United States Patent Application Publication US 2022/0213167 A1 - sequence listing, part 6

SEQ ID NO: 109044 - protein, 16 aa, Homo sapiens
  CDR3 for beta chain variable domain of TCR clone 54522 (TRBV7-9, TRBJ2-1)
CASSDVAGGSYNEQFF

SEQ ID NO: 109045 - protein, 10 aa, Homo sapiens
  CDR3 for alpha chain variable domain of TCR clone 54523 (TRAV36/DV7, TRAJ48)
CAVGNEKLTF

SEQ ID NO: 109046 - protein, 17 aa, Homo sapiens
  CDR3 for beta chain variable domain of TCR clone 54523 (TRBV6-5, TRBJ1-4)
CASSSVGGAGEKLFLAV

SEQ ID NO: 109047 - protein, 11 aa, Homo sapiens
  CDR3 for alpha chain variable domain of TCR clone 54524 (TRAV1-1, TRAJ23)
CAVGQGGKLIF

SEQ ID NO: 109048 - protein, 20 aa, Homo sapiens
  CDR3 for beta chain variable domain of TCR clone 54524 (TRBV7-8, TRBJ2-2)
CASSHLFPGPTIHITGELFF

SEQ ID NO: 109049 - protein, 15 aa, Homo sapiens
  CDR3 for alpha chain variable domain of TCR clone 54525 (TRAV21, TRAJ38)
RAVRQDAGNNRKLIW

SEQ ID NO: 109050 - protein, 16 aa, Homo sapiens
  CDR3 for beta chain variable domain of TCR clone 54525 (TRBV4-2, TRBJ1-1)
CASRPLDGGGDTEAFF

SEQ ID NO: 109051 - protein, 13 aa, Homo sapiens
  CDR3 for alpha chain variable domain of TCR clone 54526 (TRAV35, TRAJ44)
CAGLSGTASKLAF

SEQ ID NO: 109052 - protein, 17 aa, Homo sapiens
  CDR3 for beta chain variable domain of TCR clone 54526 (TRBV7-8, TRBJ1-2)
CASSLRPLQGHLYGYTF

SEQ ID NO: 109053 - protein, 10 aa, Homo sapiens
  CDR3 for alpha chain variable domain of TCR clone 54527 (TRAV12-3, TRAJ49)
CAMNDDQFYF

SEQ ID NO: 109054 - protein, 13 aa, Homo sapiens
  CDR3 for beta chain variable domain of TCR clone 54527 (TRBV12-4, TRBJ1-1)
CTSSPGTGFEAFF

SEQ ID NO: 109055 - protein, 11 aa, Homo sapiens
  CDR3 for alpha chain variable domain of TCR clone 54528 (TRAV21, TRAJ9)
CAVPGGFKTIF

SEQ ID NO: 109056 - protein, 12 aa, Homo sapiens
  CDR3 for beta chain variable domain of TCR clone 54528 (TRBV20-1, TRBJ2-3)
CSARVVTDTQYF

SEQ ID NO: 109057 - protein, 11 aa, Homo sapiens
  CDR3 for alpha chain variable domain of TCR clone 54529 (TRAV12-3, TRAJ43)
CAMSDSNDMRF

SEQ ID NO: 109058 - protein, 13 aa, Homo sapiens
  CDR3 for beta chain variable domain of TCR clone 54529 (TRBV20-1, TRBJ1-1)
CSAPLGGGTEAFF

SEQ ID NO: 109059 - protein, 13 aa, Homo sapiens
  CDR3 for alpha chain variable domain of TCR clone 54530 (TRAV35, TRAJ42)
CAGFPGSQGNLIF

SEQ ID NO: 109060 - protein, 13 aa, Homo sapiens
  CDR3 for beta chain variable domain of TCR clone 54530 (TRBV29-1, TRBJ2-1)
CSFEGGRVNEQFF

SEQ ID NO: 109061 - protein, 15 aa, Homo sapiens
  CDR3 for alpha chain variable domain of TCR clone 54531 (TRAV21, TRAJ53)
CATLNSGGSNYKLTF

SEQ ID NO: 109062 - protein, 14 aa, Homo sapiens
  CDR3 for beta chain variable domain of TCR clone 54531 (TRBV18, TRBJ2-5)
CASSPGVSQETQYF

SEQ ID NO: 109063 - protein, 14 aa, Homo sapiens
  CDR3 for alpha chain variable domain of TCR clone 54532 (TRAV8-1, TRAJ24)
CAVNVADSWGKLQF

SEQ ID NO: 109064 - protein, 16 aa, Homo sapiens
  CDR3 for beta chain variable domain of TCR clone 54532 (TRBV4-3, TRBJ2-1)
CASSPALDRGVNEQLF

SEQ ID NO: 109065 - protein, 13 aa, Homo sapiens
  CDR3 for alpha chain variable domain of TCR clone 54533 (TRAV12-2, TRAJ20)
CAVNRFGDYKLSF

SEQ ID NO: 109066 - protein, 12 aa, Homo sapiens
  CDR3 for beta chain variable domain of TCR clone 54533 (TRBV19, TRBJ2-1)
CASSQISNEQFF

SEQ ID NO: 109067 - protein, 11 aa, Homo sapiens
  CDR3 for alpha chain variable domain of TCR clone 54534 (TRAV3, TRAJ21)
CAVGNFNKFYF

SEQ ID NO: 109068 - protein, 13 aa, Homo sapiens
  CDR3 for beta chain variable domain of TCR clone 54534 (TRBV4-1, TRBJ2-2)
CASSQENTGELFF

SEQ ID NO: 109069 - protein, 13 aa, Homo sapiens
  CDR3 for alpha chain variable domain of TCR clone 54535 (TRAV12-1, TRAJ21)
CVVTLYNFNKFYF

SEQ ID NO: 109070 - protein, 14 aa, Homo sapiens
  CDR3 for beta chain variable domain of TCR clone 54535 (TRBV12-5, TRBJ2-5)
CASGSRTHQETQYF

SEQ ID NO: 109071 - protein, 13 aa, Homo sapiens
  CDR3 for alpha chain variable domain of TCR clone 54536 (TRAV21, TRAJ57)
CAVTRGGSEKLVF

SEQ ID NO: 109072 - protein, 11 aa, Homo sapiens
  CDR3 for beta chain variable domain of TCR clone 54536 (TRBV11-2, TRBJ2-2)
CASSLPGELFF

SEQ ID NO: 109073 - protein, 13 aa, Homo sapiens
  CDR3 for alpha chain variable domain of TCR clone 54537 (TRAV26-1, TRAJ33)
CIVRVEGDYQLIW

SEQ ID NO: 109074 - protein, 16 aa, Homo sapiens
  CDR3 for beta chain variable domain of TCR clone 54537 (TRBV15, TRBJ2-7)
CATSRDRGRRRGEQYF

SEQ ID NO: 109075 - protein, 12 aa, Homo sapiens
  CDR3 for alpha chain variable domain of TCR clone 54538 (TRAV30, TRAJ20)
RGTESNDYKLSF

SEQ ID NO: 109076 - protein, 15 aa, Homo sapiens
  CDR3 for beta chain variable domain of TCR clone 54538 (TRBV20-1, TRBJ2-7)
CSARDRVSGMDEQYF

SEQ ID NO: 109077 - protein, 23 aa, Homo sapiens
  CDR3 for alpha chain variable domain of TCR clone 54539 (TRAV26-1, TRAJ38)
CIADNAGNNHIQNPDPAVSQLRD

SEQ ID NO: 109078 - protein, 12 aa, Homo sapiens
  CDR3 for beta chain variable domain of TCR clone 54539 (TRBV11-2, TRBJ2-2)
CASSLGGGELFF

SEQ ID NO: 109079 - protein, 15 aa, Homo sapiens
  CDR3 for alpha chain variable domain of TCR clone 54540 (TRAV23/DV6, TRAJ37)
CAAGEGSSNTGKLIF

SEQ ID NO: 109080 - protein, 15 aa, Homo sapiens
  CDR3 for beta chain variable domain of TCR clone 54540 (TRBV28, TRBJ2-1)
CASSIIAGGRSEQFF

SEQ ID NO: 109081 - protein, 16 aa, Homo sapiens
  CDR3 for alpha chain variable domain of TCR clone 54541 (TRAV3, TRAJ3)
CAVRDRAKSSASKIIF

SEQ ID NO: 109082 - protein, 13 aa, Homo sapiens
  CDR3 for beta chain variable domain of TCR clone 54541 (TRBV10-3, TRBJ2-7)
CASKLAVNYEQYF

SEQ ID NO: 109083 - protein, 11 aa, Homo sapiens
  CDR3 for alpha chain variable domain of TCR clone 54542 (TRAV26-2, TRAJ8)
CILTGFQKLVF

SEQ ID NO: 109084 - protein, 19 aa, Homo sapiens
  CDR3 for beta chain variable domain of TCR clone 54542 (TRBV20-1, TRBJ2-1)
CSARGETSGNSPQIDGQFF

SEQ ID NO: 109085 - protein, 13 aa, Homo sapiens
  CDR3 for alpha chain variable domain of TCR clone 54543 (TRAV12-3, TRAJ7)
CAMSASGNNRLAF

SEQ ID NO: 109086 - protein, 14 aa, Homo sapiens
  CDR3 for beta chain variable domain of TCR clone 54543 (TRBV13, TRBJ2-5)
CASRLGPRGETQYF

SEQ ID NO: 109087 - protein, 14 aa, Homo sapiens
  CDR3 for alpha chain variable domain of TCR clone 54544 (TRAV13-2, TRAJ22)
CADGTLGSARQLTF

SEQ ID NO: 109088 - protein, 16 aa, Homo sapiens
  CDR3 for beta chain variable domain of TCR clone 54544 (TRBV19, TRBJ2-1)
CASSSKGTRPYNEQFF

SEQ ID NO: 109089 - protein, 12 aa, Homo sapiens
  CDR3 for alpha chain variable domain of TCR clone 54545 (TRAV13-1, TRAJ21)
CAAKEGFNKFYF

SEQ ID NO: 109090 - protein, 14 aa, Homo sapiens
  CDR3 for beta chain variable domain of TCR clone 54545 (TRBV5-1, TRBJ2-7)
CASNRGESLYEQYF

SEQ ID NO: 109091 - protein, 12 aa, Homo sapiens
  CDR3 for alpha chain variable domain of TCR clone 54546 (TRAV13-1, TRAJ49)
CAASPMGNQFYF

SEQ ID NO: 109092 - protein, 17 aa, Homo sapiens
  CDR3 for beta chain variable domain of TCR clone 54546 (TRBV7-2, TRBJ2-2)
CASSPRGAGEGTGELFF

SEQ ID NO: 109093 - protein, 17 aa, Homo sapiens
  CDR3 for alpha chain variable domain of TCR clone 54547 (TRAV4, TRAJ13)
CIVGVQGSSGGYHKVTF

SEQ ID NO: 109094 - protein, 18 aa, Homo sapiens
  CDR3 for beta chain variable domain of TCR clone 54547 (TRBV15, TRBJ2-3)
CATSRDGARSWDTDTQYF

SEQ ID NO: 109095 - protein, 16 aa, Homo sapiens
  CDR3 for alpha chain variable domain of TCR clone 54548 (TRAV1-2, TRAJ10)
CGVRGVLTGGGNKLTF

SEQ ID NO: 109096 - protein, 12 aa, Homo sapiens
  CDR3 for beta chain variable domain of TCR clone 54548 (TRBV7-8, TRBJ2-7)
CASSLGDREQYF

SEQ ID NO: 109097 - protein, 11 aa, Homo sapiens
  CDR3 for alpha chain variable domain of TCR clone 54549 (TRAV12-3, TRAJ43)
CAMSVSNDMRF

SEQ ID NO: 109098 - protein, 14 aa, Homo sapiens
  CDR3 for beta chain variable domain of TCR clone 54549 (TRBV12-5, TRBJ2-5)
CASGSRAHQETQYF

SEQ ID NO: 109099 - protein, 15 aa, Homo sapiens
  CDR3 for alpha chain variable domain of TCR clone 54550 (TRAV17, TRAJ35)
CATAFVIGFWNVLHC

SEQ ID NO: 109100 - protein, 15 aa, Homo sapiens
  CDR3 for beta chain variable domain of TCR clone 54550 (TRBV7-9, TRBJ2-7)
CASSLALAEAYEQYF

SEQ ID NO: 109101 - protein, 15 aa, Homo sapiens
  CDR3 for alpha chain variable domain of TCR clone 54551 (TRAV17, TRAJ22)
CATVAPSGSARQLTF

SEQ ID NO: 109102 - protein, 15 aa, Homo sapiens
  CDR3 for beta chain variable domain of TCR clone 54551 (TRBV11-3, TRBJ2-3)
CAGLKDGREGDTQYF

SEQ ID NO: 109103 - protein, 11 aa, Homo sapiens
  CDR3 for alpha chain variable domain of TCR clone 54552 (TRAV1-2, TRAJ40)
CAVPGTYKYIF

SEQ ID NO: 109104 - protein, 16 aa, Homo sapiens
  CDR3 for beta chain variable domain of TCR clone 54552 (TRBV29-1, TRBJ2-7)
CSFEVVGTSGSYEQYF

SEQ ID NO: 109105 - protein, 14 aa, Homo sapiens
  CDR3 for alpha chain variable domain of TCR clone 54553 (TRAV3, TRAJ37)
CAVKESGNTGKLIF

SEQ ID NO: 109106 - protein, 12 aa, Homo sapiens
  CDR3 for beta chain variable domain of TCR clone 54553 (TRBV11-2, TRBJ2-2)
CASSLGGGELFF

SEQ ID NO: 109107 - protein, 12 aa, Homo sapiens
  CDR3 for alpha chain variable domain of TCR clone 54554 (TRAV12-3, TRAJ20)
CAMVREDYKLSF

SEQ ID NO: 109108 - protein, 14 aa, Homo sapiens
  CDR3 for beta chain variable domain of TCR clone 54554 (TRBV5-5, TRBJ1-5)
CASSGQGVDQPQHF

SEQ ID NO: 109109 - protein, 12 aa, Homo sapiens
  CDR3 for alpha chain variable domain of TCR clone 54555 (TRAV27, TRAJ58)
CAGAIDTSRLTF

SEQ ID NO: 109110 - protein, 14 aa, Homo sapiens
  CDR3 for beta chain variable domain of TCR clone 54555 (TRBV7-3, TRBJ2-1)
CASSLGTSANEQFF

SEQ ID NO: 109111 - protein, 15 aa, Homo sapiens
  CDR3 for alpha chain variable domain of TCR clone 54556 (TRAV21, TRAJ53)
CATLNSGGSNYKLTF

SEQ ID NO: 109112 - protein, 16 aa, Homo sapiens
  CDR3 for beta chain variable domain of TCR clone 54556 (TRBV12-4, TRBJ2-5)
CASSFFVRGRQETQYF

SEQ ID NO: 109113 - protein, 23 aa, Homo sapiens
  CDR3 for alpha chain variable domain of TCR clone 54557 (TRAV26-1, TRAJ38)
CIADNAGNNHIQNPDPAAYQLRD

SEQ ID NO: 109114 - protein, 12 aa, Homo sapiens
  CDR3 for beta chain variable domain of TCR clone 54557 (TRBV11-2, TRBJ2-2)
CASSLGGGELFF

SEQ ID NO: 109115 - protein, 13 aa, Homo sapiens
  CDR3 for alpha chain variable domain of TCR clone 54558 (TRAV21, TRAJ27)
CATRPGNAGKSTF

SEQ ID NO: 109116 - protein, 14 aa, Homo sapiens
  CDR3 for beta chain variable domain of TCR clone 54558 (TRBV7-6, TRBJ2-3)
CTSSLGTVTDTQYF

SEQ ID NO: 109117 - protein, 13 aa, Homo sapiens
  CDR3 for alpha chain variable domain of TCR clone 54559 (TRAV8-3, TRAJ48)
CAVVPFGTEKLTF

SEQ ID NO: 109118 - protein, 15 aa, Homo sapiens
  CDR3 for beta chain variable domain of TCR clone 54559 (TRBV11-2, TRBJ2-1)
CASSSPSTRYNEQFF

SEQ ID NO: 109119 - protein, 11 aa, Homo sapiens
  CDR3 for alpha chain variable domain of TCR clone 54560 (TRAV13-2, TRAJ15)
CSHQAGTALIF

SEQ ID NO: 109120 - protein, 15 aa, Homo sapiens
  CDR3 for beta chain variable domain of TCR clone 54560 (TRBV20-1, TRBJ2-7)
CSARDRVSGMDEQYF

SEQ ID NO: 109121 - protein, 13 aa, Homo sapiens
  CDR3 for alpha chain variable domain of TCR clone 54561 (TRAV21, TRAJ27)
CAARPGNAGKSTF

SEQ ID NO: 109122 - protein, 14 aa, Homo sapiens
  CDR3 for beta chain variable domain of TCR clone 54561 (TRBV12-4, TRBJ2-3)
CASSTKRGGVTQYF

SEQ ID NO: 109123 - protein, 16 aa, Homo sapiens
  CDR3 for alpha chain variable domain of TCR clone 54562 (TRAV3, TRAJ23)
CAVKIGIYNQGGELIF

SEQ ID NO: 109124 - protein, 17 aa, Homo sapiens
  CDR3 for beta chain variable domain of TCR clone 54562 (TRBV10-3, TRBJ2-6)
CAISESTAPSGANVLTF

SEQ ID NO: 109125 - protein, 14 aa, Homo sapiens
  CDR3 for alpha chain variable domain of TCR clone 54563 (TRAV26-1, TRAJ48)
CIVSSNFGNEKSTF

SEQ ID NO: 109126 - protein, 13 aa, Homo sapiens
  CDR3 for beta chain variable domain of TCR clone 54563 (TRBV3-1, TRBJ2-5)
CASSLGLVGTQYF

SEQ ID NO: 109127 - protein, 15 aa, Homo sapiens
  CDR3 for alpha chain variable domain of TCR clone 54564 (TRAV13-2, TRAJ45)
CAENNSGGGADGLTF

SEQ ID NO: 109128 - protein, 13 aa, Homo sapiens
  CDR3 for beta chain variable domain of TCR clone 54564 (TRBV25-1, TRBJ2-6)
FASRGPGANVLTF

SEQ ID NO: 109129 - protein, 18 aa, Homo sapiens
  CDR3 for alpha chain variable domain of TCR clone 54565 (TRAV13-1, TRAJ52)
CAAKNPNAGGTGYGKLTF

SEQ ID NO: 109130 - protein, 14 aa, Homo sapiens
  CDR3 for beta chain variable domain of TCR clone 54565 (TRBV4-1, TRBJ2-2)
CASSQAVNTGELFF

SEQ ID NO: 109131 - protein, 22 aa, Homo sapiens
  CDR3 for alpha chain variable domain of TCR clone 54566 (TRAV3, TRAJ38)
CAVRDCLNAGNNHIQNPDPAVY

SEQ ID NO: 109132 - protein, 14 aa, Homo sapiens
  CDR3 for beta chain variable domain of TCR clone 54566 (TRBV5-5, TRBJ1-5)
RASSGQGVDQPQHF

SEQ ID NO: 109133 - protein, 17 aa, Homo sapiens
  CDR3 for alpha chain variable domain of TCR clone 54567 (TRAV8-6, TRAJ58)
CAVSSWVGETSGSRLTF

SEQ ID NO: 109134 - protein, 17 aa, Homo sapiens
  CDR3 for beta chain variable domain of TCR clone 54567 (TRBV15, TRBJ1-4)
CATSRYGTGDPNEKLFF

SEQ ID NO: 109135 - protein, 12 aa, Homo sapiens
  CDR3 for alpha chain variable domain of TCR clone 54568 (TRAV16, TRAJ56)
CAPTGANSKLTF

SEQ ID NO: 109136 - protein, 17 aa, Homo sapiens
  CDR3 for beta chain variable domain of TCR clone 54568 (TRBV27, TRBJ2-6)
CASSLTGFAAGANVLTF

SEQ ID NO: 109137 - protein, 17 aa, Homo sapiens
  CDR3 for alpha chain variable domain of TCR clone 54569 (TRAV8-1, TRAJ43)
CAVTNDMRFGAGTRLTV

SEQ ID NO: 109138 - protein, 17 aa, Homo sapiens
  CDR3 for beta chain variable domain of TCR clone 54569 (TRBV11-2, TRBJ2-1)
CASSLYPPGVEYNEQFF

SEQ ID NO: 109139 - protein, 14 aa, Homo sapiens
  CDR3 for alpha chain variable domain of TCR clone 54570 (TRAV1-2, TRAJ16)
CAVNRFSDGQKLLS

SEQ ID NO: 109140 - protein, 15 aa, Homo sapiens
  CDR3 for beta chain variable domain of TCR clone 54570 (TRBV19, TRBJ1-5)
CASSIVWADNQPQHF

SEQ ID NO: 109141 - protein, 14 aa, Homo sapiens
  CDR3 for alpha chain variable domain of TCR clone 54571 (TRAV1-2, TRAJ8)
CAVREDTGFQKLVF

SEQ ID NO: 109142 - protein, 15 aa, Homo sapiens
  CDR3 for beta chain variable domain of TCR clone 54571 (TRBV5-8, TRBJ1-1)
CASSFSGTSLKGAFF

SEQ ID NO: 109143 - protein, 12 aa, Homo sapiens
  CDR3 for alpha chain variable domain of TCR clone 54572 (TRAV12-2, TRAJ30)
CAGTNRDDKIIF

SEQ ID NO: 109144 - protein, 15 aa, Homo sapiens
  CDR3 for beta chain variable domain of TCR clone 54572 (TRBV19, TRBJ2-4)
CASRGPRRGENIQYF

SEQ ID NO: 109145 - protein, 14 aa, Homo sapiens
  CDR3 for alpha chain variable domain of TCR clone 54573 (TRAV29/DV5, TRAJ36)
CAARRKTGANNLFF

SEQ ID NO: 109146 - protein, 13 aa, Homo sapiens
  CDR3 for beta chain variable domain of TCR clone 54573 (TRBV19, TRBJ2-7)
CASSPRQSYEQYF

SEQ ID NO: 109147 - protein, 11 aa, Homo sapiens
  CDR3 for alpha chain variable domain of TCR clone 54574 (TRAV12-1, TRAJ34)
CVVNKGRELIF

SEQ ID NO: 109148 - protein, 16 aa, Homo sapiens
  CDR3 for beta chain variable domain of TCR clone 54574 (TRBV11-2, TRBJ1-2)
CASSLDTGGADYGYTF

SEQ ID NO: 109149 - protein, 15 aa, Homo sapiens
  CDR3 for alpha chain variable domain of TCR clone 54575 (TRAV25, TRAJ52)
CAGRPGGNSYGKLTF

SEQ ID NO: 109150 - protein, 17 aa, Homo sapiens
  CDR3 for beta chain variable domain of TCR clone 54575 (TRBV7-8, TRBJ2-6)
CASSAGTGGAGANVLTL

SEQ ID NO: 109151 - protein, 11 aa, Homo sapiens
  CDR3 for alpha chain variable domain of TCR clone 54576 (TRAV17, TRAJ9)
CGFTGGFKTIF

SEQ ID NO: 109152 - protein, 12 aa, Homo sapiens
  CDR3 for beta chain variable domain of TCR clone 54576 (TRBV11-2, TRBJ2-2)
CASSLGGGELFF

SEQ ID NO: 109153 - protein, 16 aa, Homo sapiens
  CDR3 for alpha chain variable domain of TCR clone 54577 (TRAV30, TRAJ24)
CGTEIVDADSWGKFQV

SEQ ID NO: 109154 - protein, 12 aa, Homo sapiens
  CDR3 for beta chain variable domain of TCR clone 54577 (TRBV11-2, TRBJ2-2)
CASSLPTGELFF

SEQ ID NO: 109155 - protein, 13 aa, Homo sapiens
  CDR3 for alpha chain variable domain of TCR clone 54578 (TRAV17, TRAJ9)
CATDYTGGFKTIF

SEQ ID NO: 109156 - protein, 16 aa, Homo sapiens
  CDR3 for beta chain variable domain of TCR clone 54578 (TRBV7-7, TRBJ2-1)
CASSLASRTSYNEQFF

SEQ ID NO: 109157 - protein, 18 aa, Homo sapiens
  CDR3 for alpha chain variable domain of TCR clone 54579 (TRAV13-1, TRAJ52)
CAASKRSAGGTSYGKLTF

SEQ ID NO: 109158 - protein, 13 aa, Homo sapiens
  CDR3 for beta chain variable domain of TCR clone 54579 (TRBV12-4, TRBJ1-2)
CASSSRQGKGYTF

SEQ ID NO: 109159 - protein, 13 aa, Homo sapiens
  CDR3 for alpha chain variable domain of TCR clone 54580 (TRAV13-1, TRAJ48)
CAAASFGNEKLTF

SEQ ID NO: 109160 - protein, 14 aa, Homo sapiens
  CDR3 for beta chain variable domain of TCR clone 54580 (TRBV18, TRBJ2-1)
CASSPGTSETEQFS

SEQ ID NO: 109161 - protein, 13 aa, Homo sapiens
  CDR3 for alpha chain variable domain of TCR clone 54581 (TRAV4, TRAJ34)
CLVGDYNTDKPIF

SEQ ID NO: 109162 - protein, 23 aa, Homo sapiens
  CDR3 for beta chain variable domain of TCR clone 54581 (TRBV4-2, TRBJ2-3)
CASSQDPPRASSISGGRGDTQYF

SEQ ID NO: 109163 - protein, 13 aa, Homo sapiens
  CDR3 for alpha chain variable domain of TCR clone 54582 (TRAV12-3, TRAJ56)
CALATGANSKLTF

SEQ ID NO: 109164 - protein, 18 aa, Homo sapiens
  CDR3 for beta chain variable domain of TCR clone 54582 (TRBV3-1, TRBJ2-7)
CASSRISAGGRSSYEQYF

SEQ ID NO: 109165 - protein, 19 aa, Homo sapiens
  CDR3 for alpha chain variable domain of TCR clone 54583 (TRAV9-2, TRAJ52)
CALSFSLPSGGTSYGKLTF

SEQ ID NO: 109166 - protein, 14 aa, Homo sapiens
  CDR3 for beta chain variable domain of TCR clone 54583 (TRBV7-6, TRBJ2-7)
CASSLFQDSYEQYF

SEQ ID NO: 109167 - protein, 15 aa, Homo sapiens
  CDR3 for alpha chain variable domain of TCR clone 54584 (TRAV17, TRAJ13)
CATDEGSGGYQKVTF

SEQ ID NO: 109168 - protein, 17 aa, Homo sapiens
  CDR3 for beta chain variable domain of TCR clone 54584 (TRBV11-2, TRBJ2-1)
CASSLYPPGVEYNEQFF

SEQ ID NO: 109169 - protein, 13 aa, Homo sapiens
  CDR3 for alpha chain variable domain of TCR clone 54585 (TRAV20, TRAJ35)
CAVQEGFGNVPHC

SEQ ID NO: 109170 - protein, 14 aa, Homo sapiens
  CDR3 for beta chain variable domain of TCR clone 54585 (TRBV5-1, TRBJ1-1)
CASSSATGGTEAFF

SEQ ID NO: 109171 - protein, 11 aa, Homo sapiens
  CDR3 for alpha chain variable domain of TCR clone 54586 (TRAV12-1, TRAJ15)
CVVNAGTALIF

SEQ ID NO: 109172 - protein, 16 aa, Homo sapiens
  CDR3 for beta chain variable domain of TCR clone 54586 (TRBV19, TRBJ1-2)
CASSKFRDTTNYGYTF

SEQ ID NO: 109173 - protein, 15 aa, Homo sapiens
  CDR3 for alpha chain variable domain of TCR clone 54587 (TRAV26-1, TRAJ47)
CIVRVGGGYGNKLVF

SEQ ID NO: 109174 - protein, 13 aa, Homo sapiens
  CDR3 for beta chain variable domain of TCR clone 54587 (TRBV20-1, TRBJ2-7)
CSARGDTQDEQYF

SEQ ID NO: 109175 - protein, 13 aa, Homo sapiens
  CDR3 for alpha chain variable domain of TCR clone 54588 (TRAV3, TRAJ33)
CAVRDRSNYQLIW

SEQ ID NO: 109176 - protein, 16 aa, Homo sapiens
  CDR3 for beta chain variable domain of TCR clone 54588 (TRBV4-2, TRBJ2-7)
CASSQDGGTSSYEQYF

SEQ ID NO: 109177 - protein, 15 aa, Homo sapiens
  CDR3 for alpha chain variable domain of TCR clone 54589 (TRAV8-2, TRAJ40)
CVVLGTTSGTYKYIF

SEQ ID NO: 109178 - protein, 16 aa, Homo sapiens
  CDR3 for beta chain variable domain of TCR clone 54589 (TRBV7-3, TRBJ2-1)
CASRLEGYRSYNEQFF

SEQ ID NO: 109179 - protein, 16 aa, Homo sapiens
  CDR3 for alpha chain variable domain of TCR clone 54590 (TRAV38-2/DV8, TRAJ57)
CAYRSVGQGGSEKLVF

SEQ ID NO: 109180 - protein, 12 aa, Homo sapiens
  CDR3 for beta chain variable domain of TCR clone 54590 (TRBV7-8, TRBJ2-1)
CASTDRVNEQFF

SEQ ID NO: 109181 - protein, 16 aa, Homo sapiens
  CDR3 for alpha chain variable domain of TCR clone 54591 (TRAV8-3, TRAJ10)
CAVGPILTGGGNKLTF

SEQ ID NO: 109182 - protein, 16 aa, Homo sapiens
  CDR3 for beta chain variable domain of TCR clone 54591 (TRBV7-2, TRBJ2-5)
CASSSKWLSGQEAQYF

SEQ ID NO: 109183 - protein, 15 aa, Homo sapiens
  CDR3 for alpha chain variable domain of TCR clone 54592 (TRAV12-1, TRAJ42)
CVVTRDGGSQGNLIV

SEQ ID NO: 109184 - protein, 14 aa, Homo sapiens
  CDR3 for beta chain variable domain of TCR clone 54592 (TRBV11-2, TRBJ2-3)
CASSLGGGANTQYF

SEQ ID NO: 109185 - protein, 15 aa, Homo sapiens
  CDR3 for alpha chain variable domain of TCR clone 54593 (TRAV23/DV6, TRAJ37)
CAAGEGSSNPGKLIF

SEQ ID NO: 109186 - protein, 17 aa, Homo sapiens
  CDR3 for beta chain variable domain of TCR clone 54593 (TRBV20-1, TRBJ2-7)
CSATRAGGVAGVEEQYF

SEQ ID NO: 109187 - protein, 17 aa, Homo sapiens
  CDR3 for alpha chain variable domain of TCR clone 54594 (TRAV3, TRAJ6)
RAVRDGPRAGGSYIPTF

SEQ ID NO: 109188 - protein, 14 aa, Homo sapiens
  CDR3 for beta chain variable domain of TCR clone 54594 (TRBV7-3, TRBJ2-1)
CASSTSGGWDEQFF

SEQ ID NO: 109189 - protein, 15 aa, Homo sapiens
  CDR3 for alpha chain variable domain of TCR clone 54595 (TRAV12-2, TRAJ53)
CAVNGGGGSNYKRTF

SEQ ID NO: 109190 - protein, 13 aa, Homo sapiens
  CDR3 for beta chain variable domain of TCR clone 54595 (TRBV3-1, TRBJ1-1)
CASSPGVITEAFF

SEQ ID NO: 109191 - protein, 16 aa, Homo sapiens
  CDR3 for alpha chain variable domain of TCR clone 54596 (TRAV30, TRAJ24)
CGTEIEDADSWGKFQF

SEQ ID NO: 109192 - protein, 14 aa, Homo sapiens
  CDR3 for beta chain variable domain of TCR clone 54596 (TRBV12-5, TRBJ2-5)
CAGGSRTHQETQYF

SEQ ID NO: 109193 - protein, 15 aa, Homo sapiens
  CDR3 for alpha chain variable domain of TCR clone 54597 (TRAV12-3, TRAJ6)
CAMSATTGGSYIPTF

SEQ ID NO: 109194 - protein, 15 aa, Homo sapiens
  CDR3 for beta chain variable domain of TCR clone 54597 (TRBV27, TRBJ2-3)
CASSLGLAATDTQYF

SEQ ID NO: 109195 - protein, 13 aa, Homo sapiens
  CDR3 for alpha chain variable domain of TCR clone 54598 (TRAV8-3, TRAJ33)
CAVGIDSNYQLIW

SEQ ID NO: 109196 - protein, 15 aa, Homo sapiens
  CDR3 for beta chain variable domain of TCR clone 54598 (TRBV3-1, TRBJ2-1)
CASSQQPSGGNEQFF

SEQ ID NO: 109197 - protein, 15 aa, Homo sapiens
  CDR3 for alpha chain variable domain of TCR clone 54599 (TRAV26-1, TRAJ29)
CIVRVEGSGNAPLVF

SEQ ID NO: 109198 - protein, 14 aa, Homo sapiens
  CDR3 for beta chain variable domain of TCR clone 54599 (TRBV18, TRBJ2-5)
CASSPGVSQEAQYF

SEQ ID NO: 109199 - protein, 13 aa, Homo sapiens
  CDR3 for alpha chain variable domain of TCR clone 54600 (TRAV1-2, TRAJ12)
CAVSMDSSYKLIF

SEQ ID NO: 109200 - protein, 15 aa, Homo sapiens
  CDR3 for beta chain variable domain of TCR clone 54600 (TRBV27, TRBJ2-5)
CASSLIPSGGETQYL

SEQ ID NO: 109201 - protein, 14 aa, Homo sapiens
  CDR3 for alpha chain variable domain of TCR clone 54601 (TRAV14/DV4, TRAJ42)
CPRGSLRSQGNLIF

SEQ ID NO: 109202 - protein, 13 aa, Homo sapiens
  CDR3 for beta chain variable domain of TCR clone 54601 (TRBV7-7, TRBJ2-3)
CASSLSRADTQYF

SEQ ID NO: 109203 - protein, 12 aa, Homo sapiens
  CDR3 for alpha chain variable domain of TCR clone 54602 (TRAV13-1, TRAJ32)
VTDGGATNKLIF

SEQ ID NO: 109204 - protein, 15 aa, Homo sapiens
  CDR3 for beta chain variable domain of TCR clone 54602 (TRBV20-1, TRBJ1-2)
CSAIRTGAFNYGYTF

SEQ ID NO: 109205 - protein, 15 aa, Homo sapiens
  CDR3 for alpha chain variable domain of TCR clone 54603 (TRAV20, TRAJ4)
CAVQVFSGGYNKLIF

SEQ ID NO: 109206 - protein, 13 aa, Homo sapiens
  CDR3 for beta chain variable domain of TCR clone 54603 (TRBV24-1, TRBJ2-2)
CATSDWSTGELFF

SEQ ID NO: 109207 - protein, 15 aa, Homo sapiens
  CDR3 for alpha chain variable domain of TCR clone 54604 (TRAV8-4, TRAJ40)
CAVSSITSGTYKYIF

SEQ ID NO: 109208 - protein, 13 aa, Homo sapiens
  CDR3 for beta chain variable domain of TCR clone 54604 (TRBV2, TRBJ2-1)
CATSRGADNEQFF

SEQ ID NO: 109209 - protein, 13 aa, Homo sapiens
  CDR3 for alpha chain variable domain of TCR clone 54605 (TRAV27, TRAJ45)
CRSSGGGADGLTF

SEQ ID NO: 109210 - protein, 11 aa, Homo sapiens
  CDR3 for beta chain variable domain of TCR clone 54605 (TRBV19, TRBJ1-1)
CASGIGSEAFF

SEQ ID NO: 109211 - protein, 14 aa, Homo sapiens
  CDR3 for alpha chain variable domain of TCR clone 54606 (TRAV30, TRAJ26)
CGTEIVSYGQNFVF

SEQ ID NO: 109212 - protein, 16 aa, Homo sapiens
  CDR3 for beta chain variable domain of TCR clone 54606 (TRBV13, TRBJ2-2)
CASSPRTGEHTGELFF

SEQ ID NO: 109213 - protein, 14 aa, Homo sapiens
  CDR3 for alpha chain variable domain of TCR clone 54607 (TRAV12-2, TRAJ13)
CAVKKTGGYQKVTF

SEQ ID NO: 109214 - protein, 12 aa, Homo sapiens
  CDR3 for beta chain variable domain of TCR clone 54607 (TRBV11-2, TRBJ2-2)
CASSLGGGELFL

SEQ ID NO: 109215 - protein, 13 aa, Homo sapiens
  CDR3 for alpha chain variable domain of TCR clone 54608 (TRAV2, TRAJ21)
CAVEDLNFNKFYF

SEQ ID NO: 109216 - protein, 14 aa, Homo sapiens
  CDR3 for beta chain variable domain of TCR clone 54608 (TRBV11-2, TRBJ2-7)
CASSLEWSRGEQYF

SEQ ID NO: 109217 - protein, 14 aa, Homo sapiens
  CDR3 for alpha chain variable domain of TCR clone 54609 (TRAV1-2, TRAJ8)
CAVREDTCFQKLVF

SEQ ID NO: 109218 - protein, 16 aa, Homo sapiens
  CDR3 for beta chain variable domain of TCR clone 54609 (TRBV7-3, TRBJ2-2)
CASSLKRGTLSGELFF

SEQ ID NO: 109219 - protein, 16 aa, Homo sapiens
  CDR3 for alpha chain variable domain of TCR clone 54610 (TRAV3, TRAJ23)
CAVKIGIYNQGGKLNF

SEQ ID NO: 109220 - protein, 17 aa, Homo sapiens
  CDR3 for beta chain variable domain of TCR clone 54610 (TRBV10-3, TRBJ2-6)
CAISESTAPSGANVLTF

SEQ ID NO: 109221 - protein, 12 aa, Homo sapiens
  CDR3 for alpha chain variable domain of TCR clone 54611 (TRAV35, TRAJ39)
LAPNNAGNMLAF

SEQ ID NO: 109222 - protein, 16 aa, Homo sapiens
  CDR3 for beta chain variable domain of TCR clone 54611 (TRBV2, TRBJ2-3)
CASSTSVEGVTDTQYF

SEQ ID NO: 109223 - protein, 12 aa, Homo sapiens
  CDR3 for alpha chain variable domain of TCR clone 54612 (TRAV17, TRAJ30)
CVPERRGDKIIF

SEQ ID NO: 109224 - protein, 14 aa, Homo sapiens
  CDR3 for beta chain variable domain of TCR clone 54612 (TRBV7-7, TRBJ2-2)
CASSRDRSTGELFF

SEQ ID NO: 109225 - protein, 17 aa, Homo sapiens
  CDR3 for alpha chain variable domain of TCR clone 54613 (TRAV23/DV6, TRAJ57)
CAASSTLSQGGSEKLVF

SEQ ID NO: 109226 - protein, 11 aa, Homo sapiens
  CDR3 for beta chain variable domain of TCR clone 54613 (TRBV25-1, TRBJ1-1)
PTWGGNTEAFF

SEQ ID NO: 109227 - protein, 14 aa, Homo sapiens
  CDR3 for alpha chain variable domain of TCR clone 54614 (TRAV12-1, TRAJ12)
CVVTRMDSIYKLIF

SEQ ID NO: 109228 - protein, 13 aa, Homo sapiens
  CDR3 for beta chain variable domain of TCR clone 54614 (TRBV20-1, TRBJ1-1)
CSARGGGNTEAFF

SEQ ID NO: 109229 - protein, 13 aa, Homo sapiens
  CDR3 for alpha chain variable domain of TCR clone 54615 (TRAV12-2, TRAJ4)
CAGVSGGYNKLIF

SEQ ID NO: 109230 - protein, 14 aa, Homo sapiens
  CDR3 for beta chain variable domain of TCR clone 54615 (TRBV24-1, TRBJ1-1)
CATSIPRGDTEAFF

SEQ ID NO: 109231 - protein, 12 aa, Homo sapiens
  CDR3 for alpha chain variable domain of TCR clone 54616 (TRAV1-1, TRAJ29)
CASGSGNTPLVF

SEQ ID NO: 109232 - protein, 15 aa, Homo sapiens
  CDR3 for beta chain variable domain of TCR clone 54616 (TRBV27, TRBJ2-1)
CASSNGGGSSDEQFF

SEQ ID NO: 109233 - protein, 14 aa, Homo sapiens
  CDR3 for alpha chain variable domain of TCR clone 54617 (TRAV12-2, TRAJ40)
CAVKIPSGTYKYIF

SEQ ID NO: 109234 - protein, 14 aa, Homo sapiens
  CDR3 for beta chain variable domain of TCR clone 54617 (TRBV20-1, TRBJ1-1)
SSAQTRIGGTEAFF

SEQ ID NO: 109235 - protein, 16 aa, Homo sapiens
  CDR3 for alpha chain variable domain of TCR clone 54618 (TRAV16, TRAJ42)
CALSGYYGGSQGNLIF

SEQ ID NO: 109236 - protein, 12 aa, Homo sapiens
  CDR3 for beta chain variable domain of TCR clone 54618 (TRBV7-9, TRBJ2-7)
CASSLEGYEQYF

SEQ ID NO: 109237 - protein, 15 aa, Homo sapiens
  CDR3 for alpha chain variable domain of TCR clone 54619 (TRAV8-3, TRAJ45)
CASSYSGGGADGLTF

SEQ ID NO: 109238 - protein, 16 aa, Homo sapiens
  CDR3 for beta chain variable domain of TCR clone 54619 (TRBV7-3, TRBJ2-1)
CASSLEGYRSYNEQFF

SEQ ID NO: 109239 - protein, 16 aa, Homo sapiens
  CDR3 for alpha chain variable domain of TCR clone 54620 (TRAV20, TRAJ22)
CAVQASSSGSARQLTC

SEQ ID NO: 109240 - protein, 13 aa, Homo sapiens
  CDR3 for beta chain variable domain of TCR clone 54620 (TRBV7-2, TRBJ2-5)
CASSQTSVETQYF

SEQ ID NO: 109241 - protein, 16 aa, Homo sapiens
  CDR3 for alpha chain variable domain of TCR clone 54621 (TRAV16, TRAJ37)
CSKWLDGSSNTGKLIF

SEQ ID NO: 109242 - protein, 13 aa, Homo sapiens
  CDR3 for beta chain variable domain of TCR clone 54621 (TRBV7-2, TRBJ2-2)
CASSLAVTGELFF

SEQ ID NO: 109243 - protein, 17 aa, Homo sapiens
  CDR3 for alpha chain variable domain of TCR clone 54622 (TRAV16, TRAJ58)
CITVLSNGETRGSRLTF

SEQ ID NO: 109244 - protein, 17 aa, Homo sapiens
  CDR3 for beta chain variable domain of TCR clone 54622 (TRBV18, TRBJ2-1)
CASSKGLSGGADNEQFF

SEQ ID NO: 109245 - protein, 14 aa, Homo sapiens
  CDR3 for alpha chain variable domain of TCR clone 54623 (TRAV8-3, TRAJ44)
CAVGNTGIASKLTF

SEQ ID NO: 109246 - protein, 15 aa, Homo sapiens
  CDR3 for beta chain variable domain of TCR clone 54623 (TRBV28, TRBJ2-7)
CASSFRGQGRYEQYF

SEQ ID NO: 109247 - protein, 12 aa, Homo sapiens
  CDR3 for alpha chain variable domain of TCR clone 54624 (TRAV8-3, TRAJ20)
CAVGANDYKLSF

SEQ ID NO: 109248 - protein, 15 aa, Homo sapiens
  CDR3 for beta chain variable domain of TCR clone 54624 (TRBV19, TRBJ2-2)
CSRSPGTGATGELFF

SEQ ID NO: 109249 - protein, 15 aa, Homo sapiens
  CDR3 for alpha chain variable domain of TCR clone 54625 (TRAV3, TRAJ5)
CAVRDRKTGRRALTF

SEQ ID NO: 109250 - protein, 16 aa, Homo sapiens
  CDR3 for beta chain variable domain of TCR clone 54625 (TRBV19, TRBJ2-1)
CASSKAGPSSYNEQFF

SEQ ID NO: 109251 - protein, 16 aa, Homo sapiens
  CDR3 for alpha chain variable domain of TCR clone 54626 (TRAV35, TRAJ29)
CAGPIRGISGNTPLVF

SEQ ID NO: 109252 - protein, 15 aa, Homo sapiens
  CDR3 for beta chain variable domain of TCR clone 54626 (TRBV19, TRBJ1-2)
CASSVGQVLNYGYTF

SEQ ID NO: 109253 - protein, 14 aa, Homo sapiens
  CDR3 for alpha chain variable domain of TCR clone 54627 (TRAV3, TRAJ17)
CAVRDAAAGNKLTF

SEQ ID NO: 109254 - protein, 16 aa, Homo sapiens
  CDR3 for beta chain variable domain of TCR clone 54627 (TRBV20-1, TRBJ1-2)
CSASMGQGVANYGYAF

SEQ ID NO: 109255 - protein, 17 aa, Homo sapiens
  CDR3 for alpha chain variable domain of TCR clone 54628 (TRAV3, TRAJ6)
CAVRDGPRAGGSYIPTF

SEQ ID NO: 109256 - protein, 15 aa, Homo sapiens
  CDR3 for beta chain variable domain of TCR clone 54628 (TRBV7-9, TRBJ1-2)
CASSLDREPNYGYTF

SEQ ID NO: 109257 - protein, 12 aa, Homo sapiens
  CDR3 for alpha chain variable domain of TCR clone 54629 (TRAV2, TRAJ31)
YAVEDNNARLMF

SEQ ID NO: 109258 - protein, 16 aa, Homo sapiens
  CDR3 for beta chain variable domain of TCR clone 54629 (TRBV10-3, TRBJ2-1)
CAISGVGDGGGGEQFF

SEQ ID NO: 109259 - protein, 19 aa, Homo sapiens
  CDR3 for alpha chain variable domain of TCR clone 54630 (TRAV38-1, TRAJ53)
CAFMKHGLESGGSNYKLTF

SEQ ID NO: 109260 - protein, 17 aa, Homo sapiens
  CDR3 for beta chain variable domain of TCR clone 54630 (TRBV20-1, TRBJ2-3)
CSASLLGRGGSADTQYF

SEQ ID NO: 109261 - protein, 15 aa, Homo sapiens
  CDR3 for alpha chain variable domain of TCR clone 54631 (TRAV29/DV5, TRAJ24)
CVASGATDSWGKFQF

SEQ ID NO: 109262 - protein, 12 aa, Homo sapiens
  CDR3 for beta chain variable domain of TCR clone 54631 (TRBV11-2, TRBJ2-2)
CASSLPTGELFF

SEQ ID NO: 109263 - protein, 13 aa, Homo sapiens
  CDR3 for alpha chain variable domain of TCR clone 54632 (TRAV23/DV6, TRAJ34)
CAASIEGTDKLIF

SEQ ID NO: 109264 - protein, 14 aa, Homo sapiens
  CDR3 for beta chain variable domain of TCR clone 54632 (TRBV19, TRBJ2-1)
CASPTFVLSGEQFF

SEQ ID NO: 109265 - protein, 12 aa, Homo sapiens
  CDR3 for alpha chain variable domain of TCR clone 54633 (TRAV13-1, TRAJ21)
CAAKEGFNKFYF

SEQ ID NO: 109266 - protein, 12 aa, Homo sapiens
  CDR3 for beta chain variable domain of TCR clone 54633 (TRBV7-9, TRBJ1-4)
CASSTDREKLFF

SEQ ID NO: 109267 - protein, 12 aa, Homo sapiens
  CDR3 for alpha chain variable domain of TCR clone 54634 (TRAV12-1, TRAJ40)
CVVYSGTYKYIF

SEQ ID NO: 109268 - protein, 15 aa, Homo sapiens
  CDR3 for beta chain variable domain of TCR clone 54634 (TRBV7-3, TRBJ2-2)
CASSETGQGTGELFF

SEQ ID NO: 109269 - protein, 18 aa, Homo sapiens
  CDR3 for alpha chain variable domain of TCR clone 54635 (TRAV26-2, TRAJ45)
CILRVDKDSGGGADGLTF

SEQ ID NO: 109270 - protein, 16 aa, Homo sapiens
  CDR3 for beta chain variable domain of TCR clone 54635 (TRBV2, TRBJ1-4)
CASNLLQGATNEKLFF

SEQ ID NO: 109271 - protein, 17 aa, Homo sapiens
  CDR3 for alpha chain variable domain of TCR clone 54636 (TRAV3, TRAJ6)
CAVRDGPRAGGSYIPTF

SEQ ID NO: 109272 - protein, 11 aa, Homo sapiens
  CDR3 for beta chain variable domain of TCR clone 54636 (TRBV19, TRBJ1-1)
CASSIGSEAFF

SEQ ID NO: 109273 - protein, 14 aa, Homo sapiens
  CDR3 for alpha chain variable domain of TCR clone 54637 (TRAV1-2, TRAJ16)
CAVNRFSDGEKLLF

SEQ ID NO: 109274 - protein, 14 aa, Homo sapiens
  CDR3 for beta chain variable domain of TCR clone 54637 (TRBV13, TRBJ2-5)
CASSLGRGQETQYF

SEQ ID NO: 109275 - protein, 14 aa, Homo sapiens
  CDR3 for alpha chain variable domain of TCR clone 54638 (TRAV29/DV5, TRAJ36)
CAARRKTGANNLFF

SEQ ID NO: 109276 - protein, 15 aa, Homo sapiens
  CDR3 for beta chain variable domain of TCR clone 54638 (TRBV4-1, TRBJ1-4)
CASSDTGGTNEKLFF

SEQ ID NO: 109277 - protein, 15 aa, Homo sapiens
  CDR3 for alpha chain variable domain of TCR clone 54639 (TRAV3, TRAJ3)
CAVRDRDSSASKIIF

SEQ ID NO: 109278 - protein, 18 aa, Homo sapiens
  CDR3 for beta chain variable domain of TCR clone 54639 (TRBV25-1, TRBJ1-2)
CASSGLQNGKGLIFSYTF

SEQ ID NO: 109279 - protein, 13 aa, Homo sapiens
  CDR3 for alpha chain variable domain of TCR clone 54640 (TRAV2, TRAJ15)
CAVASQAGTALIF

SEQ ID NO: 109280 - protein, 18 aa, Homo sapiens
  CDR3 for beta chain variable domain of TCR clone 54640 (TRBV7-9, TRBJ2-7)
CASSLTTSGSRTWYEQYF

SEQ ID NO: 109281 - protein, 17 aa, Homo sapiens
  CDR3 for alpha chain variable domain of TCR clone 54641 (TRAV3, TRAJ6)
CAVRDGPRAGGSYIPTF

SEQ ID NO: 109282 - protein, 15 aa, Homo sapiens
  CDR3 for beta chain variable domain of TCR clone 54641 (TRBV10-3, TRBJ2-3)
CAISLTSGGTDTQYF

SEQ ID NO: 109283 - protein, 14 aa, Homo sapiens
  CDR3 for alpha chain variable domain of TCR clone 54642 (TRAV12-3, TRAJ10)
SHLPLTGGGNKLTF

SEQ ID NO: 109284 - protein, 13 aa, Homo sapiens
  CDR3 for beta chain variable domain of TCR clone 54642 (TRBV2, TRBJ1-6)
CADSSSYNSPLHF

SEQ ID NO: 109285 - protein, 17 aa, Homo sapiens
  CDR3 for alpha chain variable domain of TCR clone 54643 (TRAV17, TRAJ52)
CATERTSGGTSYGKLTF

SEQ ID NO: 109286 - protein, 13 aa, Homo sapiens
  CDR3 for beta chain variable domain of TCR clone 54643 (TRBV7-9, TRBJ1-2)
CASSLKQNYGYTF

SEQ ID NO: 109287 - protein, 15 aa, Homo sapiens
  CDR3 for alpha chain variable domain of TCR clone 54644 (TRAV13-1, TRAJ44)
CAASRNTGTASKLTF

SEQ ID NO: 109288 - protein, 15 aa, Homo sapiens
  CDR3 for beta chain variable domain of TCR clone 54644 (TRBV4-1, TRBJ1-4)
CASSDTGGTNEKLFF

SEQ ID NO: 109289 - protein, 14 aa, Homo sapiens
  CDR3 for alpha chain variable domain of TCR clone 54645 (TRAV12-2, TRAJ17)
CAVLFEAAGNKLTF

SEQ ID NO: 109290 - protein, 17 aa, Homo sapiens
  CDR3 for beta chain variable domain of TCR clone 54645 (TRBV11-2, TRBJ2-1)
CASSLYPPGVEYNEQFF

SEQ ID NO: 109291 - protein, 12 aa, Homo sapiens
  CDR3 for alpha chain variable domain of TCR clone 54646 (TRAV26-1, TRAJ36)
CTVRVRADNLFF

SEQ ID NO: 109292 - protein, 13 aa, Homo sapiens
  CDR3 for beta chain variable domain of TCR clone 54646 (TRBV11-2, TRBJ2-5)
CASSRGPSETQYF

SEQ ID NO: 109293 - protein, 16 aa, Homo sapiens
  CDR3 for alpha chain variable domain of TCR clone 54647 (TRAV21, TRAJ37)
CAVRTAGSSNTGKLIF

SEQ ID NO: 109294 - protein, 13 aa, Homo sapiens
  CDR3 for beta chain variable domain of TCR clone 54647 (TRBV7-9, TRBJ2-5)
CASLPSRRETQYF

SEQ ID NO: 109295 - protein, 14 aa, Homo sapiens
  CDR3 for alpha chain variable domain of TCR clone 54648 (TRAV1-2, TRAJ16)
CAVNRFSDGQKLLF

SEQ ID NO: 109296 - protein, 12 aa, Homo sapiens
  CDR3 for beta chain variable domain of TCR clone 54648 (TRBV11-3, TRBJ1-1)
CASSHRQGEAFF

SEQ ID NO: 109297 - protein, 16 aa, Homo sapiens
  CDR3 for alpha chain variable domain of TCR clone 54649 (TRAV3, TRAJ18)
CAVRDGRGSTLGRLYF

SEQ ID NO: 109298 - protein, 17 aa, Homo sapiens
  CDR3 for beta chain variable domain of TCR clone 54649 (TRBV7-8, TRBJ2-6)
CASSAGTGGAGANVLTF

SEQ ID NO: 109299 - protein, 18 aa, Homo sapiens
  CDR3 for alpha chain variable domain of TCR clone 54650 (TRAV12-3, TRAJ52)
CAMSRTNAGGTSYGKLTF

SEQ ID NO: 109300 - protein, 17 aa, Homo sapiens
  CDR3 for beta chain variable domain of TCR clone 54650 (TRBV7-3, TRBJ2-3)
CAGSLMKRMRGADTQYF

SEQ ID NO: 109301 - protein, 14 aa, Homo sapiens
  CDR3 for alpha chain variable domain of TCR clone 54651 (TRAV26-1, TRAJ38)
CIADNAGNNRKLIW

SEQ ID NO: 109302 - protein, 13 aa, Homo sapiens
  CDR3 for beta chain variable domain of TCR clone 54651 (TRBV5-5, TRBJ1-2)
CASSFWRGEDYTF

SEQ ID NO: 109303 - protein, 12 aa, Homo sapiens
  CDR3 for alpha chain variable domain of TCR clone 54652 (TRAV12-3, TRAJ17)
CAMTLTGNKLTF

SEQ ID NO: 109304 - protein, 14 aa, Homo sapiens
  CDR3 for beta chain variable domain of TCR clone 54652 (TRBV7-2, TRBJ1-2)
CVSSQTGSTYGYTF

SEQ ID NO: 109305 - protein, 20 aa, Homo sapiens
  CDR3 for alpha chain variable domain of TCR clone 54653 (TRAV27, TRAJ10)
ASTSVPSRGILTGGRNKLTF

SEQ ID NO: 109306 - protein, 15 aa, Homo sapiens
  CDR3 for beta chain variable domain of TCR clone 54653 (TRBV9, TRBJ2-3)
CASSLEGGLTDTQYF

SEQ ID NO: 109307 - protein, 12 aa, Homo sapiens
  CDR3 for alpha chain variable domain of TCR clone 54654 (TRAV17, TRAJ12)
CATLRSSYKLIF

SEQ ID NO: 109308 - protein, 16 aa, Homo sapiens
  CDR3 for beta chain variable domain of TCR clone 54654 (TRBV28, TRBJ2-7)
CASSLFFETRGPEQYF

SEQ ID NO: 109309 - protein, 14 aa, Homo sapiens
  CDR3 for alpha chain variable domain of TCR clone 54655 (TRAV29/DV5, TRAJ44)
CAAFLVGTASKLTF

SEQ ID NO: 109310 - protein, 14 aa, Homo sapiens
  CDR3 for beta chain variable domain of TCR clone 54655 (TRBV7-9, TRBJ2-2)
CASSLVQDTGELFF

SEQ ID NO: 109311 - protein, 16 aa, Homo sapiens
  CDR3 for alpha chain variable domain of TCR clone 54656 (TRAV8-2, TRAJ48)
CVVSDVSNFGNEKLTF

SEQ ID NO: 109312 - protein, 13 aa, Homo sapiens
  CDR3 for beta chain variable domain of TCR clone 54656 (TRBV7-3, TRBJ1-1)
CASSLTQGTEAFF

SEQ ID NO: 109313 - protein, 14 aa, Homo sapiens
  CDR3 for alpha chain variable domain of TCR clone 54657 (TRAV9-2, TRAJ3)
CALCPYSSASKIIF

SEQ ID NO: 109314 - protein, 13 aa, Homo sapiens
  CDR3 for beta chain variable domain of TCR clone 54657 (TRBV3-1, TRBJ1-1)
CASSPGVITEAFF

SEQ ID NO: 109315 - protein, 13 aa, Homo sapiens
  CDR3 for alpha chain variable domain of TCR clone 54658 (TRAV21, TRAJ20)
CAVGLRVDYKLSF

SEQ ID NO: 109316 - protein, 13 aa, Homo sapiens
  CDR3 for beta chain variable domain of TCR clone 54658 (TRBV6-1, TRBJ1-1)
CASSRQGNNEAFF

SEQ ID NO: 109317 - protein, 12 aa, Homo sapiens
  CDR3 for alpha chain variable domain of TCR clone 54659 (TRAV12-1, TRAJ40)
CVVYSGTYKYIF

SEQ ID NO: 109318 - protein, 18 aa, Homo sapiens
  CDR3 for beta chain variable domain of TCR clone 54659 (TRBV11-2, TRBJ2-3)
CASSLWGASRGAPNTQYF

SEQ ID NO: 109319 - protein, 14 aa, Homo sapiens
  CDR3 for alpha chain variable domain of TCR clone 54660 (TRAV8-2, TRAJ4)
CVVSPSGGYNKLIF

SEQ ID NO: 109320 - protein, 15 aa, Homo sapiens
  CDR3 for beta chain variable domain of TCR clone 54660 (TRBV4-1, TRBJ1-4)
CASSDTGRTNEKLFF

SEQ ID NO: 109321 - protein, 14 aa, Homo sapiens
  CDR3 for alpha chain variable domain of TCR clone 54661 (TRAV16, TRAJ33)
CALSAIDSNYQLIW

SEQ ID NO: 109322 - protein, 12 aa, Homo sapiens
  CDR3 for beta chain variable domain of TCR clone 54661 (TRBV5-1, TRBJ1-2)
CASSQDTYGYTF

SEQ ID NO: 109323 - protein, 12 aa, Homo sapiens
  CDR3 for alpha chain variable domain of TCR clone 54662 (TRAV8-3, TRAJ20)
CAVGANDYKLSF

SEQ ID NO: 109324 - protein, 14 aa, Homo sapiens
  CDR3 for beta chain variable domain of TCR clone 54662 (TRBV7-2, TRBJ2-7)
CASRSQGAAYEQYF

SEQ ID NO: 109325 - protein, 18 aa, Homo sapiens
  CDR3 for alpha chain variable domain of TCR clone 54663 (TRAV26-1, TRAJ23)
CIVRVGLEVWNQGGKLIF

SEQ ID NO: 109326 - protein, 16 aa, Homo sapiens
  CDR3 for beta chain variable domain of TCR clone 54663 (TRBV12-4, TRBJ2-5)
CASSFFVRGRRETQYF

SEQ ID NO: 109327 - protein, 14 aa, Homo sapiens
  CDR3 for alpha chain variable domain of TCR clone 54664 (TRAV8-3, TRAJ9)
CAVVYNTGGFKTIF

SEQ ID NO: 109328 - protein, 14 aa, Homo sapiens
  CDR3 for beta chain variable domain of TCR clone 54664 (TRBV7-3, TRBJ2-2)
CASISGGYTGELFF

SEQ ID NO: 109329 - protein, 12 aa, Homo sapiens
  CDR3 for alpha chain variable domain of TCR clone 54665 (TRAV12-3, TRAJ17)
CAMTLTGNKLTF

SEQ ID NO: 109330 - protein, 15 aa, Homo sapiens
  CDR3 for beta chain variable domain of TCR clone 54665 (TRBV6-1, TRBJ2-6)
CASSSRPSGANVLTF

SEQ ID NO: 109331 - protein, 15 aa, Homo sapiens
  CDR3 for alpha chain variable domain of TCR clone 54666 (TRAV3, TRAJ3)
CAVRDRDSSASKIIF

SEQ ID NO: 109332 - protein, 18 aa, Homo sapiens
  CDR3 for beta chain variable domain of TCR clone 54666 (TRBV25-1, TRBJ1-2)
CASSGLQNGHGLIFGYTF

SEQ ID NO: 109333 - protein, 23 aa, Homo sapiens
  CDR3 for alpha chain variable domain of TCR clone 54667 (TRAV1-1, TRAJ11)
LLQELQMKDSASYFCAGYSTLTF

SEQ ID NO: 109334 - protein, 15 aa, Homo sapiens
  CDR3 for beta chain variable domain of TCR clone 54667 (TRBV6-5, TRBJ2-1)
CASRGDFDSYNEQFS

SEQ ID NO: 109335 - protein, 13 aa, Homo sapiens
  CDR3 for alpha chain variable domain of TCR clone 54668 (TRAV12-3, TRAJ13)
CAMSSGGYQKVTF

SEQ ID NO: 109336 - protein, 13 aa, Homo sapiens
  CDR3 for beta chain variable domain of TCR clone 54668 (TRBV20-1, TRBJ1-1)
CSASPGGHTEAFF

SEQ ID NO: 109337 - protein, 13 aa, Homo sapiens
  CDR3 for alpha chain variable domain of TCR clone 54669 (TRAV17, TRAJ9)
CATDYTGGFKTIF

SEQ ID NO: 109338 - protein, 15 aa, Homo sapiens
  CDR3 for beta chain variable domain of TCR clone 54669 (TRBV6-3, TRBJ2-7)
CASSSPGTAFYEQYF

SEQ ID NO: 109339 - protein, 11 aa, Homo sapiens
  CDR3 for alpha chain variable domain of TCR clone 54670 (TRAV21, TRAJ31)
CAVRNNARLMF

SEQ ID NO: 109340 - protein, 16 aa, Homo sapiens
  CDR3 for beta chain variable domain of TCR clone 54670 (TRBV4-1, TRBJ2-5)
CASSSGLAGVLGTQYF

SEQ ID NO: 109341 - protein, 11 aa, Homo sapiens
  CDR3 for alpha chain variable domain of TCR clone 54671 (TRAV3, TRAJ21)
CAVGNFNKVYF

SEQ ID NO: 109342 - protein, 16 aa, Homo sapiens
  CDR3 for beta chain variable domain of TCR clone 54671 (TRBV19, TRBJ2-1)
CASSKAGPSSYNEQFF

SEQ ID NO: 109343 - protein, 14 aa, Homo sapiens
  CDR3 for alpha chain variable domain of TCR clone 54672 (TRAV8-1, TRAJ34)
CAVITTHNTDKLIF

SEQ ID NO: 109344 - protein, 14 aa, Homo sapiens
  CDR3 for beta chain variable domain of TCR clone 54672 (TRBV11-3, TRBJ1-3)
CASSHNGQGNTIYF

SEQ ID NO: 109345 - protein, 15 aa, Homo sapiens
  CDR3 for alpha chain variable domain of TCR clone 54673 (TRAV21, TRAJ53)
CATSNSGGSNYKLTF

SEQ ID NO: 109346 - protein, 16 aa, Homo sapiens
  CDR3 for beta chain variable domain of TCR clone 54673 (TRBV29-1, TRBJ1-2)
CSVEANRDIANYGYTF

SEQ ID NO: 109347 - protein, 11 aa, Homo sapiens
  CDR3 for alpha chain variable domain of TCR clone 54674 (TRAV26-1, TRAJ26)
CIKGYGQNFVF

SEQ ID NO: 109348 - protein, 13 aa, Homo sapiens
  CDR3 for beta chain variable domain of TCR clone 54674 (TRBV7-6, TRBJ1-2)
CASSLVADYGYTF

SEQ ID NO: 109349 - protein, 16 aa, Homo sapiens
  CDR3 for alpha chain variable domain of TCR clone 54675 (TRAV16, TRAJ37)
CAVRTAGSSNTGKLIF

SEQ ID NO: 109350 - protein, 13 aa, Homo sapiens
  CDR3 for beta chain variable domain of TCR clone 54675 (TRBV7-9, TRBJ2-5)
CASLPSGREAQYF

SEQ ID NO: 109351 - protein, 14 aa, Homo sapiens
  CDR3 for alpha chain variable domain of TCR clone 54676 (TRAV2, TRAJ9)
CAVEDRSGGFKTTF

SEQ ID NO: 109352 - protein, 16 aa, Homo sapiens
  CDR3 for beta chain variable domain of TCR clone 54676 (TRBV7-3, TRBJ2-2)
CASSLKRGTLSGELFF

SEQ ID NO: 109353 - protein, 12 aa, Homo sapiens
  CDR3 for alpha chain variable domain of TCR clone 54677 (TRAV2, TRAJ10)
CASTGGGNKLTF

SEQ ID NO: 109354 - protein, 14 aa, Homo sapiens
  CDR3 for beta chain variable domain of TCR clone 54677 (TRBV7-3, TRBJ2-7)
CASSLGGVSYEQYF

SEQ ID NO: 109355 - protein, 17 aa, Homo sapiens
  CDR3 for alpha chain variable domain of TCR clone 54678 (TRAV3, TRAJ6)
CAVRDGPRAGGSYIPTF

SEQ ID NO: 109356 - protein, 18 aa, Homo sapiens
  CDR3 for beta chain variable domain of TCR clone 54678 (TRBV7-9, TRBJ2-7)
CASSLTASGSRTWYEQYF

SEQ ID NO: 109357 - protein, 14 aa, Homo sapiens
  CDR3 for alpha chain variable domain of TCR clone 54679 (TRAV3, TRAJ21)
CAVESQSNFNKFYF

SEQ ID NO: 109358 - protein, 18 aa, Homo sapiens
  CDR3 for beta chain variable domain of TCR clone 54679 (TRBV7-9, TRBJ2-1)
CASSLAVSGTSGRNEQFF

SEQ ID NO: 109359 - protein, 15 aa, Homo sapiens
  CDR3 for alpha chain variable domain of TCR clone 54680 (TRAV8-3, TRAJ27)
CAVGPSKTNSGKSTF

SEQ ID NO: 109360 - protein, 13 aa, Homo sapiens
  CDR3 for beta chain variable domain of TCR clone 54680 (TRBV20-1, TRBJ1-1)
CSAPLGGGTEAFF

SEQ ID NO: 109361 - protein, 14 aa, Homo sapiens
  CDR3 for alpha chain variable domain of TCR clone 54681 (TRAV29/DV5, TRAJ45)
CAASFRGGADGLTF

SEQ ID NO: 109362 - protein, 13 aa, Homo sapiens
  CDR3 for beta chain variable domain of TCR clone 54681 (TRBV10-3, TRBJ1-2)
CAISERDSYGYTF

SEQ ID NO: 109363 - protein, 16 aa, Homo sapiens
  CDR3 for alpha chain variable domain of TCR clone 54682 (TRAV3, TRAJ37)
CAVRVRGSGNTGKLIF

SEQ ID NO: 109364 - protein, 11 aa, Homo sapiens
  CDR3 for beta chain variable domain of TCR clone 54682 (TRBV11-2, TRBJ2-2)
CAGSLPGELFF

SEQ ID NO: 109365 - protein, 12 aa, Homo sapiens
  CDR3 for alpha chain variable domain of TCR clone 54683 (TRAV3, TRAJ20)
CAVRDPDYKPSF

SEQ ID NO: 109366 - protein, 15 aa, Homo sapiens
  CDR3 for beta chain variable domain of TCR clone 54683 (TRBV9, TRBJ1-6)
CASSVAGTGDSPLHF

SEQ ID NO: 109367 - protein, 21 aa, Homo sapiens
  CDR3 for alpha chain variable domain of TCR clone 54684 (TRAV25, TRAJ7)
TATQTADVGTYFCPGNNRLAF

SEQ ID NO: 109368 - protein, 14 aa, Homo sapiens
  CDR3 for beta chain variable domain of TCR clone 54684 (TRBV11-2, TRBJ2-2)
CASSLGLRVRELFF

SEQ ID NO: 109369 - protein, 13 aa, Homo sapiens
  CDR3 for alpha chain variable domain of TCR clone 54685 (TRAV3, TRAJ27)
CAVRPLGAGKSTF

SEQ ID NO: 109370 - protein, 15 aa, Homo sapiens
  CDR3 for beta chain variable domain of TCR clone 54685 (TRBV5-1, TRBJ2-1)
CASSPPRAPYNEQFF

SEQ ID NO: 109371 - protein, 15 aa, Homo sapiens
  CDR3 for alpha chain variable domain of TCR clone 54686 (TRAV8-3, TRAJ40)
CAAPSLGSGTYSYIF

SEQ ID NO: 109372 - protein, 16 aa, Homo sapiens
  CDR3 for beta chain variable domain of TCR clone 54686 (TRBV7-3, TRBJ2-3)
CASSLSGYRPEDTQYF

SEQ ID NO: 109373 - protein, 13 aa, Homo sapiens
  CDR3 for alpha chain variable domain of TCR clone 54687 (TRAV12-2, TRAJ15)
CAVFNQAGTALIF

SEQ ID NO: 109374 - protein, 15 aa, Homo sapiens
  CDR3 for beta chain variable domain of TCR clone 54687 (TRBV7-8, TRBJ1-5)
CASSRGGGADQTQHF

SEQ ID NO: 109375 - protein, 12 aa, Homo sapiens
  CDR3 for alpha chain variable domain of TCR clone 54688 (TRAV36/DV7, TRAJ54)
CAVVRGAQKLVF

SEQ ID NO: 109376 - protein, 13 aa, Homo sapiens
  CDR3 for beta chain variable domain of TCR clone 54688 (TRBV4-2, TRBJ1-1)
CASSQAGNTEAFF

SEQ ID NO: 109377 - protein, 17 aa, Homo sapiens
  CDR3 for alpha chain variable domain of TCR clone 54689 (TRAV8-6, TRAJ58)
CAVSSWVGETSGSRLTF

SEQ ID NO: 109378 - protein, 15 aa, Homo sapiens
  CDR3 for beta chain variable domain of TCR clone 54689 (TRBV20-1, TRBJ2-7)
CSARDWVSGMDEQYF

SEQ ID NO: 109379 - protein, 12 aa, Homo sapiens
  CDR3 for alpha chain variable domain of TCR clone 54690 (TRAV12-3, TRAJ17)
CAMTLTGNKLTF

SEQ ID NO: 109380 - protein, 14 aa, Homo sapiens
  CDR3 for beta chain variable domain of TCR clone 54690 (TRBV4-1, TRBJ2-7)
CASSQDWEHVEQYF

SEQ ID NO: 109381 - protein, 14 aa, Homo sapiens
  CDR3 for alpha chain variable domain of TCR clone 54691 (TRAV26-1, TRAJ21)
CIARVVYNFNKFYF

SEQ ID NO: 109382 - protein, 11 aa, Homo sapiens
  CDR3 for beta chain variable domain of TCR clone 54691 (TRBV5-6, TRBJ2-5)
CASSLERTQYF

SEQ ID NO: 109383 - protein, 12 aa, Homo sapiens
  CDR3 for alpha chain variable domain of TCR clone 54692 (TRAV13-2, TRAJ8)
CAPWLGFQKLVF

SEQ ID NO: 109384 - protein, 14 aa, Homo sapiens
  CDR3 for beta chain variable domain of TCR clone 54692 (TRBV10-2, TRBJ1-5)
CASSSTGRNQPQHF

SEQ ID NO: 109385 - protein, 15 aa, Homo sapiens
  CDR3 for alpha chain variable domain of TCR clone 54693 (TRAV17, TRAJ23)
CATDAEDNLGGKLIF

SEQ ID NO: 109386 - protein, 12 aa, Homo sapiens
  CDR3 for beta chain variable domain of TCR clone 54693 (TRBV2, TRBJ2-1)
CAKREGYNEQFF

SEQ ID NO: 109387 - protein, 12 aa, Homo sapiens
  CDR3 for alpha chain variable domain of TCR clone 54694 (TRAV13-1, TRAJ21)
CAAKEGFNKFYF

SEQ ID NO: 109388 - protein, 16 aa, Homo sapiens
  CDR3 for beta chain variable domain of TCR clone 54694 (TRBV12-4, TRBJ1-5)
CASRQPVEGSNQPQHF

SEQ ID NO: 109389 - protein, 14 aa, Homo sapiens
  CDR3 for alpha chain variable domain of TCR clone 54695 (TRAV35, TRAJ22)
CAGLRPGSARQLTF

SEQ ID NO: 109390 - protein, 17 aa, Homo sapiens
  CDR3 for beta chain variable domain of TCR clone 54695 (TRBV11-2, TRBJ2-1)
CASSLYPPGVEYNEQFF

SEQ ID NO: 109391 - protein, 17 aa, Homo sapiens
  CDR3 for alpha chain variable domain of TCR clone 54696 (TRAV12-3, TRAJ6)
CAMSTRGGAGGSYIPTF

SEQ ID NO: 109392 - protein, 12 aa, Homo sapiens
  CDR3 for beta chain variable domain of TCR clone 54696 (TRBV12-4, TRBJ2-3)
CASSTLPDTQYF

SEQ ID NO: 109393 - protein, 13 aa, Homo sapiens
  CDR3 for alpha chain variable domain of TCR clone 54697 (TRAV2, TRAJ15)
CAVASQAGTALIF

SEQ ID NO: 109394 - protein, 16 aa, Homo sapiens
  CDR3 for beta chain variable domain of TCR clone 54697 (TRBV7-8, TRBJ2-4)
CASSAERTLAKNMQYF

SEQ ID NO: 109395 - protein, 12 aa, Homo sapiens
  CDR3 for alpha chain variable domain of TCR clone 54698 (TRAV3, TRAJ27)
CAVRDKAGKSTF

SEQ ID NO: 109396 - protein, 13 aa, Homo sapiens
  CDR3 for beta chain variable domain of TCR clone 54698 (TRBV6-5, TRBJ2-5)
CASSPQGGETQYL

SEQ ID NO: 109397 - protein, 14 aa, Homo sapiens
  CDR3 for alpha chain variable domain of TCR clone 54699 (TRAV2, TRAJ9)
CAVEDRSGGFKTIF

SEQ ID NO: 109398 - protein, 14 aa, Homo sapiens
  CDR3 for beta chain variable domain of TCR clone 54699 (TRBV7-2, TRBJ2-7)
CASSLYPGRYEQYF

SEQ ID NO: 109399 - protein, 13 aa, Homo sapiens
  CDR3 for alpha chain variable domain of TCR clone 54700 (TRAV13-2, TRAJ13)
CAERPGGYQKVTF

SEQ ID NO: 109400 - protein, 15 aa, Homo sapiens
  CDR3 for beta chain variable domain of TCR clone 54700 (TRBV4-1, TRBJ1-4)
CASSDTGGTNEKLFL

SEQ ID NO: 109401 - protein, 15 aa, Homo sapiens
  CDR3 for alpha chain variable domain of TCR clone 54701 (TRAV27, TRAJ38)
CAGRFNAGNNRTLIW

SEQ ID NO: 109402 - protein, 13 aa, Homo sapiens
  CDR3 for beta chain variable domain of TCR clone 54701 (TRBV12-5, TRBJ2-3)
CASQNRGTDTQYF

SEQ ID NO: 109403 - protein, 16 aa, Homo sapiens
  CDR3 for alpha chain variable domain of TCR clone 54702 (TRAV27, TRAJ52)
RAGAPAGGTSYGKLTF

SEQ ID NO: 109404 - protein, 12 aa, Homo sapiens
  CDR3 for beta chain variable domain of TCR clone 54702 (TRBV27, TRBJ2-1)
CASRGFYNEQFF

SEQ ID NO: 109405 - protein, 17 aa, Homo sapiens
  CDR3 for alpha chain variable domain of TCR clone 54703 (TRAV12-3, TRAJ6)
CAMSARGGAGGSYMPTF

SEQ ID NO: 109406 - protein, 12 aa, Homo sapiens
  CDR3 for beta chain variable domain of TCR clone 54703 (TRBV12-4, TRBJ2-3)
CASSTLPDTQYF

SEQ ID NO: 109407 - protein, 16 aa, Homo sapiens
  CDR3 for alpha chain variable domain of TCR clone 54704 (TRAV12-2, TRAJ10)
CAANRVLTGGGNKLTF

SEQ ID NO: 109408 - protein, 14 aa, Homo sapiens
  CDR3 for beta chain variable domain of TCR clone 54704 (TRBV9, TRBJ2-1)
CASSVALAVNEQFF

SEQ ID NO: 109409 - protein, 14 aa, Homo sapiens
  CDR3 for alpha chain variable domain of TCR clone 54705 (TRAV26-1, TRAJ21)
CIVRPPSNFNKFYF

SEQ ID NO: 109410 - protein, 14 aa, Homo sapiens
  CDR3 for beta chain variable domain of TCR clone 54705 (TRBV11-3, TRBJ2-1)
CASSATTSGSIQFF

SEQ ID NO: 109411 - protein, 14 aa, Homo sapiens
  CDR3 for alpha chain variable domain of TCR clone 54706 (TRAV8-4, TRAJ9)
CAVRINTGGFKTIF

SEQ ID NO: 109412 - protein, 15 aa, Homo sapiens
  CDR3 for beta chain variable domain of TCR clone 54706 (TRBV10-2, TRBJ2-6)
CASSEQGAGSNVLTF

SEQ ID NO: 109413 - protein, 12 aa, Homo sapiens
  CDR3 for alpha chain variable domain of TCR clone 54707 (TRAV12-3, TRAJ17)
CAMTLTGNKLTF

SEQ ID NO: 109414 - protein, 13 aa, Homo sapiens
  CDR3 for beta chain variable domain of TCR clone 54707 (TRBV7-2, TRBJ2-2)
CASSSVRAGELFF

SEQ ID NO: 109415 - protein, 14 aa, Homo sapiens
  CDR3 for alpha chain variable domain of TCR clone 54708 (TRAV1-2, TRAJ16)
CAVNRFSDGQKLLF

SEQ ID NO: 109416 - protein, 14 aa, Homo sapiens
  CDR3 for beta chain variable domain of TCR clone 54708 (TRBV12-4, TRBJ1-4)
CASRMTGRSEKLFF

SEQ ID NO: 109417 - protein, 14 aa, Homo sapiens
  CDR3 for alpha chain variable domain of TCR clone 54709 (TRAV1-2, TRAJ16)
CAVNRFSDGQKLLF

SEQ ID NO: 109418 - protein, 13 aa, Homo sapiens
  CDR3 for beta chain variable domain of TCR clone 54709 (TRBV2, TRBJ2-5)
CASSGLVEETQYF

SEQ ID NO: 109419 - protein, 18 aa, Homo sapiens
  CDR3 for alpha chain variable domain of TCR clone 54710 (TRAV21, TRAJ52)
CAVRPSAAGGTSYGKLTF

SEQ ID NO: 109420 - protein, 17 aa, Homo sapiens
  CDR3 for beta chain variable domain of TCR clone 54710 (TRBV13, TRBJ2-3)
CASSLSRVAGGRNTQYF

SEQ ID NO: 109421 - protein, 14 aa, Homo sapiens
  CDR3 for alpha chain variable domain of TCR clone 54711 (TRAV9-2, TRAJ39)
CALYIYNAGNMLTF

SEQ ID NO: 109422 - protein, 14 aa, Homo sapiens
  CDR3 for beta chain variable domain of TCR clone 54711 (TRBV19, TRBJ2-1)
CASSRLASINEQFF

SEQ ID NO: 109423 - protein, 15 aa, Homo sapiens
  CDR3 for alpha chain variable domain of TCR clone 54712 (TRAV36/DV7, TRAJ53)
WEGENSGGRNYKLTF

SEQ ID NO: 109424 - protein, 15 aa, Homo sapiens
  CDR3 for beta chain variable domain of TCR clone 54712 (TRBV6-1, TRBJ2-5)
CASSEGWGIQETQYF

SEQ ID NO: 109425 - protein, 14 aa, Homo sapiens
  CDR3 for alpha chain variable domain of TCR clone 54713 (TRAV12-2, TRAJ40)
WAVKIPSGTYKYIF

SEQ ID NO: 109426 - protein, 14 aa, Homo sapiens
  CDR3 for beta chain variable domain of TCR clone 54713 (TRBV20-1, TRBJ1-1)
CSAQTRIGGTEAFF

SEQ ID NO: 109427 - protein, 12 aa, Homo sapiens
  CDR3 for alpha chain variable domain of TCR clone 54714 (TRAV13-2, TRAJ23)
CAERHRGGKLIF

SEQ ID NO: 109428 - protein, 12 aa, Homo sapiens
  CDR3 for beta chain variable domain of TCR clone 54714 (TRBV13, TRBJ2-7)
CASSLQAYEQYF

SEQ ID NO: 109429 - protein, 16 aa, Homo sapiens
  CDR3 for alpha chain variable domain of TCR clone 54715 (TRAV13-1, TRAJ48)
CAASIFGNFGNEKLTF

SEQ ID NO: 109430 - protein, 16 aa, Homo sapiens
  CDR3 for beta chain variable domain of TCR clone 54715 (TRBV7-2, TRBJ2-6)
CASSERRASGANGLTF

SEQ ID NO: 109431 - protein, 14 aa, Homo sapiens
  CDR3 for alpha chain variable domain of TCR clone 54716 (TRAV1-2, TRAJ16)
CAVNRFSDGQELLF

SEQ ID NO: 109432 - protein, 14 aa, Homo sapiens
  CDR3 for beta chain variable domain of TCR clone 54716 (TRBV7-2, TRBJ2-5)
CASSPLGQSETQYF

SEQ ID NO: 109433 - protein, 12 aa, Homo sapiens
  CDR3 for alpha chain variable domain of TCR clone 54717 (TRAV8-6, TRAJ22)
CAVNPGTRQLTF

SEQ ID NO: 109434 - protein, 13 aa, Homo sapiens
  CDR3 for beta chain variable domain of TCR clone 54717 (TRBV19, TRBJ1-2)
CASSQGQVYGYTF

SEQ ID NO: 109435 - protein, 16 aa, Homo sapiens
  CDR3 for alpha chain variable domain of TCR clone 54718 (TRAV12-2, TRAJ43)
CAGDDMRFGAGTRLTV

SEQ ID NO: 109436 - protein, 16 aa, Homo sapiens
  CDR3 for beta chain variable domain of TCR clone 54718 (TRBV2, TRBJ2-4)
CASSEAPGGEQNVQYF

SEQ ID NO: 109437 - protein, 16 aa, Homo sapiens
  CDR3 for alpha chain variable domain of TCR clone 54719 (TRAV14/DV4, TRAJ44)
CAMREGRGGTASKLTF

SEQ ID NO: 109438 - protein, 13 aa, Homo sapiens
  CDR3 for beta chain variable domain of TCR clone 54719 (TRBV15, TRBJ1-6)
CATSGGLNSPLHF

SEQ ID NO: 109439 - protein, 13 aa, Homo sapiens
  CDR3 for alpha chain variable domain of TCR clone 54720 (TRAV20, TRAJ37)
SAGCSSNTGKLIF

SEQ ID NO: 109440 - protein, 11 aa, Homo sapiens
  CDR3 for beta chain variable domain of TCR clone 54720 (TRBV12-4, TRBJ2-3)
CASTATDTQYF

SEQ ID NO: 109441 - protein, 16 aa, Homo sapiens
  CDR3 for alpha chain variable domain of TCR clone 54721 (TRAV3, TRAJ37)
CAVRVRGSGNTGKLIF

SEQ ID NO: 109442 - protein, 17 aa, Homo sapiens
  CDR3 for beta chain variable domain of TCR clone 54721 (TRBV3-1, TRBJ2-6)
CASSPNTGPAGANVLTF

SEQ ID NO: 109443 - protein, 16 aa, Homo sapiens
  CDR3 for alpha chain variable domain of TCR clone 54722 (TRAV30, TRAJ24)
CGTEIVGADSWGKFQF

SEQ ID NO: 109444 - protein, 14 aa, Homo sapiens
  CDR3 for beta chain variable domain of TCR clone 54722 (TRBV18, TRBJ2-7)
CASSPRGGAYEQYF

SEQ ID NO: 109445 - protein, 19 aa, Homo sapiens
  CDR3 for alpha chain variable domain of TCR clone 54723 (TRAV13-1, TRAJ52)
CAASPYQNAGGTSYGKLTF

SEQ ID NO: 109446 - protein, 14 aa, Homo sapiens
  CDR3 for beta chain variable domain of TCR clone 54723 (TRBV19, TRBJ2-7)
CASTVQGRPYEQYS

SEQ ID NO: 109447 - protein, 10 aa, Homo sapiens
  CDR3 for alpha chain variable domain of TCR clone 54724 (TRAV8-4, TRAJ43)
CAVSADDMRF

SEQ ID NO: 109448 - protein, 15 aa, Homo sapiens
  CDR3 for beta chain variable domain of TCR clone 54724 (TRBV11-2, TRBJ1-3)
CASSLDGTVGNTIYF

SEQ ID NO: 109449 - protein, 16 aa, Homo sapiens
  CDR3 for alpha chain variable domain of TCR clone 54725 (TRAV14/DV4, TRAJ20)
CAMREGRSRDDYKLSF

SEQ ID NO: 109450 - protein, 15 aa, Homo sapiens
  CDR3 for beta chain variable domain of TCR clone 54725 (TRBV2, TRBJ2-7)
CASSEGLARSYEQYF

SEQ ID NO: 109451 - protein, 12 aa, Homo sapiens
  CDR3 for alpha chain variable domain of TCR clone 54726 (TRAV21, TRAJ33)
CAKMDSNYQLIW

SEQ ID NO: 109452 - protein, 14 aa, Homo sapiens
  CDR3 for beta chain variable domain of TCR clone 54726 (TRBV2, TRBJ2-7)
CASSLNSGGYEQYF

SEQ ID NO: 109453 - protein, 12 aa, Homo sapiens
  CDR3 for alpha chain variable domain of TCR clone 54727 (TRAV13-1, TRAJ49)
CAASPMGSQFYF

SEQ ID NO: 109454 - protein, 13 aa, Homo sapiens
  CDR3 for beta chain variable domain of TCR clone 54727 (TRBV20-1, TRBJ2-2)
CSASAAGTGELFF

SEQ ID NO: 109455 - protein, 13 aa, Homo sapiens
  CDR3 for alpha chain variable domain of TCR clone 54728 (TRAV8-3, TRAJ36)
CAVGATGANNLFF

SEQ ID NO: 109456 - protein, 15 aa, Homo sapiens
  CDR3 for beta chain variable domain of TCR clone 54728 (TRBV7-2, TRBJ1-2)
CASSPSAGWNYGYTF

SEQ ID NO: 109457 - protein, 14 aa, Homo sapiens
  CDR3 for alpha chain variable domain of TCR clone 54729 (TRAV20, TRAJ56)
CAVQFGGANSKLTF

SEQ ID NO: 109458 - protein, 14 aa, Homo sapiens
  CDR3 for beta chain variable domain of TCR clone 54729 (TRBV20-1, TRBJ2-7)
CSAKRGWSSYEQYF

SEQ ID NO: 109459 - protein, 12 aa, Homo sapiens
  CDR3 for alpha chain variable domain of TCR clone 54730 (TRAV17, TRAJ39)
CATGAAGNMLTF

SEQ ID NO: 109460 - protein, 14 aa, Homo sapiens
  CDR3 for beta chain variable domain of TCR clone 54730 (TRBV7-9, TRBJ1-2)
CASSLQGANYGYTF

SEQ ID NO: 109461 - protein, 15 aa, Homo sapiens
  CDR3 for alpha chain variable domain of TCR clone 54731 (TRAV8-3, TRAJ45)
CALSYSGGGADGLTF

SEQ ID NO: 109462 - protein, 13 aa, Homo sapiens
  CDR3 for beta chain variable domain of TCR clone 54731 (TRBV10-3, TRBJ2-7)
CTSKLAVNYEQYF

SEQ ID NO: 109463 - protein, 13 aa, Homo sapiens
  CDR3 for alpha chain variable domain of TCR clone 54732 (TRAV27, TRAJ3)
ASLQGSSASKIIF

SEQ ID NO: 109464 - protein, 15 aa, Homo sapiens
  CDR3 for beta chain variable domain of TCR clone 54732 (TRBV28, TRBJ1-3)
CASSMGWASGNTIYF

SEQ ID NO: 109465 - protein, 11 aa, Homo sapiens
  CDR3 for alpha chain variable domain of TCR clone 54733 (TRAV12-2, TRAJ31)
GAVTRWARLMF

SEQ ID NO: 109466 - protein, 15 aa, Homo sapiens
  CDR3 for beta chain variable domain of TCR clone 54733 (TRBV19, TRBJ2-7)
CASSIGGGLVNEQYF

SEQ ID NO: 109467 - protein, 14 aa, Homo sapiens
  CDR3 for alpha chain variable domain of TCR clone 54734 (TRAV16, TRAJ54)
CAPSGVQGAQKLVF

SEQ ID NO: 109468 - protein, 15 aa, Homo sapiens
  CDR3 for beta chain variable domain of TCR clone 54734 (TRBV18, TRBJ2-2)
CASSTSGLHTGELFF

SEQ ID NO: 109469 - protein, 14 aa, Homo sapiens
  CDR3 for alpha chain variable domain of TCR clone 54735 (TRAV12-3, TRAJ10)
SHLPLTGGGNKLTF

SEQ ID NO: 109470 - protein, 13 aa, Homo sapiens
  CDR3 for beta chain variable domain of TCR clone 54735 (TRBV12-4, TRBJ1-1)
CASSPGTGCEAFF

SEQ ID NO: 109471 - protein, 15 aa, Homo sapiens
  CDR3 for alpha chain variable domain of TCR clone 54736 (TRAV3, TRAJ5)
CAVRDLDTGRRALTF

SEQ ID NO: 109472 - protein, 13 aa, Homo sapiens
  CDR3 for beta chain variable domain of TCR clone 54736 (TRBV12-4, TRBJ2-7)
CASSPTETYVQYF

SEQ ID NO: 109473 - protein, 13 aa, Homo sapiens
  CDR3 for alpha chain variable domain of TCR clone 54737 (TRAV8-3, TRAJ28)
CAVGAVGSYPLTF

SEQ ID NO: 109474 - protein, 15 aa, Homo sapiens
  CDR3 for beta chain variable domain of TCR clone 54737 (TRBV7-9, TRBJ1-5)
CASSQGHQPNQPQHF

SEQ ID NO: 109475 - protein, 14 aa, Homo sapiens
  CDR3 for alpha chain variable domain of TCR clone 54738 (TRAV1-1, TRAJ28)
CAAPSGAGGYQLTF

SEQ ID NO: 109476 - protein, 15 aa, Homo sapiens
  CDR3 for beta chain variable domain of TCR clone 54738 (TRBV7-2, TRBJ1-2)
CASSLVSGGDYGYTF

SEQ ID NO: 109477 - protein, 17 aa, Homo sapiens
  CDR3 for alpha chain variable domain of TCR clone 54739 (TRAV3, TRAJ12)
CAVRDRGRMDSSYKLIF

SEQ ID NO: 109478 - protein, 16 aa, Homo sapiens
  CDR3 for beta chain variable domain of TCR clone 54739 (TRBV9, TRBJ2-2)
CASSAMGKGNTGELFF

SEQ ID NO: 109479 - protein, 16 aa, Homo sapiens
  CDR3 for alpha chain variable domain of TCR clone 54740 (TRAV13-2, TRAJ23)
CAESPLGRNQGGKLIF

SEQ ID NO: 109480 - protein, 14 aa, Homo sapiens
  CDR3 for beta chain variable domain of TCR clone 54740 (TRBV19, TRBJ2-2)
CASSTLHRSGELFF

SEQ ID NO: 109481 - protein, 10 aa, Homo sapiens
  CDR3 for alpha chain variable domain of TCR clone 54741 (TRAV17, TRAJ36)
CATVAGSLFF

SEQ ID NO: 109482 - protein, 12 aa, Homo sapiens
  CDR3 for beta chain variable domain of TCR clone 54741 (TRBV11-2, TRBJ2-4)
CASSSASGSEYF

SEQ ID NO: 109483 - protein, 12 aa, Homo sapiens
  CDR3 for alpha chain variable domain of TCR clone 54742 (TRAV17, TRAJ20)
CATDGDDYKLSF

SEQ ID NO: 109484 - protein, 14 aa, Homo sapiens
  CDR3 for beta chain variable domain of TCR clone 54742 (TRBV25-1, TRBJ1-1)
CASTHLGGNTEAFF

SEQ ID NO: 109485 - protein, 11 aa, Homo sapiens
  CDR3 for alpha chain variable domain of TCR clone 54743 (TRAV1-2, TRAJ20)
CAVSNDYKLSF

SEQ ID NO: 109486 - protein, 11 aa, Homo sapiens
  CDR3 for beta chain variable domain of TCR clone 54743 (TRBV10-3, TRBJ2-7)
CAISEGLEQYF

SEQ ID NO: 109487 - protein, 16 aa, Homo sapiens
  CDR3 for alpha chain variable domain of TCR clone 54744 (TRAV30, TRAJ24)
CGTEIVGADSWGKFQF

SEQ ID NO: 109488 - protein, 12 aa, Homo sapiens
  CDR3 for beta chain variable domain of TCR clone 54744 (TRBV14, TRBJ2-5)
CASSQLKETQYF

SEQ ID NO: 109489 - protein, 17 aa, Homo sapiens
  CDR3 for alpha chain variable domain of TCR clone 54745 (TRAV3, TRAJ7)
CAVRDMSPLEETTDSLL

SEQ ID NO: 109490 - protein, 17 aa, Homo sapiens
  CDR3 for beta chain variable domain of TCR clone 54745 (TRBV15, TRBJ1-2)
CATSGREIDVVNYGYTF

SEQ ID NO: 109491 - protein, 14 aa, Homo sapiens
  CDR3 for alpha chain variable domain of TCR clone 54746 (TRAV21, TRAJ28)
CAVGSGAGSYQLPF

SEQ ID NO: 109492 - protein, 14 aa, Homo sapiens
  CDR3 for beta chain variable domain of TCR clone 54746 (TRBV18, TRBJ1-4)
CASSPGPNGEKLFF

SEQ ID NO: 109493 - protein, 13 aa, Homo sapiens
  CDR3 for alpha chain variable domain of TCR clone 54747 (TRAV8-6, TRAJ21)
CAVSTSSLNKFYF

SEQ ID NO: 109494 - protein, 14 aa, Homo sapiens
  CDR3 for beta chain variable domain of TCR clone 54747 (TRBV7-9, TRBJ2-5)
CASSLDTAQETQYF

SEQ ID NO: 109495 - protein, 11 aa, Homo sapiens
  CDR3 for alpha chain variable domain of TCR clone 54748 (TRAV2, TRAJ13)
CASGGYQKVTF

SEQ ID NO: 109496 - protein, 15 aa, Homo sapiens
  CDR3 for beta chain variable domain of TCR clone 54748 (TRBV7-2, TRBJ2-1)
CASTHGTGIYNEQFF

SEQ ID NO: 109497 - protein, 17 aa, Homo sapiens
  CDR3 for alpha chain variable domain of TCR clone 54749 (TRAV2, TRAJ36)
CAVEDRGNWGKQPRLWD

SEQ ID NO: 109498 - protein, 14 aa, Homo sapiens
  CDR3 for beta chain variable domain of TCR clone 54749 (TRBV7-9, TRBJ2-5)
CASSLDTAQETQYF

SEQ ID NO: 109499 - protein, 16 aa, Homo sapiens
  CDR3 for alpha chain variable domain of TCR clone 54750 (TRAV12-3, TRAJ20)
CAMDKLSFGAGATVTV

SEQ ID NO: 109500 - protein, 14 aa, Homo sapiens
  CDR3 for beta chain variable domain of TCR clone 54750 (TRBV5-4, TRBJ2-2)
CASSLTSRTGELFF

SEQ ID NO: 109501 - protein, 15 aa, Homo sapiens
  CDR3 for alpha chain variable domain of TCR clone 54751 (TRAV3, TRAJ20)
YAVRDIKLSDYKLSF

SEQ ID NO: 109502 - protein, 15 aa, Homo sapiens
  CDR3 for beta chain variable domain of TCR clone 54751 (TRBV7-9, TRBJ1-6)
CASSSPGRGNSPLHF

SEQ ID NO: 109503 - protein, 15 aa, Homo sapiens
  CDR3 for alpha chain variable domain of TCR clone 54752 (TRAV12-2, TRAJ53)
CAVNGGGGSNYKLTF

SEQ ID NO: 109504 - protein, 17 aa, Homo sapiens
  CDR3 for beta chain variable domain of TCR clone 54752 (TRBV7-3, TRBJ2-3)
RASSLVKRMRGADTQYF

SEQ ID NO: 109505 - protein, 10 aa, Homo sapiens
  CDR3 for alpha chain variable domain of TCR clone 54753 (TRAV1-2, TRAJ20)
CALNDYKLSF

SEQ ID NO: 109506 - protein, 16 aa, Homo sapiens
  CDR3 for beta chain variable domain of TCR clone 54753 (TRBV20-1, TRBJ1-1)
CSARALTQGMNTGAFF

SEQ ID NO: 109507 - protein, 14 aa, Homo sapiens
  CDR3 for alpha chain variable domain of TCR clone 54754 (TRAV35, TRAJ34)
CARRGTPTSSSLGL

SEQ ID NO: 109508 - protein, 13 aa, Homo sapiens
  CDR3 for beta chain variable domain of TCR clone 54754 (TRBV19, TRBJ2-7)
CASSIDRTYEQYF

SEQ ID NO: 109509 - protein, 14 aa, Homo sapiens
  CDR3 for alpha chain variable domain of TCR clone 54755 (TRAV30, TRAJ33)
CGTVAPRSNYQLIW

SEQ ID NO: 109510 - protein, 13 aa, Homo sapiens
  CDR3 for beta chain variable domain of TCR clone 54755 (TRBV10-3, TRBJ2-7)
CAIRAGGPHEQYF

SEQ ID NO: 109511 - protein, 15 aa, Homo sapiens
  CDR3 for alpha chain variable domain of TCR clone 54756 (TRAV25, TRAJ53)
CPTSNSGGSNYKLTF

SEQ ID NO: 109512 - protein, 14 aa, Homo sapiens
  CDR3 for beta chain variable domain of TCR clone 54756 (TRBV11-2, TRBJ2-3)
CASSRLARADTQYF

SEQ ID NO: 109513 - protein, 11 aa, Homo sapiens
  CDR3 for alpha chain variable domain of TCR clone 54757 (TRAV2, TRAJ23)
CAVETRRKLIF

SEQ ID NO: 109514 - protein, 14 aa, Homo sapiens
  CDR3 for beta chain variable domain of TCR clone 54757 (TRBV2, TRBJ2-3)
CASSEGQNTDTQYF

SEQ ID NO: 109515 - protein, 16 aa, Homo sapiens
  CDR3 for alpha chain variable domain of TCR clone 54758 (TRAV30, TRAJ24)
FGTEIVDADSWGKFQF

SEQ ID NO: 109516 - protein, 15 aa, Homo sapiens
  CDR3 for beta chain variable domain of TCR clone 54758 (TRBV27, TRBJ2-1)
CASSNGGGSSNEQFF

SEQ ID NO: 109517 - protein, 13 aa, Homo sapiens
  CDR3 for alpha chain variable domain of TCR clone 54759 (TRAV13-1, TRAJ6)
CAASKGGSYIPTF

SEQ ID NO: 109518 - protein, 13 aa, Homo sapiens
  CDR3 for beta chain variable domain of TCR clone 54759 (TRBV7-9, TRBJ1-2)
CASSLKQNYGYTF

SEQ ID NO: 109519 - protein, 15 aa, Homo sapiens
  CDR3 for alpha chain variable domain of TCR clone 54760 (TRAV8-3, TRAJ45)
CASSYSGGGADGLTF

SEQ ID NO: 109520 - protein, 17 aa, Homo sapiens
  CDR3 for beta chain variable domain of TCR clone 54760 (TRBV7-8, TRBJ1-2)
CASSLRPLQGNLYGYTF

SEQ ID NO: 109521 - protein, 12 aa, Homo sapiens
  CDR3 for alpha chain variable domain of TCR clone 54761 (TRAV23/DV6, TRAJ30)
CAASKGDGKIIF

SEQ ID NO: 109522 - protein, 15 aa, Homo sapiens
  CDR3 for beta chain variable domain of TCR clone 54761 (TRBV12-4, TRBJ2-1)
CASRPTRTGYNEQFF

SEQ ID NO: 109523 - protein, 14 aa, Homo sapiens
  CDR3 for alpha chain variable domain of TCR clone 54762 (TRAV1-2, TRAJ8)
CAVGEDTGFQKLVF

SEQ ID NO: 109524 - protein, 17 aa, Homo sapiens
  CDR3 for beta chain variable domain of TCR clone 54762 (TRBV11-3, TRBJ2-3)
CASSPGSSGGRTDTQYF

SEQ ID NO: 109525 - protein, 16 aa, Homo sapiens
  CDR3 for alpha chain variable domain of TCR clone 54763 (TRAV12-1, TRAJ53)
CVVTSVAGGSNYKLTF

SEQ ID NO: 109526 - protein, 20 aa, Homo sapiens
  CDR3 for beta chain variable domain of TCR clone 54763 (TRBV28, TRBJ2-1)
CASTPIGRSPGLAGGNEQFF

SEQ ID NO: 109527 - protein, 14 aa, Homo sapiens
  CDR3 for alpha chain variable domain of TCR clone 54764 (TRAV12-2, TRAJ40)
CAVKIPSGTYKYIF

SEQ ID NO: 109528 - protein, 14 aa, Homo sapiens
  CDR3 for beta chain variable domain of TCR clone 54764 (TRBV20-1, TRBJ1-1)
CSAQTRIGGTVAFF

SEQ ID NO: 109529 - protein, 15 aa, Homo sapiens
  CDR3 for alpha chain variable domain of TCR clone 54765 (TRAV26-1, TRAJ44)
CIVRANAGTASKLTF

SEQ ID NO: 109530 - protein, 16 aa, Homo sapiens
  CDR3 for beta chain variable domain of TCR clone 54765 (TRBV7-7, TRBJ2-1)
CASSLASGTSYNEQFF

SEQ ID NO: 109531 - protein, 18 aa, Homo sapiens
  CDR3 for alpha chain variable domain of TCR clone 54766 (TRAV21, TRAJ52)
CAVRPSQAGGTSYGKLTF

SEQ ID NO: 109532 - protein, 17 aa, Homo sapiens
  CDR3 for beta chain variable domain of TCR clone 54766 (TRBV25-1, TRBJ2-1)
CASSAYGQGRGVYEQFF

SEQ ID NO: 109533 - protein, 13 aa, Homo sapiens
  CDR3 for alpha chain variable domain of TCR clone 54767 (TRAV13-2, TRAJ13)
CEDLSGGYQKVTF

SEQ ID NO: 109534 - protein, 15 aa, Homo sapiens
  CDR3 for beta chain variable domain of TCR clone 54767 (TRBV19, TRBJ1-1)
CASSIGGGRNTEAFF

SEQ ID NO: 109535 - protein, 18 aa, Homo sapiens
  CDR3 for alpha chain variable domain of TCR clone 54768 (TRAV16, TRAJ52)
CALSGVDAGGTSYGKLTF

SEQ ID NO: 109536 - protein, 15 aa, Homo sapiens
  CDR3 for beta chain variable domain of TCR clone 54768 (TRBV20-1, TRBJ2-7)
CSARDRVSGMDEQYF

SEQ ID NO: 109537 - protein, 12 aa, Homo sapiens
  CDR3 for alpha chain variable domain of TCR clone 54769 (TRAV3, TRAJ34)
CAVLGNTAKLIF

SEQ ID NO: 109538 - protein, 13 aa, Homo sapiens
  CDR3 for beta chain variable domain of TCR clone 54769 (TRBV19, TRBJ2-1)
CASSIGTGNEQFF

SEQ ID NO: 109539 - protein, 16 aa, Homo sapiens
  CDR3 for alpha chain variable domain of TCR clone 54770 (TRAV3, TRAJ13)
CAVRDFESGGYQKVTL

SEQ ID NO: 109540 - protein, 16 aa, Homo sapiens
  CDR3 for beta chain variable domain of TCR clone 54770 (TRBV27, TRBJ2-5)
CASSYGPGGQKETQYF

SEQ ID NO: 109541 - protein, 14 aa, Homo sapiens
  CDR3 for alpha chain variable domain of TCR clone 54771 (TRAV12-3, TRAJ20)
CAMSARRGDYKLSF

SEQ ID NO: 109542 - protein, 14 aa, Homo sapiens
  CDR3 for beta chain variable domain of TCR clone 54771 (TRBV7-3, TRBJ2-3)
CASSPSARTDTRYF

SEQ ID NO: 109543 - protein, 16 aa, Homo sapiens
  CDR3 for alpha chain variable domain of TCR clone 54772 (TRAV30, TRAJ24)
CGTEIVDADSWGKFQF

SEQ ID NO: 109544 - protein, 17 aa, Homo sapiens
  CDR3 for beta chain variable domain of TCR clone 54772 (TRBV5-5, TRBJ1-2)
CASSLGSLDGQSEGYTF

SEQ ID NO: 109545 - protein, 10 aa, Homo sapiens
  CDR3 for alpha chain variable domain of TCR clone 54773 (TRAV12-3, TRAJ49)
CAMNDDQFYF

SEQ ID NO: 109546 - protein, 12 aa, Homo sapiens
  CDR3 for beta chain variable domain of TCR clone 54773 (TRBV11-2, TRBJ2-1)
CASSPGNNEQFF

SEQ ID NO: 109547 - protein, 12 aa, Homo sapiens
  CDR3 for alpha chain variable domain of TCR clone 54774 (TRAV1-2, TRAJ29)
CAVPSGYTPLVF

SEQ ID NO: 109548 - protein, 13 aa, Homo sapiens
  CDR3 for beta chain variable domain of TCR clone 54774 (TRBV5-4, TRBJ1-1)
CASSVDLGTEAFF

SEQ ID NO: 109549 - protein, 12 aa, Homo sapiens
  CDR3 for alpha chain variable domain of TCR clone 54775 (TRAV27, TRAJ35)
CAVADFGNVLHC

SEQ ID NO: 109550 - protein, 16 aa, Homo sapiens
  CDR3 for beta chain variable domain of TCR clone 54775 (TRBV6-1, TRBJ2-1)
CASILRQGSSYNEQFF

SEQ ID NO: 109551 - protein, 17 aa, Homo sapiens
  CDR3 for alpha chain variable domain of TCR clone 54776 (TRAV3, TRAJ38)
CAVRDCLNAGNNRKLIW

SEQ ID NO: 109552 - protein, 14 aa, Homo sapiens
  CDR3 for beta chain variable domain of TCR clone 54776 (TRBV19, TRBJ2-5)
CASSMTGQQETQYF

SEQ ID NO: 109553 - protein, 18 aa, Homo sapiens
  CDR3 for alpha chain variable domain of TCR clone 54777 (TRAV13-1, TRAJ52)
CAAKNPNTGGTSYGKLTF

SEQ ID NO: 109554 - protein, 18 aa, Homo sapiens
  CDR3 for beta chain variable domain of TCR clone 54777 (TRBV4-1, TRBJ1-4)
CASSPRTGGAWTNEKLFF

SEQ ID NO: 109555 - protein, 12 aa, Homo sapiens
  CDR3 for alpha chain variable domain of TCR clone 54778 (TRAV12-3, TRAJ39)
CAIENAGNMLTF

SEQ ID NO: 109556 - protein, 12 aa, Homo sapiens
  CDR3 for beta chain variable domain of TCR clone 54778 (TRBV10-3, TRBJ2-2)
CAIRENTGELFF

SEQ ID NO: 109557 - protein, 14 aa, Homo sapiens
  CDR3 for alpha chain variable domain of TCR clone 54779 (TRAV12-2, TRAJ13)
CAVKKTGGYRKVTF

SEQ ID NO: 109558 - protein, 15 aa, Homo sapiens
  CDR3 for beta chain variable domain of TCR clone 54779 (TRBV19, TRBJ1-6)
CASSTQGAVGSPLHF

SEQ ID NO: 109559 - protein, 12 aa, Homo sapiens
  CDR3 for alpha chain variable domain of TCR clone 54780 (TRAV27, TRAJ33)
CAGEDSNYQLIW

SEQ ID NO: 109560 - protein, 14 aa, Homo sapiens
  CDR3 for beta chain variable domain of TCR clone 54780 (TRBV12-5, TRBJ2-5)
CASGSRTHQETQYF

SEQ ID NO: 109561 - protein, 13 aa, Homo sapiens
  CDR3 for alpha chain variable domain of TCR clone 54781 (TRAV8-3, TRAJ41)
CAVGADSGYALNF

SEQ ID NO: 109562 - protein, 14 aa, Homo sapiens
  CDR3 for beta chain variable domain of TCR clone 54781 (TRBV2, TRBJ1-1)
CASRALLMNTEAFL

SEQ ID NO: 109563 - protein, 17 aa, Homo sapiens
  CDR3 for alpha chain variable domain of TCR clone 54782 (TRAV26-1, TRAJ11)
CIVRVGQSNSGYSTLTL

SEQ ID NO: 109564 - protein, 15 aa, Homo sapiens
  CDR3 for beta chain variable domain of TCR clone 54782 (TRBV27, TRBJ2-5)
CASSLIPSGGETQYF

SEQ ID NO: 109565 - protein, 14 aa, Homo sapiens
  CDR3 for alpha chain variable domain of TCR clone 54783 (TRAV12-1, TRAJ39)
CVVNFNNAGNMLTF

SEQ ID NO: 109566 - protein, 13 aa, Homo sapiens
  CDR3 for beta chain variable domain of TCR clone 54783 (TRBV7-3, TRBJ1-1)
CASSQDWGAEAFF

SEQ ID NO: 109567 - protein, 13 aa, Homo sapiens
  CDR3 for alpha chain variable domain of TCR clone 54784 (TRAV12-1, TRAJ6)
CVVFPGGSDIPTF

SEQ ID NO: 109568 - protein, 14 aa, Homo sapiens
  CDR3 for beta chain variable domain of TCR clone 54784 (TRBV20-1, TRBJ1-3)
CSASPTGAGNTIYF

SEQ ID NO: 109569 - protein, 12 aa, Homo sapiens
  CDR3 for alpha chain variable domain of TCR clone 54785 (TRAV36/DV7, TRAJ37)
CACYGNTGKLIF

SEQ ID NO: 109570 - protein, 13 aa, Homo sapiens
  CDR3 for beta chain variable domain of TCR clone 54785 (TRBV19, TRBJ1-2)
CASSVPGQDGYTF

SEQ ID NO: 109571 - protein, 14 aa, Homo sapiens
  CDR3 for alpha chain variable domain of TCR clone 54786 (TRAV21, TRAJ58)
CAVRRGRSGSRLTV

SEQ ID NO: 109572 - protein, 13 aa, Homo sapiens
  CDR3 for beta chain variable domain of TCR clone 54786 (TRBV7-2, TRBJ1-6)
CASSLKFDSPLHF

SEQ ID NO: 109573 - protein, 15 aa, Homo sapiens
  CDR3 for alpha chain variable domain of TCR clone 54787 (TRAV12-1, TRAJ44)
CVADLPTGTASKLTF

SEQ ID NO: 109574 - protein, 13 aa, Homo sapiens
  CDR3 for beta chain variable domain of TCR clone 54787 (TRBV6-5, TRBJ2-5)
CASSPQGGETHYF

SEQ ID NO: 109575 - protein, 14 aa, Homo sapiens
  CDR3 for alpha chain variable domain of TCR clone 54788 (TRAV30, TRAJ26)
CGTEIVSYGQNFVF

SEQ ID NO: 109576 - protein, 13 aa, Homo sapiens
  CDR3 for beta chain variable domain of TCR clone 54788 (TRBV19, TRBJ1-3)
CASRLFLGNTIYF

SEQ ID NO: 109577 - protein, 15 aa, Homo sapiens
  CDR3 for alpha chain variable domain of TCR clone 54789 (TRAV1-2, TRAJ30)
CAVRPHVNRDDKIIF

SEQ ID NO: 109578 - protein, 13 aa, Homo sapiens
  CDR3 for beta chain variable domain of TCR clone 54789 (TRBV4-1, TRBJ2-7)
CASSQGQAYEQYF

SEQ ID NO: 109579 - protein, 14 aa, Homo sapiens
  CDR3 for alpha chain variable domain of TCR clone 54790 (TRAV12-3, TRAJ10)
SHLPLTEGGNKLTF

SEQ ID NO: 109580 - protein, 13 aa, Homo sapiens
  CDR3 for beta chain variable domain of TCR clone 54790 (TRBV12-4, TRBJ1-1)
CASSPGTGFEAFF

SEQ ID NO: 109581 - protein, 13 aa, Homo sapiens
  CDR3 for alpha chain variable domain of TCR clone 54791 (TRAV3, TRAJ21)
CAVREPDFNKFYF

SEQ ID NO: 109582 - protein, 17 aa, Homo sapiens
  CDR3 for beta chain variable domain of TCR clone 54791 (TRBV20-1, TRBJ1-5)
CSASLSPGQGGNQPQHF

SEQ ID NO: 109583 - protein, 16 aa, Homo sapiens
  CDR3 for alpha chain variable domain of TCR clone 54792 (TRAV26-1, TRAJ36)
CIVRVSYQTGANNLFF

SEQ ID NO: 109584 - protein, 13 aa, Homo sapiens
  CDR3 for beta chain variable domain of TCR clone 54792 (TRBV5-5, TRBJ1-5)
CASSMGIGGDQHF

SEQ ID NO: 109585 - protein, 13 aa, Homo sapiens
  CDR3 for alpha chain variable domain of TCR clone 54793 (TRAV9-2, TRAJ53)
CALSGGNNYKLTF

SEQ ID NO: 109586 - protein, 17 aa, Homo sapiens
  CDR3 for beta chain variable domain of TCR clone 54793 (TRBV11-2, TRBJ2-1)
CASSLYPPGVEYNEQFF

SEQ ID NO: 109587 - protein, 14 aa, Homo sapiens
  CDR3 for alpha chain variable domain of TCR clone 54794 (TRAV23/DV6, TRAJ17)
CAASIGAAGNKLTF

SEQ ID NO: 109588 - protein, 12 aa, Homo sapiens
  CDR3 for beta chain variable domain of TCR clone 54794 (TRBV20-1, TRBJ2-5)
CSAGGAGEAQYF

SEQ ID NO: 109589 - protein, 22 aa, Homo sapiens
  CDR3 for alpha chain variable domain of TCR clone 54795 (TRAV22, TRAJ6)
CAGSGQEEATYLHLEEEPALLF

SEQ ID NO: 109590 - protein, 11 aa, Homo sapiens
  CDR3 for beta chain variable domain of TCR clone 54795 (TRBV20-1, TRBJ2-1)
CSLSSGSEQFF

SEQ ID NO: 109591 - protein, 13 aa, Homo sapiens
  CDR3 for alpha chain variable domain of TCR clone 54796 (TRAV16, TRAJ31)
CALSTHNNARLMF

SEQ ID NO: 109592 - protein, 14 aa, Homo sapiens
  CDR3 for beta chain variable domain of TCR clone 54796 (TRBV7-2, TRBJ2-5)
CASSFTQGQETQYF

SEQ ID NO: 109593 - protein, 16 aa, Homo sapiens
  CDR3 for alpha chain variable domain of TCR clone 54797 (TRAV26-1, TRAJ38)
CIIRPLNAGNNRKLIW

SEQ ID NO: 109594 - protein, 13 aa, Homo sapiens
  CDR3 for beta chain variable domain of TCR clone 54797 (TRBV18, TRBJ1-1)
CASSPNGDTEAFF

SEQ ID NO: 109595 - protein, 13 aa, Homo sapiens
  CDR3 for alpha chain variable domain of TCR clone 54798 (TRAV1-2, TRAJ12)
CAVSMDSSYKLIF

SEQ ID NO: 109596 - protein, 14 aa, Homo sapiens
  CDR3 for beta chain variable domain of TCR clone 54798 (TRBV12-4, TRBJ1-1)
CASSLGTGGTEAFF

SEQ ID NO: 109597 - protein, 15 aa, Homo sapiens
  CDR3 for alpha chain variable domain of TCR clone 54799 (TRAV17, TRAJ13)
CATDAGSGCYQKVTF

SEQ ID NO: 109598 - protein, 17 aa, Homo sapiens
  CDR3 for beta chain variable domain of TCR clone 54799 (TRBV11-2, TRBJ2-1)
CASSLYPPGVEYNEQFF

SEQ ID NO: 109599 - protein, 14 aa, Homo sapiens
  CDR3 for alpha chain variable domain of TCR clone 54800 (TRAV17, TRAJ57)
CATDPQGGPEKLVF

SEQ ID NO: 109600 - protein, 18 aa, Homo sapiens
  CDR3 for beta chain variable domain of TCR clone 54800 (TRBV6-6, TRBJ1-3)
CASSYSKWDSISGNTIYF

SEQ ID NO: 109601 - protein, 11 aa, Homo sapiens
  CDR3 for alpha chain variable domain of TCR clone 54801 (TRAV3, TRAJ23)
CAVRQGGKLIF

SEQ ID NO: 109602 - protein, 13 aa, Homo sapiens
  CDR3 for beta chain variable domain of TCR clone 54801 (TRBV7-3, TRBJ1-1)
CASSQDWGAEAFF

SEQ ID NO: 109603 - protein, 16 aa, Homo sapiens
  CDR3 for alpha chain variable domain of TCR clone 54802 (TRAV30, TRAJ24)
CGTEIVDADSWGKFPF

SEQ ID NO: 109604 - protein, 13 aa, Homo sapiens
  CDR3 for beta chain variable domain of TCR clone 54802 (TRBV18, TRBJ1-2)
CASSASATEGYTF

SEQ ID NO: 109605 - protein, 17 aa, Homo sapiens
  CDR3 for alpha chain variable domain of TCR clone 54803 (TRAV3, TRAJ6)
CAVRDGPRAGGSYIPTF

SEQ ID NO: 109606 - protein, 16 aa, Homo sapiens
  CDR3 for beta chain variable domain of TCR clone 54803 (TRBV2, TRBJ2-1)
CASSVGGSLSYNEQFF

SEQ ID NO: 109607 - protein, 13 aa, Homo sapiens
  CDR3 for alpha chain variable domain of TCR clone 54804 (TRAV8-3, TRAJ28)
CAVGAVGSYQLTF

SEQ ID NO: 109608 - protein, 19 aa, Homo sapiens
  CDR3 for beta chain variable domain of TCR clone 54804 (TRBV19, TRBJ2-5)
CASSIGQVTDFFLGETQYF

SEQ ID NO: 109609 - protein, 11 aa, Homo sapiens
  CDR3 for alpha chain variable domain of TCR clone 54805 (TRAV17, TRAJ31)
CATDRIARLMF

SEQ ID NO: 109610 - protein, 14 aa, Homo sapiens
  CDR3 for beta chain variable domain of TCR clone 54805 (TRBV4-1, TRBJ2-2)
CASSQAVNTGELFF

SEQ ID NO: 109611 - protein, 13 aa, Homo sapiens
  CDR3 for alpha chain variable domain of TCR clone 54806 (TRAV13-2, TRAJ13)
CAERPGGYQKVTF

SEQ ID NO: 109612 - protein, 14 aa, Homo sapiens
  CDR3 for beta chain variable domain of TCR clone 54806 (TRBV9, TRBJ2-7)
CASSVGVSSYGQYF

SEQ ID NO: 109613 - protein, 16 aa, Homo sapiens
  CDR3 for alpha chain variable domain of TCR clone 54807 (TRAV30, TRAJ24)
CGTEIVDADSWGKFQF

SEQ ID NO: 109614 - protein, 14 aa, Homo sapiens
  CDR3 for beta chain variable domain of TCR clone 54807 (TRBV7-7, TRBJ2-2)
CATRQDSDTGELFF

SEQ ID NO: 109615 - protein, 18 aa, Homo sapiens
  CDR3 for alpha chain variable domain of TCR clone 54808 (TRAV21, TRAJ52)
CAVRPAPAGGTSYGKLTF

SEQ ID NO: 109616 - protein, 17 aa, Homo sapiens
  CDR3 for beta chain variable domain of TCR clone 54808 (TRBV13, TRBJ2-3)
CASSLSRVAGGRNTQYF

SEQ ID NO: 109617 - protein, 11 aa, Homo sapiens
  CDR3 for alpha chain variable domain of TCR clone 54809 (TRAV21, TRAJ34)
CAVTNTDKLIF

SEQ ID NO: 109618 - protein, 12 aa, Homo sapiens
  CDR3 for beta chain variable domain of TCR clone 54809 (TRBV7-8, TRBJ2-7)
CASSLGDREQYF

SEQ ID NO: 109619 - protein, 13 aa, Homo sapiens
  CDR3 for alpha chain variable domain of TCR clone 54810 (TRAV12-3, TRAJ33)
CAMSVNSNYQLIW

SEQ ID NO: 109620 - protein, 12 aa, Homo sapiens
  CDR3 for beta chain variable domain of TCR clone 54810 (TRBV11-2, TRBJ2-1)
CASSPGNNEQFF

SEQ ID NO: 109621 - protein, 13 aa, Homo sapiens
  CDR3 for alpha chain variable domain of TCR clone 54811 (TRAV3, TRAJ29)
CAVRDILDTPLVF

SEQ ID NO: 109622 - protein, 14 aa, Homo sapiens
  CDR3 for beta chain variable domain of TCR clone 54811 (TRBV27, TRBJ2-1)
CASSATGGYNEQFF

SEQ ID NO: 109623 - protein, 17 aa, Homo sapiens
  CDR3 for alpha chain variable domain of TCR clone 54812 (TRAV27, TRAJ42)
CAERVIYYGGSQGNIIF

SEQ ID NO: 109624 - protein, 14 aa, Homo sapiens
  CDR3 for beta chain variable domain of TCR clone 54812 (TRBV6-6, TRBJ2-3)
CASRLQREADTQYF

SEQ ID NO: 109625 - protein, 17 aa, Homo sapiens
  CDR3 for alpha chain variable domain of TCR clone 54813 (TRAV3, TRAJ7)
CAVRDMSPLEGTTDSLL

SEQ ID NO: 109626 - protein, 16 aa, Homo sapiens
  CDR3 for beta chain variable domain of TCR clone 54813 (TRBV19, TRBJ2-1)
CASSKAGPSSYNEQFF

SEQ ID NO: 109627 - protein, 14 aa, Homo sapiens
  CDR3 for alpha chain variable domain of TCR clone 54814 (TRAV21, TRAJ35)
CAVMPIGFGNVLHC

SEQ ID NO: 109628 - protein, 12 aa, Homo sapiens
  CDR3 for beta chain variable domain of TCR clone 54814 (TRBV7-9, TRBJ2-7)
SASSIKREEQYF

SEQ ID NO: 109629 - protein, 15 aa, Homo sapiens
  CDR3 for alpha chain variable domain of TCR clone 54815 (TRAV26-1, TRAJ29)
CIVRVEGSGNTPLAF

SEQ ID NO: 109630 - protein, 14 aa, Homo sapiens
  CDR3 for beta chain variable domain of TCR clone 54815 (TRBV18, TRBJ2-5)
CASSPEVSQETQYF

SEQ ID NO: 109631 - protein, 14 aa, Homo sapiens
  CDR3 for alpha chain variable domain of TCR clone 54816 (TRAV17, TRAJ22)
CATVISGSARQLAF

SEQ ID NO: 109632 - protein, 14 aa, Homo sapiens
  CDR3 for beta chain variable domain of TCR clone 54816 (TRBV12-4, TRBJ2-5)
CASSLGDRGETQYF

SEQ ID NO: 109633 - protein, 14 aa, Homo sapiens
  CDR3 for alpha chain variable domain of TCR clone 54817 (TRAV13-2, TRAJ17)
CAENGKAAGNKLTF

SEQ ID NO: 109634 - protein, 15 aa, Homo sapiens
  CDR3 for beta chain variable domain of TCR clone 54817 (TRBV6-3, TRBJ1-5)
CASSPEVGFNQPQHF

SEQ ID NO: 109635 - protein, 10 aa, Homo sapiens
  CDR3 for alpha chain variable domain of TCR clone 54818 (TRAV1-2, TRAJ20)
CALNDYKFSF

SEQ ID NO: 109636 - protein, 16 aa, Homo sapiens
  CDR3 for beta chain variable domain of TCR clone 54818 (TRBV20-1, TRBJ1-1)
CSARALTQGMNTEAFF

SEQ ID NO: 109637 - protein, 15 aa, Homo sapiens
  CDR3 for alpha chain variable domain of TCR clone 54819 (TRAV4, TRAJ8)
CLVGEQHTGFQKLVL

SEQ ID NO: 109638 - protein, 15 aa, Homo sapiens
  CDR3 for beta chain variable domain of TCR clone 54819 (TRBV7-9, TRBJ2-5)
CASSNRDYLQETQYF

SEQ ID NO: 109639 - protein, 11 aa, Homo sapiens
  CDR3 for alpha chain variable domain of TCR clone 54820 (TRAV21, TRAJ34)
RAHYNTDKLIF

SEQ ID NO: 109640 - protein, 13 aa, Homo sapiens
  CDR3 for beta chain variable domain of TCR clone 54820 (TRBV7-6, TRBJ1-2)
CASSLVADYGYTF

SEQ ID NO: 109641 - protein, 13 aa, Homo sapiens
  CDR3 for alpha chain variable domain of TCR clone 54821 (TRAV21, TRAJ27)
CAARPGNAGKSTF

SEQ ID NO: 109642 - protein, 15 aa, Homo sapiens
  CDR3 for beta chain variable domain of TCR clone 54821 (TRBV11-3, TRBJ2-7)
CASSPEPASSYEQYF

SEQ ID NO: 109643 - protein, 21 aa, Homo sapiens
  CDR3 for alpha chain variable domain of TCR clone 54822 (TRAV12-1, TRAJ37)
CVVNEGLWQHRQTNLWARDNF

SEQ ID NO: 109644 - protein, 12 aa, Homo sapiens
  CDR3 for beta chain variable domain of TCR clone 54822 (TRBV20-1, TRBJ1-2)
CSAPGFNYGYTF

SEQ ID NO: 109645 - protein, 15 aa, Homo sapiens
  CDR3 for alpha chain variable domain of TCR clone 54823 (TRAV26-1, TRAJ40)
CIFRVTTSGTYKYIF

SEQ ID NO: 109646 - protein, 12 aa, Homo sapiens
  CDR3 for beta chain variable domain of TCR clone 54823 (TRBV7-9, TRBJ1-4)
CASSTDREKLFF

SEQ ID NO: 109647 - protein, 16 aa, Homo sapiens
  CDR3 for alpha chain variable domain of TCR clone 54824 (TRAV3, TRAJ37)
CAVRGKGSGNTGKLIF

SEQ ID NO: 109648 - protein, 12 aa, Homo sapiens
  CDR3 for beta chain variable domain of TCR clone 54824 (TRBV11-2, TRBJ2-7)
CASSLPAYEQYF

SEQ ID NO: 109649 - protein, 13 aa, Homo sapiens
  CDR3 for alpha chain variable domain of TCR clone 54825 (TRAV21, TRAJ11)
CAVPNSGYSTLTF

SEQ ID NO: 109650 - protein, 12 aa, Homo sapiens
  CDR3 for beta chain variable domain of TCR clone 54825 (TRBV12-4, TRBJ2-7)
CASSLGGYEQYF

SEQ ID NO: 109651 - protein, 16 aa, Homo sapiens
  CDR3 for alpha chain variable domain of TCR clone 54826 (TRAV12-1, TRAJ12)
CVVNTLLTDSSYKLIF

SEQ ID NO: 109652 - protein, 13 aa, Homo sapiens
  CDR3 for beta chain variable domain of TCR clone 54826 (TRBV11-2, TRBJ2-1)
CASSSEAYNEQFF

SEQ ID NO: 109653 - protein, 12 aa, Homo sapiens
  CDR3 for alpha chain variable domain of TCR clone 54827 (TRAV13-1, TRAJ21)
CAAKEGFNKFYF

SEQ ID NO: 109654 - protein, 14 aa, Homo sapiens
  CDR3 for beta chain variable domain of TCR clone 54827 (TRBV9, TRBJ2-7)
CASSVGVGSYEQYF

SEQ ID NO: 109655 - protein, 14 aa, Homo sapiens
  CDR3 for alpha chain variable domain of TCR clone 54828 (TRAV17, TRAJ57)
CATDPQGGSEKPVF

SEQ ID NO: 109656 - protein, 14 aa, Homo sapiens
  CDR3 for beta chain variable domain of TCR clone 54828 (TRBV7-8, TRBJ2-7)
CASSPRDRVYEQYF

SEQ ID NO: 109657 - protein, 12 aa, Homo sapiens
  CDR3 for alpha chain variable domain of TCR clone 54829 (TRAV4, TRAJ26)
CLVGDYGQNFVF

SEQ ID NO: 109658 - protein, 17 aa, Homo sapiens
  CDR3 for beta chain variable domain of TCR clone 54829 (TRBV11-2, TRBJ2-1)
CASSLYPPGVEYNEQFF

SEQ ID NO: 109659 - protein, 14 aa, Homo sapiens
  CDR3 for alpha chain variable domain of TCR clone 54830 (TRAV1-2, TRAJ16)
CAVNRFSDGRKLLF

SEQ ID NO: 109660 - protein, 13 aa, Homo sapiens
  CDR3 for beta chain variable domain of TCR clone 54830 (TRBV7-9, TRBJ1-2)
CASSLKQNYGYTF

SEQ ID NO: 109661 - protein, 10 aa, Homo sapiens
  CDR3 for alpha chain variable domain of TCR clone 54831 (TRAV12-1, TRAJ43)
CVVHNNDMRF

SEQ ID NO: 109662 - protein, 13 aa, Homo sapiens
  CDR3 for beta chain variable domain of TCR clone 54831 (TRBV7-7, TRBJ2-5)
CASSRSGQETQYF

SEQ ID NO: 109663 - protein, 14 aa, Homo sapiens
  CDR3 for alpha chain variable domain of TCR clone 54832 (TRAV8-6, TRAJ53)
CAVSDIGSNYKLTF

SEQ ID NO: 109664 - protein, 12 aa, Homo sapiens
  CDR3 for beta chain variable domain of TCR clone 54832 (TRBV11-2, TRBJ2-2)
CASSLGGGELFF

SEQ ID NO: 109665 - protein, 13 aa, Homo sapiens
  CDR3 for alpha chain variable domain of TCR clone 54833 (TRAV25, TRAJ10)
CAGRTGGGDKLTF

SEQ ID NO: 109666 - protein, 15 aa, Homo sapiens
  CDR3 for beta chain variable domain of TCR clone 54833 (TRBV19, TRBJ2-1)
CASSSPGVPLDEQFF

SEQ ID NO: 109667 - protein, 11 aa, Homo sapiens
  CDR3 for alpha chain variable domain of TCR clone 54834 (TRAV1-2, TRAJ8)
CAVSSFQKLAF

SEQ ID NO: 109668 - protein, 16 aa, Homo sapiens
  CDR3 for beta chain variable domain of TCR clone 54834 (TRBV7-3, TRBJ2-2)
CASSLKRGTLSGELFF

SEQ ID NO: 109669 - protein, 14 aa, Homo sapiens
  CDR3 for alpha chain variable domain of TCR clone 54835 (TRAV1-2, TRAJ16)
CAVNRFSDGQKLLF

SEQ ID NO: 109670 - protein, 14 aa, Homo sapiens
  CDR3 for beta chain variable domain of TCR clone 54835 (TRBV18, TRBJ2-7)
CASSPRGGAYEQYL

SEQ ID NO: 109671 - protein, 14 aa, Homo sapiens
  CDR3 for alpha chain variable domain of TCR clone 54836 (TRAV12-2, TRAJ17)
CAVLFKAAGNKLTF

SEQ ID NO: 109672 - protein, 17 aa, Homo sapiens
  CDR3 for beta chain variable domain of TCR clone 54836 (TRBV20-1, TRBJ2-2)
CSASGSGLGGLTGELFF

SEQ ID NO: 109673 - protein, 13 aa, Homo sapiens
  CDR3 for alpha chain variable domain of TCR clone 54837 (TRAV16, TRAJ31)
CALSAHNSARLMF

SEQ ID NO: 109674 - protein, 17 aa, Homo sapiens
  CDR3 for beta chain variable domain of TCR clone 54837 (TRBV12-4, TRBJ2-1)
CASSPGLAGGRINELFF

SEQ ID NO: 109675 - protein, 13 aa, Homo sapiens
  CDR3 for alpha chain variable domain of TCR clone 54838 (TRAV35, TRAJ42)
CAGFPGSQGNLIL

SEQ ID NO: 109676 - protein, 14 aa, Homo sapiens
  CDR3 for beta chain variable domain of TCR clone 54838 (TRBV19, TRBJ2-1)
CASPTFVLSGEQFF

SEQ ID NO: 109677 - protein, 13 aa, Homo sapiens
  CDR3 for alpha chain variable domain of TCR clone 54839 (TRAV29/DV5, TRAJ31)
CAASRNNNARLMF

SEQ ID NO: 109678 - protein, 14 aa, Homo sapiens
  CDR3 for beta chain variable domain of TCR clone 54839 (TRBV13, TRBJ2-7)
CASSLKGASYEQYF

SEQ ID NO: 109679 - protein, 11 aa, Homo sapiens
  CDR3 for alpha chain variable domain of TCR clone 54840 (TRAV21, TRAJ49)
CAVSFGNQFYF

SEQ ID NO: 109680 - protein, 15 aa, Homo sapiens
  CDR3 for beta chain variable domain of TCR clone 54840 (TRBV7-9, TRBJ1-4)
CASSARTGGNEKLFF

SEQ ID NO: 109681 - protein, 12 aa, Homo sapiens
  CDR3 for alpha chain variable domain of TCR clone 54841 (TRAV3, TRAJ39)
CAGIEWSNMLTF

SEQ ID NO: 109682 - protein, 14 aa, Homo sapiens
  CDR3 for beta chain variable domain of TCR clone 54841 (TRBV7-8, TRBJ2-3)
CASSFPDGQDTQYF

SEQ ID NO: 109683 - protein, 16 aa, Homo sapiens
  CDR3 for alpha chain variable domain of TCR clone 54842 (TRAV30, TRAJ24)
CGTEIVDAYSWGKFQF

SEQ ID NO: 109684 - protein, 18 aa, Homo sapiens
  CDR3 for beta chain variable domain of TCR clone 54842 (TRBV7-9, TRBJ2-7)
CASSLTTSGSRTWYEQYF

SEQ ID NO: 109685 - protein, 16 aa, Homo sapiens
  CDR3 for alpha chain variable domain of TCR clone 54843 (TRAV26-1, TRAJ6)
CIVRVPRTGGSYIPTF

SEQ ID NO: 109686 - protein, 15 aa, Homo sapiens
  CDR3 for beta chain variable domain of TCR clone 54843 (TRBV10-3, TRBJ2-7)
CAISDMTALYYEQYF

SEQ ID NO: 109687 - protein, 16 aa, Homo sapiens
  CDR3 for alpha chain variable domain of TCR clone 54844 (TRAV3, TRAJ37)
CAVRPHGSGNTGKLIF

SEQ ID NO: 109688 - protein, 13 aa, Homo sapiens
  CDR3 for beta chain variable domain of TCR clone 54844 (TRBV7-2, TRBJ2-2)
CASSLAVTGELFF

SEQ ID NO: 109689 - protein, 18 aa, Homo sapiens
  CDR3 for alpha chain variable domain of TCR clone 54845 (TRAV26-1, TRAJ23)
CIVRVGLEVWNQGGKLIF

SEQ ID NO: 109690 - protein, 14 aa, Homo sapiens
  CDR3 for beta chain variable domain of TCR clone 54845 (TRBV11-2, TRBJ2-3)
CASSRLARTDTQYF

SEQ ID NO: 109691 - protein, 18 aa, Homo sapiens
  CDR3 for alpha chain variable domain of TCR clone 54846 (TRAV12-3, TRAJ52)
CAMSRTNAGGTSYGKLTF

SEQ ID NO: 109692 - protein, 17 aa, Homo sapiens
  CDR3 for beta chain variable domain of TCR clone 54846 (TRBV7-3, TRBJ2-3)
CAISLMKRMRGADTQYF

SEQ ID NO: 109693 - protein, 16 aa, Homo sapiens
  CDR3 for alpha chain variable domain of TCR clone 54847 (TRAV12-2, TRAJ32)
CAVNLGQGGAKNKLIF

SEQ ID NO: 109694 - protein, 15 aa, Homo sapiens
  CDR3 for beta chain variable domain of TCR clone 54847 (TRBV20-1, TRBJ2-7)
CSARGPLAGGREQYF

SEQ ID NO: 109695 - protein, 14 aa, Homo sapiens
  CDR3 for alpha chain variable domain of TCR clone 54848 (TRAV8-3, TRAJ4)
CAVGAAGGYNKLIF

SEQ ID NO: 109696 - protein, 20 aa, Homo sapiens
  CDR3 for beta chain variable domain of TCR clone 54848 (TRBV28, TRBJ2-1)
CASTPIGRSPGLAGGNEQFF

SEQ ID NO: 109697 - protein, 15 aa, Homo sapiens
  CDR3 for alpha chain variable domain of TCR clone 54849 (TRAV3, TRAJ5)
CAVRDLDTGRRALTF

SEQ ID NO: 109698 - protein, 13 aa, Homo sapiens
  CDR3 for beta chain variable domain of TCR clone 54849 (TRBV12-4, TRBJ2-7)
CASSPTETYAQYF

SEQ ID NO: 109699 - protein, 14 aa, Homo sapiens
  CDR3 for alpha chain variable domain of TCR clone 54850 (TRAV13-1, TRAJ44)
CAAKATGAASKLTF

SEQ ID NO: 109700 - protein, 16 aa, Homo sapiens
  CDR3 for beta chain variable domain of TCR clone 54850 (TRBV7-9, TRBJ2-6)
CASSLKGPLRANVLTF

SEQ ID NO: 109701 - protein, 15 aa, Homo sapiens
  CDR3 for alpha chain variable domain of TCR clone 54851 (TRAV3, TRAJ5)
CAVRDRKTGRRALTF

SEQ ID NO: 109702 - protein, 15 aa, Homo sapiens
  CDR3 for beta chain variable domain of TCR clone 54851 (TRBV7-8, TRBJ2-1)
YASSLADSLYNEQFF

SEQ ID NO: 109703 - protein, 14 aa, Homo sapiens
  CDR3 for alpha chain variable domain of TCR clone 54852 (TRAV9-2, TRAJ39)
CALYIYNAGNMLTF

SEQ ID NO: 109704 - protein, 14 aa, Homo sapiens
  CDR3 for beta chain variable domain of TCR clone 54852 (TRBV27, TRBJ1-5)
CQQSRDRVRSAQHF

SEQ ID NO: 109705 - protein, 12 aa, Homo sapiens
  CDR3 for alpha chain variable domain of TCR clone 54853 (TRAV8-3, TRAJ20)
CAVDFNNYKLSF

SEQ ID NO: 109706 - protein, 13 aa, Homo sapiens
  CDR3 for beta chain variable domain of TCR clone 54853 (TRBV5-7, TRBJ2-3)
CASSLGRTDTQYF

SEQ ID NO: 109707 - protein, 15 aa, Homo sapiens
  CDR3 for alpha chain variable domain of TCR clone 54854 (TRAV3, TRAJ17)
CAVSPKEAAGNKLTF

SEQ ID NO: 109708 - protein, 12 aa, Homo sapiens
  CDR3 for beta chain variable domain of TCR clone 54854 (TRBV7-9, TRBJ1-6)
CASSLMTSTLHF

SEQ ID NO: 109709 - protein, 14 aa, Homo sapiens
  CDR3 for alpha chain variable domain of TCR clone 54855 (TRAV12-3, TRAJ5)
CAMTWDTGRRALTF

SEQ ID NO: 109710 - protein, 14 aa, Homo sapiens
  CDR3 for beta chain variable domain of TCR clone 54855 (TRBV10-2, TRBJ1-5)
CASSSTGRNQPRHF

SEQ ID NO: 109711 - protein, 14 aa, Homo sapiens
  CDR3 for alpha chain variable domain of TCR clone 54856 (TRAV21, TRAJ37)
CAVKGSSNTGKLIF

SEQ ID NO: 109712 - protein, 14 aa, Homo sapiens
  CDR3 for beta chain variable domain of TCR clone 54856 (TRBV7-2, TRBJ2-1)
CSSSRGGARNEQFF

SEQ ID NO: 109713 - protein, 14 aa, Homo sapiens
  CDR3 for alpha chain variable domain of TCR clone 54857 (TRAV12-2, TRAJ13)
CAVKKTGGYQKVTF

SEQ ID NO: 109714 - protein, 14 aa, Homo sapiens
  CDR3 for beta chain variable domain of TCR clone 54857 (TRBV9, TRBJ1-2)
CASSVSTRSYGYTF

SEQ ID NO: 109715 - protein, 18 aa, Homo sapiens
  CDR3 for alpha chain variable domain of TCR clone 54858 (TRAV9-2, TRAJ52)
CALSRHNAGGTSYRKLTF

SEQ ID NO: 109716 - protein, 13 aa, Homo sapiens
  CDR3 for beta chain variable domain of TCR clone 54858 (TRBV7-9, TRBJ1-2)
CASSLKQNYGYTF

SEQ ID NO: 109717 - protein, 13 aa, Homo sapiens
  CDR3 for alpha chain variable domain of TCR clone 54859 (TRAV27, TRAJ45)
CRSSGGGADGLTF

SEQ ID NO: 109718 - protein, 13 aa, Homo sapiens
  CDR3 for beta chain variable domain of TCR clone 54859 (TRBV19, TRBJ1-1)
CASSPQMNTEAFF

SEQ ID NO: 109719 - protein, 13 aa, Homo sapiens
  CDR3 for alpha chain variable domain of TCR clone 54860 (TRAV17, TRAJ9)
CATDYTGGFKTTF

SEQ ID NO: 109720 - protein, 14 aa, Homo sapiens
  CDR3 for beta chain variable domain of TCR clone 54860 (TRBV19, TRBJ2-5)
CASSMTGRQETQYF

SEQ ID NO: 109721 - protein, 15 aa, Homo sapiens
  CDR3 for alpha chain variable domain of TCR clone 54861 (TRAV35, TRAJ40)
CAGQLGTSGTYKYIF

SEQ ID NO: 109722 - protein, 13 aa, Homo sapiens
  CDR3 for beta chain variable domain of TCR clone 54861 (TRBV7-3, TRBJ2-1)
CQQLAGGTNERFF

SEQ ID NO: 109723 - protein, 16 aa, Homo sapiens
  CDR3 for alpha chain variable domain of TCR clone 54862 (TRAV30, TRAJ24)
CGTEIVDADSWGKFQF

SEQ ID NO: 109724 - protein, 13 aa, Homo sapiens
  CDR3 for beta chain variable domain of TCR clone 54862 (TRBV19, TRBJ2-7)
CASSPRQSYEQYF

SEQ ID NO: 109725 - protein, 13 aa, Homo sapiens
  CDR3 for alpha chain variable domain of TCR clone 54863 (TRAV12-1, TRAJ39)
CVVNYNAGNMLTF

SEQ ID NO: 109726 - protein, 12 aa, Homo sapiens
  CDR3 for beta chain variable domain of TCR clone 54863 (TRBV5-6, TRBJ1-1)
CASSLGRGKAFF

SEQ ID NO: 109727 - protein, 13 aa, Homo sapiens
  CDR3 for alpha chain variable domain of TCR clone 54864 (TRAV8-6, TRAJ54)
CAVSDQGAQKLVF

SEQ ID NO: 109728 - protein, 17 aa, Homo sapiens
  CDR3 for beta chain variable domain of TCR clone 54864 (TRBV4-3, TRBJ2-7)
CASSQDLIGQGAYEQYF

SEQ ID NO: 109729 - protein, 17 aa, Homo sapiens
  CDR3 for alpha chain variable domain of TCR clone 54865 (TRAV23/DV6, TRAJ57)
CAASSTLSQGGSEKLVF

SEQ ID NO: 109730 - protein, 14 aa, Homo sapiens
  CDR3 for beta chain variable domain of TCR clone 54865 (TRBV25-1, TRBJ1-1)
CASTPLGGNTEAFF

SEQ ID NO: 109731 - protein, 14 aa, Homo sapiens
  CDR3 for alpha chain variable domain of TCR clone 54866 (TRAV26-1, TRAJ21)
RIVRVVYNFNKFYF

SEQ ID NO: 109732 - protein, 11 aa, Homo sapiens
  CDR3 for beta chain variable domain of TCR clone 54866 (TRBV5-6, TRBJ2-5)
CASSLERTQYF

SEQ ID NO: 109733 - protein, 15 aa, Homo sapiens
  CDR3 for alpha chain variable domain of TCR clone 54867 (TRAV21, TRAJ53)
CATLNSGGSNYKLTL

SEQ ID NO: 109734 - protein, 16 aa, Homo sapiens
  CDR3 for beta chain variable domain of TCR clone 54867 (TRBV20-1, TRBJ1-4)
CSAPGQGLLTNEKLFF

SEQ ID NO: 109735 - protein, 16 aa, Homo sapiens
  CDR3 for alpha chain variable domain of TCR clone 54868 (TRAV23/DV6, TRAJ9)
CAASIGGNTGGFKTIF

SEQ ID NO: 109736 - protein, 13 aa, Homo sapiens
  CDR3 for beta chain variable domain of TCR clone 54868 (TRBV7-3, TRBJ1-1)
CASSQDWGAEAFF

SEQ ID NO: 109737 - protein, 15 aa, Homo sapiens
  CDR3 for alpha chain variable domain of TCR clone 54869 (TRAV13-1, TRAJ50)
CAAKGSETSYDKVIF

SEQ ID NO: 109738 - protein, 15 aa, Homo sapiens
  CDR3 for beta chain variable domain of TCR clone 54869 (TRBV9, TRBJ1-6)
CASSVAGTGDSPLHF

SEQ ID NO: 109739 - protein, 12 aa, Homo sapiens
  CDR3 for alpha chain variable domain of TCR clone 54870 (TRAV12-2, TRAJ10)
WGVTGGGNKLTF

SEQ ID NO: 109740 - protein, 11 aa, Homo sapiens
  CDR3 for beta chain variable domain of TCR clone 54870 (TRBV19, TRBJ1-1)
CASSIGSEAFF

SEQ ID NO: 109741 - protein, 16 aa, Homo sapiens
  CDR3 for alpha chain variable domain of TCR clone 54871 (TRAV30, TRAJ24)
CGTEIVDADSWGKFQF

SEQ ID NO: 109742 - protein, 16 aa, Homo sapiens
  CDR3 for beta chain variable domain of TCR clone 54871 (TRBV11-2, TRBJ1-2)
CASSPSGREANYGYTF

SEQ ID NO: 109743 - protein, 14 aa, Homo sapiens
  CDR3 for alpha chain variable domain of TCR clone 54872 (TRAV2, TRAJ37)
CAVDFTSNTGKLIF

SEQ ID NO: 109744 - protein, 13 aa, Homo sapiens
  CDR3 for beta chain variable domain of TCR clone 54872 (TRBV4-1, TRBJ2-2)
RASSQENTGELFF

SEQ ID NO: 109745 - protein, 14 aa, Homo sapiens
  CDR3 for alpha chain variable domain of TCR clone 54873 (TRAV26-1, TRAJ34)
CIVRVAYNTDKPIF

SEQ ID NO: 109746 - protein, 14 aa, Homo sapiens
  CDR3 for beta chain variable domain of TCR clone 54873 (TRBV20-1, TRBJ2-7)
CSAWTALSSYEQYF

SEQ ID NO: 109747 - protein, 15 aa, Homo sapiens
  CDR3 for alpha chain variable domain of TCR clone 54874 (TRAV34, TRAJ38)
CGADFTPGNNRKLIW

SEQ ID NO: 109748 - protein, 16 aa, Homo sapiens
  CDR3 for beta chain variable domain of TCR clone 54874 (TRBV12-5, TRBJ2-5)
CASGPQTSGNQETQYF

SEQ ID NO: 109749 - protein, 12 aa, Homo sapiens
  CDR3 for alpha chain variable domain of TCR clone 54875 (TRAV8-3, TRAJ20)
CAVDFNDYKLSL

SEQ ID NO: 109750 - protein, 12 aa, Homo sapiens
  CDR3 for beta chain variable domain of TCR clone 54875 (TRBV29-1, TRBJ2-3)
CSVTGGADTQYF

SEQ ID NO: 109751 - protein, 15 aa, Homo sapiens
  CDR3 for alpha chain variable domain of TCR clone 54876 (TRAV35, TRAJ50)
RAGQLRKTSYDKVIF

SEQ ID NO: 109752 - protein, 12 aa, Homo sapiens
  CDR3 for beta chain variable domain of TCR clone 54876 (TRBV5-1, TRBJ2-5)
CASSLGLETQYF

SEQ ID NO: 109753 - protein, 14 aa, Homo sapiens
  CDR3 for alpha chain variable domain of TCR clone 54877 (TRAV12-1, TRAJ17)
CVVNYKAAGNKLTF

SEQ ID NO: 109754 - protein, 12 aa, Homo sapiens
  CDR3 for beta chain variable domain of TCR clone 54877 (TRBV7-9, TRBJ2-7)
CASSIKREEQYF

SEQ ID NO: 109755 - protein, 13 aa, Homo sapiens
  CDR3 for alpha chain variable domain of TCR clone 54878 (TRAV35, TRAJ36)
CARPRIGANNLFF

SEQ ID NO: 109756 - protein, 15 aa, Homo sapiens
  CDR3 for beta chain variable domain of TCR clone 54878 (TRBV28, TRBJ2-5)
CASSPPWSYQETQHF

SEQ ID NO: 109757 - protein, 13 aa, Homo sapiens
  CDR3 for alpha chain variable domain of TCR clone 54879 (TRAV12-2, TRAJ37)
CAGGSGNTGKLIF

SEQ ID NO: 109758 - protein, 14 aa, Homo sapiens
  CDR3 for beta chain variable domain of TCR clone 54879 (TRBV6-1, TRBJ2-6)
CASQRGAGANVLTF

SEQ ID NO: 109759 - protein, 14 aa, Homo sapiens
  CDR3 for alpha chain variable domain of TCR clone 54880 (TRAV8-4, TRAJ48)
CAVSETFGNEKLTF

SEQ ID NO: 109760 - protein, 19 aa, Homo sapiens
  CDR3 for beta chain variable domain of TCR clone 54880 (TRBV7-2, TRBJ2-3)
CASSFLSRNWGVGTDTQYF

SEQ ID NO: 109761 - protein, 11 aa, Homo sapiens
  CDR3 for alpha chain variable domain of TCR clone 54881 (TRAV12-1, TRAJ43)
CVEYDNNDIRF

SEQ ID NO: 109762 - protein, 16 aa, Homo sapiens
  CDR3 for beta chain variable domain of TCR clone 54881 (TRBV5-4, TRBJ2-1)
CASSLVGSGQDNEQFF

SEQ ID NO: 109763 - protein, 16 aa, Homo sapiens
  CDR3 for alpha chain variable domain of TCR clone 54882 (TRAV4, TRAJ9)
CLVGDPNRPGGFKTIF

SEQ ID NO: 109764 - protein, 16 aa, Homo sapiens
  CDR3 for beta chain variable domain of TCR clone 54882 (TRBV28, TRBJ1-4)
CASSTPYRGRSEKLFF

SEQ ID NO: 109765 - protein, 13 aa, Homo sapiens
  CDR3 for alpha chain variable domain of TCR clone 54883 (TRAV16, TRAJ34)
CALTGYNTDKLIL

SEQ ID NO: 109766 - protein, 13 aa, Homo sapiens
  CDR3 for beta chain variable domain of TCR clone 54883 (TRBV6-1, TRBJ2-1)
CASREDGGHEQFF

SEQ ID NO: 109767 - protein, 11 aa, Homo sapiens
  CDR3 for alpha chain variable domain of TCR clone 54884 (TRAV2, TRAJ33)
CAVDSNYQLIW

SEQ ID NO: 109768 - protein, 19 aa, Homo sapiens
  CDR3 for beta chain variable domain of TCR clone 54884 (TRBV5-1, TRBJ2-3)
CASSLWLAGGITTTDTQYF

SEQ ID NO: 109769 - protein, 15 aa, Homo sapiens
  CDR3 for alpha chain variable domain of TCR clone 54885 (TRAV23/DV6, TRAJ12)
CAAIDLGAMDRSYKL

SEQ ID NO: 109770 - protein, 12 aa, Homo sapiens
  CDR3 for beta chain variable domain of TCR clone 54885 (TRBV10-3, TRBJ2-2)
CAIRENTGELFF

SEQ ID NO: 109771 - protein, 14 aa, Homo sapiens
  CDR3 for alpha chain variable domain of TCR clone 54886 (TRAV9-2, TRAJ39)
CALYIYNAGNMLTF

SEQ ID NO: 109772 - protein, 18 aa, Homo sapiens
  CDR3 for beta chain variable domain of TCR clone 54886 (TRBV7-9, TRBJ2-7)
CASSLTTSGSRTWYEQYF

SEQ ID NO: 109773 - protein, 16 aa, Homo sapiens
  CDR3 for alpha chain variable domain of TCR clone 54887 (TRAV13-2, TRAJ22)
CAENRGSSGSARQLTF

SEQ ID NO: 109774 - protein, 12 aa, Homo sapiens
  CDR3 for beta chain variable domain of TCR clone 54887 (TRBV11-2, TRBJ2-2)
CASSLGGGELFF

SEQ ID NO: 109775 - protein, 15 aa, Homo sapiens
  CDR3 for alpha chain variable domain of TCR clone 54888 (TRAV34, TRAJ38)
CGADFTPGNNRKLIW

SEQ ID NO: 109776 - protein, 16 aa, Homo sapiens
  CDR3 for beta chain variable domain of TCR clone 54888 (TRBV12-4, TRBJ1-5)
CASSRPVGGSNQPQHF

SEQ ID NO: 109777 - protein, 18 aa, Homo sapiens
  CDR3 for alpha chain variable domain of TCR clone 54889 (TRAV17, TRAJ57)
CFLLLCYGPPGGSEKLVF

SEQ ID NO: 109778 - protein, 18 aa, Homo sapiens
  CDR3 for beta chain variable domain of TCR clone 54889 (TRBV6-6, TRBJ1-3)
CASSYSKWDSISGNTIYF

SEQ ID NO: 109779 - protein, 17 aa, Homo sapiens
  CDR3 for alpha chain variable domain of TCR clone 54890 (TRAV3, TRAJ6)
CAVRDGPRAGGSYIPTF

SEQ ID NO: 109780 - protein, 16 aa, Homo sapiens
  CDR3 for beta chain variable domain of TCR clone 54890 (TRBV7-2, TRBJ2-2)
CASSLKRGTLSGELFF

SEQ ID NO: 109781 - protein, 11 aa, Homo sapiens
  CDR3 for alpha chain variable domain of TCR clone 54891 (TRAV12-2, TRAJ21)
CAVEGFNKFYF

SEQ ID NO: 109782 - protein, 15 aa, Homo sapiens
  CDR3 for beta chain variable domain of TCR clone 54891 (TRBV20-1, TRBJ1-5)
CSASGRGDLGQPQHF

SEQ ID NO: 109783 - protein, 14 aa, Homo sapiens
  CDR3 for alpha chain variable domain of TCR clone 54892 (TRAV12-3, TRAJ54)
CAMRGIQGAQKLVL

SEQ ID NO: 109784 - protein, 13 aa, Homo sapiens
  CDR3 for beta chain variable domain of TCR clone 54892 (TRBV19, TRBJ1-1)
CASSPSNGGEAFF

SEQ ID NO: 109785 - protein, 14 aa, Homo sapiens
  CDR3 for alpha chain variable domain of TCR clone 54893 (TRAV1-1, TRAJ30)
CAVRPLSRDDKIIF

SEQ ID NO: 109786 - protein, 15 aa, Homo sapiens
  CDR3 for beta chain variable domain of TCR clone 54893 (TRBV27, TRBJ1-4)
CASSAQQDLSEKLFF

SEQ ID NO: 109787 - protein, 14 aa, Homo sapiens
  CDR3 for alpha chain variable domain of TCR clone 54894 (TRAV23/DV6, TRAJ9)
CASKYWRLQNYLWS

SEQ ID NO: 109788 - protein, 14 aa, Homo sapiens
  CDR3 for beta chain variable domain of TCR clone 54894 (TRBV6-1, TRBJ2-7)
CASTRTGDYYEQYF

SEQ ID NO: 109789 - protein, 13 aa, Homo sapiens
  CDR3 for alpha chain variable domain of TCR clone 54895 (TRAV8-6, TRAJ8)
CAVSNTGFQKLVF

SEQ ID NO: 109790 - protein, 15 aa, Homo sapiens
  CDR3 for beta chain variable domain of TCR clone 54895 (TRBV4-1, TRBJ2-7)
CASSQNTGRLYEQYF

SEQ ID NO: 109791 - protein, 14 aa, Homo sapiens
  CDR3 for alpha chain variable domain of TCR clone 54896 (TRAV17, TRAJ57)
CATDPQGGSEKLVF

SEQ ID NO: 109792 - protein, 15 aa, Homo sapiens
  CDR3 for beta chain variable domain of TCR clone 54896 (TRBV20-1, TRBJ2-6)
CSAYGQVSGANVLTF

SEQ ID NO: 109793 - protein, 12 aa, Homo sapiens
  CDR3 for alpha chain variable domain of TCR clone 54897 (TRAV13-2, TRAJ31)
CAESYNNARLMF

SEQ ID NO: 109794 - protein, 13 aa, Homo sapiens
  CDR3 for beta chain variable domain of TCR clone 54897 (TRBV24-1, TRBJ1-3)
CATMADSGNTMYF

SEQ ID NO: 109795 - protein, 23 aa, Homo sapiens
  CDR3 for alpha chain variable domain of TCR clone 54898 (TRAV26-1, TRAJ38)
CIADNAGNNHIQDPDPAVYQLRD

SEQ ID NO: 109796 - protein, 15 aa, Homo sapiens
  CDR3 for beta chain variable domain of TCR clone 54898 (TRBV27, TRBJ2-1)
CASSNGGGSSNEQFF

SEQ ID NO: 109797 - protein, 16 aa, Homo sapiens
  CDR3 for alpha chain variable domain of TCR clone 54899 (TRAV9-2, TRAJ53)
CALRKNSGGSNYKLTL

SEQ ID NO: 109798 - protein, 14 aa, Homo sapiens
  CDR3 for beta chain variable domain of TCR clone 54899 (TRBV28, TRBJ2-1)
CASSLNGRNNEQFF

SEQ ID NO: 109799 - protein, 16 aa, Homo sapiens
  CDR3 for alpha chain variable domain of TCR clone 54900 (TRAV3, TRAJ3)
CAVRDRAKSSASKIIF

SEQ ID NO: 109800 - protein, 16 aa, Homo sapiens
  CDR3 for beta chain variable domain of TCR clone 54900 (TRBV20-1, TRBJ2-4)
CSATSLAGLAKNIQYF

SEQ ID NO: 109801 - protein, 13 aa, Homo sapiens
  CDR3 for alpha chain variable domain of TCR clone 54901 (TRAV16, TRAJ48)
CSPLNFGNEKLTF

SEQ ID NO: 109802 - protein, 11 aa, Homo sapiens
  CDR3 for beta chain variable domain of TCR clone 54901 (TRBV7-9, TRBJ2-3)
CASNPTDTQYF

SEQ ID NO: 109803 - protein, 12 aa, Homo sapiens
  CDR3 for alpha chain variable domain of TCR clone 54902 (TRAV8-3, TRAJ26)
CAGDNYGQNFVF

SEQ ID NO: 109804 - protein, 15 aa, Homo sapiens
  CDR3 for beta chain variable domain of TCR clone 54902 (TRBV9, TRBJ2-1)
CASSLARSSYNEQFF

SEQ ID NO: 109805 - protein, 13 aa, Homo sapiens
  CDR3 for alpha chain variable domain of TCR clone 54903 (TRAV2, TRAJ15)
CAVASQAGTALIF

SEQ ID NO: 109806 - protein, 14 aa, Homo sapiens
  CDR3 for beta chain variable domain of TCR clone 54903 (TRBV25-1, TRBJ1-1)
CASTHLGGNTGAFF

SEQ ID NO: 109807 - protein, 14 aa, Homo sapiens
  CDR3 for alpha chain variable domain of TCR clone 54904 (TRAV12-3, TRAJ10)
SHLPLTGGGNKLTF

SEQ ID NO: 109808 - protein, 13 aa, Homo sapiens
  CDR3 for beta chain variable domain of TCR clone 54904 (TRBV7-9, TRBJ1-2)
CASSLKQDYGYTF

SEQ ID NO: 109809 - protein, 14 aa, Homo sapiens
  CDR3 for alpha chain variable domain of TCR clone 54905 (TRAV21, TRAJ37)
CAVKGASNTGKLIF

SEQ ID NO: 109810 - protein, 14 aa, Homo sapiens
  CDR3 for beta chain variable domain of TCR clone 54905 (TRBV7-2, TRBJ2-1)
CASSRGGARNEQFF

SEQ ID NO: 109811 - protein, 18 aa, Homo sapiens
  CDR3 for alpha chain variable domain of TCR clone 54906 (TRAV17, TRAJ45)
CATSLDLYSGGGADRLTF

SEQ ID NO: 109812 - protein, 15 aa, Homo sapiens
  CDR3 for beta chain variable domain of TCR clone 54906 (TRBV11-2, TRBJ2-1)
CASSKNRGLIYEQFF

SEQ ID NO: 109813 - protein, 14 aa, Homo sapiens
  CDR3 for alpha chain variable domain of TCR clone 54907 (TRAV12-1, TRAJ17)
CVVNYKAAGNKLTL

SEQ ID NO: 109814 - protein, 17 aa, Homo sapiens
  CDR3 for beta chain variable domain of TCR clone 54907 (TRBV20-1, TRBJ2-1)
CSASSSGLVGSYNEQFF

SEQ ID NO: 109815 - protein, 10 aa, Homo sapiens
  CDR3 for alpha chain variable domain of TCR clone 54908 (TRAV23/DV6, TRAJ57)
CAASSTLFQG

SEQ ID NO: 109816 - protein, 17 aa, Homo sapiens
  CDR3 for beta chain variable domain of TCR clone 54908 (TRBV10-3, TRBJ2-6)
CAISESTAPSGANVLTF

SEQ ID NO: 109817 - protein, 15 aa, Homo sapiens
  CDR3 for alpha chain variable domain of TCR clone 54909 (TRAV12-2, TRAJ53)
CAVNGGGGSNYKLTF

SEQ ID NO: 109818 - protein, 13 aa, Homo sapiens
  CDR3 for beta chain variable domain of TCR clone 54909 (TRBV3-1, TRBJ1-1)
CGSSPGVITEAFF

SEQ ID NO: 109819 - protein, 12 aa, Homo sapiens
  CDR3 for alpha chain variable domain of TCR clone 54910 (TRAV13-1, TRAJ21)
CAAKEGFNKFYL

SEQ ID NO: 109820 - protein, 19 aa, Homo sapiens
  CDR3 for beta chain variable domain of TCR clone 54910 (TRBV2, TRBJ2-7)
CASSDDETSGRANDYEQYF

SEQ ID NO: 109821 - protein, 14 aa, Homo sapiens
  CDR3 for alpha chain variable domain of TCR clone 54911 (TRAV16, TRAJ8)
CALLMNTGFQKLVF

SEQ ID NO: 109822 - protein, 14 aa, Homo sapiens
  CDR3 for beta chain variable domain of TCR clone 54911 (TRBV7-2, TRBJ2-7)
CASRSQGAAYEQYF

SEQ ID NO: 109823 - protein, 14 aa, Homo sapiens
  CDR3 for alpha chain variable domain of TCR clone 54912 (TRAV3, TRAJ33)
CAVRDMDSNYQLIW

SEQ ID NO: 109824 - protein, 19 aa, Homo sapiens
  CDR3 for beta chain variable domain of TCR clone 54912 (TRBV7-3, TRBJ1-2)
CASSFPQGNDGELWLLLRF

SEQ ID NO: 109825 - protein, 13 aa, Homo sapiens
  CDR3 for alpha chain variable domain of TCR clone 54913 (TRAV29/DV5, TRAJ31)
CAASRNNNARLMF

SEQ ID NO: 109826 - protein, 14 aa, Homo sapiens
  CDR3 for beta chain variable domain of TCR clone 54913 (TRBV20-1, TRBJ2-1)
CSAQIGGSANEQFF

SEQ ID NO: 109827 - protein, 13 aa, Homo sapiens
  CDR3 for alpha chain variable domain of TCR clone 54914 (TRAV8-3, TRAJ36)
CAVGATGANNLFF

SEQ ID NO: 109828 - protein, 15 aa, Homo sapiens
  CDR3 for beta chain variable domain of TCR clone 54914 (TRBV6-3, TRBJ2-3)
CASSWRDGDADTQYF

SEQ ID NO: 109829 - protein, 13 aa, Homo sapiens
  CDR3 for alpha chain variable domain of TCR clone 54915 (TRAV12-1, TRAJ13)
CVVTSGGHQKVTF

SEQ ID NO: 109830 - protein, 14 aa, Homo sapiens
  CDR3 for beta chain variable domain of TCR clone 54915 (TRBV27, TRBJ2-1)
CASSATGGYNEQFF

SEQ ID NO: 109831 - protein, 13 aa, Homo sapiens
  CDR3 for alpha chain variable domain of TCR clone 54916 (TRAV21, TRAJ58)
CAVPRTSGSRLTF

SEQ ID NO: 109832 - protein, 15 aa, Homo sapiens
  CDR3 for beta chain variable domain of TCR clone 54916 (TRBV7-3, TRBJ2-1)
CASSLSSGSFDEQFF

SEQ ID NO: 109833 - protein, 18 aa, Homo sapiens
  CDR3 for alpha chain variable domain of TCR clone 54917 (TRAV21, TRAJ52)
CAVRPSPAGGTSYGKLTF

SEQ ID NO: 109834 - protein, 16 aa, Homo sapiens
  CDR3 for beta chain variable domain of TCR clone 54917 (TRBV11-2, TRBJ1-2)
CASSLDTGGADYGYTF

SEQ ID NO: 109835 - protein, 13 aa, Homo sapiens
  CDR3 for alpha chain variable domain of TCR clone 54918 (TRAV2, TRAJ40)
CAVVTSGTYKYIF

SEQ ID NO: 109836 - protein, 15 aa, Homo sapiens
  CDR3 for beta chain variable domain of TCR clone 54918 (TRBV4-3, TRBJ2-7)
CASSQGGRGIYEQYF

SEQ ID NO: 109837 - protein, 13 aa, Homo sapiens
  CDR3 for alpha chain variable domain of TCR clone 54919 (TRAV27, TRAJ3)
ASLRGSSASKIIF

SEQ ID NO: 109838 - protein, 15 aa, Homo sapiens
  CDR3 for beta chain variable domain of TCR clone 54919 (TRBV28, TRBJ1-3)
CASSMGWASGNIIYF

SEQ ID NO: 109839 - protein, 14 aa, Homo sapiens
  CDR3 for alpha chain variable domain of TCR clone 54920 (TRAV1-2, TRAJ16)
CAVNRFSDGRKLLF

SEQ ID NO: 109840 - protein, 16 aa, Homo sapiens
  CDR3 for beta chain variable domain of TCR clone 54920 (TRBV12-5, TRBJ2-5)
CASGPRTSGNQETQYF

SEQ ID NO: 109841 - protein, 12 aa, Homo sapiens
  CDR3 for alpha chain variable domain of TCR clone 54921 (TRAV9-2, TRAJ26)
CALSSYGQNFVF

SEQ ID NO: 109842 - protein, 10 aa, Homo sapiens
  CDR3 for beta chain variable domain of TCR clone 54921 (TRBV20-1, TRBJ1-4)
PQGANEKLFF

SEQ ID NO: 109843 - protein, 16 aa, Homo sapiens
  CDR3 for alpha chain variable domain of TCR clone 54922 (TRAV30, TRAJ24)
CGTEIVDADSWGKFQF

SEQ ID NO: 109844 - protein, 13 aa, Homo sapiens
  CDR3 for beta chain variable domain of TCR clone 54922 (TRBV18, TRBJ1-2)
CASSAAATEGYTF

SEQ ID NO: 109845 - protein, 13 aa, Homo sapiens
  CDR3 for alpha chain variable domain of TCR clone 54923 (TRAV9-2, TRAJ53)
CALSGGSNYKLTF

SEQ ID NO: 109846 - protein, 16 aa, Homo sapiens
  CDR3 for beta chain variable domain of TCR clone 54923 (TRBV11-3, TRBJ2-5)
CASSSVVAGSTENQYF

SEQ ID NO: 109847 - protein, 12 aa, Homo sapiens
  CDR3 for alpha chain variable domain of TCR clone 54924 (TRAV12-2, TRAJ10)
WGVTGGGNKLTF

SEQ ID NO: 109848 - protein, 15 aa, Homo sapiens
  CDR3 for beta chain variable domain of TCR clone 54924 (TRBV7-6, TRBJ2-5)
CASSKPTGPQETQYF

SEQ ID NO: 109849 - protein, 15 aa, Homo sapiens
  CDR3 for alpha chain variable domain of TCR clone 54925 (TRAV12-2, TRAJ53)
CAVNGGGGSNYKLTL

SEQ ID NO: 109850 - protein, 14 aa, Homo sapiens
  CDR3 for beta chain variable domain of TCR clone 54925 (TRBV18, TRBJ2-7)
CASSPRGGAYEQYF

SEQ ID NO: 109851 - protein, 15 aa, Homo sapiens
  CDR3 for alpha chain variable domain of TCR clone 54926 (TRAV8-3, TRAJ45)
CASSYSGGGADGLTF

SEQ ID NO: 109852 - protein, 17 aa, Homo sapiens
  CDR3 for beta chain variable domain of TCR clone 54926 (TRBV7-8, TRBJ1-2)
CASSLRPIQGHLYGYTF

SEQ ID NO: 109853 - protein, 13 aa, Homo sapiens
  CDR3 for alpha chain variable domain of TCR clone 54927 (TRAV13-1, TRAJ43)
CAASKNNNNDMRF

SEQ ID NO: 109854 - protein, 14 aa, Homo sapiens
  CDR3 for beta chain variable domain of TCR clone 54927 (TRBV14, TRBJ2-1)
CASGQVQGRGEQFF

SEQ ID NO: 109855 - protein, 12 aa, Homo sapiens
  CDR3 for alpha chain variable domain of TCR clone 54928 (TRAV13-1, TRAJ36)
WRGGAGANNLFL

SEQ ID NO: 109856 - protein, 16 aa, Homo sapiens
  CDR3 for beta chain variable domain of TCR clone 54928 (TRBV7-9, TRBJ2-5)
CASRLEIGTRKETQYF

SEQ ID NO: 109857 - protein, 15 aa, Homo sapiens
  CDR3 for alpha chain variable domain of TCR clone 54929 (TRAV14/DV4, TRAJ26)
CAMREGQNYGQNFVF

SEQ ID NO: 109858 - protein, 13 aa, Homo sapiens
  CDR3 for beta chain variable domain of TCR clone 54929 (TRBV24-1, TRBJ2-2)
CATSDWSTGELFL

SEQ ID NO: 109859 - protein, 13 aa, Homo sapiens
  CDR3 for alpha chain variable domain of TCR clone 54930 (TRAV12-2, TRAJ39)
CAVNNDAGNMLTF

SEQ ID NO: 109860 - protein, 13 aa, Homo sapiens
  CDR3 for beta chain variable domain of TCR clone 54930 (TRBV2, TRBJ1-5)
CATAGPGNQPQHF

SEQ ID NO: 109861 - protein, 15 aa, Homo sapiens
  CDR3 for alpha chain variable domain of TCR clone 54931 (TRAV12-3, TRAJ52)
CNGGAGGTSYGELTF

SEQ ID NO: 109862 - protein, 13 aa, Homo sapiens
  CDR3 for beta chain variable domain of TCR clone 54931 (TRBV20-1, TRBJ2-5)
CSARGDYQETQYF

SEQ ID NO: 109863 - protein, 15 aa, Homo sapiens
  CDR3 for alpha chain variable domain of TCR clone 54932 (TRAV12-3, TRAJ42)
CAMSGHGGSQGNLIF

SEQ ID NO: 109864 - protein, 12 aa, Homo sapiens
  CDR3 for beta chain variable domain of TCR clone 54932 (TRBV13, TRBJ2-1)
CASSLGAQEQFF

SEQ ID NO: 109865 - protein, 15 aa, Homo sapiens
  CDR3 for alpha chain variable domain of TCR clone 54933 (TRAV12-3, TRAJ6)
CAMSATSGGSYIPTF

SEQ ID NO: 109866 - protein, 12 aa, Homo sapiens
  CDR3 for beta chain variable domain of TCR clone 54933 (TRBV29-1, TRBJ2-7)
CSVEGASYEQYF

SEQ ID NO: 109867 - protein, 17 aa, Homo sapiens
  CDR3 for alpha chain variable domain of TCR clone 54934 (TRAV17, TRAJ52)
CATDRNAGGTSYGKLTF

SEQ ID NO: 109868 - protein, 16 aa, Homo sapiens
  CDR3 for beta chain variable domain of TCR clone 54934 (TRBV6-1, TRBJ2-5)
CASSETLDGGAETQYF

SEQ ID NO: 109869 - protein, 13 aa, Homo sapiens
  CDR3 for alpha chain variable domain of TCR clone 54935 (TRAV8-3, TRAJ44)
CAVVPGTARKLTF

SEQ ID NO: 109870 - protein, 14 aa, Homo sapiens
  CDR3 for beta chain variable domain of TCR clone 54935 (TRBV11-2, TRBJ2-3)
CASSRLARTDTQYF

SEQ ID NO: 109871 - protein, 13 aa, Homo sapiens
  CDR3 for alpha chain variable domain of TCR clone 54936 (TRAV8-6, TRAJ21)
CAVSPSSLNKFYF

SEQ ID NO: 109872 - protein, 14 aa, Homo sapiens
  CDR3 for beta chain variable domain of TCR clone 54936 (TRBV7-9, TRBJ2-5)
CASSVDTAQETQYF

SEQ ID NO: 109873 - protein, 23 aa, Homo sapiens
  CDR3 for alpha chain variable domain of TCR clone 54937 (TRAV1-1, TRAJ11)
LLQELQMKDSASYFCAGYSTLTF

SEQ ID NO: 109874 - protein, 15 aa, Homo sapiens
  CDR3 for beta chain variable domain of TCR clone 54937 (TRBV6-5, TRBJ2-1)
CACRGDFDSYNEQFF

SEQ ID NO: 109875 - protein, 17 aa, Homo sapiens
  CDR3 for alpha chain variable domain of TCR clone 54938 (TRAV3, TRAJ42)
CAVRDRDYGGSQGNRIF

SEQ ID NO: 109876 - protein, 14 aa, Homo sapiens
  CDR3 for beta chain variable domain of TCR clone 54938 (TRBV25-1, TRBJ1-1)
CASTHLGGNTEAFF

SEQ ID NO: 109877 - protein, 15 aa, Homo sapiens
  CDR3 for alpha chain variable domain of TCR clone 54939 (TRAV3, TRAJ3)
CSVRDRDSSASKIIF

SEQ ID NO: 109878 - protein, 18 aa, Homo sapiens
  CDR3 for beta chain variable domain of TCR clone 54939 (TRBV25-1, TRBJ1-2)
CASSGLQNGQGLIFGYTF

SEQ ID NO: 109879 - protein, 14 aa, Homo sapiens
  CDR3 for alpha chain variable domain of TCR clone 54940 (TRAV13-2, TRAJ32)
CAESLGGATNKLIF

SEQ ID NO: 109880 - protein, 12 aa, Homo sapiens
  CDR3 for beta chain variable domain of TCR clone 54940 (TRBV11-2, TRBJ2-1)
CASSPGNNEQSF

SEQ ID NO: 109881 - protein, 10 aa, Homo sapiens
  CDR3 for alpha chain variable domain of TCR clone 54941 (TRAV16, TRAJ22)
SAMYLRQLTF

SEQ ID NO: 109882 - protein, 16 aa, Homo sapiens
  CDR3 for beta chain variable domain of TCR clone 54941 (TRBV7-3, TRBJ2-2)
CASSLKRGTLSGELFF

SEQ ID NO: 109883 - protein, 15 aa, Homo sapiens
  CDR3 for alpha chain variable domain of TCR clone 54942 (TRAV25, TRAJ53)
CAATGGGGSNYKLTF

SEQ ID NO: 109884 - protein, 14 aa, Homo sapiens
  CDR3 for beta chain variable domain of TCR clone 54942 (TRBV7-2, TRBJ2-3)
CASRRGLAADTQYF

SEQ ID NO: 109885 - protein, 13 aa, Homo sapiens
  CDR3 for alpha chain variable domain of TCR clone 54943 (TRAV13-1, TRAJ13)
CAASKGGYQKVTF

SEQ ID NO: 109886 - protein, 16 aa, Homo sapiens
  CDR3 for beta chain variable domain of TCR clone 54943 (TRBV18, TRBJ1-2)
CASSPPERVTIYGYTL

SEQ ID NO: 109887 - protein, 14 aa, Homo sapiens
  CDR3 for alpha chain variable domain of TCR clone 54944 (TRAV1-2, TRAJ16)
CAANRFSDGQKLLF

SEQ ID NO: 109888 - protein, 16 aa, Homo sapiens
  CDR3 for beta chain variable domain of TCR clone 54944 (TRBV11-2, TRBJ1-2)
CASSLDTGGADYGYTF

SEQ ID NO: 109889 - protein, 13 aa, Homo sapiens
  CDR3 for alpha chain variable domain of TCR clone 54945 (TRAV3, TRAJ21)
CAVREPDFNKFYF

SEQ ID NO: 109890 - protein, 15 aa, Homo sapiens
  CDR3 for beta chain variable domain of TCR clone 54945 (TRBV2, TRBJ2-1)
CASSELAGGYNEQFF

SEQ ID NO: 109891 - protein, 11 aa, Homo sapiens
  CDR3 for alpha chain variable domain of TCR clone 54946 (TRAV23/DV6, TRAJ58)
CAARLLRGETS

SEQ ID NO: 109892 - protein, 14 aa, Homo sapiens
  CDR3 for beta chain variable domain of TCR clone 54946 (TRBV2, TRBJ2-7)
CASSLTSGGYDQYF

SEQ ID NO: 109893 - protein, 13 aa, Homo sapiens
  CDR3 for alpha chain variable domain of TCR clone 54947 (TRAV1-1, TRAJ30)
CAVRSDRDDKIIF

SEQ ID NO: 109894 - protein, 15 aa, Homo sapiens
  CDR3 for beta chain variable domain of TCR clone 54947 (TRBV4-1, TRBJ1-4)
CASSDTGGTNEKLFF

SEQ ID NO: 109895 - protein, 16 aa, Homo sapiens
  CDR3 for alpha chain variable domain of TCR clone 54948 (TRAV38-1, TRAJ37)
CAFKGDGSSNTGKLIF

SEQ ID NO: 109896 - protein, 13 aa, Homo sapiens
  CDR3 for beta chain variable domain of TCR clone 54948 (TRBV12-4, TRBJ2-5)
CASSLFRGETQYF

SEQ ID NO: 109897 - protein, 11 aa, Homo sapiens
  CDR3 for alpha chain variable domain of TCR clone 54949 (TRAV13-1, TRAJ6)
CATLGSYIPTF

SEQ ID NO: 109898 - protein, 12 aa, Homo sapiens
  CDR3 for beta chain variable domain of TCR clone 54949 (TRBV11-2, TRBJ2-1)
CASSHGNNEQFF

SEQ ID NO: 109899 - protein, 15 aa, Homo sapiens
  CDR3 for alpha chain variable domain of TCR clone 54950 (TRAV21, TRAJ24)
CAARSSTDSWGKLQF

SEQ ID NO: 109900 - protein, 13 aa, Homo sapiens
  CDR3 for beta chain variable domain of TCR clone 54950 (TRBV11-2, TRBJ2-5)
CASSSTGEETQHF

SEQ ID NO: 109901 - protein, 14 aa, Homo sapiens
  CDR3 for alpha chain variable domain of TCR clone 54951 (TRAV21, TRAJ35)
CAVMPIGFGNVLHC

SEQ ID NO: 109902 - protein, 12 aa, Homo sapiens
  CDR3 for beta chain variable domain of TCR clone 54951 (TRBV7-8, TRBJ2-7)
CASSLGDREQYF

SEQ ID NO: 109903 - protein, 15 aa, Homo sapiens
  CDR3 for alpha chain variable domain of TCR clone 54952 (TRAV12-3, TRAJ23)
CAMILIYNQGGKLIF

SEQ ID NO: 109904 - protein, 14 aa, Homo sapiens
  CDR3 for beta chain variable domain of TCR clone 54952 (TRBV27, TRBJ1-5)
CTSSLDPRNQPQHF

SEQ ID NO: 109905 - protein, 16 aa, Homo sapiens
  CDR3 for alpha chain variable domain of TCR clone 54953 (TRAV3, TRAJ6)
CAVRDGRGRRKLHTYI

SEQ ID NO: 109906 - protein, 15 aa, Homo sapiens
  CDR3 for beta chain variable domain of TCR clone 54953 (TRBV9, TRBJ2-1)
CASSLAGSSYNEQFF

SEQ ID NO: 109907 - protein, 14 aa, Homo sapiens
  CDR3 for alpha chain variable domain of TCR clone 54954 (TRAV13-1, TRAJ35)
CAATKGGFGNVLHC

SEQ ID NO: 109908 - protein, 13 aa, Homo sapiens
  CDR3 for beta chain variable domain of TCR clone 54954 (TRBV7-3, TRBJ1-1)
CASSQDWGAEAFF

SEQ ID NO: 109909 - protein, 14 aa, Homo sapiens
  CDR3 for alpha chain variable domain of TCR clone 54955 (TRAV12-2, TRAJ17)
CAVLFKAAGNKLTF

SEQ ID NO: 109910 - protein, 17 aa, Homo sapiens
  CDR3 for beta chain variable domain of TCR clone 54955 (TRBV20-1, TRBJ2-2)
CSASGSGQGGLSGELFF

SEQ ID NO: 109911 - protein, 12 aa, Homo sapiens
  CDR3 for alpha chain variable domain of TCR clone 54956 (TRAV12-3, TRAJ34)
CAMGYNTDKLIF

SEQ ID NO: 109912 - protein, 14 aa, Homo sapiens
  CDR3 for beta chain variable domain of TCR clone 54956 (TRBV4-1, TRBJ2-2)
CASSQAVSTGELFF

SEQ ID NO: 109913 - protein, 15 aa, Homo sapiens
  CDR3 for alpha chain variable domain of TCR clone 54957 (TRAV1-2, TRAJ38)
RAVSENAGNNRKLIW

SEQ ID NO: 109914 - protein, 16 aa, Homo sapiens
  CDR3 for beta chain variable domain of TCR clone 54957 (TRBV4-1, TRBJ2-7)
CASSLTAGQATYEQYF

SEQ ID NO: 109915 - protein, 10 aa, Homo sapiens
  CDR3 for alpha chain variable domain of TCR clone 54958 (TRAV13-2, TRAJ49)
CADTGNQFYF

SEQ ID NO: 109916 - protein, 13 aa, Homo sapiens
  CDR3 for beta chain variable domain of TCR clone 54958 (TRBV12-4, TRBJ1-2)
CASTMTSNYGYTF

SEQ ID NO: 109917 - protein, 15 aa, Homo sapiens
  CDR3 for alpha chain variable domain of TCR clone 54959 (TRAV3, TRAJ20)
CAVRDIKLSDYKLSF

SEQ ID NO: 109918 - protein, 15 aa, Homo sapiens
  CDR3 for beta chain variable domain of TCR clone 54959 (TRBV7-9, TRBJ1-6)
SASSSPGRGNSPLHF

SEQ ID NO: 109919 - protein, 15 aa, Homo sapiens
  CDR3 for alpha chain variable domain of TCR clone 54960 (TRAV3, TRAJ42)
CAVRGGTGSQGNLIF

SEQ ID NO: 109920 - protein, 14 aa, Homo sapiens
  CDR3 for beta chain variable domain of TCR clone 54960 (TRBV19, TRBJ1-2)
CASSSLFARDVYAF

SEQ ID NO: 109921 - protein, 17 aa, Homo sapiens
  CDR3 for alpha chain variable domain of TCR clone 54961 (TRAV4, TRAJ18)
CLVGERFVGSTLGRLYF

SEQ ID NO: 109922 - protein, 14 aa, Homo sapiens
  CDR3 for beta chain variable domain of TCR clone 54961 (TRBV6-5, TRBJ1-2)
CASSYDGTGGGYTF

SEQ ID NO: 109923 - protein, 11 aa, Homo sapiens
  CDR3 for alpha chain variable domain of TCR clone 54962 (TRAV21, TRAJ34)
CAVTNTDNLIF

SEQ ID NO: 109924 - protein, 17 aa, Homo sapiens
  CDR3 for beta chain variable domain of TCR clone 54962 (TRBV20-1, TRBJ2-1)
CSARGPSGGPPTMSSSS

SEQ ID NO: 109925 - protein, 14 aa, Homo sapiens
  CDR3 for alpha chain variable domain of TCR clone 54963 (TRAV1-2, TRAJ6)
CAVSLSGGSYIPTF

SEQ ID NO: 109926 - protein, 15 aa, Homo sapiens
  CDR3 for beta chain variable domain of TCR clone 54963 (TRBV19, TRBJ1-1)
CASTSGQIQNTEAFF

SEQ ID NO: 109927 - protein, 13 aa, Homo sapiens
  CDR3 for alpha chain variable domain of TCR clone 54964 (TRAV12-3, TRAJ13)
CAMTSGGYQRVTF

SEQ ID NO: 109928 - protein, 13 aa, Homo sapiens
  CDR3 for beta chain variable domain of TCR clone 54964 (TRBV20-1, TRBJ2-2)
CSALSGGAGELFF

SEQ ID NO: 109929 - protein, 14 aa, Homo sapiens
  CDR3 for alpha chain variable domain of TCR clone 54965 (TRAV21, TRAJ58)
CAVRRGRSGSRLTF

SEQ ID NO: 109930 - protein, 17 aa, Homo sapiens
  CDR3 for beta chain variable domain of TCR clone 54965 (TRBV5-1, TRBJ2-7)
FAPAADNPGQIPYEQYF

SEQ ID NO: 109931 - protein, 12 aa, Homo sapiens
  CDR3 for alpha chain variable domain of TCR clone 54966 (TRAV2, TRAJ33)
CAVPDSNYQLIW

SEQ ID NO: 109932 - protein, 17 aa, Homo sapiens
  CDR3 for beta chain variable domain of TCR clone 54966 (TRBV20-1, TRBJ2-1)
CSASSSGLAGSYNEQFF

SEQ ID NO: 109933 - protein, 13 aa, Homo sapiens
  CDR3 for alpha chain variable domain of TCR clone 54967 (TRAV2, TRAJ40)
CAVVTSGTYKYIF

SEQ ID NO: 109934 - protein, 14 aa, Homo sapiens
  CDR3 for beta chain variable domain of TCR clone 54967 (TRBV19, TRBJ2-7)
CASPTFVLSGEQFF

SEQ ID NO: 109935 - protein, 14 aa, Homo sapiens
  CDR3 for alpha chain variable domain of TCR clone 54968 (TRAV35, TRAJ13)
CAGSPSGGYQKVTF

SEQ ID NO: 109936 - protein, 13 aa, Homo sapiens
  CDR3 for beta chain variable domain of TCR clone 54968 (TRBV29-1, TRBJ1-1)
CSVGDSRNNEAFF

SEQ ID NO: 109937 - protein, 15 aa, Homo sapiens
  CDR3 for alpha chain variable domain of TCR clone 54969 (TRAV12-3, TRAJ6)
CAMSATTGGSYIPTF

SEQ ID NO: 109938 - protein, 16 aa, Homo sapiens
  CDR3 for beta chain variable domain of TCR clone 54969 (TRBV20-1, TRBJ1-2)
SAVPRWEGVANYGYTF

SEQ ID NO: 109939 - protein, 13 aa, Homo sapiens
  CDR3 for alpha chain variable domain of TCR clone 54970 (TRAV20, TRAJ20)
CAVRWVRDYKLSF

SEQ ID NO: 109940 - protein, 14 aa, Homo sapiens
  CDR3 for beta chain variable domain of TCR clone 54970 (TRBV7-6, TRBJ2-3)
CASSLGTVTDTQYF

SEQ ID NO: 109941 - protein, 12 aa, Homo sapiens
  CDR3 for alpha chain variable domain of TCR clone 54971 (TRAV13-1, TRAJ27)
CAAHTNAGKSTF

SEQ ID NO: 109942 - protein, 14 aa, Homo sapiens
  CDR3 for beta chain variable domain of TCR clone 54971 (TRBV5-5, TRBJ2-1)
CASGTGTPYNEQFF

SEQ ID NO: 109943 - protein, 17 aa, Homo sapiens
  CDR3 for alpha chain variable domain of TCR clone 54972 (TRAV23/DV6, TRAJ57)
CAASSTLSQGGSEKLVF

SEQ ID NO: 109944 - protein, 14 aa, Homo sapiens
  CDR3 for beta chain variable domain of TCR clone 54972 (TRBV25-1, TRBJ1-1)
CASTHLGGNTETFF

SEQ ID NO: 109945 - protein, 14 aa, Homo sapiens
  CDR3 for alpha chain variable domain of TCR clone 54973 (TRAV12-3, TRAJ10)
SRLPLTGGGNKLTF

SEQ ID NO: 109946 - protein, 14 aa, Homo sapiens
  CDR3 for beta chain variable domain of TCR clone 54973 (TRBV5-1, TRBJ2-3)
CASSLERDLGPQYF

SEQ ID NO: 109947 - protein, 12 aa, Homo sapiens
  CDR3 for alpha chain variable domain of TCR clone 54974 (TRAV6, TRAJ5)
CAPDTGRRALTF

SEQ ID NO: 109948 - protein, 15 aa, Homo sapiens
  CDR3 for beta chain variable domain of TCR clone 54974 (TRBV11-3, TRBJ2-7)
CASSPGPASSYEQYF

SEQ ID NO: 109949 - protein, 11 aa, Homo sapiens
  CDR3 for alpha chain variable domain of TCR clone 54975 (TRAV2, TRAJ13)
CASGGYQKVTF

SEQ ID NO: 109950 - protein, 15 aa, Homo sapiens
  CDR3 for beta chain variable domain of TCR clone 54975 (TRBV18, TRBJ2-7)
CASSPSSTGNYGQYF

SEQ ID NO: 109951 - protein, 15 aa, Homo sapiens
  CDR3 for alpha chain variable domain of TCR clone 54976 (TRAV12-2, TRAJ43)
CAFDMRLGAGTRLTV

SEQ ID NO: 109952 - protein, 18 aa, Homo sapiens
  CDR3 for beta chain variable domain of TCR clone 54976 (TRBV20-1, TRBJ2-3)
CSASGLAGGPGTTDTQYF

SEQ ID NO: 109953 - protein, 10 aa, Homo sapiens
  CDR3 for alpha chain variable domain of TCR clone 54977 (TRAV1-2, TRAJ31)
CAFFDARLMF

SEQ ID NO: 109954 - protein, 17 aa, Homo sapiens
  CDR3 for beta chain variable domain of TCR clone 54977 (TRBV11-2, TRBJ2-1)
CASSLYPPGVEYNEQFF

SEQ ID NO: 109955 - protein, 18 aa, Homo sapiens
  CDR3 for alpha chain variable domain of TCR clone 54978 (TRAV21, TRAJ52)
CAVRPSPAGGTSYGKLTF

SEQ ID NO: 109956 - protein, 14 aa, Homo sapiens
  CDR3 for beta chain variable domain of TCR clone 54978 (TRBV7-2, TRBJ2-3)
CASRRGLAADTQYF

SEQ ID NO: 109957 - protein, 10 aa, Homo sapiens
  CDR3 for alpha chain variable domain of TCR clone 54979 (TRAV36/DV7, TRAJ49)
CALTGNQFYF

SEQ ID NO: 109958 - protein, 15 aa, Homo sapiens
  CDR3 for beta chain variable domain of TCR clone 54979 (TRBV20-1, TRBJ2-7)
CSARDRVSGMDEQYF

SEQ ID NO: 109959 - protein, 13 aa, Homo sapiens
  CDR3 for alpha chain variable domain of TCR clone 54980 (TRAV1-2, TRAJ9)
CAALNTGGFKTIF

SEQ ID NO: 109960 - protein, 13 aa, Homo sapiens
  CDR3 for beta chain variable domain of TCR clone 54980 (TRBV7-7, TRBJ2-2)
CASSLTSAGELFF

SEQ ID NO: 109961 - protein, 14 aa, Homo sapiens
  CDR3 for alpha chain variable domain of TCR clone 54981 (TRAV16, TRAJ33)
CALSAMDSNYQLIW

SEQ ID NO: 109962 - protein, 12 aa, Homo sapiens
  CDR3 for beta chain variable domain of TCR clone 54981 (TRBV28, TRBJ2-6)
CAIQAGANVPTF

SEQ ID NO: 109963 - protein, 14 aa, Homo sapiens
  CDR3 for alpha chain variable domain of TCR clone 54982 (TRAV12-2, TRAJ53)
CRERGGGSNYKLTF

SEQ ID NO: 109964 - protein, 14 aa, Homo sapiens
  CDR3 for beta chain variable domain of TCR clone 54982 (TRBV4-1, TRBJ2-2)
CASSQAVNTGELFF

SEQ ID NO: 109965 - protein, 11 aa, Homo sapiens
  CDR3 for alpha chain variable domain of TCR clone 54983 (TRAV12-3, TRAJ49)
CAANTGNQFYF

SEQ ID NO: 109966 - protein, 17 aa, Homo sapiens
  CDR3 for beta chain variable domain of TCR clone 54983 (TRBV13, TRBJ2-3)
CASSLSRVAGGRNTQYF

SEQ ID NO: 109967 - protein, 14 aa, Homo sapiens
  CDR3 for alpha chain variable domain of TCR clone 54984 (TRAV8-2, TRAJ11)
CVVSEKSGYSTLTF

SEQ ID NO: 109968 - protein, 16 aa, Homo sapiens
  CDR3 for beta chain variable domain of TCR clone 54984 (TRBV28, TRBJ2-1)
CASSSPECPRDNEQFF

SEQ ID NO: 109969 - protein, 15 aa, Homo sapiens
  CDR3 for alpha chain variable domain of TCR clone 54985 (TRAV26-1, TRAJ29)
CIVRVGGSGNTPLVF

SEQ ID NO: 109970 - protein, 14 aa, Homo sapiens
  CDR3 for beta chain variable domain of TCR clone 54985 (TRBV7-8, TRBJ1-2)
CASSSSEANYGYTF

SEQ ID NO: 109971 - protein, 16 aa, Homo sapiens
  CDR3 for alpha chain variable domain of TCR clone 54986 (TRAV16, TRAJ4)
CALSRMFSGGYNKLIF

SEQ ID NO: 109972 - protein, 14 aa, Homo sapiens
  CDR3 for beta chain variable domain of TCR clone 54986 (TRBV20-1, TRBJ1-1)
CSAQTRIGGTEAFF

SEQ ID NO: 109973 - protein, 16 aa, Homo sapiens
  CDR3 for alpha chain variable domain of TCR clone 54987 (TRAV29/DV5, TRAJ39)
CAASLLFNNAGSMLTF

SEQ ID NO: 109974 - protein, 16 aa, Homo sapiens
  CDR3 for beta chain variable domain of TCR clone 54987 (TRBV19, TRBJ2-6)
CASSMSGLSGANVLTF

SEQ ID NO: 109975 - protein, 15 aa, Homo sapiens
  CDR3 for alpha chain variable domain of TCR clone 54988 (TRAV2, TRAJ9)
CAVEDRGTGGFKTIF

SEQ ID NO: 109976 - protein, 12 aa, Homo sapiens
  CDR3 for beta chain variable domain of TCR clone 54988 (TRBV7-9, TRBJ1-5)
CASSPQGQPQHF

SEQ ID NO: 109977 - protein, 14 aa, Homo sapiens
  CDR3 for alpha chain variable domain of TCR clone 54989 (TRAV36/DV7, TRAJ40)
CAVETTSGTYKYIF

SEQ ID NO: 109978 - protein, 15 aa, Homo sapiens
  CDR3 for beta chain variable domain of TCR clone 54989 (TRBV7-9, TRBJ1-5)
CASSQGHQPNQPQHF

SEQ ID NO: 109979 - protein, 13 aa, Homo sapiens
  CDR3 for alpha chain variable domain of TCR clone 54990 (TRAV35, TRAJ42)
CAGFPGSQGNLIF

SEQ ID NO: 109980 - protein, 17 aa, Homo sapiens
  CDR3 for beta chain variable domain of TCR clone 54990 (TRBV13, TRBJ2-3)
CASSLSRVAGGRNTQYF

SEQ ID NO: 109981 - protein, 15 aa, Homo sapiens
  CDR3 for alpha chain variable domain of TCR clone 54991 (TRAV8-3, TRAJ27)
CAVGPSKTNAGKSTF

SEQ ID NO: 109982 - protein, 14 aa, Homo sapiens
  CDR3 for beta chain variable domain of TCR clone 54991 (TRBV19, TRBJ2-1)
CASSPGLAPNEQFF

SEQ ID NO: 109983 - protein, 15 aa, Homo sapiens
  CDR3 for alpha chain variable domain of TCR clone 54992 (TRAV20, TRAJ58)
CAVQDLETSGSRLTF

SEQ ID NO: 109984 - protein, 15 aa, Homo sapiens
  CDR3 for beta chain variable domain of TCR clone 54992 (TRBV7-9, TRBJ1-1)
CASSLLEQGGTEAFF

SEQ ID NO: 109985 - protein, 21 aa, Homo sapiens
  CDR3 for alpha chain variable domain of TCR clone 54993 (TRAV1-1, TRAJ6)
CLLLLRCERLERTGGSYIPTF

SEQ ID NO: 109986 - protein, 13 aa, Homo sapiens
  CDR3 for beta chain variable domain of TCR clone 54993 (TRBV10-2, TRBJ2-7)
CASGDSGGYEQYF

SEQ ID NO: 109987 - protein, 13 aa, Homo sapiens
  CDR3 for alpha chain variable domain of TCR clone 54994 (TRAV27, TRAJ29)
CAGTHSGNTPLVF

SEQ ID NO: 109988 - protein, 14 aa, Homo sapiens
  CDR3 for beta chain variable domain of TCR clone 54994 (TRBV19, TRBJ2-1)
CASPTFVLSGEQFF

SEQ ID NO: 109989 - protein, 11 aa, Homo sapiens
  CDR3 for alpha chain variable domain of TCR clone 54995 (TRAV12-3, TRAJ43)
CAMSVSNDMRF

SEQ ID NO: 109990 - protein, 13 aa, Homo sapiens
  CDR3 for beta chain variable domain of TCR clone 54995 (TRBV28, TRBJ2-5)
CASSFAGGETQYF

SEQ ID NO: 109991 - protein, 13 aa, Homo sapiens
  CDR3 for alpha chain variable domain of TCR clone 54996 (TRAV35, TRAJ42)
CAGFPGSQGTLIF

SEQ ID NO: 109992 - protein, 13 aa, Homo sapiens
  CDR3 for beta chain variable domain of TCR clone 54996 (TRBV29-1, TRBJ2-1)
CSVEGGRVNEQFF

SEQ ID NO: 109993 - protein, 13 aa, Homo sapiens
  CDR3 for alpha chain variable domain of TCR clone 54997 (TRAV21, TRAJ37)
CAVSSGNTGKLIF

SEQ ID NO: 109994 - protein, 14 aa, Homo sapiens
  CDR3 for beta chain variable domain of TCR clone 54997 (TRBV28, TRBJ1-2)
CASRIQGANYGYTF

SEQ ID NO: 109995 - protein, 14 aa, Homo sapiens
  CDR3 for alpha chain variable domain of TCR clone 54998 (TRAV29/DV5, TRAJ36)
CAARRKTGANNLFF

SEQ ID NO: 109996 - protein, 14 aa, Homo sapiens
  CDR3 for beta chain variable domain of TCR clone 54998 (TRBV12-5, TRBJ2-5)
CASGSRTYQETQYF

SEQ ID NO: 109997 - protein, 15 aa, Homo sapiens
  CDR3 for alpha chain variable domain of TCR clone 54999 (TRAV12-3, TRAJ6)
CAMSATTGGSYIPTF

SEQ ID NO: 109998 - protein, 15 aa, Homo sapiens
  CDR3 for beta chain variable domain of TCR clone 54999 (TRBV27, TRBJ2-1)
CASSNGGGSSNEQFF

SEQ ID NO: 109999 - protein, 14 aa, Homo sapiens
  CDR3 for alpha chain variable domain of TCR clone 55000 (TRAV12-2, TRAJ13)
CAVKKTGGYQKVTL

SEQ ID NO: 110000 - protein, 12 aa, Homo sapiens
  CDR3 for beta chain variable domain of TCR clone 55000 (TRBV12-4, TRBJ1-2)
CASSFIWLHLRF

SEQ ID NO: 110001 - protein, 14 aa, Homo sapiens
  CDR3 for alpha chain variable domain of TCR clone 55001 (TRAV12-3, TRAJ12)
CAMSEVDSSYKLIF

SEQ ID NO: 110002 - protein, 12 aa, Homo sapiens
  CDR3 for beta chain variable domain of TCR clone 55001 (TRBV18, TRBJ1-4)
CASSPSRERLFF

SEQ ID NO: 110003 - protein, 15 aa, Homo sapiens
  CDR3 for alpha chain variable domain of TCR clone 55002 (TRAV8-3, TRAJ11)
CAVGLLNSGYSTLTF

SEQ ID NO: 110004 - protein, 16 aa, Homo sapiens
  CDR3 for beta chain variable domain of TCR clone 55002 (TRBV7-9, TRBJ1-2)
CTSSLGFSSGEDGYTF

SEQ ID NO: 110005 - protein, 14 aa, Homo sapiens
  CDR3 for alpha chain variable domain of TCR clone 55003 (TRAV38-1, TRAJ45)
CAYYSGGGADGLTF

SEQ ID NO: 110006 - protein, 20 aa, Homo sapiens
  CDR3 for beta chain variable domain of TCR clone 55003 (TRBV28, TRBJ2-1)
CASTPIGRSPGLAGGNESSS

SEQ ID NO: 110007 - protein, 13 aa, Homo sapiens
  CDR3 for alpha chain variable domain of TCR clone 55004 (TRAV12-3, TRAJ33)
CAMSVNSNYQLIW

SEQ ID NO: 110008 - protein, 14 aa, Homo sapiens
  CDR3 for beta chain variable domain of TCR clone 55004 (TRBV20-1, TRBJ2-5)
CSAHRQGLWETQYF

SEQ ID NO: 110009 - protein, 14 aa, Homo sapiens
  CDR3 for alpha chain variable domain of TCR clone 55005 (TRAV13-2, TRAJ37)
CAERPYSNTGKLIF

SEQ ID NO: 110010 - protein, 12 aa, Homo sapiens
  CDR3 for beta chain variable domain of TCR clone 55005 (TRBV14, TRBJ2-7)
CASSRLKGEQYF

SEQ ID NO: 110011 - protein, 15 aa, Homo sapiens
  CDR3 for alpha chain variable domain of TCR clone 55006 (TRAV13-1, TRAJ44)
CAASRGGGTASKLPF

SEQ ID NO: 110012 - protein, 12 aa, Homo sapiens
  CDR3 for beta chain variable domain of TCR clone 55006 (TRBV11-2, TRBJ2-2)
CASSLGGGELFF

SEQ ID NO: 110013 - protein, 14 aa, Homo sapiens
  CDR3 for alpha chain variable domain of TCR clone 55007 (TRAV1-2, TRAJ16)
CAVNRFSDGQKLLF

SEQ ID NO: 110014 - protein, 15 aa, Homo sapiens
  CDR3 for beta chain variable domain of TCR clone 55007 (TRBV7-9, TRBJ1-6)
CASSSLGRGNSPLHF

SEQ ID NO: 110015 - protein, 15 aa, Homo sapiens
  CDR3 for alpha chain variable domain of TCR clone 55008 (TRAV3, TRAJ5)
CAVRDLDTGRRALTF

SEQ ID NO: 110016 - protein, 15 aa, Homo sapiens
  CDR3 for beta chain variable domain of TCR clone 55008 (TRBV3-1, TRBJ1-2)
CASSHPGTPGYGYTF

SEQ ID NO: 110017 - protein, 13 aa, Homo sapiens
  CDR3 for alpha chain variable domain of TCR clone 55009 (TRAV21, TRAJ20)
CAVGLRVDYKLSF

SEQ ID NO: 110018 - protein, 13 aa, Homo sapiens
  CDR3 for beta chain variable domain of TCR clone 55009 (TRBV15, TRBJ1-6)
CATSGGLNSPLHF

SEQ ID NO: 110019 - protein, 14 aa, Homo sapiens
  CDR3 for alpha chain variable domain of TCR clone 55010 (TRAV16, TRAJ15)
CALSFNQAGTALIF

SEQ ID NO: 110020 - protein, 16 aa, Homo sapiens
  CDR3 for beta chain variable domain of TCR clone 55010 (TRBV9, TRBJ2-7)
CASSAGPDRAPYEQYF

SEQ ID NO: 110021 - protein, 18 aa, Homo sapiens
  CDR3 for alpha chain variable domain of TCR clone 55011 (TRAV26-2, TRAJ45)
CILRVDKYSGGGADGLTF

SEQ ID NO: 110022 - protein, 15 aa, Homo sapiens
  CDR3 for beta chain variable domain of TCR clone 55011 (TRBV7-9, TRBJ1-5)
CASSQGHQPNQPQHF

SEQ ID NO: 110023 - protein, 15 aa, Homo sapiens
  CDR3 for alpha chain variable domain of TCR clone 55012 (TRAV26-1, TRAJ40)
CIVRVTTSGTYKYIF

SEQ ID NO: 110024 - protein, 13 aa, Homo sapiens
  CDR3 for beta chain variable domain of TCR clone 55012 (TRBV20-1, TRBJ1-1)
CSARGGGNTEAFF

SEQ ID NO: 110025 - protein, 15 aa, Homo sapiens
  CDR3 for alpha chain variable domain of TCR clone 55013 (TRAV38-1, TRAJ37)
CAFIFGSGNTGKLIF

SEQ ID NO: 110026 - protein, 12 aa, Homo sapiens
  CDR3 for beta chain variable domain of TCR clone 55013 (TRBV7-9, TRBJ2-7)
CASSLEGYERYF

SEQ ID NO: 110027 - protein, 12 aa, Homo sapiens
  CDR3 for alpha chain variable domain of TCR clone 55014 (TRAV21, TRAJ29)
CAVTSGNTPPVF

SEQ ID NO: 110028 - protein, 15 aa, Homo sapiens
  CDR3 for beta chain variable domain of TCR clone 55014 (TRBV12-4, TRBJ1-2)
CASRLGVAGNYGYTF

SEQ ID NO: 110029 - protein, 15 aa, Homo sapiens
  CDR3 for alpha chain variable domain of TCR clone 55015 (TRAV12-3, TRAJ6)
FAMSATTGGSYIPTF

SEQ ID NO: 110030 - protein, 16 aa, Homo sapiens
  CDR3 for beta chain variable domain of TCR clone 55015 (TRBV20-1, TRBJ1-2)
CSASMGQGVANYGYTF

SEQ ID NO: 110031 - protein, 14 aa, Homo sapiens
  CDR3 for alpha chain variable domain of TCR clone 55016 (TRAV29/DV5, TRAJ36)
CAARRKTGANNLFF

SEQ ID NO: 110032 - protein, 14 aa, Homo sapiens
  CDR3 for beta chain variable domain of TCR clone 55016 (TRBV12-5, TRBJ2-5)
CASGSRTHQETKYF

SEQ ID NO: 110033 - protein, 15 aa, Homo sapiens
  CDR3 for alpha chain variable domain of TCR clone 55017 (TRAV21, TRAJ13)
CAVWPTSGGYQKVTF

SEQ ID NO: 110034 - protein, 18 aa, Homo sapiens
  CDR3 for beta chain variable domain of TCR clone 55017 (TRBV11-3, TRBJ2-1)
CASSSYPGGRDSYNEQFF

SEQ ID NO: 110035 - protein, 20 aa, Homo sapiens
  CDR3 for alpha chain variable domain of TCR clone 55018 (TRAV26-1, TRAJ42)
CCVLLHRQTYYGGSQGNLIF

SEQ ID NO: 110036 - protein, 15 aa, Homo sapiens
  CDR3 for beta chain variable domain of TCR clone 55018 (TRBV7-3, TRBJ2-2)
CQQLKAGTLSGELFF

SEQ ID NO: 110037 - protein, 10 aa, Homo sapiens
  CDR3 for alpha chain variable domain of TCR clone 55019 (TRAV12-3, TRAJ49)
CAMNDDQFYY

SEQ ID NO: 110038 - protein, 13 aa, Homo sapiens
  CDR3 for beta chain variable domain of TCR clone 55019 (TRBV12-4, TRBJ1-1)
CASSPGTGFEAFF

SEQ ID NO: 110039 - protein, 14 aa, Homo sapiens
  CDR3 for alpha chain variable domain of TCR clone 55020 (TRAV29/DV5, TRAJ36)
CAARRKTGANNLFF

SEQ ID NO: 110040 - protein, 13 aa, Homo sapiens
  CDR3 for beta chain variable domain of TCR clone 55020 (TRBV24-1, TRBJ2-2)
CATSDWSTGELFF

SEQ ID NO: 110041 - protein, 20 aa, Homo sapiens
  CDR3 for alpha chain variable domain of TCR clone 55021 (TRAV26-1, TRAJ42)
CCVLLHRQTYYGGSQGNLIF

SEQ ID NO: 110042 - protein, 16 aa, Homo sapiens
  CDR3 for beta chain variable domain of TCR clone 55021 (TRBV7-3, TRBJ2-2)
CASSLKRGILSGELFF

SEQ ID NO: 110043 - protein, 14 aa, Homo sapiens
  CDR3 for alpha chain variable domain of TCR clone 55022 (TRAV2, TRAJ37)
CAVDFTSNTGKLIF

SEQ ID NO: 110044 - protein, 13 aa, Homo sapiens
  CDR3 for beta chain variable domain of TCR clone 55022 (TRBV2, TRBJ1-1)
CASNLLRNTEAFF

SEQ ID NO: 110045 - protein, 14 aa, Homo sapiens
  CDR3 for alpha chain variable domain of TCR clone 55023 (TRAV1-2, TRAJ16)
CAVNRFSDGQKLLF

SEQ ID NO: 110046 - protein, 16 aa, Homo sapiens
  CDR3 for beta chain variable domain of TCR clone 55023 (TRBV7-2, TRBJ2-7)
CASGLDLSGGAYEQYF

SEQ ID NO: 110047 - protein, 10 aa, Homo sapiens
  CDR3 for alpha chain variable domain of TCR clone 55024 (TRAV12-3, TRAJ49)
CAMNDDQFYF

SEQ ID NO: 110048 - protein, 13 aa, Homo sapiens
  CDR3 for beta chain variable domain of TCR clone 55024 (TRBV12-4, TRBJ1-1)
CASSPGIGFEAFF

SEQ ID NO: 110049 - protein, 13 aa, Homo sapiens
  CDR3 for alpha chain variable domain of TCR clone 55025 (TRAV1-1, TRAJ31)
CASYLNNNARLMF

SEQ ID NO: 110050 - protein, 14 aa, Homo sapiens
  CDR3 for beta chain variable domain of TCR clone 55025 (TRBV4-1, TRBJ2-5)
CASSRSGGGETQYF

SEQ ID NO: 110051 - protein, 15 aa, Homo sapiens
  CDR3 for alpha chain variable domain of TCR clone 55026 (TRAV8-4, TRAJ42)
CAVSDDRGSQGNLIF

SEQ ID NO: 110052 - protein, 17 aa, Homo sapiens
  CDR3 for beta chain variable domain of TCR clone 55026 (TRBV11-2, TRBJ2-1)
CASSLYPPGVEYDEQFF

SEQ ID NO: 110053 - protein, 11 aa, Homo sapiens
  CDR3 for alpha chain variable domain of TCR clone 55027 (TRAV13-1, TRAJ6)
CATLGSYIPTF

SEQ ID NO: 110054 - protein, 15 aa, Homo sapiens
  CDR3 for beta chain variable domain of TCR clone 55027 (TRBV11-2, TRBJ2-1)
CASSKNRGLIYEQFF

SEQ ID NO: 110055 - protein, 15 aa, Homo sapiens
  CDR3 for alpha chain variable domain of TCR clone 55028 (TRAV23/DV6, TRAJ18)
CAARYRGSTLGRLYF

SEQ ID NO: 110056 - protein, 16 aa, Homo sapiens
  CDR3 for beta chain variable domain of TCR clone 55028 (TRBV12-5, TRBJ2-5)
CASGPRTSGNQETQYF

SEQ ID NO: 110057 - protein, 18 aa, Homo sapiens
  CDR3 for alpha chain variable domain of TCR clone 55029 (TRAV9-2, TRAJ52)
CALSRRNAGGTSYGKLTF

SEQ ID NO: 110058 - protein, 13 aa, Homo sapiens
  CDR3 for beta chain variable domain of TCR clone 55029 (TRBV7-9, TRBJ1-2)
CASSLKQNYGYTF

SEQ ID NO: 110059 - protein, 15 aa, Homo sapiens
  CDR3 for alpha chain variable domain of TCR clone 55030 (TRAV1-2, TRAJ9)
CAVRDDGTGGFKTIF

SEQ ID NO: 110060 - protein, 13 aa, Homo sapiens
  CDR3 for beta chain variable domain of TCR clone 55030 (TRBV6-1, TRBJ1-1)
CASSRQGNTEAFF

SEQ ID NO: 110061 - protein, 14 aa, Homo sapiens
  CDR3 for alpha chain variable domain of TCR clone 55031 (TRAV38-1, TRAJ48)
CAFMANFGNEKLTF

SEQ ID NO: 110062 - protein, 14 aa, Homo sapiens
  CDR3 for beta chain variable domain of TCR clone 55031 (TRBV19, TRBJ1-2)
CASSLQGQAYGYTF

SEQ ID NO: 110063 - protein, 14 aa, Homo sapiens
  CDR3 for alpha chain variable domain of TCR clone 55032 (TRAV12-3, TRAJ29)
CAMSPYSGNTPLVF

SEQ ID NO: 110064 - protein, 13 aa, Homo sapiens
  CDR3 for beta chain variable domain of TCR clone 55032 (TRBV19, TRBJ1-5)
CASSMRGYQPQHF

SEQ ID NO: 110065 - protein, 14 aa, Homo sapiens
  CDR3 for alpha chain variable domain of TCR clone 55033 (TRAV4, TRAJ26)
CLVGPHNYGQNFFF

SEQ ID NO: 110066 - protein, 17 aa, Homo sapiens
  CDR3 for beta chain variable domain of TCR clone 55033 (TRBV20-1, TRBJ2-1)
CSASSSGLAGSYNEQFF

SEQ ID NO: 110067 - protein, 12 aa, Homo sapiens
  CDR3 for alpha chain variable domain of TCR clone 55034 (TRAV17, TRAJ20)
CATYSNDYKLSF

SEQ ID NO: 110068 - protein, 12 aa, Homo sapiens
  CDR3 for beta chain variable domain of TCR clone 55034 (TRBV24-1, TRBJ1-4)
CATSDPNEKLFF

SEQ ID NO: 110069 - protein, 13 aa, Homo sapiens
  CDR3 for alpha chain variable domain of TCR clone 55035 (TRAV21, TRAJ27)
CAPRPGNAGKSTF

SEQ ID NO: 110070 - protein, 14 aa, Homo sapiens
  CDR3 for beta chain variable domain of TCR clone 55035 (TRBV7-6, TRBJ2-3)
CASSLGTVTDTQYF

SEQ ID NO: 110071 - protein, 10 aa, Homo sapiens
  CDR3 for alpha chain variable domain of TCR clone 55036 (TRAV17, TRAJ36)
CATVAGNLFF

SEQ ID NO: 110072 - protein, 12 aa, Homo sapiens
  CDR3 for beta chain variable domain of TCR clone 55036 (TRBV11-2, TRBJ2-4)
CASNSASGSEYF

SEQ ID NO: 110073 - protein, 15 aa, Homo sapiens
  CDR3 for alpha chain variable domain of TCR clone 55037 (TRAV8-4, TRAJ52)
CAVSDGGTSYGKLTF

SEQ ID NO: 110074 - protein, 12 aa, Homo sapiens
  CDR3 for beta chain variable domain of TCR clone 55037 (TRBV29-1, TRBJ2-3)
CSVTSGGDTQYS

SEQ ID NO: 110075 - protein, 18 aa, Homo sapiens
  CDR3 for alpha chain variable domain of TCR clone 55038 (TRAV13-1, TRAJ52)
CAASKRSAGGTSYGKLTF

SEQ ID NO: 110076 - protein, 14 aa, Homo sapiens
  CDR3 for beta chain variable domain of TCR clone 55038 (TRBV19, TRBJ2-1)
CASPTFALSGEQFF

SEQ ID NO: 110077 - protein, 13 aa, Homo sapiens
  CDR3 for alpha chain variable domain of TCR clone 55039 (TRAV8-3, TRAJ28)
CAVGAVGSYQLTF

SEQ ID NO: 110078 - protein, 15 aa, Homo sapiens
  CDR3 for beta chain variable domain of TCR clone 55039 (TRBV11-2, TRBJ2-1)
CASSSPSTRYNEQFF

SEQ ID NO: 110079 - protein, 12 aa, Homo sapiens
  CDR3 for alpha chain variable domain of TCR clone 55040 (TRAV30, TRAJ43)
CGTEERGNDMRF

SEQ ID NO: 110080 - protein, 17 aa, Homo sapiens
  CDR3 for beta chain variable domain of TCR clone 55040 (TRBV13, TRBJ2-3)
CASSLSRVAGGRNTQYF

SEQ ID NO: 110081 - protein, 12 aa, Homo sapiens
  CDR3 for alpha chain variable domain of TCR clone 55041 (TRAV8-3, TRAJ26)
CAGDSYGQNFVF

SEQ ID NO: 110082 - protein, 15 aa, Homo sapiens
  CDR3 for beta chain variable domain of TCR clone 55041 (TRBV5-1, TRBJ2-3)
CASSVTSGSTDTQYF

SEQ ID NO: 110083 - protein, 16 aa, Homo sapiens
  CDR3 for alpha chain variable domain of TCR clone 55042 (TRAV12-1, TRAJ28)
CVVIAYSGAGSYQLTF

SEQ ID NO: 110084 - protein, 15 aa, Homo sapiens
  CDR3 for beta chain variable domain of TCR clone 55042 (TRBV14, TRBJ1-1)
CASSQEGMGSTEAFF

SEQ ID NO: 110085 - protein, 12 aa, Homo sapiens
  CDR3 for alpha chain variable domain of TCR clone 55043 (TRAV12-3, TRAJ17)
CAMTLTGNKLTF

SEQ ID NO: 110086 - protein, 16 aa, Homo sapiens
  CDR3 for beta chain variable domain of TCR clone 55043 (TRBV7-2, TRBJ1-2)
CASSSNQDRRGHGYTF

SEQ ID NO: 110087 - protein, 14 aa, Homo sapiens
  CDR3 for alpha chain variable domain of TCR clone 55044 (TRAV13-1, TRAJ44)
CAAKANGTASKLTF

SEQ ID NO: 110088 - protein, 13 aa, Homo sapiens
  CDR3 for beta chain variable domain of TCR clone 55044 (TRBV5-5, TRBJ1-2)
CASSFWRGEDYTF

SEQ ID NO: 110089 - protein, 15 aa, Homo sapiens
  CDR3 for alpha chain variable domain of TCR clone 55045 (TRAV27, TRAJ38)
CAARRNAGNNRKLIW

SEQ ID NO: 110090 - protein, 13 aa, Homo sapiens
  CDR3 for beta chain variable domain of TCR clone 55045 (TRBV12-5, TRBJ2-3)
CAIGDRQSDTQYF

SEQ ID NO: 110091 - protein, 15 aa, Homo sapiens
  CDR3 for alpha chain variable domain of TCR clone 55046 (TRAV25, TRAJ52)
CAGRPGGTSYGKLTF

SEQ ID NO: 110092 - protein, 14 aa, Homo sapiens
  CDR3 for beta chain variable domain of TCR clone 55046 (TRBV7-2, TRBJ2-3)
YASSQTGSSYTQYF

SEQ ID NO: 110093 - protein, 11 aa, Homo sapiens
  CDR3 for alpha chain variable domain of TCR clone 55047 (TRAV16, TRAJ49)
CSLRSGNQFYF

SEQ ID NO: 110094 - protein, 16 aa, Homo sapiens
  CDR3 for beta chain variable domain of TCR clone 55047 (TRBV20-1, TRBJ1-5)
CSARDVGGGWIQPQHF

SEQ ID NO: 110095 - protein, 15 aa, Homo sapiens
  CDR3 for alpha chain variable domain of TCR clone 55048 (TRAV26-1, TRAJ29)
CIVRVTNSGNAPLVF

SEQ ID NO: 110096 - protein, 12 aa, Homo sapiens
  CDR3 for beta chain variable domain of TCR clone 55048 (TRBV20-1, TRBJ1-2)
CSASWQGYGYTF

SEQ ID NO: 110097 - protein, 14 aa, Homo sapiens
  CDR3 for alpha chain variable domain of TCR clone 55049 (TRAV38-1, TRAJ40)
CALRPTSGTYKYIF

SEQ ID NO: 110098 - protein, 13 aa, Homo sapiens
  CDR3 for beta chain variable domain of TCR clone 55049 (TRBV19, TRBJ2-7)
CASSPRQSYEQYF

SEQ ID NO: 110099 - protein, 13 aa, Homo sapiens
  CDR3 for alpha chain variable domain of TCR clone 55050 (TRAV39, TRAJ48)
CAAVNFGNEKLTF

SEQ ID NO: 110100 - protein, 12 aa, Homo sapiens
  CDR3 for beta chain variable domain of TCR clone 55050 (TRBV5-5, TRBJ2-5)
CASSYCGETQYF

SEQ ID NO: 110101 - protein, 18 aa, Homo sapiens
  CDR3 for alpha chain variable domain of TCR clone 55051 (TRAV12-3, TRAJ52)
CAMSRTNAGGTSYGKLTF

SEQ ID NO: 110102 - protein, 17 aa, Homo sapiens
  CDR3 for beta chain variable domain of TCR clone 55051 (TRBV7-3, TRBJ2-3)
CASSLMKGMRGADTQYF

SEQ ID NO: 110103 - protein, 15 aa, Homo sapiens
  CDR3 for alpha chain variable domain of TCR clone 55052 (TRAV12-2, TRAJ53)
CAVNGGGGSNYELTF

SEQ ID NO: 110104 - protein, 16 aa, Homo sapiens
  CDR3 for beta chain variable domain of TCR clone 55052 (TRBV7-3, TRBJ2-3)
CASSLGLAGVADTQYF

SEQ ID NO: 110105 - protein, 16 aa, Homo sapiens
  CDR3 for alpha chain variable domain of TCR clone 55053 (TRAV3, TRAJ37)
CAVRGKGTGNTGKLIF

SEQ ID NO: 110106 - protein, 16 aa, Homo sapiens
  CDR3 for beta chain variable domain of TCR clone 55053 (TRBV7-7, TRBJ2-1)
CASSLASGTSYNEQFF

SEQ ID NO: 110107 - protein, 14 aa, Homo sapiens
  CDR3 for alpha chain variable domain of TCR clone 55054 (TRAV23/DV6, TRAJ40)
CAASLTSGTYKSIF

SEQ ID NO: 110108 - protein, 14 aa, Homo sapiens
  CDR3 for beta chain variable domain of TCR clone 55054 (TRBV5-1, TRBJ2-3)
CASSRGQGGGTQYF

SEQ ID NO: 110109 - protein, 13 aa, Homo sapiens
  CDR3 for alpha chain variable domain of TCR clone 55055 (TRAV13-1, TRAJ6)
CAASKGGRYIPTF

SEQ ID NO: 110110 - protein, 14 aa, Homo sapiens
  CDR3 for beta chain variable domain of TCR clone 55055 (TRBV7-2, TRBJ2-1)
CASSLGVGYNEQFF

SEQ ID NO: 110111 - protein, 11 aa, Homo sapiens
  CDR3 for alpha chain variable domain of TCR clone 55056 (TRAV2, TRAJ13)
CASGGYQKVTF

SEQ ID NO: 110112 - protein, 18 aa, Homo sapiens
  CDR3 for beta chain variable domain of TCR clone 55056 (TRBV18, TRBJ2-3)
CASSYTSGAAGGTDTQYF

SEQ ID NO: 110113 - protein, 14 aa, Homo sapiens
  CDR3 for alpha chain variable domain of TCR clone 55057 (TRAV17, TRAJ57)
CATDPQGGSEKLVL

SEQ ID NO: 110114 - protein, 18 aa, Homo sapiens
  CDR3 for beta chain variable domain of TCR clone 55057 (TRBV6-6, TRBJ1-3)
CASSYSKWDSISGNTIYF

SEQ ID NO: 110115 - protein, 14 aa, Homo sapiens
  CDR3 for alpha chain variable domain of TCR clone 55058 (TRAV12-3, TRAJ10)
SHLPLTGGGNKLTF

SEQ ID NO: 110116 - protein, 16 aa, Homo sapiens
  CDR3 for beta chain variable domain of TCR clone 55058 (TRBV7-2, TRBJ2-7)
CASSLEAGGPWYEQYF

SEQ ID NO: 110117 - protein, 12 aa, Homo sapiens
  CDR3 for alpha chain variable domain of TCR clone 55059 (TRAV12-1, TRAJ5)
RVADTGRRALTF

SEQ ID NO: 110118 - protein, 14 aa, Homo sapiens
  CDR3 for beta chain variable domain of TCR clone 55059 (TRBV2, TRBJ1-1)
CASSEQWGDTEAFF

SEQ ID NO: 110119 - protein, 18 aa, Homo sapiens
  CDR3 for alpha chain variable domain of TCR clone 55060 (TRAV21, TRAJ52)
CAVRSSPAGGTSYGKLTF

SEQ ID NO: 110120 - protein, 13 aa, Homo sapiens
  CDR3 for beta chain variable domain of TCR clone 55060 (TRBV10-3, TRBJ2-1)
CAISEFSGREQFF

SEQ ID NO: 110121 - protein, 13 aa, Homo sapiens
  CDR3 for alpha chain variable domain of TCR clone 55061 (TRAV8-3, TRAJ37)
CAVPSSNTGKLIF

SEQ ID NO: 110122 - protein, 12 aa, Homo sapiens
  CDR3 for beta chain variable domain of TCR clone 55061 (TRBV11-2, TRBJ2-1)
CASSPGNNEQLF

SEQ ID NO: 110123 - protein, 15 aa, Homo sapiens
  CDR3 for alpha chain variable domain of TCR clone 55062 (TRAV29/DV5, TRAJ29)
CAASERSSVNTPLVF

SEQ ID NO: 110124 - protein, 17 aa, Homo sapiens
  CDR3 for beta chain variable domain of TCR clone 55062 (TRBV4-1, TRBJ1-4)
CASSQEGPRGVEEKLFF

SEQ ID NO: 110125 - protein, 15 aa, Homo sapiens
  CDR3 for alpha chain variable domain of TCR clone 55063 (TRAV17, TRAJ57)
CATGPAQGGSEKLVF

SEQ ID NO: 110126 - protein, 16 aa, Homo sapiens
  CDR3 for beta chain variable domain of TCR clone 55063 (TRBV12-4, TRBJ1-5)
CASSRPVGGSNQPQHF

SEQ ID NO: 110127 - protein, 18 aa, Homo sapiens
  CDR3 for alpha chain variable domain of TCR clone 55064 (TRAV26-2, TRAJ54)
CILRDVEVGIQGAQKLVF

SEQ ID NO: 110128 - protein, 16 aa, Homo sapiens
  CDR3 for beta chain variable domain of TCR clone 55064 (TRBV6-1, TRBJ2-5)
CASSETLDRGAETQYL

SEQ ID NO: 110129 - protein, 14 aa, Homo sapiens
  CDR3 for alpha chain variable domain of TCR clone 55065 (TRAV9-2, TRAJ39)
CALYIYNAGNMLTF

SEQ ID NO: 110130 - protein, 15 aa, Homo sapiens
  CDR3 for beta chain variable domain of TCR clone 55065 (TRBV11-2, TRBJ1-3)
CASSAHSSSGNTIYF

SEQ ID NO: 110131 - protein, 17 aa, Homo sapiens
  CDR3 for alpha chain variable domain of TCR clone 55066 (TRAV13-1, TRAJ52)
CAAGRNAGGTSYGKLTF

SEQ ID NO: 110132 - protein, 13 aa, Homo sapiens
  CDR3 for beta chain variable domain of TCR clone 55066 (TRBV7-2, TRBJ1-1)
CASNPKGAKVAFF

SEQ ID NO: 110133 - protein, 18 aa, Homo sapiens
  CDR3 for alpha chain variable domain of TCR clone 55067 (TRAV29/DV5, TRAJ52)
CAAGFRSAGGTSYGKLTF

SEQ ID NO: 110134 - protein, 16 aa, Homo sapiens
  CDR3 for beta chain variable domain of TCR clone 55067 (TRBV7-3, TRBJ2-2)
CASSLKRGTLSGELFF

SEQ ID NO: 110135 - protein, 12 aa, Homo sapiens
  CDR3 for alpha chain variable domain of TCR clone 55068 (TRAV3, TRAJ31)
CAVRDGNARLMF

SEQ ID NO: 110136 - protein, 15 aa, Homo sapiens
  CDR3 for beta chain variable domain of TCR clone 55068 (TRBV7-9, TRBJ1-6)
CASSSPGRGNSPLHF

SEQ ID NO: 110137 - protein, 15 aa, Homo sapiens
  CDR3 for alpha chain variable domain of TCR clone 55069 (TRAV3, TRAJ30)
CAVRDEYGRDDEIIF

SEQ ID NO: 110138 - protein, 16 aa, Homo sapiens
  CDR3 for beta chain variable domain of TCR clone 55069 (TRBV5-1, TRBJ2-5)
CASSLANHRGRETQYF

SEQ ID NO: 110139 - protein, 14 aa, Homo sapiens
  CDR3 for alpha chain variable domain of TCR clone 55070 (TRAV1-2, TRAJ8)
CAVREDTGFQKLVF

SEQ ID NO: 110140 - protein, 13 aa, Homo sapiens
  CDR3 for beta chain variable domain of TCR clone 55070 (TRBV9, TRBJ1-1)
CASSVGTGTEAFF

SEQ ID NO: 110141 - protein, 11 aa, Homo sapiens
  CDR3 for alpha chain variable domain of TCR clone 55071 (TRAV1-1, TRAJ23)
CAVRQGGELIF

SEQ ID NO: 110142 - protein, 14 aa, Homo sapiens
  CDR3 for beta chain variable domain of TCR clone 55071 (TRBV19, TRBJ2-1)
CASPTFVLSGEQFF

SEQ ID NO: 110143 - protein, 15 aa, Homo sapiens
  CDR3 for alpha chain variable domain of TCR clone 55072 (TRAV8-6, TRAJ12)
CAVSTWMDSSYKLIF

SEQ ID NO: 110144 - protein, 15 aa, Homo sapiens
  CDR3 for beta chain variable domain of TCR clone 55072 (TRBV27, TRBJ1-5)
CASSLGTGFDQPQHF

SEQ ID NO: 110145 - protein, 14 aa, Homo sapiens
  CDR3 for alpha chain variable domain of TCR clone 55073 (TRAV1-2, TRAJ8)
CAVREDTGFQKLVF

SEQ ID NO: 110146 - protein, 14 aa, Homo sapiens
  CDR3 for beta chain variable domain of TCR clone 55073 (TRBV11-3, TRBJ2-7)
CASSPDRNTYEQYF

SEQ ID NO: 110147 - protein, 14 aa, Homo sapiens
  CDR3 for alpha chain variable domain of TCR clone 55074 (TRAV38-1, TRAJ29)
CAFITPSGNTPLVF

SEQ ID NO: 110148 - protein, 14 aa, Homo sapiens
  CDR3 for beta chain variable domain of TCR clone 55074 (TRBV18, TRBJ2-7)
CASSPRGGAYKQYF

SEQ ID NO: 110149 - protein, 15 aa, Homo sapiens
  CDR3 for alpha chain variable domain of TCR clone 55075 (TRAV35, TRAJ23)
CAGPLGNNQGGKLIF

SEQ ID NO: 110150 - protein, 14 aa, Homo sapiens
  CDR3 for beta chain variable domain of TCR clone 55075 (TRBV7-9, TRBJ1-1)
CASTPLQSYTEAVF

SEQ ID NO: 110151 - protein, 13 aa, Homo sapiens
  CDR3 for alpha chain variable domain of TCR clone 55076 (TRAV13-1, TRAJ12)
CAASPDSSYKLIF

SEQ ID NO: 110152 - protein, 16 aa, Homo sapiens
  CDR3 for beta chain variable domain of TCR clone 55076 (TRBV15, TRBJ2-1)
CATRRERLAGAYEQFF

SEQ ID NO: 110153 - protein, 17 aa, Homo sapiens
  CDR3 for alpha chain variable domain of TCR clone 55077 (TRAV4, TRAJ18)
CLVGERSVGSTLGRLYF

SEQ ID NO: 110154 - protein, 11 aa, Homo sapiens
  CDR3 for beta chain variable domain of TCR clone 55077 (TRBV20-1, TRBJ2-7)
CSGRQGHEQYF

SEQ ID NO: 110155 - protein, 15 aa, Homo sapiens
  CDR3 for alpha chain variable domain of TCR clone 55078 (TRAV9-2, TRAJ28)
CALSISGAGSYQLTF

SEQ ID NO: 110156 - protein, 14 aa, Homo sapiens
  CDR3 for beta chain variable domain of TCR clone 55078 (TRBV19, TRBJ2-1)
CASPTFVLSGEQFF

SEQ ID NO: 110157 - protein, 11 aa, Homo sapiens
  CDR3 for alpha chain variable domain of TCR clone 55079 (TRAV1-2, TRAJ20)
CAVANDYKFSF

SEQ ID NO: 110158 - protein, 16 aa, Homo sapiens
  CDR3 for beta chain variable domain of TCR clone 55079 (TRBV4-3, TRBJ1-6)
CASSQDPGVYNSPLHF

SEQ ID NO: 110159 - protein, 14 aa, Homo sapiens
  CDR3 for alpha chain variable domain of TCR clone 55080 (TRAV9-2, TRAJ39)
CALYIYNAGNMLTF

SEQ ID NO: 110160 - protein, 12 aa, Homo sapiens
  CDR3 for beta chain variable domain of TCR clone 55080 (TRBV7-2, TRBJ2-1)
CASSPQDIEQFF

SEQ ID NO: 110161 - protein, 12 aa, Homo sapiens
  CDR3 for alpha chain variable domain of TCR clone 55081 (TRAV13-1, TRAJ49)
CAASPMGNQFYF

SEQ ID NO: 110162 - protein, 13 aa, Homo sapiens
  CDR3 for beta chain variable domain of TCR clone 55081 (TRBV20-1, TRBJ2-2)
CSASAAGTGELFL

SEQ ID NO: 110163 - protein, 14 aa, Homo sapiens
  CDR3 for alpha chain variable domain of TCR clone 55082 (TRAV21, TRAJ35)
CAVMPIGFGNVLHC

SEQ ID NO: 110164 - protein, 16 aa, Homo sapiens
  CDR3 for beta chain variable domain of TCR clone 55082 (TRBV20-1, TRBJ2-3)
CSARLHSAGAIDTQYF

SEQ ID NO: 110165 - protein, 11 aa, Homo sapiens
  CDR3 for alpha chain variable domain of TCR clone 55083 (TRAV1-2, TRAJ31)
CAVNNNARLMF

SEQ ID NO: 110166 - protein, 15 aa, Homo sapiens
  CDR3 for beta chain variable domain of TCR clone 55083 (TRBV28, TRBJ2-1)
CVSSIIAGGRSEQFF

SEQ ID NO: 110167 - protein, 12 aa, Homo sapiens
  CDR3 for alpha chain variable domain of TCR clone 55084 (TRAV13-1, TRAJ9)
CASHTGGFKTTF

SEQ ID NO: 110168 - protein, 13 aa, Homo sapiens
  CDR3 for beta chain variable domain of TCR clone 55084 (TRBV12-4, TRBJ1-2)
CASSSGSKDGYTF

SEQ ID NO: 110169 - protein, 11 aa, Homo sapiens
  CDR3 for alpha chain variable domain of TCR clone 55085 (TRAV13-2, TRAJ31)
CAENMDARLMF

SEQ ID NO: 110170 - protein, 15 aa, Homo sapiens
  CDR3 for beta chain variable domain of TCR clone 55085 (TRBV7-8, TRBJ1-2)
CASSLGRDGGLGYTF

SEQ ID NO: 110171 - protein, 14 aa, Homo sapiens
  CDR3 for alpha chain variable domain of TCR clone 55086 (TRAV8-3, TRAJ28)
CAVVPGAGSYQLTF

SEQ ID NO: 110172 - protein, 13 aa, Homo sapiens
  CDR3 for beta chain variable domain of TCR clone 55086 (TRBV4-2, TRBJ1-1)
CASSQAGNTEAFF

SEQ ID NO: 110173 - protein, 18 aa, Homo sapiens
  CDR3 for alpha chain variable domain of TCR clone 55087 (TRAV29/DV5, TRAJ52)
CAAGCRGAGGTSYGKLTF

SEQ ID NO: 110174 - protein, 16 aa, Homo sapiens
  CDR3 for beta chain variable domain of TCR clone 55087 (TRBV7-3, TRBJ2-2)
CASSLKRGTLSGELFF

SEQ ID NO: 110175 - protein, 13 aa, Homo sapiens
  CDR3 for alpha chain variable domain of TCR clone 55088 (TRAV12-2, TRAJ20)
CAVYPSNDHKLSF

SEQ ID NO: 110176 - protein, 15 aa, Homo sapiens
  CDR3 for beta chain variable domain of TCR clone 55088 (TRBV27, TRBJ2-5)
CASSLYPRGGETQYF

SEQ ID NO: 110177 - protein, 13 aa, Homo sapiens
  CDR3 for alpha chain variable domain of TCR clone 55089 (TRAV13-1, TRAJ6)
CAASRGGSYIPTF

SEQ ID NO: 110178 - protein, 15 aa, Homo sapiens
  CDR3 for beta chain variable domain of TCR clone 55089 (TRBV25-1, TRBJ2-5)
CASSDTGTHQDTQYF

SEQ ID NO: 110179 - protein, 11 aa, Homo sapiens
  CDR3 for alpha chain variable domain of TCR clone 55090 (TRAV35, TRAJ34)
CWARNTDKLIF

SEQ ID NO: 110180 - protein, 15 aa, Homo sapiens
  CDR3 for beta chain variable domain of TCR clone 55090 (TRBV20-1, TRBJ2-7)
CSARDRVSGMDEQYF

SEQ ID NO: 110181 - protein, 12 aa, Homo sapiens
  CDR3 for alpha chain variable domain of TCR clone 55091 (TRAV12-1, TRAJ40)
CVFYSGTYKYIS

SEQ ID NO: 110182 - protein, 18 aa, Homo sapiens
  CDR3 for beta chain variable domain of TCR clone 55091 (TRBV12-4, TRBJ2-2)
CASSLVAGTRGRTGELFF

SEQ ID NO: 110183 - protein, 12 aa, Homo sapiens
  CDR3 for alpha chain variable domain of TCR clone 55092 (TRAV30, TRAJ43)
CGTEERGNDIRF

SEQ ID NO: 110184 - protein, 17 aa, Homo sapiens
  CDR3 for beta chain variable domain of TCR clone 55092 (TRBV11-2, TRBJ2-1)
CASSLYPPGVEYNEQFF

SEQ ID NO: 110185 - protein, 14 aa, Homo sapiens
  CDR3 for alpha chain variable domain of TCR clone 55093 (TRAV12-2, TRAJ36)
CAVTISTGANNLFF

SEQ ID NO: 110186 - protein, 14 aa, Homo sapiens
  CDR3 for beta chain variable domain of TCR clone 55093 (TRBV25-1, TRBJ1-2)
CASSDTTGVVGYTF

SEQ ID NO: 110187 - protein, 15 aa, Homo sapiens
  CDR3 for alpha chain variable domain of TCR clone 55094 (TRAV26-1, TRAJ29)
CIVRVEGSGNTPLVF

SEQ ID NO: 110188 - protein, 14 aa, Homo sapiens
  CDR3 for beta chain variable domain of TCR clone 55094 (TRBV7-9, TRBJ1-5)
CSSQGHQPNQPQHF

SEQ ID NO: 110189 - protein, 15 aa, Homo sapiens
  CDR3 for alpha chain variable domain of TCR clone 55095 (TRAV17, TRAJ23)
CATDAEDNPGGKLIF

SEQ ID NO: 110190 - protein, 12 aa, Homo sapiens
  CDR3 for beta chain variable domain of TCR clone 55095 (TRBV2, TRBJ2-1)
CAKREGYNEQFF

SEQ ID NO: 110191 - protein, 10 aa, Homo sapiens
  CDR3 for alpha chain variable domain of TCR clone 55096 (TRAV5, TRAJ34)
CAEDTDKLIF

SEQ ID NO: 110192 - protein, 15 aa, Homo sapiens
  CDR3 for beta chain variable domain of TCR clone 55096 (TRBV6-3, TRBJ2-7)
CASSSPGTVFYEQYF

SEQ ID NO: 110193 - protein, 14 aa, Homo sapiens
  CDR3 for alpha chain variable domain of TCR clone 55097 (TRAV3, TRAJ21)
CAVESQANFSKFYF

SEQ ID NO: 110194 - protein, 18 aa, Homo sapiens
  CDR3 for beta chain variable domain of TCR clone 55097 (TRBV7-9, TRBJ2-1)
CASSLAVSGTSGRNEQFF

SEQ ID NO: 110195 - protein, 11 aa, Homo sapiens
  CDR3 for alpha chain variable domain of TCR clone 55098 (TRAV12-3, TRAJ17)
CMTLTGNKLTF

SEQ ID NO: 110196 - protein, 14 aa, Homo sapiens
  CDR3 for beta chain variable domain of TCR clone 55098 (TRBV20-1, TRBJ1-3)
CSASPTGAGNTIYF

SEQ ID NO: 110197 - protein, 12 aa, Homo sapiens
  CDR3 for alpha chain variable domain of TCR clone 55099 (TRAV36/DV7, TRAJ54)
CAVVRGAQKLVF

SEQ ID NO: 110198 - protein, 14 aa, Homo sapiens
  CDR3 for beta chain variable domain of TCR clone 55099 (TRBV7-3, TRBJ1-1)
FASSLKGGNTEAFF

SEQ ID NO: 110199 - protein, 18 aa, Homo sapiens
  CDR3 for alpha chain variable domain of TCR clone 55100 (TRAV21, TRAJ52)
CAVRPSPAGGTSYGKLTF

SEQ ID NO: 110200 - protein, 16 aa, Homo sapiens
  CDR3 for beta chain variable domain of TCR clone 55100 (TRBV13, TRBJ2-3)
GQQPLQGSGGRNTQYF

SEQ ID NO: 110201 - protein, 13 aa, Homo sapiens
  CDR3 for alpha chain variable domain of TCR clone 55101 (TRAV13-2, TRAJ22)
CRDPSGSARQLTF

SEQ ID NO: 110202 - protein, 13 aa, Homo sapiens
  CDR3 for beta chain variable domain of TCR clone 55101 (TRBV12-5, TRBJ2-3)
CASGDRQPDTQYF

SEQ ID NO: 110203 - protein, 15 aa, Homo sapiens
  CDR3 for alpha chain variable domain of TCR clone 55102 (TRAV12-2, TRAJ43)
CAFDMSFGAGTRLTV

SEQ ID NO: 110204 - protein, 18 aa, Homo sapiens
  CDR3 for beta chain variable domain of TCR clone 55102 (TRBV20-1, TRBJ2-3)
CSASGLAGGPGTTDTQYF

SEQ ID NO: 110205 - protein, 14 aa, Homo sapiens
  CDR3 for alpha chain variable domain of TCR clone 55103 (TRAV1-2, TRAJ6)
CAVSLSGGSYIPTF

SEQ ID NO: 110206 - protein, 15 aa, Homo sapiens
  CDR3 for beta chain variable domain of TCR clone 55103 (TRBV28, TRBJ2-7)
CASGPGGRGFYEQYF

SEQ ID NO: 110207 - protein, 13 aa, Homo sapiens
  CDR3 for alpha chain variable domain of TCR clone 55104 (TRAV21, TRAJ27)
CAARPGNAGKSTF

SEQ ID NO: 110208 - protein, 13 aa, Homo sapiens
  CDR3 for beta chain variable domain of TCR clone 55104 (TRBV13, TRBJ2-1)
CASILGVRGEQFF

SEQ ID NO: 110209 - protein, 16 aa, Homo sapiens
  CDR3 for alpha chain variable domain of TCR clone 55105 (TRAV12-3, TRAJ53)
CAMSPGSGGSNYKLTF

SEQ ID NO: 110210 - protein, 15 aa, Homo sapiens
  CDR3 for beta chain variable domain of TCR clone 55105 (TRBV7-3, TRBJ2-1)
CASSLDGNSYNEQFF

SEQ ID NO: 110211 - protein, 14 aa, Homo sapiens
  CDR3 for alpha chain variable domain of TCR clone 55106 (TRAV17, TRAJ6)
CATDASGVSYIPTF

SEQ ID NO: 110212 - protein, 19 aa, Homo sapiens
  CDR3 for beta chain variable domain of TCR clone 55106 (TRBV4-3, TRBJ2-7)
CASSQEFIGWQVTPYEQYF

SEQ ID NO: 110213 - protein, 18 aa, Homo sapiens
  CDR3 for alpha chain variable domain of TCR clone 55107 (TRAV26-1, TRAJ52)
CIVRVEGAGGTSYGKLTF

SEQ ID NO: 110214 - protein, 13 aa, Homo sapiens
  CDR3 for beta chain variable domain of TCR clone 55107 (TRBV7-3, TRBJ1-2)
CASSLKRGYGYIF

SEQ ID NO: 110215 - protein, 21 aa, Homo sapiens
  CDR3 for alpha chain variable domain of TCR clone 55108 (TRAV8-4, TRAJ47)
HLTKPSAHMSDAAERGNKLVF

SEQ ID NO: 110216 - protein, 14 aa, Homo sapiens
  CDR3 for beta chain variable domain of TCR clone 55108 (TRBV7-9, TRBJ2-1)
CASSPRDSLYGQFF

SEQ ID NO: 110217 - protein, 19 aa, Homo sapiens
  CDR3 for alpha chain variable domain of TCR clone 55109 (TRAV1-2, TRAJ26)
CLLPLCCERPDNYGQNFVF

SEQ ID NO: 110218 - protein, 13 aa, Homo sapiens
  CDR3 for beta chain variable domain of TCR clone 55109 (TRBV4-2, TRBJ1-1)
CASSQAGNTEAFF

SEQ ID NO: 110219 - protein, 13 aa, Homo sapiens
  CDR3 for alpha chain variable domain of TCR clone 55110 (TRAV23/DV6, TRAJ22)
CAPYFGSARQLTF

SEQ ID NO: 110220 - protein, 13 aa, Homo sapiens
  CDR3 for beta chain variable domain of TCR clone 55110 (TRBV6-1, TRBJ1-1)
CASSRQGNTEAFF

SEQ ID NO: 110221 - protein, 15 aa, Homo sapiens
  CDR3 for alpha chain variable domain of TCR clone 55111 (TRAV23/DV6, TRAJ39)
CAASMGNNAGNMFTF

SEQ ID NO: 110222 - protein, 17 aa, Homo sapiens
  CDR3 for beta chain variable domain of TCR clone 55111 (TRBV28, TRBJ2-1)
CASSAPWGTPSYNEQFF

SEQ ID NO: 110223 - protein, 13 aa, Homo sapiens
  CDR3 for alpha chain variable domain of TCR clone 55112 (TRAV12-3, TRAJ9)
CAMRNTGGFKTIF

SEQ ID NO: 110224 - protein, 14 aa, Homo sapiens
  CDR3 for beta chain variable domain of TCR clone 55112 (TRBV25-1, TRBJ1-1)
CASTHLGGNTEAFF

SEQ ID NO: 110225 - protein, 14 aa, Homo sapiens
  CDR3 for alpha chain variable domain of TCR clone 55113 (TRAV1-2, TRAJ16)
CAVNRFSDGQKLLF

SEQ ID NO: 110226 - protein, 16 aa, Homo sapiens
  CDR3 for beta chain variable domain of TCR clone 55113 (TRBV7-3, TRBJ2-2)
CASSLKRGTVSGELFF

SEQ ID NO: 110227 - protein, 12 aa, Homo sapiens
  CDR3 for alpha chain variable domain of TCR clone 55114 (TRAV12-3, TRAJ34)
CAMGYNTDKLIF

SEQ ID NO: 110228 - protein, 14 aa, Homo sapiens
  CDR3 for beta chain variable domain of TCR clone 55114 (TRBV5-7, TRBJ1-5)
CASSRTGGGPPQHF

SEQ ID NO: 110229 - protein, 11 aa, Homo sapiens
  CDR3 for alpha chain variable domain of TCR clone 55115 (TRAV17, TRAJ43)
CATPRSNDMRF

SEQ ID NO: 110230 - protein, 15 aa, Homo sapiens
  CDR3 for beta chain variable domain of TCR clone 55115 (TRBV5-1, TRBJ2-1)
CASSQAGYWWNEQFF

SEQ ID NO: 110231 - protein, 16 aa, Homo sapiens
  CDR3 for alpha chain variable domain of TCR clone 55116 (TRAV1-2, TRAJ10)
CAVRGVLTGGGNKLTF

SEQ ID NO: 110232 - protein, 15 aa, Homo sapiens
  CDR3 for beta chain variable domain of TCR clone 55116 (TRBV15, TRBJ1-5)
CATGRDPVSNQPQHF

SEQ ID NO: 110233 - protein, 14 aa, Homo sapiens
  CDR3 for alpha chain variable domain of TCR clone 55117 (TRAV8-4, TRAJ23)
CAVSAPGSGGKLIF

SEQ ID NO: 110234 - protein, 17 aa, Homo sapiens
  CDR3 for beta chain variable domain of TCR clone 55117 (TRBV4-3, TRBJ2-3)
CASSQDPLAGAVDTQYL

SEQ ID NO: 110235 - protein, 12 aa, Homo sapiens
  CDR3 for alpha chain variable domain of TCR clone 55118 (TRAV2, TRAJ9)
CAVGAGGFKTIF

SEQ ID NO: 110236 - protein, 15 aa, Homo sapiens
  CDR3 for beta chain variable domain of TCR clone 55118 (TRBV7-2, TRBJ2-1)
CASSLASGRVNEQFF

SEQ ID NO: 110237 - protein, 13 aa, Homo sapiens
  CDR3 for alpha chain variable domain of TCR clone 55119 (TRAV21, TRAJ56)
CAVRTGANSKLTF

SEQ ID NO: 110238 - protein, 15 aa, Homo sapiens
  CDR3 for beta chain variable domain of TCR clone 55119 (TRBV7-9, TRBJ1-1)
CASSHSGTVNTEAFF

SEQ ID NO: 110239 - protein, 14 aa, Homo sapiens
  CDR3 for alpha chain variable domain of TCR clone 55120 (TRAV12-3, TRAJ33)
CAMSAGDSNYQLIW

SEQ ID NO: 110240 - protein, 14 aa, Homo sapiens
  CDR3 for beta chain variable domain of TCR clone 55120 (TRBV12-4, TRBJ1-1)
CASSLGTGGTEAFF

SEQ ID NO: 110241 - protein, 12 aa, Homo sapiens
  CDR3 for alpha chain variable domain of TCR clone 55121 (TRAV13-2, TRAJ23)
CAERHRGGKLIF

SEQ ID NO: 110242 - protein, 16 aa, Homo sapiens
  CDR3 for beta chain variable domain of TCR clone 55121 (TRBV20-1, TRBJ1-4)
CSAPGQGLLTNEKLFV

SEQ ID NO: 110243 - protein, 14 aa, Homo sapiens
  CDR3 for alpha chain variable domain of TCR clone 55122 (TRAV16, TRAJ33)
CALSAMDSNYQLIW

SEQ ID NO: 110244 - protein, 12 aa, Homo sapiens
  CDR3 for beta chain variable domain of TCR clone 55122 (TRBV5-1, TRBJ1-2)
CASSQDIYGYTF

SEQ ID NO: 110245 - protein, 12 aa, Homo sapiens
  CDR3 for alpha chain variable domain of TCR clone 55123 (TRAV12-3, TRAJ9)
CAMSTGGFKTIF

SEQ ID NO: 110246 - protein, 12 aa, Homo sapiens
  CDR3 for beta chain variable domain of TCR clone 55123 (TRBV7-8, TRBJ2-7)
CASSLGDREQYF

SEQ ID NO: 110247 - protein, 13 aa, Homo sapiens
  CDR3 for alpha chain variable domain of TCR clone 55124 (TRAV13-1, TRAJ6)
CAASKGGSYIPTF

SEQ ID NO: 110248 - protein, 14 aa, Homo sapiens
  CDR3 for beta chain variable domain of TCR clone 55124 (TRBV7-2, TRBJ2-1)
CASSLGVGYSEQFF

SEQ ID NO: 110249 - protein, 18 aa, Homo sapiens
  CDR3 for alpha chain variable domain of TCR clone 55125 (TRAV3, TRAJ17)
CAVRARRGGRSCRQQANF

SEQ ID NO: 110250 - protein, 14 aa, Homo sapiens
  CDR3 for beta chain variable domain of TCR clone 55125 (TRBV4-1, TRBJ2-2)
CARSQAVNTGELFF

SEQ ID NO: 110251 - protein, 11 aa, Homo sapiens
  CDR3 for alpha chain variable domain of TCR clone 55126 (TRAV12-3, TRAJ43)
CAMSVSNDIRF

SEQ ID NO: 110252 - protein, 15 aa, Homo sapiens
  CDR3 for beta chain variable domain of TCR clone 55126 (TRBV5-1, TRBJ2-1)
CASSPPRAPYNEQFF

SEQ ID NO: 110253 - protein, 14 aa, Homo sapiens
  CDR3 for alpha chain variable domain of TCR clone 55127 (TRAV12-2, TRAJ48)
CAVNAFFGNEKLTF

SEQ ID NO: 110254 - protein, 13 aa, Homo sapiens
  CDR3 for beta chain variable domain of TCR clone 55127 (TRBV28, TRBJ2-7)
WAGAQQGLDEQYF

SEQ ID NO: 110255 - protein, 13 aa, Homo sapiens
  CDR3 for alpha chain variable domain of TCR clone 55128 (TRAV1-2, TRAJ9)
CAALNTGGFKTIF

SEQ ID NO: 110256 - protein, 15 aa, Homo sapiens
  CDR3 for beta chain variable domain of TCR clone 55128 (TRBV19, TRBJ1-6)
CASSTQGAVGSPLHF

SEQ ID NO: 110257 - protein, 19 aa, Homo sapiens
  CDR3 for alpha chain variable domain of TCR clone 55129 (TRAV17, TRAJ17)
CATDGRPGVIKAAGNKLTF

SEQ ID NO: 110258 - protein, 13 aa, Homo sapiens
  CDR3 for beta chain variable domain of TCR clone 55129 (TRBV12-4, TRBJ1-1)
CQQFIGFQTEAFF

SEQ ID NO: 110259 - protein, 13 aa, Homo sapiens
  CDR3 for alpha chain variable domain of TCR clone 55130 (TRAV2, TRAJ15)
CAVASQAGTALIF

SEQ ID NO: 110260 - protein, 16 aa, Homo sapiens
  CDR3 for beta chain variable domain of TCR clone 55130 (TRBV5-1, TRBJ1-1)
GASSSGGNSLNTEAFF

SEQ ID NO: 110261 - protein, 14 aa, Homo sapiens
  CDR3 for alpha chain variable domain of TCR clone 55131 (TRAV8-1, TRAJ5)
CAVRTDTGRRALTF

SEQ ID NO: 110262 - protein, 16 aa, Homo sapiens
  CDR3 for beta chain variable domain of TCR clone 55131 (TRBV7-3, TRBJ2-3)
CASSLSGYRPEDTQYF

SEQ ID NO: 110263 - protein, 14 aa, Homo sapiens
  CDR3 for alpha chain variable domain of TCR clone 55132 (TRAV12-3, TRAJ10)
SHLPLTGGGSKLTF

SEQ ID NO: 110264 - protein, 19 aa, Homo sapiens
  CDR3 for beta chain variable domain of TCR clone 55132 (TRBV4-1, TRBJ1-1)
CASSRIILTPRGVNTEAFF

SEQ ID NO: 110265 - protein, 10 aa, Homo sapiens
  CDR3 for alpha chain variable domain of TCR clone 55133 (TRAV36/DV7, TRAJ56)
CAGPAVELTF

SEQ ID NO: 110266 - protein, 13 aa, Homo sapiens
  CDR3 for beta chain variable domain of TCR clone 55133 (TRBV7-9, TRBJ2-7)
YASSFWSSYEQYF

SEQ ID NO: 110267 - protein, 14 aa, Homo sapiens
  CDR3 for alpha chain variable domain of TCR clone 55134 (TRAV8-3, TRAJ4)
CAVGAAGGYNKLIF

SEQ ID NO: 110268 - protein, 15 aa, Homo sapiens
  CDR3 for beta chain variable domain of TCR clone 55134 (TRBV28, TRBJ1-3)
CASSMGWASGNTIYF

SEQ ID NO: 110269 - protein, 14 aa, Homo sapiens
  CDR3 for alpha chain variable domain of TCR clone 55135 (TRAV1-2, TRAJ16)
CAVNRFSDGQKLLF

SEQ ID NO: 110270 - protein, 15 aa, Homo sapiens
  CDR3 for beta chain variable domain of TCR clone 55135 (TRBV11-2, TRBJ2-2)
CASRGLAANTGELFF

SEQ ID NO: 110271 - protein, 14 aa, Homo sapiens
  CDR3 for alpha chain variable domain of TCR clone 55136 (TRAV8-3, TRAJ4)
CAVGAAGGYNKLIF

SEQ ID NO: 110272 - protein, 14 aa, Homo sapiens
  CDR3 for beta chain variable domain of TCR clone 55136 (TRBV4-2, TRBJ2-5)
CASSQDRGRETQYF

SEQ ID NO: 110273 - protein, 15 aa, Homo sapiens
  CDR3 for alpha chain variable domain of TCR clone 55137 (TRAV27, TRAJ38)
CAGRFNAGNNRKLIL

SEQ ID NO: 110274 - protein, 13 aa, Homo sapiens
  CDR3 for beta chain variable domain of TCR clone 55137 (TRBV12-5, TRBJ2-3)
CASQNRGIDTQYF

SEQ ID NO: 110275 - protein, 14 aa, Homo sapiens
  CDR3 for alpha chain variable domain of TCR clone 55138 (TRAV9-2, TRAJ39)
CALYIYNAGNMLTF

SEQ ID NO: 110276 - protein, 13 aa, Homo sapiens
  CDR3 for beta chain variable domain of TCR clone 55138 (TRBV19, TRBJ2-7)
CASRKAGGSEQYF

SEQ ID NO: 110277 - protein, 14 aa, Homo sapiens
  CDR3 for alpha chain variable domain of TCR clone 55139 (TRAV8-3, TRAJ9)
CAVVYNTGGFKTIF

SEQ ID NO: 110278 - protein, 16 aa, Homo sapiens
  CDR3 for beta chain variable domain of TCR clone 55139 (TRBV7-2, TRBJ1-2)
CASSSNQDRRGHGYTF

SEQ ID NO: 110279 - protein, 17 aa, Homo sapiens
  CDR3 for alpha chain variable domain of TCR clone 55140 (TRAV13-1, TRAJ52)
CAASSGAGGTSYGKLTF

SEQ ID NO: 110280 - protein, 12 aa, Homo sapiens
  CDR3 for beta chain variable domain of TCR clone 55140 (TRBV2, TRBJ2-1)
CAYGPPGNEQFF

SEQ ID NO: 110281 - protein, 14 aa, Homo sapiens
  CDR3 for alpha chain variable domain of TCR clone 55141 (TRAV12-2, TRAJ24)
CAMTPADSWGKLQF

SEQ ID NO: 110282 - protein, 12 aa, Homo sapiens
  CDR3 for beta chain variable domain of TCR clone 55141 (TRBV3-1, TRBJ2-1)
CASSQGSSGQFF

SEQ ID NO: 110283 - protein, 14 aa, Homo sapiens
  CDR3 for alpha chain variable domain of TCR clone 55142 (TRAV8-3, TRAJ4)
CAVGAAGGYNKLIF

SEQ ID NO: 110284 - protein, 15 aa, Homo sapiens
  CDR3 for beta chain variable domain of TCR clone 55142 (TRBV5-1, TRBJ2-3)
CASSVTSGSTDTQYF

SEQ ID NO: 110285 - protein, 14 aa, Homo sapiens
  CDR3 for alpha chain variable domain of TCR clone 55143 (TRAV35, TRAJ22)
CAGLRPGSARQLTF

SEQ ID NO: 110286 - protein, 16 aa, Homo sapiens
  CDR3 for beta chain variable domain of TCR clone 55143 (TRBV7-3, TRBJ2-2)
CASSLKRGTLSGELFF

SEQ ID NO: 110287 - protein, 17 aa, Homo sapiens
  CDR3 for alpha chain variable domain of TCR clone 55144 (TRAV13-1, TRAJ52)
CAASSGAVGTSYGKLTF

SEQ ID NO: 110288 - protein, 15 aa, Homo sapiens
  CDR3 for beta chain variable domain of TCR clone 55144 (TRBV2, TRBJ2-1)
CASSELAGSYNEQFF

SEQ ID NO: 110289 - protein, 19 aa, Homo sapiens
  CDR3 for alpha chain variable domain of TCR clone 55145 (TRAV35, TRAJ30)
CAPGGMTRSSLEKGHDFIF

SEQ ID NO: 110290 - protein, 13 aa, Homo sapiens
  CDR3 for beta chain variable domain of TCR clone 55145 (TRBV7-6, TRBJ2-1)
CQQLGGGADEQFF

SEQ ID NO: 110291 - protein, 15 aa, Homo sapiens
  CDR3 for alpha chain variable domain of TCR clone 55146 (TRAV13-1, TRAJ18)
CAASGGSSTLGRLYF

SEQ ID NO: 110292 - protein, 13 aa, Homo sapiens
  CDR3 for beta chain variable domain of TCR clone 55146 (TRBV18, TRBJ2-1)
CASGLASNNEQFF

SEQ ID NO: 110293 - protein, 16 aa, Homo sapiens
  CDR3 for alpha chain variable domain of TCR clone 55147 (TRAV4, TRAJ22)
CIVGDLYSGSARQLTF

SEQ ID NO: 110294 - protein, 16 aa, Homo sapiens
  CDR3 for beta chain variable domain of TCR clone 55147 (TRBV7-9, TRBJ2-1)
CASSDVAGGSYNEQFF

SEQ ID NO: 110295 - protein, 16 aa, Homo sapiens
  CDR3 for alpha chain variable domain of TCR clone 55148 (TRAV16, TRAJ4)
CITVLPFSGGYNKLIL

SEQ ID NO: 110296 - protein, 14 aa, Homo sapiens
  CDR3 for beta chain variable domain of TCR clone 55148 (TRBV19, TRBJ2-7)
CASSMGQGAIEQYF

SEQ ID NO: 110297 - protein, 14 aa, Homo sapiens
  CDR3 for alpha chain variable domain of TCR clone 55149 (TRAV1-2, TRAJ16)
CAVNRFSDGQELLF

SEQ ID NO: 110298 - protein, 15 aa, Homo sapiens
  CDR3 for beta chain variable domain of TCR clone 55149 (TRBV7-9, TRBJ1-6)
CASSSPGRGNSPLHF

SEQ ID NO: 110299 - protein, 14 aa, Homo sapiens
  CDR3 for alpha chain variable domain of TCR clone 55150 (TRAV12-3, TRAJ42)
CAMNYGGSQGNLIF

SEQ ID NO: 110300 - protein, 15 aa, Homo sapiens
  CDR3 for beta chain variable domain of TCR clone 55150 (TRBV5-7, TRBJ1-5)
CASSYGNLWDQPQHF

SEQ ID NO: 110301 - protein, 19 aa, Homo sapiens
  CDR3 for alpha chain variable domain of TCR clone 55151 (TRAV3, TRAJ6)
CAVRDRNPSRSGGSYIPTF

SEQ ID NO: 110302 - protein, 15 aa, Homo sapiens
  CDR3 for beta chain variable domain of TCR clone 55151 (TRBV18, TRBJ2-7)
CASSLTFMDSYEQYF

SEQ ID NO: 110303 - protein, 14 aa, Homo sapiens
  CDR3 for alpha chain variable domain of TCR clone 55152 (TRAV8-2, TRAJ11)
CVVSEKSGYSPLTF

SEQ ID NO: 110304 - protein, 16 aa, Homo sapiens
  CDR3 for beta chain variable domain of TCR clone 55152 (TRBV28, TRBJ2-1)
CASSSPEYPRDNEQFF

SEQ ID NO: 110305 - protein, 12 aa, Homo sapiens
  CDR3 for alpha chain variable domain of TCR clone 55153 (TRAV21, TRAJ31)
CAASPARGRLMF

SEQ ID NO: 110306 - protein, 14 aa, Homo sapiens
  CDR3 for beta chain variable domain of TCR clone 55153 (TRBV28, TRBJ2-7)
CASSLLRISYEQYF

SEQ ID NO: 110307 - protein, 20 aa, Homo sapiens
  CDR3 for alpha chain variable domain of TCR clone 55154 (TRAV1-2, TRAJ8)
CAVREDTGFQKLVLELAPDF

SEQ ID NO: 110308 - protein, 14 aa, Homo sapiens
  CDR3 for beta chain variable domain of TCR clone 55154 (TRBV5-4, TRBJ1-1)
CASSLDSRRDEAFF

SEQ ID NO: 110309 - protein, 13 aa, Homo sapiens
  CDR3 for alpha chain variable domain of TCR clone 55155 (TRAV21, TRAJ57)
YAVIEGGSEKLVF

SEQ ID NO: 110310 - protein, 15 aa, Homo sapiens
  CDR3 for beta chain variable domain of TCR clone 55155 (TRBV10-3, TRBJ2-5)
CAISEFGRGQETQYF

SEQ ID NO: 110311 - protein, 15 aa, Homo sapiens
  CDR3 for alpha chain variable domain of TCR clone 55156 (TRAV21, TRAJ24)
CAARSSTDSWGKLQF

SEQ ID NO: 110312 - protein, 14 aa, Homo sapiens
  CDR3 for beta chain variable domain of TCR clone 55156 (TRBV7-2, TRBJ1-1)
CASSFLTGTTEAFF

SEQ ID NO: 110313 - protein, 13 aa, Homo sapiens
  CDR3 for alpha chain variable domain of TCR clone 55157 (TRAV12-2, TRAJ52)
CNAGGTSYGKLTF

SEQ ID NO: 110314 - protein, 12 aa, Homo sapiens
  CDR3 for beta chain variable domain of TCR clone 55157 (TRBV29-1, TRBJ2-3)
CSVTGGADTQYF

SEQ ID NO: 110315 - protein, 13 aa, Homo sapiens
  CDR3 for alpha chain variable domain of TCR clone 55158 (TRAV29/DV5, TRAJ47)
CAASAEYGNKLVF

SEQ ID NO: 110316 - protein, 15 aa, Homo sapiens
  CDR3 for beta chain variable domain of TCR clone 55158 (TRBV7-9, TRBJ1-4)
CASSARTGGNEKLLF

SEQ ID NO: 110317 - protein, 15 aa, Homo sapiens
  CDR3 for alpha chain variable domain of TCR clone 55159 (TRAV35, TRAJ23)
CAGPLGDNQGGKLIF

SEQ ID NO: 110318 - protein, 14 aa, Homo sapiens
  CDR3 for beta chain variable domain of TCR clone 55159 (TRBV7-9, TRBJ1-1)
CASTPLQSYTEAFF

SEQ ID NO: 110319 - protein, 13 aa, Homo sapiens
  CDR3 for alpha chain variable domain of TCR clone 55160 (TRAV17, TRAJ26)
CATVDNYGQIFVF

SEQ ID NO: 110320 - protein, 16 aa, Homo sapiens
  CDR3 for beta chain variable domain of TCR clone 55160 (TRBV2, TRBJ2-1)
CASSVGGSLSYNEQFF

SEQ ID NO: 110321 - protein, 14 aa, Homo sapiens
  CDR3 for alpha chain variable domain of TCR clone 55161 (TRAV23/DV6, TRAJ11)
CAASLESGYSTHTF

SEQ ID NO: 110322 - protein, 13 aa, Homo sapiens
  CDR3 for beta chain variable domain of TCR clone 55161 (TRBV4-1, TRBJ2-5)
CASSLTRGETQYF

SEQ ID NO: 110323 - protein, 15 aa, Homo sapiens
  CDR3 for alpha chain variable domain of TCR clone 55162 (TRAV8-4, TRAJ37)
CAVTYGSSNTGKLIF

SEQ ID NO: 110324 - protein, 13 aa, Homo sapiens
  CDR3 for beta chain variable domain of TCR clone 55162 (TRBV7-9, TRBJ2-5)
CASLPSGRETQYF

SEQ ID NO: 110325 - protein, 15 aa, Homo sapiens
  CDR3 for alpha chain variable domain of TCR clone 55163 (TRAV4, TRAJ10)
CLVGDEEGGGKKLTF

SEQ ID NO: 110326 - protein, 15 aa, Homo sapiens
  CDR3 for beta chain variable domain of TCR clone 55163 (TRBV7-2, TRBJ2-7)
CASSLTGQGTYEQYF

SEQ ID NO: 110327 - protein, 12 aa, Homo sapiens
  CDR3 for alpha chain variable domain of TCR clone 55164 (TRAV26-1, TRAJ17)
CIVRSAGNKLTF

SEQ ID NO: 110328 - protein, 12 aa, Homo sapiens
  CDR3 for beta chain variable domain of TCR clone 55164 (TRBV7-9, TRBJ2-7)
CASSLEGYEQYF

SEQ ID NO: 110329 - protein, 10 aa, Homo sapiens
  CDR3 for alpha chain variable domain of TCR clone 55165 (TRAV30, TRAJ48)
CGIGNEKLTI

SEQ ID NO: 110330 - protein, 14 aa, Homo sapiens
  CDR3 for beta chain variable domain of TCR clone 55165 (TRBV7-6, TRBJ2-3)
CASSVAGGTDTQYF

SEQ ID NO: 110331 - protein, 12 aa, Homo sapiens
  CDR3 for alpha chain variable domain of TCR clone 55166 (TRAV17, TRAJ57)
CATDGGSEKLVF

SEQ ID NO: 110332 - protein, 16 aa, Homo sapiens
  CDR3 for beta chain variable domain of TCR clone 55166 (TRBV2, TRBJ2-1)
CASRPRSGGPYGEQFF

SEQ ID NO: 110333 - protein, 16 aa, Homo sapiens
  CDR3 for alpha chain variable domain of TCR clone 55167 (TRAV12-3, TRAJ53)
CAMSPGSGGSNYRLTF

SEQ ID NO: 110334 - protein, 15 aa, Homo sapiens
  CDR3 for beta chain variable domain of TCR clone 55167 (TRBV25-1, TRBJ1-4)
CASSKRIATNEKLFF

SEQ ID NO: 110335 - protein, 13 aa, Homo sapiens
  CDR3 for alpha chain variable domain of TCR clone 55168 (TRAV2, TRAJ40)
CAVVTSGTYKYIF

SEQ ID NO: 110336 - protein, 14 aa, Homo sapiens
  CDR3 for beta chain variable domain of TCR clone 55168 (TRBV19, TRBJ2-3)
CASSAPRGTDTQYL

SEQ ID NO: 110337 - protein, 13 aa, Homo sapiens
  CDR3 for alpha chain variable domain of TCR clone 55169 (TRAV40, TRAJ43)
SAVYYRPNNDMRF

SEQ ID NO: 110338 - protein, 13 aa, Homo sapiens
  CDR3 for beta chain variable domain of TCR clone 55169 (TRBV7-2, TRBJ2-4)
CASSREHANIQYF

SEQ ID NO: 110339 - protein, 14 aa, Homo sapiens
  CDR3 for alpha chain variable domain of TCR clone 55170 (TRAV12-2, TRAJ13)
CAVKKTGGYQKVTF

SEQ ID NO: 110340 - protein, 16 aa, Homo sapiens
  CDR3 for beta chain variable domain of TCR clone 55170 (TRBV5-4, TRBJ2-3)
CASQQPGAGGADTQYF

SEQ ID NO: 110341 - protein, 20 aa, Homo sapiens
  CDR3 for alpha chain variable domain of TCR clone 55171 (TRAV26-1, TRAJ42)
CCVLLHRQTYYGGSQGNLIF

SEQ ID NO: 110342 - protein, 16 aa, Homo sapiens
  CDR3 for beta chain variable domain of TCR clone 55171 (TRBV7-3, TRBJ2-2)
CASSLKRGTLAGELFF

SEQ ID NO: 110343 - protein, 14 aa, Homo sapiens
  CDR3 for alpha chain variable domain of TCR clone 55172 (TRAV9-2, TRAJ39)
CALYIYNAGNMLTF

SEQ ID NO: 110344 - protein, 18 aa, Homo sapiens
  CDR3 for beta chain variable domain of TCR clone 55172 (TRBV12-4, TRBJ2-5)
CASSSGGGGDPVLRARHA

SEQ ID NO: 110345 - protein, 19 aa, Homo sapiens
  CDR3 for alpha chain variable domain of TCR clone 55173 (TRAV38-1, TRAJ53)
CALMKHGLESGGSNYKLTF

SEQ ID NO: 110346 - protein, 13 aa, Homo sapiens
  CDR3 for beta chain variable domain of TCR clone 55173 (TRBV19, TRBJ2-7)
CASSPRQSYEQYF

SEQ ID NO: 110347 - protein, 14 aa, Homo sapiens
  CDR3 for alpha chain variable domain of TCR clone 55174 (TRAV12-2, TRAJ17)
CAVLFKAAGNKLTF

SEQ ID NO: 110348 - protein, 13 aa, Homo sapiens
  CDR3 for beta chain variable domain of TCR clone 55174 (TRBV19, TRBJ2-5)
CASSITTQETQYF

SEQ ID NO: 110349 - protein, 14 aa, Homo sapiens
  CDR3 for alpha chain variable domain of TCR clone 55175 (TRAV8-1, TRAJ5)
CAVRTDTGRRALTF

SEQ ID NO: 110350 - protein, 12 aa, Homo sapiens
  CDR3 for beta chain variable domain of TCR clone 55175 (TRBV19, TRBJ2-1)
CASSMQDTEQFF

SEQ ID NO: 110351 - protein, 13 aa, Homo sapiens
  CDR3 for alpha chain variable domain of TCR clone 55176 (TRAV12-3, TRAJ16)
CAVQLSDGQKLLF

SEQ ID NO: 110352 - protein, 15 aa, Homo sapiens
  CDR3 for beta chain variable domain of TCR clone 55176 (TRBV6-3, TRBJ2-7)
CASSSPGTVFYEQYF

SEQ ID NO: 110353 - protein, 13 aa, Homo sapiens
  CDR3 for alpha chain variable domain of TCR clone 55177 (TRAV27, TRAJ8)
CAGGPTGFQKLVF

SEQ ID NO: 110354 - protein, 13 aa, Homo sapiens
  CDR3 for beta chain variable domain of TCR clone 55177 (TRBV7-3, TRBJ1-1)
CASSQDWGAEAFF

SEQ ID NO: 110355 - protein, 17 aa, Homo sapiens
  CDR3 for alpha chain variable domain of TCR clone 55178 (TRAV12-3, TRAJ6)
CAMSARGGAGGSYLPTF

SEQ ID NO: 110356 - protein, 12 aa, Homo sapiens
  CDR3 for beta chain variable domain of TCR clone 55178 (TRBV12-4, TRBJ2-3)
CASSTLPDTQYF

SEQ ID NO: 110357 - protein, 14 aa, Homo sapiens
  CDR3 for alpha chain variable domain of TCR clone 55179 (TRAV1-2, TRAJ8)
CAVREDTGFQKLVF

SEQ ID NO: 110358 - protein, 15 aa, Homo sapiens
  CDR3 for beta chain variable domain of TCR clone 55179 (TRBV7-9, TRBJ1-1)
CASSHRGTVNTEAFS

SEQ ID NO: 110359 - protein, 18 aa, Homo sapiens
  CDR3 for alpha chain variable domain of TCR clone 55180 (TRAV1-2, TRAJ18)
CAVRDMGDRGSTLGRLYF

SEQ ID NO: 110360 - protein, 16 aa, Homo sapiens
  CDR3 for beta chain variable domain of TCR clone 55180 (TRBV29-1, TRBJ1-2)
CSVEANRDIANYGYSF

SEQ ID NO: 110361 - protein, 14 aa, Homo sapiens
  CDR3 for alpha chain variable domain of TCR clone 55181 (TRAV20, TRAJ56)
CAVQFGGANSKLTF

SEQ ID NO: 110362 - protein, 11 aa, Homo sapiens
  CDR3 for beta chain variable domain of TCR clone 55181 (TRBV12-4, TRBJ2-3)
CASTATDTQYF

SEQ ID NO: 110363 - protein, 16 aa, Homo sapiens
  CDR3 for alpha chain variable domain of TCR clone 55182 (TRAV8-3, TRAJ8)
CAVPRDGNTGFRKLVF

SEQ ID NO: 110364 - protein, 14 aa, Homo sapiens
  CDR3 for beta chain variable domain of TCR clone 55182 (TRBV28, TRBJ1-1)
CASSESGRGTEAFF

SEQ ID NO: 110365 - protein, 16 aa, Homo sapiens
  CDR3 for alpha chain variable domain of TCR clone 55183 (TRAV26-1, TRAJ53)
CIVRVAMGGSNYKLTF

SEQ ID NO: 110366 - protein, 16 aa, Homo sapiens
  CDR3 for beta chain variable domain of TCR clone 55183 (TRBV7-8, TRBJ2-6)
CASRVGDSSGANVLTF

SEQ ID NO: 110367 - protein, 13 aa, Homo sapiens
  CDR3 for alpha chain variable domain of TCR clone 55184 (TRAV35, TRAJ32)
CAGVGGATNKLIF

SEQ ID NO: 110368 - protein, 16 aa, Homo sapiens
  CDR3 for beta chain variable domain of TCR clone 55184 (TRBV13, TRBJ2-2)
CASSPRTGEHTGELFF

SEQ ID NO: 110369 - protein, 14 aa, Homo sapiens
  CDR3 for alpha chain variable domain of TCR clone 55185 (TRAV12-3, TRAJ9)
CAMSPNTGGFKTIF

SEQ ID NO: 110370 - protein, 12 aa, Homo sapiens
  CDR3 for beta chain variable domain of TCR clone 55185 (TRBV19, TRBJ1-5)
CVSSIAQQPQHF

SEQ ID NO: 110371 - protein, 10 aa, Homo sapiens
  CDR3 for alpha chain variable domain of TCR clone 55186 (TRAV17, TRAJ31)
CATDGARLTF

SEQ ID NO: 110372 - protein, 13 aa, Homo sapiens
  CDR3 for beta chain variable domain of TCR clone 55186 (TRBV14, TRBJ1-6)
CASSQSIYSPLHF

SEQ ID NO: 110373 - protein, 19 aa, Homo sapiens
  CDR3 for alpha chain variable domain of TCR clone 55187 (TRAV4, TRAJ10)
CCVLLPRGDGSGGGNKLTF

SEQ ID NO: 110374 - protein, 15 aa, Homo sapiens
  CDR3 for beta chain variable domain of TCR clone 55187 (TRBV27, TRBJ2-3)
CASSSLAGVIDTQYF

SEQ ID NO: 110375 - protein, 12 aa, Homo sapiens
  CDR3 for alpha chain variable domain of TCR clone 55188 (TRAV1-2, TRAJ13)
PGPSGGYQKVTF

SEQ ID NO: 110376 - protein, 15 aa, Homo sapiens
  CDR3 for beta chain variable domain of TCR clone 55188 (TRBV7-9, TRBJ1-6)
CASSSPGRGNSPLHF

SEQ ID NO: 110377 - protein, 16 aa, Homo sapiens
  CDR3 for alpha chain variable domain of TCR clone 55189 (TRAV17, TRAJ52)
CATSNAGGTSYGKLTF

SEQ ID NO: 110378 - protein, 13 aa, Homo sapiens
  CDR3 for beta chain variable domain of TCR clone 55189 (TRBV27, TRBJ1-6)
CASSLVLVSHLHF

SEQ ID NO: 110379 - protein, 14 aa, Homo sapiens
  CDR3 for alpha chain variable domain of TCR clone 55190 (TRAV12-2, TRAJ45)
CAVNIGGGADGLPF

SEQ ID NO: 110380 - protein, 13 aa, Homo sapiens
  CDR3 for beta chain variable domain of TCR clone 55190 (TRBV19, TRBJ2-2)
CASSIWSTGELFF

SEQ ID NO: 110381 - protein, 14 aa, Homo sapiens
  CDR3 for alpha chain variable domain of TCR clone 55191 (TRAV26-1, TRAJ39)
CIVRGSRAANMLTF

SEQ ID NO: 110382 - protein, 15 aa, Homo sapiens
  CDR3 for beta chain variable domain of TCR clone 55191 (TRBV7-9, TRBJ1-5)
CASSQGHQPNQPQHF

SEQ ID NO: 110383 - protein, 13 aa, Homo sapiens
  CDR3 for alpha chain variable domain of TCR clone 55192 (TRAV13-2, TRAJ48)
CAEMDFGNEKLTF

SEQ ID NO: 110384 - protein, 17 aa, Homo sapiens
  CDR3 for beta chain variable domain of TCR clone 55192 (TRBV11-2, TRBJ2-1)
CASSLYPPGVEYNEQFF

SEQ ID NO: 110385 - protein, 11 aa, Homo sapiens
  CDR3 for alpha chain variable domain of TCR clone 55193 (TRAV13-1, TRAJ20)
CAASNDYKLSF

SEQ ID NO: 110386 - protein, 15 aa, Homo sapiens
  CDR3 for beta chain variable domain of TCR clone 55193 (TRBV27, TRBJ2-1)
CASSNGGGSSNEQFF

SEQ ID NO: 110387 - protein, 14 aa, Homo sapiens
  CDR3 for alpha chain variable domain of TCR clone 55194 (TRAV1-1, TRAJ27)
CAVIYNTNAGKSTF

SEQ ID NO: 110388 - protein, 15 aa, Homo sapiens
  CDR3 for beta chain variable domain of TCR clone 55194 (TRBV7-2, TRBJ2-1)
CASRSGLAGSNEQFF

SEQ ID NO: 110389 - protein, 12 aa, Homo sapiens
  CDR3 for alpha chain variable domain of TCR clone 55195 (TRAV30, TRAJ43)
CGTEERGNDMRC

SEQ ID NO: 110390 - protein, 13 aa, Homo sapiens
  CDR3 for beta chain variable domain of TCR clone 55195 (TRBV27, TRBJ2-7)
CASSFSQGYEQYF

SEQ ID NO: 110391 - protein, 13 aa, Homo sapiens
  CDR3 for alpha chain variable domain of TCR clone 55196 (TRAV13-1, TRAJ21)
CAASIYNFNKFYF

SEQ ID NO: 110392 - protein, 13 aa, Homo sapiens
  CDR3 for beta chain variable domain of TCR clone 55196 (TRBV27, TRBJ1-4)
CASSLMGDEQLFF

SEQ ID NO: 110393 - protein, 12 aa, Homo sapiens
  CDR3 for alpha chain variable domain of TCR clone 55197 (TRAV13-1, TRAJ42)
VNYGGSQGNLIF

SEQ ID NO: 110394 - protein, 15 aa, Homo sapiens
  CDR3 for beta chain variable domain of TCR clone 55197 (TRBV5-1, TRBJ2-7)
CASSLYPDGGYEQYF

SEQ ID NO: 110395 - protein, 12 aa, Homo sapiens
  CDR3 for alpha chain variable domain of TCR clone 55198 (TRAV13-1, TRAJ15)
CSASQAGTALIF

SEQ ID NO: 110396 - protein, 18 aa, Homo sapiens
  CDR3 for beta chain variable domain of TCR clone 55198 (TRBV7-9, TRBJ2-3)
CASSLPINGQISTDTQYF

SEQ ID NO: 110397 - protein, 12 aa, Homo sapiens
  CDR3 for alpha chain variable domain of TCR clone 55199 (TRAV8-3, TRAJ20)
CAVGANDYKLSF

SEQ ID NO: 110398 - protein, 16 aa, Homo sapiens
  CDR3 for beta chain variable domain of TCR clone 55199 (TRBV19, TRBJ2-2)
CASRFPGTGATGELFF

SEQ ID NO: 110399 - protein, 13 aa, Homo sapiens
  CDR3 for alpha chain variable domain of TCR clone 55200 (TRAV12-1, TRAJ40)
CVVPTSGTYKYIF

SEQ ID NO: 110400 - protein, 18 aa, Homo sapiens
  CDR3 for beta chain variable domain of TCR clone 55200 (TRBV7-6, TRBJ2-1)
CASSTRTSGMSSYNEQFF

SEQ ID NO: 110401 - protein, 12 aa, Homo sapiens
  CDR3 for alpha chain variable domain of TCR clone 55201 (TRAV2, TRAJ31)
CAVEDNNARLMF

SEQ ID NO: 110402 - protein, 14 aa, Homo sapiens
  CDR3 for beta chain variable domain of TCR clone 55201 (TRBV7-2, TRBJ2-7)
CASRSQGAAYEQYF

SEQ ID NO: 110403 - protein, 14 aa, Homo sapiens
  CDR3 for alpha chain variable domain of TCR clone 55202 (TRAV12-2, TRAJ44)
CAVNPAGTASKLTF

SEQ ID NO: 110404 - protein, 16 aa, Homo sapiens
  CDR3 for beta chain variable domain of TCR clone 55202 (TRBV2, TRBJ2-1)
CASSVGGSLSYSEQFF

SEQ ID NO: 110405 - protein, 13 aa, Homo sapiens
  CDR3 for alpha chain variable domain of TCR clone 55203 (TRAV8-3, TRAJ28)
CAVGAVGSYQLTF

SEQ ID NO: 110406 - protein, 15 aa, Homo sapiens
  CDR3 for beta chain variable domain of TCR clone 55203 (TRBV7-9, TRBJ1-5)
CASSQGHQPNQPEHF

SEQ ID NO: 110407 - protein, 14 aa, Homo sapiens
  CDR3 for alpha chain variable domain of TCR clone 55204 (TRAV1-2, TRAJ16)
CAVNRFSDGQKLLF

SEQ ID NO: 110408 - protein, 16 aa, Homo sapiens
  CDR3 for beta chain variable domain of TCR clone 55204 (TRBV12-4, TRBJ1-5)
CASRQPVEGSNQPQHF

SEQ ID NO: 110409 - protein, 15 aa, Homo sapiens
  CDR3 for alpha chain variable domain of TCR clone 55205 (TRAV4, TRAJ4)
CLVGPLSGDYNKLIF

SEQ ID NO: 110410 - protein, 16 aa, Homo sapiens
  CDR3 for beta chain variable domain of TCR clone 55205 (TRBV7-8, TRBJ1-4)
CASSLGVGTSNEKLFF

SEQ ID NO: 110411 - protein, 17 aa, Homo sapiens
  CDR3 for alpha chain variable domain of TCR clone 55206 (TRAV12-2, TRAJ36)
CAVKDNLFFGTGTRLTV

SEQ ID NO: 110412 - protein, 15 aa, Homo sapiens
  CDR3 for beta chain variable domain of TCR clone 55206 (TRBV28, TRBJ2-2)
CASTVAGASTGELFF

SEQ ID NO: 110413 - protein, 16 aa, Homo sapiens
  CDR3 for alpha chain variable domain of TCR clone 55207 (TRAV38-1, TRAJ34)
CAFMKHDETYTDKLIF

SEQ ID NO: 110414 - protein, 13 aa, Homo sapiens
  CDR3 for beta chain variable domain of TCR clone 55207 (TRBV11-3, TRBJ2-3)
CASSHDTKDTQYF

SEQ ID NO: 110415 - protein, 12 aa, Homo sapiens
  CDR3 for alpha chain variable domain of TCR clone 55208 (TRAV13-2, TRAJ23)
CAERHRGGKLIF

SEQ ID NO: 110416 - protein, 14 aa, Homo sapiens
  CDR3 for beta chain variable domain of TCR clone 55208 (TRBV11-2, TRBJ1-2)
CASSLGKANYGYTF

SEQ ID NO: 110417 - protein, 12 aa, Homo sapiens
  CDR3 for alpha chain variable domain of TCR clone 55209 (TRAV21, TRAJ23)
YAVGPQGGKLIF

SEQ ID NO: 110418 - protein, 13 aa, Homo sapiens
  CDR3 for beta chain variable domain of TCR clone 55209 (TRBV20-1, TRBJ2-7)
CSARTGAGYEQYF

SEQ ID NO: 110419 - protein, 16 aa, Homo sapiens
  CDR3 for alpha chain variable domain of TCR clone 55210 (TRAV3, TRAJ37)
CAVRGKGSGNTGKLIF

SEQ ID NO: 110420 - protein, 14 aa, Homo sapiens
  CDR3 for beta chain variable domain of TCR clone 55210 (TRBV11-2, TRBJ1-2)
CASSLGTANYGYTF

SEQ ID NO: 110421 - protein, 12 aa, Homo sapiens
  CDR3 for alpha chain variable domain of TCR clone 55211 (TRAV13-1, TRAJ21)
CAAKEGFNKFYF

SEQ ID NO: 110422 - protein, 19 aa, Homo sapiens
  CDR3 for beta chain variable domain of TCR clone 55211 (TRBV2, TRBJ2-7)
CASSDDGTSGRANDYEQYF

SEQ ID NO: 110423 - protein, 14 aa, Homo sapiens
  CDR3 for alpha chain variable domain of TCR clone 55212 (TRAV12-1, TRAJ12)
CVVTRMDSSYKLIF

SEQ ID NO: 110424 - protein, 14 aa, Homo sapiens
  CDR3 for beta chain variable domain of TCR clone 55212 (TRBV4-1, TRBJ2-7)
CASSPVAGGDEQYS

SEQ ID NO: 110425 - protein, 14 aa, Homo sapiens
  CDR3 for alpha chain variable domain of TCR clone 55213 (TRAV13-1, TRAJ44)
CAAKATGTASKFTF

SEQ ID NO: 110426 - protein, 17 aa, Homo sapiens
  CDR3 for beta chain variable domain of TCR clone 55213 (TRBV7-3, TRBJ2-3)
CASSLMKRMRGADTQYF

SEQ ID NO: 110427 - protein, 15 aa, Homo sapiens
  CDR3 for alpha chain variable domain of TCR clone 55214 (TRAV26-1, TRAJ48)
RIVRVGDFGNEKLTF

SEQ ID NO: 110428 - protein, 16 aa, Homo sapiens
  CDR3 for beta chain variable domain of TCR clone 55214 (TRBV4-1, TRBJ2-3)
CASSQRAGGLTDTQYF

SEQ ID NO: 110429 - protein, 12 aa, Homo sapiens
  CDR3 for alpha chain variable domain of TCR clone 55215 (TRAV27, TRAJ35)
CAGADFGNVLHC

SEQ ID NO: 110430 - protein, 16 aa, Homo sapiens
  CDR3 for beta chain variable domain of TCR clone 55215 (TRBV6-1, TRBJ2-1)
CASILRQGSSYNEQFV

SEQ ID NO: 110431 - protein, 13 aa, Homo sapiens
  CDR3 for alpha chain variable domain of TCR clone 55216 (TRAV12-1, TRAJ6)
CVVFPGGSYIPTF

SEQ ID NO: 110432 - protein, 12 aa, Homo sapiens
  CDR3 for beta chain variable domain of TCR clone 55216 (TRBV11-2, TRBJ2-2)
CASSLGGGELSF

SEQ ID NO: 110433 - protein, 16 aa, Homo sapiens
  CDR3 for alpha chain variable domain of TCR clone 55217 (TRAV12-1, TRAJ43)
CVVNPHRFGAGTRLTV

SEQ ID NO: 110434 - protein, 13 aa, Homo sapiens
  CDR3 for beta chain variable domain of TCR clone 55217 (TRBV12-4, TRBJ1-2)
RASSSGPNYGYTF

SEQ ID NO: 110435 - protein, 16 aa, Homo sapiens
  CDR3 for alpha chain variable domain of TCR clone 55218 (TRAV27, TRAJ53)
CAAPEGSGGSNYKRTF

SEQ ID NO: 110436 - protein, 15 aa, Homo sapiens
  CDR3 for beta chain variable domain of TCR clone 55218 (TRBV20-1, TRBJ1-1)
CSASRGVTGNTEAFF

SEQ ID NO: 110437 - protein, 10 aa, Homo sapiens
  CDR3 for alpha chain variable domain of TCR clone 55219 (TRAV12-3, TRAJ49)
CAMNDEQFYF

SEQ ID NO: 110438 - protein, 13 aa, Homo sapiens
  CDR3 for beta chain variable domain of TCR clone 55219 (TRBV12-4, TRBJ1-1)
CASSPGTGFEAFF

SEQ ID NO: 110439 - protein, 15 aa, Homo sapiens
  CDR3 for alpha chain variable domain of TCR clone 55220 (TRAV20, TRAJ4)
CAVQVFSGGHNKLIF

SEQ ID NO: 110440 - protein, 14 aa, Homo sapiens
  CDR3 for beta chain variable domain of TCR clone 55220 (TRBV7-6, TRBJ2-3)
CASNSGGDANTQYF

SEQ ID NO: 110441 - protein, 17 aa, Homo sapiens
  CDR3 for alpha chain variable domain of TCR clone 55221 (TRAV13-1, TRAJ52)
CAASSGAGGTSYGKLTF

SEQ ID NO: 110442 - protein, 14 aa, Homo sapiens
  CDR3 for beta chain variable domain of TCR clone 55221 (TRBV7-6, TRBJ2-3)
CASSLGTVTDTQYF

SEQ ID NO: 110443 - protein, 13 aa, Homo sapiens
  CDR3 for alpha chain variable domain of TCR clone 55222 (TRAV21, TRAJ27)
CAARPGNAGKSTF

SEQ ID NO: 110444 - protein, 14 aa, Homo sapiens
  CDR3 for beta chain variable domain of TCR clone 55222 (TRBV7-6, TRBJ2-3)
CASSLATVTDTQYF

SEQ ID NO: 110445 - protein, 11 aa, Homo sapiens
  CDR3 for alpha chain variable domain of TCR clone 55223 (TRAV12-1, TRAJ30)
CVVNGQDKIIF

SEQ ID NO: 110446 - protein, 12 aa, Homo sapiens
  CDR3 for beta chain variable domain of TCR clone 55223 (TRBV27, TRBJ2-2)
CASKLFTGELSF

SEQ ID NO: 110447 - protein, 11 aa, Homo sapiens
  CDR3 for alpha chain variable domain of TCR clone 55224 (TRAV13-2, TRAJ17)
CAENKGGKLQA

SEQ ID NO: 110448 - protein, 12 aa, Homo sapiens
  CDR3 for beta chain variable domain of TCR clone 55224 (TRBV11-2, TRBJ2-1)
CASSPGNNEQFF

SEQ ID NO: 110449 - protein, 14 aa, Homo sapiens
  CDR3 for alpha chain variable domain of TCR clone 55225 (TRAV8-4, TRAJ9)
CAVRINTGGFKTIF

SEQ ID NO: 110450 - protein, 15 aa, Homo sapiens
  CDR3 for beta chain variable domain of TCR clone 55225 (TRBV6-3, TRBJ2-2)
CASSFLATLTGELFF

SEQ ID NO: 110451 - protein, 13 aa, Homo sapiens
  CDR3 for alpha chain variable domain of TCR clone 55226 (TRAV2, TRAJ40)
CAVVTSGTYKYIF

SEQ ID NO: 110452 - protein, 15 aa, Homo sapiens
  CDR3 for beta chain variable domain of TCR clone 55226 (TRBV19, TRBJ1-2)
CASGRDGGGGYGYTF

SEQ ID NO: 110453 - protein, 11 aa, Homo sapiens
  CDR3 for alpha chain variable domain of TCR clone 55227 (TRAV35, TRAJ34)
CWARNTDKLIF

SEQ ID NO: 110454 - protein, 14 aa, Homo sapiens
  CDR3 for beta chain variable domain of TCR clone 55227 (TRBV19, TRBJ2-3)
CASSAPRGTDTQYF

SEQ ID NO: 110455 - protein, 17 aa, Homo sapiens
  CDR3 for alpha chain variable domain of TCR clone 55228 (TRAV13-1, TRAJ52)
CAASSGAGGTSYGKLTF

SEQ ID NO: 110456 - protein, 15 aa, Homo sapiens
  CDR3 for beta chain variable domain of TCR clone 55228 (TRBV2, TRBJ2-1)
CASSERAGSYNEQFF

SEQ ID NO: 110457 - protein, 13 aa, Homo sapiens
  CDR3 for alpha chain variable domain of TCR clone 55229 (TRAV12-3, TRAJ13)
CAMSSWGYQKVTF

SEQ ID NO: 110458 - protein, 13 aa, Homo sapiens
  CDR3 for beta chain variable domain of TCR clone 55229 (TRBV20-1, TRBJ1-1)
CSAPPGGHTEAFF

SEQ ID NO: 110459 - protein, 14 aa, Homo sapiens
  CDR3 for alpha chain variable domain of TCR clone 55230 (TRAV12-3, TRAJ29)
CAMSPYSGNTPLVF

SEQ ID NO: 110460 - protein, 14 aa, Homo sapiens
  CDR3 for beta chain variable domain of TCR clone 55230 (TRBV19, TRBJ2-1)
CASPTFVLSGEQFF

SEQ ID NO: 110461 - protein, 15 aa, Homo sapiens
  CDR3 for alpha chain variable domain of TCR clone 55231 (TRAV8-3, TRAJ11)
CVVGLLNSGYSTLTF

SEQ ID NO: 110462 - protein, 13 aa, Homo sapiens
  CDR3 for beta chain variable domain of TCR clone 55231 (TRBV4-1, TRBJ2-5)
RQQPQRSGETQYF

SEQ ID NO: 110463 - protein, 13 aa, Homo sapiens
  CDR3 for alpha chain variable domain of TCR clone 55232 (TRAV2, TRAJ40)
CAVVTSGTYKYIF

SEQ ID NO: 110464 - protein, 16 aa, Homo sapiens
  CDR3 for beta chain variable domain of TCR clone 55232 (TRBV19, TRBJ2-1)
CASDLGRLSSYNEQFF

SEQ ID NO: 110465 - protein, 15 aa, Homo sapiens
  CDR3 for alpha chain variable domain of TCR clone 55233 (TRAV14/DV4, TRAJ15)
CAMREGWQAGTALIF

SEQ ID NO: 110466 - protein, 14 aa, Homo sapiens
  CDR3 for beta chain variable domain of TCR clone 55233 (TRBV19, TRBJ1-5)
CASRAPDSFLSQHF

SEQ ID NO: 110467 - protein, 17 aa, Homo sapiens
  CDR3 for alpha chain variable domain of TCR clone 55234 (TRAV3, TRAJ42)
CAVRDRDYGGSQGNLIF

SEQ ID NO: 110468 - protein, 12 aa, Homo sapiens
  CDR3 for beta chain variable domain of TCR clone 55234 (TRBV12-4, TRBJ2-7)
CASSLGGYEQYF

SEQ ID NO: 110469 - protein, 14 aa, Homo sapiens
  CDR3 for alpha chain variable domain of TCR clone 55235 (TRAV4, TRAJ6)
CLVGEAGGSYVPTF

SEQ ID NO: 110470 - protein, 16 aa, Homo sapiens
  CDR3 for beta chain variable domain of TCR clone 55235 (TRBV7-6, TRBJ2-1)
CASSLNEGPSYNEQFF

SEQ ID NO: 110471 - protein, 14 aa, Homo sapiens
  CDR3 for alpha chain variable domain of TCR clone 55236 (TRAV20, TRAJ17)
CAARREAAGNKLTF

SEQ ID NO: 110472 - protein, 13 aa, Homo sapiens
  CDR3 for beta chain variable domain of TCR clone 55236 (TRBV23-1, TRBJ2-1)
CASNRETYNEQFF

SEQ ID NO: 110473 - protein, 15 aa, Homo sapiens
  CDR3 for alpha chain variable domain of TCR clone 55237 (TRAV12-2, TRAJ9)
CAVNNERTGGFKTIF

SEQ ID NO: 110474 - protein, 14 aa, Homo sapiens
  CDR3 for beta chain variable domain of TCR clone 55237 (TRBV4-1, TRBJ1-4)
RASSQERKNEKLFF

SEQ ID NO: 110475 - protein, 12 aa, Homo sapiens
  CDR3 for alpha chain variable domain of TCR clone 55238 (TRAV13-2, TRAJ23)
CAERHRGGKLIF

SEQ ID NO: 110476 - protein, 13 aa, Homo sapiens
  CDR3 for beta chain variable domain of TCR clone 55238 (TRBV20-1, TRBJ2-5)
CSARGDYQETQYF

SEQ ID NO: 110477 - protein, 19 aa, Homo sapiens
  CDR3 for alpha chain variable domain of TCR clone 55239 (TRAV1-2, TRAJ26)
CLLPLCCERPDNYGQNFVF

SEQ ID NO: 110478 - protein, 15 aa, Homo sapiens
  CDR3 for beta chain variable domain of TCR clone 55239 (TRBV20-1, TRBJ2-7)
CSARDRVSGMDEQYF

SEQ ID NO: 110479 - protein, 14 aa, Homo sapiens
  CDR3 for alpha chain variable domain of TCR clone 55240 (TRAV2, TRAJ37)
CAVDFTSNTGKQIF

SEQ ID NO: 110480 - protein, 15 aa, Homo sapiens
  CDR3 for beta chain variable domain of TCR clone 55240 (TRBV20-1, TRBJ1-1)
CSASRGVTGNTEAFF

SEQ ID NO: 110481 - protein, 11 aa, Homo sapiens
  CDR3 for alpha chain variable domain of TCR clone 55241 (TRAV2, TRAJ33)
CAVESNYQLIW

SEQ ID NO: 110482 - protein, 15 aa, Homo sapiens
  CDR3 for beta chain variable domain of TCR clone 55241 (TRBV7-2, TRBJ2-1)
CASSSGLAGGNEQFF

SEQ ID NO: 110483 - protein, 13 aa, Homo sapiens
  CDR3 for alpha chain variable domain of TCR clone 55242 (TRAV21, TRAJ37)
CAVSSGNTGKLIS

SEQ ID NO: 110484 - protein, 15 aa, Homo sapiens
  CDR3 for beta chain variable domain of TCR clone 55242 (TRBV12-4, TRBJ1-2)
CASSFVNRGNYGYTF

SEQ ID NO: 110485 - protein, 14 aa, Homo sapiens
  CDR3 for alpha chain variable domain of TCR clone 55243 (TRAV1-2, TRAJ16)
CAVNRFSDGQKLLF

SEQ ID NO: 110486 - protein, 13 aa, Homo sapiens
  CDR3 for beta chain variable domain of TCR clone 55243 (TRBV10-2, TRBJ2-7)
CASGTSGGYEQYF

SEQ ID NO: 110487 - protein, 13 aa, Homo sapiens
  CDR3 for alpha chain variable domain of TCR clone 55244 (TRAV29/DV5, TRAJ31)
CAASRNNNARLMF

SEQ ID NO: 110488 - protein, 12 aa, Homo sapiens
  CDR3 for beta chain variable domain of TCR clone 55244 (TRBV7-9, TRBJ2-7)
CASSLEGYEQYF

SEQ ID NO: 110489 - protein, 14 aa, Homo sapiens
  CDR3 for alpha chain variable domain of TCR clone 55245 (TRAV1-2, TRAJ16)
CAANRFSDGQKLLF

SEQ ID NO: 110490 - protein, 16 aa, Homo sapiens
  CDR3 for beta chain variable domain of TCR clone 55245 (TRBV19, TRBJ2-1)
CASSKAGPSSYNEQFF

SEQ ID NO: 110491 - protein, 15 aa, Homo sapiens
  CDR3 for alpha chain variable domain of TCR clone 55246 (TRAV2, TRAJ24)
CAVEVLTYSWGKFQF

SEQ ID NO: 110492 - protein, 14 aa, Homo sapiens
  CDR3 for beta chain variable domain of TCR clone 55246 (TRBV19, TRBJ2-1)
CASSMGSGRRSSSS

SEQ ID NO: 110493 - protein, 16 aa, Homo sapiens
  CDR3 for alpha chain variable domain of TCR clone 55247 (TRAV8-3, TRAJ13)
CAVGAHPSGGYQKVTF

SEQ ID NO: 110494 - protein, 14 aa, Homo sapiens
  CDR3 for beta chain variable domain of TCR clone 55247 (TRBV18, TRBJ2-5)
CASSPRASSETQYF

SEQ ID NO: 110495 - protein, 16 aa, Homo sapiens
  CDR3 for alpha chain variable domain of TCR clone 55248 (TRAV3, TRAJ21)
CAVRDIERGNFNKFYI

SEQ ID NO: 110496 - protein, 13 aa, Homo sapiens
  CDR3 for beta chain variable domain of TCR clone 55248 (TRBV27, TRBJ2-7)
CASSLTTGYEQYF

SEQ ID NO: 110497 - protein, 16 aa, Homo sapiens
  CDR3 for alpha chain variable domain of TCR clone 55249 (TRAV14/DV4, TRAJ20)
CAMREGRSRDDYKLSF

SEQ ID NO: 110498 - protein, 15 aa, Homo sapiens
  CDR3 for beta chain variable domain of TCR clone 55249 (TRBV3-1, TRBJ2-1)
CASSLSGHSYNEQFF

SEQ ID NO: 110499 - protein, 17 aa, Homo sapiens
  CDR3 for alpha chain variable domain of TCR clone 55250 (TRAV13-1, TRAJ52)
CAAGRNAGGTSYGKLTF

SEQ ID NO: 110500 - protein, 14 aa, Homo sapiens
  CDR3 for beta chain variable domain of TCR clone 55250 (TRBV19, TRBJ2-1)
CASPTFVLSGEQFF

SEQ ID NO: 110501 - protein, 18 aa, Homo sapiens
  CDR3 for alpha chain variable domain of TCR clone 55251 (TRAV13-1, TRAJ52)
CAAKNPNAGGTSYGKLTF

SEQ ID NO: 110502 - protein, 14 aa, Homo sapiens
  CDR3 for beta chain variable domain of TCR clone 55251 (TRBV11-2, TRBJ2-5)
CASSRTGGIETQYF

SEQ ID NO: 110503 - protein, 23 aa, Homo sapiens
  CDR3 for alpha chain variable domain of TCR clone 55252 (TRAV20, TRAJ32)
CAVDGMVVLQTSSSFELALCLLS

SEQ ID NO: 110504 - protein, 16 aa, Homo sapiens
  CDR3 for beta chain variable domain of TCR clone 55252 (TRBV19, TRBJ2-2)
CASRSPGTGATGELFF

SEQ ID NO: 110505 - protein, 15 aa, Homo sapiens
  CDR3 for alpha chain variable domain of TCR clone 55253 (TRAV12-3, TRAJ6)
CAMSATSGGSYIPTF

SEQ ID NO: 110506 - protein, 13 aa, Homo sapiens
  CDR3 for beta chain variable domain of TCR clone 55253 (TRBV7-9, TRBJ1-2)
CASILKQNYGYTF

SEQ ID NO: 110507 - protein, 14 aa, Homo sapiens
  CDR3 for alpha chain variable domain of TCR clone 55254 (TRAV20, TRAJ56)
CAVQFGGAISKLTF

SEQ ID NO: 110508 - protein, 14 aa, Homo sapiens
  CDR3 for beta chain variable domain of TCR clone 55254 (TRBV20-1, TRBJ2-7)
CSAKRGRSSYEQYF

SEQ ID NO: 110509 - protein, 20 aa, Homo sapiens
  CDR3 for alpha chain variable domain of TCR clone 55255 (TRAV26-1, TRAJ42)
CCVLLHRKTYYGGSQGNLIF

SEQ ID NO: 110510 - protein, 16 aa, Homo sapiens
  CDR3 for beta chain variable domain of TCR clone 55255 (TRBV7-3, TRBJ2-2)
CASSLKRGTLSGELFF

SEQ ID NO: 110511 - protein, 14 aa, Homo sapiens
  CDR3 for alpha chain variable domain of TCR clone 55256 (TRAV14/DV4, TRAJ49)
CAMREGVNGNQFYF

SEQ ID NO: 110512 - protein, 14 aa, Homo sapiens
  CDR3 for beta chain variable domain of TCR clone 55256 (TRBV5-1, TRBJ1-5)
CANSLESGSRPQHF

SEQ ID NO: 110513 - protein, 18 aa, Homo sapiens
  CDR3 for alpha chain variable domain of TCR clone 55257 (TRAV12-3, TRAJ52)
CAMSVGGAGGTSYGKLTF

SEQ ID NO: 110514 - protein, 14 aa, Homo sapiens
  CDR3 for beta chain variable domain of TCR clone 55257 (TRBV12-4, TRBJ1-1)
CASSLGTGGTEAFF

SEQ ID NO: 110515 - protein, 14 aa, Homo sapiens
  CDR3 for alpha chain variable domain of TCR clone 55258 (TRAV12-2, TRAJ13)
CAVKKTGGYQKVTF

SEQ ID NO: 110516 - protein, 13 aa, Homo sapiens
  CDR3 for beta chain variable domain of TCR clone 55258 (TRBV29-1, TRBJ2-1)
CSVEGGRVNEQFF

SEQ ID NO: 110517 - protein, 14 aa, Homo sapiens
  CDR3 for alpha chain variable domain of TCR clone 55259 (TRAV12-3, TRAJ3)
CNERGNSSASKIIF

SEQ ID NO: 110518 - protein, 16 aa, Homo sapiens
  CDR3 for beta chain variable domain of TCR clone 55259 (TRBV7-9, TRBJ2-1)
CASSLGTGWDYNEQFF

SEQ ID NO: 110519 - protein, 13 aa, Homo sapiens
  CDR3 for alpha chain variable domain of TCR clone 55260 (TRAV8-3, TRAJ44)
CAVVPGTASKLTF

SEQ ID NO: 110520 - protein, 14 aa, Homo sapiens
  CDR3 for beta chain variable domain of TCR clone 55260 (TRBV11-2, TRBJ2-3)
RASRRLARTDTQYF

SEQ ID NO: 110521 - protein, 16 aa, Homo sapiens
  CDR3 for alpha chain variable domain of TCR clone 55261 (TRAV1-2, TRAJ10)
CAVRGVLTGGGNKLTF

SEQ ID NO: 110522 - protein, 20 aa, Homo sapiens
  CDR3 for beta chain variable domain of TCR clone 55261 (TRBV7-8, TRBJ2-2)
CASSHLFPGPTIHITGELFL

SEQ ID NO: 110523 - protein, 15 aa, Homo sapiens
  CDR3 for alpha chain variable domain of TCR clone 55262 (TRAV2, TRAJ22)
CAVPSRGGSARQLTF

SEQ ID NO: 110524 - protein, 13 aa, Homo sapiens
  CDR3 for beta chain variable domain of TCR clone 55262 (TRBV12-5, TRBJ2-3)
CASGDRQSDTQYF

SEQ ID NO: 110525 - protein, 13 aa, Homo sapiens
  CDR3 for alpha chain variable domain of TCR clone 55263 (TRAV17, TRAJ40)
CATRPSGTYKYIF

SEQ ID NO: 110526 - protein, 17 aa, Homo sapiens
  CDR3 for beta chain variable domain of TCR clone 55263 (TRBV7-8, TRBJ2-6)
CASSAGTGGAGANVLTF

SEQ ID NO: 110527 - protein, 12 aa, Homo sapiens
  CDR3 for alpha chain variable domain of TCR clone 55264 (TRAV12-1, TRAJ40)
CVFYSGTYKYIF

SEQ ID NO: 110528 - protein, 12 aa, Homo sapiens
  CDR3 for beta chain variable domain of TCR clone 55264 (TRBV7-3, TRBJ2-1)
CASSFINNEQSF

SEQ ID NO: 110529 - protein, 11 aa, Homo sapiens
  CDR3 for alpha chain variable domain of TCR clone 55265 (TRAV17, TRAJ36)
CAPTGANNLFF

SEQ ID NO: 110530 - protein, 13 aa, Homo sapiens
  CDR3 for beta chain variable domain of TCR clone 55265 (TRBV20-1, TRBJ1-1)
CSATPGGHTEAFF

SEQ ID NO: 110531 - protein, 15 aa, Homo sapiens
  CDR3 for alpha chain variable domain of TCR clone 55266 (TRAV17, TRAJ23)
CATDAEDNQGGKLNF

SEQ ID NO: 110532 - protein, 12 aa, Homo sapiens
  CDR3 for beta chain variable domain of TCR clone 55266 (TRBV2, TRBJ2-1)
CAKREGYNEQFF

SEQ ID NO: 110533 - protein, 13 aa, Homo sapiens
  CDR3 for alpha chain variable domain of TCR clone 55267 (TRAV13-1, TRAJ20)
CVARVSNDYKLSF

SEQ ID NO: 110534 - protein, 12 aa, Homo sapiens
  CDR3 for beta chain variable domain of TCR clone 55267 (TRBV20-1, TRBJ2-1)
CSARLGTDEQFF

SEQ ID NO: 110535 - protein, 16 aa, Homo sapiens
  CDR3 for alpha chain variable domain of TCR clone 55268 (TRAV1-2, TRAJ10)
CVVRGVLTGGGNKLTF

SEQ ID NO: 110536 - protein, 12 aa, Homo sapiens
  CDR3 for beta chain variable domain of TCR clone 55268 (TRBV7-8, TRBJ2-7)
CASSLGDREQYF

SEQ ID NO: 110537 - protein, 17 aa, Homo sapiens
  CDR3 for alpha chain variable domain of TCR clone 55269 (TRAV1-2, TRAJ8)
CAVRDPDENTGFQKLVF

SEQ ID NO: 110538 - protein, 16 aa, Homo sapiens
  CDR3 for beta chain variable domain of TCR clone 55269 (TRBV7-9, TRBJ2-2)
CASSGFGGVNTGELFF

SEQ ID NO: 110539 - protein, 15 aa, Homo sapiens
  CDR3 for alpha chain variable domain of TCR clone 55270 (TRAV1-2, TRAJ3)
CAVRGGYSSASKIIF

SEQ ID NO: 110540 - protein, 16 aa, Homo sapiens
  CDR3 for beta chain variable domain of TCR clone 55270 (TRBV7-3, TRBJ2-1)
CASSLEGYRSYNEQFF

SEQ ID NO: 110541 - protein, 14 aa, Homo sapiens
  CDR3 for alpha chain variable domain of TCR clone 55271 (TRAV25, TRAJ35)
CARRMEGVGNVLHC

SEQ ID NO: 110542 - protein, 13 aa, Homo sapiens
  CDR3 for beta chain variable domain of TCR clone 55271 (TRBV7-2, TRBJ1-4)
CASSLAGLEKLFF

SEQ ID NO: 110543 - protein, 12 aa, Homo sapiens
  CDR3 for alpha chain variable domain of TCR clone 55272 (TRAV3, TRAJ20)
CAVRDPDYKLSF

SEQ ID NO: 110544 - protein, 15 aa, Homo sapiens
  CDR3 for beta chain variable domain of TCR clone 55272 (TRBV2, TRBJ2-3)
CASSDFEKATDTQYF

SEQ ID NO: 110545 - protein, 13 aa, Homo sapiens
  CDR3 for alpha chain variable domain of TCR clone 55273 (TRAV13-1, TRAJ21)
CAASIYNFNKFYF

SEQ ID NO: 110546 - protein, 15 aa, Homo sapiens
  CDR3 for beta chain variable domain of TCR clone 55273 (TRBV7-8, TRBJ1-5)
CASSLEGQPNQPQHF

SEQ ID NO: 110547 - protein, 11 aa, Homo sapiens
  CDR3 for alpha chain variable domain of TCR clone 55274 (TRAV12-3, TRAJ49)
RAANTGNQFYF

SEQ ID NO: 110548 - protein, 12 aa, Homo sapiens
  CDR3 for beta chain variable domain of TCR clone 55274 (TRBV6-3, TRBJ2-7)
CASSEPGFEQYF

SEQ ID NO: 110549 - protein, 13 aa, Homo sapiens
  CDR3 for alpha chain variable domain of TCR clone 55275 (TRAV2, TRAJ23)
CAVMGNQGGRLIF

SEQ ID NO: 110550 - protein, 14 aa, Homo sapiens
  CDR3 for beta chain variable domain of TCR clone 55275 (TRBV11-2, TRBJ2-1)
CASSRATSYNEQFF

SEQ ID NO: 110551 - protein, 13 aa, Homo sapiens
  CDR3 for alpha chain variable domain of TCR clone 55276 (TRAV12-1, TRAJ33)
CGDAPDSNYQLIW

SEQ ID NO: 110552 - protein, 12 aa, Homo sapiens
  CDR3 for beta chain variable domain of TCR clone 55276 (TRBV7-8, TRBJ2-7)
CASSLGDREQYF

SEQ ID NO: 110553 - protein, 13 aa, Homo sapiens
  CDR3 for alpha chain variable domain of TCR clone 55277 (TRAV13-1, TRAJ5)
CAAGDTGRRALTF

SEQ ID NO: 110554 - protein, 12 aa, Homo sapiens
  CDR3 for beta chain variable domain of TCR clone 55277 (TRBV28, TRBJ2-3)
CASSLYRDTQYL

SEQ ID NO: 110555 - protein, 14 aa, Homo sapiens
  CDR3 for alpha chain variable domain of TCR clone 55278 (TRAV8-1, TRAJ15)
CAVNGQQAGTALIF

SEQ ID NO: 110556 - protein, 15 aa, Homo sapiens
  CDR3 for beta chain variable domain of TCR clone 55278 (TRBV19, TRBJ2-1)
CASSYSGSPYNEQFF

SEQ ID NO: 110557 - protein, 14 aa, Homo sapiens
  CDR3 for alpha chain variable domain of TCR clone 55279 (TRAV26-1, TRAJ38)
CIADNAGNNRRLIW

SEQ ID NO: 110558 - protein, 13 aa, Homo sapiens
  CDR3 for beta chain variable domain of TCR clone 55279 (TRBV19, TRBJ1-2)
CASSVPGQDGYTF

SEQ ID NO: 110559 - protein, 10 aa, Homo sapiens
  CDR3 for alpha chain variable domain of TCR clone 55280 (TRAV23/DV6, TRAJ57)
CAASYTLSQG

SEQ ID NO: 110560 - protein, 14 aa, Homo sapiens
  CDR3 for beta chain variable domain of TCR clone 55280 (TRBV25-1, TRBJ1-1)
CASTHLGGNTEAFL

SEQ ID NO: 110561 - protein, 16 aa, Homo sapiens
  CDR3 for alpha chain variable domain of TCR clone 55281 (TRAV3, TRAJ10)
CAVRDMSAGGGNKLTF

SEQ ID NO: 110562 - protein, 11 aa, Homo sapiens
  CDR3 for beta chain variable domain of TCR clone 55281 (TRBV29-1, TRBJ2-5)
CSEDRTGTQYF

SEQ ID NO: 110563 - protein, 14 aa, Homo sapiens
  CDR3 for alpha chain variable domain of TCR clone 55282 (TRAV2, TRAJ9)
CAVGDRSGGFKTIF

SEQ ID NO: 110564 - protein, 14 aa, Homo sapiens
  CDR3 for beta chain variable domain of TCR clone 55282 (TRBV12-5, TRBJ2-5)
CASGSRTHQETQYF

SEQ ID NO: 110565 - protein, 12 aa, Homo sapiens
  CDR3 for alpha chain variable domain of TCR clone 55283 (TRAV1-1, TRAJ9)
CAVDTGGFKTIF

SEQ ID NO: 110566 - protein, 13 aa, Homo sapiens
  CDR3 for beta chain variable domain of TCR clone 55283 (TRBV12-4, TRBJ1-2)
CASSLDSNYGYTF

SEQ ID NO: 110567 - protein, 14 aa, Homo sapiens
  CDR3 for alpha chain variable domain of TCR clone 55284 (TRAV17, TRAJ35)
CATDRPGFGNVLHC

SEQ ID NO: 110568 - protein, 19 aa, Homo sapiens
  CDR3 for beta chain variable domain of TCR clone 55284 (TRBV11-3, TRBJ2-2)
CASSTRPGAKTTNTGELFS

SEQ ID NO: 110569 - protein, 13 aa, Homo sapiens
  CDR3 for alpha chain variable domain of TCR clone 55285 (TRAV8-4, TRAJ48)
CAVSLFGNDKLTF

SEQ ID NO: 110570 - protein, 15 aa, Homo sapiens
  CDR3 for beta chain variable domain of TCR clone 55285 (TRBV20-1, TRBJ2-7)
CSARKGLAESYEQYF

SEQ ID NO: 110571 - protein, 18 aa, Homo sapiens
  CDR3 for alpha chain variable domain of TCR clone 55286 (TRAV26-1, TRAJ22)
CIVRVALTSSGSARQLTF

SEQ ID NO: 110572 - protein, 13 aa, Homo sapiens
  CDR3 for beta chain variable domain of TCR clone 55286 (TRBV13, TRBJ2-5)
CASSPEVGETQYF

SEQ ID NO: 110573 - protein, 14 aa, Homo sapiens
  CDR3 for alpha chain variable domain of TCR clone 55287 (TRAV23/DV6, TRAJ17)
YAARGRAAGNKLTF

SEQ ID NO: 110574 - protein, 12 aa, Homo sapiens
  CDR3 for beta chain variable domain of TCR clone 55287 (TRBV7-9, TRBJ2-3)
CASSFITDTQYF

SEQ ID NO: 110575 - protein, 14 aa, Homo sapiens
  CDR3 for alpha chain variable domain of TCR clone 55288 (TRAV12-2, TRAJ9)
CAVNMDGGGFKTIF

SEQ ID NO: 110576 - protein, 14 aa, Homo sapiens
  CDR3 for beta chain variable domain of TCR clone 55288 (TRBV2, TRBJ2-5)
CASSEVLAQETQYF

SEQ ID NO: 110577 - protein, 12 aa, Homo sapiens
  CDR3 for alpha chain variable domain of TCR clone 55289 (TRAV16, TRAJ27)
CALNTNAGKSTF

SEQ ID NO: 110578 - protein, 14 aa, Homo sapiens
  CDR3 for beta chain variable domain of TCR clone 55289 (TRBV5-1, TRBJ2-7)
CASSLGVGAYEQYF

SEQ ID NO: 110579 - protein, 17 aa, Homo sapiens
  CDR3 for alpha chain variable domain of TCR clone 55290 (TRAV2, TRAJ38)
CAVEDFPNAGNNHIQNP

SEQ ID NO: 110580 - protein, 14 aa, Homo sapiens
  CDR3 for beta chain variable domain of TCR clone 55290 (TRBV29-1, TRBJ1-4)
CSVSGRQGGEKLFF

SEQ ID NO: 110581 - protein, 17 aa, Homo sapiens
  CDR3 for alpha chain variable domain of TCR clone 55291 (TRAV3, TRAJ12)
CCERRDGTMDSNYKLIF

SEQ ID NO: 110582 - protein, 15 aa, Homo sapiens
  CDR3 for beta chain variable domain of TCR clone 55291 (TRBV5-5, TRBJ1-5)
CASSLKGGGEQPQHF

SEQ ID NO: 110583 - protein, 19 aa, Homo sapiens
  CDR3 for alpha chain variable domain of TCR clone 55292 (TRAV8-4, TRAJ16)
CAVSPVGRWPEAALCKGDH

SEQ ID NO: 110584 - protein, 14 aa, Homo sapiens
  CDR3 for beta chain variable domain of TCR clone 55292 (TRBV23-1, TRBJ2-5)
CASSFLRSQETQYF

SEQ ID NO: 110585 - protein, 16 aa, Homo sapiens
  CDR3 for alpha chain variable domain of TCR clone 55293 (TRAV8-3, TRAJ42)
CAVGEGNGGSQGNPIF

SEQ ID NO: 110586 - protein, 14 aa, Homo sapiens
  CDR3 for beta chain variable domain of TCR clone 55293 (TRBV7-2, TRBJ2-1)
CASSRGGARNEQFF

SEQ ID NO: 110587 - protein, 14 aa, Homo sapiens
  CDR3 for alpha chain variable domain of TCR clone 55294 (TRAV38-1, TRAJ29)
CAFITPSGNTPLVF

SEQ ID NO: 110588 - protein, 16 aa, Homo sapiens
  CDR3 for beta chain variable domain of TCR clone 55294 (TRBV19, TRBJ2-1)
CASSKAGPSSYNEQFF

SEQ ID NO: 110589 - protein, 14 aa, Homo sapiens
  CDR3 for alpha chain variable domain of TCR clone 55295 (TRAV13-1, TRAJ35)
CAASKGGFGNALHC

SEQ ID NO: 110590 - protein, 13 aa, Homo sapiens
  CDR3 for beta chain variable domain of TCR clone 55295 (TRBV7-3, TRBJ1-1)
CASSQGWGAEAFF

SEQ ID NO: 110591 - protein, 15 aa, Homo sapiens
  CDR3 for alpha chain variable domain of TCR clone 55296 (TRAV3, TRAJ45)
CAVRTPWGGADGLTF

SEQ ID NO: 110592 - protein, 16 aa, Homo sapiens
  CDR3 for beta chain variable domain of TCR clone 55296 (TRBV6-1, TRBJ2-2)
CASSFGQVANTGELFF

SEQ ID NO: 110593 - protein, 14 aa, Homo sapiens
  CDR3 for alpha chain variable domain of TCR clone 55297 (TRAV8-2, TRAJ23)
RVVSDDNQGGKLIF

SEQ ID NO: 110594 - protein, 16 aa, Homo sapiens
  CDR3 for beta chain variable domain of TCR clone 55297 (TRBV4-2, TRBJ2-5)
CASSQELVGSQETQYF

SEQ ID NO: 110595 - protein, 12 aa, Homo sapiens
  CDR3 for alpha chain variable domain of TCR clone 55298 (TRAV2, TRAJ33)
CAFMDSNYQLIW

SEQ ID NO: 110596 - protein, 16 aa, Homo sapiens
  CDR3 for beta chain variable domain of TCR clone 55298 (TRBV2, TRBJ2-7)
CASNEPWTGPSYEQYF

SEQ ID NO: 110597 - protein, 11 aa, Homo sapiens
  CDR3 for alpha chain variable domain of TCR clone 55299 (TRAV1-2, TRAJ40)
CAVPGTYKYIF

SEQ ID NO: 110598 - protein, 14 aa, Homo sapiens
  CDR3 for beta chain variable domain of TCR clone 55299 (TRBV5-7, TRBJ1-1)
CASSLAGDWTEAFF

SEQ ID NO: 110599 - protein, 13 aa, Homo sapiens
  CDR3 for alpha chain variable domain of TCR clone 55300 (TRAV16, TRAJ34)
CALISYNTDKLIF

SEQ ID NO: 110600 - protein, 16 aa, Homo sapiens
  CDR3 for beta chain variable domain of TCR clone 55300 (TRBV5-1, TRBJ1-1)
CASSSGGNSLNTEAFF

SEQ ID NO: 110601 - protein, 13 aa, Homo sapiens
  CDR3 for alpha chain variable domain of TCR clone 55301 (TRAV21, TRAJ45)
CAVMGGGADGLTF

SEQ ID NO: 110602 - protein, 16 aa, Homo sapiens
  CDR3 for beta chain variable domain of TCR clone 55301 (TRBV20-1, TRBJ2-1)
CSARDHLAGGGGEQFF

SEQ ID NO: 110603 - protein, 16 aa, Homo sapiens
  CDR3 for alpha chain variable domain of TCR clone 55302 (TRAV12-2, TRAJ32)
CAVNLGQGGATNKLIF

SEQ ID NO: 110604 - protein, 13 aa, Homo sapiens
  CDR3 for beta chain variable domain of TCR clone 55302 (TRBV9, TRBJ2-2)
CASSPRPAGELFL

SEQ ID NO: 110605 - protein, 13 aa, Homo sapiens
  CDR3 for alpha chain variable domain of TCR clone 55303 (TRAV2, TRAJ40)
CAVVTSGTYKYIF

SEQ ID NO: 110606 - protein, 15 aa, Homo sapiens
  CDR3 for beta chain variable domain of TCR clone 55303 (TRBV9, TRBJ1-6)
CACSVAGTGDSPLHF

SEQ ID NO: 110607 - protein, 13 aa, Homo sapiens
  CDR3 for alpha chain variable domain of TCR clone 55304 (TRAV12-2, TRAJ6)
CAVNVSRKLHTYI

SEQ ID NO: 110608 - protein, 17 aa, Homo sapiens
  CDR3 for beta chain variable domain of TCR clone 55304 (TRBV7-8, TRBJ2-6)
CASSAGTGGAGANVLTF

SEQ ID NO: 110609 - protein, 13 aa, Homo sapiens
  CDR3 for alpha chain variable domain of TCR clone 55305 (TRAV8-3, TRAJ6)
CAARRGGSYIPPF

SEQ ID NO: 110610 - protein, 15 aa, Homo sapiens
  CDR3 for beta chain variable domain of TCR clone 55305 (TRBV4-1, TRBJ2-3)
CASSNLAGGRDTQYF

SEQ ID NO: 110611 - protein, 14 aa, Homo sapiens
  CDR3 for alpha chain variable domain of TCR clone 55306 (TRAV8-3, TRAJ4)
CAVGAAGGYNKLIF

SEQ ID NO: 110612 - protein, 15 aa, Homo sapiens
  CDR3 for beta chain variable domain of TCR clone 55306 (TRBV6-5, TRBJ2-1)
CASSYDAGACNEQFF

SEQ ID NO: 110613 - protein, 12 aa, Homo sapiens
  CDR3 for alpha chain variable domain of TCR clone 55307 (TRAV27, TRAJ9)
CAGESGGFKTIF

SEQ ID NO: 110614 - protein, 14 aa, Homo sapiens
  CDR3 for beta chain variable domain of TCR clone 55307 (TRBV6-1, TRBJ2-1)
CASARDGFYNEQFF

SEQ ID NO: 110615 - protein, 14 aa, Homo sapiens
  CDR3 for alpha chain variable domain of TCR clone 55308 (TRAV1-1, TRAJ35)
CAVRSIGFGNVLHC

SEQ ID NO: 110616 - protein, 14 aa, Homo sapiens
  CDR3 for beta chain variable domain of TCR clone 55308 (TRBV19, TRBJ2-1)
CASPTFVLSGEQFF

SEQ ID NO: 110617 - protein, 13 aa, Homo sapiens
  CDR3 for alpha chain variable domain of TCR clone 55309 (TRAV3, TRAJ41)
CAVSPNSGYALNF

SEQ ID NO: 110618 - protein, 13 aa, Homo sapiens
  CDR3 for beta chain variable domain of TCR clone 55309 (TRBV20-1, TRBJ2-2)
CSALSGGAGELFF

SEQ ID NO: 110619 - protein, 14 aa, Homo sapiens
  CDR3 for alpha chain variable domain of TCR clone 55310 (TRAV26-1, TRAJ38)
CIADNAGNNRKLIW

SEQ ID NO: 110620 - protein, 13 aa, Homo sapiens
  CDR3 for beta chain variable domain of TCR clone 55310 (TRBV7-9, TRBJ2-3)
CASSPGSTDTQYF

SEQ ID NO: 110621 - protein, 15 aa, Homo sapiens
  CDR3 for alpha chain variable domain of TCR clone 55311 (TRAV12-1, TRAJ42)
YVVTRDGGSQGNLIF

SEQ ID NO: 110622 - protein, 14 aa, Homo sapiens
  CDR3 for beta chain variable domain of TCR clone 55311 (TRBV11-2, TRBJ2-3)
CASSLGGGANTQYF

SEQ ID NO: 110623 - protein, 15 aa, Homo sapiens
  CDR3 for alpha chain variable domain of TCR clone 55312 (TRAV20, TRAJ53)
CAVQASGGSNYKLTF

SEQ ID NO: 110624 - protein, 12 aa, Homo sapiens
  CDR3 for beta chain variable domain of TCR clone 55312 (TRBV7-2, TRBJ2-1)
CASSPQDVEQFF

SEQ ID NO: 110625 - protein, 23 aa, Homo sapiens
  CDR3 for alpha chain variable domain of TCR clone 55313 (TRAV26-1, TRAJ38)
CIADNAGNNHIQNPDPAVYQLRD

SEQ ID NO: 110626 - protein, 17 aa, Homo sapiens
  CDR3 for beta chain variable domain of TCR clone 55313 (TRBV13, TRBJ2-3)
CASSLSRVAGGRNTQYF

SEQ ID NO: 110627 - protein, 15 aa, Homo sapiens
  CDR3 for alpha chain variable domain of TCR clone 55314 (TRAV3, TRAJ5)
CAVRDLDTGRRALTF

SEQ ID NO: 110628 - protein, 20 aa, Homo sapiens
  CDR3 for beta chain variable domain of TCR clone 55314 (TRBV28, TRBJ2-1)
CASTPIGRSPGLAGGNEQFF

SEQ ID NO: 110629 - protein, 14 aa, Homo sapiens
  CDR3 for alpha chain variable domain of TCR clone 55315 (TRAV13-1, TRAJ44)
CAAKATGTASKLTF

SEQ ID NO: 110630 - protein, 16 aa, Homo sapiens
  CDR3 for beta chain variable domain of TCR clone 55315 (TRBV20-1, TRBJ2-2)
CSARDDRVGLTGELFF

SEQ ID NO: 110631 - protein, 13 aa, Homo sapiens
  CDR3 for alpha chain variable domain of TCR clone 55316 (TRAV8-2, TRAJ47)
CVVSEREGNKLVF

SEQ ID NO: 110632 - protein, 15 aa, Homo sapiens
  CDR3 for beta chain variable domain of TCR clone 55316 (TRBV6-3, TRBJ2-7)
CASSSPGAVFYEQYF

SEQ ID NO: 110633 - protein, 16 aa, Homo sapiens
  CDR3 for alpha chain variable domain of TCR clone 55317 (TRAV41, TRAJ34)
CAFQGIGPYNTDKLIF

SEQ ID NO: 110634 - protein, 13 aa, Homo sapiens
  CDR3 for beta chain variable domain of TCR clone 55317 (TRBV4-2, TRBJ2-1)
CASSPGTYNEQFF

SEQ ID NO: 110635 - protein, 10 aa, Homo sapiens
  CDR3 for alpha chain variable domain of TCR clone 55318 (TRAV16, TRAJ22)
SAMYLRQLTF

SEQ ID NO: 110636 - protein, 15 aa, Homo sapiens
  CDR3 for beta chain variable domain of TCR clone 55318 (TRBV7-9, TRBJ1-6)
YASSSPGRGNSPLHF

SEQ ID NO: 110637 - protein, 13 aa, Homo sapiens
  CDR3 for alpha chain variable domain of TCR clone 55319 (TRAV20, TRAJ20)
CAVRDFNDYKLSF

SEQ ID NO: 110638 - protein, 18 aa, Homo sapiens
  CDR3 for beta chain variable domain of TCR clone 55319 (TRBV7-9, TRBJ2-7)
CASSLTTSGSRTWYEQYF

SEQ ID NO: 110639 - protein, 11 aa, Homo sapiens
  CDR3 for alpha chain variable domain of TCR clone 55320 (TRAV29/DV5, TRAJ47)
CAATYGNKLVF

SEQ ID NO: 110640 - protein, 17 aa, Homo sapiens
  CDR3 for beta chain variable domain of TCR clone 55320 (TRBV7-9, TRBJ2-1)
CASSLVASYPTYNEQFF

SEQ ID NO: 110641 - protein, 17 aa, Homo sapiens
  CDR3 for alpha chain variable domain of TCR clone 55321 (TRAV6, TRAJ32)
CAPKCMNYGGATNKLIF

SEQ ID NO: 110642 - protein, 12 aa, Homo sapiens
  CDR3 for beta chain variable domain of TCR clone 55321 (TRBV20-1, TRBJ1-2)
CSASREDYGYTF

SEQ ID NO: 110643 - protein, 17 aa, Homo sapiens
  CDR3 for alpha chain variable domain of TCR clone 55322 (TRAV13-1, TRAJ52)
CAAGRNAGGTSYGKLTF

SEQ ID NO: 110644 - protein, 15 aa, Homo sapiens
  CDR3 for beta chain variable domain of TCR clone 55322 (TRBV28, TRBJ2-1)
CASSIIAGGRSEQFF

SEQ ID NO: 110645 - protein, 11 aa, Homo sapiens
  CDR3 for alpha chain variable domain of TCR clone 55323 (TRAV21, TRAJ34)
CAVTNTDKPIF

SEQ ID NO: 110646 - protein, 12 aa, Homo sapiens
  CDR3 for beta chain variable domain of TCR clone 55323 (TRBV7-9, TRBJ1-1)
CASSLVRGEAFF

SEQ ID NO: 110647 - protein, 14 aa, Homo sapiens
  CDR3 for alpha chain variable domain of TCR clone 55324 (TRAV1-2, TRAJ8)
CAVREDTGLQKLVF

SEQ ID NO: 110648 - protein, 13 aa, Homo sapiens
  CDR3 for beta chain variable domain of TCR clone 55324 (TRBV19, TRBJ1-2)
CASSVPEQDGYTF

SEQ ID NO: 110649 - protein, 21 aa, Homo sapiens
  CDR3 for alpha chain variable domain of TCR clone 55325 (TRAV12-1, TRAJ37)
RVVNGGLWQHRQTNLWARDNF

SEQ ID NO: 110650 - protein, 12 aa, Homo sapiens
  CDR3 for beta chain variable domain of TCR clone 55325 (TRBV20-1, TRBJ1-2)
CSAPGFNYGYTF

SEQ ID NO: 110651 - protein, 13 aa, Homo sapiens
  CDR3 for alpha chain variable domain of TCR clone 55326 (TRAV35, TRAJ42)
CTGFPGSQGDLIF

SEQ ID NO: 110652 - protein, 14 aa, Homo sapiens
  CDR3 for beta chain variable domain of TCR clone 55326 (TRBV4-1, TRBJ2-2)
CASSQAVNTGELFF

SEQ ID NO: 110653 - protein, 13 aa, Homo sapiens
  CDR3 for alpha chain variable domain of TCR clone 55327 (TRAV13-1, TRAJ39)
CSKYSNAGNMLTF

SEQ ID NO: 110654 - protein, 16 aa, Homo sapiens
  CDR3 for beta chain variable domain of TCR clone 55327 (TRBV20-1, TRBJ1-4)
CSAPGQGLLTNDKLFF

SEQ ID NO: 110655 - protein, 16 aa, Homo sapiens
  CDR3 for alpha chain variable domain of TCR clone 55328 (TRAV3, TRAJ21)
CAVRDIERGNFKKFYF

SEQ ID NO: 110656 - protein, 16 aa, Homo sapiens
  CDR3 for beta chain variable domain of TCR clone 55328 (TRBV12-4, TRBJ1-5)
CASSRPVGGSNQPQHF

SEQ ID NO: 110657 - protein, 11 aa, Homo sapiens
  CDR3 for alpha chain variable domain of TCR clone 55329 (TRAV12-3, TRAJ27)
CAMANAGKSTF

SEQ ID NO: 110658 - protein, 14 aa, Homo sapiens
  CDR3 for beta chain variable domain of TCR clone 55329 (TRBV12-5, TRBJ2-5)
CASGSRTHQETQHF

SEQ ID NO: 110659 - protein, 14 aa, Homo sapiens
  CDR3 for alpha chain variable domain of TCR clone 55330 (TRAV17, TRAJ37)
CATDGSSNTGKLTF

SEQ ID NO: 110660 - protein, 13 aa, Homo sapiens
  CDR3 for beta chain variable domain of TCR clone 55330 (TRBV11-2, TRBJ2-1)
CASSLDLVNEQFF

SEQ ID NO: 110661 - protein, 13 aa, Homo sapiens
  CDR3 for alpha chain variable domain of TCR clone 55331 (TRAV12-1, TRAJ16)
CVVNGPDGQKLLF

SEQ ID NO: 110662 - protein, 13 aa, Homo sapiens
  CDR3 for beta chain variable domain of TCR clone 55331 (TRBV2, TRBJ1-1)
CARNPTGGFHASF

SEQ ID NO: 110663 - protein, 12 aa, Homo sapiens
  CDR3 for alpha chain variable domain of TCR clone 55332 (TRAV12-3, TRAJ21)
CAMFNDFNKFYF

SEQ ID NO: 110664 - protein, 14 aa, Homo sapiens
  CDR3 for beta chain variable domain of TCR clone 55332 (TRBV28, TRBJ2-1)
CASSIQGTVGEQFF

SEQ ID NO: 110665 - protein, 13 aa, Homo sapiens
  CDR3 for alpha chain variable domain of TCR clone 55333 (TRAV21, TRAJ20)
CAVGLRVDYKLSF

SEQ ID NO: 110666 - protein, 15 aa, Homo sapiens
  CDR3 for beta chain variable domain of TCR clone 55333 (TRBV6-3, TRBJ2-7)
CASSSPGTVFYEQYF

SEQ ID NO: 110667 - protein, 10 aa, Homo sapiens
  CDR3 for alpha chain variable domain of TCR clone 55334 (TRAV1-2, TRAJ34)
CAVNTDKLIF

SEQ ID NO: 110668 - protein, 18 aa, Homo sapiens
  CDR3 for beta chain variable domain of TCR clone 55334 (TRBV7-9, TRBJ2-7)
CASSLTTSGSRTWYGQYF

SEQ ID NO: 110669 - protein, 14 aa, Homo sapiens
  CDR3 for alpha chain variable domain of TCR clone 55335 (TRAV13-1, TRAJ44)
CAAKATGTARKLTF

SEQ ID NO: 110670 - protein, 17 aa, Homo sapiens
  CDR3 for beta chain variable domain of TCR clone 55335 (TRBV7-3, TRBJ2-3)
RASSLMKRMRGADTQYF

SEQ ID NO: 110671 - protein, 14 aa, Homo sapiens
  CDR3 for alpha chain variable domain of TCR clone 55336 (TRAV12-2, TRAJ13)
CAVKKTGGYQKVTF

SEQ ID NO: 110672 - protein, 15 aa, Homo sapiens
  CDR3 for beta chain variable domain of TCR clone 55336 (TRBV12-4, TRBJ2-5)
CASSGTGQAQETQYF

SEQ ID NO: 110673 - protein, 14 aa, Homo sapiens
  CDR3 for alpha chain variable domain of TCR clone 55337 (TRAV8-3, TRAJ4)
CAVGAAGGYNKLIF

SEQ ID NO: 110674 - protein, 14 aa, Homo sapiens
  CDR3 for beta chain variable domain of TCR clone 55337 (TRBV7-2, TRBJ2-7)
CASRSQGAAYEQYF

SEQ ID NO: 110675 - protein, 13 aa, Homo sapiens
  CDR3 for alpha chain variable domain of TCR clone 55338 (TRAV8-3, TRAJ36)
CAVGATGANNLFF

SEQ ID NO: 110676 - protein, 15 aa, Homo sapiens
  CDR3 for beta chain variable domain of TCR clone 55338 (TRBV7-2, TRBJ1-2)
CASSLRAGWNYGYTF

SEQ ID NO: 110677 - protein, 17 aa, Homo sapiens
  CDR3 for alpha chain variable domain of TCR clone 55339 (TRAV3, TRAJ6)
CAVRDGPRAGGSYIPTF

SEQ ID NO: 110678 - protein, 14 aa, Homo sapiens
  CDR3 for beta chain variable domain of TCR clone 55339 (TRBV7-2, TRBJ2-2)
CASRGQGAAGELFF

SEQ ID NO: 110679 - protein, 16 aa, Homo sapiens
  CDR3 for alpha chain variable domain of TCR clone 55340 (TRAV12-3, TRAJ58)
CAMTDTEETSGPRLTF

SEQ ID NO: 110680 - protein, 22 aa, Homo sapiens
  CDR3 for beta chain variable domain of TCR clone 55340 (TRBV23-1, TRBJ2-7)
CASSRRLDSGQGYVGGGYEQYF

SEQ ID NO: 110681 - protein, 15 aa, Homo sapiens
  CDR3 for alpha chain variable domain of TCR clone 55341 (TRAV3, TRAJ22)
CAVRDRGGSARQLTF

SEQ ID NO: 110682 - protein, 12 aa, Homo sapiens
  CDR3 for beta chain variable domain of TCR clone 55341 (TRBV7-9, TRBJ1-5)
CASSPQGQPQHF

SEQ ID NO: 110683 - protein, 10 aa, Homo sapiens
  CDR3 for alpha chain variable domain of TCR clone 55342 (TRAV9-2, TRAJ49)
YALTGNQFYF

SEQ ID NO: 110684 - protein, 16 aa, Homo sapiens
  CDR3 for beta chain variable domain of TCR clone 55342 (TRBV19, TRBJ2-3)
CASSPGAASRTDTQYF

SEQ ID NO: 110685 - protein, 11 aa, Homo sapiens
  CDR3 for alpha chain variable domain of TCR clone 55343 (TRAV26-1, TRAJ37)
CIVRVGRKLIF

SEQ ID NO: 110686 - protein, 14 aa, Homo sapiens
  CDR3 for beta chain variable domain of TCR clone 55343 (TRBV7-2, TRBJ2-7)
CASSLPPGQGTQYF

SEQ ID NO: 110687 - protein, 12 aa, Homo sapiens
  CDR3 for alpha chain variable domain of TCR clone 55344 (TRAV4, TRAJ26)
CLVGDYGQSFVF

SEQ ID NO: 110688 - protein, 12 aa, Homo sapiens
  CDR3 for beta chain variable domain of TCR clone 55344 (TRBV11-2, TRBJ2-2)
CASSLGGGELFF

SEQ ID NO: 110689 - protein, 13 aa, Homo sapiens
  CDR3 for alpha chain variable domain of TCR clone 55345 (TRAV30, TRAJ24)
CGTVTDSWGNCSL

SEQ ID NO: 110690 - protein, 14 aa, Homo sapiens
  CDR3 for beta chain variable domain of TCR clone 55345 (TRBV6-3, TRBJ2-2)
CASTYTPDTGELFF

SEQ ID NO: 110691 - protein, 14 aa, Homo sapiens
  CDR3 for alpha chain variable domain of TCR clone 55346 (TRAV8-1, TRAJ34)
CALPRGTTSSSLGL

SEQ ID NO: 110692 - protein, 16 aa, Homo sapiens
  CDR3 for beta chain variable domain of TCR clone 55346 (TRBV13, TRBJ2-2)
CASSPRTGEHTGELFF

SEQ ID NO: 110693 - protein, 15 aa, Homo sapiens
  CDR3 for alpha chain variable domain of TCR clone 55347 (TRAV12-3, TRAJ11)
CAMSEENSGYSTLTF

SEQ ID NO: 110694 - protein, 11 aa, Homo sapiens
  CDR3 for beta chain variable domain of TCR clone 55347 (TRBV29-1, TRBJ2-5)
CSEDRTGTQYF

SEQ ID NO: 110695 - protein, 15 aa, Homo sapiens
  CDR3 for alpha chain variable domain of TCR clone 55348 (TRAV25, TRAJ53)
CPTSNSGGSNYKLTF

SEQ ID NO: 110696 - protein, 14 aa, Homo sapiens
  CDR3 for beta chain variable domain of TCR clone 55348 (TRBV11-2, TRBJ2-3)
CASSRLALTDTQYF

SEQ ID NO: 110697 - protein, 14 aa, Homo sapiens
  CDR3 for alpha chain variable domain of TCR clone 55349 (TRAV2, TRAJ37)
CAVEGSSNTGKLIF

SEQ ID NO: 110698 - protein, 16 aa, Homo sapiens
  CDR3 for beta chain variable domain of TCR clone 55349 (TRBV24-1, TRBJ2-4)
CATSDPRDWATSASAP

SEQ ID NO: 110699 - protein, 12 aa, Homo sapiens
  CDR3 for alpha chain variable domain of TCR clone 55350 (TRAV8-3, TRAJ26)
CAGDNYGQNFVF

SEQ ID NO: 110700 - protein, 15 aa, Homo sapiens
  CDR3 for beta chain variable domain of TCR clone 55350 (TRBV9, TRBJ2-1)
CASSLAGSSYKEQFF

SEQ ID NO: 110701 - protein, 12 aa, Homo sapiens
  CDR3 for alpha chain variable domain of TCR clone 55351 (TRAV2, TRAJ9)
CAVGAGGFKTIF

SEQ ID NO: 110702 - protein, 16 aa, Homo sapiens
  CDR3 for beta chain variable domain of TCR clone 55351 (TRBV13, TRBJ2-2)
CASSPRTGEHTGELCF

SEQ ID NO: 110703 - protein, 17 aa, Homo sapiens
  CDR3 for alpha chain variable domain of TCR clone 55352 (TRAV3, TRAJ6)
CAVRDGPRAGGSDIPTF

SEQ ID NO: 110704 - protein, 18 aa, Homo sapiens
  CDR3 for beta chain variable domain of TCR clone 55352 (TRBV7-3, TRBJ2-3)
CASSSTGTYPGSTDTQYF

SEQ ID NO: 110705 - protein, 18 aa, Homo sapiens
  CDR3 for alpha chain variable domain of TCR clone 55353 (TRAV1-2, TRAJ18)
CAVRDMGDRGSTLGRLYF

SEQ ID NO: 110706 - protein, 14 aa, Homo sapiens
  CDR3 for beta chain variable domain of TCR clone 55353 (TRBV7-9, TRBJ2-2)
CASSLVQDTGELFF

SEQ ID NO: 110707 - protein, 12 aa, Homo sapiens
  CDR3 for alpha chain variable domain of TCR clone 55354 (TRAV12-3, TRAJ29)
CAAREGSTPLVF

SEQ ID NO: 110708 - protein, 17 aa, Homo sapiens
  CDR3 for beta chain variable domain of TCR clone 55354 (TRBV18, TRBJ2-1)
CASSPLAAGAGDNEQFF

SEQ ID NO: 110709 - protein, 14 aa, Homo sapiens
  CDR3 for alpha chain variable domain of TCR clone 55355 (TRAV17, TRAJ45)
CATASGGGADGLTF

SEQ ID NO: 110710 - protein, 20 aa, Homo sapiens
  CDR3 for beta chain variable domain of TCR clone 55355 (TRBV7-8, TRBJ2-2)
CASSHLFPGPTIHITGELFF

SEQ ID NO: 110711 - protein, 13 aa, Homo sapiens
  CDR3 for alpha chain variable domain of TCR clone 55356 (TRAV21, TRAJ27)
CAARPGNAGKSTF

SEQ ID NO: 110712 - protein, 15 aa, Homo sapiens
  CDR3 for beta chain variable domain of TCR clone 55356 (TRBV6-3, TRBJ2-7)
CASSSPGTVFCEQYF

SEQ ID NO: 110713 - protein, 13 aa, Homo sapiens
  CDR3 for alpha chain variable domain of TCR clone 55357 (TRAV21, TRAJ32)
CAVSGGATNKLIF

SEQ ID NO: 110714 - protein, 15 aa, Homo sapiens
  CDR3 for beta chain variable domain of TCR clone 55357 (TRBV23-1, TRBJ2-1)
CASSQWPQLIMSSSS

SEQ ID NO: 110715 - protein, 20 aa, Homo sapiens
  CDR3 for alpha chain variable domain of TCR clone 55358 (TRAV26-1, TRAJ30)
CIVRVEMTRSSLEKGHDFIF

SEQ ID NO: 110716 - protein, 14 aa, Homo sapiens
  CDR3 for beta chain variable domain of TCR clone 55358 (TRBV19, TRBJ2-1)
CASPTFVLSGEQFF

SEQ ID NO: 110717 - protein, 13 aa, Homo sapiens
  CDR3 for alpha chain variable domain of TCR clone 55359 (TRAV13-1, TRAJ21)
CAASIYNLNKFYF

SEQ ID NO: 110718 - protein, 13 aa, Homo sapiens
  CDR3 for beta chain variable domain of TCR clone 55359 (TRBV27, TRBJ1-4)
CASSLMGDEKLFF

SEQ ID NO: 110719 - protein, 15 aa, Homo sapiens
  CDR3 for alpha chain variable domain of TCR clone 55360 (TRAV35, TRAJ40)
CAGQLGTSGTYKYIF

SEQ ID NO: 110720 - protein, 14 aa, Homo sapiens
  CDR3 for beta chain variable domain of TCR clone 55360 (TRBV7-3, TRBJ2-1)
YASSLAGGTNEQFF

SEQ ID NO: 110721 - protein, 19 aa, Homo sapiens
  CDR3 for alpha chain variable domain of TCR clone 55361 (TRAV12-3, TRAJ24)
SLFIRDSQPRADSWGKFQF

SEQ ID NO: 110722 - protein, 13 aa, Homo sapiens
  CDR3 for beta chain variable domain of TCR clone 55361 (TRBV19, TRBJ2-5)
CASSIPYGETQYF

SEQ ID NO: 110723 - protein, 14 aa, Homo sapiens
  CDR3 for alpha chain variable domain of TCR clone 55362 (TRAV13-1, TRAJ8)
CSKYPQHRLQKLVF

SEQ ID NO: 110724 - protein, 13 aa, Homo sapiens
  CDR3 for beta chain variable domain of TCR clone 55362 (TRBV5-4, TRBJ1-1)
CASSFQVNTEAFF

SEQ ID NO: 110725 - protein, 13 aa, Homo sapiens
  CDR3 for alpha chain variable domain of TCR clone 55363 (TRAV35, TRAJ42)
CAGFPGSQGNLIF

SEQ ID NO: 110726 - protein, 14 aa, Homo sapiens
  CDR3 for beta chain variable domain of TCR clone 55363 (TRBV4-1, TRBJ2-2)
YASSQAVNTGELFF

SEQ ID NO: 110727 - protein, 15 aa, Homo sapiens
  CDR3 for alpha chain variable domain of TCR clone 55364 (TRAV26-1, TRAJ29)
CIVRVEGSGNTPLVF

SEQ ID NO: 110728 - protein, 14 aa, Homo sapiens
  CDR3 for beta chain variable domain of TCR clone 55364 (TRBV7-9, TRBJ2-7)
CASSLGGSSYEQYF

SEQ ID NO: 110729 - protein, 11 aa, Homo sapiens
  CDR3 for alpha chain variable domain of TCR clone 55365 (TRAV2, TRAJ13)
CASGGYQKVTF

SEQ ID NO: 110730 - protein, 16 aa, Homo sapiens
  CDR3 for beta chain variable domain of TCR clone 55365 (TRBV12-5, TRBJ2-5)
SASGPRTSGNQETQYF

SEQ ID NO: 110731 - protein, 12 aa, Homo sapiens
  CDR3 for alpha chain variable domain of TCR clone 55366 (TRAV8-3, TRAJ6)
CAVARGSYIPTF

SEQ ID NO: 110732 - protein, 13 aa, Homo sapiens
  CDR3 for beta chain variable domain of TCR clone 55366 (TRBV4-1, TRBJ2-2)
CASSQENTGELFF

SEQ ID NO: 110733 - protein, 16 aa, Homo sapiens
  CDR3 for alpha chain variable domain of TCR clone 55367 (TRAV8-3, TRAJ44)
CAVGTLMTGTASKLTF

SEQ ID NO: 110734 - protein, 15 aa, Homo sapiens
  CDR3 for beta chain variable domain of TCR clone 55367 (TRBV19, TRBJ2-3)
CASREAMGSRNTQYF

SEQ ID NO: 110735 - protein, 17 aa, Homo sapiens
  CDR3 for alpha chain variable domain of TCR clone 55368 (TRAV3, TRAJ42)
CAVRDRDYGGSQGNRIF

SEQ ID NO: 110736 - protein, 12 aa, Homo sapiens
  CDR3 for beta chain variable domain of TCR clone 55368 (TRBV11-2, TRBJ2-1)
CASSPGNNEQFF

SEQ ID NO: 110737 - protein, 14 aa, Homo sapiens
  CDR3 for alpha chain variable domain of TCR clone 55369 (TRAV1-2, TRAJ16)
CAVNRSSDGQKLLF

SEQ ID NO: 110738 - protein, 12 aa, Homo sapiens
  CDR3 for beta chain variable domain of TCR clone 55369 (TRBV3-1, TRBJ2-2)
CASSLFPGELFF

SEQ ID NO: 110739 - protein, 12 aa, Homo sapiens
  CDR3 for alpha chain variable domain of TCR clone 55370 (TRAV1-1, TRAJ24)
CAATDSWGKLQF

SEQ ID NO: 110740 - protein, 15 aa, Homo sapiens
  CDR3 for beta chain variable domain of TCR clone 55370 (TRBV7-3, TRBJ2-2)
CASKANGANTGELFF

SEQ ID NO: 110741 - protein, 12 aa, Homo sapiens
  CDR3 for alpha chain variable domain of TCR clone 55371 (TRAV8-3, TRAJ26)
CAVITMVRILSL

SEQ ID NO: 110742 - protein, 15 aa, Homo sapiens
  CDR3 for beta chain variable domain of TCR clone 55371 (TRBV9, TRBJ2-1)
CASSLAGSSYNEQFF

SEQ ID NO: 110743 - protein, 11 aa, Homo sapiens
  CDR3 for alpha chain variable domain of TCR clone 55372 (TRAV8-3, TRAJ15)
CAVGPGAALIF

SEQ ID NO: 110744 - protein, 18 aa, Homo sapiens
  CDR3 for beta chain variable domain of TCR clone 55372 (TRBV18, TRBJ2-3)
CASSYTSGAAGGTDTQYF

SEQ ID NO: 110745 - protein, 14 aa, Homo sapiens
  CDR3 for alpha chain variable domain of TCR clone 55373 (TRAV17, TRAJ57)
CATDPQGRSEKLVF

SEQ ID NO: 110746 - protein, 18 aa, Homo sapiens
  CDR3 for beta chain variable domain of TCR clone 55373 (TRBV6-6, TRBJ1-3)
CASSYSKWDSISGNTIYF

SEQ ID NO: 110747 - protein, 14 aa, Homo sapiens
  CDR3 for alpha chain variable domain of TCR clone 55374 (TRAV16, TRAJ33)
CALSAMDSNYQLTW

SEQ ID NO: 110748 - protein, 17 aa, Homo sapiens
  CDR3 for beta chain variable domain of TCR clone 55374 (TRBV25-1, TRBJ2-7)
CASSDARVVFSSYEQYF

SEQ ID NO: 110749 - protein, 19 aa, Homo sapiens
  CDR3 for alpha chain variable domain of TCR clone 55375 (TRAV1-2, TRAJ26)
CLLPLCCERPDNYGQNFVF

SEQ ID NO: 110750 - protein, 14 aa, Homo sapiens
  CDR3 for beta chain variable domain of TCR clone 55375 (TRBV12-5, TRBJ2-5)
CASGSRTHQETQYF

SEQ ID NO: 110751 - protein, 14 aa, Homo sapiens
  CDR3 for alpha chain variable domain of TCR clone 55376 (TRAV12-2, TRAJ13)
CAVNPSGGYQKVTF

SEQ ID NO: 110752 - protein, 13 aa, Homo sapiens
  CDR3 for beta chain variable domain of TCR clone 55376 (TRBV20-1, TRBJ1-6)
CSARLGGTSPLHF

SEQ ID NO: 110753 - protein, 14 aa, Homo sapiens
  CDR3 for alpha chain variable domain of TCR clone 55377 (TRAV12-2, TRAJ3)
CAVSLYSGASKIIF

SEQ ID NO: 110754 - protein, 14 aa, Homo sapiens
  CDR3 for beta chain variable domain of TCR clone 55377 (TRBV27, TRBJ2-1)
CAGSIAETYNEQFF

SEQ ID NO: 110755 - protein, 17 aa, Homo sapiens
  CDR3 for alpha chain variable domain of TCR clone 55378 (TRAV3, TRAJ12)
CAARDGGRMDSSYKLIF

SEQ ID NO: 110756 - protein, 16 aa, Homo sapiens
  CDR3 for beta chain variable domain of TCR clone 55378 (TRBV9, TRBJ2-2)
CASSAMGKGNTGELFF

SEQ ID NO: 110757 - protein, 15 aa, Homo sapiens
  CDR3 for alpha chain variable domain of TCR clone 55379 (TRAV8-3, TRAJ11)
CAVGLLNSGYSTLTF

SEQ ID NO: 110758 - protein, 15 aa, Homo sapiens
  CDR3 for beta chain variable domain of TCR clone 55379 (TRBV5-8, TRBJ2-2)
CASSLDRGATGELFF

SEQ ID NO: 110759 - protein, 10 aa, Homo sapiens
  CDR3 for alpha chain variable domain of TCR clone 55380 (TRAV12-1, TRAJ43)
CVVRNNDMRF

SEQ ID NO: 110760 - protein, 13 aa, Homo sapiens
  CDR3 for beta chain variable domain of TCR clone 55380 (TRBV12-4, TRBJ1-2)
CASSSGLTVISTF

SEQ ID NO: 110761 - protein, 16 aa, Homo sapiens
  CDR3 for alpha chain variable domain of TCR clone 55381 (TRAV30, TRAJ24)
CGTEIVDADSWGKFQF

SEQ ID NO: 110762 - protein, 13 aa, Homo sapiens
  CDR3 for beta chain variable domain of TCR clone 55381 (TRBV19, TRBJ1-5)
CASSMRGYQPQHF

SEQ ID NO: 110763 - protein, 15 aa, Homo sapiens
  CDR3 for alpha chain variable domain of TCR clone 55382 (TRAV3, TRAJ4)
CAVRDGTGGYNKLIF

SEQ ID NO: 110764 - protein, 13 aa, Homo sapiens
  CDR3 for beta chain variable domain of TCR clone 55382 (TRBV12-5, TRBJ1-2)
CASGVRTGNGYSF

SEQ ID NO: 110765 - protein, 12 aa, Homo sapiens
  CDR3 for alpha chain variable domain of TCR clone 55383 (TRAV12-3, TRAJ17)
CAMTLTGNKLTF

SEQ ID NO: 110766 - protein, 14 aa, Homo sapiens
  CDR3 for beta chain variable domain of TCR clone 55383 (TRBV13, TRBJ2-3)
CASSSGSPTDTQYF

SEQ ID NO: 110767 - protein, 15 aa, Homo sapiens
  CDR3 for alpha chain variable domain of TCR clone 55384 (TRAV3, TRAJ5)
CAVRDLDTGRRALTF

SEQ ID NO: 110768 - protein, 13 aa, Homo sapiens
  CDR3 for beta chain variable domain of TCR clone 55384 (TRBV12-4, TRBJ2-7)
CASSPTETYEQYY

SEQ ID NO: 110769 - protein, 18 aa, Homo sapiens
  CDR3 for alpha chain variable domain of TCR clone 55385 (TRAV13-1, TRAJ52)
CAASKRSAGGTGYGKPTF

SEQ ID NO: 110770 - protein, 13 aa, Homo sapiens
  CDR3 for beta chain variable domain of TCR clone 55385 (TRBV12-4, TRBJ1-2)
CASSLRQGKGYTF

SEQ ID NO: 110771 - protein, 10 aa, Homo sapiens
  CDR3 for alpha chain variable domain of TCR clone 55386 (TRAV26-1, TRAJ40)
CLAGTYKYIF

SEQ ID NO: 110772 - protein, 15 aa, Homo sapiens
  CDR3 for beta chain variable domain of TCR clone 55386 (TRBV19, TRBJ2-1)
CASSSPGVPLDEQFF

SEQ ID NO: 110773 - protein, 16 aa, Homo sapiens
  CDR3 for alpha chain variable domain of TCR clone 55387 (TRAV35, TRAJ37)
CWAFLRGSSDTGKLIF

SEQ ID NO: 110774 - protein, 13 aa, Homo sapiens
  CDR3 for beta chain variable domain of TCR clone 55387 (TRBV2, TRBJ1-2)
CASSVRGNYGYTF

SEQ ID NO: 110775 - protein, 16 aa, Homo sapiens
  CDR3 for alpha chain variable domain of TCR clone 55388 (TRAV12-3, TRAJ53)
CAMSPGSGGTNYKLTF

SEQ ID NO: 110776 - protein, 11 aa, Homo sapiens
  CDR3 for beta chain variable domain of TCR clone 55388 (TRBV29-1, TRBJ2-5)
CSEDRTGTQYF

SEQ ID NO: 110777 - protein, 17 aa, Homo sapiens
  CDR3 for alpha chain variable domain of TCR clone 55389 (TRAV2, TRAJ22)
ILQVREADAAEQRQLTF

SEQ ID NO: 110778 - protein, 16 aa, Homo sapiens
  CDR3 for beta chain variable domain of TCR clone 55389 (TRBV2, TRBJ2-5)
CASSETQGVGEDTQYF

SEQ ID NO: 110779 - protein, 15 aa, Homo sapiens
  CDR3 for alpha chain variable domain of TCR clone 55390 (TRAV27, TRAJ38)
CAARRNAGNNRKLIW

SEQ ID NO: 110780 - protein, 12 aa, Homo sapiens
  CDR3 for beta chain variable domain of TCR clone 55390 (TRBV6-3, TRBJ2-7)
CASSLTPYEQYF

SEQ ID NO: 110781 - protein, 12 aa, Homo sapiens
  CDR3 for alpha chain variable domain of TCR clone 55391 (TRAV21, TRAJ33)
CAKMDSSYQLIW

SEQ ID NO: 110782 - protein, 14 aa, Homo sapiens
  CDR3 for beta chain variable domain of TCR clone 55391 (TRBV7-3, TRBJ1-1)
CASSLKGGNTEAFF

SEQ ID NO: 110783 - protein, 12 aa, Homo sapiens
  CDR3 for alpha chain variable domain of TCR clone 55392 (TRAV29/DV5, TRAJ15)
CTSNQAGTALIF

SEQ ID NO: 110784 - protein, 15 aa, Homo sapiens
  CDR3 for beta chain variable domain of TCR clone 55392 (TRBV11-2, TRBJ2-2)
CASSSDRVNAGELFF

SEQ ID NO: 110785 - protein, 12 aa, Homo sapiens
  CDR3 for alpha chain variable domain of TCR clone 55393 (TRAV26-1, TRAJ43)
CIVRPRGDDMRF

SEQ ID NO: 110786 - protein, 16 aa, Homo sapiens
  CDR3 for beta chain variable domain of TCR clone 55393 (TRBV3-1, TRBJ2-1)
CASSQGGRRSFDEQSF

SEQ ID NO: 110787 - protein, 16 aa, Homo sapiens
  CDR3 for alpha chain variable domain of TCR clone 55394 (TRAV3, TRAJ21)
CAVRDIERGNFNKFYF

SEQ ID NO: 110788 - protein, 13 aa, Homo sapiens
  CDR3 for beta chain variable domain of TCR clone 55394 (TRBV27, TRBJ2-7)
RASSLTTGYEQYF

SEQ ID NO: 110789 - protein, 12 aa, Homo sapiens
  CDR3 for alpha chain variable domain of TCR clone 55395 (TRAV12-2, TRAJ7)
CAVMRGNSRLAF

SEQ ID NO: 110790 - protein, 17 aa, Homo sapiens
  CDR3 for beta chain variable domain of TCR clone 55395 (TRBV7-9, TRBJ2-3)
CASSPTVAGDLTDTQYF

SEQ ID NO: 110791 - protein, 16 aa, Homo sapiens
  CDR3 for alpha chain variable domain of TCR clone 55396 (TRAV8-3, TRAJ10)
CAVGPILTGGGNKLTF

SEQ ID NO: 110792 - protein, 16 aa, Homo sapiens
  CDR3 for beta chain variable domain of TCR clone 55396 (TRBV7-2, TRBJ2-5)
RASSSKWLSGQETQYF

SEQ ID NO: 110793 - protein, 12 aa, Homo sapiens
  CDR3 for alpha chain variable domain of TCR clone 55397 (TRAV8-3, TRAJ13)
CAVGAGYQKVTF

SEQ ID NO: 110794 - protein, 17 aa, Homo sapiens
  CDR3 for beta chain variable domain of TCR clone 55397 (TRBV7-2, TRBJ2-3)
CASSLEARGTSTDTQYF

SEQ ID NO: 110795 - protein, 13 aa, Homo sapiens
  CDR3 for alpha chain variable domain of TCR clone 55398 (TRAV38-2/DV8, TRAJ56)
CAYKGGANSKLTF

SEQ ID NO: 110796 - protein, 16 aa, Homo sapiens
  CDR3 for beta chain variable domain of TCR clone 55398 (TRBV20-1, TRBJ1-5)
CSASRGTGYSNQPQHF

SEQ ID NO: 110797 - protein, 14 aa, Homo sapiens
  CDR3 for alpha chain variable domain of TCR clone 55399 (TRAV16, TRAJ33)
CALSAMDSNCQLIW

SEQ ID NO: 110798 - protein, 12 aa, Homo sapiens
  CDR3 for beta chain variable domain of TCR clone 55399 (TRBV5-1, TRBJ1-2)
CASSQDTYGYTF

SEQ ID NO: 110799 - protein, 13 aa, Homo sapiens
  CDR3 for alpha chain variable domain of TCR clone 55400 (TRAV36/DV7, TRAJ40)
CAVEASGTYKYIF

SEQ ID NO: 110800 - protein, 14 aa, Homo sapiens
  CDR3 for beta chain variable domain of TCR clone 55400 (TRBV15, TRBJ2-5)
CATSIGGLGETQYF

SEQ ID NO: 110801 - protein, 14 aa, Homo sapiens
  CDR3 for alpha chain variable domain of TCR clone 55401 (TRAV16, TRAJ3)
CALSQYSSASKIIF

SEQ ID NO: 110802 - protein, 14 aa, Homo sapiens
  CDR3 for beta chain variable domain of TCR clone 55401 (TRBV6-3, TRBJ2-1)
CASLHSACYNEQFF

SEQ ID NO: 110803 - protein, 14 aa, Homo sapiens
  CDR3 for alpha chain variable domain of TCR clone 55402 (TRAV16, TRAJ39)
CALSKNNAGNMLTF

SEQ ID NO: 110804 - protein, 16 aa, Homo sapiens
  CDR3 for beta chain variable domain of TCR clone 55402 (TRBV6-6, TRBJ2-1)
CASSYSFSGSYNEQFL

SEQ ID NO: 110805 - protein, 15 aa, Homo sapiens
  CDR3 for alpha chain variable domain of TCR clone 55403 (TRAV12-3, TRAJ13)
CAMSTRSGGYQKVTF

SEQ ID NO: 110806 - protein, 18 aa, Homo sapiens
  CDR3 for beta chain variable domain of TCR clone 55403 (TRBV3-1, TRBJ2-7)
CASSQEGGGRSWHYEQYF

SEQ ID NO: 110807 - protein, 18 aa, Homo sapiens
  CDR3 for alpha chain variable domain of TCR clone 55404 (TRAV1-2, TRAJ18)
CAVRDMGDRGSTLGRLYF

SEQ ID NO: 110808 - protein, 16 aa, Homo sapiens
  CDR3 for beta chain variable domain of TCR clone 55404 (TRBV29-1, TRBJ1-2)
CSVEANRDRANYGYTF

SEQ ID NO: 110809 - protein, 12 aa, Homo sapiens
  CDR3 for alpha chain variable domain of TCR clone 55405 (TRAV8-3, TRAJ6)
RAVAGGSYIPTF

SEQ ID NO: 110810 - protein, 14 aa, Homo sapiens
  CDR3 for beta chain variable domain of TCR clone 55405 (TRBV27, TRBJ2-7)
CASATGTERREQYL

SEQ ID NO: 110811 - protein, 14 aa, Homo sapiens
  CDR3 for alpha chain variable domain of TCR clone 55406 (TRAV35, TRAJ42)
CAGRYGGNQGNLIF

SEQ ID NO: 110812 - protein, 15 aa, Homo sapiens
  CDR3 for beta chain variable domain of TCR clone 55406 (TRBV7-9, TRBJ2-1)
CASSLGWGRANEQFF

SEQ ID NO: 110813 - protein, 13 aa, Homo sapiens
  CDR3 for alpha chain variable domain of TCR clone 55407 (TRAV13-2, TRAJ40)
CAEFTSGTYKYIF

SEQ ID NO: 110814 - protein, 13 aa, Homo sapiens
  CDR3 for beta chain variable domain of TCR clone 55407 (TRBV19, TRBJ1-2)
CASSVPGQDGYTF

SEQ ID NO: 110815 - protein, 13 aa, Homo sapiens
  CDR3 for alpha chain variable domain of TCR clone 55408 (TRAV1-2, TRAJ9)
CAVLNTGGFKTIF

SEQ ID NO: 110816 - protein, 14 aa, Homo sapiens
  CDR3 for beta chain variable domain of TCR clone 55408 (TRBV5-1, TRBJ2-2)
CASGLGGGSGELFF

SEQ ID NO: 110817 - protein, 13 aa, Homo sapiens
  CDR3 for alpha chain variable domain of TCR clone 55409 (TRAV21, TRAJ20)
CAVGLRVDYKLSF

SEQ ID NO: 110818 - protein, 14 aa, Homo sapiens
  CDR3 for beta chain variable domain of TCR clone 55409 (TRBV7-8, TRBJ2-3)
CASSLEAGTDTQYF

SEQ ID NO: 110819 - protein, 14 aa, Homo sapiens
  CDR3 for alpha chain variable domain of TCR clone 55410 (TRAV12-2, TRAJ17)
CAALFKAAGNKLTF

SEQ ID NO: 110820 - protein, 14 aa, Homo sapiens
  CDR3 for beta chain variable domain of TCR clone 55410 (TRBV7-9, TRBJ2-2)
CASSGLADTGELFF

SEQ ID NO: 110821 - protein, 15 aa, Homo sapiens
  CDR3 for alpha chain variable domain of TCR clone 55411 (TRAV23/DV6, TRAJ30)
CAASSQESRDDKIIF

SEQ ID NO: 110822 - protein, 17 aa, Homo sapiens
  CDR3 for beta chain variable domain of TCR clone 55411 (TRBV4-3, TRBJ2-1)
CASSQCSSGRASGEQFF

SEQ ID NO: 110823 - protein, 14 aa, Homo sapiens
  CDR3 for alpha chain variable domain of TCR clone 55412 (TRAV1-1, TRAJ5)
CAVRDGAGRRALTF

SEQ ID NO: 110824 - protein, 14 aa, Homo sapiens
  CDR3 for beta chain variable domain of TCR clone 55412 (TRBV28, TRBJ2-1)
RASSYYTAYNEQFF

SEQ ID NO: 110825 - protein, 12 aa, Homo sapiens
  CDR3 for alpha chain variable domain of TCR clone 55413 (TRAV8-3, TRAJ20)
CAVGANDYKLSF

SEQ ID NO: 110826 - protein, 13 aa, Homo sapiens
  CDR3 for beta chain variable domain of TCR clone 55413 (TRBV7-9, TRBJ2-7)
CASSFAGAYEQYF

SEQ ID NO: 110827 - protein, 13 aa, Homo sapiens
  CDR3 for alpha chain variable domain of TCR clone 55414 (TRAV2, TRAJ47)
CAVDREYGDKLVF

SEQ ID NO: 110828 - protein, 17 aa, Homo sapiens
  CDR3 for beta chain variable domain of TCR clone 55414 (TRBV15, TRBJ1-5)
CATSRVKGIYSNQPQHF

SEQ ID NO: 110829 - protein, 12 aa, Homo sapiens
  CDR3 for alpha chain variable domain of TCR clone 55415 (TRAV21, TRAJ13)
PGPSGGYQKVTF

SEQ ID NO: 110830 - protein, 15 aa, Homo sapiens
  CDR3 for beta chain variable domain of TCR clone 55415 (TRBV20-1, TRBJ2-7)
CGARDRVSGMDEQYF

SEQ ID NO: 110831 - protein, 11 aa, Homo sapiens
  CDR3 for alpha chain variable domain of TCR clone 55416 (TRAV35, TRAJ30)
CAGPGDDKIIF

SEQ ID NO: 110832 - protein, 15 aa, Homo sapiens
  CDR3 for beta chain variable domain of TCR clone 55416 (TRBV7-6, TRBJ2-1)
CASSSLAGEGNEQFF

SEQ ID NO: 110833 - protein, 11 aa, Homo sapiens
  CDR3 for alpha chain variable domain of TCR clone 55417 (TRAV2, TRAJ10)
PLTGGGNKLTF

SEQ ID NO: 110834 - protein, 12 aa, Homo sapiens
  CDR3 for beta chain variable domain of TCR clone 55417 (TRBV14, TRBJ2-7)
CASSSLKGEQYF

SEQ ID NO: 110835 - protein, 16 aa, Homo sapiens
  CDR3 for alpha chain variable domain of TCR clone 55418 (TRAV38-2/DV8, TRAJ45)
CAYTTTSGGDADGLTF

SEQ ID NO: 110836 - protein, 14 aa, Homo sapiens
  CDR3 for beta chain variable domain of TCR clone 55418 (TRBV7-9, TRBJ2-2)
CASSLGHRTGEMFF

SEQ ID NO: 110837 - protein, 14 aa, Homo sapiens
  CDR3 for alpha chain variable domain of TCR clone 55419 (TRAV26-1, TRAJ21)
CIVRVVYNFNKFYF

SEQ ID NO: 110838 - protein, 14 aa, Homo sapiens
  CDR3 for beta chain variable domain of TCR clone 55419 (TRBV5-4, TRBJ1-1)
CASSLDSRRDEAFF

SEQ ID NO: 110839 - protein, 14 aa, Homo sapiens
  CDR3 for alpha chain variable domain of TCR clone 55420 (TRAV2, TRAJ37)
CAVDFTSNTGKLIF

SEQ ID NO: 110840 - protein, 14 aa, Homo sapiens
  CDR3 for beta chain variable domain of TCR clone 55420 (TRBV18, TRBJ2-7)
CASSPTSGGYEQYF

SEQ ID NO: 110841 - protein, 13 aa, Homo sapiens
  CDR3 for alpha chain variable domain of TCR clone 55421 (TRAV8-3, TRAJ36)
CAVGATGANNLSF

SEQ ID NO: 110842 - protein, 16 aa, Homo sapiens
  CDR3 for beta chain variable domain of TCR clone 55421 (TRBV20-1, TRBJ1-4)
CSAPGQGLLTNEKLFF

SEQ ID NO: 110843 - protein, 14 aa, Homo sapiens
  CDR3 for alpha chain variable domain of TCR clone 55422 (TRAV8-3, TRAJ6)
CAVGASGGSYIPTF

SEQ ID NO: 110844 - protein, 17 aa, Homo sapiens
  CDR3 for beta chain variable domain of TCR clone 55422 (TRBV18, TRBJ2-2)
CASSTSDPWQNTGELFF

SEQ ID NO: 110845 - protein, 16 aa, Homo sapiens
  CDR3 for alpha chain variable domain of TCR clone 55423 (TRAV30, TRAJ24)
CGTEIVDADSWGKFQF

SEQ ID NO: 110846 - protein, 12 aa, Homo sapiens
  CDR3 for beta chain variable domain of TCR clone 55423 (TRBV11-2, TRBJ2-2)
CASGLGGGELFF

SEQ ID NO: 110847 - protein, 15 aa, Homo sapiens
  CDR3 for alpha chain variable domain of TCR clone 55424 (TRAV12-1, TRAJ44)
CAVFVNTGTASKLTF

SEQ ID NO: 110848 - protein, 17 aa, Homo sapiens
  CDR3 for beta chain variable domain of TCR clone 55424 (TRBV7-8, TRBJ2-6)
CASSAGTGGAGANVLTF

SEQ ID NO: 110849 - protein, 16 aa, Homo sapiens
  CDR3 for alpha chain variable domain of TCR clone 55425 (TRAV3, TRAJ18)
CAVRDGRGSTLGSLYF

SEQ ID NO: 110850 - protein, 15 aa, Homo sapiens
  CDR3 for beta chain variable domain of TCR clone 55425 (TRBV7-9, TRBJ1-6)
CASSSPGRGNSPLHF

SEQ ID NO: 110851 - protein, 15 aa, Homo sapiens
  CDR3 for alpha chain variable domain of TCR clone 55426 (TRAV12-3, TRAJ11)
CAMSEENSGYSTLTS

SEQ ID NO: 110852 - protein, 20 aa, Homo sapiens
  CDR3 for beta chain variable domain of TCR clone 55426 (TRBV7-8, TRBJ2-2)
CASSHLFPGPTIHITGELFF

SEQ ID NO: 110853 - protein, 11 aa, Homo sapiens
  CDR3 for alpha chain variable domain of TCR clone 55427 (TRAV2, TRAJ21)
CAVFNFNKFYL

SEQ ID NO: 110854 - protein, 14 aa, Homo sapiens
  CDR3 for beta chain variable domain of TCR clone 55427 (TRBV15, TRBJ2-3)
CATRGGTSTDTQYF

SEQ ID NO: 110855 - protein, 12 aa, Homo sapiens
  CDR3 for alpha chain variable domain of TCR clone 55428 (TRAV2, TRAJ31)
CAVEYDNARLMF

SEQ ID NO: 110856 - protein, 16 aa, Homo sapiens
  CDR3 for beta chain variable domain of TCR clone 55428 (TRBV10-3, TRBJ2-1)
CAISGVGDGGGGEQFF

SEQ ID NO: 110857 - protein, 15 aa, Homo sapiens
  CDR3 for alpha chain variable domain of TCR clone 55429 (TRAV3, TRAJ3)
CAVRDSDSSASKIIF

SEQ ID NO: 110858 - protein, 18 aa, Homo sapiens
  CDR3 for beta chain variable domain of TCR clone 55429 (TRBV25-1, TRBJ1-2)
CASSGLQNGQGLIFGYTF

SEQ ID NO: 110859 - protein, 14 aa, Homo sapiens
  CDR3 for alpha chain variable domain of TCR clone 55430 (TRAV21, TRAJ37)
CAASGSSNTGKLIF

SEQ ID NO: 110860 - protein, 15 aa, Homo sapiens
  CDR3 for beta chain variable domain of TCR clone 55430 (TRBV5-8, TRBJ2-1)
CASSLGALRANEQFF

SEQ ID NO: 110861 - protein, 13 aa, Homo sapiens
  CDR3 for alpha chain variable domain of TCR clone 55431 (TRAV21, TRAJ20)
CAVGLRVDYKLSF

SEQ ID NO: 110862 - protein, 13 aa, Homo sapiens
  CDR3 for beta chain variable domain of TCR clone 55431 (TRBV6-1, TRBJ1-1)
CASSRQGNTGAFL

SEQ ID NO: 110863 - protein, 15 aa, Homo sapiens
  CDR3 for alpha chain variable domain of TCR clone 55432 (TRAV8-3, TRAJ6)
CAVGPLGGGSYIPPF

SEQ ID NO: 110864 - protein, 14 aa, Homo sapiens
  CDR3 for beta chain variable domain of TCR clone 55432 (TRBV19, TRBJ2-2)
CASSTGQGAGELFF

SEQ ID NO: 110865 - protein, 14 aa, Homo sapiens
  CDR3 for alpha chain variable domain of TCR clone 55433 (TRAV34, TRAJ44)
CGADGTGTASKLTF

SEQ ID NO: 110866 - protein, 16 aa, Homo sapiens
  CDR3 for beta chain variable domain of TCR clone 55433 (TRBV12-4, TRBJ2-7)
CASSLIGGTGTYEQYF

SEQ ID NO: 110867 - protein, 12 aa, Homo sapiens
  CDR3 for alpha chain variable domain of TCR clone 55434 (TRAV8-3, TRAJ26)
CAGDNYGQNFVF

SEQ ID NO: 110868 - protein, 15 aa, Homo sapiens
  CDR3 for beta chain variable domain of TCR clone 55434 (TRBV9, TRBJ2-1)
CASSLAWSSYNEQFF

SEQ ID NO: 110869 - protein, 13 aa, Homo sapiens
  CDR3 for alpha chain variable domain of TCR clone 55435 (TRAV20, TRAJ37)
CAGFSSNTGKLIF

SEQ ID NO: 110870 - protein, 11 aa, Homo sapiens
  CDR3 for beta chain variable domain of TCR clone 55435 (TRBV12-4, TRBJ2-3)
CASTATDTQYF

SEQ ID NO: 110871 - protein, 15 aa, Homo sapiens
  CDR3 for alpha chain variable domain of TCR clone 55436 (TRAV21, TRAJ18)
CAVRDRGSTLGRLYF

SEQ ID NO: 110872 - protein, 17 aa, Homo sapiens
  CDR3 for beta chain variable domain of TCR clone 55436 (TRBV7-2, TRBJ2-3)
CVSSSYSGTRRADTQYF

SEQ ID NO: 110873 - protein, 15 aa, Homo sapiens
  CDR3 for alpha chain variable domain of TCR clone 55437 (TRAV4, TRAJ26)
CLVGGMNNYGQNFVF

SEQ ID NO: 110874 - protein, 16 aa, Homo sapiens
  CDR3 for beta chain variable domain of TCR clone 55437 (TRBV28, TRBJ1-4)
CASSSRTGAANEKLFF

SEQ ID NO: 110875 - protein, 14 aa, Homo sapiens
  CDR3 for alpha chain variable domain of TCR clone 55438 (TRAV12-3, TRAJ29)
CAMILLSGNTPLVL

SEQ ID NO: 110876 - protein, 16 aa, Homo sapiens
  CDR3 for beta chain variable domain of TCR clone 55438 (TRBV28, TRBJ2-7)
CASSSGTSGRGYEQYF

SEQ ID NO: 110877 - protein, 17 aa, Homo sapiens
  CDR3 for alpha chain variable domain of TCR clone 55439 (TRAV13-1, TRAJ31)
CAPRDRLMFGDGTQLVV

SEQ ID NO: 110878 - protein, 14 aa, Homo sapiens
  CDR3 for beta chain variable domain of TCR clone 55439 (TRBV7-3, TRBJ1-1)
CASSLKGGNTEAFF

SEQ ID NO: 110879 - protein, 12 aa, Homo sapiens
  CDR3 for alpha chain variable domain of TCR clone 55440 (TRAV13-1, TRAJ21)
CAAKEGFNKFYF

SEQ ID NO: 110880 - protein, 13 aa, Homo sapiens
  CDR3 for beta chain variable domain of TCR clone 55440 (TRBV15, TRBJ1-6)
CATSGGLNSPLHF

SEQ ID NO: 110881 - protein, 13 aa, Homo sapiens
  CDR3 for alpha chain variable domain of TCR clone 55441 (TRAV2, TRAJ15)
CAVASQAGTALIF

SEQ ID NO: 110882 - protein, 17 aa, Homo sapiens
  CDR3 for beta chain variable domain of TCR clone 55441 (TRBV4-1, TRBJ1-4)
CASSQEGPRGVEEKLFF

SEQ ID NO: 110883 - protein, 13 aa, Homo sapiens
  CDR3 for alpha chain variable domain of TCR clone 55442 (TRAV12-3, TRAJ9)
CAMSADGGFKTIF

SEQ ID NO: 110884 - protein, 16 aa, Homo sapiens
  CDR3 for beta chain variable domain of TCR clone 55442 (TRBV5-1, TRBJ1-1)
CASSSGGNSLNTEAFF

SEQ ID NO: 110885 - protein, 15 aa, Homo sapiens
  CDR3 for alpha chain variable domain of TCR clone 55443 (TRAV1-1, TRAJ36)
CAGHLNWGKQPLLWD

SEQ ID NO: 110886 - protein, 17 aa, Homo sapiens
  CDR3 for beta chain variable domain of TCR clone 55443 (TRBV15, TRBJ1-2)
CATSGREIDVVNYGYTF

SEQ ID NO: 110887 - protein, 11 aa, Homo sapiens
  CDR3 for alpha chain variable domain of TCR clone 55444 (TRAV13-1, TRAJ15)
RAATPGTALIF

SEQ ID NO: 110888 - protein, 13 aa, Homo sapiens
  CDR3 for beta chain variable domain of TCR clone 55444 (TRBV7-2, TRBJ2-1)
CASSLGVYNEQFF

SEQ ID NO: 110889 - protein, 13 aa, Homo sapiens
  CDR3 for alpha chain variable domain of TCR clone 55445 (TRAV17, TRAJ9)
CATDYTGGFKTIF

SEQ ID NO: 110890 - protein, 16 aa, Homo sapiens
  CDR3 for beta chain variable domain of TCR clone 55445 (TRBV7-7, TRBJ2-1)
CASSLASGTYYNEQFF

SEQ ID NO: 110891 - protein, 16 aa, Homo sapiens
  CDR3 for alpha chain variable domain of TCR clone 55446 (TRAV26-1, TRAJ38)
CIVRPLNAGNSRKLIW

SEQ ID NO: 110892 - protein, 13 aa, Homo sapiens
  CDR3 for beta chain variable domain of TCR clone 55446 (TRBV18, TRBJ1-1)
CASSPNGDTEAFF

SEQ ID NO: 110893 - protein, 11 aa, Homo sapiens
  CDR3 for alpha chain variable domain of TCR clone 55447 (TRAV12-2, TRAJ54)
CAVEGAQKLVF

SEQ ID NO: 110894 - protein, 17 aa, Homo sapiens
  CDR3 for beta chain variable domain of TCR clone 55447 (TRBV18, TRBJ1-3)
CASSPYPTGPSGNTTYF

SEQ ID NO: 110895 - protein, 12 aa, Homo sapiens
  CDR3 for alpha chain variable domain of TCR clone 55448 (TRAV1-2, TRAJ29)
CAVPSGNTPLVF

SEQ ID NO: 110896 - protein, 12 aa, Homo sapiens
  CDR3 for beta chain variable domain of TCR clone 55448 (TRBV7-9, TRBJ2-7)
SASSFGSYEQYF

SEQ ID NO: 110897 - protein, 11 aa, Homo sapiens
  CDR3 for alpha chain variable domain of TCR clone 55449 (TRAV1-1, TRAJ23)
CAVRQGGKLIF

SEQ ID NO: 110898 - protein, 20 aa, Homo sapiens
  CDR3 for beta chain variable domain of TCR clone 55449 (TRBV7-8, TRBJ2-2)
CGSSHLFPGPTIHITGELFF

SEQ ID NO: 110899 - protein, 13 aa, Homo sapiens
  CDR3 for alpha chain variable domain of TCR clone 55450 (TRAV39, TRAJ40)
CAVYTSGTYKYIF

SEQ ID NO: 110900 - protein, 15 aa, Homo sapiens
  CDR3 for beta chain variable domain of TCR clone 55450 (TRBV7-9, TRBJ1-6)
CASSSPGRGNSPLHF

SEQ ID NO: 110901 - protein, 14 aa, Homo sapiens
  CDR3 for alpha chain variable domain of TCR clone 55451 (TRAV16, TRAJ33)
CALSAMGSNYQLIW

SEQ ID NO: 110902 - protein, 14 aa, Homo sapiens
  CDR3 for beta chain variable domain of TCR clone 55451 (TRBV2, TRBJ1-5)
CASSGTGFNQPQHF

SEQ ID NO: 110903 - protein, 14 aa, Homo sapiens
  CDR3 for alpha chain variable domain of TCR clone 55452 (TRAV35, TRAJ22)
RAGLRPGSARQLTF

SEQ ID NO: 110904 - protein, 14 aa, Homo sapiens
  CDR3 for beta chain variable domain of TCR clone 55452 (TRBV4-1, TRBJ2-7)
CASSPVAGGDEQYF

SEQ ID NO: 110905 - protein, 14 aa, Homo sapiens
  CDR3 for alpha chain variable domain of TCR clone 55453 (TRAV12-2, TRAJ44)
CAVNPAGTASKLTF

SEQ ID NO: 110906 - protein, 13 aa, Homo sapiens
  CDR3 for beta chain variable domain of TCR clone 55453 (TRBV20-1, TRBJ1-6)
CSAPLGVGSPLHL

SEQ ID NO: 110907 - protein, 18 aa, Homo sapiens
  CDR3 for alpha chain variable domain of TCR clone 55454 (TRAV13-1, TRAJ52)
CAAKNPNAGGTSYGKLTF

SEQ ID NO: 110908 - protein, 13 aa, Homo sapiens
  CDR3 for beta chain variable domain of TCR clone 55454 (TRBV4-1, TRBJ2-1)
CASSQAGGDEQFF

SEQ ID NO: 110909 - protein, 18 aa, Homo sapiens
  CDR3 for alpha chain variable domain of TCR clone 55455 (TRAV21, TRAJ52)
CAVRPSPAGGTSYGKLTF

SEQ ID NO: 110910 - protein, 19 aa, Homo sapiens
  CDR3 for beta chain variable domain of TCR clone 55455 (TRBV19, TRBJ2-5)
CASSIGQVTDFFLGETQYF

SEQ ID NO: 110911 - protein, 13 aa, Homo sapiens
  CDR3 for alpha chain variable domain of TCR clone 55456 (TRAV12-1, TRAJ33)
CGDAPDSNYQLIW

SEQ ID NO: 110912 - protein, 13 aa, Homo sapiens
  CDR3 for beta chain variable domain of TCR clone 55456 (TRBV2, TRBJ1-1)
CARNPTGGFHAFF

SEQ ID NO: 110913 - protein, 15 aa, Homo sapiens
  CDR3 for alpha chain variable domain of TCR clone 55457 (TRAV4, TRAJ8)
CLVGEQHTGFQKLVF

SEQ ID NO: 110914 - protein, 15 aa, Homo sapiens
  CDR3 for beta chain variable domain of TCR clone 55457 (TRBV7-9, TRBJ2-5)
CASSNRDYLQETQYL

SEQ ID NO: 110915 - protein, 17 aa, Homo sapiens
  CDR3 for alpha chain variable domain of TCR clone 55458 (TRAV29/DV5, TRAJ52)
CAATSTADGTSYGKLTF

SEQ ID NO: 110916 - protein, 13 aa, Homo sapiens
  CDR3 for beta chain variable domain of TCR clone 55458 (TRBV20-1, TRBJ1-1)
CSARGGGNTEAFF

SEQ ID NO: 110917 - protein, 14 aa, Homo sapiens
  CDR3 for alpha chain variable domain of TCR clone 55459 (TRAV1-2, TRAJ29)
CAVRELTSATPLVF

SEQ ID NO: 110918 - protein, 14 aa, Homo sapiens
  CDR3 for beta chain variable domain of TCR clone 55459 (TRBV3-1, TRBJ2-5)
CASSQGPGQETQYF

SEQ ID NO: 110919 - protein, 14 aa, Homo sapiens
  CDR3 for alpha chain variable domain of TCR clone 55460 (TRAV23/DV6, TRAJ17)
CAASIGATGNKLTF

SEQ ID NO: 110920 - protein, 12 aa, Homo sapiens
  CDR3 for beta chain variable domain of TCR clone 55460 (TRBV20-1, TRBJ2-5)
CSAGGAGETQYF

SEQ ID NO: 110921 - protein, 11 aa, Homo sapiens
  CDR3 for alpha chain variable domain of TCR clone 55461 (TRAV21, TRAJ9)
CAVPGGFKTIF

SEQ ID NO: 110922 - protein, 12 aa, Homo sapiens
  CDR3 for beta chain variable domain of TCR clone 55461 (TRBV20-1, TRBJ2-3)
CSARVGTDTQHF

SEQ ID NO: 110923 - protein, 13 aa, Homo sapiens
  CDR3 for alpha chain variable domain of TCR clone 55462 (TRAV12-1, TRAJ22)
CVVYSGSARQLTF

SEQ ID NO: 110924 - protein, 10 aa, Homo sapiens
  CDR3 for beta chain variable domain of TCR clone 55462 (TRBV6-3, TRBJ2-2)
CANRDGELFF

SEQ ID NO: 110925 - protein, 12 aa, Homo sapiens
  CDR3 for alpha chain variable domain of TCR clone 55463 (TRAV12-3, TRAJ5)
CASGQGRRALTF

SEQ ID NO: 110926 - protein, 16 aa, Homo sapiens
  CDR3 for beta chain variable domain of TCR clone 55463 (TRBV7-3, TRBJ2-2)
CASSLKRGTLSGELFF

SEQ ID NO: 110927 - protein, 14 aa, Homo sapiens
  CDR3 for alpha chain variable domain of TCR clone 55464 (TRAV21, TRAJ58)
CAVRRGRSGSRLTL

SEQ ID NO: 110928 - protein, 13 aa, Homo sapiens
  CDR3 for beta chain variable domain of TCR clone 55464 (TRBV7-2, TRBJ1-6)
CASSLKFDSPLHF

SEQ ID NO: 110929 - protein, 14 aa, Homo sapiens
  CDR3 for alpha chain variable domain of TCR clone 55465 (TRAV13-2, TRAJ43)
CAEIPTYNNNDMSF

SEQ ID NO: 110930 - protein, 15 aa, Homo sapiens
  CDR3 for beta chain variable domain of TCR clone 55465 (TRBV7-9, TRBJ2-2)
CASGPLDTFPGELFF

SEQ ID NO: 110931 - protein, 13 aa, Homo sapiens
  CDR3 for alpha chain variable domain of TCR clone 55466 (TRAV12-1, TRAJ40)
CVVPTSGTYKYIF

SEQ ID NO: 110932 - protein, 13 aa, Homo sapiens
  CDR3 for beta chain variable domain of TCR clone 55466 (TRBV10-3, TRBJ2-7)
CASKLAVNYEQYF

SEQ ID NO: 110933 - protein, 11 aa, Homo sapiens
  CDR3 for alpha chain variable domain of TCR clone 55467 (TRAV12-2, TRAJ29)
CAVTLRSPLVF

SEQ ID NO: 110934 - protein, 16 aa, Homo sapiens
  CDR3 for beta chain variable domain of TCR clone 55467 (TRBV5-1, TRBJ2-2)
CAGSLGGTGSTGELFF

SEQ ID NO: 110935 - protein, 18 aa, Homo sapiens
  CDR3 for alpha chain variable domain of TCR clone 55468 (TRAV26-2, TRAJ45)
CILRVDKYSGGGADGLTF

SEQ ID NO: 110936 - protein, 16 aa, Homo sapiens
  CDR3 for beta chain variable domain of TCR clone 55468 (TRBV2, TRBJ1-4)
CASNLLQGTTNEKLFF

SEQ ID NO: 110937 - protein, 15 aa, Homo sapiens
  CDR3 for alpha chain variable domain of TCR clone 55469 (TRAV26-1, TRAJ42)
FIVRVKGGSQGNLIF

SEQ ID NO: 110938 - protein, 14 aa, Homo sapiens
  CDR3 for beta chain variable domain of TCR clone 55469 (TRBV19, TRBJ2-2)
GATTGHANTGELFF

SEQ ID NO: 110939 - protein, 14 aa, Homo sapiens
  CDR3 for alpha chain variable domain of TCR clone 55470 (TRAV21, TRAJ40)
CCEAQTSGTYKYIF

SEQ ID NO: 110940 - protein, 13 aa, Homo sapiens
  CDR3 for beta chain variable domain of TCR clone 55470 (TRBV7-2, TRBJ2-2)
CASSSVRAGELFF

SEQ ID NO: 110941 - protein, 14 aa, Homo sapiens
  CDR3 for alpha chain variable domain of TCR clone 55471 (TRAV30, TRAJ49)
CGTEIVAPVTSSIL

SEQ ID NO: 110942 - protein, 13 aa, Homo sapiens
  CDR3 for beta chain variable domain of TCR clone 55471 (TRBV24-1, TRBJ2-1)
CATSAGPYNEQFF

SEQ ID NO: 110943 - protein, 18 aa, Homo sapiens
  CDR3 for alpha chain variable domain of TCR clone 55472 (TRAV21, TRAJ52)
CAVRPSPAGGTSYGKLTS

SEQ ID NO: 110944 - protein, 13 aa, Homo sapiens
  CDR3 for beta chain variable domain of TCR clone 55472 (TRBV7-3, TRBJ1-1)
CASSQDWGAEAFF

SEQ ID NO: 110945 - protein, 15 aa, Homo sapiens
  CDR3 for alpha chain variable domain of TCR clone 55473 (TRAV12-3, TRAJ49)
CAMAVTPNTGTQFYF

SEQ ID NO: 110946 - protein, 18 aa, Homo sapiens
  CDR3 for beta chain variable domain of TCR clone 55473 (TRBV4-1, TRBJ1-5)
CASSQDPRGQGLNQPQHF

SEQ ID NO: 110947 - protein, 15 aa, Homo sapiens
  CDR3 for alpha chain variable domain of TCR clone 55474 (TRAV12-3, TRAJ6)
CAMSASTGGSYIPTF

SEQ ID NO: 110948 - protein, 16 aa, Homo sapiens
  CDR3 for beta chain variable domain of TCR clone 55474 (TRBV20-1, TRBJ1-2)
CSASMGQGVANYGYTL

SEQ ID NO: 110949 - protein, 15 aa, Homo sapiens
  CDR3 for alpha chain variable domain of TCR clone 55475 (TRAV17, TRAJ56)
CATEPFTGANRKLTF

SEQ ID NO: 110950 - protein, 15 aa, Homo sapiens
  CDR3 for beta chain variable domain of TCR clone 55475 (TRBV28, TRBJ1-5)
CASSRTGGYVQPQHF

SEQ ID NO: 110951 - protein, 15 aa, Homo sapiens
  CDR3 for alpha chain variable domain of TCR clone 55476 (TRAV17, TRAJ52)
CATEAGGTSYGKLTF

SEQ ID NO: 110952 - protein, 14 aa, Homo sapiens
  CDR3 for beta chain variable domain of TCR clone 55476 (TRBV28, TRBJ1-5)
CVSSLGVLVKPQHF

SEQ ID NO: 110953 - protein, 12 aa, Homo sapiens
  CDR3 for alpha chain variable domain of TCR clone 55477 (TRAV21, TRAJ3)
CCFYSSASKIIF

SEQ ID NO: 110954 - protein, 16 aa, Homo sapiens
  CDR3 for beta chain variable domain of TCR clone 55477 (TRBV19, TRBJ2-1)
CASSKAGPRSYNEQFF

SEQ ID NO: 110955 - protein, 15 aa, Homo sapiens
  CDR3 for alpha chain variable domain of TCR clone 55478 (TRAV3, TRAJ22)
CAVRDRGGSARQLTF

SEQ ID NO: 110956 - protein, 16 aa, Homo sapiens
  CDR3 for beta chain variable domain of TCR clone 55478 (TRBV5-4, TRBJ2-3)
CASQQAGAGGADTQYF

SEQ ID NO: 110957 - protein, 14 aa, Homo sapiens
  CDR3 for alpha chain variable domain of TCR clone 55479 (TRAV1-2, TRAJ8)
CAVREDTGFQKLVF

SEQ ID NO: 110958 - protein, 13 aa, Homo sapiens
  CDR3 for beta chain variable domain of TCR clone 55479 (TRBV5-1, TRBJ1-1)
CASSKLGNTEAFF

SEQ ID NO: 110959 - protein, 13 aa, Homo sapiens
  CDR3 for alpha chain variable domain of TCR clone 55480 (TRAV2, TRAJ40)
CAVVTSGTYKYIF

SEQ ID NO: 110960 - protein, 18 aa, Homo sapiens
  CDR3 for beta chain variable domain of TCR clone 55480 (TRBV20-1, TRBJ2-3)
CSASGLAGGPGTTDTQYF

SEQ ID NO: 110961 - protein, 13 aa, Homo sapiens
  CDR3 for alpha chain variable domain of TCR clone 55481 (TRAV22, TRAJ44)
CALNPGTASKLTF

SEQ ID NO: 110962 - protein, 16 aa, Homo sapiens
  CDR3 for beta chain variable domain of TCR clone 55481 (TRBV7-9, TRBJ1-2)
CASSLGFSSGEDGYTF

SEQ ID NO: 110963 - protein, 14 aa, Homo sapiens
  CDR3 for alpha chain variable domain of TCR clone 55482 (TRAV26-1, TRAJ34)
CIVRVAYNTDKLIF

SEQ ID NO: 110964 - protein, 12 aa, Homo sapiens
  CDR3 for beta chain variable domain of TCR clone 55482 (TRBV11-2, TRBJ2-2)
CASSLGGGELFF

SEQ ID NO: 110965 - protein, 11 aa, Homo sapiens
  CDR3 for alpha chain variable domain of TCR clone 55483 (TRAV12-1, TRAJ31)
CVLNNNARLMF

SEQ ID NO: 110966 - protein, 15 aa, Homo sapiens
  CDR3 for beta chain variable domain of TCR clone 55483 (TRBV7-2, TRBJ1-5)
CASSLDRGQDQPQHF

SEQ ID NO: 110967 - protein, 13 aa, Homo sapiens
  CDR3 for alpha chain variable domain of TCR clone 55484 (TRAV2, TRAJ40)
CAVVTSGTYKYIF

SEQ ID NO: 110968 - protein, 15 aa, Homo sapiens
  CDR3 for beta chain variable domain of TCR clone 55484 (TRBV11-2, TRBJ1-2)
CASSLEGVQRNGYTF

SEQ ID NO: 110969 - protein, 14 aa, Homo sapiens
  CDR3 for alpha chain variable domain of TCR clone 55485 (TRAV12-2, TRAJ17)
CAVLFKAAGNKLTF

SEQ ID NO: 110970 - protein, 11 aa, Homo sapiens
  CDR3 for beta chain variable domain of TCR clone 55485 (TRBV20-1, TRBJ1-5)
CSAQGDQPQHF

SEQ ID NO: 110971 - protein, 11 aa, Homo sapiens
  CDR3 for alpha chain variable domain of TCR clone 55486 (TRAV2, TRAJ13)
CASGGYHKVTF

SEQ ID NO: 110972 - protein, 16 aa, Homo sapiens
  CDR3 for beta chain variable domain of TCR clone 55486 (TRBV19, TRBJ2-1)
CASSMGGGSSYNEQFF

SEQ ID NO: 110973 - protein, 13 aa, Homo sapiens
  CDR3 for alpha chain variable domain of TCR clone 55487 (TRAV21, TRAJ20)
CAVGLRVVYKLSF

SEQ ID NO: 110974 - protein, 13 aa, Homo sapiens
  CDR3 for beta chain variable domain of TCR clone 55487 (TRBV6-1, TRBJ1-1)
CASSRQGNTEAFF

SEQ ID NO: 110975 - protein, 14 aa, Homo sapiens
  CDR3 for alpha chain variable domain of TCR clone 55488 (TRAV12-1, TRAJ17)
CVVNYKAGGNKLTF

SEQ ID NO: 110976 - protein, 17 aa, Homo sapiens
  CDR3 for beta chain variable domain of TCR clone 55488 (TRBV20-1, TRBJ2-1)
CSASSSGLAGSYNEQFF

SEQ ID NO: 110977 - protein, 16 aa, Homo sapiens
  CDR3 for alpha chain variable domain of TCR clone 55489 (TRAV30, TRAJ24)
CGTEIVDADSWGKFQF

SEQ ID NO: 110978 - protein, 15 aa, Homo sapiens
  CDR3 for beta chain variable domain of TCR clone 55489 (TRBV20-1, TRBJ2-7)
CSARDWVSGMDEQYF

SEQ ID NO: 110979 - protein, 13 aa, Homo sapiens
  CDR3 for alpha chain variable domain of TCR clone 55490 (TRAV21, TRAJ57)
CAVTQGGAEKLVF

SEQ ID NO: 110980 - protein, 15 aa, Homo sapiens
  CDR3 for beta chain variable domain of TCR clone 55490 (TRBV5-1, TRBJ1-1)
CASSSTTGTNTEAFF

SEQ ID NO: 110981 - protein, 15 aa, Homo sapiens
  CDR3 for alpha chain variable domain of TCR clone 55491 (TRAV17, TRAJ16)
CATALRFSDGQKLLF

SEQ ID NO: 110982 - protein, 12 aa, Homo sapiens
  CDR3 for beta chain variable domain of TCR clone 55491 (TRBV2, TRBJ2-7)
CASSDPYYEQYF

SEQ ID NO: 110983 - protein, 13 aa, Homo sapiens
  CDR3 for alpha chain variable domain of TCR clone 55492 (TRAV12-3, TRAJ13)
CAMSSGGYQKVTF

SEQ ID NO: 110984 - protein, 14 aa, Homo sapiens
  CDR3 for beta chain variable domain of TCR clone 55492 (TRBV2, TRBJ2-1)
CARRTGSSYNEQFF

SEQ ID NO: 110985 - protein, 13 aa, Homo sapiens
  CDR3 for alpha chain variable domain of TCR clone 55493 (TRAV30, TRAJ24)
CGTVTDSWGKLQF

SEQ ID NO: 110986 - protein, 15 aa, Homo sapiens
  CDR3 for beta chain variable domain of TCR clone 55493 (TRBV25-1, TRBJ1-4)
CASSPGDSTNETLFF

SEQ ID NO: 110987 - protein, 14 aa, Homo sapiens
  CDR3 for alpha chain variable domain of TCR clone 55494 (TRAV2, TRAJ9)
CAVEDRSGGFKTIF

SEQ ID NO: 110988 - protein, 14 aa, Homo sapiens
  CDR3 for beta chain variable domain of TCR clone 55494 (TRBV7-8, TRBJ2-7)
CASSPRDRVYEQYF

SEQ ID NO: 110989 - protein, 13 aa, Homo sapiens
  CDR3 for alpha chain variable domain of TCR clone 55495 (TRAV8-3, TRAJ36)
CAVGATGANNLFF

SEQ ID NO: 110990 - protein, 12 aa, Homo sapiens
  CDR3 for beta chain variable domain of TCR clone 55495 (TRBV7-2, TRBJ1-2)
CASSPRQAGTMA

SEQ ID NO: 110991 - protein, 14 aa, Homo sapiens
  CDR3 for alpha chain variable domain of TCR clone 55496 (TRAV12-3, TRAJ13)
CAVKKTGGYQKVTF

SEQ ID NO: 110992 - protein, 11 aa, Homo sapiens
  CDR3 for beta chain variable domain of TCR clone 55496 (TRBV29-1, TRBJ2-5)
CSEDRTGTQYF

SEQ ID NO: 110993 - protein, 14 aa, Homo sapiens
  CDR3 for alpha chain variable domain of TCR clone 55497 (TRAV27, TRAJ38)
CAARRNAGNNRKLI

SEQ ID NO: 110994 - protein, 11 aa, Homo sapiens
  CDR3 for beta chain variable domain of TCR clone 55497 (TRBV12-4, TRBJ2-2)
CASSSAGELFF

SEQ ID NO: 110995 - protein, 11 aa, Homo sapiens
  CDR3 for alpha chain variable domain of TCR clone 55498 (TRAV1-2, TRAJ40)
CAVPGTYKYIF

SEQ ID NO: 110996 - protein, 17 aa, Homo sapiens
  CDR3 for beta chain variable domain of TCR clone 55498 (TRBV11-2, TRBJ2-1)
CASSLYPPGVEYNEQFF

SEQ ID NO: 110997 - protein, 16 aa, Homo sapiens
  CDR3 for alpha chain variable domain of TCR clone 55499 (TRAV3, TRAJ37)
CAVRVRGSGNTGKLIF

SEQ ID NO: 110998 - protein, 16 aa, Homo sapiens
  CDR3 for beta chain variable domain of TCR clone 55499 (TRBV28, TRBJ1-5)
CASSFRGGYSNQPQHF

SEQ ID NO: 110999 - protein, 18 aa, Homo sapiens
  CDR3 for alpha chain variable domain of TCR clone 55500 (TRAV21, TRAJ52)
CAVRPSPAGGTSYGKLTF

SEQ ID NO: 111000 - protein, 15 aa, Homo sapiens
  CDR3 for beta chain variable domain of TCR clone 55500 (TRBV6-1, TRBJ2-1)
CASSELRGQYNEQFF

SEQ ID NO: 111001 - protein, 15 aa, Homo sapiens
  CDR3 for alpha chain variable domain of TCR clone 55501 (TRAV21, TRAJ24)
CAARSSTDSWGKLQF

SEQ ID NO: 111002 - protein, 13 aa, Homo sapiens
  CDR3 for beta chain variable domain of TCR clone 55501 (TRBV11-2, TRBJ2-5)
CASSSTGEETQFF

SEQ ID NO: 111003 - protein, 14 aa, Homo sapiens
  CDR3 for alpha chain variable domain of TCR clone 55502 (TRAV12-2, TRAJ44)
CAVNPAGTASKLTF

SEQ ID NO: 111004 - protein, 13 aa, Homo sapiens
  CDR3 for beta chain variable domain of TCR clone 55502 (TRBV20-1, TRBJ1-6)
CSAPLGVVSPLHF

SEQ ID NO: 111005 - protein, 15 aa, Homo sapiens
  CDR3 for alpha chain variable domain of TCR clone 55503 (TRAV34, TRAJ38)
CGADFTPGNNRKLIW

SEQ ID NO: 111006 - protein, 14 aa, Homo sapiens
  CDR3 for beta chain variable domain of TCR clone 55503 (TRBV11-2, TRBJ2-3)
CASSRLARTDTQYF

SEQ ID NO: 111007 - protein, 14 aa, Homo sapiens
  CDR3 for alpha chain variable domain of TCR clone 55504 (TRAV21, TRAJ35)
CAVMPIGFGNVLHC

SEQ ID NO: 111008 - protein, 12 aa, Homo sapiens
  CDR3 for beta chain variable domain of TCR clone 55504 (TRBV7-9, TRBJ2-7)
CASSIKLEEQYF

SEQ ID NO: 111009 - protein, 14 aa, Homo sapiens
  CDR3 for alpha chain variable domain of TCR clone 55505 (TRAV13-1, TRAJ8)
CAASMSTGIQKLVF

SEQ ID NO: 111010 - protein, 13 aa, Homo sapiens
  CDR3 for beta chain variable domain of TCR clone 55505 (TRBV13, TRBJ2-1)
CASTPGSYNEQFF

SEQ ID NO: 111011 - protein, 12 aa, Homo sapiens
  CDR3 for alpha chain variable domain of TCR clone 55506 (TRAV27, TRAJ35)
CAGADFGNVLHC

SEQ ID NO: 111012 - protein, 16 aa, Homo sapiens
  CDR3 for beta chain variable domain of TCR clone 55506 (TRBV6-1, TRBJ2-1)
CASISRQGGSYNEQFF

SEQ ID NO: 111013 - protein, 16 aa, Homo sapiens
  CDR3 for alpha chain variable domain of TCR clone 55507 (TRAV3, TRAJ37)
CAVRGKGSGNTGKLIF

SEQ ID NO: 111014 - protein, 15 aa, Homo sapiens
  CDR3 for beta chain variable domain of TCR clone 55507 (TRBV7-9, TRBJ2-2)
WASGPLDTFPGELFF

SEQ ID NO: 111015 - protein, 11 aa, Homo sapiens
  CDR3 for alpha chain variable domain of TCR clone 55508 (TRAV26-1, TRAJ37)
CIVRVGRKLIF

SEQ ID NO: 111016 - protein, 13 aa, Homo sapiens
  CDR3 for beta chain variable domain of TCR clone 55508 (TRBV14, TRBJ1-2)
YASSEDRRYGYTF

SEQ ID NO: 111017 - protein, 15 aa, Homo sapiens
  CDR3 for alpha chain variable domain of TCR clone 55509 (TRAV26-1, TRAJ29)
CIVRVEGSGNTPLAF

SEQ ID NO: 111018 - protein, 14 aa, Homo sapiens
  CDR3 for beta chain variable domain of TCR clone 55509 (TRBV18, TRBJ2-5)
CASSPGVPQETQYF

SEQ ID NO: 111019 - protein, 13 aa, Homo sapiens
  CDR3 for alpha chain variable domain of TCR clone 55510 (TRAV17, TRAJ22)
CAHHSGSARQLTF

SEQ ID NO: 111020 - protein, 14 aa, Homo sapiens
  CDR3 for beta chain variable domain of TCR clone 55510 (TRBV7-3, TRBJ2-1)
CASSLAGGTNEQFF

SEQ ID NO: 111021 - protein, 14 aa, Homo sapiens
  CDR3 for alpha chain variable domain of TCR clone 55511 (TRAV38-1, TRAJ28)
CAFTSGAGSYQLTF

SEQ ID NO: 111022 - protein, 18 aa, Homo sapiens
  CDR3 for beta chain variable domain of TCR clone 55511 (TRBV7-9, TRBJ1-1)
CASSKPWGTMGMNTEAFF

SEQ ID NO: 111023 - protein, 13 aa, Homo sapiens
  CDR3 for alpha chain variable domain of TCR clone 55512 (TRAV35, TRAJ42)
CAGFPGSHGNLIF

SEQ ID NO: 111024 - protein, 14 aa, Homo sapiens
  CDR3 for beta chain variable domain of TCR clone 55512 (TRBV4-1, TRBJ2-2)
CASSQAVNTGELFF

SEQ ID NO: 111025 - protein, 13 aa, Homo sapiens
  CDR3 for alpha chain variable domain of TCR clone 55513 (TRAV26-2, TRAJ43)
CILRAVNNYDMRF

SEQ ID NO: 111026 - protein, 15 aa, Homo sapiens
  CDR3 for beta chain variable domain of TCR clone 55513 (TRBV7-2, TRBJ2-1)
CASTHGTGIYNEQFF

SEQ ID NO: 111027 - protein, 14 aa, Homo sapiens
  CDR3 for alpha chain variable domain of TCR clone 55514 (TRAV17, TRAJ16)
CATADFPDGQKLLF

SEQ ID NO: 111028 - protein, 12 aa, Homo sapiens
  CDR3 for beta chain variable domain of TCR clone 55514 (TRBV24-1, TRBJ1-1)
CATLYPDTEAFF

SEQ ID NO: 111029 - protein, 13 aa, Homo sapiens
  CDR3 for alpha chain variable domain of TCR clone 55515 (TRAV17, TRAJ9)
CATGSTGGFKTIF

SEQ ID NO: 111030 - protein, 14 aa, Homo sapiens
  CDR3 for beta chain variable domain of TCR clone 55515 (TRBV7-8, TRBJ2-7)
RASTFRGGPNEQYF

SEQ ID NO: 111031 - protein, 15 aa, Homo sapiens
  CDR3 for alpha chain variable domain of TCR clone 55516 (TRAV9-2, TRAJ56)
CALSDVDGANSKLTF

SEQ ID NO: 111032 - protein, 14 aa, Homo sapiens
  CDR3 for beta chain variable domain of TCR clone 55516 (TRBV7-8, TRBJ2-3)
CASSFKSSTDTQYF

SEQ ID NO: 111033 - protein, 13 aa, Homo sapiens
  CDR3 for alpha chain variable domain of TCR clone 55517 (TRAV35, TRAJ21)
CAGQLSNFNKFYF

SEQ ID NO: 111034 - protein, 16 aa, Homo sapiens
  CDR3 for beta chain variable domain of TCR clone 55517 (TRBV12-5, TRBJ2-5)
CASGPRTSGNQETKYF

SEQ ID NO: 111035 - protein, 16 aa, Homo sapiens
  CDR3 for alpha chain variable domain of TCR clone 55518 (TRAV17, TRAJ22)
CATGPISSGSARQLTF

SEQ ID NO: 111036 - protein, 13 aa, Homo sapiens
  CDR3 for beta chain variable domain of TCR clone 55518 (TRBV11-2, TRBJ2-1)
CASSLVLAGGRFF

SEQ ID NO: 111037 - protein, 13 aa, Homo sapiens
  CDR3 for alpha chain variable domain of TCR clone 55519 (TRAV3, TRAJ36)
CAVRDTGANNLFF

SEQ ID NO: 111038 - protein, 15 aa, Homo sapiens
  CDR3 for beta chain variable domain of TCR clone 55519 (TRBV24-1, TRBJ2-1)
CATSESGGFYDEQFF

SEQ ID NO: 111039 - protein, 12 aa, Homo sapiens
  CDR3 for alpha chain variable domain of TCR clone 55520 (TRAV12-3, TRAJ17)
CAMALTGNKLTF

SEQ ID NO: 111040 - protein, 15 aa, Homo sapiens
  CDR3 for beta chain variable domain of TCR clone 55520 (TRBV20-1, TRBJ2-7)
CSARDRVSGMYEQYF

SEQ ID NO: 111041 - protein, 14 aa, Homo sapiens
  CDR3 for alpha chain variable domain of TCR clone 55521 (TRAV1-2, TRAJ33)
CAVRAPDSNYQLIC

SEQ ID NO: 111042 - protein, 14 aa, Homo sapiens
  CDR3 for beta chain variable domain of TCR clone 55521 (TRBV11-3, TRBJ1-6)
CASSFSGGDSPLHF

SEQ ID NO: 111043 - protein, 12 aa, Homo sapiens
  CDR3 for alpha chain variable domain of TCR clone 55522 (TRAV3, TRAJ7)
CADSLWEQQTRF

SEQ ID NO: 111044 - protein, 13 aa, Homo sapiens
  CDR3 for beta chain variable domain of TCR clone 55522 (TRBV7-3, TRBJ2-5)
CASSFRGGETQYF

SEQ ID NO: 111045 - protein, 13 aa, Homo sapiens
  CDR3 for alpha chain variable domain of TCR clone 55523 (TRAV12-2, TRAJ20)
CAVYPSNDSKLSF

SEQ ID NO: 111046 - protein, 15 aa, Homo sapiens
  CDR3 for beta chain variable domain of TCR clone 55523 (TRBV27, TRBJ2-5)
CASSLYPRGGETQYF

SEQ ID NO: 111047 - protein, 11 aa, Homo sapiens
  CDR3 for alpha chain variable domain of TCR clone 55524 (TRAV1-2, TRAJ40)
CAVPGTYKYIF

SEQ ID NO: 111048 - protein, 15 aa, Homo sapiens
  CDR3 for beta chain variable domain of TCR clone 55524 (TRBV5-7, TRBJ1-5)
CASSYGELWDQPQHF

SEQ ID NO: 111049 - protein, 11 aa, Homo sapiens
  CDR3 for alpha chain variable domain of TCR clone 55525 (TRAV21, TRAJ34)
CAVTNTDKLIF

SEQ ID NO: 111050 - protein, 16 aa, Homo sapiens
  CDR3 for beta chain variable domain of TCR clone 55525 (TRBV18, TRBJ1-1)
CASSPGVGGRGSEAFF

SEQ ID NO: 111051 - protein, 14 aa, Homo sapiens
  CDR3 for alpha chain variable domain of TCR clone 55526 (TRAV17, TRAJ53)
CATDAGGSNYKLKF

SEQ ID NO: 111052 - protein, 16 aa, Homo sapiens
  CDR3 for beta chain variable domain of TCR clone 55526 (TRBV4-1, TRBJ1-1)
CASSQDAGMGNTEAFF

SEQ ID NO: 111053 - protein, 12 aa, Homo sapiens
  CDR3 for alpha chain variable domain of TCR clone 55527 (TRAV8-6, TRAJ43)
CAVSHNNNDIRF

SEQ ID NO: 111054 - protein, 14 aa, Homo sapiens
  CDR3 for beta chain variable domain of TCR clone 55527 (TRBV10-3, TRBJ1-1)
CAISDGSGVTEAFF

SEQ ID NO: 111055 - protein, 14 aa, Homo sapiens
  CDR3 for alpha chain variable domain of TCR clone 55528 (TRAV1-2, TRAJ16)
CAVNRFSDGQKLLF

SEQ ID NO: 111056 - protein, 14 aa, Homo sapiens
  CDR3 for beta chain variable domain of TCR clone 55528 (TRBV7-9, TRBJ2-3)
CASSLEDGTETQYF

SEQ ID NO: 111057 - protein, 12 aa, Homo sapiens
  CDR3 for alpha chain variable domain of TCR clone 55529 (TRAV4, TRAJ6)
CLAPGGSYTPTF

SEQ ID NO: 111058 - protein, 12 aa, Homo sapiens
  CDR3 for beta chain variable domain of TCR clone 55529 (TRBV6-5, TRBJ2-3)
CASSDTTDTQYF

SEQ ID NO: 111059 - protein, 12 aa, Homo sapiens
  CDR3 for alpha chain variable domain of TCR clone 55530 (TRAV29/DV5, TRAJ15)
CASNQAGTALIF

SEQ ID NO: 111060 - protein, 13 aa, Homo sapiens
  CDR3 for beta chain variable domain of TCR clone 55530 (TRBV19, TRBJ2-7)
CASSTSGSYEQYF

SEQ ID NO: 111061 - protein, 13 aa, Homo sapiens
  CDR3 for alpha chain variable domain of TCR clone 55531 (TRAV27, TRAJ11)
CAGARSGYSTLTF

SEQ ID NO: 111062 - protein, 16 aa, Homo sapiens
  CDR3 for beta chain variable domain of TCR clone 55531 (TRBV10-2, TRBJ2-2)
CASSESRDRGSGEMFF

SEQ ID NO: 111063 - protein, 14 aa, Homo sapiens
  CDR3 for alpha chain variable domain of TCR clone 55532 (TRAV26-1, TRAJ44)
CIARTTGTASKLTF

SEQ ID NO: 111064 - protein, 12 aa, Homo sapiens
  CDR3 for beta chain variable domain of TCR clone 55532 (TRBV11-2, TRBJ2-1)
CASSPGSNEQFF

SEQ ID NO: 111065 - protein, 17 aa, Homo sapiens
  CDR3 for alpha chain variable domain of TCR clone 55533 (TRAV26-2, TRAJ42)
CILRDVGSGGSQGNLIF

SEQ ID NO: 111066 - protein, 16 aa, Homo sapiens
  CDR3 for beta chain variable domain of TCR clone 55533 (TRBV12-4, TRBJ2-7)
CASSLIGGTGTYEQYF

SEQ ID NO: 111067 - protein, 12 aa, Homo sapiens
  CDR3 for alpha chain variable domain of TCR clone 55534 (TRAV8-3, TRAJ43)
CAVGAGNNYMRF

SEQ ID NO: 111068 - protein, 14 aa, Homo sapiens
  CDR3 for beta chain variable domain of TCR clone 55534 (TRBV4-2, TRBJ1-5)
CASSRDRGNQPQHF

SEQ ID NO: 111069 - protein, 15 aa, Homo sapiens
  CDR3 for alpha chain variable domain of TCR clone 55535 (TRAV3, TRAJ22)
CAVRDRGGSARQLPF

SEQ ID NO: 111070 - protein, 13 aa, Homo sapiens
  CDR3 for beta chain variable domain of TCR clone 55535 (TRBV7-3, TRBJ2-1)
CASSPVAYNEQFF

SEQ ID NO: 111071 - protein, 14 aa, Homo sapiens
  CDR3 for alpha chain variable domain of TCR clone 55536 (TRAV2, TRAJ9)
CAVEDRSGGFKTTF

SEQ ID NO: 111072 - protein, 15 aa, Homo sapiens
  CDR3 for beta chain variable domain of TCR clone 55536 (TRBV6-6, TRBJ2-7)
CASSYSYGGSYEQYF

SEQ ID NO: 111073 - protein, 16 aa, Homo sapiens
  CDR3 for alpha chain variable domain of TCR clone 55537 (TRAV3, TRAJ37)
CAVRGKGSGNTGKLIF

SEQ ID NO: 111074 - protein, 16 aa, Homo sapiens
  CDR3 for beta chain variable domain of TCR clone 55537 (TRBV12-4, TRBJ1-5)
CASSRPVGGSNQHQHF

SEQ ID NO: 111075 - protein, 14 aa, Homo sapiens
  CDR3 for alpha chain variable domain of TCR clone 55538 (TRAV16, TRAJ16)
CSPGRGSDGQKLLF

SEQ ID NO: 111076 - protein, 15 aa, Homo sapiens
  CDR3 for beta chain variable domain of TCR clone 55538 (TRBV20-1, TRBJ2-7)
CSARDRVSGMDEQYF

SEQ ID NO: 111077 - protein, 14 aa, Homo sapiens
  CDR3 for alpha chain variable domain of TCR clone 55539 (TRAV13-1, TRAJ44)
CAAKATGTASKLTF

SEQ ID NO: 111078 - protein, 15 aa, Homo sapiens
  CDR3 for beta chain variable domain of TCR clone 55539 (TRBV7-2, TRBJ2-7)
CASSLSGALTYEQYF

SEQ ID NO: 111079 - protein, 17 aa, Homo sapiens
  CDR3 for alpha chain variable domain of TCR clone 55540 (TRAV3, TRAJ42)
CAVRDRDYGGSKGNLIF

SEQ ID NO: 111080 - protein, 16 aa, Homo sapiens
  CDR3 for beta chain variable domain of TCR clone 55540 (TRBV9, TRBJ2-1)
CASSVGGGGNYNEQFF

SEQ ID NO: 111081 - protein, 13 aa, Homo sapiens
  CDR3 for alpha chain variable domain of TCR clone 55541 (TRAV21, TRAJ20)
CAVGLRVDYKLSF

SEQ ID NO: 111082 - protein, 14 aa, Homo sapiens
  CDR3 for beta chain variable domain of TCR clone 55541 (TRBV19, TRBJ2-1)
CASSRLASINEQFF

SEQ ID NO: 111083 - protein, 13 aa, Homo sapiens
  CDR3 for alpha chain variable domain of TCR clone 55542 (TRAV12-2, TRAJ20)
CAVYPSNDYKLSF

SEQ ID NO: 111084 - protein, 19 aa, Homo sapiens
  CDR3 for beta chain variable domain of TCR clone 55542 (TRBV25-1, TRBJ2-2)
CAILVYRVDRGRKTGELFF

SEQ ID NO: 111085 - protein, 17 aa, Homo sapiens
  CDR3 for alpha chain variable domain of TCR clone 55543 (TRAV23/DV6, TRAJ57)
CAASSALSQGGSEKLVF

SEQ ID NO: 111086 - protein, 14 aa, Homo sapiens
  CDR3 for beta chain variable domain of TCR clone 55543 (TRBV25-1, TRBJ1-1)
CASTHLGGNTEAFF

SEQ ID NO: 111087 - protein, 11 aa, Homo sapiens
  CDR3 for alpha chain variable domain of TCR clone 55544 (TRAV3, TRAJ21)
CAAGNFNNFYF

SEQ ID NO: 111088 - protein, 16 aa, Homo sapiens
  CDR3 for beta chain variable domain of TCR clone 55544 (TRBV19, TRBJ2-1)
CASSKAGPSSYNEQFF

SEQ ID NO: 111089 - protein, 14 aa, Homo sapiens
  CDR3 for alpha chain variable domain of TCR clone 55545 (TRAV1-2, TRAJ15)
CAVRDRQAGTALIF

SEQ ID NO: 111090 - protein, 16 aa, Homo sapiens
  CDR3 for beta chain variable domain of TCR clone 55545 (TRBV24-1, TRBJ1-2)
CATSDPGPSNDYGYTF

SEQ ID NO: 111091 - protein, 18 aa, Homo sapiens
  CDR3 for alpha chain variable domain of TCR clone 55546 (TRAV12-3, TRAJ52)
CAMSVGGAGGTSYGKLTF

SEQ ID NO: 111092 - protein, 15 aa, Homo sapiens
  CDR3 for beta chain variable domain of TCR clone 55546 (TRBV10-3, TRBJ2-2)
CAISPGRTNTGELFF

SEQ ID NO: 111093 - protein, 15 aa, Homo sapiens
  CDR3 for alpha chain variable domain of TCR clone 55547 (TRAV8-4, TRAJ3)
CAVTGENLVQQCFQY

SEQ ID NO: 111094 - protein, 16 aa, Homo sapiens
  CDR3 for beta chain variable domain of TCR clone 55547 (TRBV4-2, TRBJ1-1)
CASSQAGFGMNTEAFF

SEQ ID NO: 111095 - protein, 17 aa, Homo sapiens
  CDR3 for alpha chain variable domain of TCR clone 55548 (TRAV13-1, TRAJ28)
CAASPPYSGAGSYQLTF

SEQ ID NO: 111096 - protein, 12 aa, Homo sapiens
  CDR3 for beta chain variable domain of TCR clone 55548 (TRBV11-2, TRBJ2-2)
CASSLPTGKLFF

SEQ ID NO: 111097 - protein, 16 aa, Homo sapiens
  CDR3 for alpha chain variable domain of TCR clone 55549 (TRAV8-2, TRAJ4)
CVVSPSGGYNKLILEQ

SEQ ID NO: 111098 - protein, 15 aa, Homo sapiens
  CDR3 for beta chain variable domain of TCR clone 55549 (TRBV4-1, TRBJ1-4)
CASSDTGGTNEKLFF

SEQ ID NO: 111099 - protein, 13 aa, Homo sapiens
  CDR3 for alpha chain variable domain of TCR clone 55550 (TRAV13-1, TRAJ11)
CAAVLAGYSTLTF

SEQ ID NO: 111100 - protein, 17 aa, Homo sapiens
  CDR3 for beta chain variable domain of TCR clone 55550 (TRBV25-1, TRBJ2-7)
CASSDARVVVSSYEQYF

SEQ ID NO: 111101 - protein, 10 aa, Homo sapiens
  CDR3 for alpha chain variable domain of TCR clone 55551 (TRAV8-4, TRAJ43)
CAVSADDMLF

SEQ ID NO: 111102 - protein, 15 aa, Homo sapiens
  CDR3 for beta chain variable domain of TCR clone 55551 (TRBV5-1, TRBJ2-3)
CASSVTSGSTDTQYF

SEQ ID NO: 111103 - protein, 13 aa, Homo sapiens
  CDR3 for alpha chain variable domain of TCR clone 55552 (TRAV21, TRAJ27)
CAARPGNAGKSTF

SEQ ID NO: 111104 - protein, 14 aa, Homo sapiens
  CDR3 for beta chain variable domain of TCR clone 55552 (TRBV7-6, TRBJ2-3)
CASSLGTVTDTPYF

SEQ ID NO: 111105 - protein, 17 aa, Homo sapiens
  CDR3 for alpha chain variable domain of TCR clone 55553 (TRAV27, TRAJ57)
CAGERGGTQGGSEKLVF

SEQ ID NO: 111106 - protein, 15 aa, Homo sapiens
  CDR3 for beta chain variable domain of TCR clone 55553 (TRBV27, TRBJ1-6)
CASSFDRGLGSPLHF

SEQ ID NO: 111107 - protein, 11 aa, Homo sapiens
  CDR3 for alpha chain variable domain of TCR clone 55554 (TRAV27, TRAJ47)
CRGNQGNKLVF

SEQ ID NO: 111108 - protein, 16 aa, Homo sapiens
  CDR3 for beta chain variable domain of TCR clone 55554 (TRBV7-9, TRBJ2-1)
CASSDVAGGSYNEQFF

SEQ ID NO: 111109 - protein, 13 aa, Homo sapiens
  CDR3 for alpha chain variable domain of TCR clone 55555 (TRAV12-2, TRAJ18)
CAVRGSTMGRLYF

SEQ ID NO: 111110 - protein, 18 aa, Homo sapiens
  CDR3 for beta chain variable domain of TCR clone 55555 (TRBV27, TRBJ2-3)
CASSLSGTSGRGTDTQYF

SEQ ID NO: 111111 - protein, 19 aa, Homo sapiens
  CDR3 for alpha chain variable domain of TCR clone 55556 (TRAV29/DV5, TRAJ49)
CSVLLCSKLTVDTGNQFYF

SEQ ID NO: 111112 - protein, 15 aa, Homo sapiens
  CDR3 for beta chain variable domain of TCR clone 55556 (TRBV7-2, TRBJ2-1)
CASSSGLAGGNEQFF

SEQ ID NO: 111113 - protein, 14 aa, Homo sapiens
  CDR3 for alpha chain variable domain of TCR clone 55557 (TRAV12-2, TRAJ53)
CRERGGGGNYKLTF

SEQ ID NO: 111114 - protein, 17 aa, Homo sapiens
  CDR3 for beta chain variable domain of TCR clone 55557 (TRBV7-3, TRBJ2-3)
CASSLMKRMRGADTQYF

SEQ ID NO: 111115 - protein, 10 aa, Homo sapiens
  CDR3 for alpha chain variable domain of TCR clone 55558 (TRAV23/DV6, TRAJ22)
CAAGSRGSRF

SEQ ID NO: 111116 - protein, 15 aa, Homo sapiens
  CDR3 for beta chain variable domain of TCR clone 55558 (TRBV10-3, TRBJ2-3)
CAIDTSGRRTDTQYF

SEQ ID NO: 111117 - protein, 14 aa, Homo sapiens
  CDR3 for alpha chain variable domain of TCR clone 55559 (TRAV12-1, TRAJ23)
CVVIVYNQGGELIF

SEQ ID NO: 111118 - protein, 15 aa, Homo sapiens
  CDR3 for beta chain variable domain of TCR clone 55559 (TRBV20-1, TRBJ1-5)
CSAKPPGQGPQPQHF

SEQ ID NO: 111119 - protein, 15 aa, Homo sapiens
  CDR3 for alpha chain variable domain of TCR clone 55560 (TRAV20, TRAJ53)
CAVQASGGSNYKLTF

SEQ ID NO: 111120 - protein, 12 aa, Homo sapiens
  CDR3 for beta chain variable domain of TCR clone 55560 (TRBV7-8, TRBJ2-7)
CASSPGDREQYF

SEQ ID NO: 111121 - protein, 12 aa, Homo sapiens
  CDR3 for alpha chain variable domain of TCR clone 55561 (TRAV12-2, TRAJ10)
WGVTGGGNKLTF

SEQ ID NO: 111122 - protein, 15 aa, Homo sapiens
  CDR3 for beta chain variable domain of TCR clone 55561 (TRBV9, TRBJ1-6)
CASSVAGTGDSPLHF

SEQ ID NO: 111123 - protein, 12 aa, Homo sapiens
  CDR3 for alpha chain variable domain of TCR clone 55562 (TRAV13-1, TRAJ49)
CAASPMGNQFYF

SEQ ID NO: 111124 - protein, 13 aa, Homo sapiens
  CDR3 for beta chain variable domain of TCR clone 55562 (TRBV20-1, TRBJ2-2)
CSASAAGTGELSF

SEQ ID NO: 111125 - protein, 14 aa, Homo sapiens
  CDR3 for alpha chain variable domain of TCR clone 55563 (TRAV1-2, TRAJ16)
CAVNRFSDGQKLLF

SEQ ID NO: 111126 - protein, 13 aa, Homo sapiens
  CDR3 for beta chain variable domain of TCR clone 55563 (TRBV7-3, TRBJ2-3)
CASSISAQGTQYF

SEQ ID NO: 111127 - protein, 14 aa, Homo sapiens
  CDR3 for alpha chain variable domain of TCR clone 55564 (TRAV40, TRAJ42)
CLPTYGGSQGNLIF

SEQ ID NO: 111128 - protein, 13 aa, Homo sapiens
  CDR3 for beta chain variable domain of TCR clone 55564 (TRBV7-2, TRBJ2-4)
CASSREHANIQYF

SEQ ID NO: 111129 - protein, 14 aa, Homo sapiens
  CDR3 for alpha chain variable domain of TCR clone 55565 (TRAV20, TRAJ26)
CAVQAVNYGQNFVF

SEQ ID NO: 111130 - protein, 13 aa, Homo sapiens
  CDR3 for beta chain variable domain of TCR clone 55565 (TRBV23-1, TRBJ1-4)
CASRGKFNEKLFF

SEQ ID NO: 111131 - protein, 17 aa, Homo sapiens
  CDR3 for alpha chain variable domain of TCR clone 55566 (TRAV3, TRAJ6)
CAVRDGPRAEGSYIPTF

SEQ ID NO: 111132 - protein, 20 aa, Homo sapiens
  CDR3 for beta chain variable domain of TCR clone 55566 (TRBV28, TRBJ2-1)
CASTPIGRSPGLAGGNEQFF

SEQ ID NO: 111133 - protein, 12 aa, Homo sapiens
  CDR3 for alpha chain variable domain of TCR clone 55567 (TRAV35, TRAJ49)
CAWWNTGNQFYF

SEQ ID NO: 111134 - protein, 16 aa, Homo sapiens
  CDR3 for beta chain variable domain of TCR clone 55567 (TRBV5-1, TRBJ2-2)
CASSLWDTTNTGELFF

SEQ ID NO: 111135 - protein, 13 aa, Homo sapiens
  CDR3 for alpha chain variable domain of TCR clone 55568 (TRAV13-2, TRAJ48)
CAEMDFGNEKLTF

SEQ ID NO: 111136 - protein, 15 aa, Homo sapiens
  CDR3 for beta chain variable domain of TCR clone 55568 (TRBV2, TRBJ2-1)
CASSEEREGDNEQFF

SEQ ID NO: 111137 - protein, 12 aa, Homo sapiens
  CDR3 for alpha chain variable domain of TCR clone 55569 (TRAV12-3, TRAJ17)
CAMTLTGSKLTF

SEQ ID NO: 111138 - protein, 15 aa, Homo sapiens
  CDR3 for beta chain variable domain of TCR clone 55569 (TRBV20-1, TRBJ2-7)
CSAKDRVSGMDEQYF

SEQ ID NO: 111139 - protein, 15 aa, Homo sapiens
  CDR3 for alpha chain variable domain of TCR clone 55570 (TRAV21, TRAJ53)
CTTLNSGGSNYKLTF

SEQ ID NO: 111140 - protein, 14 aa, Homo sapiens
  CDR3 for beta chain variable domain of TCR clone 55570 (TRBV7-2, TRBJ2-7)
CASRSQGAAYEQYF

SEQ ID NO: 111141 - protein, 14 aa, Homo sapiens
  CDR3 for alpha chain variable domain of TCR clone 55571 (TRAV26-1, TRAJ40)
CIVRVARGTYKYIF

SEQ ID NO: 111142 - protein, 14 aa, Homo sapiens
  CDR3 for beta chain variable domain of TCR clone 55571 (TRBV7-3, TRBJ2-7)
CASSLKAGSYEQYF

SEQ ID NO: 111143 - protein, 14 aa, Homo sapiens
  CDR3 for alpha chain variable domain of TCR clone 55572 (TRAV35, TRAJ22)
CAGLRPGSAKQLTF

SEQ ID NO: 111144 - protein, 15 aa, Homo sapiens
  CDR3 for beta chain variable domain of TCR clone 55572 (TRBV12-4, TRBJ2-5)
CASSPPTGLQETQYF

SEQ ID NO: 111145 - protein, 17 aa, Homo sapiens
  CDR3 for alpha chain variable domain of TCR clone 55573 (TRAV12-3, TRAJ6)
CAMSARGGAGGSYIPTF

SEQ ID NO: 111146 - protein, 14 aa, Homo sapiens
  CDR3 for beta chain variable domain of TCR clone 55573 (TRBV19, TRBJ2-1)
CASPTFVLSGEQFF

SEQ ID NO: 111147 - protein, 14 aa, Homo sapiens
  CDR3 for alpha chain variable domain of TCR clone 55574 (TRAV13-1, TRAJ13)
CAASRVGRYQKVTF

SEQ ID NO: 111148 - protein, 17 aa, Homo sapiens
  CDR3 for beta chain variable domain of TCR clone 55574 (TRBV15, TRBJ1-5)
CATSRAPPGTRNQPQHF

SEQ ID NO: 111149 - protein, 16 aa, Homo sapiens
  CDR3 for alpha chain variable domain of TCR clone 55575 (TRAV30, TRAJ24)
CGTEIVDADSWGKFQF

SEQ ID NO: 111150 - protein, 15 aa, Homo sapiens
  CDR3 for beta chain variable domain of TCR clone 55575 (TRBV5-1, TRBJ2-7)
CASSLDLTSSYEQYF

SEQ ID NO: 111151 - protein, 13 aa, Homo sapiens
  CDR3 for alpha chain variable domain of TCR clone 55576 (TRAV21, TRAJ15)
CAVANQAGAALIF

SEQ ID NO: 111152 - protein, 14 aa, Homo sapiens
  CDR3 for beta chain variable domain of TCR clone 55576 (TRBV27, TRBJ2-2)
CASSLGAATGELFF

SEQ ID NO: 111153 - protein, 16 aa, Homo sapiens
  CDR3 for alpha chain variable domain of TCR clone 55577 (TRAV21, TRAJ33)
CAVSPASMDSNYQLIW

SEQ ID NO: 111154 - protein, 17 aa, Homo sapiens
  CDR3 for beta chain variable domain of TCR clone 55577 (TRBV2, TRBJ1-4)
RASSKRELTQGEEKLFF

SEQ ID NO: 111155 - protein, 15 aa, Homo sapiens
  CDR3 for alpha chain variable domain of TCR clone 55578 (TRAV8-3, TRAJ45)
CASSYSGGGADGLPF

SEQ ID NO: 111156 - protein, 18 aa, Homo sapiens
  CDR3 for beta chain variable domain of TCR clone 55578 (TRBV18, TRBJ1-3)
CASSPRGGAGPSGNTIYF

SEQ ID NO: 111157 - protein, 14 aa, Homo sapiens
  CDR3 for alpha chain variable domain of TCR clone 55579 (TRAV1-2, TRAJ16)
CAVNRFSDGQKLLF

SEQ ID NO: 111158 - protein, 12 aa, Homo sapiens
  CDR3 for beta chain variable domain of TCR clone 55579 (TRBV11-3, TRBJ2-1)
CASSPGNNEQFF

SEQ ID NO: 111159 - protein, 16 aa, Homo sapiens
  CDR3 for alpha chain variable domain of TCR clone 55580 (TRAV8-2, TRAJ7)
CVVSEGPDYGNNRLAF

SEQ ID NO: 111160 - protein, 15 aa, Homo sapiens
  CDR3 for beta chain variable domain of TCR clone 55580 (TRBV27, TRBJ2-3)
CASSLGLAATDTQYF

SEQ ID NO: 111161 - protein, 13 aa, Homo sapiens
  CDR3 for alpha chain variable domain of TCR clone 55581 (TRAV27, TRAJ41)
CAGEGNSGYALNF

SEQ ID NO: 111162 - protein, 14 aa, Homo sapiens
  CDR3 for beta chain variable domain of TCR clone 55581 (TRBV7-2, TRBJ1-1)
CASSFLTETTEAFF

SEQ ID NO: 111163 - protein, 17 aa, Homo sapiens
  CDR3 for alpha chain variable domain of TCR clone 55582 (TRAV26-1, TRAJ53)
CIVRVDDSGGSNSKLTF

SEQ ID NO: 111164 - protein, 15 aa, Homo sapiens
  CDR3 for beta chain variable domain of TCR clone 55582 (TRBV20-1, TRBJ2-7)
CSARVPAAYFYEQYF

SEQ ID NO: 111165 - protein, 13 aa, Homo sapiens
  CDR3 for alpha chain variable domain of TCR clone 55583 (TRAV12-1, TRAJ26)
CVVRRNYGQNFVF

SEQ ID NO: 111166 - protein, 14 aa, Homo sapiens
  CDR3 for beta chain variable domain of TCR clone 55583 (TRBV6-3, TRBJ1-1)
CASRYTGESTEAVF

SEQ ID NO: 111167 - protein, 13 aa, Homo sapiens
  CDR3 for alpha chain variable domain of TCR clone 55584 (TRAV8-3, TRAJ28)
CAVGAVGSYQLTF

SEQ ID NO: 111168 - protein, 17 aa, Homo sapiens
  CDR3 for beta chain variable domain of TCR clone 55584 (TRBV11-2, TRBJ2-1)
CASSLSPPGVEYNEQFF

SEQ ID NO: 111169 - protein, 14 aa, Homo sapiens
  CDR3 for alpha chain variable domain of TCR clone 55585 (TRAV12-3, TRAJ10)
SHLPLTGGGNKLTF

SEQ ID NO: 111170 - protein, 13 aa, Homo sapiens
  CDR3 for beta chain variable domain of TCR clone 55585 (TRBV7-6, TRBJ2-3)
CAGSLAVGDTQYF

SEQ ID NO: 111171 - protein, 15 aa, Homo sapiens
  CDR3 for alpha chain variable domain of TCR clone 55586 (TRAV26-2, TRAJ33)
CILRDGRGSNYQLIW

SEQ ID NO: 111172 - protein, 14 aa, Homo sapiens
  CDR3 for beta chain variable domain of TCR clone 55586 (TRBV7-2, TRBJ1-2)
CASSQTGSTYGYTF

SEQ ID NO: 111173 - protein, 12 aa, Homo sapiens
  CDR3 for alpha chain variable domain of TCR clone 55587 (TRAV12-3, TRAJ17)
CAMTLTGNKLTF

SEQ ID NO: 111174 - protein, 13 aa, Homo sapiens
  CDR3 for beta chain variable domain of TCR clone 55587 (TRBV7-3, TRBJ1-2)
CASSLKRGYGYTF

SEQ ID NO: 111175 - protein, 14 aa, Homo sapiens
  CDR3 for alpha chain variable domain of TCR clone 55588 (TRAV1-2, TRAJ16)
CAVNRFSDGQKLLF

SEQ ID NO: 111176 - protein, 14 aa, Homo sapiens
  CDR3 for beta chain variable domain of TCR clone 55588 (TRBV19, TRBJ2-1)
CASPTFVLGGEQFF

SEQ ID NO: 111177 - protein, 12 aa, Homo sapiens
  CDR3 for alpha chain variable domain of TCR clone 55589 (TRAV3, TRAJ6)
CAVKGGSYIPTF

SEQ ID NO: 111178 - protein, 13 aa, Homo sapiens
  CDR3 for beta chain variable domain of TCR clone 55589 (TRBV11-2, TRBJ1-1)
CASSFTENTEAFF

SEQ ID NO: 111179 - protein, 15 aa, Homo sapiens
  CDR3 for alpha chain variable domain of TCR clone 55590 (TRAV12-2, TRAJ53)
CAVNGGGGSNYKLTF

SEQ ID NO: 111180 - protein, 14 aa, Homo sapiens
  CDR3 for beta chain variable domain of TCR clone 55590 (TRBV5-1, TRBJ2-7)
CASSRGESLYEQYF

SEQ ID NO: 111181 - protein, 16 aa, Homo sapiens
  CDR3 for alpha chain variable domain of TCR clone 55591 (TRAV17, TRAJ52)
CATSNAGGTSHGKLTF

SEQ ID NO: 111182 - protein, 13 aa, Homo sapiens
  CDR3 for beta chain variable domain of TCR clone 55591 (TRBV27, TRBJ1-6)
CASSLVLVSPLHF

SEQ ID NO: 111183 - protein, 14 aa, Homo sapiens
  CDR3 for alpha chain variable domain of TCR clone 55592 (TRAV1-2, TRAJ8)
CAVGEDTGFQKLVF

SEQ ID NO: 111184 - protein, 16 aa, Homo sapiens
  CDR3 for beta chain variable domain of TCR clone 55592 (TRBV12-5, TRBJ2-5)
CASGPRTSGNQETQYF

SEQ ID NO: 111185 - protein, 16 aa, Homo sapiens
  CDR3 for alpha chain variable domain of TCR clone 55593 (TRAV8-3, TRAJ48)
CAVGLISNFGNEKLTF

SEQ ID NO: 111186 - protein, 13 aa, Homo sapiens
  CDR3 for beta chain variable domain of TCR clone 55593 (TRBV20-1, TRBJ1-5)
RSASWGRSQPQHF

SEQ ID NO: 111187 - protein, 14 aa, Homo sapiens
  CDR3 for alpha chain variable domain of TCR clone 55594 (TRAV26-1, TRAJ57)
CIRSGQGGSEKLVF

SEQ ID NO: 111188 - protein, 13 aa, Homo sapiens
  CDR3 for beta chain variable domain of TCR clone 55594 (TRBV19, TRBJ2-7)
CASSLTTSYEQYF

SEQ ID NO: 111189 - protein, 12 aa, Homo sapiens
  CDR3 for alpha chain variable domain of TCR clone 55595 (TRAV12-1, TRAJ40)
CVVPSGTYKYIF

SEQ ID NO: 111190 - protein, 12 aa, Homo sapiens
  CDR3 for beta chain variable domain of TCR clone 55595 (TRBV11-2, TRBJ2-1)
CASSPGNNEQFF

SEQ ID NO: 111191 - protein, 16 aa, Homo sapiens
  CDR3 for alpha chain variable domain of TCR clone 55596 (TRAV21, TRAJ33)
CAVSTASMDSNYQLIW

SEQ ID NO: 111192 - protein, 17 aa, Homo sapiens
  CDR3 for beta chain variable domain of TCR clone 55596 (TRBV2, TRBJ1-4)
CASSKRELTQGEEKLFF

SEQ ID NO: 111193 - protein, 17 aa, Homo sapiens
  CDR3 for alpha chain variable domain of TCR clone 55597 (TRAV36/DV7, TRAJ52)
CAVVQRAGGTSYGKLTF

SEQ ID NO: 111194 - protein, 14 aa, Homo sapiens
  CDR3 for beta chain variable domain of TCR clone 55597 (TRBV20-1, TRBJ1-1)
CSAQTRIGGTEAFF

SEQ ID NO: 111195 - protein, 10 aa, Homo sapiens
  CDR3 for alpha chain variable domain of TCR clone 55598 (TRAV13-2, TRAJ49)
CADTGNQFYL

SEQ ID NO: 111196 - protein, 13 aa, Homo sapiens
  CDR3 for beta chain variable domain of TCR clone 55598 (TRBV10-3, TRBJ1-2)
CAISERDSYGYTF

SEQ ID NO: 111197 - protein, 11 aa, Homo sapiens
  CDR3 for alpha chain variable domain of TCR clone 55599 (TRAV2, TRAJ13)
CASGGYQKVTF

SEQ ID NO: 111198 - protein, 15 aa, Homo sapiens
  CDR3 for beta chain variable domain of TCR clone 55599 (TRBV7-2, TRBJ2-1)
CASSSGLAGGSEQFF

SEQ ID NO: 111199 - protein, 11 aa, Homo sapiens
  CDR3 for alpha chain variable domain of TCR clone 55600 (TRAV12-2, TRAJ31)
CAILNNARLMF

SEQ ID NO: 111200 - protein, 16 aa, Homo sapiens
  CDR3 for beta chain variable domain of TCR clone 55600 (TRBV13, TRBJ2-2)
CASSPRTGEHTGEPFF

SEQ ID NO: 111201 - protein, 16 aa, Homo sapiens
  CDR3 for alpha chain variable domain of TCR clone 55601 (TRAV26-1, TRAJ37)
CIVRGDGSGNTGKLIF

SEQ ID NO: 111202 - protein, 11 aa, Homo sapiens
  CDR3 for beta chain variable domain of TCR clone 55601 (TRBV11-2, TRBJ1-1)
CASSINTEAFF

SEQ ID NO: 111203 - protein, 15 aa, Homo sapiens
  CDR3 for alpha chain variable domain of TCR clone 55602 (TRAV26-1, TRAJ44)
CIVRANTGTASKLTF

SEQ ID NO: 111204 - protein, 16 aa, Homo sapiens
  CDR3 for beta chain variable domain of TCR clone 55602 (TRBV7-7, TRBJ2-1)
CASSLASGTSYNEQFC

SEQ ID NO: 111205 - protein, 15 aa, Homo sapiens
  CDR3 for alpha chain variable domain of TCR clone 55603 (TRAV16, TRAJ48)
CALFISNFGNEKLTF

SEQ ID NO: 111206 - protein, 16 aa, Homo sapiens
  CDR3 for beta chain variable domain of TCR clone 55603 (TRBV7-3, TRBJ2-2)
CASSLKRGTLSGELFF

SEQ ID NO: 111207 - protein, 14 aa, Homo sapiens
  CDR3 for alpha chain variable domain of TCR clone 55604 (TRAV8-3, TRAJ9)
CAVVYNTGGFKTIF

SEQ ID NO: 111208 - protein, 14 aa, Homo sapiens
  CDR3 for beta chain variable domain of TCR clone 55604 (TRBV7-3, TRBJ2-2)
CASSSGGDTGELFF

SEQ ID NO: 111209 - protein, 15 aa, Homo sapiens
  CDR3 for alpha chain variable domain of TCR clone 55605 (TRAV12-3, TRAJ10)
CASYILTGGGNKLIF

SEQ ID NO: 111210 - protein, 15 aa, Homo sapiens
  CDR3 for beta chain variable domain of TCR clone 55605 (TRBV7-2, TRBJ1-6)
CASSLGPDRGMPLHF

SEQ ID NO: 111211 - protein, 16 aa, Homo sapiens
  CDR3 for alpha chain variable domain of TCR clone 55606 (TRAV21, TRAJ45)
CAVSWGSGGGAGGLTF

SEQ ID NO: 111212 - protein, 14 aa, Homo sapiens
  CDR3 for beta chain variable domain of TCR clone 55606 (TRBV4-2, TRBJ1-2)
CASSPGGSNYGYTF

SEQ ID NO: 111213 - protein, 11 aa, Homo sapiens
  CDR3 for alpha chain variable domain of TCR clone 55607 (TRAV12-1, TRAJ43)
CVEYDNDDMRF

SEQ ID NO: 111214 - protein, 16 aa, Homo sapiens
  CDR3 for beta chain variable domain of TCR clone 55607 (TRBV5-4, TRBJ2-1)
CASSLVGSGQDNEQFF

SEQ ID NO: 111215 - protein, 13 aa, Homo sapiens
  CDR3 for alpha chain variable domain of TCR clone 55608 (TRAV1-2, TRAJ12)
CAVSMDSSYKLIF

SEQ ID NO: 111216 - protein, 13 aa, Homo sapiens
  CDR3 for beta chain variable domain of TCR clone 55608 (TRBV12-5, TRBJ2-3)
CASGDRQSDTQYF

SEQ ID NO: 111217 - protein, 15 aa, Homo sapiens
  CDR3 for alpha chain variable domain of TCR clone 55609 (TRAV1-2, TRAJ30)
CAVRPHGNRDDKIIF

SEQ ID NO: 111218 - protein, 13 aa, Homo sapiens
  CDR3 for beta chain variable domain of TCR clone 55609 (TRBV4-1, TRBJ2-7)
CAGSQGQAYEQYF

SEQ ID NO: 111219 - protein, 18 aa, Homo sapiens
  CDR3 for alpha chain variable domain of TCR clone 55610 (TRAV3, TRAJ17)
RAVRARRGGRSCRQQANF

SEQ ID NO: 111220 - protein, 14 aa, Homo sapiens
  CDR3 for beta chain variable domain of TCR clone 55610 (TRBV4-1, TRBJ2-2)
CASSQAVNTGELFF

SEQ ID NO: 111221 - protein, 12 aa, Homo sapiens
  CDR3 for alpha chain variable domain of TCR clone 55611 (TRAV21, TRAJ13)
PGPSGGYQRVTF

SEQ ID NO: 111222 - protein, 15 aa, Homo sapiens
  CDR3 for beta chain variable domain of TCR clone 55611 (TRBV7-9, TRBJ1-6)
CASSSPGRGNSPLHF

SEQ ID NO: 111223 - protein, 14 aa, Homo sapiens
  CDR3 for alpha chain variable domain of TCR clone 55612 (TRAV9-2, TRAJ39)
CALYIYNAGNMLTF

SEQ ID NO: 111224 - protein, 12 aa, Homo sapiens
  CDR3 for beta chain variable domain of TCR clone 55612 (TRBV2, TRBJ2-1)
CAYGPPGNEQFF

SEQ ID NO: 111225 - protein, 14 aa, Homo sapiens
  CDR3 for alpha chain variable domain of TCR clone 55613 (TRAV8-6, TRAJ49)
CAVSDPGTGNQFYF

SEQ ID NO: 111226 - protein, 16 aa, Homo sapiens
  CDR3 for beta chain variable domain of TCR clone 55613 (TRBV24-1, TRBJ2-1)
CATSGAAGANYNEQFF

SEQ ID NO: 111227 - protein, 11 aa, Homo sapiens
  CDR3 for alpha chain variable domain of TCR clone 55614 (TRAV2, TRAJ23)
CAVETRGKLIS

SEQ ID NO: 111228 - protein, 14 aa, Homo sapiens
  CDR3 for beta chain variable domain of TCR clone 55614 (TRBV2, TRBJ2-3)
CASSEGQNTDTQYF

SEQ ID NO: 111229 - protein, 11 aa, Homo sapiens
  CDR3 for alpha chain variable domain of TCR clone 55615 (TRAV16, TRAJ31)
CALFNNARLMF

SEQ ID NO: 111230 - protein, 15 aa, Homo sapiens
  CDR3 for beta chain variable domain of TCR clone 55615 (TRBV18, TRBJ1-1)
CASSPRQGENTEASF

SEQ ID NO: 111231 - protein, 11 aa, Homo sapiens
  CDR3 for alpha chain variable domain of TCR clone 55616 (TRAV1-2, TRAJ20)
CAVANDYKLSF

SEQ ID NO: 111232 - protein, 11 aa, Homo sapiens
  CDR3 for beta chain variable domain of TCR clone 55616 (TRBV11-2, TRBJ2-2)
CASSLPGELFF

SEQ ID NO: 111233 - protein, 10 aa, Homo sapiens
  CDR3 for alpha chain variable domain of TCR clone 55617 (TRAV21, TRAJ31)
CAVDNARLMF

SEQ ID NO: 111234 - protein, 13 aa, Homo sapiens
  CDR3 for beta chain variable domain of TCR clone 55617 (TRBV4-1, TRBJ1-1)
CVSSRKMNTEAFF

SEQ ID NO: 111235 - protein, 12 aa, Homo sapiens
  CDR3 for alpha chain variable domain of TCR clone 55618 (TRAV30, TRAJ39)
CGRGNAGDMLTF

SEQ ID NO: 111236 - protein, 15 aa, Homo sapiens
  CDR3 for beta chain variable domain of TCR clone 55618 (TRBV5-1, TRBJ1-1)
CASSWTGRGNTEAFF

SEQ ID NO: 111237 - protein, 16 aa, Homo sapiens
  CDR3 for alpha chain variable domain of TCR clone 55619 (TRAV36/DV7, TRAJ52)
CCAQRAGGTSYGKLTF

SEQ ID NO: 111238 - protein, 15 aa, Homo sapiens
  CDR3 for beta chain variable domain of TCR clone 55619 (TRBV2, TRBJ2-7)
CASSEGLARSYEQYF

SEQ ID NO: 111239 - protein, 11 aa, Homo sapiens
  CDR3 for alpha chain variable domain of TCR clone 55620 (TRAV1-1, TRAJ23)
CAVRQGGKLIF

SEQ ID NO: 111240 - protein, 20 aa, Homo sapiens
  CDR3 for beta chain variable domain of TCR clone 55620 (TRBV7-8, TRBJ2-2)
CASSHLFAGPTIHITGELFF

SEQ ID NO: 111241 - protein, 18 aa, Homo sapiens
  CDR3 for alpha chain variable domain of TCR clone 55621 (TRAV13-1, TRAJ52)
CAASKRSAGGTSYGKLTF

SEQ ID NO: 111242 - protein, 12 aa, Homo sapiens
  CDR3 for beta chain variable domain of TCR clone 55621 (TRBV11-2, TRBJ2-1)
CASSPGNNEQFF

SEQ ID NO: 111243 - protein, 16 aa, Homo sapiens
  CDR3 for alpha chain variable domain of TCR clone 55622 (TRAV4, TRAJ22)
CLVGDLYSGSARPLTF

SEQ ID NO: 111244 - protein, 16 aa, Homo sapiens
  CDR3 for beta chain variable domain of TCR clone 55622 (TRBV7-9, TRBJ2-1)
CASSDVAGGSYNEQFF

SEQ ID NO: 111245 - protein, 17 aa, Homo sapiens
  CDR3 for alpha chain variable domain of TCR clone 55623 (TRAV13-1, TRAJ31)
CAPRDRIMFGDGTQLVV

SEQ ID NO: 111246 - protein, 12 aa, Homo sapiens
  CDR3 for beta chain variable domain of TCR clone 55623 (TRBV7-9, TRBJ2-7)
CASSLEGYEQYF

SEQ ID NO: 111247 - protein, 16 aa, Homo sapiens
  CDR3 for alpha chain variable domain of TCR clone 55624 (TRAV16, TRAJ52)
CALSAAGGTSYGKLTF

SEQ ID NO: 111248 - protein, 14 aa, Homo sapiens
  CDR3 for beta chain variable domain of TCR clone 55624 (TRBV12-5, TRBJ2-5)
CASGSRTHQETQYF

SEQ ID NO: 111249 - protein, 16 aa, Homo sapiens
  CDR3 for alpha chain variable domain of TCR clone 55625 (TRAV30, TRAJ24)
CGTEIVDADSWGKFQV

SEQ ID NO: 111250 - protein, 14 aa, Homo sapiens
  CDR3 for beta chain variable domain of TCR clone 55625 (TRBV13, TRBJ2-1)
CASSPRPRYNEQFF

SEQ ID NO: 111251 - protein, 14 aa, Homo sapiens
  CDR3 for alpha chain variable domain of TCR clone 55626 (TRAV9-2, TRAJ39)
CALYIYNAGNMLTF

SEQ ID NO: 111252 - protein, 19 aa, Homo sapiens
  CDR3 for beta chain variable domain of TCR clone 55626 (TRBV25-1, TRBJ2-2)
CATLVYRVDRGRKTGELFF

SEQ ID NO: 111253 - protein, 16 aa, Homo sapiens
  CDR3 for alpha chain variable domain of TCR clone 55627 (TRAV27, TRAJ53)
CAAPEGSGVSNYKLTF

SEQ ID NO: 111254 - protein, 15 aa, Homo sapiens
  CDR3 for beta chain variable domain of TCR clone 55627 (TRBV20-1, TRBJ1-1)
CSASRGVTGNTEAFF

SEQ ID NO: 111255 - protein, 18 aa, Homo sapiens
  CDR3 for alpha chain variable domain of TCR clone 55628 (TRAV12-3, TRAJ52)
CAMSVGGAGGTSYGKLTF

SEQ ID NO: 111256 - protein, 15 aa, Homo sapiens
  CDR3 for beta chain variable domain of TCR clone 55628 (TRBV2, TRBJ2-1)
CASSEEREGDNEQFF

SEQ ID NO: 111257 - protein, 17 aa, Homo sapiens
  CDR3 for alpha chain variable domain of TCR clone 55629 (TRAV4, TRAJ18)
CLVGERSVGSTLGRLYF

SEQ ID NO: 111258 - protein, 13 aa, Homo sapiens
  CDR3 for beta chain variable domain of TCR clone 55629 (TRBV7-3, TRBJ1-1)
CASSQDWGAEAFF

SEQ ID NO: 111259 - protein, 14 aa, Homo sapiens
  CDR3 for alpha chain variable domain of TCR clone 55630 (TRAV21, TRAJ58)
CAVRRGRSGSRLTF

SEQ ID NO: 111260 - protein, 13 aa, Homo sapiens
  CDR3 for beta chain variable domain of TCR clone 55630 (TRBV7-2, TRBJ1-6)
CASSLKFDSPLLF

SEQ ID NO: 111261 - protein, 13 aa, Homo sapiens
  CDR3 for alpha chain variable domain of TCR clone 55631 (TRAV12-1, TRAJ29)
CVVNGPGNTPLVF

SEQ ID NO: 111262 - protein, 13 aa, Homo sapiens
  CDR3 for beta chain variable domain of TCR clone 55631 (TRBV4-1, TRBJ1-1)
CASSRKMNTEAFF

SEQ ID NO: 111263 - protein, 13 aa, Homo sapiens
  CDR3 for alpha chain variable domain of TCR clone 55632 (TRAV17, TRAJ5)
CALRGTGRRALTF

SEQ ID NO: 111264 - protein, 13 aa, Homo sapiens
  CDR3 for beta chain variable domain of TCR clone 55632 (TRBV7-2, TRBJ2-7)
CASSSPSGSEQYF

SEQ ID NO: 111265 - protein, 13 aa, Homo sapiens
  CDR3 for alpha chain variable domain of TCR clone 55633 (TRAV20, TRAJ48)
YAVHLFGNEKLTF

SEQ ID NO: 111266 - protein, 15 aa, Homo sapiens
  CDR3 for beta chain variable domain of TCR clone 55633 (TRBV6-5, TRBJ2-6)
CASSQWEAGANVLTF

SEQ ID NO: 111267 - protein, 11 aa, Homo sapiens
  CDR3 for alpha chain variable domain of TCR clone 55634 (TRAV35, TRAJ30)
CAGLRDDKIIF

SEQ ID NO: 111268 - protein, 20 aa, Homo sapiens
  CDR3 for beta chain variable domain of TCR clone 55634 (TRBV7-8, TRBJ2-2)
CASSHLFPGPTNHITGELFF

SEQ ID NO: 111269 - protein, 14 aa, Homo sapiens
  CDR3 for alpha chain variable domain of TCR clone 55635 (TRAV29/DV5, TRAJ36)
CAVRRKTGANNLFF

SEQ ID NO: 111270 - protein, 14 aa, Homo sapiens
  CDR3 for beta chain variable domain of TCR clone 55635 (TRBV12-5, TRBJ2-5)
CASGSRTHQETQYF

SEQ ID NO: 111271 - protein, 10 aa, Homo sapiens
  CDR3 for alpha chain variable domain of TCR clone 55636 (TRAV26-1, TRAJ22)
CIVSLNFFWF

SEQ ID NO: 111272 - protein, 15 aa, Homo sapiens
  CDR3 for beta chain variable domain of TCR clone 55636 (TRBV4-2, TRBJ1-2)
CAGSQRTGGRDGYTF

SEQ ID NO: 111273 - protein, 14 aa, Homo sapiens
  CDR3 for alpha chain variable domain of TCR clone 55637 (TRAV17, TRAJ4)
CATAPLGGHNKLIF

SEQ ID NO: 111274 - protein, 13 aa, Homo sapiens
  CDR3 for beta chain variable domain of TCR clone 55637 (TRBV12-4, TRBJ1-3)
CASSLASGNTIYF

SEQ ID NO: 111275 - protein, 13 aa, Homo sapiens
  CDR3 for alpha chain variable domain of TCR clone 55638 (TRAV13-2, TRAJ48)
CAEMDFGNEKLTF

SEQ ID NO: 111276 - protein, 15 aa, Homo sapiens
  CDR3 for beta chain variable domain of TCR clone 55638 (TRBV7-3, TRBJ2-1)
CASSQRGGALSEQFF

SEQ ID NO: 111277 - protein, 16 aa, Homo sapiens
  CDR3 for alpha chain variable domain of TCR clone 55639 (TRAV21, TRAJ52)
CAVTNAGGTSYGKLTF

SEQ ID NO: 111278 - protein, 13 aa, Homo sapiens
  CDR3 for beta chain variable domain of TCR clone 55639 (TRBV20-1, TRBJ2-3)
CSARRAGTDTQYF

SEQ ID NO: 111279 - protein, 12 aa, Homo sapiens
  CDR3 for alpha chain variable domain of TCR clone 55640 (TRAV12-3, TRAJ17)
CAMTLTGNKLTF

SEQ ID NO: 111280 - protein, 14 aa, Homo sapiens
  CDR3 for beta chain variable domain of TCR clone 55640 (TRBV5-1, TRBJ2-2)
CASSLGGGSGELFF

SEQ ID NO: 111281 - protein, 16 aa, Homo sapiens
  CDR3 for alpha chain variable domain of TCR clone 55641 (TRAV16, TRAJ52)
RALSAAGGTSYGKLTF

SEQ ID NO: 111282 - protein, 14 aa, Homo sapiens
  CDR3 for beta chain variable domain of TCR clone 55641 (TRBV2, TRBJ2-3)
CASSEGQNTDTQYF

SEQ ID NO: 111283 - protein, 14 aa, Homo sapiens
  CDR3 for alpha chain variable domain of TCR clone 55642 (TRAV12-2, TRAJ17)
GAVLFKAAGNKLTF

SEQ ID NO: 111284 - protein, 17 aa, Homo sapiens
  CDR3 for beta chain variable domain of TCR clone 55642 (TRBV20-1, TRBJ2-2)
CSASGSGQGGLTGELFF

SEQ ID NO: 111285 - protein, 13 aa, Homo sapiens
  CDR3 for alpha chain variable domain of TCR clone 55643 (TRAV12-2, TRAJ4)
RAVRSGGYNKLIF

SEQ ID NO: 111286 - protein, 15 aa, Homo sapiens
  CDR3 for beta chain variable domain of TCR clone 55643 (TRBV10-3, TRBJ2-1)
CAISDVQDRAYEQFF

SEQ ID NO: 111287 - protein, 11 aa, Homo sapiens
  CDR3 for alpha chain variable domain of TCR clone 55644 (TRAV2, TRAJ33)
CAVDSNYQLIW

SEQ ID NO: 111288 - protein, 17 aa, Homo sapiens
  CDR3 for beta chain variable domain of TCR clone 55644 (TRBV20-1, TRBJ2-3)
CSAGDGWNAKERDTQYF

SEQ ID NO: 111289 - protein, 14 aa, Homo sapiens
  CDR3 for alpha chain variable domain of TCR clone 55645 (TRAV8-4, TRAJ5)
CAVSTDTGRRALTF

SEQ ID NO: 111290 - protein, 14 aa, Homo sapiens
  CDR3 for beta chain variable domain of TCR clone 55645 (TRBV19, TRBJ2-1)
CASPTFVLSGEQFF

SEQ ID NO: 111291 - protein, 17 aa, Homo sapiens
  CDR3 for alpha chain variable domain of TCR clone 55646 (TRAV26-1, TRAJ37)
CIVRVITISSNTGKLIF

SEQ ID NO: 111292 - protein, 14 aa, Homo sapiens
  CDR3 for beta chain variable domain of TCR clone 55646 (TRBV19, TRBJ2-1)
CASPTFVLSGEQFF

SEQ ID NO: 111293 - protein, 13 aa, Homo sapiens
  CDR3 for alpha chain variable domain of TCR clone 55647 (TRAV13-1, TRAJ20)
CAARVSNDYKISF

SEQ ID NO: 111294 - protein, 16 aa, Homo sapiens
  CDR3 for beta chain variable domain of TCR clone 55647 (TRBV11-1, TRBJ1-1)
CATNPRDRAFNTEAFF

SEQ ID NO: 111295 - protein, 14 aa, Homo sapiens
  CDR3 for alpha chain variable domain of TCR clone 55648 (TRAV29/DV5, TRAJ45)
CTASFRGGADGLTF

SEQ ID NO: 111296 - protein, 11 aa, Homo sapiens
  CDR3 for beta chain variable domain of TCR clone 55648 (TRBV11-2, TRBJ2-2)
CASSLPGELFF

SEQ ID NO: 111297 - protein, 11 aa, Homo sapiens
  CDR3 for alpha chain variable domain of TCR clone 55649 (TRAV3, TRAJ21)
FALGNFNKFYF

SEQ ID NO: 111298 - protein, 16 aa, Homo sapiens
  CDR3 for beta chain variable domain of TCR clone 55649 (TRBV19, TRBJ2-1)
CASSKAGPSSYNEQFF

SEQ ID NO: 111299 - protein, 14 aa, Homo sapiens
  CDR3 for alpha chain variable domain of TCR clone 55650 (TRAV14/DV4, TRAJ9)
CAMRPNTGGFKTIF

SEQ ID NO: 111300 - protein, 13 aa, Homo sapiens
  CDR3 for beta chain variable domain of TCR clone 55650 (TRBV7-9, TRBJ1-2)
CASSLKQNYGYTF

SEQ ID NO: 111301 - protein, 11 aa, Homo sapiens
  CDR3 for alpha chain variable domain of TCR clone 55651 (TRAV17, TRAJ43)
CAKPRSNDMRF

SEQ ID NO: 111302 - protein, 15 aa, Homo sapiens
  CDR3 for beta chain variable domain of TCR clone 55651 (TRBV11-2, TRBJ2-1)
CASSLGTSGLNEQFF

SEQ ID NO: 111303 - protein, 14 aa, Homo sapiens
  CDR3 for alpha chain variable domain of TCR clone 55652 (TRAV17, TRAJ45)
CATDARGGADGLTS

SEQ ID NO: 111304 - protein, 11 aa, Homo sapiens
  CDR3 for beta chain variable domain of TCR clone 55652 (TRBV28, TRBJ2-5)
CATGNQETQYF

SEQ ID NO: 111305 - protein, 12 aa, Homo sapiens
  CDR3 for alpha chain variable domain of TCR clone 55653 (TRAV8-3, TRAJ20)
CAVGANDYKLSF

SEQ ID NO: 111306 - protein, 11 aa, Homo sapiens
  CDR3 for beta chain variable domain of TCR clone 55653 (TRBV29-1, TRBJ2-5)
CSEDRTGTQYF

SEQ ID NO: 111307 - protein, 12 aa, Homo sapiens
  CDR3 for alpha chain variable domain of TCR clone 55654 (TRAV12-3, TRAJ17)
CAMTLTGNKLTF

SEQ ID NO: 111308 - protein, 17 aa, Homo sapiens
  CDR3 for beta chain variable domain of TCR clone 55654 (TRBV7-3, TRBJ2-2)
CASSLSGTSGGTGELFF

SEQ ID NO: 111309 - protein, 15 aa, Homo sapiens
  CDR3 for alpha chain variable domain of TCR clone 55655 (TRAV27, TRAJ38)
CAARRNAGNNGKLIW

SEQ ID NO: 111310 - protein, 13 aa, Homo sapiens
  CDR3 for beta chain variable domain of TCR clone 55655 (TRBV12-5, TRBJ2-3)
CASGDRQSDTQYF

SEQ ID NO: 111311 - protein, 13 aa, Homo sapiens
  CDR3 for alpha chain variable domain of TCR clone 55656 (TRAV8-1, TRAJ30)
CAVNSNRDDKIIF

SEQ ID NO: 111312 - protein, 14 aa, Homo sapiens
  CDR3 for beta chain variable domain of TCR clone 55656 (TRBV20-1, TRBJ1-1)
SAVLHLGGGTEAFF

SEQ ID NO: 111313 - protein, 17 aa, Homo sapiens
  CDR3 for alpha chain variable domain of TCR clone 55657 (TRAV3, TRAJ6)
CAVRDGPRAGGSYIPTF

SEQ ID NO: 111314 - protein, 16 aa, Homo sapiens
  CDR3 for beta chain variable domain of TCR clone 55657 (TRBV11-2, TRBJ2-7)
CASSPTTGGVSYEQYF

SEQ ID NO: 111315 - protein, 12 aa, Homo sapiens
  CDR3 for alpha chain variable domain of TCR clone 55658 (TRAV13-1, TRAJ21)
CAAKEGFNKFYF

SEQ ID NO: 111316 - protein, 13 aa, Homo sapiens
  CDR3 for beta chain variable domain of TCR clone 55658 (TRBV7-2, TRBJ2-2)
CASSLAVTGELFF

SEQ ID NO: 111317 - protein, 10 aa, Homo sapiens
  CDR3 for alpha chain variable domain of TCR clone 55659 (TRAV23/DV6, TRAJ57)
CAASSTLSQG

SEQ ID NO: 111318 - protein, 17 aa, Homo sapiens
  CDR3 for beta chain variable domain of TCR clone 55659 (TRBV11-2, TRBJ2-1)
CASSLYPPGVEYNEQFF

SEQ ID NO: 111319 - protein, 15 aa, Homo sapiens
  CDR3 for alpha chain variable domain of TCR clone 55660 (TRAV12-2, TRAJ53)
CAVNGGGGSNYKLTS

SEQ ID NO: 111320 - protein, 17 aa, Homo sapiens
  CDR3 for beta chain variable domain of TCR clone 55660 (TRBV7-3, TRBJ2-3)
RASSLMKRMRGADTQYF

SEQ ID NO: 111321 - protein, 16 aa, Homo sapiens
  CDR3 for alpha chain variable domain of TCR clone 55661 (TRAV14/DV4, TRAJ54)
CAMREGRIQGAQKLGF

SEQ ID NO: 111322 - protein, 18 aa, Homo sapiens
  CDR3 for beta chain variable domain of TCR clone 55661 (TRBV18, TRBJ1-3)
CASSPRGGAGPSGNTIYF

SEQ ID NO: 111323 - protein, 12 aa, Homo sapiens
  CDR3 for alpha chain variable domain of TCR clone 55662 (TRAV17, TRAJ30)
CATDARDDKIIF

SEQ ID NO: 111324 - protein, 15 aa, Homo sapiens
  CDR3 for beta chain variable domain of TCR clone 55662 (TRBV4-1, TRBJ2-1)
CASSQGWELYNEQFF

SEQ ID NO: 111325 - protein, 16 aa, Homo sapiens
  CDR3 for alpha chain variable domain of TCR clone 55663 (TRAV12-3, TRAJ53)
CAMSPGSGGSNYKLTF

SEQ ID NO: 111326 - protein, 12 aa, Homo sapiens
  CDR3 for beta chain variable domain of TCR clone 55663 (TRBV3-1, TRBJ2-1)
CASGGLGNEQFF

SEQ ID NO: 111327 - protein, 12 aa, Homo sapiens
  CDR3 for alpha chain variable domain of TCR clone 55664 (TRAV13-1, TRAJ27)
CAAHTNAGKSTF

SEQ ID NO: 111328 - protein, 14 aa, Homo sapiens
  CDR3 for beta chain variable domain of TCR clone 55664 (TRBV19, TRBJ2-2)
CDSSGQGIAGELFF

SEQ ID NO: 111329 - protein, 21 aa, Homo sapiens
  CDR3 for alpha chain variable domain of TCR clone 55665 (TRAV3, TRAJ17)
CAVRARRGGRSCRQQANVWRR

SEQ ID NO: 111330 - protein, 14 aa, Homo sapiens
  CDR3 for beta chain variable domain of TCR clone 55665 (TRBV4-1, TRBJ2-2)
CASSQAVNTGELFF

SEQ ID NO: 111331 - protein, 16 aa, Homo sapiens
  CDR3 for alpha chain variable domain of TCR clone 55666 (TRAV3, TRAJ37)
CAVRGKGSGNTGKLIF

SEQ ID NO: 111332 - protein, 16 aa, Homo sapiens
  CDR3 for beta chain variable domain of TCR clone 55666 (TRBV12-4, TRBJ1-5)
CASSRPVGGSNQPQHL

SEQ ID NO: 111333 - protein, 13 aa, Homo sapiens
  CDR3 for alpha chain variable domain of TCR clone 55667 (TRAV12-3, TRAJ13)
CAMSSGGYEKVTF

SEQ ID NO: 111334 - protein, 13 aa, Homo sapiens
  CDR3 for beta chain variable domain of TCR clone 55667 (TRBV20-1, TRBJ1-1)
CSAPPGGHTEAFF

SEQ ID NO: 111335 - protein, 15 aa, Homo sapiens
  CDR3 for alpha chain variable domain of TCR clone 55668 (TRAV21, TRAJ53)
CATLNSGGSNYKPTF

SEQ ID NO: 111336 - protein, 15 aa, Homo sapiens
  CDR3 for beta chain variable domain of TCR clone 55668 (TRBV20-1, TRBJ2-7)
CSARDRVSGMDEQYF

SEQ ID NO: 111337 - protein, 13 aa, Homo sapiens
  CDR3 for alpha chain variable domain of TCR clone 55669 (TRAV8-3, TRAJ43)
CAVGPDKNNDMRF

SEQ ID NO: 111338 - protein, 12 aa, Homo sapiens
  CDR3 for beta chain variable domain of TCR clone 55669 (TRBV7-2, TRBJ1-6)
CASSLSSSPLHF

SEQ ID NO: 111339 - protein, 14 aa, Homo sapiens
  CDR3 for alpha chain variable domain of TCR clone 55670 (TRAV8-6, TRAJ52)
CAVIGGTSYGKLTF

SEQ ID NO: 111340 - protein, 15 aa, Homo sapiens
  CDR3 for beta chain variable domain of TCR clone 55670 (TRBV11-2, TRBJ2-5)
CASSLGAGGVDTQYF

SEQ ID NO: 111341 - protein, 17 aa, Homo sapiens
  CDR3 for alpha chain variable domain of TCR clone 55671 (TRAV13-2, TRAJ42)
CAEKGKNYGGSQGNLIF

SEQ ID NO: 111342 - protein, 16 aa, Homo sapiens
  CDR3 for beta chain variable domain of TCR clone 55671 (TRBV7-9, TRBJ2-1)
CASSLGTGWDYSEQFF

SEQ ID NO: 111343 - protein, 14 aa, Homo sapiens
  CDR3 for alpha chain variable domain of TCR clone 55672 (TRAV13-1, TRAJ23)
CAASRLGRGGKLIF

SEQ ID NO: 111344 - protein, 14 aa, Homo sapiens
  CDR3 for beta chain variable domain of TCR clone 55672 (TRBV20-1, TRBJ1-1)
SAVLHLGGGTEAFF

SEQ ID NO: 111345 - protein, 14 aa, Homo sapiens
  CDR3 for alpha chain variable domain of TCR clone 55673 (TRAV38-2/DV8, TRAJ48)
CYRSGGFGNEKLTF

SEQ ID NO: 111346 - protein, 16 aa, Homo sapiens
  CDR3 for beta chain variable domain of TCR clone 55673 (TRBV28, TRBJ2-7)
CASSPWVATGDLSQYF

SEQ ID NO: 111347 - protein, 12 aa, Homo sapiens
  CDR3 for alpha chain variable domain of TCR clone 55674 (TRAV29/DV5, TRAJ15)
CASNQAGTALIF

SEQ ID NO: 111348 - protein, 15 aa, Homo sapiens
  CDR3 for beta chain variable domain of TCR clone 55674 (TRBV11-2, TRBJ2-2)
CASSSGRVNAGELFF

SEQ ID NO: 111349 - protein, 14 aa, Homo sapiens
  CDR3 for alpha chain variable domain of TCR clone 55675 (TRAV1-2, TRAJ16)
CDVNRFSDGQKLLF

SEQ ID NO: 111350 - protein, 16 aa, Homo sapiens
  CDR3 for beta chain variable domain of TCR clone 55675 (TRBV12-5, TRBJ2-5)
CASGPRTSGNQETQYF

SEQ ID NO: 111351 - protein, 14 aa, Homo sapiens
  CDR3 for alpha chain variable domain of TCR clone 55676 (TRAV3, TRAJ33)
CAVRDIDSNYQLIW

SEQ ID NO: 111352 - protein, 19 aa, Homo sapiens
  CDR3 for beta chain variable domain of TCR clone 55676 (TRBV7-3, TRBJ1-2)
CASSFPQGNDGELWLHLRF

SEQ ID NO: 111353 - protein, 12 aa, Homo sapiens
  CDR3 for alpha chain variable domain of TCR clone 55677 (TRAV12-1, TRAJ40)
CVFYSGTYKYIF

SEQ ID NO: 111354 - protein, 18 aa, Homo sapiens
  CDR3 for beta chain variable domain of TCR clone 55677 (TRBV12-4, TRBJ2-2)
CASSLVAGSRGRTGELFF

SEQ ID NO: 111355 - protein, 12 aa, Homo sapiens
  CDR3 for alpha chain variable domain of TCR clone 55678 (TRAV12-1, TRAJ31)
CVSWNNNARLMF

SEQ ID NO: 111356 - protein, 15 aa, Homo sapiens
  CDR3 for beta chain variable domain of TCR clone 55678 (TRBV7-2, TRBJ1-5)
CASSLDRGRDQPQHF

SEQ ID NO: 111357 - protein, 11 aa, Homo sapiens
  CDR3 for alpha chain variable domain of TCR clone 55679 (TRAV2, TRAJ13)
CASGGYQKITF

SEQ ID NO: 111358 - protein, 16 aa, Homo sapiens
  CDR3 for beta chain variable domain of TCR clone 55679 (TRBV6-1, TRBJ2-5)
CASSETLDRGAETQYF

SEQ ID NO: 111359 - protein, 15 aa, Homo sapiens
  CDR3 for alpha chain variable domain of TCR clone 55680 (TRAV12-1, TRAJ42)
CVVTRDGGRQGNLIF

SEQ ID NO: 111360 - protein, 14 aa, Homo sapiens
  CDR3 for beta chain variable domain of TCR clone 55680 (TRBV11-2, TRBJ2-3)
CASSLGGGANTQYF

SEQ ID NO: 111361 - protein, 12 aa, Homo sapiens
  CDR3 for alpha chain variable domain of TCR clone 55681 (TRAV9-2, TRAJ26)
CALRGYGQNFVF

SEQ ID NO: 111362 - protein, 14 aa, Homo sapiens
  CDR3 for beta chain variable domain of TCR clone 55681 (TRBV7-6, TRBJ2-3)
CASSLGTVTDTQYF

SEQ ID NO: 111363 - protein, 12 aa, Homo sapiens
  CDR3 for alpha chain variable domain of TCR clone 55682 (TRAV23/DV6, TRAJ30)
CATSKGDDKIIF

SEQ ID NO: 111364 - protein, 18 aa, Homo sapiens
  CDR3 for beta chain variable domain of TCR clone 55682 (TRBV10-3, TRBJ2-3)
CAISESRVGPMRGDTQYF

SEQ ID NO: 111365 - protein, 15 aa, Homo sapiens
  CDR3 for alpha chain variable domain of TCR clone 55683 (TRAV13-2, TRAJ50)
CAEEPLKTSYDKVIF

SEQ ID NO: 111366 - protein, 13 aa, Homo sapiens
  CDR3 for beta chain variable domain of TCR clone 55683 (TRBV11-3, TRBJ1-1)
CATEEGLNTEAFF

SEQ ID NO: 111367 - protein, 13 aa, Homo sapiens
  CDR3 for alpha chain variable domain of TCR clone 55684 (TRAV12-3, TRAJ13)
CAMSSGGYQKVTF

SEQ ID NO: 111368 - protein, 14 aa, Homo sapiens
  CDR3 for beta chain variable domain of TCR clone 55684 (TRBV2, TRBJ2-1)
CASWTGSSYNEQFF

SEQ ID NO: 111369 - protein, 13 aa, Homo sapiens
  CDR3 for alpha chain variable domain of TCR clone 55685 (TRAV26-1, TRAJ34)
CIVRPWITDKLTF

SEQ ID NO: 111370 - protein, 14 aa, Homo sapiens
  CDR3 for beta chain variable domain of TCR clone 55685 (TRBV7-2, TRBJ2-7)
CASRSQGAAYEQYF

SEQ ID NO: 111371 - protein, 12 aa, Homo sapiens
  CDR3 for alpha chain variable domain of TCR clone 55686 (TRAV27, TRAJ13)
CAGAGGYQNVTF

SEQ ID NO: 111372 - protein, 15 aa, Homo sapiens
  CDR3 for beta chain variable domain of TCR clone 55686 (TRBV20-1, TRBJ2-6)
CSARDRGPGANVLTF

SEQ ID NO: 111373 - protein, 16 aa, Homo sapiens
  CDR3 for alpha chain variable domain of TCR clone 55687 (TRAV3, TRAJ21)
CAVRDIERGNFNKFYF

SEQ ID NO: 111374 - protein, 15 aa, Homo sapiens
  CDR3 for beta chain variable domain of TCR clone 55687 (TRBV7-9, TRBJ1-5)
CASSQGHQPNQPQHF

SEQ ID NO: 111375 - protein, 11 aa, Homo sapiens
  CDR3 for alpha chain variable domain of TCR clone 55688 (TRAV17, TRAJ9)
CGFTGGFKTIF

SEQ ID NO: 111376 - protein, 14 aa, Homo sapiens
  CDR3 for beta chain variable domain of TCR clone 55688 (TRBV7-9, TRBJ2-2)
CASSLVQDTGELFS

SEQ ID NO: 111377 - protein, 14 aa, Homo sapiens
  CDR3 for alpha chain variable domain of TCR clone 55689 (TRAV12-2, TRAJ53)
CAVKGGGSNYKLTF

SEQ ID NO: 111378 - protein, 15 aa, Homo sapiens
  CDR3 for beta chain variable domain of TCR clone 55689 (TRBV11-2, TRBJ2-2)
CARSSDRVNAGELFF

SEQ ID NO: 111379 - protein, 10 aa, Homo sapiens
  CDR3 for alpha chain variable domain of TCR clone 55690 (TRAV23/DV6, TRAJ57)
CAASSTLSQG

SEQ ID NO: 111380 - protein, 16 aa, Homo sapiens
  CDR3 for beta chain variable domain of TCR clone 55690 (TRBV24-1, TRBJ2-3)
CATSDRRQDLTDTQYF

SEQ ID NO: 111381 - protein, 14 aa, Homo sapiens
  CDR3 for alpha chain variable domain of TCR clone 55691 (TRAV1-2, TRAJ8)
CAVREDTGFQKLVF

SEQ ID NO: 111382 - protein, 12 aa, Homo sapiens
  CDR3 for beta chain variable domain of TCR clone 55691 (TRBV18, TRBJ1-1)
CASSPGQLQAFF

SEQ ID NO: 111383 - protein, 21 aa, Homo sapiens
  CDR3 for alpha chain variable domain of TCR clone 55692 (TRAV12-1, TRAJ37)
CVVNGGLWQHRQTNLWARDNF

SEQ ID NO: 111384 - protein, 12 aa, Homo sapiens
  CDR3 for beta chain variable domain of TCR clone 55692 (TRBV20-1, TRBJ1-2)
CSAPGLNYGYTF

SEQ ID NO: 111385 - protein, 18 aa, Homo sapiens
  CDR3 for alpha chain variable domain of TCR clone 55693 (TRAV21, TRAJ52)
CAVRPFPAGGTSYGKLTF

SEQ ID NO: 111386 - protein, 13 aa, Homo sapiens
  CDR3 for beta chain variable domain of TCR clone 55693 (TRBV7-3, TRBJ1-1)
CASSQDWGAEAFF

SEQ ID NO: 111387 - protein, 13 aa, Homo sapiens
  CDR3 for alpha chain variable domain of TCR clone 55694 (TRAV2, TRAJ40)
CAVVTSGTYKYIF

SEQ ID NO: 111388 - protein, 16 aa, Homo sapiens
  CDR3 for beta chain variable domain of TCR clone 55694 (TRBV7-9, TRBJ2-1)
CASSRKNFSSPREQFF

SEQ ID NO: 111389 - protein, 16 aa, Homo sapiens
  CDR3 for alpha chain variable domain of TCR clone 55695 (TRAV12-3, TRAJ53)
CAMGPGSGGSNYKLTF

SEQ ID NO: 111390 - protein, 13 aa, Homo sapiens
  CDR3 for beta chain variable domain of TCR clone 55695 (TRBV19, TRBJ1-2)
CASSVPGQDGYTF

SEQ ID NO: 111391 - protein, 10 aa, Homo sapiens
  CDR3 for alpha chain variable domain of TCR clone 55696 (TRAV8-3, TRAJ33)
CAVGAIATIS

SEQ ID NO: 111392 - protein, 19 aa, Homo sapiens
  CDR3 for beta chain variable domain of TCR clone 55696 (TRBV25-1, TRBJ2-2)
CAILVYRVDRGRKTGELFF

SEQ ID NO: 111393 - protein, 14 aa, Homo sapiens
  CDR3 for alpha chain variable domain of TCR clone 55697 (TRAV13-1, TRAJ44)
CAAKATCTASKLTF

SEQ ID NO: 111394 - protein, 17 aa, Homo sapiens
  CDR3 for beta chain variable domain of TCR clone 55697 (TRBV7-3, TRBJ2-3)
RASSLMKRMRGADTQYF

SEQ ID NO: 111395 - protein, 14 aa, Homo sapiens
  CDR3 for alpha chain variable domain of TCR clone 55698 (TRAV20, TRAJ10)
CAVRVEGGGNKLTF

SEQ ID NO: 111396 - protein, 18 aa, Homo sapiens
  CDR3 for beta chain variable domain of TCR clone 55698 (TRBV24-1, TRBJ2-1)
CATSGLMFLGRGVHEQFF

SEQ ID NO: 111397 - protein, 14 aa, Homo sapiens
  CDR3 for alpha chain variable domain of TCR clone 55699 (TRAV12-2, TRAJ29)
CAVRRNSGNTPLVF

SEQ ID NO: 111398 - protein, 13 aa, Homo sapiens
  CDR3 for beta chain variable domain of TCR clone 55699 (TRBV12-4, TRBJ2-1)
CASGHYTDNEQFF

SEQ ID NO: 111399 - protein, 18 aa, Homo sapiens
  CDR3 for alpha chain variable domain of TCR clone 55700 (TRAV26-2, TRAJ54)
CILRDVEVGIQGAQKLVV

SEQ ID NO: 111400 - protein, 16 aa, Homo sapiens
  CDR3 for beta chain variable domain of TCR clone 55700 (TRBV6-1, TRBJ2-5)
CASSETLDRGAETQYF

SEQ ID NO: 111401 - protein, 16 aa, Homo sapiens
  CDR3 for alpha chain variable domain of TCR clone 55701 (TRAV14/DV4, TRAJ12)
CAMREVLMDSSYKLIF

SEQ ID NO: 111402 - protein, 14 aa, Homo sapiens
  CDR3 for beta chain variable domain of TCR clone 55701 (TRBV19, TRBJ2-2)
CASSGQGIAGELFF

SEQ ID NO: 111403 - protein, 12 aa, Homo sapiens
  CDR3 for alpha chain variable domain of TCR clone 55702 (TRAV8-3, TRAJ26)
CAGDNYGQNFVF

SEQ ID NO: 111404 - protein, 15 aa, Homo sapiens
  CDR3 for beta chain variable domain of TCR clone 55702 (TRBV9, TRBJ2-1)
CASSLAGSSYNEQFF

SEQ ID NO: 111405 - protein, 16 aa, Homo sapiens
  CDR3 for alpha chain variable domain of TCR clone 55703 (TRAV30, TRAJ24)
CGTEIVDADSWEKFQF

SEQ ID NO: 111406 - protein, 18 aa, Homo sapiens
  CDR3 for beta chain variable domain of TCR clone 55703 (TRBV7-9, TRBJ2-7)
CASSLTTSGSRTWYEQYF

SEQ ID NO: 111407 - protein, 22 aa, Homo sapiens
  CDR3 for alpha chain variable domain of TCR clone 55704 (TRAV2, TRAJ37)
CGGQMLLFTTVPGSSNTGKLIF

SEQ ID NO: 111408 - protein, 14 aa, Homo sapiens
  CDR3 for beta chain variable domain of TCR clone 55704 (TRBV7-8, TRBJ2-7)
CASSLWQSSYEQYF

SEQ ID NO: 111409 - protein, 13 aa, Homo sapiens
  CDR3 for alpha chain variable domain of TCR clone 55705 (TRAV17, TRAJ9)
CATDYTGGFKTIF

SEQ ID NO: 111410 - protein, 16 aa, Homo sapiens
  CDR3 for beta chain variable domain of TCR clone 55705 (TRBV7-7, TRBJ2-1)
CASSLASSTSYNEQFF

SEQ ID NO: 111411 - protein, 15 aa, Homo sapiens
  CDR3 for alpha chain variable domain of TCR clone 55706 (TRAV12-3, TRAJ11)
CAMSEENSGYSTLTF

SEQ ID NO: 111412 - protein, 13 aa, Homo sapiens
  CDR3 for beta chain variable domain of TCR clone 55706 (TRBV12-4, TRBJ2-1)
CASSFHTGSEQFF

SEQ ID NO: 111413 - protein, 14 aa, Homo sapiens
  CDR3 for alpha chain variable domain of TCR clone 55707 (TRAV17, TRAJ23)
CATASYNQGGKLIL

SEQ ID NO: 111414 - protein, 16 aa, Homo sapiens
  CDR3 for beta chain variable domain of TCR clone 55707 (TRBV12-4, TRBJ1-5)
CASSRPVGGSNQPQHF

SEQ ID NO: 111415 - protein, 12 aa, Homo sapiens
  CDR3 for alpha chain variable domain of TCR clone 55708 (TRAV12-2, TRAJ8)
CAVNTGFQKLVF

SEQ ID NO: 111416 - protein, 15 aa, Homo sapiens
  CDR3 for beta chain variable domain of TCR clone 55708 (TRBV7-8, TRBJ1-5)
CASSLERRGLEHQHF

SEQ ID NO: 111417 - protein, 14 aa, Homo sapiens
  CDR3 for alpha chain variable domain of TCR clone 55709 (TRAV1-2, TRAJ16)
CAVNRFSDGQKLPF

SEQ ID NO: 111418 - protein, 15 aa, Homo sapiens
  CDR3 for beta chain variable domain of TCR clone 55709 (TRBV11-3, TRBJ2-3)
CASLKDGREGDTQYF

SEQ ID NO: 111419 - protein, 14 aa, Homo sapiens
  CDR3 for alpha chain variable domain of TCR clone 55710 (TRAV13-1, TRAJ40)
CAASMTSGTYKYIF

SEQ ID NO: 111420 - protein, 14 aa, Homo sapiens
  CDR3 for beta chain variable domain of TCR clone 55710 (TRBV12-4, TRBJ2-3)
CASTIAGWGDTQYF

SEQ ID NO: 111421 - protein, 14 aa, Homo sapiens
  CDR3 for alpha chain variable domain of TCR clone 55711 (TRAV38-1, TRAJ45)
CAYYSGGGADGLTF

SEQ ID NO: 111422 - protein, 20 aa, Homo sapiens
  CDR3 for beta chain variable domain of TCR clone 55711 (TRBV28, TRBJ2-1)
CASPPIGRSPGLAGGNEQFF

SEQ ID NO: 111423 - protein, 19 aa, Homo sapiens
  CDR3 for alpha chain variable domain of TCR clone 55712 (TRAV4, TRAJ13)
CLVGVQGSSGVTRKLPLEL

SEQ ID NO: 111424 - protein, 18 aa, Homo sapiens
  CDR3 for beta chain variable domain of TCR clone 55712 (TRBV15, TRBJ2-3)
CATSRDGARSWDTDTQYF

SEQ ID NO: 111425 - protein, 12 aa, Homo sapiens
  CDR3 for alpha chain variable domain of TCR clone 55713 (TRAV17, TRAJ12)
CATLRSSYKLIF

SEQ ID NO: 111426 - protein, 14 aa, Homo sapiens
  CDR3 for beta chain variable domain of TCR clone 55713 (TRBV25-1, TRBJ1-1)
CASTHLGGNTEAFF

SEQ ID NO: 111427 - protein, 10 aa, Homo sapiens
  CDR3 for alpha chain variable domain of TCR clone 55714 (TRAV12-2, TRAJ20)
CAVYLYKLSF

SEQ ID NO: 111428 - protein, 14 aa, Homo sapiens
  CDR3 for beta chain variable domain of TCR clone 55714 (TRBV10-3, TRBJ2-2)
CAIGEVSHSGELFF

SEQ ID NO: 111429 - protein, 11 aa, Homo sapiens
  CDR3 for alpha chain variable domain of TCR clone 55715 (TRAV21, TRAJ34)
CAVTNTDNLIF

SEQ ID NO: 111430 - protein, 16 aa, Homo sapiens
  CDR3 for beta chain variable domain of TCR clone 55715 (TRBV18, TRBJ1-1)
CASSPGVGGRGGEAFF

SEQ ID NO: 111431 - protein, 13 aa, Homo sapiens
  CDR3 for alpha chain variable domain of TCR clone 55716 (TRAV13-1, TRAJ6)
CAASRGGSYIPTF

SEQ ID NO: 111432 - protein, 11 aa, Homo sapiens
  CDR3 for beta chain variable domain of TCR clone 55716 (TRBV7-8, TRBJ2-7)
CVSSLSLEQYF

SEQ ID NO: 111433 - protein, 18 aa, Homo sapiens
  CDR3 for alpha chain variable domain of TCR clone 55717 (TRAV21, TRAJ52)
CAVRPSPAGGTSYGKLTF

SEQ ID NO: 111434 - protein, 13 aa, Homo sapiens
  CDR3 for beta chain variable domain of TCR clone 55717 (TRBV6-5, TRBJ1-2)
CASSYWENYGYTF

SEQ ID NO: 111435 - protein, 14 aa, Homo sapiens
  CDR3 for alpha chain variable domain of TCR clone 55718 (TRAV17, TRAJ40)
CATALTSGTYKYIF

SEQ ID NO: 111436 - protein, 13 aa, Homo sapiens
  CDR3 for beta chain variable domain of TCR clone 55718 (TRBV27, TRBJ2-1)
CSSSSGSYNEQFF

SEQ ID NO: 111437 - protein, 14 aa, Homo sapiens
  CDR3 for alpha chain variable domain of TCR clone 55719 (TRAV17, TRAJ22)
CATSPSGSARQLTF

SEQ ID NO: 111438 - protein, 15 aa, Homo sapiens
  CDR3 for beta chain variable domain of TCR clone 55719 (TRBV4-1, TRBJ2-5)
CASSLWDLYQETQYF

SEQ ID NO: 111439 - protein, 12 aa, Homo sapiens
  CDR3 for alpha chain variable domain of TCR clone 55720 (TRAV13-2, TRAJ23)
CAERHRGGKLIF

SEQ ID NO: 111440 - protein, 16 aa, Homo sapiens
  CDR3 for beta chain variable domain of TCR clone 55720 (TRBV19, TRBJ2-1)
CASSRAGPSSYNEQFF

SEQ ID NO: 111441 - protein, 12 aa, Homo sapiens
  CDR3 for alpha chain variable domain of TCR clone 55721 (TRAV12-3, TRAJ17)
CAMTLTGNKLTF

SEQ ID NO: 111442 - protein, 15 aa, Homo sapiens
  CDR3 for beta chain variable domain of TCR clone 55721 (TRBV3-1, TRBJ2-1)
CASSQQPSGGNEQFF

SEQ ID NO: 111443 - protein, 16 aa, Homo sapiens
  CDR3 for alpha chain variable domain of TCR clone 55722 (TRAV12-3, TRAJ53)
CAMSPGSGGSNYKLTF

SEQ ID NO: 111444 - protein, 16 aa, Homo sapiens
  CDR3 for beta chain variable domain of TCR clone 55722 (TRBV4-2, TRBJ1-1)
CGGSQAGFGMNTEAFF

SEQ ID NO: 111445 - protein, 14 aa, Homo sapiens
  CDR3 for alpha chain variable domain of TCR clone 55723 (TRAV21, TRAJ48)
CAVRSNSGDEKLTF

SEQ ID NO: 111446 - protein, 15 aa, Homo sapiens
  CDR3 for beta chain variable domain of TCR clone 55723 (TRBV20-1, TRBJ2-7)
CSARDRVSGMDEQYF

SEQ ID NO: 111447 - protein, 14 aa, Homo sapiens
  CDR3 for alpha chain variable domain of TCR clone 55724 (TRAV12-2, TRAJ40)
CAVKIPSGTYKYIF

SEQ ID NO: 111448 - protein, 20 aa, Homo sapiens
  CDR3 for beta chain variable domain of TCR clone 55724 (TRBV28, TRBJ2-1)
CASTPIGRSPGLAGGTEQFF

SEQ ID NO: 111449 - protein, 13 aa, Homo sapiens
  CDR3 for alpha chain variable domain of TCR clone 55725 (TRAV21, TRAJ34)
CAVSEGDTDKLIF

SEQ ID NO: 111450 - protein, 17 aa, Homo sapiens
  CDR3 for beta chain variable domain of TCR clone 55725 (TRBV20-1, TRBJ1-5)
CSARDPSAQGFNQTQHF

SEQ ID NO: 111451 - protein, 12 aa, Homo sapiens
  CDR3 for alpha chain variable domain of TCR clone 55726 (TRAV13-1, TRAJ21)
RAAKEGFNKFYF

SEQ ID NO: 111452 - protein, 13 aa, Homo sapiens
  CDR3 for beta chain variable domain of TCR clone 55726 (TRBV12-4, TRBJ1-2)
CASSLRQGKGYTF

SEQ ID NO: 111453 - protein, 17 aa, Homo sapiens
  CDR3 for alpha chain variable domain of TCR clone 55727 (TRAV14/DV4, TRAJ28)
CAMRGTSSGAGRYQLTF

SEQ ID NO: 111454 - protein, 13 aa, Homo sapiens
  CDR3 for beta chain variable domain of TCR clone 55727 (TRBV28, TRBJ2-5)
CASSFAGGETQYF

SEQ ID NO: 111455 - protein, 12 aa, Homo sapiens
  CDR3 for alpha chain variable domain of TCR clone 55728 (TRAV21, TRAJ3)
CCFYSSASKIIF

SEQ ID NO: 111456 - protein, 16 aa, Homo sapiens
  CDR3 for beta chain variable domain of TCR clone 55728 (TRBV19, TRBJ2-1)
CASSKAGPSFYNEQFF

SEQ ID NO: 111457 - protein, 14 aa, Homo sapiens
  CDR3 for alpha chain variable domain of TCR clone 55729 (TRAV1-2, TRAJ16)
CAVNRFSDGQELLF

SEQ ID NO: 111458 - protein, 13 aa, Homo sapiens
  CDR3 for beta chain variable domain of TCR clone 55729 (TRBV20-1, TRBJ1-6)
CSAPLGVGSPLHF

SEQ ID NO: 111459 - protein, 16 aa, Homo sapiens
  CDR3 for alpha chain variable domain of TCR clone 55730 (TRAV3, TRAJ37)
CAVRVRGSGNTGKLIF

SEQ ID NO: 111460 - protein, 14 aa, Homo sapiens
  CDR3 for beta chain variable domain of TCR clone 55730 (TRBV7-2, TRBJ1-6)
CASSLQGANSPLHF

SEQ ID NO: 111461 - protein, 18 aa, Homo sapiens
  CDR3 for alpha chain variable domain of TCR clone 55731 (TRAV29/DV5, TRAJ53)
CSVLLCSKRGGSNYKLTF

SEQ ID NO: 111462 - protein, 15 aa, Homo sapiens
  CDR3 for beta chain variable domain of TCR clone 55731 (TRBV9, TRBJ1-6)
CASSVAGTGDSPLHF

SEQ ID NO: 111463 - protein, 14 aa, Homo sapiens
  CDR3 for alpha chain variable domain of TCR clone 55732 (TRAV1-2, TRAJ16)
CAVNRFSDGQKLLF

SEQ ID NO: 111464 - protein, 16 aa, Homo sapiens
  CDR3 for beta chain variable domain of TCR clone 55732 (TRBV7-2, TRBJ2-3)
CASSLVALYSTDTQYF

SEQ ID NO: 111465 - protein, 13 aa, Homo sapiens
  CDR3 for alpha chain variable domain of TCR clone 55733 (TRAV29/DV5, TRAJ48)
CAASLFGNEKLTL

SEQ ID NO: 111466 - protein, 15 aa, Homo sapiens
  CDR3 for beta chain variable domain of TCR clone 55733 (TRBV20-1, TRBJ1-1)
CSAKPGQKMNTEAFF

SEQ ID NO: 111467 - protein, 15 aa, Homo sapiens
  CDR3 for alpha chain variable domain of TCR clone 55734 (TRAV2, TRAJ9)
CAVEDRGTGGFKTIF

SEQ ID NO: 111468 - protein, 15 aa, Homo sapiens
  CDR3 for beta chain variable domain of TCR clone 55734 (TRBV7-9, TRBJ1-6)
CASSSPGRGNSPLHF

SEQ ID NO: 111469 - protein, 14 aa, Homo sapiens
  CDR3 for alpha chain variable domain of TCR clone 55735 (TRAV26-1, TRAJ45)
CIEVKGGGADGLTF

SEQ ID NO: 111470 - protein, 13 aa, Homo sapiens
  CDR3 for beta chain variable domain of TCR clone 55735 (TRBV7-6, TRBJ1-2)
CASSLVADYGYTF

SEQ ID NO: 111471 - protein, 14 aa, Homo sapiens
  CDR3 for alpha chain variable domain of TCR clone 55736 (TRAV8-4, TRAJ44)
CAVRINTGGFKTIF

SEQ ID NO: 111472 - protein, 15 aa, Homo sapiens
  CDR3 for beta chain variable domain of TCR clone 55736 (TRBV10-2, TRBJ2-6)
CASSEQGTGANVLTF

SEQ ID NO: 111473 - protein, 16 aa, Homo sapiens
  CDR3 for alpha chain variable domain of TCR clone 55737 (TRAV17, TRAJ36)
CATVSLNWGNQPLLWD

SEQ ID NO: 111474 - protein, 13 aa, Homo sapiens
  CDR3 for beta chain variable domain of TCR clone 55737 (TRBV4-1, TRBJ1-1)
CASSQLGTGEAFF

SEQ ID NO: 111475 - protein, 16 aa, Homo sapiens
  CDR3 for alpha chain variable domain of TCR clone 55738 (TRAV4, TRAJ22)
CLVGDLYSGSVRQLTF

SEQ ID NO: 111476 - protein, 16 aa, Homo sapiens
  CDR3 for beta chain variable domain of TCR clone 55738 (TRBV7-9, TRBJ2-1)
CASSDVAGGSYNEQFF

SEQ ID NO: 111477 - protein, 16 aa, Homo sapiens
  CDR3 for alpha chain variable domain of TCR clone 55739 (TRAV4, TRAJ22)
CLVGDLYSGSARQLTF

SEQ ID NO: 111478 - protein, 16 aa, Homo sapiens
  CDR3 for beta chain variable domain of TCR clone 55739 (TRBV7-9, TRBJ2-1)
RASSDVAGGSYNEQFF

SEQ ID NO: 111479 - protein, 14 aa, Homo sapiens
  CDR3 for alpha chain variable domain of TCR clone 55740 (TRAV29/DV5, TRAJ36)
CAARRKTGANNLFF

SEQ ID NO: 111480 - protein, 13 aa, Homo sapiens
  CDR3 for beta chain variable domain of TCR clone 55740 (TRBV7-3, TRBJ2-1)
CASSPVAYNEQFF

SEQ ID NO: 111481 - protein, 12 aa, Homo sapiens
  CDR3 for alpha chain variable domain of TCR clone 55741 (TRAV27, TRAJ35)
CAGADFGNVLHC

SEQ ID NO: 111482 - protein, 13 aa, Homo sapiens
  CDR3 for beta chain variable domain of TCR clone 55741 (TRBV19, TRBJ1-5)
CASSMRGYQPQHF

SEQ ID NO: 111483 - protein, 11 aa, Homo sapiens
  CDR3 for alpha chain variable domain of TCR clone 55742 (TRAV3, TRAJ32)
CAVREGIMVVL

SEQ ID NO: 111484 - protein, 13 aa, Homo sapiens
  CDR3 for beta chain variable domain of TCR clone 55742 (TRBV2, TRBJ1-1)
CASSEGGNTKAFF

SEQ ID NO: 111485 - protein, 13 aa, Homo sapiens
  CDR3 for alpha chain variable domain of TCR clone 55743 (TRAV8-3, TRAJ28)
CAVGAVGSYQLTF

SEQ ID NO: 111486 - protein, 14 aa, Homo sapiens
  CDR3 for beta chain variable domain of TCR clone 55743 (TRBV7-9, TRBJ2-1)
CASSPRDSLYEQFF

SEQ ID NO: 111487 - protein, 14 aa, Homo sapiens
  CDR3 for alpha chain variable domain of TCR clone 55744 (TRAV12-2, TRAJ17)
CAVLFKAAGNKLTF

SEQ ID NO: 111488 - protein, 13 aa, Homo sapiens
  CDR3 for beta chain variable domain of TCR clone 55744 (TRBV27, TRBJ1-4)
CASSLMGDEKLFF

SEQ ID NO: 111489 - protein, 13 aa, Homo sapiens
  CDR3 for alpha chain variable domain of TCR clone 55745 (TRAV27, TRAJ49)
CAPRPYTGNQFYF

SEQ ID NO: 111490 - protein, 16 aa, Homo sapiens
  CDR3 for beta chain variable domain of TCR clone 55745 (TRBV4-1, TRBJ1-2)
CASSQDAGQALYGYTF

SEQ ID NO: 111491 - protein, 12 aa, Homo sapiens
  CDR3 for alpha chain variable domain of TCR clone 55746 (TRAV12-3, TRAJ17)
CAMTLTGNKLTF

SEQ ID NO: 111492 - protein, 13 aa, Homo sapiens
  CDR3 for beta chain variable domain of TCR clone 55746 (TRBV10-3, TRBJ1-2)
CAISERDSYGDTF

SEQ ID NO: 111493 - protein, 16 aa, Homo sapiens
  CDR3 for alpha chain variable domain of TCR clone 55747 (TRAV12-3, TRAJ53)
CAMSSGSGGSNYKLTF

SEQ ID NO: 111494 - protein, 16 aa, Homo sapiens
  CDR3 for beta chain variable domain of TCR clone 55747 (TRBV4-2, TRBJ1-1)
CASSQAGFGMNTEAFF

SEQ ID NO: 111495 - protein, 14 aa, Homo sapiens
  CDR3 for alpha chain variable domain of TCR clone 55748 (TRAV17, TRAJ32)
CATDPGGATNKLIF

SEQ ID NO: 111496 - protein, 14 aa, Homo sapiens
  CDR3 for beta chain variable domain of TCR clone 55748 (TRBV2, TRBJ1-5)
CASSENGGGQPQHF

SEQ ID NO: 111497 - protein, 16 aa, Homo sapiens
  CDR3 for alpha chain variable domain of TCR clone 55749 (TRAV3, TRAJ21)
CAVRDLERGNFNKFYF

SEQ ID NO: 111498 - protein, 13 aa, Homo sapiens
  CDR3 for beta chain variable domain of TCR clone 55749 (TRBV27, TRBJ2-7)
CASSLTTGYEQYF

SEQ ID NO: 111499 - protein, 15 aa, Homo sapiens
  CDR3 for alpha chain variable domain of TCR clone 55750 (TRAV26-1, TRAJ29)
CIVRVEGSGNTPLVF

SEQ ID NO: 111500 - protein, 13 aa, Homo sapiens
  CDR3 for beta chain variable domain of TCR clone 55750 (TRBV20-1, TRBJ1-1)
CSAPLGGGTEAFF

SEQ ID NO: 111501 - protein, 11 aa, Homo sapiens
  CDR3 for alpha chain variable domain of TCR clone 55751 (TRAV21, TRAJ11)
YAVNGYSTLTF

SEQ ID NO: 111502 - protein, 13 aa, Homo sapiens
  CDR3 for beta chain variable domain of TCR clone 55751 (TRBV19, TRBJ2-7)
CASSIDRTYEQYF

SEQ ID NO: 111503 - protein, 15 aa, Homo sapiens
  CDR3 for alpha chain variable domain of TCR clone 55752 (TRAV8-4, TRAJ3)
CALTGENLVQQCFQD

SEQ ID NO: 111504 - protein, 16 aa, Homo sapiens
  CDR3 for beta chain variable domain of TCR clone 55752 (TRBV4-2, TRBJ1-1)
CASSQAGFGMNTEAFF

SEQ ID NO: 111505 - protein, 14 aa, Homo sapiens
  CDR3 for alpha chain variable domain of TCR clone 55753 (TRAV23/DV6, TRAJ27)
CAASRDTNAGKSTF

SEQ ID NO: 111506 - protein, 13 aa, Homo sapiens
  CDR3 for beta chain variable domain of TCR clone 55753 (TRBV20-1, TRBJ1-5)
CSASGRGNQPQHF

SEQ ID NO: 111507 - protein, 16 aa, Homo sapiens
  CDR3 for alpha chain variable domain of TCR clone 55754 (TRAV30, TRAJ24)
CGTEIVDADSWGKFQF

SEQ ID NO: 111508 - protein, 16 aa, Homo sapiens
  CDR3 for beta chain variable domain of TCR clone 55754 (TRBV7-9, TRBJ2-1)
CASSPVLASGTVEQFF

SEQ ID NO: 111509 - protein, 16 aa, Homo sapiens
  CDR3 for alpha chain variable domain of TCR clone 55755 (TRAV3, TRAJ37)
CAVGPHGSGNTGKLIF

SEQ ID NO: 111510 - protein, 14 aa, Homo sapiens
  CDR3 for beta chain variable domain of TCR clone 55755 (TRBV25-1, TRBJ1-1)
CASTHLGGNTEAFF

SEQ ID NO: 111511 - protein, 14 aa, Homo sapiens
  CDR3 for alpha chain variable domain of TCR clone 55756 (TRAV12-3, TRAJ22)
CAMSFFGSARQLTF

SEQ ID NO: 111512 - protein, 11 aa, Homo sapiens
  CDR3 for beta chain variable domain of TCR clone 55756 (TRBV12-4, TRBJ2-2)
CASSSAGELFF

SEQ ID NO: 111513 - protein, 14 aa, Homo sapiens
  CDR3 for alpha chain variable domain of TCR clone 55757 (TRAV12-2, TRAJ13)
CAVKKTGGYQKVTF

SEQ ID NO: 111514 - protein, 14 aa, Homo sapiens
  CDR3 for beta chain variable domain of TCR clone 55757 (TRBV12-4, TRBJ1-1)
CASSLGTGGTEAFF

SEQ ID NO: 111515 - protein, 23 aa, Homo sapiens
  CDR3 for alpha chain variable domain of TCR clone 55758 (TRAV26-1, TRAJ38)
CIADNAGNNHIQNPDPAVCQLRD

SEQ ID NO: 111516 - protein, 13 aa, Homo sapiens
  CDR3 for beta chain variable domain of TCR clone 55758 (TRBV20-1, TRBJ1-1)
CSARGGGNTEAFF

SEQ ID NO: 111517 - protein, 12 aa, Homo sapiens
  CDR3 for alpha chain variable domain of TCR clone 55759 (TRAV10, TRAJ6)
CVVSEGSYIPTF

SEQ ID NO: 111518 - protein, 15 aa, Homo sapiens
  CDR3 for beta chain variable domain of TCR clone 55759 (TRBV4-3, TRBJ2-7)
CASSQGGRGIYEQHF

SEQ ID NO: 111519 - protein, 12 aa, Homo sapiens
  CDR3 for alpha chain variable domain of TCR clone 55760 (TRAV13-1, TRAJ49)
CAASIRSKQFYF

SEQ ID NO: 111520 - protein, 14 aa, Homo sapiens
  CDR3 for beta chain variable domain of TCR clone 55760 (TRBV7-2, TRBJ2-1)
CASSPGLAGNEQFF

SEQ ID NO: 111521 - protein, 15 aa, Homo sapiens
  CDR3 for alpha chain variable domain of TCR clone 55761 (TRAV4, TRAJ39)
CLVGPNNNAGSMLTF

SEQ ID NO: 111522 - protein, 16 aa, Homo sapiens
  CDR3 for beta chain variable domain of TCR clone 55761 (TRBV13, TRBJ2-2)
CASSPRTGEHTGELFF

SEQ ID NO: 111523 - protein, 17 aa, Homo sapiens
  CDR3 for alpha chain variable domain of TCR clone 55762 (TRAV3, TRAJ42)
CAVRDRDYGGSQGNLIF

SEQ ID NO: 111524 - protein, 15 aa, Homo sapiens
  CDR3 for beta chain variable domain of TCR clone 55762 (TRBV6-6, TRBJ2-7)
CASSYSYGGSHEQYF

SEQ ID NO: 111525 - protein, 14 aa, Homo sapiens
  CDR3 for alpha chain variable domain of TCR clone 55763 (TRAV1-2, TRAJ8)
CAVREDTGFQKLVF

SEQ ID NO: 111526 - protein, 16 aa, Homo sapiens
  CDR3 for beta chain variable domain of TCR clone 55763 (TRBV4-2, TRBJ1-1)
CASSQAGFGMNTEAFF

SEQ ID NO: 111527 - protein, 14 aa, Homo sapiens
  CDR3 for alpha chain variable domain of TCR clone 55764 (TRAV1-2, TRAJ16)
CAVNRFSDGQKRLF

SEQ ID NO: 111528 - protein, 16 aa, Homo sapiens
  CDR3 for beta chain variable domain of TCR clone 55764 (TRBV12-5, TRBJ2-5)
CASGPRTSGNQETQYF

SEQ ID NO: 111529 - protein, 13 aa, Homo sapiens
  CDR3 for alpha chain variable domain of TCR clone 55765 (TRAV12-1, TRAJ40)
CVVPTSGTYKYIF

SEQ ID NO: 111530 - protein, 18 aa, Homo sapiens
  CDR3 for beta chain variable domain of TCR clone 55765 (TRBV7-6, TRBJ2-1)
GASSPRTSGMSSYNEQFF

SEQ ID NO: 111531 - protein, 12 aa, Homo sapiens
  CDR3 for alpha chain variable domain of TCR clone 55766 (TRAV13-1, TRAJ21)
CAAKEGFNKFYF

SEQ ID NO: 111532 - protein, 15 aa, Homo sapiens
  CDR3 for beta chain variable domain of TCR clone 55766 (TRBV27, TRBJ1-6)
CASSFDRGLGSPLHF

SEQ ID NO: 111533 - protein, 12 aa, Homo sapiens
  CDR3 for alpha chain variable domain of TCR clone 55767 (TRAV35, TRAJ12)
CAGMDSSYKLIF

SEQ ID NO: 111534 - protein, 14 aa, Homo sapiens
  CDR3 for beta chain variable domain of TCR clone 55767 (TRBV28, TRBJ2-5)
CASSLYRGKETQYF

SEQ ID NO: 111535 - protein, 19 aa, Homo sapiens
  CDR3 for alpha chain variable domain of TCR clone 55768 (TRAV40, )
CLPIPDIQNPDPAVYQLRD

SEQ ID NO: 111536 - protein, 15 aa, Homo sapiens
  CDR3 for beta chain variable domain of TCR clone 55768 (TRBV2, TRBJ1-2)
CASSEIGGANYGDTF

SEQ ID NO: 111537 - protein, 13 aa, Homo sapiens
  CDR3 for alpha chain variable domain of TCR clone 55769 (TRAV8-6, TRAJ49)
CAVITSTGNRFYF

SEQ ID NO: 111538 - protein, 15 aa, Homo sapiens
  CDR3 for beta chain variable domain of TCR clone 55769 (TRBV9, TRBJ1-6)
CASSVAGTGDSPLHF

SEQ ID NO: 111539 - protein, 12 aa, Homo sapiens
  CDR3 for alpha chain variable domain of TCR clone 55770 (TRAV22, TRAJ36)
CAVGTGANNLFF

SEQ ID NO: 111540 - protein, 17 aa, Homo sapiens
  CDR3 for beta chain variable domain of TCR clone 55770 (TRBV15, TRBJ1-4)
CAISRYGTGDPNEKLFF

SEQ ID NO: 111541 - protein, 13 aa, Homo sapiens
  CDR3 for alpha chain variable domain of TCR clone 55771 (TRAV21, TRAJ20)
CAVGLWVDYKLSF

SEQ ID NO: 111542 - protein, 13 aa, Homo sapiens
  CDR3 for beta chain variable domain of TCR clone 55771 (TRBV6-1, TRBJ1-1)
CASSRQGNTEAFF

SEQ ID NO: 111543 - protein, 14 aa, Homo sapiens
  CDR3 for alpha chain variable domain of TCR clone 55772 (TRAV1-2, TRAJ29)
CAVRELTSATPLVS

SEQ ID NO: 111544 - protein, 14 aa, Homo sapiens
  CDR3 for beta chain variable domain of TCR clone 55772 (TRBV3-1, TRBJ2-5)
CASSQGPDQETQYF

SEQ ID NO: 111545 - protein, 13 aa, Homo sapiens
  CDR3 for alpha chain variable domain of TCR clone 55773 (TRAV20, TRAJ31)
CAVQAIGGASLMF

SEQ ID NO: 111546 - protein, 14 aa, Homo sapiens
  CDR3 for beta chain variable domain of TCR clone 55773 (TRBV2, TRBJ1-5)
CASSGTVSNQPQHF

SEQ ID NO: 111547 - protein, 15 aa, Homo sapiens
  CDR3 for alpha chain variable domain of TCR clone 55774 (TRAV12-3, TRAJ6)
CAMSATSGGSYIPTF

SEQ ID NO: 111548 - protein, 13 aa, Homo sapiens
  CDR3 for beta chain variable domain of TCR clone 55774 (TRBV7-9, TRBJ1-2)
CASSLKQNYGYAF

SEQ ID NO: 111549 - protein, 13 aa, Homo sapiens
  CDR3 for alpha chain variable domain of TCR clone 55775 (TRAV12-1, TRAJ40)
CVVPTSGTYKYIF

SEQ ID NO: 111550 - protein, 18 aa, Homo sapiens
  CDR3 for beta chain variable domain of TCR clone 55775 (TRBV7-6, TRBJ2-1)
CARSPRTSGMSSYNEQFF

SEQ ID NO: 111551 - protein, 12 aa, Homo sapiens
  CDR3 for alpha chain variable domain of TCR clone 55776 (TRAV35, TRAJ31)
CAAASNNARLML

SEQ ID NO: 111552 - protein, 14 aa, Homo sapiens
  CDR3 for beta chain variable domain of TCR clone 55776 (TRBV2, TRBJ2-2)
CASSLFGGNGELFF

SEQ ID NO: 111553 - protein, 12 aa, Homo sapiens
  CDR3 for alpha chain variable domain of TCR clone 55777 (TRAV12-1, TRAJ34)
CVVAGATDKLIF

SEQ ID NO: 111554 - protein, 12 aa, Homo sapiens
  CDR3 for beta chain variable domain of TCR clone 55777 (TRBV7-9, TRBJ1-1)
CASGLVRGEAFF

SEQ ID NO: 111555 - protein, 11 aa, Homo sapiens
  CDR3 for alpha chain variable domain of TCR clone 55778 (TRAV2, TRAJ13)
CASGGYQKVTF

SEQ ID NO: 111556 - protein, 15 aa, Homo sapiens
  CDR3 for beta chain variable domain of TCR clone 55778 (TRBV28, TRBJ1-3)
CASSMGWASGNTMYF

SEQ ID NO: 111557 - protein, 13 aa, Homo sapiens
  CDR3 for alpha chain variable domain of TCR clone 55779 (TRAV3, TRAJ8)
CAVRFTGFQKLVS

SEQ ID NO: 111558 - protein, 12 aa, Homo sapiens
  CDR3 for beta chain variable domain of TCR clone 55779 (TRBV2, TRBJ1-2)
CASSGQTYGYTF

SEQ ID NO: 111559 - protein, 14 aa, Homo sapiens
  CDR3 for alpha chain variable domain of TCR clone 55780 (TRAV1-2, TRAJ8)
CAVREDTGFQKLVL

SEQ ID NO: 111560 - protein, 12 aa, Homo sapiens
  CDR3 for beta chain variable domain of TCR clone 55780 (TRBV11-2, TRBJ2-2)
CASSLGGGELFF

SEQ ID NO: 111561 - protein, 13 aa, Homo sapiens
  CDR3 for alpha chain variable domain of TCR clone 55781 (TRAV12-2, TRAJ10)
CAVPTGGGTKLTF

SEQ ID NO: 111562 - protein, 11 aa, Homo sapiens
  CDR3 for beta chain variable domain of TCR clone 55781 (TRBV6-1, TRBJ2-1)
CASISSNEQFF

SEQ ID NO: 111563 - protein, 12 aa, Homo sapiens
  CDR3 for alpha chain variable domain of TCR clone 55782 (TRAV38-1, TRAJ32)
CAPLGATNELIF

SEQ ID NO: 111564 - protein, 14 aa, Homo sapiens
  CDR3 for beta chain variable domain of TCR clone 55782 (TRBV29-1, TRBJ2-5)
CSVETSGSGETQYF

SEQ ID NO: 111565 - protein, 18 aa, Homo sapiens
  CDR3 for alpha chain variable domain of TCR clone 55783 (TRAV12-3, TRAJ52)
CAMSRTNAGGTSYGKLTF

SEQ ID NO: 111566 - protein, 14 aa, Homo sapiens
  CDR3 for beta chain variable domain of TCR clone 55783 (TRBV12-4, TRBJ1-1)
CASSLGTGGTEAFF

SEQ ID NO: 111567 - protein, 13 aa, Homo sapiens
  CDR3 for alpha chain variable domain of TCR clone 55784 (TRAV38-1, TRAJ57)
CALVQGGSEKLVF

SEQ ID NO: 111568 - protein, 17 aa, Homo sapiens
  CDR3 for beta chain variable domain of TCR clone 55784 (TRBV29-1, TRBJ2-3)
CSVDSPPRGARTDTQYL

SEQ ID NO: 111569 - protein, 15 aa, Homo sapiens
  CDR3 for alpha chain variable domain of TCR clone 55785 (TRAV8-3, TRAJ11)
CAVGLLNSGYSTLTF

SEQ ID NO: 111570 - protein, 15 aa, Homo sapiens
  CDR3 for beta chain variable domain of TCR clone 55785 (TRBV13, TRBJ2-1)
CASSLLAGLNNEQFF

SEQ ID NO: 111571 - protein, 14 aa, Homo sapiens
  CDR3 for alpha chain variable domain of TCR clone 55786 (TRAV9-2, TRAJ39)
CALYIYNAGNMLTF

SEQ ID NO: 111572 - protein, 13 aa, Homo sapiens
  CDR3 for beta chain variable domain of TCR clone 55786 (TRBV4-1, TRBJ2-1)
CASSQAGGDEQFF

SEQ ID NO: 111573 - protein, 14 aa, Homo sapiens
  CDR3 for alpha chain variable domain of TCR clone 55787 (TRAV9-2, TRAJ48)
CALSSNFGNGKLTF

SEQ ID NO: 111574 - protein, 13 aa, Homo sapiens
  CDR3 for beta chain variable domain of TCR clone 55787 (TRBV7-2, TRBJ2-4)
CASSREHANIQYF

SEQ ID NO: 111575 - protein, 14 aa, Homo sapiens
  CDR3 for alpha chain variable domain of TCR clone 55788 (TRAV12-1, TRAJ12)
CLVTRMDSSYKLIF

SEQ ID NO: 111576 - protein, 13 aa, Homo sapiens
  CDR3 for beta chain variable domain of TCR clone 55788 (TRBV20-1, TRBJ1-1)
CSARGGGNTEAFF

SEQ ID NO: 111577 - protein, 12 aa, Homo sapiens
  CDR3 for alpha chain variable domain of TCR clone 55789 (TRAV12-1, TRAJ6)
CVVSERGYIPTF

SEQ ID NO: 111578 - protein, 21 aa, Homo sapiens
  CDR3 for beta chain variable domain of TCR clone 55789 (TRBV7-3, TRBJ2-1)
GGTQPCISVPAAYGLAGAQFF

SEQ ID NO: 111579 - protein, 10 aa, Homo sapiens
  CDR3 for alpha chain variable domain of TCR clone 55790 (TRAV36/DV7, TRAJ48)
CAVGNEELTF

SEQ ID NO: 111580 - protein, 15 aa, Homo sapiens
  CDR3 for beta chain variable domain of TCR clone 55790 (TRBV7-9, TRBJ1-1)
CASSLLEQGGTEAFF

SEQ ID NO: 111581 - protein, 14 aa, Homo sapiens
  CDR3 for alpha chain variable domain of TCR clone 55791 (TRAV1-2, TRAJ16)
CAVNRFSDGQKLLF

SEQ ID NO: 111582 - protein, 12 aa, Homo sapiens
  CDR3 for beta chain variable domain of TCR clone 55791 (TRBV5-1, TRBJ2-7)
CASSPTTYEQYF

SEQ ID NO: 111583 - protein, 16 aa, Homo sapiens
  CDR3 for alpha chain variable domain of TCR clone 55792 (TRAV20, TRAJ22)
CAVQASSSGSARQLTF

SEQ ID NO: 111584 - protein, 13 aa, Homo sapiens
  CDR3 for beta chain variable domain of TCR clone 55792 (TRBV7-2, TRBJ2-5)
CASSQTSVDTQYF

SEQ ID NO: 111585 - protein, 11 aa, Homo sapiens
  CDR3 for alpha chain variable domain of TCR clone 55793 (TRAV22, TRAJ20)
CAPLHDYKLSF

SEQ ID NO: 111586 - protein, 16 aa, Homo sapiens
  CDR3 for beta chain variable domain of TCR clone 55793 (TRBV11-2, TRBJ2-2)
CASSLRTGNLIGELFF

SEQ ID NO: 111587 - protein, 10 aa, Homo sapiens
  CDR3 for alpha chain variable domain of TCR clone 55794 (TRAV23/DV6, TRAJ57)
CAASSTLSQG

SEQ ID NO: 111588 - protein, 14 aa, Homo sapiens
  CDR3 for beta chain variable domain of TCR clone 55794 (TRBV25-1, TRBJ1-1)
CASTHLGGNTEAFI

SEQ ID NO: 111589 - protein, 14 aa, Homo sapiens
  CDR3 for alpha chain variable domain of TCR clone 55795 (TRAV1-2, TRAJ16)
CAVNRFSDGQKLLF

SEQ ID NO: 111590 - protein, 16 aa, Homo sapiens
  CDR3 for beta chain variable domain of TCR clone 55795 (TRBV27, TRBJ1-5)
CASSLVDREDNQPQHF

SEQ ID NO: 111591 - protein, 15 aa, Homo sapiens
  CDR3 for alpha chain variable domain of TCR clone 55796 (TRAV17, TRAJ57)
CATGPSQGGSEKLVF

SEQ ID NO: 111592 - protein, 15 aa, Homo sapiens
  CDR3 for beta chain variable domain of TCR clone 55796 (TRBV7-2, TRBJ2-2)
CASRRPGQNTGELFF

SEQ ID NO: 111593 - protein, 13 aa, Homo sapiens
  CDR3 for alpha chain variable domain of TCR clone 55797 (TRAV17, TRAJ5)
CALRGTGRRALTF

SEQ ID NO: 111594 - protein, 12 aa, Homo sapiens
  CDR3 for beta chain variable domain of TCR clone 55797 (TRBV6-1, TRBJ2-5)
CASSEGRETQYF

SEQ ID NO: 111595 - protein, 14 aa, Homo sapiens
  CDR3 for alpha chain variable domain of TCR clone 55798 (TRAV23/DV6, TRAJ8)
CAASRATGFQKLVF

SEQ ID NO: 111596 - protein, 15 aa, Homo sapiens
  CDR3 for beta chain variable domain of TCR clone 55798 (TRBV28, TRBJ2-3)
CASSPDRQGANTQYF

SEQ ID NO: 111597 - protein, 14 aa, Homo sapiens
  CDR3 for alpha chain variable domain of TCR clone 55799 (TRAV1-2, TRAJ16)
CAVNRFSDGQKLLF

SEQ ID NO: 111598 - protein, 15 aa, Homo sapiens
  CDR3 for beta chain variable domain of TCR clone 55799 (TRBV9, TRBJ1-6)
CASSVAGTGDSPHHF

SEQ ID NO: 111599 - protein, 12 aa, Homo sapiens
  CDR3 for alpha chain variable domain of TCR clone 55800 (TRAV13-2, TRAJ23)
CAERHRGGKLIF

SEQ ID NO: 111600 - protein, 15 aa, Homo sapiens
  CDR3 for beta chain variable domain of TCR clone 55800 (TRBV19, TRBJ2-4)
CASSDGGGTKNIQYF

SEQ ID NO: 111601 - protein, 12 aa, Homo sapiens
  CDR3 for alpha chain variable domain of TCR clone 55801 (TRAV13-1, TRAJ26)
QVQDNYGQNFVF

SEQ ID NO: 111602 - protein, 13 aa, Homo sapiens
  CDR3 for beta chain variable domain of TCR clone 55801 (TRBV7-9, TRBJ2-7)
CASSAGLRYEQYF

SEQ ID NO: 111603 - protein, 16 aa, Homo sapiens
  CDR3 for alpha chain variable domain of TCR clone 55802 (TRAV3, TRAJ18)
CTVRDGRGSTLGRLYF

SEQ ID NO: 111604 - protein, 15 aa, Homo sapiens
  CDR3 for beta chain variable domain of TCR clone 55802 (TRBV7-9, TRBJ1-6)
CASSSPGRGNSPLHF

SEQ ID NO: 111605 - protein, 21 aa, Homo sapiens
  CDR3 for alpha chain variable domain of TCR clone 55803 (TRAV12-1, TRAJ37)
CVVNGGLWQHRQTNLWARDNF

SEQ ID NO: 111606 - protein, 12 aa, Homo sapiens
  CDR3 for beta chain variable domain of TCR clone 55803 (TRBV20-1, TRBJ1-2)
CSAPGFNYGYAF

SEQ ID NO: 111607 - protein, 11 aa, Homo sapiens
  CDR3 for alpha chain variable domain of TCR clone 55804 (TRAV3, TRAJ17)
PRGAAGNKLTF

SEQ ID NO: 111608 - protein, 16 aa, Homo sapiens
  CDR3 for beta chain variable domain of TCR clone 55804 (TRBV7-6, TRBJ2-1)
CAISAPGPSSYNEQFF

SEQ ID NO: 111609 - protein, 14 aa, Homo sapiens
  CDR3 for alpha chain variable domain of TCR clone 55805 (TRAV12-2, TRAJ17)
CAVLFKAAGNKLTF

SEQ ID NO: 111610 - protein, 15 aa, Homo sapiens
  CDR3 for beta chain variable domain of TCR clone 55805 (TRBV2, TRBJ2-7)
CASSEGLARSYEQYF

SEQ ID NO: 111611 - protein, 19 aa, Homo sapiens
  CDR3 for alpha chain variable domain of TCR clone 55806 (TRAV1-2, TRAJ26)
CLLPLCCERPDNYGQNFVF

SEQ ID NO: 111612 - protein, 17 aa, Homo sapiens
  CDR3 for beta chain variable domain of TCR clone 55806 (TRBV13, TRBJ2-3)
CASSLSRVAGGRDTQYF

SEQ ID NO: 111613 - protein, 12 aa, Homo sapiens
  CDR3 for alpha chain variable domain of TCR clone 55807 (TRAV27, TRAJ9)
CAGESGGFKTIF

SEQ ID NO: 111614 - protein, 14 aa, Homo sapiens
  CDR3 for beta chain variable domain of TCR clone 55807 (TRBV18, TRBJ2-5)
CASSPGVSQETQYF

SEQ ID NO: 111615 - protein, 12 aa, Homo sapiens
  CDR3 for alpha chain variable domain of TCR clone 55808 (TRAV1-1, TRAJ23)
CAVTNQEGKLIF

SEQ ID NO: 111616 - protein, 13 aa, Homo sapiens
  CDR3 for beta chain variable domain of TCR clone 55808 (TRBV15, TRBJ1-6)
CATSGGLNSPLHF

SEQ ID NO: 111617 - protein, 15 aa, Homo sapiens
  CDR3 for alpha chain variable domain of TCR clone 55809 (TRAV26-1, TRAJ44)
CIVRANTGTASKLTF

SEQ ID NO: 111618 - protein, 15 aa, Homo sapiens
  CDR3 for beta chain variable domain of TCR clone 55809 (TRBV7-7, TRBJ2-1)
CQQLASGTSYNEQFF

SEQ ID NO: 111619 - protein, 14 aa, Homo sapiens
  CDR3 for alpha chain variable domain of TCR clone 55810 (TRAV26-1, TRAJ34)
CIVRVAYNTDKLIF

SEQ ID NO: 111620 - protein, 16 aa, Homo sapiens
  CDR3 for beta chain variable domain of TCR clone 55810 (TRBV12-5, TRBJ2-5)
CASGPRTSGNQETQYF

SEQ ID NO: 111621 - protein, 13 aa, Homo sapiens
  CDR3 for alpha chain variable domain of TCR clone 55811 (TRAV8-3, TRAJ40)
CAVGAQYLRNLQI

SEQ ID NO: 111622 - protein, 18 aa, Homo sapiens
  CDR3 for beta chain variable domain of TCR clone 55811 (TRBV18, TRBJ1-3)
CASSPRGGAGPSGNTIYF

SEQ ID NO: 111623 - protein, 16 aa, Homo sapiens
  CDR3 for alpha chain variable domain of TCR clone 55812 (TRAV4, TRAJ22)
CLVGDLYSGSARQLTF

SEQ ID NO: 111624 - protein, 16 aa, Homo sapiens
  CDR3 for beta chain variable domain of TCR clone 55812 (TRBV7-9, TRBJ2-1)
CASSDVAGGSYDEQFF

SEQ ID NO: 111625 - protein, 11 aa, Homo sapiens
  CDR3 for alpha chain variable domain of TCR clone 55813 (TRAV13-1, TRAJ20)
CATKRRLQAQL

SEQ ID NO: 111626 - protein, 13 aa, Homo sapiens
  CDR3 for beta chain variable domain of TCR clone 55813 (TRBV12-4, TRBJ1-1)
CASSLIGDTEAFF

SEQ ID NO: 111627 - protein, 13 aa, Homo sapiens
  CDR3 for alpha chain variable domain of TCR clone 55814 (TRAV27, TRAJ42)
CAGARGSQGNLIF

SEQ ID NO: 111628 - protein, 17 aa, Homo sapiens
  CDR3 for beta chain variable domain of TCR clone 55814 (TRBV13, TRBJ2-3)
CASSPSRVAGGRNTQYF

SEQ ID NO: 111629 - protein, 17 aa, Homo sapiens
  CDR3 for alpha chain variable domain of TCR clone 55815 (TRAV3, TRAJ42)
CAVRDRDYGESQGNLIF

SEQ ID NO: 111630 - protein, 15 aa, Homo sapiens
  CDR3 for beta chain variable domain of TCR clone 55815 (TRBV6-6, TRBJ2-7)
CASSYSYGGSYEQYF

SEQ ID NO: 111631 - protein, 17 aa, Homo sapiens
  CDR3 for alpha chain variable domain of TCR clone 55816 (TRAV4, TRAJ18)
CLVGERSVGSTLGRLYF

SEQ ID NO: 111632 - protein, 14 aa, Homo sapiens
  CDR3 for beta chain variable domain of TCR clone 55816 (TRBV5-1, TRBJ2-7)
CASSRGESLYEQYF

SEQ ID NO: 111633 - protein, 14 aa, Homo sapiens
  CDR3 for alpha chain variable domain of TCR clone 55817 (TRAV38-1, TRAJ29)
CAFITASGNTPLVF

SEQ ID NO: 111634 - protein, 14 aa, Homo sapiens
  CDR3 for beta chain variable domain of TCR clone 55817 (TRBV18, TRBJ2-7)
CASSPRGGAYEQYF

SEQ ID NO: 111635 - protein, 17 aa, Homo sapiens
  CDR3 for alpha chain variable domain of TCR clone 55818 (TRAV3, TRAJ28)
CAVREAYSVAGSYQLTF

SEQ ID NO: 111636 - protein, 17 aa, Homo sapiens
  CDR3 for beta chain variable domain of TCR clone 55818 (TRBV20-1, TRBJ2-1)
CSASSSGLAGSYNEQFF

SEQ ID NO: 111637 - protein, 16 aa, Homo sapiens
  CDR3 for alpha chain variable domain of TCR clone 55819 (TRAV23/DV6, )
CADIQNPDPAVYQLSD

SEQ ID NO: 111638 - protein, 13 aa, Homo sapiens
  CDR3 for beta chain variable domain of TCR clone 55819 (TRBV28, TRBJ2-7)
CASRSSGVYEQYF

SEQ ID NO: 111639 - protein, 14 aa, Homo sapiens
  CDR3 for alpha chain variable domain of TCR clone 55820 (TRAV17, TRAJ53)
CATDAGGSNYKMTF

SEQ ID NO: 111640 - protein, 16 aa, Homo sapiens
  CDR3 for beta chain variable domain of TCR clone 55820 (TRBV4-1, TRBJ1-1)
CASSQDAGMGNTEAFF

SEQ ID NO: 111641 - protein, 14 aa, Homo sapiens
  CDR3 for alpha chain variable domain of TCR clone 55821 (TRAV1-2, TRAJ16)
CAVNRFSDGQKLLF

SEQ ID NO: 111642 - protein, 14 aa, Homo sapiens
  CDR3 for beta chain variable domain of TCR clone 55821 (TRBV2, TRBJ2-1)
CASSEARQGVSEFF

SEQ ID NO: 111643 - protein, 14 aa, Homo sapiens
  CDR3 for alpha chain variable domain of TCR clone 55822 (TRAV17, TRAJ57)
CATDPQGGSEKLVF

SEQ ID NO: 111644 - protein, 13 aa, Homo sapiens
  CDR3 for beta chain variable domain of TCR clone 55822 (TRBV19, TRBJ2-7)
CTSSPRQSYEQYF

SEQ ID NO: 111645 - protein, 13 aa, Homo sapiens
  CDR3 for alpha chain variable domain of TCR clone 55823 (TRAV12-1, TRAJ16)
CVVNGPDGQKLLF

SEQ ID NO: 111646 - protein, 15 aa, Homo sapiens
  CDR3 for beta chain variable domain of TCR clone 55823 (TRBV6-3, TRBJ2-7)
CTSSSPGTVFYEQYF

SEQ ID NO: 111647 - protein, 15 aa, Homo sapiens
  CDR3 for alpha chain variable domain of TCR clone 55824 (TRAV12-3, TRAJ27)
CAMRAYNTNAGKSTI

SEQ ID NO: 111648 - protein, 13 aa, Homo sapiens
  CDR3 for beta chain variable domain of TCR clone 55824 (TRBV11-2, TRBJ2-5)
CASSRGPSETQYF

SEQ ID NO: 111649 - protein, 15 aa, Homo sapiens
  CDR3 for alpha chain variable domain of TCR clone 55825 (TRAV8-4, TRAJ47)
CAVSDPEEYGNKLVF

SEQ ID NO: 111650 - protein, 15 aa, Homo sapiens
  CDR3 for beta chain variable domain of TCR clone 55825 (TRBV11-2, TRBJ2-1)
CASRLGPDSYNEQFF

SEQ ID NO: 111651 - protein, 14 aa, Homo sapiens
  CDR3 for alpha chain variable domain of TCR clone 55826 (TRAV26-2, TRAJ44)
CIGTYTGTASKLTF

SEQ ID NO: 111652 - protein, 15 aa, Homo sapiens
  CDR3 for beta chain variable domain of TCR clone 55826 (TRBV27, TRBJ2-5)
CASSLYPRGGETQYF

SEQ ID NO: 111653 - protein, 16 aa, Homo sapiens
  CDR3 for alpha chain variable domain of TCR clone 55827 (TRAV27, TRAJ52)
CAGAGAGGTSYGKLTF

SEQ ID NO: 111654 - protein, 17 aa, Homo sapiens
  CDR3 for beta chain variable domain of TCR clone 55827 (TRBV24-1, TRBJ2-3)
CATSDLPSGEDTETQYF

SEQ ID NO: 111655 - protein, 13 aa, Homo sapiens
  CDR3 for alpha chain variable domain of TCR clone 55828 (TRAV22, TRAJ30)
CAVGGGRDDKIIF

SEQ ID NO: 111656 - protein, 11 aa, Homo sapiens
  CDR3 for beta chain variable domain of TCR clone 55828 (TRBV6-3, TRBJ2-3)
CATGQADTQYF

SEQ ID NO: 111657 - protein, 14 aa, Homo sapiens
  CDR3 for alpha chain variable domain of TCR clone 55829 (TRAV21, TRAJ35)
CAVMPIGFGNVLHC

SEQ ID NO: 111658 - protein, 14 aa, Homo sapiens
  CDR3 for beta chain variable domain of TCR clone 55829 (TRBV7-9, TRBJ2-7)
CASSISGRSSTSGR

SEQ ID NO: 111659 - protein, 13 aa, Homo sapiens
  CDR3 for alpha chain variable domain of TCR clone 55830 (TRAV38-2/DV8, TRAJ53)
CASGGGSNYKLTF

SEQ ID NO: 111660 - protein, 16 aa, Homo sapiens
  CDR3 for beta chain variable domain of TCR clone 55830 (TRBV28, TRBJ1-5)
CASRFRGAVQNQHQHF

SEQ ID NO: 111661 - protein, 11 aa, Homo sapiens
  CDR3 for alpha chain variable domain of TCR clone 55831 (TRAV21, TRAJ11)
CAVNGYSTLTF

SEQ ID NO: 111662 - protein, 11 aa, Homo sapiens
  CDR3 for beta chain variable domain of TCR clone 55831 (TRBV19, TRBJ1-1)
CARSIGSEAFF

SEQ ID NO: 111663 - protein, 14 aa, Homo sapiens
  CDR3 for alpha chain variable domain of TCR clone 55832 (TRAV13-1, TRAJ3)
CAAEGYSSASKIIF

SEQ ID NO: 111664 - protein, 17 aa, Homo sapiens
  CDR3 for beta chain variable domain of TCR clone 55832 (TRBV19, TRBJ2-6)
CASSTGQVFSGANVLTF

SEQ ID NO: 111665 - protein, 13 aa, Homo sapiens
  CDR3 for alpha chain variable domain of TCR clone 55833 (TRAV13-1, TRAJ43)
CAASMNNNNDMRF

SEQ ID NO: 111666 - protein, 13 aa, Homo sapiens
  CDR3 for beta chain variable domain of TCR clone 55833 (TRBV29-1, TRBJ2-1)
CSVEGGASDEQFF

SEQ ID NO: 111667 - protein, 14 aa, Homo sapiens
  CDR3 for alpha chain variable domain of TCR clone 55834 (TRAV16, TRAJ37)
CALDISGNTGKLIF

SEQ ID NO: 111668 - protein, 15 aa, Homo sapiens
  CDR3 for beta chain variable domain of TCR clone 55834 (TRBV5-1, TRBJ1-1)
CASSLGEGENTEAFF

SEQ ID NO: 111669 - protein, 18 aa, Homo sapiens
  CDR3 for alpha chain variable domain of TCR clone 55835 (TRAV13-1, TRAJ52)
CAAKNPNAGGTSYGKLTF

SEQ ID NO: 111670 - protein, 16 aa, Homo sapiens
  CDR3 for beta chain variable domain of TCR clone 55835 (TRBV13, TRBJ2-2)
CASSPRTGEHTGELFF

SEQ ID NO: 111671 - protein, 18 aa, Homo sapiens
  CDR3 for alpha chain variable domain of TCR clone 55836 (TRAV12-3, TRAJ52)
CAMSVGGAGGTSYGKLTS

SEQ ID NO: 111672 - protein, 15 aa, Homo sapiens
  CDR3 for beta chain variable domain of TCR clone 55836 (TRBV27, TRBJ1-6)
CASSFDRGLGSPLHF

SEQ ID NO: 111673 - protein, 15 aa, Homo sapiens
  CDR3 for alpha chain variable domain of TCR clone 55837 (TRAV8-4, TRAJ48)
CAVSAAYLGNEKLTF

SEQ ID NO: 111674 - protein, 12 aa, Homo sapiens
  CDR3 for beta chain variable domain of TCR clone 55837 (TRBV3-1, TRBJ2-5)
CASSQRGETQYF

SEQ ID NO: 111675 - protein, 14 aa, Homo sapiens
  CDR3 for alpha chain variable domain of TCR clone 55838 (TRAV13-1, TRAJ44)
CAAKATGTASKLTF

SEQ ID NO: 111676 - protein, 13 aa, Homo sapiens
  CDR3 for beta chain variable domain of TCR clone 55838 (TRBV12-5, TRBJ2-3)
CASGDRQSDTQYF

SEQ ID NO: 111677 - protein, 13 aa, Homo sapiens
  CDR3 for alpha chain variable domain of TCR clone 55839 (TRAV12-2, TRAJ18)
CAVRSSTLGRLYF

SEQ ID NO: 111678 - protein, 20 aa, Homo sapiens
  CDR3 for beta chain variable domain of TCR clone 55839 (TRBV7-8, TRBJ2-2)
CASSHLFPGPTIHITGELFF

SEQ ID NO: 111679 - protein, 14 aa, Homo sapiens
  CDR3 for alpha chain variable domain of TCR clone 55840 (TRAV16, TRAJ42)
CALLAGGSQGNLIF

SEQ ID NO: 111680 - protein, 14 aa, Homo sapiens
  CDR3 for beta chain variable domain of TCR clone 55840 (TRBV12-5, TRBJ2-5)
CASGSRTHQETQYF

SEQ ID NO: 111681 - protein, 18 aa, Homo sapiens
  CDR3 for alpha chain variable domain of TCR clone 55841 (TRAV21, TRAJ52)
CAVRPSPAGGTSYGKLTF

SEQ ID NO: 111682 - protein, 13 aa, Homo sapiens
  CDR3 for beta chain variable domain of TCR clone 55841 (TRBV28, TRBJ2-5)
CASSFAGGETQYF

SEQ ID NO: 111683 - protein, 17 aa, Homo sapiens
  CDR3 for alpha chain variable domain of TCR clone 55842 (TRAV13-1, TRAJ31)
CAPRDRLMFGDGTQLVV

SEQ ID NO: 111684 - protein, 13 aa, Homo sapiens
  CDR3 for beta chain variable domain of TCR clone 55842 (TRBV10-3, TRBJ2-7)
CASKLAVNYEQYF

SEQ ID NO: 111685 - protein, 12 aa, Homo sapiens
  CDR3 for alpha chain variable domain of TCR clone 55843 (TRAV21, TRAJ29)
CCEDSGNTPLVF

SEQ ID NO: 111686 - protein, 15 aa, Homo sapiens
  CDR3 for beta chain variable domain of TCR clone 55843 (TRBV10-3, TRBJ2-1)
CAIRNGTSGHNEQFF

SEQ ID NO: 111687 - protein, 13 aa, Homo sapiens
  CDR3 for alpha chain variable domain of TCR clone 55844 (TRAV21, TRAJ36)
CVVIKTGANNLFF

SEQ ID NO: 111688 - protein, 13 aa, Homo sapiens
  CDR3 for beta chain variable domain of TCR clone 55844 (TRBV29-1, TRBJ2-3)
CSATRGGRDTQYF

SEQ ID NO: 111689 - protein, 13 aa, Homo sapiens
  CDR3 for alpha chain variable domain of TCR clone 55845 (TRAV8-4, TRAJ9)
CAVSETGGFKTIF

SEQ ID NO: 111690 - protein, 13 aa, Homo sapiens
  CDR3 for beta chain variable domain of TCR clone 55845 (TRBV7-9, TRBJ1-2)
CASSLKQNYGYTF

SEQ ID NO: 111691 - protein, 13 aa, Homo sapiens
  CDR3 for alpha chain variable domain of TCR clone 55846 (TRAV12-3, TRAJ33)
CAMSVNSNYQLIW

SEQ ID NO: 111692 - protein, 11 aa, Homo sapiens
  CDR3 for beta chain variable domain of TCR clone 55846 (TRBV29-1, TRBJ2-5)
CSEDRTGTQYF

SEQ ID NO: 111693 - protein, 15 aa, Homo sapiens
  CDR3 for alpha chain variable domain of TCR clone 55847 (TRAV12-2, TRAJ43)
CAFDMRFGAGTRLTV

SEQ ID NO: 111694 - protein, 18 aa, Homo sapiens
  CDR3 for beta chain variable domain of TCR clone 55847 (TRBV20-1, TRBJ2-3)
CRASGLAGGPGTTDTQYF

SEQ ID NO: 111695 - protein, 12 aa, Homo sapiens
  CDR3 for alpha chain variable domain of TCR clone 55848 (TRAV12-1, TRAJ40)
CVVYSGTYQYIF

SEQ ID NO: 111696 - protein, 18 aa, Homo sapiens
  CDR3 for beta chain variable domain of TCR clone 55848 (TRBV11-2, TRBJ2-3)
CASSLGGASRGAPNTQYF

SEQ ID NO: 111697 - protein, 12 aa, Homo sapiens
  CDR3 for alpha chain variable domain of TCR clone 55849 (TRAV16, TRAJ21)
CALLGNFNKFYF

SEQ ID NO: 111698 - protein, 15 aa, Homo sapiens
  CDR3 for beta chain variable domain of TCR clone 55849 (TRBV3-1, TRBJ2-2)
CASSQAVSETGELFF

SEQ ID NO: 111699 - protein, 12 aa, Homo sapiens
  CDR3 for alpha chain variable domain of TCR clone 55850 (TRAV1-1, TRAJ39)
CAVPVVGNMLTF

SEQ ID NO: 111700 - protein, 16 aa, Homo sapiens
  CDR3 for beta chain variable domain of TCR clone 55850 (TRBV19, TRBJ2-2)
CASSFPGQGLAGELFF

SEQ ID NO: 111701 - protein, 14 aa, Homo sapiens
  CDR3 for alpha chain variable domain of TCR clone 55851 (TRAV1-2, TRAJ8)
CAVRKDTGFQKLVF

SEQ ID NO: 111702 - protein, 13 aa, Homo sapiens
  CDR3 for beta chain variable domain of TCR clone 55851 (TRBV24-1, TRBJ2-2)
CATSDWSTGELFF

SEQ ID NO: 111703 - protein, 15 aa, Homo sapiens
  CDR3 for alpha chain variable domain of TCR clone 55852 (TRAV9-2, TRAJ8)
CALRGLNTGFQKLVF

SEQ ID NO: 111704 - protein, 16 aa, Homo sapiens
  CDR3 for beta chain variable domain of TCR clone 55852 (TRBV12-4, TRBJ1-5)
CASSRPVGGSNQPQHF

SEQ ID NO: 111705 - protein, 14 aa, Homo sapiens
  CDR3 for alpha chain variable domain of TCR clone 55853 (TRAV8-3, TRAJ9)
CAGVYNTGGFKTIF

SEQ ID NO: 111706 - protein, 14 aa, Homo sapiens
  CDR3 for beta chain variable domain of TCR clone 55853 (TRBV7-3, TRBJ2-2)
CASSSGGYTGELFF

SEQ ID NO: 111707 - protein, 14 aa, Homo sapiens
  CDR3 for alpha chain variable domain of TCR clone 55854 (TRAV1-2, TRAJ16)
CAVNRFSGGQKLLF

SEQ ID NO: 111708 - protein, 15 aa, Homo sapiens
  CDR3 for beta chain variable domain of TCR clone 55854 (TRBV2, TRBJ2-1)
CASSEEREGDNEQFF

SEQ ID NO: 111709 - protein, 11 aa, Homo sapiens
  CDR3 for alpha chain variable domain of TCR clone 55855 (TRAV1-2, TRAJ31)
CAVDNNARLMF

SEQ ID NO: 111710 - protein, 15 aa, Homo sapiens
  CDR3 for beta chain variable domain of TCR clone 55855 (TRBV28, TRBJ2-1)
CASSIIAGGRSEQFF

SEQ ID NO: 111711 - protein, 18 aa, Homo sapiens
  CDR3 for alpha chain variable domain of TCR clone 55856 (TRAV26-1, TRAJ23)
CIVRVGLEVWNQGGKLIF

SEQ ID NO: 111712 - protein, 16 aa, Homo sapiens
  CDR3 for beta chain variable domain of TCR clone 55856 (TRBV12-4, TRBJ2-5)
CASSFFVRGRQETQDF

SEQ ID NO: 111713 - protein, 12 aa, Homo sapiens
  CDR3 for alpha chain variable domain of TCR clone 55857 (TRAV35, TRAJ49)
CAGWNTGNQFYF

SEQ ID NO: 111714 - protein, 16 aa, Homo sapiens
  CDR3 for beta chain variable domain of TCR clone 55857 (TRBV5-1, TRBJ2-2)
CANSLWDTTNTGELFF

SEQ ID NO: 111715 - protein, 16 aa, Homo sapiens
  CDR3 for alpha chain variable domain of TCR clone 55858 (TRAV23/DV6, TRAJ9)
CAESIGGNTGGFKTIF

SEQ ID NO: 111716 - protein, 14 aa, Homo sapiens
  CDR3 for beta chain variable domain of TCR clone 55858 (TRBV9, TRBJ2-7)
CASSVGVGSYEQYF

SEQ ID NO: 111717 - protein, 15 aa, Homo sapiens
  CDR3 for alpha chain variable domain of TCR clone 55859 (TRAV26-1, TRAJ17)
CIVRVVKAAGNKLTF

SEQ ID NO: 111718 - protein, 16 aa, Homo sapiens
  CDR3 for beta chain variable domain of TCR clone 55859 (TRBV7-9, TRBJ2-1)
RASSLVSGPSYNEQFF

SEQ ID NO: 111719 - protein, 13 aa, Homo sapiens
  CDR3 for alpha chain variable domain of TCR clone 55860 (TRAV12-1, TRAJ33)
CGDAPDSNYQLIW

SEQ ID NO: 111720 - protein, 15 aa, Homo sapiens
  CDR3 for beta chain variable domain of TCR clone 55860 (TRBV27, TRBJ2-1)
CASSNGGGSANEQFF

SEQ ID NO: 111721 - protein, 16 aa, Homo sapiens
  CDR3 for alpha chain variable domain of TCR clone 55861 (TRAV35, TRAJ28)
CAGQKYSGAGSYKLTF

SEQ ID NO: 111722 - protein, 13 aa, Homo sapiens
  CDR3 for beta chain variable domain of TCR clone 55861 (TRBV19, TRBJ1-2)
CASSQGQVYGYTF

SEQ ID NO: 111723 - protein, 11 aa, Homo sapiens
  CDR3 for alpha chain variable domain of TCR clone 55862 (TRAV17, TRAJ31)
CATDRTDRLMF

SEQ ID NO: 111724 - protein, 14 aa, Homo sapiens
  CDR3 for beta chain variable domain of TCR clone 55862 (TRBV4-2, TRBJ2-3)
CASSQERGTDTQYF

SEQ ID NO: 111725 - protein, 14 aa, Homo sapiens
  CDR3 for alpha chain variable domain of TCR clone 55863 (TRAV8-4, TRAJ9)
CAVRVNTGGFKTIF

SEQ ID NO: 111726 - protein, 14 aa, Homo sapiens
  CDR3 for beta chain variable domain of TCR clone 55863 (TRBV5-1, TRBJ1-1)
CASSLQGASTEAFF

SEQ ID NO: 111727 - protein, 16 aa, Homo sapiens
  CDR3 for alpha chain variable domain of TCR clone 55864 (TRAV23/DV6, TRAJ9)
CAASIGGNTGGFKTIF

SEQ ID NO: 111728 - protein, 17 aa, Homo sapiens
  CDR3 for beta chain variable domain of TCR clone 55864 (TRBV25-1, TRBJ2-7)
CASSDARVVFSSYEQYF

SEQ ID NO: 111729 - protein, 17 aa, Homo sapiens
  CDR3 for alpha chain variable domain of TCR clone 55865 (TRAV36/DV7, TRAJ52)
CAVAQRAGGTSYGKLTF

SEQ ID NO: 111730 - protein, 15 aa, Homo sapiens
  CDR3 for beta chain variable domain of TCR clone 55865 (TRBV6-5, TRBJ1-2)
FASSYSQAFNYGYTF

SEQ ID NO: 111731 - protein, 15 aa, Homo sapiens
  CDR3 for alpha chain variable domain of TCR clone 55866 (TRAV3, TRAJ37)
CCERKGSGNTGKLIF

SEQ ID NO: 111732 - protein, 13 aa, Homo sapiens
  CDR3 for beta chain variable domain of TCR clone 55866 (TRBV14, TRBJ2-7)
CASSQDRRYEQYF

SEQ ID NO: 111733 - protein, 13 aa, Homo sapiens
  CDR3 for alpha chain variable domain of TCR clone 55867 (TRAV20, TRAJ37)
CAGCSSNTGKLVF

SEQ ID NO: 111734 - protein, 21 aa, Homo sapiens
  CDR3 for beta chain variable domain of TCR clone 55867 (TRBV4-2, TRBJ2-3)
PCSQKTRPCISVPAAPDTQYF

SEQ ID NO: 111735 - protein, 12 aa, Homo sapiens
  CDR3 for alpha chain variable domain of TCR clone 55868 (TRAV3, TRAJ26)
CAVRDYGKNFVF

SEQ ID NO: 111736 - protein, 16 aa, Homo sapiens
  CDR3 for beta chain variable domain of TCR clone 55868 (TRBV11-2, TRBJ1-2)
CASSPSGREANYGYTF

SEQ ID NO: 111737 - protein, 14 aa, Homo sapiens
  CDR3 for alpha chain variable domain of TCR clone 55869 (TRAV12-2, TRAJ17)
CAVLFKAAGNKLTF

SEQ ID NO: 111738 - protein, 14 aa, Homo sapiens
  CDR3 for beta chain variable domain of TCR clone 55869 (TRBV28, TRBJ1-5)
CASIPYGLEQPQHF

SEQ ID NO: 111739 - protein, 14 aa, Homo sapiens
  CDR3 for alpha chain variable domain of TCR clone 55870 (TRAV26-1, TRAJ45)
CIEVTGGGADGLTF

SEQ ID NO: 111740 - protein, 13 aa, Homo sapiens
  CDR3 for beta chain variable domain of TCR clone 55870 (TRBV7-6, TRBJ1-2)
CASSLVADYSYTF

SEQ ID NO: 111741 - protein, 12 aa, Homo sapiens
  CDR3 for alpha chain variable domain of TCR clone 55871 (TRAV38-2/DV8, TRAJ49)
CAYRSSGNQFYF

SEQ ID NO: 111742 - protein, 13 aa, Homo sapiens
  CDR3 for beta chain variable domain of TCR clone 55871 (TRBV10-3, TRBJ1-4)
CAIRGGTDEKLFF

SEQ ID NO: 111743 - protein, 15 aa, Homo sapiens
  CDR3 for alpha chain variable domain of TCR clone 55872 (TRAV3, TRAJ5)
CAVRDLDTGRRALTF

SEQ ID NO: 111744 - protein, 14 aa, Homo sapiens
  CDR3 for beta chain variable domain of TCR clone 55872 (TRBV25-1, TRBJ1-4)
CASSGGGQPDKLFF

SEQ ID NO: 111745 - protein, 15 aa, Homo sapiens
  CDR3 for alpha chain variable domain of TCR clone 55873 (TRAV26-1, TRAJ44)
CIARVPFSTASKLTF

SEQ ID NO: 111746 - protein, 16 aa, Homo sapiens
  CDR3 for beta chain variable domain of TCR clone 55873 (TRBV4-1, TRBJ2-1)
CASSQEAGQGSDEQFF

SEQ ID NO: 111747 - protein, 12 aa, Homo sapiens
  CDR3 for alpha chain variable domain of TCR clone 55874 (TRAV17, TRAJ30)
CATDARDDKIIF

SEQ ID NO: 111748 - protein, 14 aa, Homo sapiens
  CDR3 for beta chain variable domain of TCR clone 55874 (TRBV19, TRBJ2-5)
CASSMTGQQETQYF

SEQ ID NO: 111749 - protein, 14 aa, Homo sapiens
  CDR3 for alpha chain variable domain of TCR clone 55875 (TRAV12-1, TRAJ30)
CVVNIGGRDDKIIF

SEQ ID NO: 111750 - protein, 13 aa, Homo sapiens
  CDR3 for beta chain variable domain of TCR clone 55875 (TRBV2, TRBJ1-1)
CASSVLMNTEAFF

SEQ ID NO: 111751 - protein, 15 aa, Homo sapiens
  CDR3 for alpha chain variable domain of TCR clone 55876 (TRAV17, TRAJ57)
CATGPSQGGSEKLVF

SEQ ID NO: 111752 - protein, 17 aa, Homo sapiens
  CDR3 for beta chain variable domain of TCR clone 55876 (TRBV7-3, TRBJ2-3)
CASSLMKRMRGADTQYF

SEQ ID NO: 111753 - protein, 15 aa, Homo sapiens
  CDR3 for alpha chain variable domain of TCR clone 55877 (TRAV26-1, TRAJ3)
CIARSGYSSASKIIF

SEQ ID NO: 111754 - protein, 14 aa, Homo sapiens
  CDR3 for beta chain variable domain of TCR clone 55877 (TRBV13, TRBJ2-5)
CASYRRLAEETQYF

SEQ ID NO: 111755 - protein, 10 aa, Homo sapiens
  CDR3 for alpha chain variable domain of TCR clone 55878 (TRAV12-3, TRAJ49)
CAMNDDQFYF

SEQ ID NO: 111756 - protein, 13 aa, Homo sapiens
  CDR3 for beta chain variable domain of TCR clone 55878 (TRBV12-4, TRBJ1-1)
CACSPGTGFEAFF

SEQ ID NO: 111757 - protein, 16 aa, Homo sapiens
  CDR3 for alpha chain variable domain of TCR clone 55879 (TRAV21, TRAJ17)
CAVRPGEEAAGNKPTF

SEQ ID NO: 111758 - protein, 16 aa, Homo sapiens
  CDR3 for beta chain variable domain of TCR clone 55879 (TRBV2, TRBJ2-7)
CASSEPWTGPSYEQYF

SEQ ID NO: 111759 - protein, 12 aa, Homo sapiens
  CDR3 for alpha chain variable domain of TCR clone 55880 (TRAV3, TRAJ31)
CAVREGNARLMF

SEQ ID NO: 111760 - protein, 18 aa, Homo sapiens
  CDR3 for beta chain variable domain of TCR clone 55880 (TRBV7-2, TRBJ2-3)
CASSLKREGSGITDTQYF

SEQ ID NO: 111761 - protein, 15 aa, Homo sapiens
  CDR3 for alpha chain variable domain of TCR clone 55881 (TRAV35, TRAJ58)
CAGRRQETSGSRLTF

SEQ ID NO: 111762 - protein, 12 aa, Homo sapiens
  CDR3 for beta chain variable domain of TCR clone 55881 (TRBV12-4, TRBJ1-2)
CASSFIWLHLRF

SEQ ID NO: 111763 - protein, 15 aa, Homo sapiens
  CDR3 for alpha chain variable domain of TCR clone 55882 (TRAV12-3, TRAJ49)
CAMAATPNTGNQFYF

SEQ ID NO: 111764 - protein, 18 aa, Homo sapiens
  CDR3 for beta chain variable domain of TCR clone 55882 (TRBV4-1, TRBJ1-5)
CASSQDPRGRGLNQPQHF

SEQ ID NO: 111765 - protein, 16 aa, Homo sapiens
  CDR3 for alpha chain variable domain of TCR clone 55883 (TRAV3, TRAJ21)
RAVRDIERGNFNKFYF

SEQ ID NO: 111766 - protein, 16 aa, Homo sapiens
  CDR3 for beta chain variable domain of TCR clone 55883 (TRBV12-4, TRBJ1-5)
CASSRPVGGSNQPQHF

SEQ ID NO: 111767 - protein, 14 aa, Homo sapiens
  CDR3 for alpha chain variable domain of TCR clone 55884 (TRAV12-2, TRAJ53)
WAVKGGGSNYKLTF

SEQ ID NO: 111768 - protein, 14 aa, Homo sapiens
  CDR3 for beta chain variable domain of TCR clone 55884 (TRBV7-7, TRBJ2-2)
CATRQDSDTGELFF

SEQ ID NO: 111769 - protein, 14 aa, Homo sapiens
  CDR3 for alpha chain variable domain of TCR clone 55885 (TRAV13-2, TRAJ33)
CAGRDQDSNYQLIW

SEQ ID NO: 111770 - protein, 17 aa, Homo sapiens
  CDR3 for beta chain variable domain of TCR clone 55885 (TRBV7-8, TRBJ2-6)
CASSAGTGGAGANVLTF

SEQ ID NO: 111771 - protein, 17 aa, Homo sapiens
  CDR3 for alpha chain variable domain of TCR clone 55886 (TRAV3, TRAJ6)
CAVSRRTDTGGSYIPPF

SEQ ID NO: 111772 - protein, 18 aa, Homo sapiens
  CDR3 for beta chain variable domain of TCR clone 55886 (TRBV7-2, TRBJ2-3)
CASSLETSRGRKADTQYF

SEQ ID NO: 111773 - protein, 15 aa, Homo sapiens
  CDR3 for alpha chain variable domain of TCR clone 55887 (TRAV38-1, TRAJ54)
CAFNYLIQGAQKLVF

SEQ ID NO: 111774 - protein, 16 aa, Homo sapiens
  CDR3 for beta chain variable domain of TCR clone 55887 (TRBV12-4, TRBJ1-5)
CASSRPVGGSNQPQHF

SEQ ID NO: 111775 - protein, 15 aa, Homo sapiens
  CDR3 for alpha chain variable domain of TCR clone 55888 (TRAV12-1, TRAJ4)
CVVNPFSGGYNKLIF

SEQ ID NO: 111776 - protein, 16 aa, Homo sapiens
  CDR3 for beta chain variable domain of TCR clone 55888 (TRBV5-1, TRBJ1-1)
CASSKAGTEVGTEAFF

SEQ ID NO: 111777 - protein, 14 aa, Homo sapiens
  CDR3 for alpha chain variable domain of TCR clone 55889 (TRAV1-2, TRAJ16)
CAVNQFSDGQKLLF

SEQ ID NO: 111778 - protein, 19 aa, Homo sapiens
  CDR3 for beta chain variable domain of TCR clone 55889 (TRBV25-1, TRBJ2-2)
CAILVYRVDRGRKTGELFF

SEQ ID NO: 111779 - protein, 15 aa, Homo sapiens
  CDR3 for alpha chain variable domain of TCR clone 55890 (TRAV17, TRAJ57)
CATGPSQGGSERLVF

SEQ ID NO: 111780 - protein, 15 aa, Homo sapiens
  CDR3 for beta chain variable domain of TCR clone 55890 (TRBV25-1, TRBJ1-4)
CASSPGDSTNEKLFF

SEQ ID NO: 111781 - protein, 14 aa, Homo sapiens
  CDR3 for alpha chain variable domain of TCR clone 55891 (TRAV1-2, TRAJ8)
CAVREDTGFQKLVF

SEQ ID NO: 111782 - protein, 15 aa, Homo sapiens
  CDR3 for beta chain variable domain of TCR clone 55891 (TRBV6-1, TRBJ1-1)
CASSEAWGQNTEAFF

SEQ ID NO: 111783 - protein, 15 aa, Homo sapiens
  CDR3 for alpha chain variable domain of TCR clone 55892 (TRAV23/DV6, TRAJ22)
CAASSPSGSARQLTF

SEQ ID NO: 111784 - protein, 14 aa, Homo sapiens
  CDR3 for beta chain variable domain of TCR clone 55892 (TRBV7-2, TRBJ2-2)
CASSSDGHTGELFF

SEQ ID NO: 111785 - protein, 15 aa, Homo sapiens
  CDR3 for alpha chain variable domain of TCR clone 55893 (TRAV3, TRAJ5)
CAVRDRKTGRRALTF

SEQ ID NO: 111786 - protein, 19 aa, Homo sapiens
  CDR3 for beta chain variable domain of TCR clone 55893 (TRBV19, TRBJ2-2)
CASTRPGLAGGRVTGELFF

SEQ ID NO: 111787 - protein, 13 aa, Homo sapiens
  CDR3 for alpha chain variable domain of TCR clone 55894 (TRAV1-2, TRAJ9)
CAALNTGGFKTIF

SEQ ID NO: 111788 - protein, 15 aa, Homo sapiens
  CDR3 for beta chain variable domain of TCR clone 55894 (TRBV2, TRBJ2-1)
CASDIGLAGEGEQFF

SEQ ID NO: 111789 - protein, 15 aa, Homo sapiens
  CDR3 for alpha chain variable domain of TCR clone 55895 (TRAV12-2, TRAJ43)
CAFDMRFGAGPRLTV

SEQ ID NO: 111790 - protein, 18 aa, Homo sapiens
  CDR3 for beta chain variable domain of TCR clone 55895 (TRBV20-1, TRBJ2-3)
CSASGLAGGPGTTDTQYF

SEQ ID NO: 111791 - protein, 14 aa, Homo sapiens
  CDR3 for alpha chain variable domain of TCR clone 55896 (TRAV3, TRAJ21)
CAVESRANFNKFYF

SEQ ID NO: 111792 - protein, 18 aa, Homo sapiens
  CDR3 for beta chain variable domain of TCR clone 55896 (TRBV7-9, TRBJ2-1)
CASSLAVSGTSGRNEQFF

SEQ ID NO: 111793 - protein, 14 aa, Homo sapiens
  CDR3 for alpha chain variable domain of TCR clone 55897 (TRAV17, TRAJ32)
CATDPGGATNKLIF

SEQ ID NO: 111794 - protein, 14 aa, Homo sapiens
  CDR3 for beta chain variable domain of TCR clone 55897 (TRBV2, TRBJ1-5)
CASSENRGGRPQHF

SEQ ID NO: 111795 - protein, 13 aa, Homo sapiens
  CDR3 for alpha chain variable domain of TCR clone 55898 (TRAV26-1, TRAJ40)
CIVRVEGTYKYIF

SEQ ID NO: 111796 - protein, 15 aa, Homo sapiens
  CDR3 for beta chain variable domain of TCR clone 55898 (TRBV12-4, TRBJ1-2)
CASSLAHRDGQAYAF

SEQ ID NO: 111797 - protein, 16 aa, Homo sapiens
  CDR3 for alpha chain variable domain of TCR clone 55899 (TRAV12-3, TRAJ53)
CAMSPGSGGSNYKLTF

SEQ ID NO: 111798 - protein, 11 aa, Homo sapiens
  CDR3 for beta chain variable domain of TCR clone 55899 (TRBV29-1, TRBJ2-5)
CSEDRTGTQDF

SEQ ID NO: 111799 - protein, 14 aa, Homo sapiens
  CDR3 for alpha chain variable domain of TCR clone 55900 (TRAV8-2, TRAJ11)
CVVSEKTGYSTLTF

SEQ ID NO: 111800 - protein, 16 aa, Homo sapiens
  CDR3 for beta chain variable domain of TCR clone 55900 (TRBV28, TRBJ2-1)
CASSSPEYPRDNEQFF

SEQ ID NO: 111801 - protein, 13 aa, Homo sapiens
  CDR3 for alpha chain variable domain of TCR clone 55901 (TRAV8-4, TRAJ48)
CAVSLFGSEKLTF

SEQ ID NO: 111802 - protein, 15 aa, Homo sapiens
  CDR3 for beta chain variable domain of TCR clone 55901 (TRBV20-1, TRBJ2-7)
CSARKGLAESYEQYF

SEQ ID NO: 111803 - protein, 13 aa, Homo sapiens
  CDR3 for alpha chain variable domain of TCR clone 55902 (TRAV1-2, TRAJ9)
CAALNTGGFKTIF

SEQ ID NO: 111804 - protein, 12 aa, Homo sapiens
  CDR3 for beta chain variable domain of TCR clone 55902 (TRBV12-4, TRBJ2-7)
CASSLGGYEQYF

SEQ ID NO: 111805 - protein, 11 aa, Homo sapiens
  CDR3 for alpha chain variable domain of TCR clone 55903 (TRAV12-1, TRAJ30)
CVVNGQDKIIF

SEQ ID NO: 111806 - protein, 15 aa, Homo sapiens
  CDR3 for beta chain variable domain of TCR clone 55903 (TRBV19, TRBJ1-1)
CASSRGGALNTEAFF

SEQ ID NO: 111807 - protein, 13 aa, Homo sapiens
  CDR3 for alpha chain variable domain of TCR clone 55904 (TRAV35, TRAJ42)
CAGFPGSQGNLIF

SEQ ID NO: 111808 - protein, 13 aa, Homo sapiens
  CDR3 for beta chain variable domain of TCR clone 55904 (TRBV29-1, TRBJ2-1)
CSVEGWRVNEQFF

SEQ ID NO: 111809 - protein, 14 aa, Homo sapiens
  CDR3 for alpha chain variable domain of TCR clone 55905 (TRAV23/DV6, TRAJ37)
CAASTSSNTGKLIF

SEQ ID NO: 111810 - protein, 12 aa, Homo sapiens
  CDR3 for beta chain variable domain of TCR clone 55905 (TRBV7-9, TRBJ1-5)
CASSPQGQPQHF

SEQ ID NO: 111811 - protein, 14 aa, Homo sapiens
  CDR3 for alpha chain variable domain of TCR clone 55906 (TRAV23/DV6, TRAJ22)
CAAFSSGSARQLTF

SEQ ID NO: 111812 - protein, 15 aa, Homo sapiens
  CDR3 for beta chain variable domain of TCR clone 55906 (TRBV19, TRBJ2-1)
CASNAQGLAGREQFF

SEQ ID NO: 111813 - protein, 14 aa, Homo sapiens
  CDR3 for alpha chain variable domain of TCR clone 55907 (TRAV1-2, TRAJ8)
CAVREDTGFQKLVF

SEQ ID NO: 111814 - protein, 15 aa, Homo sapiens
  CDR3 for beta chain variable domain of TCR clone 55907 (TRBV15, TRBJ1-1)
CATSLQVGRNTEAFF

SEQ ID NO: 111815 - protein, 15 aa, Homo sapiens
  CDR3 for alpha chain variable domain of TCR clone 55908 (TRAV12-1, TRAJ41)
CVVNSRTGSGYAPNF

SEQ ID NO: 111816 - protein, 11 aa, Homo sapiens
  CDR3 for beta chain variable domain of TCR clone 55908 (TRBV6-4, TRBJ2-1)
CASSDSYAQFF

SEQ ID NO: 111817 - protein, 14 aa, Homo sapiens
  CDR3 for alpha chain variable domain of TCR clone 55909 (TRAV9-2, TRAJ22)
CALRGSGSARQLTF

SEQ ID NO: 111818 - protein, 12 aa, Homo sapiens
  CDR3 for beta chain variable domain of TCR clone 55909 (TRBV24-1, TRBJ2-2)
CATSDPGLTGLQ

SEQ ID NO: 111819 - protein, 17 aa, Homo sapiens
  CDR3 for alpha chain variable domain of TCR clone 55910 (TRAV3, TRAJ6)
CAVRDGPRAGGSYIPTF

SEQ ID NO: 111820 - protein, 15 aa, Homo sapiens
  CDR3 for beta chain variable domain of TCR clone 55910 (TRBV6-5, TRBJ2-1)
CASSYDAGAGNEQFF

SEQ ID NO: 111821 - protein, 16 aa, Homo sapiens
  CDR3 for alpha chain variable domain of TCR clone 55911 (TRAV4, TRAJ22)
CLVGDLYSGSARQLTF

SEQ ID NO: 111822 - protein, 16 aa, Homo sapiens
  CDR3 for beta chain variable domain of TCR clone 55911 (TRBV7-9, TRBJ2-1)
CASSDVAGGSYHEQFF

SEQ ID NO: 111823 - protein, 15 aa, Homo sapiens
  CDR3 for alpha chain variable domain of TCR clone 55912 (TRAV29/DV5, TRAJ24)
CAASGATDSWGKFQF

SEQ ID NO: 111824 - protein, 12 aa, Homo sapiens
  CDR3 for beta chain variable domain of TCR clone 55912 (TRBV12-4, TRBJ2-1)
CASSPGRNEQFF

SEQ ID NO: 111825 - protein, 13 aa, Homo sapiens
  CDR3 for alpha chain variable domain of TCR clone 55913 (TRAV8-4, TRAJ9)
CAVSETGGFKTIF

SEQ ID NO: 111826 - protein, 14 aa, Homo sapiens
  CDR3 for beta chain variable domain of TCR clone 55913 (TRBV13, TRBJ2-5)
CASSLERVEETQYF

SEQ ID NO: 111827 - protein, 12 aa, Homo sapiens
  CDR3 for alpha chain variable domain of TCR clone 55914 (TRAV26-1, TRAJ26)
CIVYNYGQNFVF

SEQ ID NO: 111828 - protein, 14 aa, Homo sapiens
  CDR3 for beta chain variable domain of TCR clone 55914 (TRBV12-5, TRBJ2-5)
CASGSRTHQETQYF

SEQ ID NO: 111829 - protein, 14 aa, Homo sapiens
  CDR3 for alpha chain variable domain of TCR clone 55915 (TRAV1-2, TRAJ16)
CAVNRFSDGQKLLF

SEQ ID NO: 111830 - protein, 17 aa, Homo sapiens
  CDR3 for beta chain variable domain of TCR clone 55915 (TRBV7-2, TRBJ2-7)
CASSFETSGYTSSTSGR

SEQ ID NO: 111831 - protein, 14 aa, Homo sapiens
  CDR3 for alpha chain variable domain of TCR clone 55916 (TRAV13-1, TRAJ44)
CAAKATGTASKLTF

SEQ ID NO: 111832 - protein, 17 aa, Homo sapiens
  CDR3 for beta chain variable domain of TCR clone 55916 (TRBV7-3, TRBJ2-3)
CASSLMKRMRRADTQYF

SEQ ID NO: 111833 - protein, 13 aa, Homo sapiens
  CDR3 for alpha chain variable domain of TCR clone 55917 (TRAV30, TRAJ6)
CGFIEGGSYIPTF

SEQ ID NO: 111834 - protein, 13 aa, Homo sapiens
  CDR3 for beta chain variable domain of TCR clone 55917 (TRBV5-4, TRBJ2-5)
CASSPVSQETQYF

SEQ ID NO: 111835 - protein, 14 aa, Homo sapiens
  CDR3 for alpha chain variable domain of TCR clone 55918 (TRAV12-1, TRAJ22)
RVVTTSGSARQLTF

SEQ ID NO: 111836 - protein, 16 aa, Homo sapiens
  CDR3 for beta chain variable domain of TCR clone 55918 (TRBV6-6, TRBJ2-1)
CASSLLSDSSYNEQFF

SEQ ID NO: 111837 - protein, 16 aa, Homo sapiens
  CDR3 for alpha chain variable domain of TCR clone 55919 (TRAV26-2, TRAJ37)
CILRDFGSGNAGKLIF

SEQ ID NO: 111838 - protein, 15 aa, Homo sapiens
  CDR3 for beta chain variable domain of TCR clone 55919 (TRBV6-5, TRBJ2-7)
CASRSLAVSSYEQYF

SEQ ID NO: 111839 - protein, 12 aa, Homo sapiens
  CDR3 for alpha chain variable domain of TCR clone 55920 (TRAV3, TRAJ39)
CAVIEWSDMLTF

SEQ ID NO: 111840 - protein, 14 aa, Homo sapiens
  CDR3 for beta chain variable domain of TCR clone 55920 (TRBV7-8, TRBJ2-3)
CASSFPDGQDTQYF

SEQ ID NO: 111841 - protein, 14 aa, Homo sapiens
  CDR3 for alpha chain variable domain of TCR clone 55921 (TRAV2, TRAJ9)
CAVEDRSGGFKTIF

SEQ ID NO: 111842 - protein, 14 aa, Homo sapiens
  CDR3 for beta chain variable domain of TCR clone 55921 (TRBV7-9, TRBJ2-7)
CAGSPSGGQNEQYF

SEQ ID NO: 111843 - protein, 14 aa, Homo sapiens
  CDR3 for alpha chain variable domain of TCR clone 55922 (TRAV13-1, TRAJ35)
CAASKGGFGNVLHC

SEQ ID NO: 111844 - protein, 14 aa, Homo sapiens
  CDR3 for beta chain variable domain of TCR clone 55922 (TRBV19, TRBJ2-1)
CASPTFVLSGEQFF

SEQ ID NO: 111845 - protein, 12 aa, Homo sapiens
  CDR3 for alpha chain variable domain of TCR clone 55923 (TRAV36/DV7, TRAJ54)
CAVVRGAQKLAF

SEQ ID NO: 111846 - protein, 14 aa, Homo sapiens
  CDR3 for beta chain variable domain of TCR clone 55923 (TRBV7-3, TRBJ1-1)
CASSLKGGNTEAFS

SEQ ID NO: 111847 - protein, 15 aa, Homo sapiens
  CDR3 for alpha chain variable domain of TCR clone 55924 (TRAV8-4, TRAJ48)
CAVSAAYFGNEELTF

SEQ ID NO: 111848 - protein, 12 aa, Homo sapiens
  CDR3 for beta chain variable domain of TCR clone 55924 (TRBV3-1, TRBJ2-5)
CASSQRGETQYF

SEQ ID NO: 111849 - protein, 14 aa, Homo sapiens
  CDR3 for alpha chain variable domain of TCR clone 55925 (TRAV12-1, TRAJ27)
CGGHIRTNAGKSTF

SEQ ID NO: 111850 - protein, 15 aa, Homo sapiens
  CDR3 for beta chain variable domain of TCR clone 55925 (TRBV19, TRBJ1-1)
CASTSGQIQNTEAFF

SEQ ID NO: 111851 - protein, 11 aa, Homo sapiens
  CDR3 for alpha chain variable domain of TCR clone 55926 (TRAV8-1, TRAJ8)
CAMTGFQKLEF

SEQ ID NO: 111852 - protein, 14 aa, Homo sapiens
  CDR3 for beta chain variable domain of TCR clone 55926 (TRBV5-4, TRBJ1-2)
CASTRQTGNYGYTF

SEQ ID NO: 111853 - protein, 12 aa, Homo sapiens
  CDR3 for alpha chain variable domain of TCR clone 55927 (TRAV1-1, TRAJ8)
CAGGTGFQKLVF

SEQ ID NO: 111854 - protein, 15 aa, Homo sapiens
  CDR3 for beta chain variable domain of TCR clone 55927 (TRBV6-3, TRBJ2-7)
CASSSPGTVFYEQCF

SEQ ID NO: 111855 - protein, 13 aa, Homo sapiens
  CDR3 for alpha chain variable domain of TCR clone 55928 (TRAV35, TRAJ42)
CAGFPGSQGNLIS

SEQ ID NO: 111856 - protein, 14 aa, Homo sapiens
  CDR3 for beta chain variable domain of TCR clone 55928 (TRBV4-1, TRBJ2-2)
CASSQAVNTGELFF

SEQ ID NO: 111857 - protein, 11 aa, Homo sapiens
  CDR3 for alpha chain variable domain of TCR clone 55929 (TRAV12-3, TRAJ43)
CAMSVSNDMRF

SEQ ID NO: 111858 - protein, 17 aa, Homo sapiens
  CDR3 for beta chain variable domain of TCR clone 55929 (TRBV20-1, TRBJ2-1)
CSASSSGLAGYYNEQFF

SEQ ID NO: 111859 - protein, 14 aa, Homo sapiens
  CDR3 for alpha chain variable domain of TCR clone 55930 (TRAV34, TRAJ22)
CGADTSGSARQLTF

SEQ ID NO: 111860 - protein, 16 aa, Homo sapiens
  CDR3 for beta chain variable domain of TCR clone 55930 (TRBV12-4, TRBJ1-5)
CASSRPVGGSNQPQHF

SEQ ID NO: 111861 - protein, 14 aa, Homo sapiens
  CDR3 for alpha chain variable domain of TCR clone 55931 (TRAV17, TRAJ16)
CATADFSDGQELLF

SEQ ID NO: 111862 - protein, 12 aa, Homo sapiens
  CDR3 for beta chain variable domain of TCR clone 55931 (TRBV24-1, TRBJ1-1)
CATLYPDTEAFF

SEQ ID NO: 111863 - protein, 16 aa, Homo sapiens
  CDR3 for alpha chain variable domain of TCR clone 55932 (TRAV3, TRAJ6)
CAARDGMGRRKLHTYI

SEQ ID NO: 111864 - protein, 15 aa, Homo sapiens
  CDR3 for beta chain variable domain of TCR clone 55932 (TRBV5-1, TRBJ2-7)
CASSLGDFTTYEQYF

SEQ ID NO: 111865 - protein, 13 aa, Homo sapiens
  CDR3 for alpha chain variable domain of TCR clone 55933 (TRAV12-3, TRAJ40)
CAMSARGTYKYIF

SEQ ID NO: 111866 - protein, 16 aa, Homo sapiens
  CDR3 for beta chain variable domain of TCR clone 55933 (TRBV20-1, TRBJ2-3)
CSGDAGLAGGQDTQYF

SEQ ID NO: 111867 - protein, 14 aa, Homo sapiens
  CDR3 for alpha chain variable domain of TCR clone 55934 (TRAV17, TRAJ12)
CATDEKGSSYKLIF

SEQ ID NO: 111868 - protein, 18 aa, Homo sapiens
  CDR3 for beta chain variable domain of TCR clone 55934 (TRBV25-1, TRBJ1-2)
CASSGLQNGQGLIFGYTF

SEQ ID NO: 111869 - protein, 14 aa, Homo sapiens
  CDR3 for alpha chain variable domain of TCR clone 55935 (TRAV26-1, TRAJ34)
CIVRVAYNTDKLIF

SEQ ID NO: 111870 - protein, 16 aa, Homo sapiens
  CDR3 for beta chain variable domain of TCR clone 55935 (TRBV7-3, TRBJ2-2)
CASSLKRGALSGELFF

SEQ ID NO: 111871 - protein, 17 aa, Homo sapiens
  CDR3 for alpha chain variable domain of TCR clone 55936 (TRAV4, TRAJ13)
CLVGVHVSSGGYQKVTF

SEQ ID NO: 111872 - protein, 18 aa, Homo sapiens
  CDR3 for beta chain variable domain of TCR clone 55936 (TRBV15, TRBJ2-3)
CATSRDGARSWDTDTQYF

SEQ ID NO: 111873 - protein, 12 aa, Homo sapiens
  CDR3 for alpha chain variable domain of TCR clone 55937 (TRAV13-1, TRAJ21)
CAAKEGFNKFYF

SEQ ID NO: 111874 - protein, 13 aa, Homo sapiens
  CDR3 for beta chain variable domain of TCR clone 55937 (TRBV28, TRBJ2-7)
CASKAGGVYEQYF

SEQ ID NO: 111875 - protein, 17 aa, Homo sapiens
  CDR3 for alpha chain variable domain of TCR clone 55938 (TRAV13-1, TRAJ28)
CAASPPYSGAGGYQLTF

SEQ ID NO: 111876 - protein, 12 aa, Homo sapiens
  CDR3 for beta chain variable domain of TCR clone 55938 (TRBV11-2, TRBJ2-2)
CASSLPTGELFF

SEQ ID NO: 111877 - protein, 14 aa, Homo sapiens
  CDR3 for alpha chain variable domain of TCR clone 55939 (TRAV35, TRAJ50)
CAGHRKTSYDKVIF

SEQ ID NO: 111878 - protein, 13 aa, Homo sapiens
  CDR3 for beta chain variable domain of TCR clone 55939 (TRBV7-7, TRBJ2-3)
CASSLSRADTQYC

SEQ ID NO: 111879 - protein, 14 aa, Homo sapiens
  CDR3 for alpha chain variable domain of TCR clone 55940 (TRAV38-1, TRAJ29)
CAFITPSGNTPLVF

SEQ ID NO: 111880 - protein, 14 aa, Homo sapiens
  CDR3 for beta chain variable domain of TCR clone 55940 (TRBV18, TRBJ2-7)
CASSPRGRAYEQYF

SEQ ID NO: 111881 - protein, 13 aa, Homo sapiens
  CDR3 for alpha chain variable domain of TCR clone 55941 (TRAV17, TRAJ9)
CATGSTGGFKTIF

SEQ ID NO: 111882 - protein, 16 aa, Homo sapiens
  CDR3 for beta chain variable domain of TCR clone 55941 (TRBV7-8, TRBJ2-7)
CASAFRGGLTSSTSGR

SEQ ID NO: 111883 - protein, 13 aa, Homo sapiens
  CDR3 for alpha chain variable domain of TCR clone 55942 (TRAV1-2, TRAJ9)
CAVLNTGGFKTIF

SEQ ID NO: 111884 - protein, 14 aa, Homo sapiens
  CDR3 for beta chain variable domain of TCR clone 55942 (TRBV5-1, TRBJ2-2)
CASSLGGGSEELFF

SEQ ID NO: 111885 - protein, 13 aa, Homo sapiens
  CDR3 for alpha chain variable domain of TCR clone 55943 (TRAV26-1, TRAJ33)
CIVRGEGNYQLIW

SEQ ID NO: 111886 - protein, 16 aa, Homo sapiens
  CDR3 for beta chain variable domain of TCR clone 55943 (TRBV15, TRBJ2-7)
CATSRDRGRRRGEQYF

SEQ ID NO: 111887 - protein, 14 aa, Homo sapiens
  CDR3 for alpha chain variable domain of TCR clone 55944 (TRAV26-1, TRAJ38)
CIADNAGHNRKLIW

SEQ ID NO: 111888 - protein, 14 aa, Homo sapiens
  CDR3 for beta chain variable domain of TCR clone 55944 (TRBV4-1, TRBJ2-2)
CASSQAVNTGELFF

SEQ ID NO: 111889 - protein, 12 aa, Homo sapiens
  CDR3 for alpha chain variable domain of TCR clone 55945 (TRAV8-3, TRAJ26)
CAGDNYGQNFVF

SEQ ID NO: 111890 - protein, 12 aa, Homo sapiens
  CDR3 for beta chain variable domain of TCR clone 55945 (TRBV11-2, TRBJ2-2)
CASSIGGGELFF

SEQ ID NO: 111891 - protein, 13 aa, Homo sapiens
  CDR3 for alpha chain variable domain of TCR clone 55946 (TRAV22, TRAJ29)
CAVGGSGNTPLVF

SEQ ID NO: 111892 - protein, 13 aa, Homo sapiens
  CDR3 for beta chain variable domain of TCR clone 55946 (TRBV4-2, TRBJ1-1)
CASSQAGNTDAFF

SEQ ID NO: 111893 - protein, 15 aa, Homo sapiens
  CDR3 for alpha chain variable domain of TCR clone 55947 (TRAV1-1, TRAJ27)
CLLLLRWLRDDKIIF

SEQ ID NO: 111894 - protein, 14 aa, Homo sapiens
  CDR3 for beta chain variable domain of TCR clone 55947 (TRBV11-3, TRBJ1-6)
CASSFSGGDSPLHF

SEQ ID NO: 111895 - protein, 16 aa, Homo sapiens
  CDR3 for alpha chain variable domain of TCR clone 55948 (TRAV17, TRAJ22)
CATDAISSGSARQLTF

SEQ ID NO: 111896 - protein, 15 aa, Homo sapiens
  CDR3 for beta chain variable domain of TCR clone 55948 (TRBV5-1, TRBJ2-1)
CAGSPPRAPYNEQFF

SEQ ID NO: 111897 - protein, 11 aa, Homo sapiens
  CDR3 for alpha chain variable domain of TCR clone 55949 (TRAV35, TRAJ34)
CWARNTDKLIF

SEQ ID NO: 111898 - protein, 15 aa, Homo sapiens
  CDR3 for beta chain variable domain of TCR clone 55949 (TRBV6-3, TRBJ2-7)
CASSSPGTVFYEQYF

SEQ ID NO: 111899 - protein, 14 aa, Homo sapiens
  CDR3 for alpha chain variable domain of TCR clone 55950 (TRAV17, TRAJ31)
CATVLRNNNARLVF

SEQ ID NO: 111900 - protein, 14 aa, Homo sapiens
  CDR3 for beta chain variable domain of TCR clone 55950 (TRBV12-4, TRBJ2-5)
CASSLWQKQETQYF

SEQ ID NO: 111901 - protein, 11 aa, Homo sapiens
  CDR3 for alpha chain variable domain of TCR clone 55951 (TRAV21, TRAJ11)
CAVNGYSTLTF

SEQ ID NO: 111902 - protein, 15 aa, Homo sapiens
  CDR3 for beta chain variable domain of TCR clone 55951 (TRBV20-1, TRBJ2-7)
CSARDRVSGMDEQYF

SEQ ID NO: 111903 - protein, 18 aa, Homo sapiens
  CDR3 for alpha chain variable domain of TCR clone 55952 (TRAV13-1, TRAJ52)
CAAKNPNAGGTSYGKLTF

SEQ ID NO: 111904 - protein, 15 aa, Homo sapiens
  CDR3 for beta chain variable domain of TCR clone 55952 (TRBV4-1, TRBJ1-4)
CASSDTGGTNEKLFF

SEQ ID NO: 111905 - protein, 13 aa, Homo sapiens
  CDR3 for alpha chain variable domain of TCR clone 55953 (TRAV13-1, TRAJ39)
CAESIWAGNMLTF

SEQ ID NO: 111906 - protein, 15 aa, Homo sapiens
  CDR3 for beta chain variable domain of TCR clone 55953 (TRBV7-9, TRBJ1-1)
CASSLLEQGGTEAFF

SEQ ID NO: 111907 - protein, 15 aa, Homo sapiens
  CDR3 for alpha chain variable domain of TCR clone 55954 (TRAV20, TRAJ41)
CAVQANSNSGYALNF

SEQ ID NO: 111908 - protein, 14 aa, Homo sapiens
  CDR3 for beta chain variable domain of TCR clone 55954 (TRBV25-1, TRBJ1-1)
CASPHLGGNTEAFF

SEQ ID NO: 111909 - protein, 16 aa, Homo sapiens
  CDR3 for alpha chain variable domain of TCR clone 55955 (TRAV8-3, TRAJ44)
CAVGASNTGTASKLTF

SEQ ID NO: 111910 - protein, 15 aa, Homo sapiens
  CDR3 for beta chain variable domain of TCR clone 55955 (TRBV27, TRBJ1-5)
CASTFNRGINQPQHF

SEQ ID NO: 111911 - protein, 13 aa, Homo sapiens
  CDR3 for alpha chain variable domain of TCR clone 55956 (TRAV8-3, TRAJ34)
CAVGPYNTDKLIF

SEQ ID NO: 111912 - protein, 15 aa, Homo sapiens
  CDR3 for beta chain variable domain of TCR clone 55956 (TRBV11-2, TRBJ1-2)
CASSLEGVQRNGYTF

SEQ ID NO: 111913 - protein, 14 aa, Homo sapiens
  CDR3 for alpha chain variable domain of TCR clone 55957 (TRAV26-1, TRAJ21)
CIVRVVYNLNKFYF

SEQ ID NO: 111914 - protein, 11 aa, Homo sapiens
  CDR3 for beta chain variable domain of TCR clone 55957 (TRBV5-6, TRBJ2-5)
CASSLERTQYF

SEQ ID NO: 111915 - protein, 14 aa, Homo sapiens
  CDR3 for alpha chain variable domain of TCR clone 55958 (TRAV8-1, TRAJ12)
CAVNAMDSSYKLIF

SEQ ID NO: 111916 - protein, 14 aa, Homo sapiens
  CDR3 for beta chain variable domain of TCR clone 55958 (TRBV12-4, TRBJ1-6)
CASNLQGKGSPLHF

SEQ ID NO: 111917 - protein, 20 aa, Homo sapiens
  CDR3 for alpha chain variable domain of TCR clone 55959 (TRAV13-1, )
CAASPMDIQNPDPAVSQLRD

SEQ ID NO: 111918 - protein, 13 aa, Homo sapiens
  CDR3 for beta chain variable domain of TCR clone 55959 (TRBV20-1, TRBJ2-2)
CSASAAGTGELFF

SEQ ID NO: 111919 - protein, 16 aa, Homo sapiens
  CDR3 for alpha chain variable domain of TCR clone 55960 (TRAV1-2, TRAJ10)
CAVRGVLTGGGNKLTF

SEQ ID NO: 111920 - protein, 14 aa, Homo sapiens
  CDR3 for beta chain variable domain of TCR clone 55960 (TRBV18, TRBJ2-7)
CASSPRGGAYEQYF

SEQ ID NO: 111921 - protein, 16 aa, Homo sapiens
  CDR3 for alpha chain variable domain of TCR clone 55961 (TRAV17, TRAJ35)
CATAEGGIGFGKVLHC

SEQ ID NO: 111922 - protein, 16 aa, Homo sapiens
  CDR3 for beta chain variable domain of TCR clone 55961 (TRBV6-5, TRBJ2-7)
CASSSDPTSGFYEQYF

SEQ ID NO: 111923 - protein, 14 aa, Homo sapiens
  CDR3 for alpha chain variable domain of TCR clone 55962 (TRAV1-2, TRAJ16)
CAVNRFSDGQKLLF

SEQ ID NO: 111924 - protein, 14 aa, Homo sapiens
  CDR3 for beta chain variable domain of TCR clone 55962 (TRBV19, TRBJ2-1)
CASPTSVLSGEQFF

SEQ ID NO: 111925 - protein, 16 aa, Homo sapiens
  CDR3 for alpha chain variable domain of TCR clone 55963 (TRAV23/DV6, TRAJ9)
CAASIGGNTGGFKTTF

SEQ ID NO: 111926 - protein, 18 aa, Homo sapiens
  CDR3 for beta chain variable domain of TCR clone 55963 (TRBV7-9, TRBJ2-7)
CASSLTTSGSRTWYEQYF

SEQ ID NO: 111927 - protein, 14 aa, Homo sapiens
  CDR3 for alpha chain variable domain of TCR clone 55964 (TRAV1-1, TRAJ27)
CAVMYNTNAGKSTF

SEQ ID NO: 111928 - protein, 15 aa, Homo sapiens
  CDR3 for beta chain variable domain of TCR clone 55964 (TRBV7-2, TRBJ2-1)
CASSSGLAGGNEQFF

SEQ ID NO: 111929 - protein, 14 aa, Homo sapiens
  CDR3 for alpha chain variable domain of TCR clone 55965 (TRAV12-2, TRAJ17)
CAVNIKATGNKLTF

SEQ ID NO: 111930 - protein, 16 aa, Homo sapiens
  CDR3 for beta chain variable domain of TCR clone 55965 (TRBV20-1, TRBJ2-6)
CSASSQGYDGANVLTF

SEQ ID NO: 111931 - protein, 14 aa, Homo sapiens
  CDR3 for alpha chain variable domain of TCR clone 55966 (TRAV8-3, TRAJ10)
CAVGNAGGGNRLTF

SEQ ID NO: 111932 - protein, 16 aa, Homo sapiens
  CDR3 for beta chain variable domain of TCR clone 55966 (TRBV11-2, TRBJ1-2)
CASSLDTGGADYGYTF

SEQ ID NO: 111933 - protein, 16 aa, Homo sapiens
  CDR3 for alpha chain variable domain of TCR clone 55967 (TRAV30, TRAJ24)
CGTEIVDADSWGKFQF

SEQ ID NO: 111934 - protein, 19 aa, Homo sapiens
  CDR3 for beta chain variable domain of TCR clone 55967 (TRBV11-3, TRBJ2-2)
CASSTRPGAKTTNTGELFF

SEQ ID NO: 111935 - protein, 14 aa, Homo sapiens
  CDR3 for alpha chain variable domain of TCR clone 55968 (TRAV30, TRAJ26)
CGTEIVSYGQNFVF

SEQ ID NO: 111936 - protein, 13 aa, Homo sapiens
  CDR3 for beta chain variable domain of TCR clone 55968 (TRBV19, TRBJ1-3)
CASRLSRGNTIYF

SEQ ID NO: 111937 - protein, 20 aa, Homo sapiens
  CDR3 for alpha chain variable domain of TCR clone 55969 (TRAV8-3, TRAJ45)
LSTSVLWGSYSGGGADGLTF

SEQ ID NO: 111938 - protein, 11 aa, Homo sapiens
  CDR3 for beta chain variable domain of TCR clone 55969 (TRBV20-1, TRBJ2-5)
CSDDRAETQYF

SEQ ID NO: 111939 - protein, 15 aa, Homo sapiens
  CDR3 for alpha chain variable domain of TCR clone 55970 (TRAV12-3, TRAJ49)
CAMAVTPNTGNQFYF

SEQ ID NO: 111940 - protein, 18 aa, Homo sapiens
  CDR3 for beta chain variable domain of TCR clone 55970 (TRBV4-1, TRBJ1-5)
CARSQDPRGQGLNQPQHF

SEQ ID NO: 111941 - protein, 13 aa, Homo sapiens
  CDR3 for alpha chain variable domain of TCR clone 55971 (TRAV12-1, TRAJ26)
CVVRRNYGQNFVF

SEQ ID NO: 111942 - protein, 16 aa, Homo sapiens
  CDR3 for beta chain variable domain of TCR clone 55971 (TRBV6-1, TRBJ1-2)
CASSGAWQGRSHGYTF

SEQ ID NO: 111943 - protein, 15 aa, Homo sapiens
  CDR3 for alpha chain variable domain of TCR clone 55972 (TRAV13-1, TRAJ32)
CAASIYGGATNKLIF

SEQ ID NO: 111944 - protein, 14 aa, Homo sapiens
  CDR3 for beta chain variable domain of TCR clone 55972 (TRBV7-9, TRBJ2-1)
RASSLASGSSEQFF

SEQ ID NO: 111945 - protein, 10 aa, Homo sapiens
  CDR3 for alpha chain variable domain of TCR clone 55973 (TRAV30, TRAJ32)
CGTEKDMVVL

SEQ ID NO: 111946 - protein, 13 aa, Homo sapiens
  CDR3 for beta chain variable domain of TCR clone 55973 (TRBV10-3, TRBJ2-7)
CAPKLAVNYEQYF

SEQ ID NO: 111947 - protein, 11 aa, Homo sapiens
  CDR3 for alpha chain variable domain of TCR clone 55974 (TRAV1-2, TRAJ31)
CAVNNNARLMF

SEQ ID NO: 111948 - protein, 15 aa, Homo sapiens
  CDR3 for beta chain variable domain of TCR clone 55974 (TRBV28, TRBJ2-1)
CASSIIAVGRSEQFF

SEQ ID NO: 111949 - protein, 16 aa, Homo sapiens
  CDR3 for alpha chain variable domain of TCR clone 55975 (TRAV21, TRAJ45)
CAVSWGSGGGADGRTF

SEQ ID NO: 111950 - protein, 14 aa, Homo sapiens
  CDR3 for beta chain variable domain of TCR clone 55975 (TRBV4-2, TRBJ1-2)
CASSPGGSNYGYTF

SEQ ID NO: 111951 - protein, 14 aa, Homo sapiens
  CDR3 for alpha chain variable domain of TCR clone 55976 (TRAV38-2/DV8, TRAJ30)
CAYMDGLVGDKIIF

SEQ ID NO: 111952 - protein, 15 aa, Homo sapiens
  CDR3 for beta chain variable domain of TCR clone 55976 (TRBV7-9, TRBJ2-2)
CASRPADRDTGELFF

SEQ ID NO: 111953 - protein, 14 aa, Homo sapiens
  CDR3 for alpha chain variable domain of TCR clone 55977 (TRAV1-2, TRAJ8)
CAVGEDTGFQKLVF

SEQ ID NO: 111954 - protein, 12 aa, Homo sapiens
  CDR3 for beta chain variable domain of TCR clone 55977 (TRBV27, TRBJ2-2)
CASKLFTGELFF

SEQ ID NO: 111955 - protein, 12 aa, Homo sapiens
  CDR3 for alpha chain variable domain of TCR clone 55978 (TRAV12-3, TRAJ20)
CAMVRGDYRLSF

SEQ ID NO: 111956 - protein, 12 aa, Homo sapiens
  CDR3 for beta chain variable domain of TCR clone 55978 (TRBV6-1, TRBJ2-7)
CASSDYSYEQYF

SEQ ID NO: 111957 - protein, 14 aa, Homo sapiens
  CDR3 for alpha chain variable domain of TCR clone 55979 (TRAV12-3, TRAJ10)
SHPPLTGGGNKLTF

SEQ ID NO: 111958 - protein, 11 aa, Homo sapiens
  CDR3 for beta chain variable domain of TCR clone 55979 (TRBV19, TRBJ1-1)
CASSIGSEAFF

SEQ ID NO: 111959 - protein, 20 aa, Homo sapiens
  CDR3 for alpha chain variable domain of TCR clone 55980 (TRAV12-2, TRAJ52)
SPVIQPHTSFRSTSYGKLTF

SEQ ID NO: 111960 - protein, 11 aa, Homo sapiens
  CDR3 for beta chain variable domain of TCR clone 55980 (TRBV11-2, TRBJ2-2)
CASSLPGELFF

SEQ ID NO: 111961 - protein, 11 aa, Homo sapiens
  CDR3 for alpha chain variable domain of TCR clone 55981 (TRAV13-2, TRAJ23)
CAESPRGKLIS

SEQ ID NO: 111962 - protein, 15 aa, Homo sapiens
  CDR3 for beta chain variable domain of TCR clone 55981 (TRBV28, TRBJ2-1)
CASSGLAEVDNEQFF

SEQ ID NO: 111963 - protein, 14 aa, Homo sapiens
  CDR3 for alpha chain variable domain of TCR clone 55982 (TRAV12-3, TRAJ10)
SHLPLTGGGNRLTF

SEQ ID NO: 111964 - protein, 14 aa, Homo sapiens
  CDR3 for beta chain variable domain of TCR clone 55982 (TRBV20-1, TRBJ2-5)
CSALVPGYQETQYF

SEQ ID NO: 111965 - protein, 18 aa, Homo sapiens
  CDR3 for alpha chain variable domain of TCR clone 55983 (TRAV21, TRAJ52)
CAVRPSPAGGTSYGKLTF

SEQ ID NO: 111966 - protein, 18 aa, Homo sapiens
  CDR3 for beta chain variable domain of TCR clone 55983 (TRBV20-1, TRBJ2-3)
CSASGLAGGPGTTDTQYF

SEQ ID NO: 111967 - protein, 14 aa, Homo sapiens
  CDR3 for alpha chain variable domain of TCR clone 55984 (TRAV12-2, TRAJ45)
CALPERGGADGLTF

SEQ ID NO: 111968 - protein, 14 aa, Homo sapiens
  CDR3 for beta chain variable domain of TCR clone 55984 (TRBV18, TRBJ1-5)
CASSPGNSNRPQHF

SEQ ID NO: 111969 - protein, 15 aa, Homo sapiens
  CDR3 for alpha chain variable domain of TCR clone 55985 (TRAV20, TRAJ41)
CAVQANSNSGYALNF

SEQ ID NO: 111970 - protein, 14 aa, Homo sapiens
  CDR3 for beta chain variable domain of TCR clone 55985 (TRBV25-1, TRBJ1-1)
CARTHLGGNTEAFF

SEQ ID NO: 111971 - protein, 11 aa, Homo sapiens
  CDR3 for alpha chain variable domain of TCR clone 55986 (TRAV12-2, TRAJ33)
CAVTSNYKLIW

SEQ ID NO: 111972 - protein, 14 aa, Homo sapiens
  CDR3 for beta chain variable domain of TCR clone 55986 (TRBV12-4, TRBJ2-2)
CASNQGANTGELFF

SEQ ID NO: 111973 - protein, 15 aa, Homo sapiens
  CDR3 for alpha chain variable domain of TCR clone 55987 (TRAV12-3, TRAJ27)
CAMRAYNTNAGKSTF

SEQ ID NO: 111974 - protein, 15 aa, Homo sapiens
  CDR3 for beta chain variable domain of TCR clone 55987 (TRBV7-9, TRBJ1-4)
CASSRTGGFNEKLFF

SEQ ID NO: 111975 - protein, 17 aa, Homo sapiens
  CDR3 for alpha chain variable domain of TCR clone 55988 (TRAV16, TRAJ58)
CITVLSNGETSGARLTF

SEQ ID NO: 111976 - protein, 17 aa, Homo sapiens
  CDR3 for beta chain variable domain of TCR clone 55988 (TRBV18, TRBJ2-1)
CASSKGLSGGADNEQFF

SEQ ID NO: 111977 - protein, 14 aa, Homo sapiens
  CDR3 for alpha chain variable domain of TCR clone 55989 (TRAV12-3, TRAJ9)
CAMSPNTGGFKTIF

SEQ ID NO: 111978 - protein, 12 aa, Homo sapiens
  CDR3 for beta chain variable domain of TCR clone 55989 (TRBV19, TRBJ1-5)
CASSIAHQPQHF

SEQ ID NO: 111979 - protein, 14 aa, Homo sapiens
  CDR3 for alpha chain variable domain of TCR clone 55990 (TRAV12-2, TRAJ17)
CAVLFKAAGNKLTL

SEQ ID NO: 111980 - protein, 17 aa, Homo sapiens
  CDR3 for beta chain variable domain of TCR clone 55990 (TRBV20-1, TRBJ2-2)
CSASGSGQGGLTGELFF

SEQ ID NO: 111981 - protein, 13 aa, Homo sapiens
  CDR3 for alpha chain variable domain of TCR clone 55991 (TRAV20, TRAJ40)
CAVRTSGTYKYIF

SEQ ID NO: 111982 - protein, 16 aa, Homo sapiens
  CDR3 for beta chain variable domain of TCR clone 55991 (TRBV7-6, TRBJ2-1)
CASSLNEGPSYNEQFF

SEQ ID NO: 111983 - protein, 15 aa, Homo sapiens
  CDR3 for alpha chain variable domain of TCR clone 55992 (TRAV12-3, TRAJ5)
CAMSGLGTGRRALTF

SEQ ID NO: 111984 - protein, 16 aa, Homo sapiens
  CDR3 for beta chain variable domain of TCR clone 55992 (TRBV20-1, TRBJ2-3)
CSARLHSAGAIDTQYS

SEQ ID NO: 111985 - protein, 13 aa, Homo sapiens
  CDR3 for alpha chain variable domain of TCR clone 55993 (TRAV21, TRAJ37)
CAVSSGNTGKLIF

SEQ ID NO: 111986 - protein, 15 aa, Homo sapiens
  CDR3 for beta chain variable domain of TCR clone 55993 (TRBV12-4, TRBJ1-2)
CAGSFVDRGNYGYTF

SEQ ID NO: 111987 - protein, 15 aa, Homo sapiens
  CDR3 for alpha chain variable domain of TCR clone 55994 (TRAV12-2, TRAJ53)
CATLNSGGSNYKLTF

SEQ ID NO: 111988 - protein, 15 aa, Homo sapiens
  CDR3 for beta chain variable domain of TCR clone 55994 (TRBV27, TRBJ2-1)
CASSNGGGSSNEQFF

SEQ ID NO: 111989 - protein, 16 aa, Homo sapiens
  CDR3 for alpha chain variable domain of TCR clone 55995 (TRAV30, TRAJ24)
CGTEIVDADSWGNSSL

SEQ ID NO: 111990 - protein, 13 aa, Homo sapiens
  CDR3 for beta chain variable domain of TCR clone 55995 (TRBV11-2, TRBJ2-5)
CASSSTGEETQYF

SEQ ID NO: 111991 - protein, 12 aa, Homo sapiens
  CDR3 for alpha chain variable domain of TCR clone 55996 (TRAV3, TRAJ43)
CAVRDPNNYMRF

SEQ ID NO: 111992 - protein, 15 aa, Homo sapiens
  CDR3 for beta chain variable domain of TCR clone 55996 (TRBV27, TRBJ1-5)
CASSLGTGFDQPQHF

SEQ ID NO: 111993 - protein, 14 aa, Homo sapiens
  CDR3 for alpha chain variable domain of TCR clone 55997 (TRAV16, TRAJ17)
CALSEGAAGNKLTF

SEQ ID NO: 111994 - protein, 14 aa, Homo sapiens
  CDR3 for beta chain variable domain of TCR clone 55997 (TRBV28, TRBJ2-2)
CASRIRSVTGELFF

SEQ ID NO: 111995 - protein, 13 aa, Homo sapiens
  CDR3 for alpha chain variable domain of TCR clone 55998 (TRAV12-3, TRAJ9)
CAMRNTGGFKTIF

SEQ ID NO: 111996 - protein, 14 aa, Homo sapiens
  CDR3 for beta chain variable domain of TCR clone 55998 (TRBV19, TRBJ2-5)
CASSMTGQQETQYF

SEQ ID NO: 111997 - protein, 14 aa, Homo sapiens
  CDR3 for alpha chain variable domain of TCR clone 55999 (TRAV8-2, TRAJ15)
CCDHGNQAGTALIF

SEQ ID NO: 111998 - protein, 12 aa, Homo sapiens
  CDR3 for beta chain variable domain of TCR clone 55999 (TRBV6-1, TRBJ2-7)
CASSDYSYEQYF

SEQ ID NO: 111999 - protein, 21 aa, Homo sapiens
  CDR3 for alpha chain variable domain of TCR clone 56000 (TRAV26-1, TRAJ22)
CIVRVSFWFCKATDLWIWDTI

SEQ ID NO: 112000 - protein, 13 aa, Homo sapiens
  CDR3 for beta chain variable domain of TCR clone 56000 (TRBV7-9, TRBJ1-2)
CASSLKQNYGYTF

SEQ ID NO: 112001 - protein, 16 aa, Homo sapiens
  CDR3 for alpha chain variable domain of TCR clone 56001 (TRAV16, TRAJ4)
CITVLPFSGVYNKLIF

SEQ ID NO: 112002 - protein, 14 aa, Homo sapiens
  CDR3 for beta chain variable domain of TCR clone 56001 (TRBV19, TRBJ2-7)
CASSMGQGAIEQYF

SEQ ID NO: 112003 - protein, 14 aa, Homo sapiens
  CDR3 for alpha chain variable domain of TCR clone 56002 (TRAV12-3, TRAJ13)
CAGRSPGGYQKVTF

SEQ ID NO: 112004 - protein, 14 aa, Homo sapiens
  CDR3 for beta chain variable domain of TCR clone 56002 (TRBV19, TRBJ2-2)
CASSMVGLSGELFF

SEQ ID NO: 112005 - protein, 13 aa, Homo sapiens
  CDR3 for alpha chain variable domain of TCR clone 56003 (TRAV26-2, TRAJ47)
CILPMEYGSKLVF

SEQ ID NO: 112006 - protein, 12 aa, Homo sapiens
  CDR3 for beta chain variable domain of TCR clone 56003 (TRBV14, TRBJ2-7)
CASSSLKGEQYF

SEQ ID NO: 112007 - protein, 11 aa, Homo sapiens
  CDR3 for alpha chain variable domain of TCR clone 56004 (TRAV29/DV5, TRAJ49)
CAAVPGNQFYF

SEQ ID NO: 112008 - protein, 17 aa, Homo sapiens
  CDR3 for beta chain variable domain of TCR clone 56004 (TRBV4-2, TRBJ1-1)
CASTQFGGGSGNIEAFF

SEQ ID NO: 112009 - protein, 13 aa, Homo sapiens
  CDR3 for alpha chain variable domain of TCR clone 56005 (TRAV35, TRAJ44)
CAGLSGTASKLTF

SEQ ID NO: 112010 - protein, 17 aa, Homo sapiens
  CDR3 for beta chain variable domain of TCR clone 56005 (TRBV7-8, TRBJ1-2)
CASSLRPLQGHLYAYTF

SEQ ID NO: 112011 - protein, 10 aa, Homo sapiens
  CDR3 for alpha chain variable domain of TCR clone 56006 (TRAV8-2, TRAJ29)
CTGGNTPLVF

SEQ ID NO: 112012 - protein, 17 aa, Homo sapiens
  CDR3 for beta chain variable domain of TCR clone 56006 (TRBV2, TRBJ2-7)
CASNQALTGWDSYEQYF

SEQ ID NO: 112013 - protein, 12 aa, Homo sapiens
  CDR3 for alpha chain variable domain of TCR clone 56007 (TRAV12-3, TRAJ3)
CAIDSSASKIIF

SEQ ID NO: 112014 - protein, 12 aa, Homo sapiens
  CDR3 for beta chain variable domain of TCR clone 56007 (TRBV12-4, TRBJ2-7)
CASSLGGYEQYF

SEQ ID NO: 112015 - protein, 19 aa, Homo sapiens
  CDR3 for alpha chain variable domain of TCR clone 56008 (TRAV3, TRAJ6)
CAVRDRNPSRSGGSYIPTF

SEQ ID NO: 112016 - protein, 15 aa, Homo sapiens
  CDR3 for beta chain variable domain of TCR clone 56008 (TRBV18, TRBJ2-7)
CASSPTLMDSYEQYF

SEQ ID NO: 112017 - protein, 17 aa, Homo sapiens
  CDR3 for alpha chain variable domain of TCR clone 56009 (TRAV4, TRAJ18)
CLVGERSVGSTLGRLYS

SEQ ID NO: 112018 - protein, 18 aa, Homo sapiens
  CDR3 for beta chain variable domain of TCR clone 56009 (TRBV11-2, TRBJ2-3)
CASSLGGASRGAPNTQYF

SEQ ID NO: 112019 - protein, 12 aa, Homo sapiens
  CDR3 for alpha chain variable domain of TCR clone 56010 (TRAV30, TRAJ43)
CGTEERGNDMSF

SEQ ID NO: 112020 - protein, 13 aa, Homo sapiens
  CDR3 for beta chain variable domain of TCR clone 56010 (TRBV27, TRBJ2-7)
CASSFSQGYEQYF

SEQ ID NO: 112021 - protein, 14 aa, Homo sapiens
  CDR3 for alpha chain variable domain of TCR clone 56011 (TRAV26-1, TRAJ21)
CIVRPPYNFNKFYF

SEQ ID NO: 112022 - protein, 13 aa, Homo sapiens
  CDR3 for beta chain variable domain of TCR clone 56011 (TRBV5-8, TRBJ1-2)
CASSLGGNYGYTF

SEQ ID NO: 112023 - protein, 12 aa, Homo sapiens
  CDR3 for alpha chain variable domain of TCR clone 56012 (TRAV17, TRAJ12)
CATLRSGYKLIF

SEQ ID NO: 112024 - protein, 16 aa, Homo sapiens
  CDR3 for beta chain variable domain of TCR clone 56012 (TRBV28, TRBJ2-7)
CASSLSFETGGPEQYF

SEQ ID NO: 112025 - protein, 18 aa, Homo sapiens
  CDR3 for alpha chain variable domain of TCR clone 56013 (TRAV29/DV5, TRAJ52)
CAAGFRGAGGTSYGKLTF

SEQ ID NO: 112026 - protein, 19 aa, Homo sapiens
  CDR3 for beta chain variable domain of TCR clone 56013 (TRBV25-1, TRBJ2-2)
CAILVYRVDRGRKTGELFF

SEQ ID NO: 112027 - protein, 18 aa, Homo sapiens
  CDR3 for alpha chain variable domain of TCR clone 56014 (TRAV21, TRAJ52)
CAVRPSPAGGTSYGKLTF

SEQ ID NO: 112028 - protein, 15 aa, Homo sapiens
  CDR3 for beta chain variable domain of TCR clone 56014 (TRBV7-3, TRBJ2-2)
CASSETGQGTGELFF

SEQ ID NO: 112029 - protein, 12 aa, Homo sapiens
  CDR3 for alpha chain variable domain of TCR clone 56015 (TRAV12-2, TRAJ10)
WGVTGGGNKLTF

SEQ ID NO: 112030 - protein, 14 aa, Homo sapiens
  CDR3 for beta chain variable domain of TCR clone 56015 (TRBV19, TRBJ2-2)
CASTVTANTGELFF

SEQ ID NO: 112031 - protein, 16 aa, Homo sapiens
  CDR3 for alpha chain variable domain of TCR clone 56016 (TRAV8-1, TRAJ39)
CAVNVPSYNAGNMLTL

SEQ ID NO: 112032 - protein, 15 aa, Homo sapiens
  CDR3 for beta chain variable domain of TCR clone 56016 (TRBV4-1, TRBJ2-3)
CASRSTRAGTDTQYF

SEQ ID NO: 112033 - protein, 16 aa, Homo sapiens
  CDR3 for alpha chain variable domain of TCR clone 56017 (TRAV3, TRAJ3)
CAVRDRAKRSASKIIF

SEQ ID NO: 112034 - protein, 13 aa, Homo sapiens
  CDR3 for beta chain variable domain of TCR clone 56017 (TRBV10-3, TRBJ2-7)
CASKLAVNYEQYF

SEQ ID NO: 112035 - protein, 14 aa, Homo sapiens
  CDR3 for alpha chain variable domain of TCR clone 56018 (TRAV8-4, TRAJ48)
CAVSETFGNGKLTF

SEQ ID NO: 112036 - protein, 14 aa, Homo sapiens
  CDR3 for beta chain variable domain of TCR clone 56018 (TRBV13, TRBJ2-7)
CASSLKGASYEQYF

SEQ ID NO: 112037 - protein, 11 aa, Homo sapiens
  CDR3 for alpha chain variable domain of TCR clone 56019 (TRAV4, TRAJ23)
FLVAPGGKLIF

SEQ ID NO: 112038 - protein, 15 aa, Homo sapiens
  CDR3 for beta chain variable domain of TCR clone 56019 (TRBV7-2, TRBJ2-1)
CASSFQADEYNEQFF

SEQ ID NO: 112039 - protein, 13 aa, Homo sapiens
  CDR3 for alpha chain variable domain of TCR clone 56020 (TRAV8-3, TRAJ36)
CAVGATGANNLFF

SEQ ID NO: 112040 - protein, 16 aa, Homo sapiens
  CDR3 for beta chain variable domain of TCR clone 56020 (TRBV20-1, TRBJ1-2)
CSASMGQGVANYGYTF

SEQ ID NO: 112041 - protein, 12 aa, Homo sapiens
  CDR3 for alpha chain variable domain of TCR clone 56021 (TRAV16, TRAJ9)
FALRAGGFKTIF

SEQ ID NO: 112042 - protein, 13 aa, Homo sapiens
  CDR3 for beta chain variable domain of TCR clone 56021 (TRBV4-3, TRBJ1-1)
CASSQVEGSMAFF

SEQ ID NO: 112043 - protein, 14 aa, Homo sapiens
  CDR3 for alpha chain variable domain of TCR clone 56022 (TRAV12-2, TRAJ45)
CAMNIGGGADGLTF

SEQ ID NO: 112044 - protein, 17 aa, Homo sapiens
  CDR3 for beta chain variable domain of TCR clone 56022 (TRBV20-1, TRBJ2-2)
CSASGSGQGGLTGELFF

SEQ ID NO: 112045 - protein, 15 aa, Homo sapiens
  CDR3 for alpha chain variable domain of TCR clone 56023 (TRAV3, TRAJ22)
CSVRDRGGSARQLTF

SEQ ID NO: 112046 - protein, 18 aa, Homo sapiens
  CDR3 for beta chain variable domain of TCR clone 56023 (TRBV28, TRBJ2-1)
CASSSTSGRANSYNEQFF

SEQ ID NO: 112047 - protein, 15 aa, Homo sapiens
  CDR3 for alpha chain variable domain of TCR clone 56024 (TRAV27, TRAJ38)
CAARRNAGNNRKLIW

SEQ ID NO: 112048 - protein, 14 aa, Homo sapiens
  CDR3 for beta chain variable domain of TCR clone 56024 (TRBV12-4, TRBJ2-2)
CASNQGANTGELFF

SEQ ID NO: 112049 - protein, 17 aa, Homo sapiens
  CDR3 for alpha chain variable domain of TCR clone 56025 (TRAV3, TRAJ12)
CAVRDGGRVDSSYKLIF

SEQ ID NO: 112050 - protein, 15 aa, Homo sapiens
  CDR3 for beta chain variable domain of TCR clone 56025 (TRBV5-1, TRBJ2-3)
CASSVTSGSTDTQYF

SEQ ID NO: 112051 - protein, 14 aa, Homo sapiens
  CDR3 for alpha chain variable domain of TCR clone 56026 (TRAV9-2, TRAJ39)
CALYIYNAGNMLTF

SEQ ID NO: 112052 - protein, 15 aa, Homo sapiens
  CDR3 for beta chain variable domain of TCR clone 56026 (TRBV7-2, TRBJ2-3)
CASSLAGAFIDTQYF

SEQ ID NO: 112053 - protein, 12 aa, Homo sapiens
  CDR3 for alpha chain variable domain of TCR clone 56027 (TRAV12-1, TRAJ34)
CVVAGATDKLIF

SEQ ID NO: 112054 - protein, 14 aa, Homo sapiens
  CDR3 for beta chain variable domain of TCR clone 56027 (TRBV19, TRBJ2-1)
CASPTFVLSGEQFF

SEQ ID NO: 112055 - protein, 11 aa, Homo sapiens
  CDR3 for alpha chain variable domain of TCR clone 56028 (TRAV2, TRAJ33)
CAVDSNYQLNW

SEQ ID NO: 112056 - protein, 15 aa, Homo sapiens
  CDR3 for beta chain variable domain of TCR clone 56028 (TRBV19, TRBJ1-2)
CASSVGQVLNYGYTF

SEQ ID NO: 112057 - protein, 15 aa, Homo sapiens
  CDR3 for alpha chain variable domain of TCR clone 56029 (TRAV1-2, TRAJ17)
CAVKGYGAAGNKLTF

SEQ ID NO: 112058 - protein, 23 aa, Homo sapiens
  CDR3 for beta chain variable domain of TCR clone 56029 (TRBV11-2, TRBJ2-5)
CASSSPGGEGAASRDPVLRARHA

SEQ ID NO: 112059 - protein, 19 aa, Homo sapiens
  CDR3 for alpha chain variable domain of TCR clone 56030 (TRAV26-1, TRAJ52)
CIVRAHRNAGSTSYGKLTF

SEQ ID NO: 112060 - protein, 13 aa, Homo sapiens
  CDR3 for beta chain variable domain of TCR clone 56030 (TRBV20-1, TRBJ1-6)
CSAPLGVGSPLHF

SEQ ID NO: 112061 - protein, 16 aa, Homo sapiens
  CDR3 for alpha chain variable domain of TCR clone 56031 (TRAV23/DV6, TRAJ9)
CAASIGGNTGGFKTIF

SEQ ID NO: 112062 - protein, 12 aa, Homo sapiens
  CDR3 for beta chain variable domain of TCR clone 56031 (TRBV11-3, TRBJ2-1)
CASSVQREGQFF

SEQ ID NO: 112063 - protein, 15 aa, Homo sapiens
  CDR3 for alpha chain variable domain of TCR clone 56032 (TRAV12-3, TRAJ13)
CAVRPTSGGYQKVTF

SEQ ID NO: 112064 - protein, 15 aa, Homo sapiens
  CDR3 for beta chain variable domain of TCR clone 56032 (TRBV28, TRBJ2-7)
CASSPGGRGFYEQYF

SEQ ID NO: 112065 - protein, 10 aa, Homo sapiens
  CDR3 for alpha chain variable domain of TCR clone 56033 (TRAV36/DV7, TRAJ56)
CAGPAVELTF

SEQ ID NO: 112066 - protein, 13 aa, Homo sapiens
  CDR3 for beta chain variable domain of TCR clone 56033 (TRBV7-9, TRBJ2-7)
CASSVWSSYEQYF

SEQ ID NO: 112067 - protein, 13 aa, Homo sapiens
  CDR3 for alpha chain variable domain of TCR clone 56034 (TRAV3, TRAJ36)
CAVRDSGANNLFL

SEQ ID NO: 112068 - protein, 15 aa, Homo sapiens
  CDR3 for beta chain variable domain of TCR clone 56034 (TRBV6-5, TRBJ2-1)
CASSPREGTYNEQFF

SEQ ID NO: 112069 - protein, 14 aa, Homo sapiens
  CDR3 for alpha chain variable domain of TCR clone 56035 (TRAV17, TRAJ12)
CATDEKDGSYKLIF

SEQ ID NO: 112070 - protein, 16 aa, Homo sapiens
  CDR3 for beta chain variable domain of TCR clone 56035 (TRBV11-2, TRBJ2-1)
CASSPRLAGVYNEQFF

SEQ ID NO: 112071 - protein, 14 aa, Homo sapiens
  CDR3 for alpha chain variable domain of TCR clone 56036 (TRAV13-1, TRAJ35)
CAASKGGFGNVLHC

SEQ ID NO: 112072 - protein, 16 aa, Homo sapiens
  CDR3 for beta chain variable domain of TCR clone 56036 (TRBV19, TRBJ2-2)
CASRSPGTGATGELFF

SEQ ID NO: 112073 - protein, 14 aa, Homo sapiens
  CDR3 for alpha chain variable domain of TCR clone 56037 (TRAV17, TRAJ16)
CATADFSDGQKLLF

SEQ ID NO: 112074 - protein, 15 aa, Homo sapiens
  CDR3 for beta chain variable domain of TCR clone 56037 (TRBV27, TRBJ2-5)
CASSLIPSGGETQYF

SEQ ID NO: 112075 - protein, 15 aa, Homo sapiens
  CDR3 for alpha chain variable domain of TCR clone 56038 (TRAV27, TRAJ38)
CAARRNAGNNRKRIG

SEQ ID NO: 112076 - protein, 13 aa, Homo sapiens
  CDR3 for beta chain variable domain of TCR clone 56038 (TRBV12-5, TRBJ2-3)
CASGDRQSDTQYF

SEQ ID NO: 112077 - protein, 12 aa, Homo sapiens
  CDR3 for alpha chain variable domain of TCR clone 56039 (TRAV12-3, TRAJ21)
CAMFNNFNKFYF

SEQ ID NO: 112078 - protein, 14 aa, Homo sapiens
  CDR3 for beta chain variable domain of TCR clone 56039 (TRBV28, TRBJ2-1)
CASSIQGTVGERFF

SEQ ID NO: 112079 - protein, 16 aa, Homo sapiens
  CDR3 for alpha chain variable domain of TCR clone 56040 (TRAV3, TRAJ37)
CAVRPHGSGNTGKLIF

SEQ ID NO: 112080 - protein, 11 aa, Homo sapiens
  CDR3 for beta chain variable domain of TCR clone 56040 (TRBV10-3, TRBJ2-7)
CAISEGREQYF

SEQ ID NO: 112081 - protein, 12 aa, Homo sapiens
  CDR3 for alpha chain variable domain of TCR clone 56041 (TRAV13-2, TRAJ23)
CAERHRGGKLIF

SEQ ID NO: 112082 - protein, 15 aa, Homo sapiens
  CDR3 for beta chain variable domain of TCR clone 56041 (TRBV4-1, TRBJ2-5)
CASSQWDLYQETQYF

SEQ ID NO: 112083 - protein, 15 aa, Homo sapiens
  CDR3 for alpha chain variable domain of TCR clone 56042 (TRAV12-3, TRAJ6)
CAMSDASGGSYIPTF

SEQ ID NO: 112084 - protein, 13 aa, Homo sapiens
  CDR3 for beta chain variable domain of TCR clone 56042 (TRBV20-1, TRBJ1-2)
CSASTERIYGYTF

SEQ ID NO: 112085 - protein, 11 aa, Homo sapiens
  CDR3 for alpha chain variable domain of TCR clone 56043 (TRAV12-1, TRAJ30)
CVVNGQDKIIF

SEQ ID NO: 112086 - protein, 17 aa, Homo sapiens
  CDR3 for beta chain variable domain of TCR clone 56043 (TRBV7-2, TRBJ2-3)
CASSLEARGTSTDTQYF

SEQ ID NO: 112087 - protein, 18 aa, Homo sapiens
  CDR3 for alpha chain variable domain of TCR clone 56044 (TRAV26-1, TRAJ23)
CIVRVGLEVWSQGGKLIF

SEQ ID NO: 112088 - protein, 16 aa, Homo sapiens
  CDR3 for beta chain variable domain of TCR clone 56044 (TRBV12-4, TRBJ2-5)
CASSFFVRGRQETQYL

SEQ ID NO: 112089 - protein, 13 aa, Homo sapiens
  CDR3 for alpha chain variable domain of TCR clone 56045 (TRAV21, TRAJ27)
CAARPGNAGKSTF

SEQ ID NO: 112090 - protein, 20 aa, Homo sapiens
  CDR3 for beta chain variable domain of TCR clone 56045 (TRBV7-8, TRBJ2-2)
CASSHLFPGPTTHITGELFF

SEQ ID NO: 112091 - protein, 16 aa, Homo sapiens
  CDR3 for alpha chain variable domain of TCR clone 56046 (TRAV2, TRAJ4)
CAVADRFSGGYNKLIF

SEQ ID NO: 112092 - protein, 13 aa, Homo sapiens
  CDR3 for beta chain variable domain of TCR clone 56046 (TRBV7-7, TRBJ2-5)
CASSRSGQETQYF

SEQ ID NO: 112093 - protein, 16 aa, Homo sapiens
  CDR3 for alpha chain variable domain of TCR clone 56047 (TRAV23/DV6, TRAJ9)
CAASIGGNTGGFKTIF

SEQ ID NO: 112094 - protein, 16 aa, Homo sapiens
  CDR3 for beta chain variable domain of TCR clone 56047 (TRBV12-5, TRBJ2-5)
CASGPRTSGNQETQYF

SEQ ID NO: 112095 - protein, 12 aa, Homo sapiens
  CDR3 for alpha chain variable domain of TCR clone 56048 (TRAV3, TRAJ20)
CAVRDGDYKLSF

SEQ ID NO: 112096 - protein, 14 aa, Homo sapiens
  CDR3 for beta chain variable domain of TCR clone 56048 (TRBV7-2, TRBJ2-7)
CASSPKTSFYEQYF

SEQ ID NO: 112097 - protein, 14 aa, Homo sapiens
  CDR3 for alpha chain variable domain of TCR clone 56049 (TRAV12-1, TRAJ40)
CVVYTTSGTYKYIF

SEQ ID NO: 112098 - protein, 13 aa, Homo sapiens
  CDR3 for beta chain variable domain of TCR clone 56049 (TRBV12-4, TRBJ2-7)
CASSPTETYEQYF

SEQ ID NO: 112099 - protein, 12 aa, Homo sapiens
  CDR3 for alpha chain variable domain of TCR clone 56050 (TRAV17, TRAJ20)
CATDSNDYKLSF

SEQ ID NO: 112100 - protein, 16 aa, Homo sapiens
  CDR3 for beta chain variable domain of TCR clone 56050 (TRBV10-3, TRBJ2-1)
CAISGVGDGGGGEQFF

SEQ ID NO: 112101 - protein, 15 aa, Homo sapiens
  CDR3 for alpha chain variable domain of TCR clone 56051 (TRAV27, TRAJ38)
CAARRNAGNNRKLIL

SEQ ID NO: 112102 - protein, 15 aa, Homo sapiens
  CDR3 for beta chain variable domain of TCR clone 56051 (TRBV5-1, TRBJ2-1)
CASSPPRAPYNEQFF

SEQ ID NO: 112103 - protein, 14 aa, Homo sapiens
  CDR3 for alpha chain variable domain of TCR clone 56052 (TRAV21, TRAJ38)
CAVMGAGNNRKLIW

SEQ ID NO: 112104 - protein, 13 aa, Homo sapiens
  CDR3 for beta chain variable domain of TCR clone 56052 (TRBV7-3, TRBJ2-5)
CASSIGLFETQYF

SEQ ID NO: 112105 - protein, 13 aa, Homo sapiens
  CDR3 for alpha chain variable domain of TCR clone 56053 (TRAV27, TRAJ53)
RAGQGGSNYKLTF

SEQ ID NO: 112106 - protein, 13 aa, Homo sapiens
  CDR3 for beta chain variable domain of TCR clone 56053 (TRBV29-1, TRBJ1-1)
CSVESGFGTEAFF

SEQ ID NO: 112107 - protein, 16 aa, Homo sapiens
  CDR3 for alpha chain variable domain of TCR clone 56054 (TRAV8-3, TRAJ10)
CAVGPGVTGGGNKLTF

SEQ ID NO: 112108 - protein, 13 aa, Homo sapiens
  CDR3 for beta chain variable domain of TCR clone 56054 (TRBV18, TRBJ1-1)
CASSPGPTGEAFF

SEQ ID NO: 112109 - protein, 13 aa, Homo sapiens
  CDR3 for alpha chain variable domain of TCR clone 56055 (TRAV25, TRAJ30)
CAGRVDRDDKIIF

SEQ ID NO: 112110 - protein, 17 aa, Homo sapiens
  CDR3 for beta chain variable domain of TCR clone 56055 (TRBV7-9, TRBJ2-6)
CASSFGAGYSGANVLTS

SEQ ID NO: 112111 - protein, 17 aa, Homo sapiens
  CDR3 for alpha chain variable domain of TCR clone 56056 (TRAV3, TRAJ42)
CAVRDRDYGGSQGNLIF

SEQ ID NO: 112112 - protein, 13 aa, Homo sapiens
  CDR3 for beta chain variable domain of TCR clone 56056 (TRBV23-1, TRBJ1-4)
CASRGKFNEKLFF

SEQ ID NO: 112113 - protein, 14 aa, Homo sapiens
  CDR3 for alpha chain variable domain of TCR clone 56057 (TRAV9-2, TRAJ39)
CALYIYNAGNMLTF

SEQ ID NO: 112114 - protein, 20 aa, Homo sapiens
  CDR3 for beta chain variable domain of TCR clone 56057 (TRBV19, TRBJ2-1)
CASSISRTVTSTRLNNEQFF

SEQ ID NO: 112115 - protein, 16 aa, Homo sapiens
  CDR3 for alpha chain variable domain of TCR clone 56058 (TRAV12-1, TRAJ12)
CVVNTLLMDSSYKMIF

SEQ ID NO: 112116 - protein, 13 aa, Homo sapiens
  CDR3 for beta chain variable domain of TCR clone 56058 (TRBV11-2, TRBJ2-1)
CASSSEAYNEQFF

SEQ ID NO: 112117 - protein, 14 aa, Homo sapiens
  CDR3 for alpha chain variable domain of TCR clone 56059 (TRAV1-2, TRAJ29)
CAVRELTSATPLVF

SEQ ID NO: 112118 - protein, 14 aa, Homo sapiens
  CDR3 for beta chain variable domain of TCR clone 56059 (TRBV3-1, TRBJ2-5)
CASSQGPDQETQFF

SEQ ID NO: 112119 - protein, 16 aa, Homo sapiens
  CDR3 for alpha chain variable domain of TCR clone 56060 (TRAV12-1, TRAJ28)
CVVIAYSGAGSYQLTF

SEQ ID NO: 112120 - protein, 14 aa, Homo sapiens
  CDR3 for beta chain variable domain of TCR clone 56060 (TRBV5-4, TRBJ1-1)
CASILDSRRDEAFF

SEQ ID NO: 112121 - protein, 13 aa, Homo sapiens
  CDR3 for alpha chain variable domain of TCR clone 56061 (TRAV1-1, TRAJ9)
CAAKNTGGFKTTF

SEQ ID NO: 112122 - protein, 13 aa, Homo sapiens
  CDR3 for beta chain variable domain of TCR clone 56061 (TRBV7-9, TRBJ1-2)
CASSLKQNYGYTF

SEQ ID NO: 112123 - protein, 13 aa, Homo sapiens
  CDR3 for alpha chain variable domain of TCR clone 56062 (TRAV27, TRAJ45)
CRSSGGGADGLTF

SEQ ID NO: 112124 - protein, 17 aa, Homo sapiens
  CDR3 for beta chain variable domain of TCR clone 56062 (TRBV11-2, TRBJ2-1)
CASSLYPPGVEYNEQFS

SEQ ID NO: 112125 - protein, 12 aa, Homo sapiens
  CDR3 for alpha chain variable domain of TCR clone 56063 (TRAV13-1, TRAJ15)
CAASHAGTALIF

SEQ ID NO: 112126 - protein, 18 aa, Homo sapiens
  CDR3 for beta chain variable domain of TCR clone 56063 (TRBV7-9, TRBJ2-3)
CASSLPINGQISTDTQYF

SEQ ID NO: 112127 - protein, 18 aa, Homo sapiens
  CDR3 for alpha chain variable domain of TCR clone 56064 (TRAV13-1, TRAJ10)
RAASKGRAVTGGGNKLTF

SEQ ID NO: 112128 - protein, 14 aa, Homo sapiens
  CDR3 for beta chain variable domain of TCR clone 56064 (TRBV18, TRBJ2-7)
CASSPRGGAYEQYF

SEQ ID NO: 112129 - protein, 15 aa, Homo sapiens
  CDR3 for alpha chain variable domain of TCR clone 56065 (TRAV26-1, TRAJ22)
CIVRVSFWFCKATDL

SEQ ID NO: 112130 - protein, 16 aa, Homo sapiens
  CDR3 for beta chain variable domain of TCR clone 56065 (TRBV12-5, TRBJ2-5)
CASGPRTSGNQETQYF

SEQ ID NO: 112131 - protein, 13 aa, Homo sapiens
  CDR3 for alpha chain variable domain of TCR clone 56066 (TRAV27, TRAJ3)
ASLRGSSASKIIF

SEQ ID NO: 112132 - protein, 15 aa, Homo sapiens
  CDR3 for beta chain variable domain of TCR clone 56066 (TRBV28, TRBJ1-3)
CASSMGRASGNTIYF

SEQ ID NO: 112133 - protein, 11 aa, Homo sapiens
  CDR3 for alpha chain variable domain of TCR clone 56067 (TRAV13-1, TRAJ39)
CASHAGNMLTF

SEQ ID NO: 112134 - protein, 14 aa, Homo sapiens
  CDR3 for beta chain variable domain of TCR clone 56067 (TRBV11-2, TRBJ1-5)
CASSLDRGKQPQHF

SEQ ID NO: 112135 - protein, 15 aa, Homo sapiens
  CDR3 for alpha chain variable domain of TCR clone 56068 (TRAV21, TRAJ24)
CAARSSTDGWGKLQF

SEQ ID NO: 112136 - protein, 15 aa, Homo sapiens
  CDR3 for beta chain variable domain of TCR clone 56068 (TRBV20-1, TRBJ1-1)
CSASRGVTGNTEAFF

SEQ ID NO: 112137 - protein, 13 aa, Homo sapiens
  CDR3 for alpha chain variable domain of TCR clone 56069 (TRAV12-3, TRAJ46)
CAVKKSSGDKLTF

SEQ ID NO: 112138 - protein, 13 aa, Homo sapiens
  CDR3 for beta chain variable domain of TCR clone 56069 (TRBV6-1, TRBJ2-1)
CASSHDRDNEQFF

SEQ ID NO: 112139 - protein, 19 aa, Homo sapiens
  CDR3 for alpha chain variable domain of TCR clone 56070 (TRAV17, TRAJ40)
TASRAADTASYFCASKYIF

SEQ ID NO: 112140 - protein, 17 aa, Homo sapiens
  CDR3 for beta chain variable domain of TCR clone 56070 (TRBV11-2, TRBJ2-4)
CASSFLALGGAGDTQYF

SEQ ID NO: 112141 - protein, 16 aa, Homo sapiens
  CDR3 for alpha chain variable domain of TCR clone 56071 (TRAV30, TRAJ24)
CGTEIVDADSWGKFQF

SEQ ID NO: 112142 - protein, 12 aa, Homo sapiens
  CDR3 for beta chain variable domain of TCR clone 56071 (TRBV7-8, TRBJ2-7)
CASEGGPHGQYF

SEQ ID NO: 112143 - protein, 13 aa, Homo sapiens
  CDR3 for alpha chain variable domain of TCR clone 56072 (TRAV13-2, TRAJ48)
CAEMDFGNGKLTF

SEQ ID NO: 112144 - protein, 13 aa, Homo sapiens
  CDR3 for beta chain variable domain of TCR clone 56072 (TRBV7-9, TRBJ1-2)
CASSLKQNYGYTF

SEQ ID NO: 112145 - protein, 14 aa, Homo sapiens
  CDR3 for alpha chain variable domain of TCR clone 56073 (TRAV12-1, TRAJ12)
CVVNPMDSSYELIF

SEQ ID NO: 112146 - protein, 13 aa, Homo sapiens
  CDR3 for beta chain variable domain of TCR clone 56073 (TRBV28, TRBJ2-2)
CASVRESTGELFF

SEQ ID NO: 112147 - protein, 13 aa, Homo sapiens
  CDR3 for alpha chain variable domain of TCR clone 56074 (TRAV12-1, TRAJ11)
CVVTRGGYRTLTF

SEQ ID NO: 112148 - protein, 13 aa, Homo sapiens
  CDR3 for beta chain variable domain of TCR clone 56074 (TRBV20-1, TRBJ1-2)
CSARDQGAYGYTF

SEQ ID NO: 112149 - protein, 16 aa, Homo sapiens
  CDR3 for alpha chain variable domain of TCR clone 56075 (TRAV12-3, TRAJ53)
CAMSPGSGGSNYKLTF

SEQ ID NO: 112150 - protein, 13 aa, Homo sapiens
  CDR3 for beta chain variable domain of TCR clone 56075 (TRBV4-2, TRBJ1-1)
CVSSQAGNTEAFF

SEQ ID NO: 112151 - protein, 16 aa, Homo sapiens
  CDR3 for alpha chain variable domain of TCR clone 56076 (TRAV23/DV6, TRAJ7)
CAASRVASMGTTDSLL

SEQ ID NO: 112152 - protein, 13 aa, Homo sapiens
  CDR3 for beta chain variable domain of TCR clone 56076 (TRBV19, TRBJ1-2)
CASSQGQVYGYSF

SEQ ID NO: 112153 - protein, 18 aa, Homo sapiens
  CDR3 for alpha chain variable domain of TCR clone 56077 (TRAV12-3, TRAJ52)
CAMSVGGAGGTSYGKLTF

SEQ ID NO: 112154 - protein, 16 aa, Homo sapiens
  CDR3 for beta chain variable domain of TCR clone 56077 (TRBV7-9, TRBJ2-1)
CASSDVAGGSYNEQFF

SEQ ID NO: 112155 - protein, 13 aa, Homo sapiens
  CDR3 for alpha chain variable domain of TCR clone 56078 (TRAV1-1, TRAJ9)
CAAKNTGGFKTIF

SEQ ID NO: 112156 - protein, 14 aa, Homo sapiens
  CDR3 for beta chain variable domain of TCR clone 56078 (TRBV20-1, TRBJ2-1)
CGAQIGGSANEQFF

SEQ ID NO: 112157 - protein, 13 aa, Homo sapiens
  CDR3 for alpha chain variable domain of TCR clone 56079 (TRAV29/DV5, TRAJ31)
CAASRNNNARLMF

SEQ ID NO: 112158 - protein, 15 aa, Homo sapiens
  CDR3 for beta chain variable domain of TCR clone 56079 (TRBV28, TRBJ1-3)
CASGATGNSGNTIYF

SEQ ID NO: 112159 - protein, 15 aa, Homo sapiens
  CDR3 for alpha chain variable domain of TCR clone 56080 (TRAV8-3, TRAJ27)
CAVGPPETNAGKSTF

SEQ ID NO: 112160 - protein, 15 aa, Homo sapiens
  CDR3 for beta chain variable domain of TCR clone 56080 (TRBV7-2, TRBJ2-1)
CASSSGLAGGNEQFF

SEQ ID NO: 112161 - protein, 13 aa, Homo sapiens
  CDR3 for alpha chain variable domain of TCR clone 56081 (TRAV12-2, TRAJ20)
CAVYPSNDYKLSF

SEQ ID NO: 112162 - protein, 20 aa, Homo sapiens
  CDR3 for beta chain variable domain of TCR clone 56081 (TRBV7-8, TRBJ2-2)
CASSHLFPGPTIHITGELFF

SEQ ID NO: 112163 - protein, 17 aa, Homo sapiens
  CDR3 for alpha chain variable domain of TCR clone 56082 (TRAV3, TRAJ6)
CAVRDGPRAGGSYIPTF

SEQ ID NO: 112164 - protein, 17 aa, Homo sapiens
  CDR3 for beta chain variable domain of TCR clone 56082 (TRBV28, TRBJ2-5)
CASSRQGGLSGAETQYF

SEQ ID NO: 112165 - protein, 13 aa, Homo sapiens
  CDR3 for alpha chain variable domain of TCR clone 56083 (TRAV3, TRAJ21)
CAVREPDFNKFYF

SEQ ID NO: 112166 - protein, 16 aa, Homo sapiens
  CDR3 for beta chain variable domain of TCR clone 56083 (TRBV27, TRBJ2-2)
CASGFRGLVRTGELFF

SEQ ID NO: 112167 - protein, 16 aa, Homo sapiens
  CDR3 for alpha chain variable domain of TCR clone 56084 (TRAV3, TRAJ8)
CAVRDYPNTGFQKLVF

SEQ ID NO: 112168 - protein, 15 aa, Homo sapiens
  CDR3 for beta chain variable domain of TCR clone 56084 (TRBV7-9, TRBJ1-6)
CASSSPGRGNSPLHF

SEQ ID NO: 112169 - protein, 13 aa, Homo sapiens
  CDR3 for alpha chain variable domain of TCR clone 56085 (TRAV29/DV5, TRAJ29)
CAASTAGNTPLVF

SEQ ID NO: 112170 - protein, 14 aa, Homo sapiens
  CDR3 for beta chain variable domain of TCR clone 56085 (TRBV19, TRBJ2-3)
CASSAPRGTDTQYF

SEQ ID NO: 112171 - protein, 15 aa, Homo sapiens
  CDR3 for alpha chain variable domain of TCR clone 56086 (TRAV17, TRAJ57)
RATGPSQGGSEKLVF

SEQ ID NO: 112172 - protein, 14 aa, Homo sapiens
  CDR3 for beta chain variable domain of TCR clone 56086 (TRBV12-5, TRBJ2-5)
CASGSRTHQETQYF

SEQ ID NO: 112173 - protein, 14 aa, Homo sapiens
  CDR3 for alpha chain variable domain of TCR clone 56087 (TRAV13-1, TRAJ35)
CAASKGGFGNVLHC

SEQ ID NO: 112174 - protein, 15 aa, Homo sapiens
  CDR3 for beta chain variable domain of TCR clone 56087 (TRBV7-3, TRBJ2-1)
CASSLGQGPFGEQFF

SEQ ID NO: 112175 - protein, 11 aa, Homo sapiens
  CDR3 for alpha chain variable domain of TCR clone 56088 (TRAV12-1, TRAJ26)
CVVAYGQNFVF

SEQ ID NO: 112176 - protein, 15 aa, Homo sapiens
  CDR3 for beta chain variable domain of TCR clone 56088 (TRBV12-4, TRBJ2-5)
CASSGTGKAQETQYF

SEQ ID NO: 112177 - protein, 15 aa, Homo sapiens
  CDR3 for alpha chain variable domain of TCR clone 56089 (TRAV26-1, TRAJ40)
CIVRVTTSGTYKYIF

SEQ ID NO: 112178 - protein, 14 aa, Homo sapiens
  CDR3 for beta chain variable domain of TCR clone 56089 (TRBV7-2, TRBJ2-2)
CASRGQGAAGELFF

SEQ ID NO: 112179 - protein, 13 aa, Homo sapiens
  CDR3 for alpha chain variable domain of TCR clone 56090 (TRAV1-2, TRAJ9)
FAALNTGGFKTIF

SEQ ID NO: 112180 - protein, 14 aa, Homo sapiens
  CDR3 for beta chain variable domain of TCR clone 56090 (TRBV13, TRBJ2-3)
CASSSGSPTDTQYF

SEQ ID NO: 112181 - protein, 12 aa, Homo sapiens
  CDR3 for alpha chain variable domain of TCR clone 56091 (TRAV1-1, TRAJ43)
CAPRVSSNDMRF

SEQ ID NO: 112182 - protein, 13 aa, Homo sapiens
  CDR3 for beta chain variable domain of TCR clone 56091 (TRBV7-3, TRBJ1-2)
CASSLKRGYGYTF

SEQ ID NO: 112183 - protein, 14 aa, Homo sapiens
  CDR3 for alpha chain variable domain of TCR clone 56092 (TRAV38-1, TRAJ45)
CASHAGGGADGLTF

SEQ ID NO: 112184 - protein, 13 aa, Homo sapiens
  CDR3 for beta chain variable domain of TCR clone 56092 (TRBV10-3, TRBJ1-2)
CAISERDSYGYTF

SEQ ID NO: 112185 - protein, 15 aa, Homo sapiens
  CDR3 for alpha chain variable domain of TCR clone 56093 (TRAV3, TRAJ22)
CAVRDRGGSARQLTF

SEQ ID NO: 112186 - protein, 14 aa, Homo sapiens
  CDR3 for beta chain variable domain of TCR clone 56093 (TRBV13, TRBJ2-5)
CASSLERVGETQYF

SEQ ID NO: 112187 - protein, 13 aa, Homo sapiens
  CDR3 for alpha chain variable domain of TCR clone 56094 (TRAV21, TRAJ20)
CAVGLRVDYKLSF

SEQ ID NO: 112188 - protein, 13 aa, Homo sapiens
  CDR3 for beta chain variable domain of TCR clone 56094 (TRBV7-2, TRBJ2-4)
CASSREHANIQYF

SEQ ID NO: 112189 - protein, 13 aa, Homo sapiens
  CDR3 for alpha chain variable domain of TCR clone 56095 (TRAV2, TRAJ24)
CAVSTDSWGRLQF

SEQ ID NO: 112190 - protein, 13 aa, Homo sapiens
  CDR3 for beta chain variable domain of TCR clone 56095 (TRBV28, TRBJ1-5)
CASSDRGNQPQHF

SEQ ID NO: 112191 - protein, 12 aa, Homo sapiens
  CDR3 for alpha chain variable domain of TCR clone 56096 (TRAV2, TRAJ10)
CASTGGGNKLTF

SEQ ID NO: 112192 - protein, 13 aa, Homo sapiens
  CDR3 for beta chain variable domain of TCR clone 56096 (TRBV7-2, TRBJ2-2)
CQQRTGGGWELFF

SEQ ID NO: 112193 - protein, 15 aa, Homo sapiens
  CDR3 for alpha chain variable domain of TCR clone 56097 (TRAV2, TRAJ22)
CAVPSRGGPARQLTF

SEQ ID NO: 112194 - protein, 11 aa, Homo sapiens
  CDR3 for beta chain variable domain of TCR clone 56097 (TRBV27, TRBJ2-3)
CASSLGDTQYF

SEQ ID NO: 112195 - protein, 14 aa, Homo sapiens
  CDR3 for alpha chain variable domain of TCR clone 56098 (TRAV26-1, TRAJ38)
CIADNAGNNRKLIW

SEQ ID NO: 112196 - protein, 13 aa, Homo sapiens
  CDR3 for beta chain variable domain of TCR clone 56098 (TRBV19, TRBJ1-2)
CASSVPGHDGYTF

SEQ ID NO: 112197 - protein, 14 aa, Homo sapiens
  CDR3 for alpha chain variable domain of TCR clone 56099 (TRAV8-6, TRAJ54)
CAVSPALGAQKLVF

SEQ ID NO: 112198 - protein, 14 aa, Homo sapiens
  CDR3 for beta chain variable domain of TCR clone 56099 (TRBV5-1, TRBJ2-7)
CASSRGESLYEQYF

SEQ ID NO: 112199 - protein, 14 aa, Homo sapiens
  CDR3 for alpha chain variable domain of TCR clone 56100 (TRAV1-2, TRAJ16)
CAVNRFSDGQKLLF

SEQ ID NO: 112200 - protein, 13 aa, Homo sapiens
  CDR3 for beta chain variable domain of TCR clone 56100 (TRBV19, TRBJ1-2)
CASSVPGQDGDTF

SEQ ID NO: 112201 - protein, 13 aa, Homo sapiens
  CDR3 for alpha chain variable domain of TCR clone 56101 (TRAV12-2, TRAJ20)
CAVYPSNDYKLSF

SEQ ID NO: 112202 - protein, 15 aa, Homo sapiens
  CDR3 for beta chain variable domain of TCR clone 56101 (TRBV18, TRBJ1-2)
RASSPGNGLGYGYTF

SEQ ID NO: 112203 - protein, 12 aa, Homo sapiens
  CDR3 for alpha chain variable domain of TCR clone 56102 (TRAV8-4, TRAJ43)
CAVSVNNDDMRF

SEQ ID NO: 112204 - protein, 18 aa, Homo sapiens
  CDR3 for beta chain variable domain of TCR clone 56102 (TRBV5-7, TRBJ2-2)
CASSLGASGGLNTGELFF

SEQ ID NO: 112205 - protein, 11 aa, Homo sapiens
  CDR3 for alpha chain variable domain of TCR clone 56103 (TRAV2, TRAJ33)
CAVESNYQLIW

SEQ ID NO: 112206 - protein, 18 aa, Homo sapiens
  CDR3 for beta chain variable domain of TCR clone 56103 (TRBV7-9, TRBJ2-7)
CASSLTTSGSRTWYEQYF

SEQ ID NO: 112207 - protein, 16 aa, Homo sapiens
  CDR3 for alpha chain variable domain of TCR clone 56104 (TRAV13-2, TRAJ22)
RAENRGSSGSARQLTF

SEQ ID NO: 112208 - protein, 17 aa, Homo sapiens
  CDR3 for beta chain variable domain of TCR clone 56104 (TRBV14, TRBJ2-1)
CASSQDRRVSSYNEQFF

SEQ ID NO: 112209 - protein, 12 aa, Homo sapiens
  CDR3 for alpha chain variable domain of TCR clone 56105 (TRAV17, TRAJ49)
CATVTTGNQFYF

SEQ ID NO: 112210 - protein, 13 aa, Homo sapiens
  CDR3 for beta chain variable domain of TCR clone 56105 (TRBV7-2, TRBJ2-2)
CASSLAVTGELFL

SEQ ID NO: 112211 - protein, 15 aa, Homo sapiens
  CDR3 for alpha chain variable domain of TCR clone 56106 (TRAV8-3, TRAJ15)
CAVGAPNQAGTALIF

SEQ ID NO: 112212 - protein, 14 aa, Homo sapiens
  CDR3 for beta chain variable domain of TCR clone 56106 (TRBV20-1, TRBJ2-1)
CSPNDEAAYNEQFF

SEQ ID NO: 112213 - protein, 13 aa, Homo sapiens
  CDR3 for alpha chain variable domain of TCR clone 56107 (TRAV3, TRAJ27)
CAVRPLGAGKSTF

SEQ ID NO: 112214 - protein, 13 aa, Homo sapiens
  CDR3 for beta chain variable domain of TCR clone 56107 (TRBV10-3, TRBJ2-7)
CASKLAVNYEQYF

SEQ ID NO: 112215 - protein, 13 aa, Homo sapiens
  CDR3 for alpha chain variable domain of TCR clone 56108 (TRAV2, TRAJ29)
CAVYSSGNTPLVF

SEQ ID NO: 112216 - protein, 14 aa, Homo sapiens
  CDR3 for beta chain variable domain of TCR clone 56108 (TRBV7-9, TRBJ1-1)
CAGSLGGLKTEAFF

SEQ ID NO: 112217 - protein, 13 aa, Homo sapiens
  CDR3 for alpha chain variable domain of TCR clone 56109 (TRAV21, TRAJ20)
CAVGLRVDYKLSF

SEQ ID NO: 112218 - protein, 13 aa, Homo sapiens
  CDR3 for beta chain variable domain of TCR clone 56109 (TRBV6-1, TRBJ1-1)
CASSRQGNTGAFS

SEQ ID NO: 112219 - protein, 14 aa, Homo sapiens
  CDR3 for alpha chain variable domain of TCR clone 56110 (TRAV12-2, TRAJ13)
CAVKKTGGYQEVTF

SEQ ID NO: 112220 - protein, 17 aa, Homo sapiens
  CDR3 for beta chain variable domain of TCR clone 56110 (TRBV13, TRBJ2-3)
CASSLSRVAGGRNTQYF

SEQ ID NO: 112221 - protein, 13 aa, Homo sapiens
  CDR3 for alpha chain variable domain of TCR clone 56111 (TRAV16, TRAJ22)
RQLTLGSGTQLTV

SEQ ID NO: 112222 - protein, 15 aa, Homo sapiens
  CDR3 for beta chain variable domain of TCR clone 56111 (TRBV7-9, TRBJ1-6)
CASSSPGRGNSPLHF

SEQ ID NO: 112223 - protein, 14 aa, Homo sapiens
  CDR3 for alpha chain variable domain of TCR clone 56112 (TRAV1-2, TRAJ8)
CAVREDTGFKKLVF

SEQ ID NO: 112224 - protein, 16 aa, Homo sapiens
  CDR3 for beta chain variable domain of TCR clone 56112 (TRBV12-4, TRBJ1-5)
CASSRPVGGSNQPQHF

SEQ ID NO: 112225 - protein, 11 aa, Homo sapiens
  CDR3 for alpha chain variable domain of TCR clone 56113 (TRAV2, TRAJ13)
CASGGYQKVTF

SEQ ID NO: 112226 - protein, 16 aa, Homo sapiens
  CDR3 for beta chain variable domain of TCR clone 56113 (TRBV6-1, TRBJ2-5)
CASSETLDRGAETQFF

SEQ ID NO: 112227 - protein, 13 aa, Homo sapiens
  CDR3 for alpha chain variable domain of TCR clone 56114 (TRAV35, TRAJ42)
CAGFPGSQGNLIF

SEQ ID NO: 112228 - protein, 13 aa, Homo sapiens
  CDR3 for beta chain variable domain of TCR clone 56114 (TRBV3-1, TRBJ1-5)
CASSQFGDQPQHF

SEQ ID NO: 112229 - protein, 15 aa, Homo sapiens
  CDR3 for alpha chain variable domain of TCR clone 56115 (TRAV8-2, TRAJ40)
CVVLGTTSGTYKYIF

SEQ ID NO: 112230 - protein, 16 aa, Homo sapiens
  CDR3 for beta chain variable domain of TCR clone 56115 (TRBV7-3, TRBJ2-1)
YASSLEGYRSYNEQFF

SEQ ID NO: 112231 - protein, 18 aa, Homo sapiens
  CDR3 for alpha chain variable domain of TCR clone 56116 (TRAV21, TRAJ52)
CAVRPSPAGGTSYGKLTF

SEQ ID NO: 112232 - protein, 17 aa, Homo sapiens
  CDR3 for beta chain variable domain of TCR clone 56116 (TRBV25-1, TRBJ2-1)
CASSAYGQGRGVYEQLF

SEQ ID NO: 112233 - protein, 14 aa, Homo sapiens
  CDR3 for alpha chain variable domain of TCR clone 56117 (TRAV8-1, TRAJ36)
CAVNSPTGAKNLFF

SEQ ID NO: 112234 - protein, 15 aa, Homo sapiens
  CDR3 for beta chain variable domain of TCR clone 56117 (TRBV7-2, TRBJ2-3)
CASSLEQGGTDTQYF

SEQ ID NO: 112235 - protein, 15 aa, Homo sapiens
  CDR3 for alpha chain variable domain of TCR clone 56118 (TRAV25, TRAJ53)
CPTSNSGGSNYQLTF

SEQ ID NO: 112236 - protein, 14 aa, Homo sapiens
  CDR3 for beta chain variable domain of TCR clone 56118 (TRBV11-2, TRBJ2-3)
CASSRLARTDTQYF

SEQ ID NO: 112237 - protein, 12 aa, Homo sapiens
  CDR3 for alpha chain variable domain of TCR clone 56119 (TRAV13-1, TRAJ21)
CAAKEGFNKFYF

SEQ ID NO: 112238 - protein, 14 aa, Homo sapiens
  CDR3 for beta chain variable domain of TCR clone 56119 (TRBV23-1, TRBJ2-5)
CASSFLRSQETQHF

SEQ ID NO: 112239 - protein, 15 aa, Homo sapiens
  CDR3 for alpha chain variable domain of TCR clone 56120 (TRAV17, TRAJ37)
CATDHGSSNTGKLIF

SEQ ID NO: 112240 - protein, 14 aa, Homo sapiens
  CDR3 for beta chain variable domain of TCR clone 56120 (TRBV7-2, TRBJ2-3)
CASSRTGGADTQYF

SEQ ID NO: 112241 - protein, 11 aa, Homo sapiens
  CDR3 for alpha chain variable domain of TCR clone 56121 (TRAV26-1, TRAJ27)
CIDPNAGKSTF

SEQ ID NO: 112242 - protein, 18 aa, Homo sapiens
  CDR3 for beta chain variable domain of TCR clone 56121 (TRBV7-9, TRBJ2-6)
CASSFPGAGISGANALTF

SEQ ID NO: 112243 - protein, 11 aa, Homo sapiens
  CDR3 for alpha chain variable domain of TCR clone 56122 (TRAV17, TRAJ9)
CGFTGGFKTIF

SEQ ID NO: 112244 - protein, 16 aa, Homo sapiens
  CDR3 for beta chain variable domain of TCR clone 56122 (TRBV28, TRBJ2-2)
CASSPAGQANTGELFF

SEQ ID NO: 112245 - protein, 15 aa, Homo sapiens
  CDR3 for alpha chain variable domain of TCR clone 56123 (TRAV8-3, TRAJ11)
CAVGLLNSGYSTLTF

SEQ ID NO: 112246 - protein, 12 aa, Homo sapiens
  CDR3 for beta chain variable domain of TCR clone 56123 (TRBV11-2, TRBJ2-2)
CASSLGGGELFF

SEQ ID NO: 112247 - protein, 13 aa, Homo sapiens
  CDR3 for alpha chain variable domain of TCR clone 56124 (TRAV12-2, TRAJ20)
CAVYPSNDYKLSF

SEQ ID NO: 112248 - protein, 15 aa, Homo sapiens
  CDR3 for beta chain variable domain of TCR clone 56124 (TRBV18, TRBJ1-2)
CASSPGNGLGYGDTF

SEQ ID NO: 112249 - protein, 14 aa, Homo sapiens
  CDR3 for alpha chain variable domain of TCR clone 56125 (TRAV9-2, TRAJ39)
CALYIYNAGNMLTF

SEQ ID NO: 112250 - protein, 14 aa, Homo sapiens
  CDR3 for beta chain variable domain of TCR clone 56125 (TRBV19, TRBJ2-2)
CASSGQGIAGELFF

SEQ ID NO: 112251 - protein, 13 aa, Homo sapiens
  CDR3 for alpha chain variable domain of TCR clone 56126 (TRAV13-2, TRAJ40)
CAEFTSGTYKYIF

SEQ ID NO: 112252 - protein, 12 aa, Homo sapiens
  CDR3 for beta chain variable domain of TCR clone 56126 (TRBV11-2, TRBJ2-2)
CASSLGGGELFL

SEQ ID NO: 112253 - protein, 18 aa, Homo sapiens
  CDR3 for alpha chain variable domain of TCR clone 56127 (TRAV13-1, TRAJ52)
CAAKNPNASGTSYGKLTF

SEQ ID NO: 112254 - protein, 15 aa, Homo sapiens
  CDR3 for beta chain variable domain of TCR clone 56127 (TRBV6-1, TRBJ2-3)
CASSERGGITDTQYF

SEQ ID NO: 112255 - protein, 14 aa, Homo sapiens
  CDR3 for alpha chain variable domain of TCR clone 56128 (TRAV8-4, TRAJ9)
CAVRINTGGFKTIF

SEQ ID NO: 112256 - protein, 15 aa, Homo sapiens
  CDR3 for beta chain variable domain of TCR clone 56128 (TRBV10-2, TRBJ2-6)
CASSEQGTWANVLTF

SEQ ID NO: 112257 - protein, 15 aa, Homo sapiens
  CDR3 for alpha chain variable domain of TCR clone 56129 (TRAV21, TRAJ32)
CAVNSYGGATNKLIF

SEQ ID NO: 112258 - protein, 13 aa, Homo sapiens
  CDR3 for beta chain variable domain of TCR clone 56129 (TRBV29-1, TRBJ2-5)
CSVLLASGETQYF

SEQ ID NO: 112259 - protein, 16 aa, Homo sapiens
  CDR3 for alpha chain variable domain of TCR clone 56130 (TRAV30, TRAJ24)
CGTEIVDADSRGKFQF

SEQ ID NO: 112260 - protein, 15 aa, Homo sapiens
  CDR3 for beta chain variable domain of TCR clone 56130 (TRBV6-3, TRBJ2-7)
CASSPPGTVFYEQYF

SEQ ID NO: 112261 - protein, 14 aa, Homo sapiens
  CDR3 for alpha chain variable domain of TCR clone 56131 (TRAV17, TRAJ22)
CATSPSGSARQLTF

SEQ ID NO: 112262 - protein, 15 aa, Homo sapiens
  CDR3 for beta chain variable domain of TCR clone 56131 (TRBV4-1, TRBJ2-5)
CASSQRDLYQETQYF

SEQ ID NO: 112263 - protein, 18 aa, Homo sapiens
  CDR3 for alpha chain variable domain of TCR clone 56132 (TRAV13-2, TRAJ52)
CAETPLNAGGTSYGKLTF

SEQ ID NO: 112264 - protein, 12 aa, Homo sapiens
  CDR3 for beta chain variable domain of TCR clone 56132 (TRBV19, TRBJ1-5)
CASSIAQQPQHF

SEQ ID NO: 112265 - protein, 15 aa, Homo sapiens
  CDR3 for alpha chain variable domain of TCR clone 56133 (TRAV3, TRAJ32)
CAVSSYGGATSKLIF

SEQ ID NO: 112266 - protein, 13 aa, Homo sapiens
  CDR3 for beta chain variable domain of TCR clone 56133 (TRBV20-1, TRBJ2-7)
CSARPSTNYEQYF

SEQ ID NO: 112267 - protein, 11 aa, Homo sapiens
  CDR3 for alpha chain variable domain of TCR clone 56134 (TRAV17, TRAJ9)
CATTGGFKTIF

SEQ ID NO: 112268 - protein, 14 aa, Homo sapiens
  CDR3 for beta chain variable domain of TCR clone 56134 (TRBV7-9, TRBJ2-2)
YASSGLADTGELFF

SEQ ID NO: 112269 - protein, 14 aa, Homo sapiens
  CDR3 for alpha chain variable domain of TCR clone 56135 (TRAV1-2, TRAJ8)
CAVREDTGFQKLVS

SEQ ID NO: 112270 - protein, 16 aa, Homo sapiens
  CDR3 for beta chain variable domain of TCR clone 56135 (TRBV29-1, TRBJ2-6)
CSVEDITYSGANVLTF

SEQ ID NO: 112271 - protein, 14 aa, Homo sapiens
  CDR3 for alpha chain variable domain of TCR clone 56136 (TRAV1-2, TRAJ16)
CAVNRFSDGQKLLF

SEQ ID NO: 112272 - protein, 10 aa, Homo sapiens
  CDR3 for beta chain variable domain of TCR clone 56136 (TRBV10-3, TRBJ2-7)
CAATSNEQYF

SEQ ID NO: 112273 - protein, 15 aa, Homo sapiens
  CDR3 for alpha chain variable domain of TCR clone 56137 (TRAV21, TRAJ53)
CATLNSGGSNYKLTF

SEQ ID NO: 112274 - protein, 16 aa, Homo sapiens
  CDR3 for beta chain variable domain of TCR clone 56137 (TRBV24-1, TRBJ2-3)
CATSDPGTGATDTRYF

SEQ ID NO: 112275 - protein, 16 aa, Homo sapiens
  CDR3 for alpha chain variable domain of TCR clone 56138 (TRAV35, TRAJ28)
CAGQRYSGAGSYQLTF

SEQ ID NO: 112276 - protein, 13 aa, Homo sapiens
  CDR3 for beta chain variable domain of TCR clone 56138 (TRBV27, TRBJ1-4)
CASSLMGDEKLFF

SEQ ID NO: 112277 - protein, 16 aa, Homo sapiens
  CDR3 for alpha chain variable domain of TCR clone 56139 (TRAV25, TRAJ53)
CAGPKGSGGSNYKLTF

SEQ ID NO: 112278 - protein, 15 aa, Homo sapiens
  CDR3 for beta chain variable domain of TCR clone 56139 (TRBV6-3, TRBJ2-7)
CANSSPGTVFYKQYF

SEQ ID NO: 112279 - protein, 13 aa, Homo sapiens
  CDR3 for alpha chain variable domain of TCR clone 56140 (TRAV21, TRAJ27)
CAALNTNPGKSTF

SEQ ID NO: 112280 - protein, 14 aa, Homo sapiens
  CDR3 for beta chain variable domain of TCR clone 56140 (TRBV27, TRBJ1-1)
CASSLLSGLSEAFF

SEQ ID NO: 112281 - protein, 14 aa, Homo sapiens
  CDR3 for alpha chain variable domain of TCR clone 56141 (TRAV12-2, TRAJ40)
CAVKIPSGTYTYIF

SEQ ID NO: 112282 - protein, 17 aa, Homo sapiens
  CDR3 for beta chain variable domain of TCR clone 56141 (TRBV13, TRBJ2-3)
CASSLSRVAGGRNTQYF

SEQ ID NO: 112283 - protein, 12 aa, Homo sapiens
  CDR3 for alpha chain variable domain of TCR clone 56142 (TRAV12-3, TRAJ17)
CAMTLTDNKLTF

SEQ ID NO: 112284 - protein, 15 aa, Homo sapiens
  CDR3 for beta chain variable domain of TCR clone 56142 (TRBV20-1, TRBJ2-7)
CSARDQVSGMDEQYF

SEQ ID NO: 112285 - protein, 13 aa, Homo sapiens
  CDR3 for alpha chain variable domain of TCR clone 56143 (TRAV21, TRAJ47)
CAVSWLYGNKLVF

SEQ ID NO: 112286 - protein, 17 aa, Homo sapiens
  CDR3 for beta chain variable domain of TCR clone 56143 (TRBV15, TRBJ2-3)
CATSGTTSEEGTDTQYF

SEQ ID NO: 112287 - protein, 15 aa, Homo sapiens
  CDR3 for alpha chain variable domain of TCR clone 56144 (TRAV12-2, TRAJ53)
CTVNGGGGSNYKLTF

SEQ ID NO: 112288 - protein, 13 aa, Homo sapiens
  CDR3 for beta chain variable domain of TCR clone 56144 (TRBV3-1, TRBJ1-1)
CASSPGVITEAFF

SEQ ID NO: 112289 - protein, 15 aa, Homo sapiens
  CDR3 for alpha chain variable domain of TCR clone 56145 (TRAV3, TRAJ4)
CAVRDGTGGYNKLIF

SEQ ID NO: 112290 - protein, 16 aa, Homo sapiens
  CDR3 for beta chain variable domain of TCR clone 56145 (TRBV27, TRBJ2-2)
CASSSSGVSNTGELVF

SEQ ID NO: 112291 - protein, 17 aa, Homo sapiens
  CDR3 for alpha chain variable domain of TCR clone 56146 (TRAV36/DV7, TRAJ52)
CAVAQRAGGTSYGKLTF

SEQ ID NO: 112292 - protein, 16 aa, Homo sapiens
  CDR3 for beta chain variable domain of TCR clone 56146 (TRBV2, TRBJ2-1)
CASSVGGSLSYNEQFF

SEQ ID NO: 112293 - protein, 17 aa, Homo sapiens
  CDR3 for alpha chain variable domain of TCR clone 56147 (TRAV3, TRAJ6)
CAVRDGPRAGGSYIPTF

SEQ ID NO: 112294 - protein, 17 aa, Homo sapiens
  CDR3 for beta chain variable domain of TCR clone 56147 (TRBV5-4, TRBJ2-1)
CASSSAGGRGPYNEQFF

SEQ ID NO: 112295 - protein, 14 aa, Homo sapiens
  CDR3 for alpha chain variable domain of TCR clone 56148 (TRAV13-1, TRAJ13)
CAASRVGGYQKVTF

SEQ ID NO: 112296 - protein, 17 aa, Homo sapiens
  CDR3 for beta chain variable domain of TCR clone 56148 (TRBV15, TRBJ1-5)
CATSRAPPGTRNQPQHC

SEQ ID NO: 112297 - protein, 19 aa, Homo sapiens
  CDR3 for alpha chain variable domain of TCR clone 56149 (TRAV26-1, TRAJ52)
CIVRAHRNAGGTSYGQLTF

SEQ ID NO: 112298 - protein, 15 aa, Homo sapiens
  CDR3 for beta chain variable domain of TCR clone 56149 (TRBV12-4, TRBJ2-5)
CASSPPTGLQETQYF

SEQ ID NO: 112299 - protein, 15 aa, Homo sapiens
  CDR3 for alpha chain variable domain of TCR clone 56150 (TRAV12-3, TRAJ6)
CAMSATTGGSYIPTF

SEQ ID NO: 112300 - protein, 16 aa, Homo sapiens
  CDR3 for beta chain variable domain of TCR clone 56150 (TRBV20-1, TRBJ1-2)
RSASMGQGVANYGYTF

SEQ ID NO: 112301 - protein, 10 aa, Homo sapiens
  CDR3 for alpha chain variable domain of TCR clone 56151 (TRAV12-3, TRAJ49)
CAMNDDQFYF

SEQ ID NO: 112302 - protein, 13 aa, Homo sapiens
  CDR3 for beta chain variable domain of TCR clone 56151 (TRBV12-4, TRBJ1-1)
CASIPGTGFEAFF

SEQ ID NO: 112303 - protein, 13 aa, Homo sapiens
  CDR3 for alpha chain variable domain of TCR clone 56152 (TRAV36/DV7, TRAJ34)
CAVGEVNTDKLIF

SEQ ID NO: 112304 - protein, 12 aa, Homo sapiens
  CDR3 for beta chain variable domain of TCR clone 56152 (TRBV28, TRBJ2-3)
CASSLYRDTQYF

SEQ ID NO: 112305 - protein, 18 aa, Homo sapiens
  CDR3 for alpha chain variable domain of TCR clone 56153 (TRAV9-2, TRAJ52)
CALSRHNAGGTSYGKLTF

SEQ ID NO: 112306 - protein, 14 aa, Homo sapiens
  CDR3 for beta chain variable domain of TCR clone 56153 (TRBV25-1, TRBJ1-1)
CASTHLGGNTEAFF

SEQ ID NO: 112307 - protein, 13 aa, Homo sapiens
  CDR3 for alpha chain variable domain of TCR clone 56154 (TRAV26-2, TRAJ43)
CILRAVNNNDIRF

SEQ ID NO: 112308 - protein, 11 aa, Homo sapiens
  CDR3 for beta chain variable domain of TCR clone 56154 (TRBV29-1, TRBJ2-5)
CSEDRTGTQYF

SEQ ID NO: 112309 - protein, 14 aa, Homo sapiens
  CDR3 for alpha chain variable domain of TCR clone 56155 (TRAV12-3, TRAJ15)
CAMIPPQAGTAPIF

SEQ ID NO: 112310 - protein, 14 aa, Homo sapiens
  CDR3 for beta chain variable domain of TCR clone 56155 (TRBV20-1, TRBJ2-2)
CSARKRLATGELFF

SEQ ID NO: 112311 - protein, 20 aa, Homo sapiens
  CDR3 for alpha chain variable domain of TCR clone 56156 (TRAV26-1, TRAJ42)
CCVLLHRQTYYGGSQGNLIF

SEQ ID NO: 112312 - protein, 15 aa, Homo sapiens
  CDR3 for beta chain variable domain of TCR clone 56156 (TRBV6-3, TRBJ2-7)
CASSSPGTVFYEQYF

SEQ ID NO: 112313 - protein, 14 aa, Homo sapiens
  CDR3 for alpha chain variable domain of TCR clone 56157 (TRAV26-1, TRAJ38)
CIADNAGNNLKLIW

SEQ ID NO: 112314 - protein, 15 aa, Homo sapiens
  CDR3 for beta chain variable domain of TCR clone 56157 (TRBV18, TRBJ2-1)
CASSPPSASYNEQFF

SEQ ID NO: 112315 - protein, 12 aa, Homo sapiens
  CDR3 for alpha chain variable domain of TCR clone 56158 (TRAV21, TRAJ49)
CAVSWTGNQFYF

SEQ ID NO: 112316 - protein, 15 aa, Homo sapiens
  CDR3 for beta chain variable domain of TCR clone 56158 (TRBV11-2, TRBJ2-1)
CASSLGTSGLNEQFF

SEQ ID NO: 112317 - protein, 15 aa, Homo sapiens
  CDR3 for alpha chain variable domain of TCR clone 56159 (TRAV4, TRAJ36)
CLVGDRQTGANNLLF

SEQ ID NO: 112318 - protein, 15 aa, Homo sapiens
  CDR3 for beta chain variable domain of TCR clone 56159 (TRBV7-6, TRBJ2-1)
CASSSLAGEGNEQFF

SEQ ID NO: 112319 - protein, 17 aa, Homo sapiens
  CDR3 for alpha chain variable domain of TCR clone 56160 (TRAV12-2, TRAJ48)
CASNEKLTFGTGTRLTI

SEQ ID NO: 112320 - protein, 15 aa, Homo sapiens
  CDR3 for beta chain variable domain of TCR clone 56160 (TRBV4-1, TRBJ2-5)
CASSQWDLYQETQYF

SEQ ID NO: 112321 - protein, 13 aa, Homo sapiens
  CDR3 for alpha chain variable domain of TCR clone 56161 (TRAV13-1, TRAJ12)
CSKYMGSSYKLIF

SEQ ID NO: 112322 - protein, 13 aa, Homo sapiens
  CDR3 for beta chain variable domain of TCR clone 56161 (TRBV4-1, TRBJ2-1)
CASSQAGGDEQFF

SEQ ID NO: 112323 - protein, 16 aa, Homo sapiens
  CDR3 for alpha chain variable domain of TCR clone 56162 (TRAV12-2, TRAJ32)
CAVNLGQGGATNKLIF

SEQ ID NO: 112324 - protein, 15 aa, Homo sapiens
  CDR3 for beta chain variable domain of TCR clone 56162 (TRBV20-1, TRBJ2-7)
RSARGPLAGGREQYF

SEQ ID NO: 112325 - protein, 13 aa, Homo sapiens
  CDR3 for alpha chain variable domain of TCR clone 56163 (TRAV16, TRAJ9)
CALRATGGFKTIF

SEQ ID NO: 112326 - protein, 16 aa, Homo sapiens
  CDR3 for beta chain variable domain of TCR clone 56163 (TRBV5-1, TRBJ1-3)
CASSRSWEDSGNTICF

SEQ ID NO: 112327 - protein, 15 aa, Homo sapiens
  CDR3 for alpha chain variable domain of TCR clone 56164 (TRAV26-1, TRAJ40)
CIVRVTTSGTYKYIF

SEQ ID NO: 112328 - protein, 16 aa, Homo sapiens
  CDR3 for beta chain variable domain of TCR clone 56164 (TRBV12-5, TRBJ2-5)
CASGPRTSGNQETQYF

SEQ ID NO: 112329 - protein, 10 aa, Homo sapiens
  CDR3 for alpha chain variable domain of TCR clone 56165 (TRAV1-2, TRAJ34)
CAVNTDKLIL

SEQ ID NO: 112330 - protein, 18 aa, Homo sapiens
  CDR3 for beta chain variable domain of TCR clone 56165 (TRBV7-9, TRBJ2-7)
CASSLTTSGSRTWYEQYF

SEQ ID NO: 112331 - protein, 15 aa, Homo sapiens
  CDR3 for alpha chain variable domain of TCR clone 56166 (TRAV8-2, TRAJ24)
CVVSDRTDSWGKLQS

SEQ ID NO: 112332 - protein, 11 aa, Homo sapiens
  CDR3 for beta chain variable domain of TCR clone 56166 (TRBV20-1, TRBJ1-2)
CSVQGAGGYTF

SEQ ID NO: 112333 - protein, 13 aa, Homo sapiens
  CDR3 for alpha chain variable domain of TCR clone 56167 (TRAV39, TRAJ58)
CAGEETSGARLTF

SEQ ID NO: 112334 - protein, 13 aa, Homo sapiens
  CDR3 for beta chain variable domain of TCR clone 56167 (TRBV15, TRBJ2-7)
CATSTTGHYEQYF

SEQ ID NO: 112335 - protein, 12 aa, Homo sapiens
  CDR3 for alpha chain variable domain of TCR clone 56168 (TRAV1-1, TRAJ20)
CAVGEDDYKLSF

SEQ ID NO: 112336 - protein, 18 aa, Homo sapiens
  CDR3 for beta chain variable domain of TCR clone 56168 (TRBV20-1, TRBJ2-3)
CSASGLAGGPGTTDTQYF

SEQ ID NO: 112337 - protein, 14 aa, Homo sapiens
  CDR3 for alpha chain variable domain of TCR clone 56169 (TRAV29/DV5, TRAJ36)
CAARRKTGANNLFF

SEQ ID NO: 112338 - protein, 14 aa, Homo sapiens
  CDR3 for beta chain variable domain of TCR clone 56169 (TRBV11-2, TRBJ2-7)
CASSLGAGAYEQYF

SEQ ID NO: 112339 - protein, 15 aa, Homo sapiens
  CDR3 for alpha chain variable domain of TCR clone 56170 (TRAV12-1, TRAJ41)
CVVNSRTGSGYALNL

SEQ ID NO: 112340 - protein, 11 aa, Homo sapiens
  CDR3 for beta chain variable domain of TCR clone 56170 (TRBV6-4, TRBJ2-1)
CASSDSYAQFF

SEQ ID NO: 112341 - protein, 13 aa, Homo sapiens
  CDR3 for alpha chain variable domain of TCR clone 56171 (TRAV17, TRAJ5)
CAPMDTGMRALTF

SEQ ID NO: 112342 - protein, 15 aa, Homo sapiens
  CDR3 for beta chain variable domain of TCR clone 56171 (TRBV6-6, TRBJ2-5)
CASSPGGGLEETQYF

SEQ ID NO: 112343 - protein, 14 aa, Homo sapiens
  CDR3 for alpha chain variable domain of TCR clone 56172 (TRAV3, TRAJ9)
CAVRLTTGGFKTIF

SEQ ID NO: 112344 - protein, 15 aa, Homo sapiens
  CDR3 for beta chain variable domain of TCR clone 56172 (TRBV7-2, TRBJ2-1)
CASSLASGRVNEQFF

SEQ ID NO: 112345 - protein, 12 aa, Homo sapiens
  CDR3 for alpha chain variable domain of TCR clone 56173 (TRAV27, TRAJ42)
CAGGGSQGNLIF

SEQ ID NO: 112346 - protein, 14 aa, Homo sapiens
  CDR3 for beta chain variable domain of TCR clone 56173 (TRBV7-6, TRBJ2-3)
CASSLGTVTDTQYF

SEQ ID NO: 112347 - protein, 17 aa, Homo sapiens
  CDR3 for alpha chain variable domain of TCR clone 56174 (TRAV3, TRAJ6)
CAVRDGPRAGGSYTPAF

SEQ ID NO: 112348 - protein, 14 aa, Homo sapiens
  CDR3 for beta chain variable domain of TCR clone 56174 (TRBV7-2, TRBJ2-7)
CASSPKTSFYEQYF

SEQ ID NO: 112349 - protein, 13 aa, Homo sapiens
  CDR3 for alpha chain variable domain of TCR clone 56175 (TRAV1-2, TRAJ12)
CAASMDSSYKLIF

SEQ ID NO: 112350 - protein, 15 aa, Homo sapiens
  CDR3 for beta chain variable domain of TCR clone 56175 (TRBV27, TRBJ2-5)
CASSLIPSGGETQYF

SEQ ID NO: 112351 - protein, 16 aa, Homo sapiens
  CDR3 for alpha chain variable domain of TCR clone 56176 (TRAV12-1, TRAJ45)
CVVIRYSGGGADGLTF

SEQ ID NO: 112352 - protein, 12 aa, Homo sapiens
  CDR3 for beta chain variable domain of TCR clone 56176 (TRBV6-5, TRBJ2-2)
CASRQITGELLF

SEQ ID NO: 112353 - protein, 13 aa, Homo sapiens
  CDR3 for alpha chain variable domain of TCR clone 56177 (TRAV30, TRAJ24)
CGTVTDSWGNCSL

SEQ ID NO: 112354 - protein, 15 aa, Homo sapiens
  CDR3 for beta chain variable domain of TCR clone 56177 (TRBV25-1, TRBJ1-4)
CASSPGDSTNEKLFF

SEQ ID NO: 112355 - protein, 12 aa, Homo sapiens
  CDR3 for alpha chain variable domain of TCR clone 56178 (TRAV2, TRAJ37)
CAVTMNAGKLIF

SEQ ID NO: 112356 - protein, 15 aa, Homo sapiens
  CDR3 for beta chain variable domain of TCR clone 56178 (TRBV5-1, TRBJ2-5)
CASSFGGPPQETQYF

SEQ ID NO: 112357 - protein, 14 aa, Homo sapiens
  CDR3 for alpha chain variable domain of TCR clone 56179 (TRAV8-1, TRAJ5)
CAVRTDTGRRALTF

SEQ ID NO: 112358 - protein, 16 aa, Homo sapiens
  CDR3 for beta chain variable domain of TCR clone 56179 (TRBV28, TRBJ2-7)
CASSSGTSGRGYEQYF

SEQ ID NO: 112359 - protein, 16 aa, Homo sapiens
  CDR3 for alpha chain variable domain of TCR clone 56180 (TRAV3, TRAJ10)
CAVRDMRAGGGNKLTF

SEQ ID NO: 112360 - protein, 13 aa, Homo sapiens
  CDR3 for beta chain variable domain of TCR clone 56180 (TRBV2, TRBJ2-1)
CASISGGNNEQFF

SEQ ID NO: 112361 - protein, 16 aa, Homo sapiens
  CDR3 for alpha chain variable domain of TCR clone 56181 (TRAV26-2, TRAJ45)
CTTASPIGGGANGLTF

SEQ ID NO: 112362 - protein, 20 aa, Homo sapiens
  CDR3 for beta chain variable domain of TCR clone 56181 (TRBV28, TRBJ2-1)
CASTPIGRSPGLAGGNEQFF

SEQ ID NO: 112363 - protein, 13 aa, Homo sapiens
  CDR3 for alpha chain variable domain of TCR clone 56182 (TRAV27, TRAJ29)
CAGVHSGNTPLVF

SEQ ID NO: 112364 - protein, 14 aa, Homo sapiens
  CDR3 for beta chain variable domain of TCR clone 56182 (TRBV25-1, TRBJ1-1)
CASTHLGGNTEAFF

SEQ ID NO: 112365 - protein, 12 aa, Homo sapiens
  CDR3 for alpha chain variable domain of TCR clone 56183 (TRAV3, TRAJ20)
CAVRDPDYKLSF

SEQ ID NO: 112366 - protein, 13 aa, Homo sapiens
  CDR3 for beta chain variable domain of TCR clone 56183 (TRBV9, TRBJ2-1)
CASSGGQGGEQFF

SEQ ID NO: 112367 - protein, 17 aa, Homo sapiens
  CDR3 for alpha chain variable domain of TCR clone 56184 (TRAV14/DV4, TRAJ28)
CAMREVSSGAGSYQLTF

SEQ ID NO: 112368 - protein, 15 aa, Homo sapiens
  CDR3 for beta chain variable domain of TCR clone 56184 (TRBV11-2, TRBJ1-6)
CASILRETGNSPLHF

SEQ ID NO: 112369 - protein, 15 aa, Homo sapiens
  CDR3 for alpha chain variable domain of TCR clone 56185 (TRAV27, TRAJ38)
CAARRNAGNNRKLIW

SEQ ID NO: 112370 - protein, 12 aa, Homo sapiens
  CDR3 for beta chain variable domain of TCR clone 56185 (TRBV7-8, TRBJ2-7)
CASSLGDREQYF

SEQ ID NO: 112371 - protein, 11 aa, Homo sapiens
  CDR3 for alpha chain variable domain of TCR clone 56186 (TRAV8-6, TRAJ20)
CAVSYDYKLSF

SEQ ID NO: 112372 - protein, 14 aa, Homo sapiens
  CDR3 for beta chain variable domain of TCR clone 56186 (TRBV13, TRBJ2-7)
CASSLKGASYEQYF

SEQ ID NO: 112373 - protein, 12 aa, Homo sapiens
  CDR3 for alpha chain variable domain of TCR clone 56187 (TRAV8-3, TRAJ26)
FAGDNYGQNFVF

SEQ ID NO: 112374 - protein, 15 aa, Homo sapiens
  CDR3 for beta chain variable domain of TCR clone 56187 (TRBV9, TRBJ2-1)
CASSLAGSSYNEQFF

SEQ ID NO: 112375 - protein, 14 aa, Homo sapiens
  CDR3 for alpha chain variable domain of TCR clone 56188 (TRAV8-4, TRAJ9)
CAMRINTGGFKTIF

SEQ ID NO: 112376 - protein, 15 aa, Homo sapiens
  CDR3 for beta chain variable domain of TCR clone 56188 (TRBV10-2, TRBJ2-6)
YASSEQGTGANVLTF

SEQ ID NO: 112377 - protein, 19 aa, Homo sapiens
  CDR3 for alpha chain variable domain of TCR clone 56189 (TRAV17, TRAJ17)
CATDGRPGVIKAAGNKLTF

SEQ ID NO: 112378 - protein, 17 aa, Homo sapiens
  CDR3 for beta chain variable domain of TCR clone 56189 (TRBV12-4, TRBJ1-1)
CASSLSGFRTTNTEAFF

SEQ ID NO: 112379 - protein, 14 aa, Homo sapiens
  CDR3 for alpha chain variable domain of TCR clone 56190 (TRAV12-2, TRAJ17)
CAVLFKAAGNKLTF

SEQ ID NO: 112380 - protein, 15 aa, Homo sapiens
  CDR3 for beta chain variable domain of TCR clone 56190 (TRBV5-5, TRBJ1-5)
CASSSTPGSNQPQHF

SEQ ID NO: 112381 - protein, 11 aa, Homo sapiens
  CDR3 for alpha chain variable domain of TCR clone 56191 (TRAV23/DV6, TRAJ48)
CAPRWGEKLTF

SEQ ID NO: 112382 - protein, 13 aa, Homo sapiens
  CDR3 for beta chain variable domain of TCR clone 56191 (TRBV12-4, TRBJ2-5)
CDSSPGTEETQYF

SEQ ID NO: 112383 - protein, 14 aa, Homo sapiens
  CDR3 for alpha chain variable domain of TCR clone 56192 (TRAV12-3, TRAJ13)
CAMRNSGGYQKVTF

SEQ ID NO: 112384 - protein, 14 aa, Homo sapiens
  CDR3 for beta chain variable domain of TCR clone 56192 (TRBV4-1, TRBJ1-6)
CASSPGSDSSPLHS

SEQ ID NO: 112385 - protein, 11 aa, Homo sapiens
  CDR3 for alpha chain variable domain of TCR clone 56193 (TRAV4, TRAJ31)
CLVGDNARLMF

SEQ ID NO: 112386 - protein, 15 aa, Homo sapiens
  CDR3 for beta chain variable domain of TCR clone 56193 (TRBV10-2, TRBJ2-6)
CASSGQGTGANVLTF

SEQ ID NO: 112387 - protein, 11 aa, Homo sapiens
  CDR3 for alpha chain variable domain of TCR clone 56194 (TRAV3, TRAJ21)
CAVGNFNKFYF

SEQ ID NO: 112388 - protein, 16 aa, Homo sapiens
  CDR3 for beta chain variable domain of TCR clone 56194 (TRBV19, TRBJ2-1)
CASTKAGPSSYNEQFF

SEQ ID NO: 112389 - protein, 13 aa, Homo sapiens
  CDR3 for alpha chain variable domain of TCR clone 56195 (TRAV8-6, TRAJ9)
CAVWDTGGFKTIF

SEQ ID NO: 112390 - protein, 15 aa, Homo sapiens
  CDR3 for beta chain variable domain of TCR clone 56195 (TRBV6-3, TRBJ2-7)
CASSSPGTVFYEQYF

SEQ ID NO: 112391 - protein, 11 aa, Homo sapiens
  CDR3 for alpha chain variable domain of TCR clone 56196 (TRAV1-2, TRAJ20)
CAVANDYKLSF

SEQ ID NO: 112392 - protein, 18 aa, Homo sapiens
  CDR3 for beta chain variable domain of TCR clone 56196 (TRBV11-2, TRBJ2-3)
CASSLGGASRGAPNTQYF

SEQ ID NO: 112393 - protein, 15 aa, Homo sapiens
  CDR3 for alpha chain variable domain of TCR clone 56197 (TRAV4, TRAJ39)
CLVGPINNAGNMLTF

SEQ ID NO: 112394 - protein, 13 aa, Homo sapiens
  CDR3 for beta chain variable domain of TCR clone 56197 (TRBV11-2, TRBJ2-5)
CASSSTGEETQYF

SEQ ID NO: 112395 - protein, 11 aa, Homo sapiens
  CDR3 for alpha chain variable domain of TCR clone 56198 (TRAV2, TRAJ33)
CAVDGNYQLIW

SEQ ID NO: 112396 - protein, 13 aa, Homo sapiens
  CDR3 for beta chain variable domain of TCR clone 56198 (TRBV7-2, TRBJ2-7)
CASSSPSGSEQYF

SEQ ID NO: 112397 - protein, 18 aa, Homo sapiens
  CDR3 for alpha chain variable domain of TCR clone 56199 (TRAV21, TRAJ52)
CAVRPSPAGGTSYGKLTF

SEQ ID NO: 112398 - protein, 17 aa, Homo sapiens
  CDR3 for beta chain variable domain of TCR clone 56199 (TRBV13, TRBJ2-3)
CASSLSTVAGGRNTQYF

SEQ ID NO: 112399 - protein, 11 aa, Homo sapiens
  CDR3 for alpha chain variable domain of TCR clone 56200 (TRAV4, TRAJ23)
CLLAPGGKLIF

SEQ ID NO: 112400 - protein, 15 aa, Homo sapiens
  CDR3 for beta chain variable domain of TCR clone 56200 (TRBV7-2, TRBJ2-1)
CASSFQADEYNEQFF

SEQ ID NO: 112401 - protein, 10 aa, Homo sapiens
  CDR3 for alpha chain variable domain of TCR clone 56201 (TRAV1-2, TRAJ18)
CAVRGEAQPW

SEQ ID NO: 112402 - protein, 14 aa, Homo sapiens
  CDR3 for beta chain variable domain of TCR clone 56201 (TRBV7-2, TRBJ2-7)
CASSFKGQYHEQYF

SEQ ID NO: 112403 - protein, 13 aa, Homo sapiens
  CDR3 for alpha chain variable domain of TCR clone 56202 (TRAV20, TRAJ36)
CAVQGTGANNLFF

SEQ ID NO: 112404 - protein, 14 aa, Homo sapiens
  CDR3 for beta chain variable domain of TCR clone 56202 (TRBV12-5, TRBJ2-5)
CASGSRTHQETQDF

SEQ ID NO: 112405 - protein, 11 aa, Homo sapiens
  CDR3 for alpha chain variable domain of TCR clone 56203 (TRAV3, TRAJ13)
CAVTSYQKVTF

SEQ ID NO: 112406 - protein, 15 aa, Homo sapiens
  CDR3 for beta chain variable domain of TCR clone 56203 (TRBV7-9, TRBJ2-7)
CASSSSGLTVYEQYF

SEQ ID NO: 112407 - protein, 14 aa, Homo sapiens
  CDR3 for alpha chain variable domain of TCR clone 56204 (TRAV26-1, TRAJ38)
CIADNAGNNRKPIW

SEQ ID NO: 112408 - protein, 17 aa, Homo sapiens
  CDR3 for beta chain variable domain of TCR clone 56204 (TRBV7-9, TRBJ2-3)
CASSPTVAGDLTDTQYF

SEQ ID NO: 112409 - protein, 11 aa, Homo sapiens
  CDR3 for alpha chain variable domain of TCR clone 56205 (TRAV1-1, TRAJ23)
CAVRQGGKLIF

SEQ ID NO: 112410 - protein, 20 aa, Homo sapiens
  CDR3 for beta chain variable domain of TCR clone 56205 (TRBV7-8, TRBJ2-2)
CASSHLFPGPTIHITMELFF

SEQ ID NO: 112411 - protein, 16 aa, Homo sapiens
  CDR3 for alpha chain variable domain of TCR clone 56206 (TRAV13-1, TRAJ48)
CSKYRESNFGNEKLTF

SEQ ID NO: 112412 - protein, 17 aa, Homo sapiens
  CDR3 for beta chain variable domain of TCR clone 56206 (TRBV28, TRBJ2-1)
CASSSVRQALTYNEQFF

SEQ ID NO: 112413 - protein, 14 aa, Homo sapiens
  CDR3 for alpha chain variable domain of TCR clone 56207 (TRAV8-1, TRAJ27)
CAVNVGTSAGKSTF

SEQ ID NO: 112414 - protein, 17 aa, Homo sapiens
  CDR3 for beta chain variable domain of TCR clone 56207 (TRBV11-2, TRBJ2-1)
CASSLYPPRVEYNEQFF

SEQ ID NO: 112415 - protein, 23 aa, Homo sapiens
  CDR3 for alpha chain variable domain of TCR clone 56208 (TRAV30, TRAJ43)
CTLRPPSSVTQEPTSAAISDMRF

SEQ ID NO: 112416 - protein, 13 aa, Homo sapiens
  CDR3 for beta chain variable domain of TCR clone 56208 (TRBV12-4, TRBJ2-2)
CASSITGSGELFF

SEQ ID NO: 112417 - protein, 17 aa, Homo sapiens
  CDR3 for alpha chain variable domain of TCR clone 56209 (TRAV3, TRAJ6)
CAVRDGPRAGGSYIPTF

SEQ ID NO: 112418 - protein, 20 aa, Homo sapiens
  CDR3 for beta chain variable domain of TCR clone 56209 (TRBV28, TRBJ2-1)
CASPPIGRSPGLAGGNEQFF

SEQ ID NO: 112419 - protein, 12 aa, Homo sapiens
  CDR3 for alpha chain variable domain of TCR clone 56210 (TRAV13-2, TRAJ23)
CAERHRGGKLIF

SEQ ID NO: 112420 - protein, 15 aa, Homo sapiens
  CDR3 for beta chain variable domain of TCR clone 56210 (TRBV5-5, TRBJ1-5)
CASSLEGASNQPQHF

SEQ ID NO: 112421 - protein, 15 aa, Homo sapiens
  CDR3 for alpha chain variable domain of TCR clone 56211 (TRAV3, TRAJ9)
CAVRARNTGGFKTIF

SEQ ID NO: 112422 - protein, 14 aa, Homo sapiens
  CDR3 for beta chain variable domain of TCR clone 56211 (TRBV25-1, TRBJ1-1)
CASTHLGGNTEAFF

SEQ ID NO: 112423 - protein, 11 aa, Homo sapiens
  CDR3 for alpha chain variable domain of TCR clone 56212 (TRAV17, TRAJ36)
CAPTGANNLFF

SEQ ID NO: 112424 - protein, 17 aa, Homo sapiens
  CDR3 for beta chain variable domain of TCR clone 56212 (TRBV11-2, TRBJ2-1)
CASSLYPPGVEYNEQFF

SEQ ID NO: 112425 - protein, 13 aa, Homo sapiens
  CDR3 for alpha chain variable domain of TCR clone 56213 (TRAV8-3, TRAJ36)
CAVGATGANNLFF

SEQ ID NO: 112426 - protein, 13 aa, Homo sapiens
  CDR3 for beta chain variable domain of TCR clone 56213 (TRBV12-4, TRBJ1-2)
CASSVRQGKGYTF

SEQ ID NO: 112427 - protein, 14 aa, Homo sapiens
  CDR3 for alpha chain variable domain of TCR clone 56214 (TRAV2, TRAJ37)
CAVDFTSNTGKLIF

SEQ ID NO: 112428 - protein, 14 aa, Homo sapiens
  CDR3 for beta chain variable domain of TCR clone 56214 (TRBV7-6, TRBJ2-3)
CASSLGTVTDTQYF

SEQ ID NO: 112429 - protein, 15 aa, Homo sapiens
  CDR3 for alpha chain variable domain of TCR clone 56215 (TRAV3, TRAJ5)
CAVRDLDTGRRALTF

SEQ ID NO: 112430 - protein, 13 aa, Homo sapiens
  CDR3 for beta chain variable domain of TCR clone 56215 (TRBV12-4, TRBJ2-7)
CASSPTETYEQSF

SEQ ID NO: 112431 - protein, 14 aa, Homo sapiens
  CDR3 for alpha chain variable domain of TCR clone 56216 (TRAV17, TRAJ15)
CATGPNQAGTALIF

SEQ ID NO: 112432 - protein, 15 aa, Homo sapiens
  CDR3 for beta chain variable domain of TCR clone 56216 (TRBV11-2, TRBJ2-2)
CASSSDRVSAGELFF

SEQ ID NO: 112433 - protein, 23 aa, Homo sapiens
  CDR3 for alpha chain variable domain of TCR clone 56217 (TRAV12-2, TRAJ22)
CAVSFRAHPGPPIVSGSARQLTF

SEQ ID NO: 112434 - protein, 13 aa, Homo sapiens
  CDR3 for beta chain variable domain of TCR clone 56217 (TRBV12-4, TRBJ1-2)
CASSLDSNYGYTF

SEQ ID NO: 112435 - protein, 12 aa, Homo sapiens
  CDR3 for alpha chain variable domain of TCR clone 56218 (TRAV35, TRAJ49)
CAGWKTGNQFYF

SEQ ID NO: 112436 - protein, 16 aa, Homo sapiens
  CDR3 for beta chain variable domain of TCR clone 56218 (TRBV5-1, TRBJ2-2)
CASSLWDTTNTGELFF

SEQ ID NO: 112437 - protein, 14 aa, Homo sapiens
  CDR3 for alpha chain variable domain of TCR clone 56219 (TRAV1-2, TRAJ16)
CAVNRFSDGQMLLF

SEQ ID NO: 112438 - protein, 15 aa, Homo sapiens
  CDR3 for beta chain variable domain of TCR clone 56219 (TRBV5-1, TRBJ2-1)
CASSPPRAPYNEQSF

SEQ ID NO: 112439 - protein, 14 aa, Homo sapiens
  CDR3 for alpha chain variable domain of TCR clone 56220 (TRAV1-2, TRAJ8)
CAVREDTGFQKLVF

SEQ ID NO: 112440 - protein, 14 aa, Homo sapiens
  CDR3 for beta chain variable domain of TCR clone 56220 (TRBV15, TRBJ2-3)
CATRSGTSTDSQYF

SEQ ID NO: 112441 - protein, 13 aa, Homo sapiens
  CDR3 for alpha chain variable domain of TCR clone 56221 (TRAV9-2, TRAJ53)
CALSGGSNYKLTF

SEQ ID NO: 112442 - protein, 17 aa, Homo sapiens
  CDR3 for beta chain variable domain of TCR clone 56221 (TRBV11-2, TRBJ2-1)
CASSLYPPGVDYNEQFF

SEQ ID NO: 112443 - protein, 14 aa, Homo sapiens
  CDR3 for alpha chain variable domain of TCR clone 56222 (TRAV12-2, TRAJ45)
CAVNIGGGADGLTF

SEQ ID NO: 112444 - protein, 17 aa, Homo sapiens
  CDR3 for beta chain variable domain of TCR clone 56222 (TRBV7-8, TRBJ2-6)
CARSAGTGGAGANVLTF

SEQ ID NO: 112445 - protein, 16 aa, Homo sapiens
  CDR3 for alpha chain variable domain of TCR clone 56223 (TRAV1-2, TRAJ10)
CAVRGVLTGGGNKLTF

SEQ ID NO: 112446 - protein, 15 aa, Homo sapiens
  CDR3 for beta chain variable domain of TCR clone 56223 (TRBV7-9, TRBJ1-5)
CASSQGHQPNQPQHF

SEQ ID NO: 112447 - protein, 17 aa, Homo sapiens
  CDR3 for alpha chain variable domain of TCR clone 56224 (TRAV26-1, TRAJ10)
CIVSFRGLTGGGNKPTF

SEQ ID NO: 112448 - protein, 13 aa, Homo sapiens
  CDR3 for beta chain variable domain of TCR clone 56224 (TRBV20-1, TRBJ2-3)
CSASRQAADTQYF

SEQ ID NO: 112449 - protein, 16 aa, Homo sapiens
  CDR3 for alpha chain variable domain of TCR clone 56225 (TRAV12-2, TRAJ32)
CAVNLGQGGATNKLIF

SEQ ID NO: 112450 - protein, 16 aa, Homo sapiens
  CDR3 for beta chain variable domain of TCR clone 56225 (TRBV19, TRBJ2-1)
CASSKAEPSSYNEQFF

SEQ ID NO: 112451 - protein, 15 aa, Homo sapiens
  CDR3 for alpha chain variable domain of TCR clone 56226 (TRAV12-1, TRAJ37)
CVVNLPTSNTGKLIF

SEQ ID NO: 112452 - protein, 15 aa, Homo sapiens
  CDR3 for beta chain variable domain of TCR clone 56226 (TRBV2, TRBJ2-1)
CQPEPSGGKYNEQFF

SEQ ID NO: 112453 - protein, 15 aa, Homo sapiens
  CDR3 for alpha chain variable domain of TCR clone 56227 (TRAV12-2, TRAJ52)
CAVTSGGTSYGKLTF

SEQ ID NO: 112454 - protein, 15 aa, Homo sapiens
  CDR3 for beta chain variable domain of TCR clone 56227 (TRBV7-2, TRBJ2-1)
CASSPGFISGNGQFF

SEQ ID NO: 112455 - protein, 14 aa, Homo sapiens
  CDR3 for alpha chain variable domain of TCR clone 56228 (TRAV1-2, TRAJ16)
CAVNRFSDGQKLLF

SEQ ID NO: 112456 - protein, 13 aa, Homo sapiens
  CDR3 for beta chain variable domain of TCR clone 56228 (TRBV20-1, TRBJ1-1)
CSARGGGNTEAVF

SEQ ID NO: 112457 - protein, 15 aa, Homo sapiens
  CDR3 for alpha chain variable domain of TCR clone 56229 (TRAV3, TRAJ5)
CAVRDLDTGRRALTF

SEQ ID NO: 112458 - protein, 15 aa, Homo sapiens
  CDR3 for beta chain variable domain of TCR clone 56229 (TRBV20-1, TRBJ2-1)
FSARSPGGPGNEQFF

SEQ ID NO: 112459 - protein, 14 aa, Homo sapiens
  CDR3 for alpha chain variable domain of TCR clone 56230 (TRAV26-1, TRAJ34)
CIVRVAYNTDKLIF

SEQ ID NO: 112460 - protein, 14 aa, Homo sapiens
  CDR3 for beta chain variable domain of TCR clone 56230 (TRBV19, TRBJ2-1)
CASPTFVLSGEQFF

SEQ ID NO: 112461 - protein, 14 aa, Homo sapiens
  CDR3 for alpha chain variable domain of TCR clone 56231 (TRAV13-1, TRAJ35)
CAASKGGFGNVLHC

SEQ ID NO: 112462 - protein, 15 aa, Homo sapiens
  CDR3 for beta chain variable domain of TCR clone 56231 (TRBV5-1, TRBJ2-3)
CASSVTSGSTDTQYF

SEQ ID NO: 112463 - protein, 16 aa, Homo sapiens
  CDR3 for alpha chain variable domain of TCR clone 56232 (TRAV30, TRAJ24)
CGTEVVDADSWGKFQF

SEQ ID NO: 112464 - protein, 15 aa, Homo sapiens
  CDR3 for beta chain variable domain of TCR clone 56232 (TRBV27, TRBJ2-1)
CASSNGGGSSNEQFF

SEQ ID NO: 112465 - protein, 14 aa, Homo sapiens
  CDR3 for alpha chain variable domain of TCR clone 56233 (TRAV13-1, TRAJ44)
CAAKATGTASKLTF

SEQ ID NO: 112466 - protein, 15 aa, Homo sapiens
  CDR3 for beta chain variable domain of TCR clone 56233 (TRBV7-2, TRBJ2-3)
CASSLAGAFIDTQYF

SEQ ID NO: 112467 - protein, 11 aa, Homo sapiens
  CDR3 for alpha chain variable domain of TCR clone 56234 (TRAV2, TRAJ13)
CASGGYQRVTF

SEQ ID NO: 112468 - protein, 15 aa, Homo sapiens
  CDR3 for beta chain variable domain of TCR clone 56234 (TRBV20-1, TRBJ2-7)
CSARDRVSGMDEQYF

SEQ ID NO: 112469 - protein, 12 aa, Homo sapiens
  CDR3 for alpha chain variable domain of TCR clone 56235 (TRAV23/DV6, TRAJ30)
CAASKGDDKIIF

SEQ ID NO: 112470 - protein, 18 aa, Homo sapiens
  CDR3 for beta chain variable domain of TCR clone 56235 (TRBV10-3, TRBJ2-3)
CPISESRVGPMRGDTQYF

SEQ ID NO: 112471 - protein, 12 aa, Homo sapiens
  CDR3 for alpha chain variable domain of TCR clone 56236 (TRAV29/DV5, TRAJ49)
CAATDTGNQFYS

SEQ ID NO: 112472 - protein, 19 aa, Homo sapiens
  CDR3 for beta chain variable domain of TCR clone 56236 (TRBV25-1, TRBJ2-2)
CAILVYRVDRGRKTGELFF

SEQ ID NO: 112473 - protein, 15 aa, Homo sapiens
  CDR3 for alpha chain variable domain of TCR clone 56237 (TRAV12-3, TRAJ42)
CAMSGHGGSQGNPIF

SEQ ID NO: 112474 - protein, 13 aa, Homo sapiens
  CDR3 for beta chain variable domain of TCR clone 56237 (TRBV19, TRBJ2-5)
CASSGRAGETQYF

SEQ ID NO: 112475 - protein, 12 aa, Homo sapiens
  CDR3 for alpha chain variable domain of TCR clone 56238 (TRAV12-3, TRAJ17)
CAMTLTGNKLTF

SEQ ID NO: 112476 - protein, 18 aa, Homo sapiens
  CDR3 for beta chain variable domain of TCR clone 56238 (TRBV4-3, TRBJ1-6)
CASSKETPASSYNSPLHF

SEQ ID NO: 112477 - protein, 16 aa, Homo sapiens
  CDR3 for alpha chain variable domain of TCR clone 56239 (TRAV12-1, TRAJ22)
CVVNTISPGSARQLTF

SEQ ID NO: 112478 - protein, 13 aa, Homo sapiens
  CDR3 for beta chain variable domain of TCR clone 56239 (TRBV19, TRBJ2-1)
CASNGGVFSEQFF

SEQ ID NO: 112479 - protein, 12 aa, Homo sapiens
  CDR3 for alpha chain variable domain of TCR clone 56240 (TRAV17, TRAJ12)
CATLRSSYKLIF

SEQ ID NO: 112480 - protein, 13 aa, Homo sapiens
  CDR3 for beta chain variable domain of TCR clone 56240 (TRBV19, TRBJ1-2)
CASSQGQVYGYTF

SEQ ID NO: 112481 - protein, 14 aa, Homo sapiens
  CDR3 for alpha chain variable domain of TCR clone 56241 (TRAV8-3, TRAJ27)
CAGGRNTNAGKSTV

SEQ ID NO: 112482 - protein, 15 aa, Homo sapiens
  CDR3 for beta chain variable domain of TCR clone 56241 (TRBV11-3, TRBJ2-5)
CASSLRGRVQETQYF

SEQ ID NO: 112483 - protein, 13 aa, Homo sapiens
  CDR3 for alpha chain variable domain of TCR clone 56242 (TRAV8-3, TRAJ4)
WVFYSGGYHKLIF

SEQ ID NO: 112484 - protein, 14 aa, Homo sapiens
  CDR3 for beta chain variable domain of TCR clone 56242 (TRBV7-9, TRBJ2-3)
CASSLEDGTDTQYF

SEQ ID NO: 112485 - protein, 15 aa, Homo sapiens
  CDR3 for alpha chain variable domain of TCR clone 56243 (TRAV13-1, TRAJ17)
CTASIERAAGNKLTF

SEQ ID NO: 112486 - protein, 12 aa, Homo sapiens
  CDR3 for beta chain variable domain of TCR clone 56243 (TRBV5-7, TRBJ1-1)
CASSLGRGKAFF

SEQ ID NO: 112487 - protein, 15 aa, Homo sapiens
  CDR3 for alpha chain variable domain of TCR clone 56244 (TRAV25, TRAJ10)
CAGPLLTGGGNKLTL

SEQ ID NO: 112488 - protein, 15 aa, Homo sapiens
  CDR3 for beta chain variable domain of TCR clone 56244 (TRBV12-5, TRBJ2-2)
CASGRLGGNTGELFF

SEQ ID NO: 112489 - protein, 15 aa, Homo sapiens
  CDR3 for alpha chain variable domain of TCR clone 56245 (TRAV13-2, TRAJ53)
CAETVSGGSNYKLTF

SEQ ID NO: 112490 - protein, 12 aa, Homo sapiens
  CDR3 for beta chain variable domain of TCR clone 56245 (TRBV11-2, TRBJ2-2)
CASSLGGGELFF

SEQ ID NO: 112491 - protein, 12 aa, Homo sapiens
  CDR3 for alpha chain variable domain of TCR clone 56246 (TRAV8-3, TRAJ20)
CTVDFNDYKLSF

SEQ ID NO: 112492 - protein, 13 aa, Homo sapiens
  CDR3 for beta chain variable domain of TCR clone 56246 (TRBV5-7, TRBJ2-3)
CASSLGRTDTQYF

SEQ ID NO: 112493 - protein, 16 aa, Homo sapiens
  CDR3 for alpha chain variable domain of TCR clone 56247 (TRAV3, TRAJ18)
CAVRDGRGSNLGRLYF

SEQ ID NO: 112494 - protein, 15 aa, Homo sapiens
  CDR3 for beta chain variable domain of TCR clone 56247 (TRBV7-9, TRBJ1-6)
CASSSPGRGNSPLHF

SEQ ID NO: 112495 - protein, 14 aa, Homo sapiens
  CDR3 for alpha chain variable domain of TCR clone 56248 (TRAV9-2, TRAJ39)
CALYIYNAGNMLTF

SEQ ID NO: 112496 - protein, 13 aa, Homo sapiens
  CDR3 for beta chain variable domain of TCR clone 56248 (TRBV2, TRBJ1-1)
CASSVLMNTEAFF

SEQ ID NO: 112497 - protein, 12 aa, Homo sapiens
  CDR3 for alpha chain variable domain of TCR clone 56249 (TRAV12-2, TRAJ10)
WGVTGGGNKLTF

SEQ ID NO: 112498 - protein, 16 aa, Homo sapiens
  CDR3 for beta chain variable domain of TCR clone 56249 (TRBV6-4, TRBJ1-2)
CASSEAVGDPNYGYTV

SEQ ID NO: 112499 - protein, 14 aa, Homo sapiens
  CDR3 for alpha chain variable domain of TCR clone 56250 (TRAV29/DV5, TRAJ36)
CAARLKTGANNLFF

SEQ ID NO: 112500 - protein, 14 aa, Homo sapiens
  CDR3 for beta chain variable domain of TCR clone 56250 (TRBV12-5, TRBJ2-5)
CASGSRTHQETQYF

SEQ ID NO: 112501 - protein, 15 aa, Homo sapiens
  CDR3 for alpha chain variable domain of TCR clone 56251 (TRAV38-1, TRAJ37)
CAFIHGSGNTGKLIF

SEQ ID NO: 112502 - protein, 12 aa, Homo sapiens
  CDR3 for beta chain variable domain of TCR clone 56251 (TRBV7-9, TRBJ2-7)
CASSFGGYEQYF

SEQ ID NO: 112503 - protein, 14 aa, Homo sapiens
  CDR3 for alpha chain variable domain of TCR clone 56252 (TRAV3, TRAJ22)
CAVRDYGSARQLTF

SEQ ID NO: 112504 - protein, 16 aa, Homo sapiens
  CDR3 for beta chain variable domain of TCR clone 56252 (TRBV12-4, TRBJ2-7)
CASSLIGGTGTYEQYF

SEQ ID NO: 112505 - protein, 13 aa, Homo sapiens
  CDR3 for alpha chain variable domain of TCR clone 56253 (TRAV12-1, TRAJ26)
CVVRRNYGQNFVF

SEQ ID NO: 112506 - protein, 15 aa, Homo sapiens
  CDR3 for beta chain variable domain of TCR clone 56253 (TRBV7-8, TRBJ2-1)
CASSLADSLYNEQFF

SEQ ID NO: 112507 - protein, 13 aa, Homo sapiens
  CDR3 for alpha chain variable domain of TCR clone 56254 (TRAV20, TRAJ20)
CAVQAPNDYKLSF

SEQ ID NO: 112508 - protein, 13 aa, Homo sapiens
  CDR3 for beta chain variable domain of TCR clone 56254 (TRBV7-9, TRBJ1-4)
CASSLPGIEKLFF

SEQ ID NO: 112509 - protein, 13 aa, Homo sapiens
  CDR3 for alpha chain variable domain of TCR clone 56255 (TRAV13-2, TRAJ48)
CAEMDFGNEKLIF

SEQ ID NO: 112510 - protein, 15 aa, Homo sapiens
  CDR3 for beta chain variable domain of TCR clone 56255 (TRBV7-9, TRBJ1-6)
CASSSPGRGNSPLHF

SEQ ID NO: 112511 - protein, 14 aa, Homo sapiens
  CDR3 for alpha chain variable domain of TCR clone 56256 (TRAV12-2, TRAJ17)
CAVNIKAAGNKLTF

SEQ ID NO: 112512 - protein, 15 aa, Homo sapiens
  CDR3 for beta chain variable domain of TCR clone 56256 (TRBV18, TRBJ2-7)
CASSPRSGTAYEQYF

SEQ ID NO: 112513 - protein, 14 aa, Homo sapiens
  CDR3 for alpha chain variable domain of TCR clone 56257 (TRAV12-1, TRAJ12)
CVVTRMDSSYKLIF

SEQ ID NO: 112514 - protein, 13 aa, Homo sapiens
  CDR3 for beta chain variable domain of TCR clone 56257 (TRBV20-1, TRBJ1-1)
CSARGGGNTEAFS

SEQ ID NO: 112515 - protein, 13 aa, Homo sapiens
  CDR3 for alpha chain variable domain of TCR clone 56258 (TRAV2, TRAJ21)
CAVEDLNFNKFYF

SEQ ID NO: 112516 - protein, 15 aa, Homo sapiens
  CDR3 for beta chain variable domain of TCR clone 56258 (TRBV28, TRBJ2-5)
CAGSPGQGSIETQYF

SEQ ID NO: 112517 - protein, 17 aa, Homo sapiens
  CDR3 for alpha chain variable domain of TCR clone 56259 (TRAV3, TRAJ42)
CAVRDRDYGGSQGNLFF

SEQ ID NO: 112518 - protein, 15 aa, Homo sapiens
  CDR3 for beta chain variable domain of TCR clone 56259 (TRBV6-6, TRBJ2-7)
CASSYSYGGSYEQYF

SEQ ID NO: 112519 - protein, 22 aa, Homo sapiens
  CDR3 for alpha chain variable domain of TCR clone 56260 (TRAV26-1, TRAJ38)
CIVRPLNAGNNHIQNPDPAVYQ

SEQ ID NO: 112520 - protein, 13 aa, Homo sapiens
  CDR3 for beta chain variable domain of TCR clone 56260 (TRBV18, TRBJ1-1)
CASSPNGDTEAFF

SEQ ID NO: 112521 - protein, 23 aa, Homo sapiens
  CDR3 for alpha chain variable domain of TCR clone 56261 (TRAV26-1, TRAJ38)
CIADNAGNNHIQNPYPAVYQLRD

SEQ ID NO: 112522 - protein, 12 aa, Homo sapiens
  CDR3 for beta chain variable domain of TCR clone 56261 (TRBV11-2, TRBJ2-2)
CASSLGGGELFF

SEQ ID NO: 112523 - protein, 17 aa, Homo sapiens
  CDR3 for alpha chain variable domain of TCR clone 56262 (TRAV26-1, TRAJ10)
CIVSFRGLTGGGNKITF

SEQ ID NO: 112524 - protein, 13 aa, Homo sapiens
  CDR3 for beta chain variable domain of TCR clone 56262 (TRBV20-1, TRBJ2-3)
CSASRQAADTQYF

SEQ ID NO: 112525 - protein, 13 aa, Homo sapiens
  CDR3 for alpha chain variable domain of TCR clone 56263 (TRAV13-2, TRAJ13)
CAEGPGGYQKVTF

SEQ ID NO: 112526 - protein, 15 aa, Homo sapiens
  CDR3 for beta chain variable domain of TCR clone 56263 (TRBV11-3, TRBJ2-7)
CASSPGPASSYEQYF

SEQ ID NO: 112527 - protein, 13 aa, Homo sapiens
  CDR3 for alpha chain variable domain of TCR clone 56264 (TRAV35, TRAJ48)
CAGHESGNEKLTF

SEQ ID NO: 112528 - protein, 14 aa, Homo sapiens
  CDR3 for beta chain variable domain of TCR clone 56264 (TRBV19, TRBJ2-1)
CASPTFVLSGEQFF

SEQ ID NO: 112529 - protein, 13 aa, Homo sapiens
  CDR3 for alpha chain variable domain of TCR clone 56265 (TRAV12-1, TRAJ40)
CVVPTSGTYKCIF

SEQ ID NO: 112530 - protein, 18 aa, Homo sapiens
  CDR3 for beta chain variable domain of TCR clone 56265 (TRBV7-6, TRBJ2-1)
CASSPRTSGMSSYNEQFF

SEQ ID NO: 112531 - protein, 13 aa, Homo sapiens
  CDR3 for alpha chain variable domain of TCR clone 56266 (TRAV29/DV5, TRAJ31)
CAASRNNNARLMF

SEQ ID NO: 112532 - protein, 12 aa, Homo sapiens
  CDR3 for beta chain variable domain of TCR clone 56266 (TRBV14, TRBJ1-1)
CASSQLRGLAFF

SEQ ID NO: 112533 - protein, 13 aa, Homo sapiens
  CDR3 for alpha chain variable domain of TCR clone 56267 (TRAV30, TRAJ6)
CGFIEGGSYIPTF

SEQ ID NO: 112534 - protein, 15 aa, Homo sapiens
  CDR3 for beta chain variable domain of TCR clone 56267 (TRBV7-9, TRBJ1-6)
CASSSPGRGNSPLHF

SEQ ID NO: 112535 - protein, 14 aa, Homo sapiens
  CDR3 for alpha chain variable domain of TCR clone 56268 (TRAV1-2, TRAJ16)
CAVNRFSDGQKLLF

SEQ ID NO: 112536 - protein, 14 aa, Homo sapiens
  CDR3 for beta chain variable domain of TCR clone 56268 (TRBV2, TRBJ1-5)
CASSGTVSNQPQHF

SEQ ID NO: 112537 - protein, 13 aa, Homo sapiens
  CDR3 for alpha chain variable domain of TCR clone 56269 (TRAV20, TRAJ49)
CAVQARTGNQFYF

SEQ ID NO: 112538 - protein, 14 aa, Homo sapiens
  CDR3 for beta chain variable domain of TCR clone 56269 (TRBV19, TRBJ2-1)
CASPTFVLSGEQFF

SEQ ID NO: 112539 - protein, 17 aa, Homo sapiens
  CDR3 for alpha chain variable domain of TCR clone 56270 (TRAV8-6, TRAJ58)
CAVSSWVGETIGSRLTF

SEQ ID NO: 112540 - protein, 14 aa, Homo sapiens
  CDR3 for beta chain variable domain of TCR clone 56270 (TRBV4-2, TRBJ2-1)
CASGLDRAYNEQFF

SEQ ID NO: 112541 - protein, 13 aa, Homo sapiens
  CDR3 for alpha chain variable domain of TCR clone 56271 (TRAV23/DV6, TRAJ47)
CAASMTRGNKLVF

SEQ ID NO: 112542 - protein, 14 aa, Homo sapiens
  CDR3 for beta chain variable domain of TCR clone 56271 (TRBV7-3, TRBJ1-1)
YASSLKGGNTEAFF

SEQ ID NO: 112543 - protein, 16 aa, Homo sapiens
  CDR3 for alpha chain variable domain of TCR clone 56272 (TRAV14/DV4, TRAJ53)
CAMREGGGGSNYKLTF

SEQ ID NO: 112544 - protein, 13 aa, Homo sapiens
  CDR3 for beta chain variable domain of TCR clone 56272 (TRBV7-9, TRBJ1-2)
CASSLKQNYGYTF

SEQ ID NO: 112545 - protein, 13 aa, Homo sapiens
  CDR3 for alpha chain variable domain of TCR clone 56273 (TRAV12-3, TRAJ9)
CAMRNTGGFKTIF

SEQ ID NO: 112546 - protein, 16 aa, Homo sapiens
  CDR3 for beta chain variable domain of TCR clone 56273 (TRBV19, TRBJ2-1)
CASSIDGSFAYNDQFF

SEQ ID NO: 112547 - protein, 13 aa, Homo sapiens
  CDR3 for alpha chain variable domain of TCR clone 56274 (TRAV16, TRAJ39)
RALGPNAGNMLTF

SEQ ID NO: 112548 - protein, 12 aa, Homo sapiens
  CDR3 for beta chain variable domain of TCR clone 56274 (TRBV6-3, TRBJ2-1)
CASSGSYNEQFF

SEQ ID NO: 112549 - protein, 15 aa, Homo sapiens
  CDR3 for alpha chain variable domain of TCR clone 56275 (TRAV13-1, TRAJ7)
CAASPAVYGNNRLAF

SEQ ID NO: 112550 - protein, 15 aa, Homo sapiens
  CDR3 for beta chain variable domain of TCR clone 56275 (TRBV27, TRBJ2-1)
CASSNGGGSSNEQFF

SEQ ID NO: 112551 - protein, 10 aa, Homo sapiens
  CDR3 for alpha chain variable domain of TCR clone 56276 (TRAV8-4, TRAJ20)
CAVTNVLTTT

SEQ ID NO: 112552 - protein, 16 aa, Homo sapiens
  CDR3 for beta chain variable domain of TCR clone 56276 (TRBV6-1, TRBJ1-2)
CASSGAWQGRSHGYTF

SEQ ID NO: 112553 - protein, 14 aa, Homo sapiens
  CDR3 for alpha chain variable domain of TCR clone 56277 (TRAV1-2, TRAJ8)
CAVREDTGFQKLVF

SEQ ID NO: 112554 - protein, 14 aa, Homo sapiens
  CDR3 for beta chain variable domain of TCR clone 56277 (TRBV11-2, TRBJ2-7)
CASSSTGEGYEQYF

SEQ ID NO: 112555 - protein, 11 aa, Homo sapiens
  CDR3 for alpha chain variable domain of TCR clone 56278 (TRAV3, TRAJ21)
CAVGNFNKFYY

SEQ ID NO: 112556 - protein, 16 aa, Homo sapiens
  CDR3 for beta chain variable domain of TCR clone 56278 (TRBV19, TRBJ2-1)
CANSKAGPSSYNEQFF

SEQ ID NO: 112557 - protein, 16 aa, Homo sapiens
  CDR3 for alpha chain variable domain of TCR clone 56279 (TRAV30, TRAJ24)
CGKEIVDADSWGKFQF

SEQ ID NO: 112558 - protein, 14 aa, Homo sapiens
  CDR3 for beta chain variable domain of TCR clone 56279 (TRBV7-2, TRBJ1-1)
CASSFLTGTTEAFF

SEQ ID NO: 112559 - protein, 13 aa, Homo sapiens
  CDR3 for alpha chain variable domain of TCR clone 56280 (TRAV6, TRAJ23)
CALDQNQGGKLIF

SEQ ID NO: 112560 - protein, 15 aa, Homo sapiens
  CDR3 for beta chain variable domain of TCR clone 56280 (TRBV28, TRBJ1-2)
CASSGSEQRACGYTF

SEQ ID NO: 112561 - protein, 12 aa, Homo sapiens
  CDR3 for alpha chain variable domain of TCR clone 56281 (TRAV8-3, TRAJ26)
CAGDNYRQNFVF

SEQ ID NO: 112562 - protein, 15 aa, Homo sapiens
  CDR3 for beta chain variable domain of TCR clone 56281 (TRBV9, TRBJ2-1)
CASSLAGSSYNEQFF

SEQ ID NO: 112563 - protein, 13 aa, Homo sapiens
  CDR3 for alpha chain variable domain of TCR clone 56282 (TRAV12-2, TRAJ42)
CAVKRGSQGNLIF

SEQ ID NO: 112564 - protein, 14 aa, Homo sapiens
  CDR3 for beta chain variable domain of TCR clone 56282 (TRBV7-9, TRBJ2-1)
CASSPRDSLYEQFF

SEQ ID NO: 112565 - protein, 17 aa, Homo sapiens
  CDR3 for alpha chain variable domain of TCR clone 56283 (TRAV36/DV7, TRAJ52)
CAVAQRADGTSYGKLTF

SEQ ID NO: 112566 - protein, 16 aa, Homo sapiens
  CDR3 for beta chain variable domain of TCR clone 56283 (TRBV7-2, TRBJ2-5)
CASSPFPTGGEETQYF

SEQ ID NO: 112567 - protein, 11 aa, Homo sapiens
  CDR3 for alpha chain variable domain of TCR clone 56284 (TRAV2, TRAJ13)
CASGGYQKVTF

SEQ ID NO: 112568 - protein, 11 aa, Homo sapiens
  CDR3 for beta chain variable domain of TCR clone 56284 (TRBV5-6, TRBJ2-5)
CASSLERAQYF

SEQ ID NO: 112569 - protein, 18 aa, Homo sapiens
  CDR3 for alpha chain variable domain of TCR clone 56285 (TRAV21, TRAJ52)
CAVRPSPAGGTSYGKLTF

SEQ ID NO: 112570 - protein, 15 aa, Homo sapiens
  CDR3 for beta chain variable domain of TCR clone 56285 (TRBV19, TRBJ1-1)
CASTSGQTQNTEAFF

SEQ ID NO: 112571 - protein, 13 aa, Homo sapiens
  CDR3 for alpha chain variable domain of TCR clone 56286 (TRAV12-1, TRAJ29)
FVVNGPGNTPLVF

SEQ ID NO: 112572 - protein, 12 aa, Homo sapiens
  CDR3 for beta chain variable domain of TCR clone 56286 (TRBV7-2, TRBJ2-5)
CQQQGGLETQYF

SEQ ID NO: 112573 - protein, 14 aa, Homo sapiens
  CDR3 for alpha chain variable domain of TCR clone 56287 (TRAV16, TRAJ29)
CALTRNSGNTPLVF

SEQ ID NO: 112574 - protein, 12 aa, Homo sapiens
  CDR3 for beta chain variable domain of TCR clone 56287 (TRBV2, TRBJ2-1)
CAKREGYNEQSF

SEQ ID NO: 112575 - protein, 13 aa, Homo sapiens
  CDR3 for alpha chain variable domain of TCR clone 56288 (TRAV12-1, TRAJ40)
CVVPTSGTYKYIF

SEQ ID NO: 112576 - protein, 18 aa, Homo sapiens
  CDR3 for beta chain variable domain of TCR clone 56288 (TRBV7-6, TRBJ2-1)
CASSPRTSGMSSYNEQFF

SEQ ID NO: 112577 - protein, 11 aa, Homo sapiens
  CDR3 for alpha chain variable domain of TCR clone 56289 (TRAV8-3, TRAJ4)
CAVGARPDFKR

SEQ ID NO: 112578 - protein, 13 aa, Homo sapiens
  CDR3 for beta chain variable domain of TCR clone 56289 (TRBV20-1, TRBJ1-2)
CSATGIQGSGCTF

SEQ ID NO: 112579 - protein, 16 aa, Homo sapiens
  CDR3 for alpha chain variable domain of TCR clone 56290 (TRAV35, TRAJ37)
CWAFLRGSSNTGKLIF

SEQ ID NO: 112580 - protein, 13 aa, Homo sapiens
  CDR3 for beta chain variable domain of TCR clone 56290 (TRBV14, TRBJ1-1)
CASSQEAGTEAFF

SEQ ID NO: 112581 - protein, 17 aa, Homo sapiens
  CDR3 for alpha chain variable domain of TCR clone 56291 (TRAV13-1, TRAJ31)
CAPRVRLMFGDGTQLVV

SEQ ID NO: 112582 - protein, 12 aa, Homo sapiens
  CDR3 for beta chain variable domain of TCR clone 56291 (TRBV7-9, TRBJ2-7)
CASSLEGYEQYF

SEQ ID NO: 112583 - protein, 12 aa, Homo sapiens
  CDR3 for alpha chain variable domain of TCR clone 56292 (TRAV8-3, TRAJ26)
CAGDNYGQNFVF

SEQ ID NO: 112584 - protein, 13 aa, Homo sapiens
  CDR3 for beta chain variable domain of TCR clone 56292 (TRBV12-4, TRBJ2-7)
CASSPTETYEQYF

SEQ ID NO: 112585 - protein, 12 aa, Homo sapiens
  CDR3 for alpha chain variable domain of TCR clone 56293 (TRAV12-3, TRAJ17)
CAMTLTGNKPTF

SEQ ID NO: 112586 - protein, 12 aa, Homo sapiens
  CDR3 for beta chain variable domain of TCR clone 56293 (TRBV11-2, TRBJ2-7)
CASSLPTYEQYF

SEQ ID NO: 112587 - protein, 16 aa, Homo sapiens
  CDR3 for alpha chain variable domain of TCR clone 56294 (TRAV1-2, TRAJ18)
CAVRVERGSTLGKLYF

SEQ ID NO: 112588 - protein, 16 aa, Homo sapiens
  CDR3 for beta chain variable domain of TCR clone 56294 (TRBV20-1, TRBJ2-7)
CSASTSGRLSSYEQYF

SEQ ID NO: 112589 - protein, 14 aa, Homo sapiens
  CDR3 for alpha chain variable domain of TCR clone 56295 (TRAV12-3, TRAJ15)
CAMIPPQAGTALIF

SEQ ID NO: 112590 - protein, 12 aa, Homo sapiens
  CDR3 for beta chain variable domain of TCR clone 56295 (TRBV11-2, TRBJ2-2)
CGSSFGGGELFF

SEQ ID NO: 112591 - protein, 11 aa, Homo sapiens
  CDR3 for alpha chain variable domain of TCR clone 56296 (TRAV3, TRAJ21)
CAVGNFNKFYF

SEQ ID NO: 112592 - protein, 14 aa, Homo sapiens
  CDR3 for beta chain variable domain of TCR clone 56296 (TRBV19, TRBJ2-5)
CASSMTGQQETQYF

SEQ ID NO: 112593 - protein, 12 aa, Homo sapiens
  CDR3 for alpha chain variable domain of TCR clone 56297 (TRAV17, TRAJ49)
CATVTTGNQFYF

SEQ ID NO: 112594 - protein, 12 aa, Homo sapiens
  CDR3 for beta chain variable domain of TCR clone 56297 (TRBV11-2, TRBJ2-2)
CASSLGGGELFF

SEQ ID NO: 112595 - protein, 14 aa, Homo sapiens
  CDR3 for alpha chain variable domain of TCR clone 56298 (TRAV13-1, TRAJ44)
CAAKATGTASKLTF

SEQ ID NO: 112596 - protein, 17 aa, Homo sapiens
  CDR3 for beta chain variable domain of TCR clone 56298 (TRBV7-3, TRBJ2-3)
RASSVMKRMRGADTQYF

SEQ ID NO: 112597 - protein, 14 aa, Homo sapiens
  CDR3 for alpha chain variable domain of TCR clone 56299 (TRAV17, TRAJ6)
CATDASGGSYIPTF

SEQ ID NO: 112598 - protein, 19 aa, Homo sapiens
  CDR3 for beta chain variable domain of TCR clone 56299 (TRBV4-3, TRBJ2-7)
CASSQEFRGWQVTPYEQYF

SEQ ID NO: 112599 - protein, 15 aa, Homo sapiens
  CDR3 for alpha chain variable domain of TCR clone 56300 (TRAV26-2, TRAJ39)
CSLRGNNSAGNMLTF

SEQ ID NO: 112600 - protein, 15 aa, Homo sapiens
  CDR3 for beta chain variable domain of TCR clone 56300 (TRBV5-4, TRBJ1-1)
CASSSLGWANTEAFF

SEQ ID NO: 112601 - protein, 10 aa, Homo sapiens
  CDR3 for alpha chain variable domain of TCR clone 56301 (TRAV16, TRAJ22)
SAMYLRQLTF

SEQ ID NO: 112602 - protein, 15 aa, Homo sapiens
  CDR3 for beta chain variable domain of TCR clone 56301 (TRBV7-9, TRBJ1-6)
CASSSLGRGDSPLHF

SEQ ID NO: 112603 - protein, 15 aa, Homo sapiens
  CDR3 for alpha chain variable domain of TCR clone 56302 (TRAV12-3, TRAJ49)
CAMAVTPNTGSQFYF

SEQ ID NO: 112604 - protein, 18 aa, Homo sapiens
  CDR3 for beta chain variable domain of TCR clone 56302 (TRBV4-1, TRBJ1-5)
CASSQDPRGQGLNQPQHF

SEQ ID NO: 112605 - protein, 12 aa, Homo sapiens
  CDR3 for alpha chain variable domain of TCR clone 56303 (TRAV17, TRAJ12)
CATLRSSYELIF

SEQ ID NO: 112606 - protein, 16 aa, Homo sapiens
  CDR3 for beta chain variable domain of TCR clone 56303 (TRBV28, TRBJ2-7)
CASSLFFETGGPEQYF

SEQ ID NO: 112607 - protein, 14 aa, Homo sapiens
  CDR3 for alpha chain variable domain of TCR clone 56304 (TRAV2, TRAJ37)
RAVDFTSNTGKLIF

SEQ ID NO: 112608 - protein, 13 aa, Homo sapiens
  CDR3 for beta chain variable domain of TCR clone 56304 (TRBV20-1, TRBJ1-1)
CSAPLGGGTEAFF

SEQ ID NO: 112609 - protein, 13 aa, Homo sapiens
  CDR3 for alpha chain variable domain of TCR clone 56305 (TRAV1-1, TRAJ13)
CAVNSGGYQKVTF

SEQ ID NO: 112610 - protein, 17 aa, Homo sapiens
  CDR3 for beta chain variable domain of TCR clone 56305 (TRBV13, TRBJ2-3)
CASSLSRVAGGRNTQYF

SEQ ID NO: 112611 - protein, 12 aa, Homo sapiens
  CDR3 for alpha chain variable domain of TCR clone 56306 (TRAV12-3, TRAJ20)
CAMVRGDYKLSF

SEQ ID NO: 112612 - protein, 13 aa, Homo sapiens
  CDR3 for beta chain variable domain of TCR clone 56306 (TRBV12-5, TRBJ2-3)
CASGDRQSDTQYF

SEQ ID NO: 112613 - protein, 14 aa, Homo sapiens
  CDR3 for alpha chain variable domain of TCR clone 56307 (TRAV1-2, TRAJ16)
CAVNRFSDGQKLLF

SEQ ID NO: 112614 - protein, 13 aa, Homo sapiens
  CDR3 for beta chain variable domain of TCR clone 56307 (TRBV7-6, TRBJ2-1)
CQQLGGGADEQFF

SEQ ID NO: 112615 - protein, 15 aa, Homo sapiens
  CDR3 for alpha chain variable domain of TCR clone 56308 (TRAV3, TRAJ5)
CAVRDRKTGRRALTF

SEQ ID NO: 112616 - protein, 14 aa, Homo sapiens
  CDR3 for beta chain variable domain of TCR clone 56308 (TRBV7-2, TRBJ2-7)
CASSPKTSFYEQYF

SEQ ID NO: 112617 - protein, 12 aa, Homo sapiens
  CDR3 for alpha chain variable domain of TCR clone 56309 (TRAV30, TRAJ43)
CGTEERGNDMRF

SEQ ID NO: 112618 - protein, 15 aa, Homo sapiens
  CDR3 for beta chain variable domain of TCR clone 56309 (TRBV12-4, TRBJ2-7)
CASSQRTSGNYEQYF

SEQ ID NO: 112619 - protein, 14 aa, Homo sapiens
  CDR3 for alpha chain variable domain of TCR clone 56310 (TRAV8-3, TRAJ4)
CAVGASGGYNKLIF

SEQ ID NO: 112620 - protein, 13 aa, Homo sapiens
  CDR3 for beta chain variable domain of TCR clone 56310 (TRBV10-3, TRBJ2-7)
CASKLAVNYEQYF

SEQ ID NO: 112621 - protein, 16 aa, Homo sapiens
  CDR3 for alpha chain variable domain of TCR clone 56311 (TRAV3, TRAJ21)
CAVRDIERGNFNKFYF

SEQ ID NO: 112622 - protein, 13 aa, Homo sapiens
  CDR3 for beta chain variable domain of TCR clone 56311 (TRBV5-4, TRBJ2-5)
CASSPVSQETQYF

SEQ ID NO: 112623 - protein, 12 aa, Homo sapiens
  CDR3 for alpha chain variable domain of TCR clone 56312 (TRAV8-3, TRAJ20)
CAVGANDYKLSF

SEQ ID NO: 112624 - protein, 16 aa, Homo sapiens
  CDR3 for beta chain variable domain of TCR clone 56312 (TRBV19, TRBJ2-2)
CASRSPGTGPTGELFF

SEQ ID NO: 112625 - protein, 15 aa, Homo sapiens
  CDR3 for alpha chain variable domain of TCR clone 56313 (TRAV21, TRAJ38)
CAVRQDAGNNRKLIW

SEQ ID NO: 112626 - protein, 16 aa, Homo sapiens
  CDR3 for beta chain variable domain of TCR clone 56313 (TRBV4-2, TRBJ1-1)
CASRPLDGEGDTEAFF

SEQ ID NO: 112627 - protein, 17 aa, Homo sapiens
  CDR3 for alpha chain variable domain of TCR clone 56314 (TRAV3, TRAJ6)
CAVRDGPRAGGSYIPTL

SEQ ID NO: 112628 - protein, 14 aa, Homo sapiens
  CDR3 for beta chain variable domain of TCR clone 56314 (TRBV7-2, TRBJ2-7)
CASNPKTSFYEQYF

SEQ ID NO: 112629 - protein, 15 aa, Homo sapiens
  CDR3 for alpha chain variable domain of TCR clone 56315 (TRAV21, TRAJ40)
CAVRPQTSGTYKYIF

SEQ ID NO: 112630 - protein, 13 aa, Homo sapiens
  CDR3 for beta chain variable domain of TCR clone 56315 (TRBV7-2, TRBJ2-2)
CASSSVRAGGLFF

SEQ ID NO: 112631 - protein, 16 aa, Homo sapiens
  CDR3 for alpha chain variable domain of TCR clone 56316 (TRAV27, TRAJ13)
CAGAKSDSGGYQKVTS

SEQ ID NO: 112632 - protein, 15 aa, Homo sapiens
  CDR3 for beta chain variable domain of TCR clone 56316 (TRBV29-1, TRBJ2-1)
CSVGRHALFYNEQFF

SEQ ID NO: 112633 - protein, 14 aa, Homo sapiens
  CDR3 for alpha chain variable domain of TCR clone 56317 (TRAV12-1, TRAJ3)
CVVNPGSSASKIIL

SEQ ID NO: 112634 - protein, 14 aa, Homo sapiens
  CDR3 for beta chain variable domain of TCR clone 56317 (TRBV20-1, TRBJ2-3)
CSARGGTSTDTQYF

SEQ ID NO: 112635 - protein, 13 aa, Homo sapiens
  CDR3 for alpha chain variable domain of TCR clone 56318 (TRAV12-1, TRAJ26)
CVVRRNYGQNFVF

SEQ ID NO: 112636 - protein, 13 aa, Homo sapiens
  CDR3 for beta chain variable domain of TCR clone 56318 (TRBV4-2, TRBJ1-1)
CASSQAGNTEAFF

SEQ ID NO: 112637 - protein, 13 aa, Homo sapiens
  CDR3 for alpha chain variable domain of TCR clone 56319 (TRAV30, TRAJ49)
CGTEPNTGNQFYF

SEQ ID NO: 112638 - protein, 14 aa, Homo sapiens
  CDR3 for beta chain variable domain of TCR clone 56319 (TRBV29-1, TRBJ2-1)
CSVEFRGVPFEQFF

SEQ ID NO: 112639 - protein, 14 aa, Homo sapiens
  CDR3 for alpha chain variable domain of TCR clone 56320 (TRAV29/DV5, TRAJ45)
CAASFRGGAVGLTF

SEQ ID NO: 112640 - protein, 11 aa, Homo sapiens
  CDR3 for beta chain variable domain of TCR clone 56320 (TRBV11-2, TRBJ2-2)
CASSLPGELFF

SEQ ID NO: 112641 - protein, 11 aa, Homo sapiens
  CDR3 for alpha chain variable domain of TCR clone 56321 (TRAV12-3, TRAJ43)
CAMSVSNDMRF

SEQ ID NO: 112642 - protein, 16 aa, Homo sapiens
  CDR3 for beta chain variable domain of TCR clone 56321 (TRBV19, TRBJ1-1)
CASRPRAQELNTEAFF

SEQ ID NO: 112643 - protein, 15 aa, Homo sapiens
  CDR3 for alpha chain variable domain of TCR clone 56322 (TRAV34, TRAJ38)
CGADFTPGNNRKLIW

SEQ ID NO: 112644 - protein, 14 aa, Homo sapiens
  CDR3 for beta chain variable domain of TCR clone 56322 (TRBV7-2, TRBJ2-7)
CASSPKTSFYEQYF

SEQ ID NO: 112645 - protein, 14 aa, Homo sapiens
  CDR3 for alpha chain variable domain of TCR clone 56323 (TRAV13-1, TRAJ3)
CAASKSSSASKITF

SEQ ID NO: 112646 - protein, 13 aa, Homo sapiens
  CDR3 for beta chain variable domain of TCR clone 56323 (TRBV25-1, TRBJ2-5)
CASSESGRETQYF

SEQ ID NO: 112647 - protein, 15 aa, Homo sapiens
  CDR3 for alpha chain variable domain of TCR clone 56324 (TRAV2, TRAJ22)
CAVPSRGGSARQLTF

SEQ ID NO: 112648 - protein, 11 aa, Homo sapiens
  CDR3 for beta chain variable domain of TCR clone 56324 (TRBV27, TRBJ2-3)
CASSSGDTQYF

SEQ ID NO: 112649 - protein, 14 aa, Homo sapiens
  CDR3 for alpha chain variable domain of TCR clone 56325 (TRAV13-1, TRAJ44)
CAAKATGTASKLTF

SEQ ID NO: 112650 - protein, 17 aa, Homo sapiens
  CDR3 for beta chain variable domain of TCR clone 56325 (TRBV7-3, TRBJ2-3)
RASSLMKRMRGADTQDF

SEQ ID NO: 112651 - protein, 11 aa, Homo sapiens
  CDR3 for alpha chain variable domain of TCR clone 56326 (TRAV23/DV6, TRAJ49)
CAARAGNQFYF

SEQ ID NO: 112652 - protein, 13 aa, Homo sapiens
  CDR3 for beta chain variable domain of TCR clone 56326 (TRBV19, TRBJ1-5)
CASSINFNQPQNF

SEQ ID NO: 112653 - protein, 14 aa, Homo sapiens
  CDR3 for alpha chain variable domain of TCR clone 56327 (TRAV12-1, TRAJ3)
CGAARYSSASTIIF

SEQ ID NO: 112654 - protein, 15 aa, Homo sapiens
  CDR3 for beta chain variable domain of TCR clone 56327 (TRBV7-2, TRBJ2-6)
CASSREGSGANVLTF

SEQ ID NO: 112655 - protein, 16 aa, Homo sapiens
  CDR3 for alpha chain variable domain of TCR clone 56328 (TRAV17, TRAJ28)
CACGSYSGAGSYQLTF

SEQ ID NO: 112656 - protein, 14 aa, Homo sapiens
  CDR3 for beta chain variable domain of TCR clone 56328 (TRBV7-2, TRBJ2-7)
CASSPKTSFYEQYF

SEQ ID NO: 112657 - protein, 12 aa, Homo sapiens
  CDR3 for alpha chain variable domain of TCR clone 56329 (TRAV38-1, TRAJ47)
YAFETYGNKLVF

SEQ ID NO: 112658 - protein, 15 aa, Homo sapiens
  CDR3 for beta chain variable domain of TCR clone 56329 (TRBV5-7, TRBJ2-7)
CASSGGRPVPYEQYF

SEQ ID NO: 112659 - protein, 13 aa, Homo sapiens
  CDR3 for alpha chain variable domain of TCR clone 56330 (TRAV12-3, TRAJ9)
CAMRNTGGFKTIF

SEQ ID NO: 112660 - protein, 11 aa, Homo sapiens
  CDR3 for beta chain variable domain of TCR clone 56330 (TRBV7-8, TRBJ2-7)
CASSLSLEQYF

SEQ ID NO: 112661 - protein, 18 aa, Homo sapiens
  CDR3 for alpha chain variable domain of TCR clone 56331 (TRAV13-1, TRAJ4)
CSKYKEVPWRGGYNKLIF

SEQ ID NO: 112662 - protein, 14 aa, Homo sapiens
  CDR3 for beta chain variable domain of TCR clone 56331 (TRBV18, TRBJ2-3)
CASLRGAATDTQYF

SEQ ID NO: 112663 - protein, 10 aa, Homo sapiens
  CDR3 for alpha chain variable domain of TCR clone 56332 (TRAV23/DV6, TRAJ22)
CAASSRGSRF

SEQ ID NO: 112664 - protein, 15 aa, Homo sapiens
  CDR3 for beta chain variable domain of TCR clone 56332 (TRBV10-3, TRBJ2-3)
CAIDTSGRRTDTQYS

SEQ ID NO: 112665 - protein, 14 aa, Homo sapiens
  CDR3 for alpha chain variable domain of TCR clone 56333 (TRAV9-2, TRAJ39)
CALYIYNAGNMLTF

SEQ ID NO: 112666 - protein, 14 aa, Homo sapiens
  CDR3 for beta chain variable domain of TCR clone 56333 (TRBV27, TRBJ2-2)
CASRPGVNTGELFF

SEQ ID NO: 112667 - protein, 13 aa, Homo sapiens
  CDR3 for alpha chain variable domain of TCR clone 56334 (TRAV12-3, TRAJ5)
CAMIYTGRRALTF

SEQ ID NO: 112668 - protein, 12 aa, Homo sapiens
  CDR3 for beta chain variable domain of TCR clone 56334 (TRBV18, TRBJ1-4)
RASSPSREKLFF

SEQ ID NO: 112669 - protein, 14 aa, Homo sapiens
  CDR3 for alpha chain variable domain of TCR clone 56335 (TRAV12-3, TRAJ10)
SHLPLTGGGNKLTF

SEQ ID NO: 112670 - protein, 12 aa, Homo sapiens
  CDR3 for beta chain variable domain of TCR clone 56335 (TRBV5-1, TRBJ2-3)
CDSSLAADTQYF

SEQ ID NO: 112671 - protein, 15 aa, Homo sapiens
  CDR3 for alpha chain variable domain of TCR clone 56336 (TRAV21, TRAJ53)
CATSNSGGSNYKLTF

SEQ ID NO: 112672 - protein, 12 aa, Homo sapiens
  CDR3 for beta chain variable domain of TCR clone 56336 (TRBV14, TRBJ2-4)
CASSNLKSIQYF

SEQ ID NO: 112673 - protein, 13 aa, Homo sapiens
  CDR3 for alpha chain variable domain of TCR clone 56337 (TRAV12-1, TRAJ31)
CVVNMNNNARLMF

SEQ ID NO: 112674 - protein, 15 aa, Homo sapiens
  CDR3 for beta chain variable domain of TCR clone 56337 (TRBV4-1, TRBJ1-2)
CASRQGQGAAYGYTF

SEQ ID NO: 112675 - protein, 12 aa, Homo sapiens
  CDR3 for alpha chain variable domain of TCR clone 56338 (TRAV3, TRAJ26)
CAVRDYGQNFVF

SEQ ID NO: 112676 - protein, 16 aa, Homo sapiens
  CDR3 for beta chain variable domain of TCR clone 56338 (TRBV11-2, TRBJ1-2)
CASSPPGREANYGYTF

SEQ ID NO: 112677 - protein, 11 aa, Homo sapiens
  CDR3 for alpha chain variable domain of TCR clone 56339 (TRAV12-2, TRAJ31)
CAVTRWARLMF

SEQ ID NO: 112678 - protein, 14 aa, Homo sapiens
  CDR3 for beta chain variable domain of TCR clone 56339 (TRBV19, TRBJ2-1)
CASPTFVLSGEQFF

SEQ ID NO: 112679 - protein, 13 aa, Homo sapiens
  CDR3 for alpha chain variable domain of TCR clone 56340 (TRAV29/DV5, TRAJ31)
CAASRNNNARLMF

SEQ ID NO: 112680 - protein, 16 aa, Homo sapiens
  CDR3 for beta chain variable domain of TCR clone 56340 (TRBV24-1, TRBJ2-3)
CATSDPGTGATDTQYF

SEQ ID NO: 112681 - protein, 14 aa, Homo sapiens
  CDR3 for alpha chain variable domain of TCR clone 56341 (TRAV13-2, TRAJ43)
CAEIHTYNNNDMRF

SEQ ID NO: 112682 - protein, 15 aa, Homo sapiens
  CDR3 for beta chain variable domain of TCR clone 56341 (TRBV7-9, TRBJ2-2)
CASGPLDTFPGELFF

SEQ ID NO: 112683 - protein, 14 aa, Homo sapiens
  CDR3 for alpha chain variable domain of TCR clone 56342 (TRAV26-1, TRAJ45)
FIVRVVGGADGLTF

SEQ ID NO: 112684 - protein, 16 aa, Homo sapiens
  CDR3 for beta chain variable domain of TCR clone 56342 (TRBV7-9, TRBJ1-1)
CASSLTQVRSNTEAFF

SEQ ID NO: 112685 - protein, 17 aa, Homo sapiens
  CDR3 for alpha chain variable domain of TCR clone 56343 (TRAV3, TRAJ6)
CAVRDGPRAGGSDIPTF

SEQ ID NO: 112686 - protein, 13 aa, Homo sapiens
  CDR3 for beta chain variable domain of TCR clone 56343 (TRBV19, TRBJ2-7)
CASSIDRTYEQYF

SEQ ID NO: 112687 - protein, 18 aa, Homo sapiens
  CDR3 for alpha chain variable domain of TCR clone 56344 (TRAV13-1, TRAJ52)
CAAKNPNAGGTSYGKLTF

SEQ ID NO: 112688 - protein, 15 aa, Homo sapiens
  CDR3 for beta chain variable domain of TCR clone 56344 (TRBV20-1, TRBJ2-1)
CSASSAGSSYNEQFF

SEQ ID NO: 112689 - protein, 13 aa, Homo sapiens
  CDR3 for alpha chain variable domain of TCR clone 56345 (TRAV3, TRAJ27)
CAVRPLGAGKSTF

SEQ ID NO: 112690 - protein, 14 aa, Homo sapiens
  CDR3 for beta chain variable domain of TCR clone 56345 (TRBV7-9, TRBJ2-1)
CASSPRDSLYEQFF

SEQ ID NO: 112691 - protein, 16 aa, Homo sapiens
  CDR3 for alpha chain variable domain of TCR clone 56346 (TRAV23/DV6, TRAJ9)
CAASIGGNTGGFKTIF

SEQ ID NO: 112692 - protein, 14 aa, Homo sapiens
  CDR3 for beta chain variable domain of TCR clone 56346 (TRBV9, TRBJ2-7)
CASGVGVGSYEQYF

SEQ ID NO: 112693 - protein, 13 aa, Homo sapiens
  CDR3 for alpha chain variable domain of TCR clone 56347 (TRAV17, TRAJ21)
CATDGGNFNKFYF

SEQ ID NO: 112694 - protein, 16 aa, Homo sapiens
  CDR3 for beta chain variable domain of TCR clone 56347 (TRBV2, TRBJ1-3)
CASSRTGGSTGNTIYF

SEQ ID NO: 112695 - protein, 17 aa, Homo sapiens
  CDR3 for alpha chain variable domain of TCR clone 56348 (TRAV8-6, TRAJ58)
CTVSSWVGETSGSRLTF

SEQ ID NO: 112696 - protein, 14 aa, Homo sapiens
  CDR3 for beta chain variable domain of TCR clone 56348 (TRBV4-2, TRBJ2-1)
CASGLDRAYNEQFF

SEQ ID NO: 112697 - protein, 14 aa, Homo sapiens
  CDR3 for alpha chain variable domain of TCR clone 56349 (TRAV12-3, TRAJ10)
SHLPLTGGGNKLTF

SEQ ID NO: 112698 - protein, 15 aa, Homo sapiens
  CDR3 for beta chain variable domain of TCR clone 56349 (TRBV7-8, TRBJ1-5)
CASSLERRGLEPQHF

SEQ ID NO: 112699 - protein, 12 aa, Homo sapiens
  CDR3 for alpha chain variable domain of TCR clone 56350 (TRAV2, TRAJ10)
CASTGGGNKRTF

SEQ ID NO: 112700 - protein, 13 aa, Homo sapiens
  CDR3 for beta chain variable domain of TCR clone 56350 (TRBV19, TRBJ1-5)
CASSMRGYQPQHF

SEQ ID NO: 112701 - protein, 16 aa, Homo sapiens
  CDR3 for alpha chain variable domain of TCR clone 56351 (TRAV12-1, TRAJ53)
CVVTSVAGGSNYKLTF

SEQ ID NO: 112702 - protein, 17 aa, Homo sapiens
  CDR3 for beta chain variable domain of TCR clone 56351 (TRBV7-3, TRBJ2-3)
RASSPRGQGYGTDTQYF

SEQ ID NO: 112703 - protein, 12 aa, Homo sapiens
  CDR3 for alpha chain variable domain of TCR clone 56352 (TRAV2, TRAJ15)
CAVAQAGTALIF

SEQ ID NO: 112704 - protein, 13 aa, Homo sapiens
  CDR3 for beta chain variable domain of TCR clone 56352 (TRBV19, TRBJ1-2)
CASSVPGQDGYTF

SEQ ID NO: 112705 - protein, 16 aa, Homo sapiens
  CDR3 for alpha chain variable domain of TCR clone 56353 (TRAV8-3, TRAJ45)
CAVGDGSGGGADGLTF

SEQ ID NO: 112706 - protein, 15 aa, Homo sapiens
  CDR3 for beta chain variable domain of TCR clone 56353 (TRBV4-3, TRBJ1-1)
CASSQGPTGNTEAFF

SEQ ID NO: 112707 - protein, 14 aa, Homo sapiens
  CDR3 for alpha chain variable domain of TCR clone 56354 (TRAV12-3, TRAJ42)
CAMNYGGSQGNLIF

SEQ ID NO: 112708 - protein, 13 aa, Homo sapiens
  CDR3 for beta chain variable domain of TCR clone 56354 (TRBV12-4, TRBJ1-2)
CASSSGLTVISTF

SEQ ID NO: 112709 - protein, 16 aa, Homo sapiens
  CDR3 for alpha chain variable domain of TCR clone 56355 (TRAV30, TRAJ24)
CVTEIVDADSWGKFQF

SEQ ID NO: 112710 - protein, 15 aa, Homo sapiens
  CDR3 for beta chain variable domain of TCR clone 56355 (TRBV7-9, TRBJ1-4)
CASSARTGGNEKLFF

SEQ ID NO: 112711 - protein, 15 aa, Homo sapiens
  CDR3 for alpha chain variable domain of TCR clone 56356 (TRAV14/DV4, TRAJ48)
CAMREGNAGNEKLTF

SEQ ID NO: 112712 - protein, 15 aa, Homo sapiens
  CDR3 for beta chain variable domain of TCR clone 56356 (TRBV19, TRBJ1-1)
CASTSGQIQNTEAFF

SEQ ID NO: 112713 - protein, 12 aa, Homo sapiens
  CDR3 for alpha chain variable domain of TCR clone 56357 (TRAV8-3, TRAJ20)
CAVGANDYKHSF

SEQ ID NO: 112714 - protein, 16 aa, Homo sapiens
  CDR3 for beta chain variable domain of TCR clone 56357 (TRBV19, TRBJ2-2)
CASRSPGTGATGELFF

SEQ ID NO: 112715 - protein, 15 aa, Homo sapiens
  CDR3 for alpha chain variable domain of TCR clone 56358 (TRAV26-1, TRAJ56)
CIVKVDNGANSKLTF

SEQ ID NO: 112716 - protein, 15 aa, Homo sapiens
  CDR3 for beta chain variable domain of TCR clone 56358 (TRBV20-1, TRBJ2-7)
CSARDPTEVGHEQYF

SEQ ID NO: 112717 - protein, 11 aa, Homo sapiens
  CDR3 for alpha chain variable domain of TCR clone 56359 (TRAV2, TRAJ13)
CASGGYQRVTF

SEQ ID NO: 112718 - protein, 16 aa, Homo sapiens
  CDR3 for beta chain variable domain of TCR clone 56359 (TRBV12-5, TRBJ2-5)
CASGPRTSGNQETQYF

SEQ ID NO: 112719 - protein, 14 aa, Homo sapiens
  CDR3 for alpha chain variable domain of TCR clone 56360 (TRAV35, TRAJ22)
CAGLRPGSARQLTF

SEQ ID NO: 112720 - protein, 15 aa, Homo sapiens
  CDR3 for beta chain variable domain of TCR clone 56360 (TRBV28, TRBJ1-2)
CASSSPRRGNYGYTF

SEQ ID NO: 112721 - protein, 10 aa, Homo sapiens
  CDR3 for alpha chain variable domain of TCR clone 56361 (TRAV23/DV6, TRAJ43)
CAAAVAALAQ

SEQ ID NO: 112722 - protein, 13 aa, Homo sapiens
  CDR3 for beta chain variable domain of TCR clone 56361 (TRBV12-4, TRBJ1-2)
CASSLRQGKGYTF

SEQ ID NO: 112723 - protein, 11 aa, Homo sapiens
  CDR3 for alpha chain variable domain of TCR clone 56362 (TRAV2, TRAJ33)
CAVESNYQLIW

SEQ ID NO: 112724 - protein, 13 aa, Homo sapiens
  CDR3 for beta chain variable domain of TCR clone 56362 (TRBV27, TRBJ1-4)
CASSLMGDEELFF

SEQ ID NO: 112725 - protein, 10 aa, Homo sapiens
  CDR3 for alpha chain variable domain of TCR clone 56363 (TRAV16, TRAJ22)
SAMYLRQLTF

SEQ ID NO: 112726 - protein, 15 aa, Homo sapiens
  CDR3 for beta chain variable domain of TCR clone 56363 (TRBV19, TRBJ1-2)
CASSVGQVLNYGYTF

SEQ ID NO: 112727 - protein, 12 aa, Homo sapiens
  CDR3 for alpha chain variable domain of TCR clone 56364 (TRAV21, TRAJ11)
CAATSGYSTITF

SEQ ID NO: 112728 - protein, 13 aa, Homo sapiens
  CDR3 for beta chain variable domain of TCR clone 56364 (TRBV20-1, TRBJ1-1)
CSAPLGGGTEAFF

SEQ ID NO: 112729 - protein, 16 aa, Homo sapiens
  CDR3 for alpha chain variable domain of TCR clone 56365 (TRAV17, TRAJ22)
CATGPISSGSARQLTF

SEQ ID NO: 112730 - protein, 14 aa, Homo sapiens
  CDR3 for beta chain variable domain of TCR clone 56365 (TRBV20-1, TRBJ1-1)
CSAQTRIGGTEAFF

SEQ ID NO: 112731 - protein, 17 aa, Homo sapiens
  CDR3 for alpha chain variable domain of TCR clone 56366 (TRAV26-2, TRAJ42)
CILRDVGYGGSQGNLIV

SEQ ID NO: 112732 - protein, 16 aa, Homo sapiens
  CDR3 for beta chain variable domain of TCR clone 56366 (TRBV12-4, TRBJ2-7)
CASSLIGGTGTYEQYF

SEQ ID NO: 112733 - protein, 11 aa, Homo sapiens
  CDR3 for alpha chain variable domain of TCR clone 56367 (TRAV12-1, TRAJ43)
CVEYDNNDMRF

SEQ ID NO: 112734 - protein, 14 aa, Homo sapiens
  CDR3 for beta chain variable domain of TCR clone 56367 (TRBV20-1, TRBJ1-1)
CSAQTRIGGTEAFF

SEQ ID NO: 112735 - protein, 11 aa, Homo sapiens
  CDR3 for alpha chain variable domain of TCR clone 56368 (TRAV2, TRAJ13)
CASGGYQKVTF

SEQ ID NO: 112736 - protein, 12 aa, Homo sapiens
  CDR3 for beta chain variable domain of TCR clone 56368 (TRBV14, TRBJ2-5)
CASSHLKETQYF

SEQ ID NO: 112737 - protein, 16 aa, Homo sapiens
  CDR3 for alpha chain variable domain of TCR clone 56369 (TRAV3, TRAJ21)
CSVRDIERGNFNKFYF

SEQ ID NO: 112738 - protein, 13 aa, Homo sapiens
  CDR3 for beta chain variable domain of TCR clone 56369 (TRBV27, TRBJ2-7)
CASSLTTGYEQYF

SEQ ID NO: 112739 - protein, 14 aa, Homo sapiens
  CDR3 for alpha chain variable domain of TCR clone 56370 (TRAV16, TRAJ33)
CALSAMDSNYQLIW

SEQ ID NO: 112740 - protein, 13 aa, Homo sapiens
  CDR3 for beta chain variable domain of TCR clone 56370 (TRBV10-3, TRBJ2-7)
CASKLAVNYEQYF

SEQ ID NO: 112741 - protein, 10 aa, Homo sapiens
  CDR3 for alpha chain variable domain of TCR clone 56371 (TRAV1-2, TRAJ34)
CAVNTDKLIF

SEQ ID NO: 112742 - protein, 18 aa, Homo sapiens
  CDR3 for beta chain variable domain of TCR clone 56371 (TRBV7-9, TRBJ2-7)
CASSLTTSGSRTWYKQYF

SEQ ID NO: 112743 - protein, 18 aa, Homo sapiens
  CDR3 for alpha chain variable domain of TCR clone 56372 (TRAV13-1, TRAJ52)
CAAKNPNAGGTSYGKLTF

SEQ ID NO: 112744 - protein, 13 aa, Homo sapiens
  CDR3 for beta chain variable domain of TCR clone 56372 (TRBV12-4, TRBJ1-2)
CASSLRQGKGYTF

SEQ ID NO: 112745 - protein, 14 aa, Homo sapiens
  CDR3 for alpha chain variable domain of TCR clone 56373 (TRAV2, TRAJ9)
CAVEDRSGGFKTIF

SEQ ID NO: 112746 - protein, 16 aa, Homo sapiens
  CDR3 for beta chain variable domain of TCR clone 56373 (TRBV12-4, TRBJ1-5)
CASSRPVGGSNQPQHF

SEQ ID NO: 112747 - protein, 12 aa, Homo sapiens
  CDR3 for alpha chain variable domain of TCR clone 56374 (TRAV12-3, TRAJ17)
CAMTLTGNKPTF

SEQ ID NO: 112748 - protein, 14 aa, Homo sapiens
  CDR3 for beta chain variable domain of TCR clone 56374 (TRBV7-3, TRBJ2-1)
CASSLAGGTNEQFF

SEQ ID NO: 112749 - protein, 13 aa, Homo sapiens
  CDR3 for alpha chain variable domain of TCR clone 56375 (TRAV3, TRAJ15)
CAVRDQVGTALIF

SEQ ID NO: 112750 - protein, 15 aa, Homo sapiens
  CDR3 for beta chain variable domain of TCR clone 56375 (TRBV11-1, TRBJ2-7)
CASSLNYGASYEQYF

SEQ ID NO: 112751 - protein, 11 aa, Homo sapiens
  CDR3 for alpha chain variable domain of TCR clone 56376 (TRAV21, TRAJ48)
CAVDGNEKLTL

SEQ ID NO: 112752 - protein, 16 aa, Homo sapiens
  CDR3 for beta chain variable domain of TCR clone 56376 (TRBV12-4, TRBJ1-5)
CASSSGPRGSNQPQHF

SEQ ID NO: 112753 - protein, 13 aa, Homo sapiens
  CDR3 for alpha chain variable domain of TCR clone 56377 (TRAV2, TRAJ40)
CAVVTSGTYKYIF

SEQ ID NO: 112754 - protein, 14 aa, Homo sapiens
  CDR3 for beta chain variable domain of TCR clone 56377 (TRBV20-1, TRBJ2-3)
CSARGGTSTDTQYF

SEQ ID NO: 112755 - protein, 15 aa, Homo sapiens
  CDR3 for alpha chain variable domain of TCR clone 56378 (TRAV26-1, TRAJ29)
CIVRVERSGNTPLVF

SEQ ID NO: 112756 - protein, 14 aa, Homo sapiens
  CDR3 for beta chain variable domain of TCR clone 56378 (TRBV18, TRBJ2-5)
CASSPGVPQETQYF

SEQ ID NO: 112757 - protein, 15 aa, Homo sapiens
  CDR3 for alpha chain variable domain of TCR clone 56379 (TRAV8-4, TRAJ3)
CAVTGEDLVQQCFQD

SEQ ID NO: 112758 - protein, 16 aa, Homo sapiens
  CDR3 for beta chain variable domain of TCR clone 56379 (TRBV4-2, TRBJ1-1)
CASSQAGFGMNTEAFF

SEQ ID NO: 112759 - protein, 17 aa, Homo sapiens
  CDR3 for alpha chain variable domain of TCR clone 56380 (TRAV3, TRAJ38)
CAVRDCLNAGNNRKLIW

SEQ ID NO: 112760 - protein, 16 aa, Homo sapiens
  CDR3 for beta chain variable domain of TCR clone 56380 (TRBV5-5, TRBJ1-5)
CASSDRESISPSILVM

SEQ ID NO: 112761 - protein, 14 aa, Homo sapiens
  CDR3 for alpha chain variable domain of TCR clone 56381 (TRAV23/DV6, TRAJ21)
CAAYKSGPRDKFYF

SEQ ID NO: 112762 - protein, 15 aa, Homo sapiens
  CDR3 for beta chain variable domain of TCR clone 56381 (TRBV5-4, TRBJ2-2)
CASSLTSRGTGELFL

SEQ ID NO: 112763 - protein, 14 aa, Homo sapiens
  CDR3 for alpha chain variable domain of TCR clone 56382 (TRAV12-2, TRAJ48)
CAVNAFFGNEKLTF

SEQ ID NO: 112764 - protein, 14 aa, Homo sapiens
  CDR3 for beta chain variable domain of TCR clone 56382 (TRBV5-1, TRBJ2-7)
CASSRGESLYEQYF

SEQ ID NO: 112765 - protein, 13 aa, Homo sapiens
  CDR3 for alpha chain variable domain of TCR clone 56383 (TRAV23/DV6, TRAJ47)
CAASSQYGNKLVF

SEQ ID NO: 112766 - protein, 15 aa, Homo sapiens
  CDR3 for beta chain variable domain of TCR clone 56383 (TRBV7-3, TRBJ2-1)
CASSLDGNAYNEQFF

SEQ ID NO: 112767 - protein, 15 aa, Homo sapiens
  CDR3 for alpha chain variable domain of TCR clone 56384 (TRAV3, TRAJ22)
CAVRDRGGSARQLTF

SEQ ID NO: 112768 - protein, 13 aa, Homo sapiens
  CDR3 for beta chain variable domain of TCR clone 56384 (TRBV20-1, TRBJ2-2)
CSASAAGTGELFF

SEQ ID NO: 112769 - protein, 14 aa, Homo sapiens
  CDR3 for alpha chain variable domain of TCR clone 56385 (TRAV9-2, TRAJ6)
CALSDPGGSYIPTF

SEQ ID NO: 112770 - protein, 13 aa, Homo sapiens
  CDR3 for beta chain variable domain of TCR clone 56385 (TRBV28, TRBJ1-1)
CASGKQGWTEAFF

SEQ ID NO: 112771 - protein, 12 aa, Homo sapiens
  CDR3 for alpha chain variable domain of TCR clone 56386 (TRAV3, TRAJ43)
CAVRDPNNDMRF

SEQ ID NO: 112772 - protein, 15 aa, Homo sapiens
  CDR3 for beta chain variable domain of TCR clone 56386 (TRBV25-1, TRBJ1-4)
CASSPGDSTNEKLFF

SEQ ID NO: 112773 - protein, 15 aa, Homo sapiens
  CDR3 for alpha chain variable domain of TCR clone 56387 (TRAV12-2, TRAJ56)
CAVNPFNGANSKLTF

SEQ ID NO: 112774 - protein, 13 aa, Homo sapiens
  CDR3 for beta chain variable domain of TCR clone 56387 (TRBV20-1, TRBJ1-2)
CSARDRVYGGYTF

SEQ ID NO: 112775 - protein, 20 aa, Homo sapiens
  CDR3 for alpha chain variable domain of TCR clone 56388 (TRAV38-1, TRAJ56)
CDVFLCFREASNWSHSKLTF

SEQ ID NO: 112776 - protein, 15 aa, Homo sapiens
  CDR3 for beta chain variable domain of TCR clone 56388 (TRBV20-1, TRBJ2-7)
CSARDRVSGMDEQYF

SEQ ID NO: 112777 - protein, 14 aa, Homo sapiens
  CDR3 for alpha chain variable domain of TCR clone 56389 (TRAV12-2, TRAJ13)
CAVKKTGGYQKVTF

SEQ ID NO: 112778 - protein, 14 aa, Homo sapiens
  CDR3 for beta chain variable domain of TCR clone 56389 (TRBV7-7, TRBJ2-2)
CATRQDSDTGELFF

SEQ ID NO: 112779 - protein, 13 aa, Homo sapiens
  CDR3 for alpha chain variable domain of TCR clone 56390 (TRAV8-3, TRAJ15)
YAVGIQAGTALIF

SEQ ID NO: 112780 - protein, 17 aa, Homo sapiens
  CDR3 for beta chain variable domain of TCR clone 56390 (TRBV20-1, TRBJ2-1)
CSARDPLAGVSYNEQFF

SEQ ID NO: 112781 - protein, 11 aa, Homo sapiens
  CDR3 for alpha chain variable domain of TCR clone 56391 (TRAV12-3, TRAJ41)
CAMNAREALNF

SEQ ID NO: 112782 - protein, 16 aa, Homo sapiens
  CDR3 for beta chain variable domain of TCR clone 56391 (TRBV7-8, TRBJ2-3)
CASSTEGQRETDTQYL

SEQ ID NO: 112783 - protein, 11 aa, Homo sapiens
  CDR3 for alpha chain variable domain of TCR clone 56392 (TRAV3, TRAJ21)
CSVGNFNKFYF

SEQ ID NO: 112784 - protein, 14 aa, Homo sapiens
  CDR3 for beta chain variable domain of TCR clone 56392 (TRBV29-1, TRBJ2-2)
CSGRGSGNTGELFF

SEQ ID NO: 112785 - protein, 15 aa, Homo sapiens
  CDR3 for alpha chain variable domain of TCR clone 56393 (TRAV21, TRAJ13)
CAVRPTYGGYQKVTF

SEQ ID NO: 112786 - protein, 15 aa, Homo sapiens
  CDR3 for beta chain variable domain of TCR clone 56393 (TRBV28, TRBJ2-7)
CASSPGGRGFYEQYF

SEQ ID NO: 112787 - protein, 11 aa, Homo sapiens
  CDR3 for alpha chain variable domain of TCR clone 56394 (TRAV12-1, TRAJ31)
CVGRVQCQTHV

SEQ ID NO: 112788 - protein, 13 aa, Homo sapiens
  CDR3 for beta chain variable domain of TCR clone 56394 (TRBV7-3, TRBJ1-1)
CASSQDWGAEAFF

SEQ ID NO: 112789 - protein, 12 aa, Homo sapiens
  CDR3 for alpha chain variable domain of TCR clone 56395 (TRAV27, TRAJ35)
CSGADFGNVLHC

SEQ ID NO: 112790 - protein, 16 aa, Homo sapiens
  CDR3 for beta chain variable domain of TCR clone 56395 (TRBV6-1, TRBJ2-1)
CASILRQGSSYNEQFF

SEQ ID NO: 112791 - protein, 13 aa, Homo sapiens
  CDR3 for alpha chain variable domain of TCR clone 56396 (TRAV21, TRAJ20)
CAVGLRVDYKLSF

SEQ ID NO: 112792 - protein, 13 aa, Homo sapiens
  CDR3 for beta chain variable domain of TCR clone 56396 (TRBV15, TRBJ2-1)
CVPPAEVDTARFF

SEQ ID NO: 112793 - protein, 13 aa, Homo sapiens
  CDR3 for alpha chain variable domain of TCR clone 56397 (TRAV8-3, TRAJ28)
CAVGAVGVTNSLS

SEQ ID NO: 112794 - protein, 14 aa, Homo sapiens
  CDR3 for beta chain variable domain of TCR clone 56397 (TRBV7-2, TRBJ2-7)
CASRSQGAAYEQYF

SEQ ID NO: 112795 - protein, 12 aa, Homo sapiens
  CDR3 for alpha chain variable domain of TCR clone 56398 (TRAV16, TRAJ22)
CALEVSARQLTF

SEQ ID NO: 112796 - protein, 15 aa, Homo sapiens
  CDR3 for beta chain variable domain of TCR clone 56398 (TRBV7-9, TRBJ1-5)
CASSQGHQPNQPQHF

SEQ ID NO: 112797 - protein, 14 aa, Homo sapiens
  CDR3 for alpha chain variable domain of TCR clone 56399 (TRAV1-2, TRAJ8)
CAVREDTDFQKLVF

SEQ ID NO: 112798 - protein, 15 aa, Homo sapiens
  CDR3 for beta chain variable domain of TCR clone 56399 (TRBV4-1, TRBJ2-7)
CASSQNTGRLYEQYF

SEQ ID NO: 112799 - protein, 13 aa, Homo sapiens
  CDR3 for alpha chain variable domain of TCR clone 56400 (TRAV3, TRAJ21)
CAVREPDFNKFYF

SEQ ID NO: 112800 - protein, 12 aa, Homo sapiens
  CDR3 for beta chain variable domain of TCR clone 56400 (TRBV14, TRBJ1-1)
CASSQLKGLAFF

SEQ ID NO: 112801 - protein, 14 aa, Homo sapiens
  CDR3 for alpha chain variable domain of TCR clone 56401 (TRAV3, TRAJ33)
CAVRDMGSNCQLIW

SEQ ID NO: 112802 - protein, 17 aa, Homo sapiens
  CDR3 for beta chain variable domain of TCR clone 56401 (TRBV19, TRBJ2-1)
CASSIWSAQPTHNEQFF

SEQ ID NO: 112803 - protein, 14 aa, Homo sapiens
  CDR3 for alpha chain variable domain of TCR clone 56402 (TRAV12-1, TRAJ24)
CVVRSTDSWGKFQF

SEQ ID NO: 112804 - protein, 13 aa, Homo sapiens
  CDR3 for beta chain variable domain of TCR clone 56402 (TRBV2, TRBJ2-3)
RASILAGGQGQYF

SEQ ID NO: 112805 - protein, 18 aa, Homo sapiens
  CDR3 for alpha chain variable domain of TCR clone 56403 (TRAV29/DV5, TRAJ52)
CAAGFRGACGTSYGKLTF

SEQ ID NO: 112806 - protein, 16 aa, Homo sapiens
  CDR3 for beta chain variable domain of TCR clone 56403 (TRBV7-3, TRBJ2-2)
CASSLKRGTLSGELFF

SEQ ID NO: 112807 - protein, 16 aa, Homo sapiens
  CDR3 for alpha chain variable domain of TCR clone 56404 (TRAV3, TRAJ3)
CAVRDMSKSSASKIIF

SEQ ID NO: 112808 - protein, 16 aa, Homo sapiens
  CDR3 for beta chain variable domain of TCR clone 56404 (TRBV20-1, TRBJ2-4)
CSATSLAELAKNIQYF

SEQ ID NO: 112809 - protein, 12 aa, Homo sapiens
  CDR3 for alpha chain variable domain of TCR clone 56405 (TRAV27, TRAJ9)
CAGESGGFKTIF

SEQ ID NO: 112810 - protein, 16 aa, Homo sapiens
  CDR3 for beta chain variable domain of TCR clone 56405 (TRBV20-1, TRBJ1-4)
CSAPGQGLLTNEKLFF

SEQ ID NO: 112811 - protein, 15 aa, Homo sapiens
  CDR3 for alpha chain variable domain of TCR clone 56406 (TRAV1-2, TRAJ28)
CAVQYSGAGSYQLTF

SEQ ID NO: 112812 - protein, 12 aa, Homo sapiens
  CDR3 for beta chain variable domain of TCR clone 56406 (TRBV7-9, TRBJ1-4)
CASSTDREKLFF

SEQ ID NO: 112813 - protein, 13 aa, Homo sapiens
  CDR3 for alpha chain variable domain of TCR clone 56407 (TRAV13-1, TRAJ5)
CAASDTGKRALTF

SEQ ID NO: 112814 - protein, 12 aa, Homo sapiens
  CDR3 for beta chain variable domain of TCR clone 56407 (TRBV28, TRBJ2-3)
CASSLYRDTQYF

SEQ ID NO: 112815 - protein, 14 aa, Homo sapiens
  CDR3 for alpha chain variable domain of TCR clone 56408 (TRAV9-2, TRAJ39)
CALYIYNAGNMLTF

SEQ ID NO: 112816 - protein, 13 aa, Homo sapiens
  CDR3 for beta chain variable domain of TCR clone 56408 (TRBV14, TRBJ2-7)
CASSQDRRYEQYF

SEQ ID NO: 112817 - protein, 11 aa, Homo sapiens
  CDR3 for alpha chain variable domain of TCR clone 56409 (TRAV21, TRAJ56)
SATGANSKLTF

SEQ ID NO: 112818 - protein, 17 aa, Homo sapiens
  CDR3 for beta chain variable domain of TCR clone 56409 (TRBV11-2, TRBJ2-1)
CASSLYPPGVEYNEQFF

SEQ ID NO: 112819 - protein, 14 aa, Homo sapiens
  CDR3 for alpha chain variable domain of TCR clone 56410 (TRAV12-2, TRAJ13)
CAVKKTGGYQKVTL

SEQ ID NO: 112820 - protein, 13 aa, Homo sapiens
  CDR3 for beta chain variable domain of TCR clone 56410 (TRBV10-3, TRBJ2-7)
CASKLAVNYEQYF

SEQ ID NO: 112821 - protein, 13 aa, Homo sapiens
  CDR3 for alpha chain variable domain of TCR clone 56411 (TRAV12-1, TRAJ5)
CVVNLPGRRALTF

SEQ ID NO: 112822 - protein, 14 aa, Homo sapiens
  CDR3 for beta chain variable domain of TCR clone 56411 (TRBV15, TRBJ2-3)
CATARDGGGDTQYF

SEQ ID NO: 112823 - protein, 14 aa, Homo sapiens
  CDR3 for alpha chain variable domain of TCR clone 56412 (TRAV2, TRAJ9)
CAVEDRSGGFKTIF

SEQ ID NO: 112824 - protein, 13 aa, Homo sapiens
  CDR3 for beta chain variable domain of TCR clone 56412 (TRBV19, TRBJ1-2)
CASSVPGQDDYTF

SEQ ID NO: 112825 - protein, 15 aa, Homo sapiens
  CDR3 for alpha chain variable domain of TCR clone 56413 (TRAV26-1, TRAJ37)
CIVKTGSSNTGKLVF

SEQ ID NO: 112826 - protein, 12 aa, Homo sapiens
  CDR3 for beta chain variable domain of TCR clone 56413 (TRBV7-8, TRBJ2-7)
CASSLGDREQYF

SEQ ID NO: 112827 - protein, 22 aa, Homo sapiens
  CDR3 for alpha chain variable domain of TCR clone 56414 (TRAV8-2, TRAJ45)
HLTKPSAHMSDAAEYSADGLPF

SEQ ID NO: 112828 - protein, 13 aa, Homo sapiens
  CDR3 for beta chain variable domain of TCR clone 56414 (TRBV7-3, TRBJ2-1)
CASSPVAYNEQFF

SEQ ID NO: 112829 - protein, 14 aa, Homo sapiens
  CDR3 for alpha chain variable domain of TCR clone 56415 (TRAV2, TRAJ23)
CAVMEDNQGGKLIF

SEQ ID NO: 112830 - protein, 14 aa, Homo sapiens
  CDR3 for beta chain variable domain of TCR clone 56415 (TRBV7-2, TRBJ2-1)
CASSRGGTYNEQFF

SEQ ID NO: 112831 - protein, 14 aa, Homo sapiens
  CDR3 for alpha chain variable domain of TCR clone 56416 (TRAV1-2, TRAJ16)
CAVNRFSDGQKLLF

SEQ ID NO: 112832 - protein, 12 aa, Homo sapiens
  CDR3 for beta chain variable domain of TCR clone 56416 (TRBV11-2, TRBJ2-2)
CASGLGGGELFF

SEQ ID NO: 112833 - protein, 11 aa, Homo sapiens
  CDR3 for alpha chain variable domain of TCR clone 56417 (TRAV12-3, TRAJ27)
CAMANAGKSTF

SEQ ID NO: 112834 - protein, 15 aa, Homo sapiens
  CDR3 for beta chain variable domain of TCR clone 56417 (TRBV28, TRBJ2-1)
CASSGLAEVDNEQFF

SEQ ID NO: 112835 - protein, 11 aa, Homo sapiens
  CDR3 for alpha chain variable domain of TCR clone 56418 (TRAV12-3, TRAJ27)
CAMANAGKSTF

SEQ ID NO: 112836 - protein, 13 aa, Homo sapiens
  CDR3 for beta chain variable domain of TCR clone 56418 (TRBV20-1, TRBJ1-1)
RSARVGGNTEAFF

SEQ ID NO: 112837 - protein, 13 aa, Homo sapiens
  CDR3 for alpha chain variable domain of TCR clone 56419 (TRAV13-2, TRAJ13)
CAEGPGGYQKVTF

SEQ ID NO: 112838 - protein, 14 aa, Homo sapiens
  CDR3 for beta chain variable domain of TCR clone 56419 (TRBV4-1, TRBJ2-2)
CASSQAVNTGELFF

SEQ ID NO: 112839 - protein, 13 aa, Homo sapiens
  CDR3 for alpha chain variable domain of TCR clone 56420 (TRAV3, TRAJ20)
CAVRDTPRYKLSF

SEQ ID NO: 112840 - protein, 16 aa, Homo sapiens
  CDR3 for beta chain variable domain of TCR clone 56420 (TRBV20-1, TRBJ2-7)
CSARAPGLALSYEQYF

SEQ ID NO: 112841 - protein, 13 aa, Homo sapiens
  CDR3 for alpha chain variable domain of TCR clone 56421 (TRAV13-1, TRAJ48)
CAAASFGNEKLTF

SEQ ID NO: 112842 - protein, 12 aa, Homo sapiens
  CDR3 for beta chain variable domain of TCR clone 56421 (TRBV24-1, TRBJ1-1)
CATLYPDTEAFF

SEQ ID NO: 112843 - protein, 18 aa, Homo sapiens
  CDR3 for alpha chain variable domain of TCR clone 56422 (TRAV17, TRAJ28)
CATDPPRGSGAGSYQLTF

SEQ ID NO: 112844 - protein, 14 aa, Homo sapiens
  CDR3 for beta chain variable domain of TCR clone 56422 (TRBV13, TRBJ2-5)
CASSLVYPQETQYF

SEQ ID NO: 112845 - protein, 14 aa, Homo sapiens
  CDR3 for alpha chain variable domain of TCR clone 56423 (TRAV9-2, TRAJ39)
CALYIYNAGNMLTF

SEQ ID NO: 112846 - protein, 15 aa, Homo sapiens
  CDR3 for beta chain variable domain of TCR clone 56423 (TRBV7-2, TRBJ1-2)
CASSPRAGWNYGYTF

SEQ ID NO: 112847 - protein, 11 aa, Homo sapiens
  CDR3 for alpha chain variable domain of TCR clone 56424 (TRAV21, TRAJ48)
CAVDGNEQLTF

SEQ ID NO: 112848 - protein, 16 aa, Homo sapiens
  CDR3 for beta chain variable domain of TCR clone 56424 (TRBV12-4, TRBJ1-5)
CASSSGPRGSNQPQHF

SEQ ID NO: 112849 - protein, 13 aa, Homo sapiens
  CDR3 for alpha chain variable domain of TCR clone 56425 (TRAV8-3, TRAJ48)
CAVVPFGNEKLTF

SEQ ID NO: 112850 - protein, 13 aa, Homo sapiens
  CDR3 for beta chain variable domain of TCR clone 56425 (TRBV12-5, TRBJ2-3)
CASGDRQSDTQYF

SEQ ID NO: 112851 - protein, 12 aa, Homo sapiens
  CDR3 for alpha chain variable domain of TCR clone 56426 (TRAV1-1, TRAJ30)
CAVRGRDDKIIF

SEQ ID NO: 112852 - protein, 13 aa, Homo sapiens
  CDR3 for beta chain variable domain of TCR clone 56426 (TRBV28, TRBJ2-7)
CASSTTRSYEQYF

SEQ ID NO: 112853 - protein, 16 aa, Homo sapiens
  CDR3 for alpha chain variable domain of TCR clone 56427 (TRAV3, TRAJ37)
CAGRGKGSGNTGKLIF

SEQ ID NO: 112854 - protein, 15 aa, Homo sapiens
  CDR3 for beta chain variable domain of TCR clone 56427 (TRBV7-9, TRBJ1-6)
CASSSPGRGNSPLHF

SEQ ID NO: 112855 - protein, 14 aa, Homo sapiens
  CDR3 for alpha chain variable domain of TCR clone 56428 (TRAV13-1, TRAJ13)
CAASRVGGYRKVTF

SEQ ID NO: 112856 - protein, 17 aa, Homo sapiens
  CDR3 for beta chain variable domain of TCR clone 56428 (TRBV15, TRBJ1-5)
CATSRAPPGTRNQPQHF

SEQ ID NO: 112857 - protein, 21 aa, Homo sapiens
  CDR3 for alpha chain variable domain of TCR clone 56429 (TRAV30, TRAJ43)
GLPAQLLRNLLPLIELNDMRF

SEQ ID NO: 112858 - protein, 14 aa, Homo sapiens
  CDR3 for beta chain variable domain of TCR clone 56429 (TRBV27, TRBJ2-1)
CASRHLGGGKEQFF

SEQ ID NO: 112859 - protein, 16 aa, Homo sapiens
  CDR3 for alpha chain variable domain of TCR clone 56430 (TRAV26-1, TRAJ32)
CIVRTNYGGATNKLIF

SEQ ID NO: 112860 - protein, 14 aa, Homo sapiens
  CDR3 for beta chain variable domain of TCR clone 56430 (TRBV27, TRBJ1-1)
CASSLLRGLSEAFF

SEQ ID NO: 112861 - protein, 15 aa, Homo sapiens
  CDR3 for alpha chain variable domain of TCR clone 56431 (TRAV21, TRAJ40)
CAVRPQTSGTYKYIF

SEQ ID NO: 112862 - protein, 12 aa, Homo sapiens
  CDR3 for beta chain variable domain of TCR clone 56431 (TRBV11-2, TRBJ2-2)
CASSLGGGELFF

SEQ ID NO: 112863 - protein, 13 aa, Homo sapiens
  CDR3 for alpha chain variable domain of TCR clone 56432 (TRAV24, TRAJ42)
CAFSTGSQGNLIF

SEQ ID NO: 112864 - protein, 17 aa, Homo sapiens
  CDR3 for beta chain variable domain of TCR clone 56432 (TRBV6-1, TRBJ2-3)
CASSEALRLISTDTQYF

SEQ ID NO: 112865 - protein, 20 aa, Homo sapiens
  CDR3 for alpha chain variable domain of TCR clone 56433 (TRAV12-3, TRAJ41)
SLFIRDSQPSDSATPEALNF

SEQ ID NO: 112866 - protein, 17 aa, Homo sapiens
  CDR3 for beta chain variable domain of TCR clone 56433 (TRBV13, TRBJ2-3)
CASSLSRVAGGRNTQYF

SEQ ID NO: 112867 - protein, 13 aa, Homo sapiens
  CDR3 for alpha chain variable domain of TCR clone 56434 (TRAV1-2, TRAJ12)
CAVSMDSSYKLIF

SEQ ID NO: 112868 - protein, 13 aa, Homo sapiens
  CDR3 for beta chain variable domain of TCR clone 56434 (TRBV20-1, TRBJ1-1)
CSARGGGNTEAFF

SEQ ID NO: 112869 - protein, 17 aa, Homo sapiens
  CDR3 for alpha chain variable domain of TCR clone 56435 (TRAV23/DV6, TRAJ58)
CAARLLRGETSGSRLTF

SEQ ID NO: 112870 - protein, 17 aa, Homo sapiens
  CDR3 for beta chain variable domain of TCR clone 56435 (TRBV20-1, TRBJ2-1)
CSASSSGLAGSYNEQFF

SEQ ID NO: 112871 - protein, 11 aa, Homo sapiens
  CDR3 for alpha chain variable domain of TCR clone 56436 (TRAV3, TRAJ17)
PRGAAGNKLTF

SEQ ID NO: 112872 - protein, 16 aa, Homo sapiens
  CDR3 for beta chain variable domain of TCR clone 56436 (TRBV7-6, TRBJ2-1)
CASSAPGPSSYNEQFF

SEQ ID NO: 112873 - protein, 11 aa, Homo sapiens
  CDR3 for alpha chain variable domain of TCR clone 56437 (TRAV35, TRAJ30)
CAGPGDDKIIS

SEQ ID NO: 112874 - protein, 14 aa, Homo sapiens
  CDR3 for beta chain variable domain of TCR clone 56437 (TRBV7-6, TRBJ1-6)
CASSQAGGGSPLHF

SEQ ID NO: 112875 - protein, 13 aa, Homo sapiens
  CDR3 for alpha chain variable domain of TCR clone 56438 (TRAV23/DV6, TRAJ12)
CAPWVDSSYKLIF

SEQ ID NO: 112876 - protein, 12 aa, Homo sapiens
  CDR3 for beta chain variable domain of TCR clone 56438 (TRBV7-6, TRBJ2-5)
CASSLSQETQYF

SEQ ID NO: 112877 - protein, 10 aa, Homo sapiens
  CDR3 for alpha chain variable domain of TCR clone 56439 (TRAV12-1, TRAJ43)
CVVHNNDMRF

SEQ ID NO: 112878 - protein, 12 aa, Homo sapiens
  CDR3 for beta chain variable domain of TCR clone 56439 (TRBV11-2, TRBJ2-2)
CASSLGGGELFF

SEQ ID NO: 112879 - protein, 15 aa, Homo sapiens
  CDR3 for alpha chain variable domain of TCR clone 56440 (TRAV35, TRAJ58)
CAGHRQETSGSRLTF

SEQ ID NO: 112880 - protein, 11 aa, Homo sapiens
  CDR3 for beta chain variable domain of TCR clone 56440 (TRBV11-2, TRBJ1-1)
CASSINTEAFF

SEQ ID NO: 112881 - protein, 11 aa, Homo sapiens
  CDR3 for alpha chain variable domain of TCR clone 56441 (TRAV1-2, TRAJ20)
CAVANDYKLSF

SEQ ID NO: 112882 - protein, 15 aa, Homo sapiens
  CDR3 for beta chain variable domain of TCR clone 56441 (TRBV7-3, TRBJ2-1)
CASSPTGGGEVEQFF

SEQ ID NO: 112883 - protein, 13 aa, Homo sapiens
  CDR3 for alpha chain variable domain of TCR clone 56442 (TRAV36/DV7, TRAJ54)
CAVDIQGAQKLVF

SEQ ID NO: 112884 - protein, 14 aa, Homo sapiens
  CDR3 for beta chain variable domain of TCR clone 56442 (TRBV19, TRBJ2-7)
CASNLRDTFTGMYF

SEQ ID NO: 112885 - protein, 13 aa, Homo sapiens
  CDR3 for alpha chain variable domain of TCR clone 56443 (TRAV3, TRAJ21)
CAVREPDFNKFYF

SEQ ID NO: 112886 - protein, 13 aa, Homo sapiens
  CDR3 for beta chain variable domain of TCR clone 56443 (TRBV2, TRBJ1-1)
CASSVSGYTEAFF

SEQ ID NO: 112887 - protein, 13 aa, Homo sapiens
  CDR3 for alpha chain variable domain of TCR clone 56444 (TRAV12-2, TRAJ34)
CAVRGYNTDKLVF

SEQ ID NO: 112888 - protein, 15 aa, Homo sapiens
  CDR3 for beta chain variable domain of TCR clone 56444 (TRBV28, TRBJ2-1)
CASRTGAGVIARQFF

SEQ ID NO: 112889 - protein, 14 aa, Homo sapiens
  CDR3 for alpha chain variable domain of TCR clone 56445 (TRAV8-4, TRAJ9)
CAVRINTGGFKTIF

SEQ ID NO: 112890 - protein, 15 aa, Homo sapiens
  CDR3 for beta chain variable domain of TCR clone 56445 (TRBV10-2, TRBJ2-6)
SASSEQGTGANVLTF

SEQ ID NO: 112891 - protein, 10 aa, Homo sapiens
  CDR3 for alpha chain variable domain of TCR clone 56446 (TRAV12-1, TRAJ37)
ARGNTGKLII

SEQ ID NO: 112892 - protein, 15 aa, Homo sapiens
  CDR3 for beta chain variable domain of TCR clone 56446 (TRBV7-2, TRBJ2-3)
CASSLEQGGTDTQYF

SEQ ID NO: 112893 - protein, 14 aa, Homo sapiens
  CDR3 for alpha chain variable domain of TCR clone 56447 (TRAV1-2, TRAJ16)
CAVNRFADGQKLLF

SEQ ID NO: 112894 - protein, 15 aa, Homo sapiens
  CDR3 for beta chain variable domain of TCR clone 56447 (TRBV7-9, TRBJ1-6)
CASSSPGRGNSPLHF

SEQ ID NO: 112895 - protein, 15 aa, Homo sapiens
  CDR3 for alpha chain variable domain of TCR clone 56448 (TRAV3, TRAJ22)
CAARDRGGSARQLTF

SEQ ID NO: 112896 - protein, 18 aa, Homo sapiens
  CDR3 for beta chain variable domain of TCR clone 56448 (TRBV28, TRBJ2-1)
CASSSTSGRANSYNEQFF

SEQ ID NO: 112897 - protein, 14 aa, Homo sapiens
  CDR3 for alpha chain variable domain of TCR clone 56449 (TRAV20, TRAJ44)
CAVQDTGTASKLTF

SEQ ID NO: 112898 - protein, 13 aa, Homo sapiens
  CDR3 for beta chain variable domain of TCR clone 56449 (TRBV29-1, TRBJ1-3)
CRAGTGRGNTIYF

SEQ ID NO: 112899 - protein, 16 aa, Homo sapiens
  CDR3 for alpha chain variable domain of TCR clone 56450 (TRAV3, TRAJ10)
CAVRDMRAGGGNKLTL

SEQ ID NO: 112900 - protein, 15 aa, Homo sapiens
  CDR3 for beta chain variable domain of TCR clone 56450 (TRBV11-2, TRBJ1-6)
CASTGFGTAVSPLHF

SEQ ID NO: 112901 - protein, 11 aa, Homo sapiens
  CDR3 for alpha chain variable domain of TCR clone 56451 (TRAV12-3, TRAJ49)
CAANTGNQFYF

SEQ ID NO: 112902 - protein, 15 aa, Homo sapiens
  CDR3 for beta chain variable domain of TCR clone 56451 (TRBV7-9, TRBJ2-5)
CASSRRTGGGETQYF

SEQ ID NO: 112903 - protein, 13 aa, Homo sapiens
  CDR3 for alpha chain variable domain of TCR clone 56452 (TRAV26-1, TRAJ36)
CIVLGTGANNLFF

SEQ ID NO: 112904 - protein, 13 aa, Homo sapiens
  CDR3 for beta chain variable domain of TCR clone 56452 (TRBV6-5, TRBJ2-6)
CASSTSGPLRLDF

SEQ ID NO: 112905 - protein, 12 aa, Homo sapiens
  CDR3 for alpha chain variable domain of TCR clone 56453 (TRAV12-3, TRAJ17)
CAMTLTGNKLTF

SEQ ID NO: 112906 - protein, 14 aa, Homo sapiens
  CDR3 for beta chain variable domain of TCR clone 56453 (TRBV6-5, TRBJ1-2)
CASSYDGTGGGYTF

SEQ ID NO: 112907 - protein, 13 aa, Homo sapiens
  CDR3 for alpha chain variable domain of TCR clone 56454 (TRAV8-2, TRAJ5)
CVVSGAGRRALTF

SEQ ID NO: 112908 - protein, 15 aa, Homo sapiens
  CDR3 for beta chain variable domain of TCR clone 56454 (TRBV11-1, TRBJ2-1)
CAIHTGLAGSNEQFF

SEQ ID NO: 112909 - protein, 13 aa, Homo sapiens
  CDR3 for alpha chain variable domain of TCR clone 56455 (TRAV26-1, TRAJ30)
CIVNMNRDDKIIF

SEQ ID NO: 112910 - protein, 16 aa, Homo sapiens
  CDR3 for beta chain variable domain of TCR clone 56455 (TRBV16, TRBJ2-7)
CASSRPAGGSSYVQYF

SEQ ID NO: 112911 - protein, 18 aa, Homo sapiens
  CDR3 for alpha chain variable domain of TCR clone 56456 (TRAV29/DV5, TRAJ26)
CSVLLCCKRKPEGQNFVF

SEQ ID NO: 112912 - protein, 17 aa, Homo sapiens
  CDR3 for beta chain variable domain of TCR clone 56456 (TRBV20-1, TRBJ2-2)
CSASGSGQGGLTGELFF

SEQ ID NO: 112913 - protein, 13 aa, Homo sapiens
  CDR3 for alpha chain variable domain of TCR clone 56457 (TRAV36/DV7, TRAJ33)
CAVDMDSNYQLIW

SEQ ID NO: 112914 - protein, 16 aa, Homo sapiens
  CDR3 for beta chain variable domain of TCR clone 56457 (TRBV15, TRBJ2-3)
CATILSGGRAPDTQYF

SEQ ID NO: 112915 - protein, 14 aa, Homo sapiens
  CDR3 for alpha chain variable domain of TCR clone 56458 (TRAV13-1, TRAJ44)
CAAKATGTASKLTF

SEQ ID NO: 112916 - protein, 15 aa, Homo sapiens
  CDR3 for beta chain variable domain of TCR clone 56458 (TRBV5-1, TRBJ2-7)
CASSLNGGPAREQYF

SEQ ID NO: 112917 - protein, 14 aa, Homo sapiens
  CDR3 for alpha chain variable domain of TCR clone 56459 (TRAV8-6, TRAJ49)
CAVSVRYTGNQFYF

SEQ ID NO: 112918 - protein, 19 aa, Homo sapiens
  CDR3 for beta chain variable domain of TCR clone 56459 (TRBV28, TRBJ2-1)
CASSFSIRGSGRTRYVQFF

SEQ ID NO: 112919 - protein, 11 aa, Homo sapiens
  CDR3 for alpha chain variable domain of TCR clone 56460 (TRAV35, TRAJ34)
CWARNTDKLIF

SEQ ID NO: 112920 - protein, 14 aa, Homo sapiens
  CDR3 for beta chain variable domain of TCR clone 56460 (TRBV5-1, TRBJ2-7)
CDSSRGESLYEQYF

SEQ ID NO: 112921 - protein, 15 aa, Homo sapiens
  CDR3 for alpha chain variable domain of TCR clone 56461 (TRAV12-1, TRAJ44)
CVVFVNTGTASKLTF

SEQ ID NO: 112922 - protein, 14 aa, Homo sapiens
  CDR3 for beta chain variable domain of TCR clone 56461 (TRBV25-1, TRBJ1-1)
CASTHLGGNTEAFF

SEQ ID NO: 112923 - protein, 11 aa, Homo sapiens
  CDR3 for alpha chain variable domain of TCR clone 56462 (TRAV35, TRAJ30)
CACPGDDKIIF

SEQ ID NO: 112924 - protein, 14 aa, Homo sapiens
  CDR3 for beta chain variable domain of TCR clone 56462 (TRBV7-6, TRBJ1-6)
CASSQAGGGSPLHF

SEQ ID NO: 112925 - protein, 13 aa, Homo sapiens
  CDR3 for alpha chain variable domain of TCR clone 56463 (TRAV2, TRAJ40)
CAVVTSGTYKYIF

SEQ ID NO: 112926 - protein, 15 aa, Homo sapiens
  CDR3 for beta chain variable domain of TCR clone 56463 (TRBV11-2, TRBJ1-3)
CASSLSPLVRDTIYF

SEQ ID NO: 112927 - protein, 16 aa, Homo sapiens
  CDR3 for alpha chain variable domain of TCR clone 56464 (TRAV16, TRAJ4)
CALSRMFSGGYKKLIF

SEQ ID NO: 112928 - protein, 16 aa, Homo sapiens
  CDR3 for beta chain variable domain of TCR clone 56464 (TRBV24-1, TRBJ2-3)
CATSDPGTGATDTQYF

SEQ ID NO: 112929 - protein, 12 aa, Homo sapiens
  CDR3 for alpha chain variable domain of TCR clone 56465 (TRAV2, TRAJ9)
CAVGAGGFKTIF

SEQ ID NO: 112930 - protein, 16 aa, Homo sapiens
  CDR3 for beta chain variable domain of TCR clone 56465 (TRBV13, TRBJ2-2)
CASIPRTGEHTGELFF

SEQ ID NO: 112931 - protein, 16 aa, Homo sapiens
  CDR3 for alpha chain variable domain of TCR clone 56466 (TRAV16, TRAJ52)
CALSAAGGTSCGKLTF

SEQ ID NO: 112932 - protein, 12 aa, Homo sapiens
  CDR3 for beta chain variable domain of TCR clone 56466 (TRBV12-4, TRBJ1-3)
CASSFSGNTIYF

SEQ ID NO: 112933 - protein, 11 aa, Homo sapiens
  CDR3 for alpha chain variable domain of TCR clone 56467 (TRAV3, TRAJ21)
CAVGNFNKFYF

SEQ ID NO: 112934 - protein, 12 aa, Homo sapiens
  CDR3 for beta chain variable domain of TCR clone 56467 (TRBV7-9, TRBJ1-5)
CASSPQGQPQHF

SEQ ID NO: 112935 - protein, 14 aa, Homo sapiens
  CDR3 for alpha chain variable domain of TCR clone 56468 (TRAV21, TRAJ35)
CAVMPIGFGNVLHY

SEQ ID NO: 112936 - protein, 12 aa, Homo sapiens
  CDR3 for beta chain variable domain of TCR clone 56468 (TRBV7-9, TRBJ2-7)
CASSIKREEQYF

SEQ ID NO: 112937 - protein, 16 aa, Homo sapiens
  CDR3 for alpha chain variable domain of TCR clone 56469 (TRAV26-1, TRAJ53)
CIVRVAMVGSNYKLTF

SEQ ID NO: 112938 - protein, 12 aa, Homo sapiens
  CDR3 for beta chain variable domain of TCR clone 56469 (TRBV7-9, TRBJ1-5)
CASSPQGQPQHF

SEQ ID NO: 112939 - protein, 11 aa, Homo sapiens
  CDR3 for alpha chain variable domain of TCR clone 56470 (TRAV2, TRAJ13)
CASGGYQKVTF

SEQ ID NO: 112940 - protein, 15 aa, Homo sapiens
  CDR3 for beta chain variable domain of TCR clone 56470 (TRBV7-9, TRBJ2-7)
CASSLALAEAYEQYF

SEQ ID NO: 112941 - protein, 13 aa, Homo sapiens
  CDR3 for alpha chain variable domain of TCR clone 56471 (TRAV27, TRAJ6)
CAGGTRGSCIPTF

SEQ ID NO: 112942 - protein, 13 aa, Homo sapiens
  CDR3 for beta chain variable domain of TCR clone 56471 (TRBV4-1, TRBJ2-2)
CASSQENTGELFF

SEQ ID NO: 112943 - protein, 14 aa, Homo sapiens
  CDR3 for alpha chain variable domain of TCR clone 56472 (TRAV27, TRAJ44)
CAASFTGTASKLTF

SEQ ID NO: 112944 - protein, 16 aa, Homo sapiens
  CDR3 for beta chain variable domain of TCR clone 56472 (TRBV27, TRBJ2-2)
CASSFRGLVRTGELFF

SEQ ID NO: 112945 - protein, 14 aa, Homo sapiens
  CDR3 for alpha chain variable domain of TCR clone 56473 (TRAV6, TRAJ6)
CALPTSGGSYIPTF

SEQ ID NO: 112946 - protein, 13 aa, Homo sapiens
  CDR3 for beta chain variable domain of TCR clone 56473 (TRBV12-4, TRBJ2-2)
CASSITGSGELFF

SEQ ID NO: 112947 - protein, 12 aa, Homo sapiens
  CDR3 for alpha chain variable domain of TCR clone 56474 (TRAV8-3, TRAJ41)
CAVALSGYALNF

SEQ ID NO: 112948 - protein, 17 aa, Homo sapiens
  CDR3 for beta chain variable domain of TCR clone 56474 (TRBV7-3, TRBJ2-2)
CASSLSGASGGTGELFF

SEQ ID NO: 112949 - protein, 11 aa, Homo sapiens
  CDR3 for alpha chain variable domain of TCR clone 56475 (TRAV2, TRAJ33)
CAVESNYQLIW

SEQ ID NO: 112950 - protein, 15 aa, Homo sapiens
  CDR3 for beta chain variable domain of TCR clone 56475 (TRBV11-2, TRBJ2-1)
CASSSPSTRYNEQFF

SEQ ID NO: 112951 - protein, 21 aa, Homo sapiens
  CDR3 for alpha chain variable domain of TCR clone 56476 (TRAV26-1, TRAJ38)
CIADNAGNNHIQNPDPAVYQL

SEQ ID NO: 112952 - protein, 13 aa, Homo sapiens
  CDR3 for beta chain variable domain of TCR clone 56476 (TRBV5-4, TRBJ1-1)
CASSVDLGTEAFF

SEQ ID NO: 112953 - protein, 11 aa, Homo sapiens
  CDR3 for alpha chain variable domain of TCR clone 56477 (TRAV1-2, TRAJ20)
CAVANDYELSF

SEQ ID NO: 112954 - protein, 18 aa, Homo sapiens
  CDR3 for beta chain variable domain of TCR clone 56477 (TRBV20-1, TRBJ2-6)
CSAETAPTHGSGANVLTF

SEQ ID NO: 112955 - protein, 13 aa, Homo sapiens
  CDR3 for alpha chain variable domain of TCR clone 56478 (TRAV1-1, TRAJ23)
CAVVANQGGKLIF

SEQ ID NO: 112956 - protein, 16 aa, Homo sapiens
  CDR3 for beta chain variable domain of TCR clone 56478 (TRBV5-5, TRBJ1-2)
CASSPTWGRGLYGYAF

SEQ ID NO: 112957 - protein, 12 aa, Homo sapiens
  CDR3 for alpha chain variable domain of TCR clone 56479 (TRAV12-3, TRAJ17)
CAMTLTGNKLTF

SEQ ID NO: 112958 - protein, 15 aa, Homo sapiens
  CDR3 for beta chain variable domain of TCR clone 56479 (TRBV6-6, TRBJ2-5)
CASSPGGDLEETQYF

SEQ ID NO: 112959 - protein, 19 aa, Homo sapiens
  CDR3 for alpha chain variable domain of TCR clone 56480 (TRAV26-1, TRAJ52)
CIVRAHRNAGGTSYGKLTF

SEQ ID NO: 112960 - protein, 15 aa, Homo sapiens
  CDR3 for beta chain variable domain of TCR clone 56480 (TRBV29-1, TRBJ2-1)
CSGRDRKNSYNEQFF

SEQ ID NO: 112961 - protein, 13 aa, Homo sapiens
  CDR3 for alpha chain variable domain of TCR clone 56481 (TRAV22, TRAJ48)
CAVERFGNEKLTF

SEQ ID NO: 112962 - protein, 15 aa, Homo sapiens
  CDR3 for beta chain variable domain of TCR clone 56481 (TRBV9, TRBJ1-6)
CASSVAGTGDSPLHF

SEQ ID NO: 112963 - protein, 14 aa, Homo sapiens
  CDR3 for alpha chain variable domain of TCR clone 56482 (TRAV8-3, TRAJ9)
CAVVYNTGGFKTIF

SEQ ID NO: 112964 - protein, 13 aa, Homo sapiens
  CDR3 for beta chain variable domain of TCR clone 56482 (TRBV7-9, TRBJ1-2)
CASSLKQNYGYTF

SEQ ID NO: 112965 - protein, 15 aa, Homo sapiens
  CDR3 for alpha chain variable domain of TCR clone 56483 (TRAV26-1, TRAJ22)
CIVRVSFWFCKATDL

SEQ ID NO: 112966 - protein, 19 aa, Homo sapiens
  CDR3 for beta chain variable domain of TCR clone 56483 (TRBV25-1, TRBJ2-2)
CAILVYRVDRGRKTGELFF

SEQ ID NO: 112967 - protein, 13 aa, Homo sapiens
  CDR3 for alpha chain variable domain of TCR clone 56484 (TRAV21, TRAJ20)
CAVGVFADYKLSF

SEQ ID NO: 112968 - protein, 14 aa, Homo sapiens
  CDR3 for beta chain variable domain of TCR clone 56484 (TRBV2, TRBJ2-7)
CASSLTSGGYEQYF

SEQ ID NO: 112969 - protein, 14 aa, Homo sapiens
  CDR3 for alpha chain variable domain of TCR clone 56485 (TRAV4, TRAJ26)
CLVGPHNYGQNFVF

SEQ ID NO: 112970 - protein, 17 aa, Homo sapiens
  CDR3 for beta chain variable domain of TCR clone 56485 (TRBV24-1, TRBJ2-1)
WATSDVSTSGTYNEQFF

SEQ ID NO: 112971 - protein, 15 aa, Homo sapiens
  CDR3 for alpha chain variable domain of TCR clone 56486 (TRAV8-3, TRAJ27)
CAVGPSKTNAGKSTS

SEQ ID NO: 112972 - protein, 14 aa, Homo sapiens
  CDR3 for beta chain variable domain of TCR clone 56486 (TRBV11-2, TRBJ2-3)
CASSRLARTDTQYF

SEQ ID NO: 112973 - protein, 15 aa, Homo sapiens
  CDR3 for alpha chain variable domain of TCR clone 56487 (TRAV20, TRAJ41)
CAVQANSNSGYALNF

SEQ ID NO: 112974 - protein, 18 aa, Homo sapiens
  CDR3 for beta chain variable domain of TCR clone 56487 (TRBV7-9, TRBJ2-7)
CASSLTTSGSRTWYEQYL

SEQ ID NO: 112975 - protein, 15 aa, Homo sapiens
  CDR3 for alpha chain variable domain of TCR clone 56488 (TRAV27, TRAJ33)
CAGADIVDSNYQLIW

SEQ ID NO: 112976 - protein, 13 aa, Homo sapiens
  CDR3 for beta chain variable domain of TCR clone 56488 (TRBV28, TRBJ1-2)
CASSLQGRGGYTF

SEQ ID NO: 112977 - protein, 13 aa, Homo sapiens
  CDR3 for alpha chain variable domain of TCR clone 56489 (TRAV13-1, TRAJ5)
CAASDTGRRALTF

SEQ ID NO: 112978 - protein, 12 aa, Homo sapiens
  CDR3 for beta chain variable domain of TCR clone 56489 (TRBV28, TRBJ2-3)
CASNLYRDTQYF

SEQ ID NO: 112979 - protein, 14 aa, Homo sapiens
  CDR3 for alpha chain variable domain of TCR clone 56490 (TRAV29/DV5, TRAJ36)
CAARRKTGANNLFF

SEQ ID NO: 112980 - protein, 15 aa, Homo sapiens
  CDR3 for beta chain variable domain of TCR clone 56490 (TRBV6-6, TRBJ2-5)
CASSPGGGLEETQYF

SEQ ID NO: 112981 - protein, 11 aa, Homo sapiens
  CDR3 for alpha chain variable domain of TCR clone 56491 (TRAV3, TRAJ49)
CAPITGNQFYF

SEQ ID NO: 112982 - protein, 16 aa, Homo sapiens
  CDR3 for beta chain variable domain of TCR clone 56491 (TRBV5-1, TRBJ2-1)
CASSLSSLRESNEQFF

SEQ ID NO: 112983 - protein, 11 aa, Homo sapiens
  CDR3 for alpha chain variable domain of TCR clone 56492 (TRAV3, TRAJ21)
CAVGNFNKFYF

SEQ ID NO: 112984 - protein, 16 aa, Homo sapiens
  CDR3 for beta chain variable domain of TCR clone 56492 (TRBV19, TRBJ2-1)
CASSRAGPGSYNEQFF

SEQ ID NO: 112985 - protein, 12 aa, Homo sapiens
  CDR3 for alpha chain variable domain of TCR clone 56493 (TRAV1-1, TRAJ9)
CAVDTGGFKTIF

SEQ ID NO: 112986 - protein, 14 aa, Homo sapiens
  CDR3 for beta chain variable domain of TCR clone 56493 (TRBV7-3, TRBJ2-2)
CASSSGGYTGELFF

SEQ ID NO: 112987 - protein, 12 aa, Homo sapiens
  CDR3 for alpha chain variable domain of TCR clone 56494 (TRAV13-1, TRAJ21)
CAAKEGFNKFYF

SEQ ID NO: 112988 - protein, 13 aa, Homo sapiens
  CDR3 for beta chain variable domain of TCR clone 56494 (TRBV10-2, TRBJ2-7)
CASGASGGYEQYF

SEQ ID NO: 112989 - protein, 17 aa, Homo sapiens
  CDR3 for alpha chain variable domain of TCR clone 56495 (TRAV26-2, TRAJ42)
CILRDVGYGGSQGILIF

SEQ ID NO: 112990 - protein, 16 aa, Homo sapiens
  CDR3 for beta chain variable domain of TCR clone 56495 (TRBV12-4, TRBJ2-7)
CASSLIGGTGTYEQYF

SEQ ID NO: 112991 - protein, 14 aa, Homo sapiens
  CDR3 for alpha chain variable domain of TCR clone 56496 (TRAV4, TRAJ17)
CLVGDMAAGNKLTF

SEQ ID NO: 112992 - protein, 13 aa, Homo sapiens
  CDR3 for beta chain variable domain of TCR clone 56496 (TRBV7-2, TRBJ1-4)
CASSLAGLEKLFF

SEQ ID NO: 112993 - protein, 12 aa, Homo sapiens
  CDR3 for alpha chain variable domain of TCR clone 56497 (TRAV3, TRAJ43)
CAVRDPNNDMRL

SEQ ID NO: 112994 - protein, 15 aa, Homo sapiens
  CDR3 for beta chain variable domain of TCR clone 56497 (TRBV27, TRBJ1-5)
CASSLGTGFDQPQHF

SEQ ID NO: 112995 - protein, 13 aa, Homo sapiens
  CDR3 for alpha chain variable domain of TCR clone 56498 (TRAV12-1, TRAJ6)
CVVFPGGSYIHTF

SEQ ID NO: 112996 - protein, 14 aa, Homo sapiens
  CDR3 for beta chain variable domain of TCR clone 56498 (TRBV20-1, TRBJ1-3)
CSASPTGAGNTIYF

SEQ ID NO: 112997 - protein, 12 aa, Homo sapiens
  CDR3 for alpha chain variable domain of TCR clone 56499 (TRAV3, TRAJ20)
CAVRDGDYKLSF

SEQ ID NO: 112998 - protein, 14 aa, Homo sapiens
  CDR3 for beta chain variable domain of TCR clone 56499 (TRBV12-5, TRBJ2-5)
CASGSRTHQETQYF

SEQ ID NO: 112999 - protein, 14 aa, Homo sapiens
  CDR3 for alpha chain variable domain of TCR clone 56500 (TRAV1-2, TRAJ16)
CAVNRFSDGQKLLF

SEQ ID NO: 113000 - protein, 15 aa, Homo sapiens
  CDR3 for beta chain variable domain of TCR clone 56500 (TRBV9, TRBJ2-1)
CASSLAGSSYNEQLF

SEQ ID NO: 113001 - protein, 16 aa, Homo sapiens
  CDR3 for alpha chain variable domain of TCR clone 56501 (TRAV30, TRAJ24)
CGTEIVDADSWGKFQF

SEQ ID NO: 113002 - protein, 17 aa, Homo sapiens
  CDR3 for beta chain variable domain of TCR clone 56501 (TRBV20-1, TRBJ2-1)
CSASSSGPAGSYNEQFF

SEQ ID NO: 113003 - protein, 16 aa, Homo sapiens
  CDR3 for alpha chain variable domain of TCR clone 56502 (TRAV26-1, TRAJ53)
CIVIVAMGGSNYKLTF

SEQ ID NO: 113004 - protein, 12 aa, Homo sapiens
  CDR3 for beta chain variable domain of TCR clone 56502 (TRBV7-9, TRBJ1-5)
CASSPQGQPQHF

SEQ ID NO: 113005 - protein, 12 aa, Homo sapiens
  CDR3 for alpha chain variable domain of TCR clone 56503 (TRAV2, TRAJ31)
CAVEDNNARLMF

SEQ ID NO: 113006 - protein, 12 aa, Homo sapiens
  CDR3 for beta chain variable domain of TCR clone 56503 (TRBV11-2, TRBJ2-2)
CASSLGGGELFF

SEQ ID NO: 113007 - protein, 14 aa, Homo sapiens
  CDR3 for alpha chain variable domain of TCR clone 56504 (TRAV2, TRAJ9)
CAVEDRSGGFKTIF

SEQ ID NO: 113008 - protein, 14 aa, Homo sapiens
  CDR3 for beta chain variable domain of TCR clone 56504 (TRBV7-2, TRBJ2-7)
RASSPKTSFYEQYF

SEQ ID NO: 113009 - protein, 13 aa, Homo sapiens
  CDR3 for alpha chain variable domain of TCR clone 56505 (TRAV12-3, TRAJ9)
CAMSADGGFKTIF

SEQ ID NO: 113010 - protein, 13 aa, Homo sapiens
  CDR3 for beta chain variable domain of TCR clone 56505 (TRBV7-3, TRBJ2-7)
CASSKRRGGEQYF

SEQ ID NO: 113011 - protein, 16 aa, Homo sapiens
  CDR3 for alpha chain variable domain of TCR clone 56506 (TRAV16, TRAJ52)
CALSAAGGTSYGKLTF

SEQ ID NO: 113012 - protein, 17 aa, Homo sapiens
  CDR3 for beta chain variable domain of TCR clone 56506 (TRBV11-2, TRBJ2-1)
CVSSLYPPGVEYNEQFF

SEQ ID NO: 113013 - protein, 15 aa, Homo sapiens
  CDR3 for alpha chain variable domain of TCR clone 56507 (TRAV3, TRAJ22)
CAVRDRGGSASQLTF

SEQ ID NO: 113014 - protein, 13 aa, Homo sapiens
  CDR3 for beta chain variable domain of TCR clone 56507 (TRBV2, TRBJ1-5)
CATAGPGNQPQHF

SEQ ID NO: 113015 - protein, 13 aa, Homo sapiens
  CDR3 for alpha chain variable domain of TCR clone 56508 (TRAV17, TRAJ34)
CATDLYNTDKLIF

SEQ ID NO: 113016 - protein, 13 aa, Homo sapiens
  CDR3 for beta chain variable domain of TCR clone 56508 (TRBV7-7, TRBJ1-1)
CASSLGANTEAFF

SEQ ID NO: 113017 - protein, 16 aa, Homo sapiens
  CDR3 for alpha chain variable domain of TCR clone 56509 (TRAV12-1, TRAJ53)
CVVTSVAGGSNYKLTF

SEQ ID NO: 113018 - protein, 17 aa, Homo sapiens
  CDR3 for beta chain variable domain of TCR clone 56509 (TRBV7-3, TRBJ2-3)
CASNPRGQGYGTDTQYF

SEQ ID NO: 113019 - protein, 15 aa, Homo sapiens
  CDR3 for alpha chain variable domain of TCR clone 56510 (TRAV26-1, TRAJ22)
CIVRVSFWFCKATDL

SEQ ID NO: 113020 - protein, 13 aa, Homo sapiens
  CDR3 for beta chain variable domain of TCR clone 56510 (TRBV7-9, TRBJ1-2)
CASSLKHNYGYTF

SEQ ID NO: 113021 - protein, 14 aa, Homo sapiens
  CDR3 for alpha chain variable domain of TCR clone 56511 (TRAV1-2, TRAJ16)
CAVNRFSDGQKLLF

SEQ ID NO: 113022 - protein, 13 aa, Homo sapiens
  CDR3 for beta chain variable domain of TCR clone 56511 (TRBV7-3, TRBJ1-1)
CASSQDWGAEAFL

SEQ ID NO: 113023 - protein, 15 aa, Homo sapiens
  CDR3 for alpha chain variable domain of TCR clone 56512 (TRAV17, TRAJ23)
CATDAEDNQGGKLIF

SEQ ID NO: 113024 - protein, 12 aa, Homo sapiens
  CDR3 for beta chain variable domain of TCR clone 56512 (TRBV2, TRBJ2-1)
RAKREGYNEQFL

SEQ ID NO: 113025 - protein, 12 aa, Homo sapiens
  CDR3 for alpha chain variable domain of TCR clone 56513 (TRAV12-2, TRAJ33)
CAVGDSHYQLIW

SEQ ID NO: 113026 - protein, 13 aa, Homo sapiens
  CDR3 for beta chain variable domain of TCR clone 56513 (TRBV6-1, TRBJ1-2)
CASSAREGYGYTF

SEQ ID NO: 113027 - protein, 14 aa, Homo sapiens
  CDR3 for alpha chain variable domain of TCR clone 56514 (TRAV27, TRAJ23)
CAGAFDNQGGKLIF

SEQ ID NO: 113028 - protein, 15 aa, Homo sapiens
  CDR3 for beta chain variable domain of TCR clone 56514 (TRBV7-3, TRBJ2-7)
CASSLTGQGKYEQCF

SEQ ID NO: 113029 - protein, 14 aa, Homo sapiens
  CDR3 for alpha chain variable domain of TCR clone 56515 (TRAV3, TRAJ16)
CCEGLKSDGQKLLF

SEQ ID NO: 113030 - protein, 15 aa, Homo sapiens
  CDR3 for beta chain variable domain of TCR clone 56515 (TRBV28, TRBJ2-7)
CASSPGGRGFYEQYF

SEQ ID NO: 113031 - protein, 11 aa, Homo sapiens
  CDR3 for alpha chain variable domain of TCR clone 56516 (TRAV12-1, TRAJ33)
CVVNMNYQLIW

SEQ ID NO: 113032 - protein, 16 aa, Homo sapiens
  CDR3 for beta chain variable domain of TCR clone 56516 (TRBV20-1, TRBJ1-2)
CSASMGQGVANYGYTF

SEQ ID NO: 113033 - protein, 12 aa, Homo sapiens
  CDR3 for alpha chain variable domain of TCR clone 56517 (TRAV12-1, TRAJ40)
CVFYSGTYKYIF

SEQ ID NO: 113034 - protein, 18 aa, Homo sapiens
  CDR3 for beta chain variable domain of TCR clone 56517 (TRBV12-4, TRBJ2-2)
CASSLVAGTRGRTGELFF

SEQ ID NO: 113035 - protein, 15 aa, Homo sapiens
  CDR3 for alpha chain variable domain of TCR clone 56518 (TRAV12-3, TRAJ6)
CAMSATTGGSYIPTF

SEQ ID NO: 113036 - protein, 16 aa, Homo sapiens
  CDR3 for beta chain variable domain of TCR clone 56518 (TRBV20-1, TRBJ1-2)
CSASMGQGGANYGYTF

SEQ ID NO: 113037 - protein, 14 aa, Homo sapiens
  CDR3 for alpha chain variable domain of TCR clone 56519 (TRAV8-4, TRAJ54)
CAVSEVLGAQKLVF

SEQ ID NO: 113038 - protein, 14 aa, Homo sapiens
  CDR3 for beta chain variable domain of TCR clone 56519 (TRBV4-3, TRBJ1-4)
CASSPLQRNEKLFF

SEQ ID NO: 113039 - protein, 13 aa, Homo sapiens
  CDR3 for alpha chain variable domain of TCR clone 56520 (TRAV8-3, TRAJ48)
CCGCNFGNEKLTF

SEQ ID NO: 113040 - protein, 12 aa, Homo sapiens
  CDR3 for beta chain variable domain of TCR clone 56520 (TRBV7-2, TRBJ2-5)
CASSQYQETQYV

SEQ ID NO: 113041 - protein, 13 aa, Homo sapiens
  CDR3 for alpha chain variable domain of TCR clone 56521 (TRAV21, TRAJ57)
CAVTQGGSEKLVF

SEQ ID NO: 113042 - protein, 11 aa, Homo sapiens
  CDR3 for beta chain variable domain of TCR clone 56521 (TRBV19, TRBJ1-1)
CASSIGSEAFF

SEQ ID NO: 113043 - protein, 14 aa, Homo sapiens
  CDR3 for alpha chain variable domain of TCR clone 56522 (TRAV20, TRAJ29)
CAVQAWVGNTPLVF

SEQ ID NO: 113044 - protein, 15 aa, Homo sapiens
  CDR3 for beta chain variable domain of TCR clone 56522 (TRBV29-1, TRBJ2-7)
CSVEFCDRGSYEQYF

SEQ ID NO: 113045 - protein, 14 aa, Homo sapiens
  CDR3 for alpha chain variable domain of TCR clone 56523 (TRAV12-1, TRAJ12)
CVVTRMDSSYKLIF

SEQ ID NO: 113046 - protein, 18 aa, Homo sapiens
  CDR3 for beta chain variable domain of TCR clone 56523 (TRBV4-1, TRBJ2-3)
CASSHQLAGGRSTDTQYF

SEQ ID NO: 113047 - protein, 16 aa, Homo sapiens
  CDR3 for alpha chain variable domain of TCR clone 56524 (TRAV12-1, TRAJ22)
CVVNTISSGSARQLTF

SEQ ID NO: 113048 - protein, 13 aa, Homo sapiens
  CDR3 for beta chain variable domain of TCR clone 56524 (TRBV19, TRBJ2-1)
CVSNGGVFSEQFF

SEQ ID NO: 113049 - protein, 11 aa, Homo sapiens
  CDR3 for alpha chain variable domain of TCR clone 56525 (TRAV3, TRAJ21)
CALGNFNKFHF

SEQ ID NO: 113050 - protein, 16 aa, Homo sapiens
  CDR3 for beta chain variable domain of TCR clone 56525 (TRBV19, TRBJ2-1)
CASSKAGPSSYNEQFF

SEQ ID NO: 113051 - protein, 14 aa, Homo sapiens
  CDR3 for alpha chain variable domain of TCR clone 56526 (TRAV26-1, TRAJ48)
CIVRVGVGNEKLTF

SEQ ID NO: 113052 - protein, 13 aa, Homo sapiens
  CDR3 for beta chain variable domain of TCR clone 56526 (TRBV11-3, TRBJ2-3)
CASSHDTKDTQYF

SEQ ID NO: 113053 - protein, 13 aa, Homo sapiens
  CDR3 for alpha chain variable domain of TCR clone 56527 (TRAV3, TRAJ27)
CAVRPLGAGKSTF

SEQ ID NO: 113054 - protein, 15 aa, Homo sapiens
  CDR3 for beta chain variable domain of TCR clone 56527 (TRBV7-2, TRBJ2-7)
CASSLSSGRTYEQYF

SEQ ID NO: 113055 - protein, 14 aa, Homo sapiens
  CDR3 for alpha chain variable domain of TCR clone 56528 (TRAV26-1, TRAJ38)
CIADNAGNNRKLTW

SEQ ID NO: 113056 - protein, 20 aa, Homo sapiens
  CDR3 for beta chain variable domain of TCR clone 56528 (TRBV7-8, TRBJ2-2)
CASSHLFPGPTTHITGELFF

SEQ ID NO: 113057 - protein, 16 aa, Homo sapiens
  CDR3 for alpha chain variable domain of TCR clone 56529 (TRAV30, TRAJ24)
CGAEIVDADSWGKFQF

SEQ ID NO: 113058 - protein, 14 aa, Homo sapiens
  CDR3 for beta chain variable domain of TCR clone 56529 (TRBV7-9, TRBJ2-4)
CASSLAMGGNIQYF

SEQ ID NO: 113059 - protein, 11 aa, Homo sapiens
  CDR3 for alpha chain variable domain of TCR clone 56530 (TRAV2, TRAJ13)
CASGGYQKVTF

SEQ ID NO: 113060 - protein, 17 aa, Homo sapiens
  CDR3 for beta chain variable domain of TCR clone 56530 (TRBV7-3, TRBJ2-3)
CASSLMKRMRGADTRYF

SEQ ID NO: 113061 - protein, 14 aa, Homo sapiens
  CDR3 for alpha chain variable domain of TCR clone 56531 (TRAV12-2, TRAJ41)
CAANRANSGYALNF

SEQ ID NO: 113062 - protein, 13 aa, Homo sapiens
  CDR3 for beta chain variable domain of TCR clone 56531 (TRBV7-9, TRBJ1-2)
CASSLKQNYGYTF

SEQ ID NO: 113063 - protein, 13 aa, Homo sapiens
  CDR3 for alpha chain variable domain of TCR clone 56532 (TRAV41, TRAJ40)
CAVIPSGTYKYIF

SEQ ID NO: 113064 - protein, 13 aa, Homo sapiens
  CDR3 for beta chain variable domain of TCR clone 56532 (TRBV6-4, TRBJ2-3)
CASSVSWADTQYF

SEQ ID NO: 113065 - protein, 14 aa, Homo sapiens
  CDR3 for alpha chain variable domain of TCR clone 56533 (TRAV29/DV5, TRAJ49)
CAASLSNTGNKFYF

SEQ ID NO: 113066 - protein, 15 aa, Homo sapiens
  CDR3 for beta chain variable domain of TCR clone 56533 (TRBV20-1, TRBJ2-1)
CSARGIGGTYNEQFF

SEQ ID NO: 113067 - protein, 12 aa, Homo sapiens
  CDR3 for alpha chain variable domain of TCR clone 56534 (TRAV12-1, TRAJ31)
CVSWNNNARLMF

SEQ ID NO: 113068 - protein, 15 aa, Homo sapiens
  CDR3 for beta chain variable domain of TCR clone 56534 (TRBV7-2, TRBJ1-5)
CASSLDRGQDQHQHF

SEQ ID NO: 113069 - protein, 14 aa, Homo sapiens
  CDR3 for alpha chain variable domain of TCR clone 56535 (TRAV1-2, TRAJ8)
CAVREDTGFQKLVF

SEQ ID NO: 113070 - protein, 13 aa, Homo sapiens
  CDR3 for beta chain variable domain of TCR clone 56535 (TRBV20-1, TRBJ1-1)
CSARGGGNTDAFF

SEQ ID NO: 113071 - protein, 15 aa, Homo sapiens
  CDR3 for alpha chain variable domain of TCR clone 56536 (TRAV12-2, TRAJ43)
CAFDMRFGAGTRLTV

SEQ ID NO: 113072 - protein, 18 aa, Homo sapiens
  CDR3 for beta chain variable domain of TCR clone 56536 (TRBV20-1, TRBJ2-3)
CSASGLAGGPGTTETQYF

SEQ ID NO: 113073 - protein, 14 aa, Homo sapiens
  CDR3 for alpha chain variable domain of TCR clone 56537 (TRAV29/DV5, TRAJ49)
CAASLSNTGNQFYF

SEQ ID NO: 113074 - protein, 15 aa, Homo sapiens
  CDR3 for beta chain variable domain of TCR clone 56537 (TRBV20-1, TRBJ2-1)
GSARGIGGTYNEQFF

SEQ ID NO: 113075 - protein, 14 aa, Homo sapiens
  CDR3 for alpha chain variable domain of TCR clone 56538 (TRAV12-3, TRAJ10)
SHLPLTGGGNKLTF

SEQ ID NO: 113076 - protein, 13 aa, Homo sapiens
  CDR3 for beta chain variable domain of TCR clone 56538 (TRBV7-3, TRBJ2-1)
CASSLDSYNEQFF

SEQ ID NO: 113077 - protein, 14 aa, Homo sapiens
  CDR3 for alpha chain variable domain of TCR clone 56539 (TRAV26-1, TRAJ39)
CIVRGSRAGNMLTF

SEQ ID NO: 113078 - protein, 15 aa, Homo sapiens
  CDR3 for beta chain variable domain of TCR clone 56539 (TRBV7-9, TRBJ1-5)
CASSQGHQPNRPQHF

SEQ ID NO: 113079 - protein, 14 aa, Homo sapiens
  CDR3 for alpha chain variable domain of TCR clone 56540 (TRAV1-2, TRAJ16)
CAVNRFSDGQKLLF

SEQ ID NO: 113080 - protein, 16 aa, Homo sapiens
  CDR3 for beta chain variable domain of TCR clone 56540 (TRBV5-1, TRBJ2-3)
CASSLALAVVSDTQYF

SEQ ID NO: 113081 - protein, 15 aa, Homo sapiens
  CDR3 for alpha chain variable domain of TCR clone 56541 (TRAV35, TRAJ58)
CAVRRQETSGSRLTF

SEQ ID NO: 113082 - protein, 11 aa, Homo sapiens
  CDR3 for beta chain variable domain of TCR clone 56541 (TRBV11-2, TRBJ1-1)
CASSINTEAFF

SEQ ID NO: 113083 - protein, 10 aa, Homo sapiens
  CDR3 for alpha chain variable domain of TCR clone 56542 (TRAV30, TRAJ48)
CGIGNEKLTF

SEQ ID NO: 113084 - protein, 13 aa, Homo sapiens
  CDR3 for beta chain variable domain of TCR clone 56542 (TRBV7-9, TRBJ1-2)
CASSLKQNYGYTF

SEQ ID NO: 113085 - protein, 11 aa, Homo sapiens
  CDR3 for alpha chain variable domain of TCR clone 56543 (TRAV17, TRAJ43)
CATHRSNDMRF

SEQ ID NO: 113086 - protein, 15 aa, Homo sapiens
  CDR3 for beta chain variable domain of TCR clone 56543 (TRBV11-2, TRBJ2-1)
CASSLGTSGLNEQFF

SEQ ID NO: 113087 - protein, 11 aa, Homo sapiens
  CDR3 for alpha chain variable domain of TCR clone 56544 (TRAV35, TRAJ30)
CAGPGDDKIIF

SEQ ID NO: 113088 - protein, 17 aa, Homo sapiens
  CDR3 for beta chain variable domain of TCR clone 56544 (TRBV13, TRBJ2-3)
CASSLSRVAGGRNTQYF

SEQ ID NO: 113089 - protein, 13 aa, Homo sapiens
  CDR3 for alpha chain variable domain of TCR clone 56545 (TRAV36/DV7, TRAJ53)
CALSGGSNYKLTF

SEQ ID NO: 113090 - protein, 13 aa, Homo sapiens
  CDR3 for beta chain variable domain of TCR clone 56545 (TRBV28, TRBJ2-7)
CASSLPSRYEQYL

SEQ ID NO: 113091 - protein, 14 aa, Homo sapiens
  CDR3 for alpha chain variable domain of TCR clone 56546 (TRAV8-3, TRAJ9)
CAVVYNTGGFKTIF

SEQ ID NO: 113092 - protein, 14 aa, Homo sapiens
  CDR3 for beta chain variable domain of TCR clone 56546 (TRBV7-3, TRBJ2-2)
CASSSGGYTGEMFF

SEQ ID NO: 113093 - protein, 12 aa, Homo sapiens
  CDR3 for alpha chain variable domain of TCR clone 56547 (TRAV17, TRAJ49)
CATVTTGNQFYF

SEQ ID NO: 113094 - protein, 18 aa, Homo sapiens
  CDR3 for beta chain variable domain of TCR clone 56547 (TRBV11-2, TRBJ2-6)
CASSLNPFLGTGANVQTF

SEQ ID NO: 113095 - protein, 15 aa, Homo sapiens
  CDR3 for alpha chain variable domain of TCR clone 56548 (TRAV8-3, TRAJ45)
CASSYSGGGADGLTF

SEQ ID NO: 113096 - protein, 16 aa, Homo sapiens
  CDR3 for beta chain variable domain of TCR clone 56548 (TRBV27, TRBJ2-2)
CASSFRGLARTGELFF

SEQ ID NO: 113097 - protein, 13 aa, Homo sapiens
  CDR3 for alpha chain variable domain of TCR clone 56549 (TRAV20, TRAJ20)
CAVRWVRDYKLSF

SEQ ID NO: 113098 - protein, 14 aa, Homo sapiens
  CDR3 for beta chain variable domain of TCR clone 56549 (TRBV19, TRBJ2-2)
CASTVTANTGELFS

SEQ ID NO: 113099 - protein, 15 aa, Homo sapiens
  CDR3 for alpha chain variable domain of TCR clone 56550 (TRAV21, TRAJ53)
CATLNSGGSNYKMTF

SEQ ID NO: 113100 - protein, 13 aa, Homo sapiens
  CDR3 for beta chain variable domain of TCR clone 56550 (TRBV4-1, TRBJ2-2)
CASSQENTGELFF

SEQ ID NO: 113101 - protein, 16 aa, Homo sapiens
  CDR3 for alpha chain variable domain of TCR clone 56551 (TRAV30, TRAJ24)
CGTEIVDADSWGKFQF

SEQ ID NO: 113102 - protein, 17 aa, Homo sapiens
  CDR3 for beta chain variable domain of TCR clone 56551 (TRBV15, TRBJ1-4)
CATSRYGTGDPNEKLFF

SEQ ID NO: 113103 - protein, 14 aa, Homo sapiens
  CDR3 for alpha chain variable domain of TCR clone 56552 (TRAV12-3, TRAJ58)
YAMSTETSGSRLTF

SEQ ID NO: 113104 - protein, 15 aa, Homo sapiens
  CDR3 for beta chain variable domain of TCR clone 56552 (TRBV4-1, TRBJ1-4)
CASSDTGGTNEKLFF

SEQ ID NO: 113105 - protein, 14 aa, Homo sapiens
  CDR3 for alpha chain variable domain of TCR clone 56553 (TRAV1-2, TRAJ16)
CAVNRFSDGQKLLF

SEQ ID NO: 113106 - protein, 13 aa, Homo sapiens
  CDR3 for beta chain variable domain of TCR clone 56553 (TRBV12-4, TRBJ1-1)
CASSRPGNTEAFF

SEQ ID NO: 113107 - protein, 14 aa, Homo sapiens
  CDR3 for alpha chain variable domain of TCR clone 56554 (TRAV17, TRAJ34)
CATDSLECTDKLIF

SEQ ID NO: 113108 - protein, 13 aa, Homo sapiens
  CDR3 for beta chain variable domain of TCR clone 56554 (TRBV11-2, TRBJ2-7)
CASSGTRPYEQYF

SEQ ID NO: 113109 - protein, 15 aa, Homo sapiens
  CDR3 for alpha chain variable domain of TCR clone 56555 (TRAV2, TRAJ9)
CAVEDRGTGGFKTIF

SEQ ID NO: 113110 - protein, 17 aa, Homo sapiens
  CDR3 for beta chain variable domain of TCR clone 56555 (TRBV11-2, TRBJ2-1)
CASSLYPPGVEYNEQFF

SEQ ID NO: 113111 - protein, 10 aa, Homo sapiens
  CDR3 for alpha chain variable domain of TCR clone 56556 (TRAV30, TRAJ48)
CSIGNEKLTF

SEQ ID NO: 113112 - protein, 14 aa, Homo sapiens
  CDR3 for beta chain variable domain of TCR clone 56556 (TRBV7-6, TRBJ2-3)
CASSVAGGTDTQYF

SEQ ID NO: 113113 - protein, 15 aa, Homo sapiens
  CDR3 for alpha chain variable domain of TCR clone 56557 (TRAV26-1, TRAJ15)
CIVRAANQAGAALIF

SEQ ID NO: 113114 - protein, 15 aa, Homo sapiens
  CDR3 for beta chain variable domain of TCR clone 56557 (TRBV20-1, TRBJ1-1)
CSARSAATSNTEAFF

SEQ ID NO: 113115 - protein, 14 aa, Homo sapiens
  CDR3 for alpha chain variable domain of TCR clone 56558 (TRAV12-2, TRAJ3)
CAVSLHSSASKIIF

SEQ ID NO: 113116 - protein, 14 aa, Homo sapiens
  CDR3 for beta chain variable domain of TCR clone 56558 (TRBV27, TRBJ2-1)
CAGSIAETYNEQFF

SEQ ID NO: 113117 - protein, 11 aa, Homo sapiens
  CDR3 for alpha chain variable domain of TCR clone 56559 (TRAV1-2, TRAJ40)
CAVPGTYKYIF

SEQ ID NO: 113118 - protein, 15 aa, Homo sapiens
  CDR3 for beta chain variable domain of TCR clone 56559 (TRBV5-7, TRBJ1-5)
CASSYGKLWGQPQHF

SEQ ID NO: 113119 - protein, 12 aa, Homo sapiens
  CDR3 for alpha chain variable domain of TCR clone 56560 (TRAV13-1, TRAJ45)
CAATRGADGLTF

SEQ ID NO: 113120 - protein, 17 aa, Homo sapiens
  CDR3 for beta chain variable domain of TCR clone 56560 (TRBV13, TRBJ2-3)
CASSLSRVAGGRNTQYF

SEQ ID NO: 113121 - protein, 13 aa, Homo sapiens
  CDR3 for alpha chain variable domain of TCR clone 56561 (TRAV1-1, TRAJ9)
CAARNTGGFKTIF

SEQ ID NO: 113122 - protein, 14 aa, Homo sapiens
  CDR3 for beta chain variable domain of TCR clone 56561 (TRBV20-1, TRBJ2-1)
CSAQIGGSANEQFF

SEQ ID NO: 113123 - protein, 12 aa, Homo sapiens
  CDR3 for alpha chain variable domain of TCR clone 56562 (TRAV13-2, TRAJ23)
CAERHRGGKLIF

SEQ ID NO: 113124 - protein, 15 aa, Homo sapiens
  CDR3 for beta chain variable domain of TCR clone 56562 (TRBV9, TRBJ1-6)
CAGSVAGTGDSPLHF

SEQ ID NO: 113125 - protein, 13 aa, Homo sapiens
  CDR3 for alpha chain variable domain of TCR clone 56563 (TRAV2, TRAJ40)
CAVVTSGTYKHIF

SEQ ID NO: 113126 - protein, 15 aa, Homo sapiens
  CDR3 for beta chain variable domain of TCR clone 56563 (TRBV18, TRBJ2-1)
CASSPPSASYNEQFF

SEQ ID NO: 113127 - protein, 15 aa, Homo sapiens
  CDR3 for alpha chain variable domain of TCR clone 56564 (TRAV23/DV6, TRAJ13)
CAAWPGGGGYQRVTF

SEQ ID NO: 113128 - protein, 17 aa, Homo sapiens
  CDR3 for beta chain variable domain of TCR clone 56564 (TRBV19, TRBJ2-7)
CASSISFYDSYPYEQYF

SEQ ID NO: 113129 - protein, 13 aa, Homo sapiens
  CDR3 for alpha chain variable domain of TCR clone 56565 (TRAV21, TRAJ27)
CAARPGNAGKSTF

SEQ ID NO: 113130 - protein, 15 aa, Homo sapiens
  CDR3 for beta chain variable domain of TCR clone 56565 (TRBV6-1, TRBJ2-3)
CASSERGGITDTQYF

SEQ ID NO: 113131 - protein, 15 aa, Homo sapiens
  CDR3 for alpha chain variable domain of TCR clone 56566 (TRAV21, TRAJ37)
CAVRPTLSNTGRLIF

SEQ ID NO: 113132 - protein, 16 aa, Homo sapiens
  CDR3 for beta chain variable domain of TCR clone 56566 (TRBV24-1, TRBJ2-3)
CATSDRRQDLTDTQYF

SEQ ID NO: 113133 - protein, 12 aa, Homo sapiens
  CDR3 for alpha chain variable domain of TCR clone 56567 (TRAV21, TRAJ37)
CAVRGNTGKLIF

SEQ ID NO: 113134 - protein, 14 aa, Homo sapiens
  CDR3 for beta chain variable domain of TCR clone 56567 (TRBV19, TRBJ2-1)
CASEVTGASNEQFF

SEQ ID NO: 113135 - protein, 14 aa, Homo sapiens
  CDR3 for alpha chain variable domain of TCR clone 56568 (TRAV3, TRAJ21)
CAVESQANFNKFYF

SEQ ID NO: 113136 - protein, 12 aa, Homo sapiens
  CDR3 for beta chain variable domain of TCR clone 56568 (TRBV6-3, TRBJ2-7)
CASSLTPYEQYL

SEQ ID NO: 113137 - protein, 16 aa, Homo sapiens
  CDR3 for alpha chain variable domain of TCR clone 56569 (TRAV26-1, TRAJ53)
CIVRVAMGSSNYKLTF

SEQ ID NO: 113138 - protein, 12 aa, Homo sapiens
  CDR3 for beta chain variable domain of TCR clone 56569 (TRBV7-9, TRBJ1-5)
CASSPQGQPQHF

SEQ ID NO: 113139 - protein, 15 aa, Homo sapiens
  CDR3 for alpha chain variable domain of TCR clone 56570 (TRAV12-3, TRAJ27)
YAMRAYNTNAGKSTF

SEQ ID NO: 113140 - protein, 13 aa, Homo sapiens
  CDR3 for beta chain variable domain of TCR clone 56570 (TRBV11-2, TRBJ2-5)
CASSRGPSETQYF

SEQ ID NO: 113141 - protein, 14 aa, Homo sapiens
  CDR3 for alpha chain variable domain of TCR clone 56571 (TRAV1-1, TRAJ27)
CAVIYNTNAGKSTF

SEQ ID NO: 113142 - protein, 15 aa, Homo sapiens
  CDR3 for beta chain variable domain of TCR clone 56571 (TRBV7-2, TRBJ2-1)
CASSSGLAVGNEQFF

SEQ ID NO: 113143 - protein, 14 aa, Homo sapiens
  CDR3 for alpha chain variable domain of TCR clone 56572 (TRAV17, TRAJ53)
CGVGSGGSNYKLTF

SEQ ID NO: 113144 - protein, 14 aa, Homo sapiens
  CDR3 for beta chain variable domain of TCR clone 56572 (TRBV2, TRBJ1-5)
CASSENRGGQPQHF

SEQ ID NO: 113145 - protein, 18 aa, Homo sapiens
  CDR3 for alpha chain variable domain of TCR clone 56573 (TRAV13-1, TRAJ52)
CAASKRSAGGTSYGKLTF

SEQ ID NO: 113146 - protein, 12 aa, Homo sapiens
  CDR3 for beta chain variable domain of TCR clone 56573 (TRBV7-8, TRBJ2-7)
CASSLGDREQYF

SEQ ID NO: 113147 - protein, 14 aa, Homo sapiens
  CDR3 for alpha chain variable domain of TCR clone 56574 (TRAV17, TRAJ12)
CATDEKDSSYKLIF

SEQ ID NO: 113148 - protein, 15 aa, Homo sapiens
  CDR3 for beta chain variable domain of TCR clone 56574 (TRBV6-1, TRBJ2-1)
CASSELRGQYNEQFF

SEQ ID NO: 113149 - protein, 12 aa, Homo sapiens
  CDR3 for alpha chain variable domain of TCR clone 56575 (TRAV13-1, TRAJ8)
CAALTGFQKLVF

SEQ ID NO: 113150 - protein, 13 aa, Homo sapiens
  CDR3 for beta chain variable domain of TCR clone 56575 (TRBV6-4, TRBJ1-5)
CASSADLNQPQHF

SEQ ID NO: 113151 - protein, 14 aa, Homo sapiens
  CDR3 for alpha chain variable domain of TCR clone 56576 (TRAV8-4, TRAJ5)
CAVSTDTGRRALTF

SEQ ID NO: 113152 - protein, 15 aa, Homo sapiens
  CDR3 for beta chain variable domain of TCR clone 56576 (TRBV19, TRBJ1-2)
CASSVGQVLNYGYTF

SEQ ID NO: 113153 - protein, 14 aa, Homo sapiens
  CDR3 for alpha chain variable domain of TCR clone 56577 (TRAV1-2, TRAJ8)
CAVREDTGFQKLVF

SEQ ID NO: 113154 - protein, 14 aa, Homo sapiens
  CDR3 for beta chain variable domain of TCR clone 56577 (TRBV13, TRBJ2-5)
CASSLGPRGETQYF

SEQ ID NO: 113155 - protein, 14 aa, Homo sapiens
  CDR3 for alpha chain variable domain of TCR clone 56578 (TRAV29/DV5, TRAJ40)
CAAAVASGTYKYIF

SEQ ID NO: 113156 - protein, 15 aa, Homo sapiens
  CDR3 for beta chain variable domain of TCR clone 56578 (TRBV12-4, TRBJ2-5)
CASSPPTGLQETQYF

SEQ ID NO: 113157 - protein, 12 aa, Homo sapiens
  CDR3 for alpha chain variable domain of TCR clone 56579 (TRAV12-3, TRAJ41)
CAMSYSGYALNF

SEQ ID NO: 113158 - protein, 13 aa, Homo sapiens
  CDR3 for beta chain variable domain of TCR clone 56579 (TRBV7-3, TRBJ2-1)
CASSLDSYNELFF

SEQ ID NO: 113159 - protein, 13 aa, Homo sapiens
  CDR3 for alpha chain variable domain of TCR clone 56580 (TRAV20, TRAJ31)
CAVQAIGGARLMF

SEQ ID NO: 113160 - protein, 14 aa, Homo sapiens
  CDR3 for beta chain variable domain of TCR clone 56580 (TRBV7-6, TRBJ2-3)
CASSLGTVTDTQYF

SEQ ID NO: 113161 - protein, 12 aa, Homo sapiens
  CDR3 for alpha chain variable domain of TCR clone 56581 (TRAV26-2, TRAJ21)
CILKGNFNKFYF

SEQ ID NO: 113162 - protein, 14 aa, Homo sapiens
  CDR3 for beta chain variable domain of TCR clone 56581 (TRBV7-9, TRBJ1-1)
CASTPLQYYTEAFF

SEQ ID NO: 113163 - protein, 13 aa, Homo sapiens
  CDR3 for alpha chain variable domain of TCR clone 56582 (TRAV27, TRAJ49)
CAPRPYTGNQFYF

SEQ ID NO: 113164 - protein, 16 aa, Homo sapiens
  CDR3 for beta chain variable domain of TCR clone 56582 (TRBV4-1, TRBJ1-2)
CARSQDAGQVLYGYTF

SEQ ID NO: 113165 - protein, 11 aa, Homo sapiens
  CDR3 for alpha chain variable domain of TCR clone 56583 (TRAV13-2, TRAJ23)
CAESPRGKLIF

SEQ ID NO: 113166 - protein, 12 aa, Homo sapiens
  CDR3 for beta chain variable domain of TCR clone 56583 (TRBV11-2, TRBJ2-2)
CASSLGCGELFF

SEQ ID NO: 113167 - protein, 14 aa, Homo sapiens
  CDR3 for alpha chain variable domain of TCR clone 56584 (TRAV12-3, TRAJ10)
SHLPLTGGGNKLTF

SEQ ID NO: 113168 - protein, 14 aa, Homo sapiens
  CDR3 for beta chain variable domain of TCR clone 56584 (TRBV19, TRBJ2-7)
CASNFRDTFTGMYF

SEQ ID NO: 113169 - protein, 15 aa, Homo sapiens
  CDR3 for alpha chain variable domain of TCR clone 56585 (TRAV8-1, TRAJ6)
CAVNTPPGGRYIPTF

SEQ ID NO: 113170 - protein, 14 aa, Homo sapiens
  CDR3 for beta chain variable domain of TCR clone 56585 (TRBV12-4, TRBJ2-1)
CASSLGQGASEQFF

SEQ ID NO: 113171 - protein, 16 aa, Homo sapiens
  CDR3 for alpha chain variable domain of TCR clone 56586 (TRAV26-1, TRAJ48)
CIVREPPNFGNEKLTF

SEQ ID NO: 113172 - protein, 12 aa, Homo sapiens
  CDR3 for beta chain variable domain of TCR clone 56586 (TRBV19, TRBJ2-1)
CASRRQGAEQFF

SEQ ID NO: 113173 - protein, 14 aa, Homo sapiens
  CDR3 for alpha chain variable domain of TCR clone 56587 (TRAV1-2, TRAJ16)
CAVNRFSDGQKLLF

SEQ ID NO: 113174 - protein, 13 aa, Homo sapiens
  CDR3 for beta chain variable domain of TCR clone 56587 (TRBV7-9, TRBJ1-2)
CASSLKQNYDYTF

SEQ ID NO: 113175 - protein, 16 aa, Homo sapiens
  CDR3 for alpha chain variable domain of TCR clone 56588 (TRAV12-1, TRAJ12)
CVVNTLLMDSSYKLIF

SEQ ID NO: 113176 - protein, 13 aa, Homo sapiens
  CDR3 for beta chain variable domain of TCR clone 56588 (TRBV11-2, TRBJ2-1)
CAGSSEAYNEQFF

SEQ ID NO: 113177 - protein, 16 aa, Homo sapiens
  CDR3 for alpha chain variable domain of TCR clone 56589 (TRAV21, TRAJ37)
CAVRTARSSNTGKLIF

SEQ ID NO: 113178 - protein, 13 aa, Homo sapiens
  CDR3 for beta chain variable domain of TCR clone 56589 (TRBV7-9, TRBJ2-5)
CASLPSGRETQYF

SEQ ID NO: 113179 - protein, 15 aa, Homo sapiens
  CDR3 for alpha chain variable domain of TCR clone 56590 (TRAV8-3, TRAJ40)
CAAPSLGSGTYKYIF

SEQ ID NO: 113180 - protein, 12 aa, Homo sapiens
  CDR3 for beta chain variable domain of TCR clone 56590 (TRBV11-2, TRBJ2-2)
CASSLGCGELFF

SEQ ID NO: 113181 - protein, 13 aa, Homo sapiens
  CDR3 for alpha chain variable domain of TCR clone 56591 (TRAV21, TRAJ57)
CAVTQGGSEKLVF

SEQ ID NO: 113182 - protein, 16 aa, Homo sapiens
  CDR3 for beta chain variable domain of TCR clone 56591 (TRBV5-1, TRBJ2-7)
CASRPSFSNNPYEQYF

SEQ ID NO: 113183 - protein, 11 aa, Homo sapiens
  CDR3 for alpha chain variable domain of TCR clone 56592 (TRAV2, TRAJ33)
CAVDSNYQLIW

SEQ ID NO: 113184 - protein, 14 aa, Homo sapiens
  CDR3 for beta chain variable domain of TCR clone 56592 (TRBV11-2, TRBJ2-3)
CASIRLARTDTQYF

SEQ ID NO: 113185 - protein, 16 aa, Homo sapiens
  CDR3 for alpha chain variable domain of TCR clone 56593 (TRAV4, TRAJ5)
CLVGPDHGHGQESTYF

SEQ ID NO: 113186 - protein, 15 aa, Homo sapiens
  CDR3 for beta chain variable domain of TCR clone 56593 (TRBV27, TRBJ2-5)
CASSLIPSGGETQYL

SEQ ID NO: 113187 - protein, 17 aa, Homo sapiens
  CDR3 for alpha chain variable domain of TCR clone 56594 (TRAV4, TRAJ18)
CLVGERSVGSTLGRLYF

SEQ ID NO: 113188 - protein, 14 aa, Homo sapiens
  CDR3 for beta chain variable domain of TCR clone 56594 (TRBV6-5, TRBJ1-2)
CASSYGGTGGGYTF

SEQ ID NO: 113189 - protein, 17 aa, Homo sapiens
  CDR3 for alpha chain variable domain of TCR clone 56595 (TRAV26-1, TRAJ58)
CIVRVGAEETSGSRLTF

SEQ ID NO: 113190 - protein, 13 aa, Homo sapiens
  CDR3 for beta chain variable domain of TCR clone 56595 (TRBV12-5, TRBJ1-2)
CASGVRPGNGYTF

SEQ ID NO: 113191 - protein, 16 aa, Homo sapiens
  CDR3 for alpha chain variable domain of TCR clone 56596 (TRAV30, TRAJ24)
CGTEIVDADSWGKFQF

SEQ ID NO: 113192 - protein, 15 aa, Homo sapiens
  CDR3 for beta chain variable domain of TCR clone 56596 (TRBV7-2, TRBJ2-3)
CASSLAGAFIDTQYF

SEQ ID NO: 113193 - protein, 17 aa, Homo sapiens
  CDR3 for alpha chain variable domain of TCR clone 56597 (TRAV13-1, TRAJ52)
CAASSGAGGTSYGKLTF

SEQ ID NO: 113194 - protein, 12 aa, Homo sapiens
  CDR3 for beta chain variable domain of TCR clone 56597 (TRBV14, TRBJ2-1)
CASSRLKGEQFF

SEQ ID NO: 113195 - protein, 11 aa, Homo sapiens
  CDR3 for alpha chain variable domain of TCR clone 56598 (TRAV21, TRAJ11)
CAVNGYSTLTL

SEQ ID NO: 113196 - protein, 11 aa, Homo sapiens
  CDR3 for beta chain variable domain of TCR clone 56598 (TRBV11-2, TRBJ2-7)
CASSSDYEQYF

SEQ ID NO: 113197 - protein, 13 aa, Homo sapiens
  CDR3 for alpha chain variable domain of TCR clone 56599 (TRAV1-2, TRAJ9)
CAALNTGGFKTIF

SEQ ID NO: 113198 - protein, 14 aa, Homo sapiens
  CDR3 for beta chain variable domain of TCR clone 56599 (TRBV19, TRBJ2-7)
CASSMGQGAIEQYF

SEQ ID NO: 113199 - protein, 14 aa, Homo sapiens
  CDR3 for alpha chain variable domain of TCR clone 56600 (TRAV38-1, TRAJ39)
CAFVYNNAGNMLTF

SEQ ID NO: 113200 - protein, 15 aa, Homo sapiens
  CDR3 for beta chain variable domain of TCR clone 56600 (TRBV19, TRBJ2-6)
CASSIGPSGANVLTF

SEQ ID NO: 113201 - protein, 13 aa, Homo sapiens
  CDR3 for alpha chain variable domain of TCR clone 56601 (TRAV1-2, TRAJ9)
CAVLNTGGFKTIF

SEQ ID NO: 113202 - protein, 14 aa, Homo sapiens
  CDR3 for beta chain variable domain of TCR clone 56601 (TRBV19, TRBJ2-1)
CASPTFVLSGEQLF

SEQ ID NO: 113203 - protein, 13 aa, Homo sapiens
  CDR3 for alpha chain variable domain of TCR clone 56602 (TRAV8-3, TRAJ48)
CAVVPFGNEKLTF

SEQ ID NO: 113204 - protein, 15 aa, Homo sapiens
  CDR3 for beta chain variable domain of TCR clone 56602 (TRBV11-2, TRBJ2-1)
CASSSPSTRYNERFF

SEQ ID NO: 113205 - protein, 16 aa, Homo sapiens
  CDR3 for alpha chain variable domain of TCR clone 56603 (TRAV30, TRAJ49)
SAAQRAGPNTGNQFYF

SEQ ID NO: 113206 - protein, 15 aa, Homo sapiens
  CDR3 for beta chain variable domain of TCR clone 56603 (TRBV2, TRBJ2-1)
CASSELAGSYNEQFF

SEQ ID NO: 113207 - protein, 12 aa, Homo sapiens
  CDR3 for alpha chain variable domain of TCR clone 56604 (TRAV8-3, TRAJ26)
CAGDNYGQNFFF

SEQ ID NO: 113208 - protein, 17 aa, Homo sapiens
  CDR3 for beta chain variable domain of TCR clone 56604 (TRBV7-8, TRBJ2-6)
CASSAGTGGAGANVLTF

SEQ ID NO: 113209 - protein, 23 aa, Homo sapiens
  CDR3 for alpha chain variable domain of TCR clone 56605 (TRAV12-2, TRAJ36)
SLLIRDSQPSDSATLERANNLFF

SEQ ID NO: 113210 - protein, 15 aa, Homo sapiens
  CDR3 for beta chain variable domain of TCR clone 56605 (TRBV19, TRBJ1-1)
CASTSGQIQNTEAFF

SEQ ID NO: 113211 - protein, 15 aa, Homo sapiens
  CDR3 for alpha chain variable domain of TCR clone 56606 (TRAV12-3, TRAJ6)
SAMSATTGGSYIPTF

SEQ ID NO: 113212 - protein, 16 aa, Homo sapiens
  CDR3 for beta chain variable domain of TCR clone 56606 (TRBV20-1, TRBJ1-2)
CSASMGQGVANYGYTF

SEQ ID NO: 113213 - protein, 15 aa, Homo sapiens
  CDR3 for alpha chain variable domain of TCR clone 56607 (TRAV21, TRAJ53)
CATLNSGGSNYKLTF

SEQ ID NO: 113214 - protein, 13 aa, Homo sapiens
  CDR3 for beta chain variable domain of TCR clone 56607 (TRBV7-2, TRBJ2-2)
CASSLAVTGGLFF

SEQ ID NO: 113215 - protein, 14 aa, Homo sapiens
  CDR3 for alpha chain variable domain of TCR clone 56608 (TRAV12-2, TRAJ40)
HAVKIPSGTYKYIF

SEQ ID NO: 113216 - protein, 13 aa, Homo sapiens
  CDR3 for beta chain variable domain of TCR clone 56608 (TRBV7-9, TRBJ1-2)
CASSLKQNYGYTF

SEQ ID NO: 113217 - protein, 12 aa, Homo sapiens
  CDR3 for alpha chain variable domain of TCR clone 56609 (TRAV2, TRAJ9)
CAVGAGGFKTIF

SEQ ID NO: 113218 - protein, 16 aa, Homo sapiens
  CDR3 for beta chain variable domain of TCR clone 56609 (TRBV13, TRBJ2-2)
CASSPRSGEHTGELFF

SEQ ID NO: 113219 - protein, 14 aa, Homo sapiens
  CDR3 for alpha chain variable domain of TCR clone 56610 (TRAV4, TRAJ9)
CLVGSGTGGFKTIF

SEQ ID NO: 113220 - protein, 16 aa, Homo sapiens
  CDR3 for beta chain variable domain of TCR clone 56610 (TRBV7-3, TRBJ2-2)
CASSLKRGTLSGELFF

SEQ ID NO: 113221 - protein, 13 aa, Homo sapiens
  CDR3 for alpha chain variable domain of TCR clone 56611 (TRAV3, TRAJ27)
CAVRPLGAGKSTF

SEQ ID NO: 113222 - protein, 13 aa, Homo sapiens
  CDR3 for beta chain variable domain of TCR clone 56611 (TRBV11-2, TRBJ2-5)
CASSSTGEETQYF

SEQ ID NO: 113223 - protein, 18 aa, Homo sapiens
  CDR3 for alpha chain variable domain of TCR clone 56612 (TRAV29/DV5, TRAJ52)
CAAGFRGAGGTSYGNLTF

SEQ ID NO: 113224 - protein, 16 aa, Homo sapiens
  CDR3 for beta chain variable domain of TCR clone 56612 (TRBV7-3, TRBJ2-2)
CASSLKRGTLSGELFF

SEQ ID NO: 113225 - protein, 17 aa, Homo sapiens
  CDR3 for alpha chain variable domain of TCR clone 56613 (TRAV8-6, TRAJ58)
CAVSSWVGETSGSRLTF

SEQ ID NO: 113226 - protein, 15 aa, Homo sapiens
  CDR3 for beta chain variable domain of TCR clone 56613 (TRBV6-5, TRBJ2-1)
CASSYDAGAGNEQLF

SEQ ID NO: 113227 - protein, 17 aa, Homo sapiens
  CDR3 for alpha chain variable domain of TCR clone 56614 (TRAV4, TRAJ18)
CLVGERSAGSTLGRLYF

SEQ ID NO: 113228 - protein, 14 aa, Homo sapiens
  CDR3 for beta chain variable domain of TCR clone 56614 (TRBV6-5, TRBJ1-2)
CASSYDGTGGGYTF

SEQ ID NO: 113229 - protein, 18 aa, Homo sapiens
  CDR3 for alpha chain variable domain of TCR clone 56615 (TRAV12-3, TRAJ52)
CAMSVGGAGGTSYGKLTF

SEQ ID NO: 113230 - protein, 15 aa, Homo sapiens
  CDR3 for beta chain variable domain of TCR clone 56615 (TRBV27, TRBJ1-6)
CDSSFDRGLGSPLHF

SEQ ID NO: 113231 - protein, 15 aa, Homo sapiens
  CDR3 for alpha chain variable domain of TCR clone 56616 (TRAV27, TRAJ38)
CAARRNAGNNRKLIW

SEQ ID NO: 113232 - protein, 16 aa, Homo sapiens
  CDR3 for beta chain variable domain of TCR clone 56616 (TRBV6-1, TRBJ1-3)
CASVQGGVETPYILER

SEQ ID NO: 113233 - protein, 17 aa, Homo sapiens
  CDR3 for alpha chain variable domain of TCR clone 56617 (TRAV13-1, TRAJ31)
CAPRDRLMFGDGTHLVV

SEQ ID NO: 113234 - protein, 12 aa, Homo sapiens
  CDR3 for beta chain variable domain of TCR clone 56617 (TRBV7-9, TRBJ2-7)
CASSLEGYEQYF

SEQ ID NO: 113235 - protein, 14 aa, Homo sapiens
  CDR3 for alpha chain variable domain of TCR clone 56618 (TRAV13-1, TRAJ40)
CAASMTSGPYKYIF

SEQ ID NO: 113236 - protein, 15 aa, Homo sapiens
  CDR3 for beta chain variable domain of TCR clone 56618 (TRBV7-3, TRBJ2-1)
CASSPTGGGEVEQFF

SEQ ID NO: 113237 - protein, 15 aa, Homo sapiens
  CDR3 for alpha chain variable domain of TCR clone 56619 (TRAV29/DV5, TRAJ8)
CAASGRNTGFQKLVF

SEQ ID NO: 113238 - protein, 15 aa, Homo sapiens
  CDR3 for beta chain variable domain of TCR clone 56619 (TRBV5-1, TRBJ2-1)
CASTGSGRTHNEQFF

SEQ ID NO: 113239 - protein, 16 aa, Homo sapiens
  CDR3 for alpha chain variable domain of TCR clone 56620 (TRAV13-2, TRAJ28)
CAEKSYSGAGSYQLTF

SEQ ID NO: 113240 - protein, 16 aa, Homo sapiens
  CDR3 for beta chain variable domain of TCR clone 56620 (TRBV19, TRBJ2-1)
CASSRAGPSSYNEQFF

SEQ ID NO: 113241 - protein, 17 aa, Homo sapiens
  CDR3 for alpha chain variable domain of TCR clone 56621 (TRAV12-1, TRAJ42)
CVVMRMNYGGSQGNLIF

SEQ ID NO: 113242 - protein, 13 aa, Homo sapiens
  CDR3 for beta chain variable domain of TCR clone 56621 (TRBV7-2, TRBJ1-1)
CASSLARPAEAVF

SEQ ID NO: 113243 - protein, 18 aa, Homo sapiens
  CDR3 for alpha chain variable domain of TCR clone 56622 (TRAV13-1, TRAJ52)
CAASKRSAGGTGYGKLAF

SEQ ID NO: 113244 - protein, 13 aa, Homo sapiens
  CDR3 for beta chain variable domain of TCR clone 56622 (TRBV12-4, TRBJ1-2)
CASSLRQGKGYTF

SEQ ID NO: 113245 - protein, 15 aa, Homo sapiens
  CDR3 for alpha chain variable domain of TCR clone 56623 (TRAV13-1, TRAJ16)
CAARYQMARSCSLQG

SEQ ID NO: 113246 - protein, 16 aa, Homo sapiens
  CDR3 for beta chain variable domain of TCR clone 56623 (TRBV4-1, TRBJ2-1)
CISAPAAKQGGDEQFF

SEQ ID NO: 113247 - protein, 14 aa, Homo sapiens
  CDR3 for alpha chain variable domain of TCR clone 56624 (TRAV13-1, TRAJ44)
CAAKATGTASKLTF

SEQ ID NO: 113248 - protein, 14 aa, Homo sapiens
  CDR3 for beta chain variable domain of TCR clone 56624 (TRBV20-1, TRBJ2-3)
CSARVRGSTDTQYF

SEQ ID NO: 113249 - protein, 15 aa, Homo sapiens
  CDR3 for alpha chain variable domain of TCR clone 56625 (TRAV21, TRAJ53)
CATLNSGGSNYKLTF

SEQ ID NO: 113250 - protein, 13 aa, Homo sapiens
  CDR3 for beta chain variable domain of TCR clone 56625 (TRBV7-3, TRBJ1-1)
CASSQDWGAEALF

SEQ ID NO: 113251 - protein, 13 aa, Homo sapiens
  CDR3 for alpha chain variable domain of TCR clone 56626 (TRAV1-2, TRAJ9)
CAALNTGGFKTIF

SEQ ID NO: 113252 - protein, 14 aa, Homo sapiens
  CDR3 for beta chain variable domain of TCR clone 56626 (TRBV7-2, TRBJ1-2)
CASRQTGSTYGYTF

SEQ ID NO: 113253 - protein, 14 aa, Homo sapiens
  CDR3 for alpha chain variable domain of TCR clone 56627 (TRAV8-3, TRAJ9)
CAVVYNTGGFKTIF

SEQ ID NO: 113254 - protein, 16 aa, Homo sapiens
  CDR3 for beta chain variable domain of TCR clone 56627 (TRBV7-3, TRBJ2-2)
CASSLKRGTVSGELFF

SEQ ID NO: 113255 - protein, 13 aa, Homo sapiens
  CDR3 for alpha chain variable domain of TCR clone 56628 (TRAV16, TRAJ10)
CDPAREEETNSPL

SEQ ID NO: 113256 - protein, 14 aa, Homo sapiens
  CDR3 for beta chain variable domain of TCR clone 56628 (TRBV7-2, TRBJ1-2)
CASSQTGSTYGYTF

SEQ ID NO: 113257 - protein, 11 aa, Homo sapiens
  CDR3 for alpha chain variable domain of TCR clone 56629 (TRAV1-1, TRAJ23)
CAVRQGGKLIF

SEQ ID NO: 113258 - protein, 20 aa, Homo sapiens
  CDR3 for beta chain variable domain of TCR clone 56629 (TRBV28, TRBJ2-1)
CASTPIGRSPGLAGGNEQFF

SEQ ID NO: 113259 - protein, 14 aa, Homo sapiens
  CDR3 for alpha chain variable domain of TCR clone 56630 (TRAV3, TRAJ22)
CAVRDYGSARQLTF

SEQ ID NO: 113260 - protein, 16 aa, Homo sapiens
  CDR3 for beta chain variable domain of TCR clone 56630 (TRBV5-7, TRBJ1-4)
CASSPSGGLKTEKLFF

SEQ ID NO: 113261 - protein, 14 aa, Homo sapiens
  CDR3 for alpha chain variable domain of TCR clone 56631 (TRAV12-3, TRAJ10)
SHLHLTGGGNKLTF

SEQ ID NO: 113262 - protein, 14 aa, Homo sapiens
  CDR3 for beta chain variable domain of TCR clone 56631 (TRBV6-1, TRBJ1-3)
CASVQGGGGNTIYF

SEQ ID NO: 113263 - protein, 13 aa, Homo sapiens
  CDR3 for alpha chain variable domain of TCR clone 56632 (TRAV12-3, TRAJ21)
CAPGPHDFNKFYF

SEQ ID NO: 113264 - protein, 13 aa, Homo sapiens
  CDR3 for beta chain variable domain of TCR clone 56632 (TRBV4-2, TRBJ1-1)
CASSQAGNTEAFF

SEQ ID NO: 113265 - protein, 14 aa, Homo sapiens
  CDR3 for alpha chain variable domain of TCR clone 56633 (TRAV27, TRAJ15)
CAGFDNQAGTALIF

SEQ ID NO: 113266 - protein, 14 aa, Homo sapiens
  CDR3 for beta chain variable domain of TCR clone 56633 (TRBV7-6, TRBJ2-3)
CASSLGTVTDTQYF

SEQ ID NO: 113267 - protein, 11 aa, Homo sapiens
  CDR3 for alpha chain variable domain of TCR clone 56634 (TRAV1-1, TRAJ23)
CAVRQGGKLIF

SEQ ID NO: 113268 - protein, 14 aa, Homo sapiens
  CDR3 for beta chain variable domain of TCR clone 56634 (TRBV11-2, TRBJ2-3)
CASSRLARTDTQYF

SEQ ID NO: 113269 - protein, 16 aa, Homo sapiens
  CDR3 for alpha chain variable domain of TCR clone 56635 (TRAV30, TRAJ24)
CGSEIVDADSWGKFQF

SEQ ID NO: 113270 - protein, 13 aa, Homo sapiens
  CDR3 for beta chain variable domain of TCR clone 56635 (TRBV7-3, TRBJ1-1)
CASSQDWGAEAFF

SEQ ID NO: 113271 - protein, 20 aa, Homo sapiens
  CDR3 for alpha chain variable domain of TCR clone 56636 (TRAV4, TRAJ29)
CCVLLPRGCVPFSGNTPLVF

SEQ ID NO: 113272 - protein, 12 aa, Homo sapiens
  CDR3 for beta chain variable domain of TCR clone 56636 (TRBV6-1, TRBJ2-7)
RASSDYSYEQYF

SEQ ID NO: 113273 - protein, 13 aa, Homo sapiens
  CDR3 for alpha chain variable domain of TCR clone 56637 (TRAV1-2, TRAJ9)
CAVLNTGGFKTIF

SEQ ID NO: 113274 - protein, 14 aa, Homo sapiens
  CDR3 for beta chain variable domain of TCR clone 56637 (TRBV20-1, TRBJ2-3)
CSARGGTSTDTQYC

SEQ ID NO: 113275 - protein, 11 aa, Homo sapiens
  CDR3 for alpha chain variable domain of TCR clone 56638 (TRAV21, TRAJ34)
CAHYNTDKLIF

SEQ ID NO: 113276 - protein, 16 aa, Homo sapiens
  CDR3 for beta chain variable domain of TCR clone 56638 (TRBV12-4, TRBJ1-5)
CASSRPVGGSNQPQHF

SEQ ID NO: 113277 - protein, 18 aa, Homo sapiens
  CDR3 for alpha chain variable domain of TCR clone 56639 (TRAV21, TRAJ52)
CSVRPSPAGGTSYGKLTF

SEQ ID NO: 113278 - protein, 17 aa, Homo sapiens
  CDR3 for beta chain variable domain of TCR clone 56639 (TRBV25-1, TRBJ2-1)
CASSAYGQGRGVYEQFF

SEQ ID NO: 113279 - protein, 14 aa, Homo sapiens
  CDR3 for alpha chain variable domain of TCR clone 56640 (TRAV12-3, TRAJ10)
SHLPLTGGGNKLTF

SEQ ID NO: 113280 - protein, 13 aa, Homo sapiens
  CDR3 for beta chain variable domain of TCR clone 56640 (TRBV10-3, TRBJ2-1)
CAISEFSGREQFF

SEQ ID NO: 113281 - protein, 17 aa, Homo sapiens
  CDR3 for alpha chain variable domain of TCR clone 56641 (TRAV3, TRAJ12)
CAVRDGGRMDRSYKLIF

SEQ ID NO: 113282 - protein, 14 aa, Homo sapiens
  CDR3 for beta chain variable domain of TCR clone 56641 (TRBV7-9, TRBJ1-2)
CASSRQGANYGYTF

SEQ ID NO: 113283 - protein, 14 aa, Homo sapiens
  CDR3 for alpha chain variable domain of TCR clone 56642 (TRAV1-2, TRAJ8)
CAVREDTGFQKLVF

SEQ ID NO: 113284 - protein, 14 aa, Homo sapiens
  CDR3 for beta chain variable domain of TCR clone 56642 (TRBV7-8, TRBJ2-3)
CASSLEAGTDTRYF

SEQ ID NO: 113285 - protein, 14 aa, Homo sapiens
  CDR3 for alpha chain variable domain of TCR clone 56643 (TRAV12-2, TRAJ3)
CSVSLYSSASKIIF

SEQ ID NO: 113286 - protein, 14 aa, Homo sapiens
  CDR3 for beta chain variable domain of TCR clone 56643 (TRBV27, TRBJ2-1)
CAGSIAETYNEQFF

SEQ ID NO: 113287 - protein, 13 aa, Homo sapiens
  CDR3 for alpha chain variable domain of TCR clone 56644 (TRAV21, TRAJ27)
CAAPNTNAGKSTF

SEQ ID NO: 113288 - protein, 15 aa, Homo sapiens
  CDR3 for beta chain variable domain of TCR clone 56644 (TRBV20-1, TRBJ2-7)
CSARKGLAESYEQYF

SEQ ID NO: 113289 - protein, 14 aa, Homo sapiens
  CDR3 for alpha chain variable domain of TCR clone 56645 (TRAV1-2, TRAJ16)
CAVKRFSDGQKLLF

SEQ ID NO: 113290 - protein, 15 aa, Homo sapiens
  CDR3 for beta chain variable domain of TCR clone 56645 (TRBV7-9, TRBJ1-6)
CASSSPGRGNSPLHF

SEQ ID NO: 113291 - protein, 14 aa, Homo sapiens
  CDR3 for alpha chain variable domain of TCR clone 56646 (TRAV2, TRAJ9)
CAVEDRSGGFKTIF

SEQ ID NO: 113292 - protein, 15 aa, Homo sapiens
  CDR3 for beta chain variable domain of TCR clone 56646 (TRBV13, TRBJ1-5)
CASSFGQGGVQPQHF

SEQ ID NO: 113293 - protein, 13 aa, Homo sapiens
  CDR3 for alpha chain variable domain of TCR clone 56647 (TRAV30, TRAJ24)
CGTVTDSWGKLQF

SEQ ID NO: 113294 - protein, 14 aa, Homo sapiens
  CDR3 for beta chain variable domain of TCR clone 56647 (TRBV5-4, TRBJ1-1)
CASSLDSRRDEAFF

SEQ ID NO: 113295 - protein, 14 aa, Homo sapiens
  CDR3 for alpha chain variable domain of TCR clone 56648 (TRAV8-1, TRAJ5)
CAVRTDTGRRALTF

SEQ ID NO: 113296 - protein, 13 aa, Homo sapiens
  CDR3 for beta chain variable domain of TCR clone 56648 (TRBV12-4, TRBJ1-2)
CASSLRQGKGYTF

SEQ ID NO: 113297 - protein, 16 aa, Homo sapiens
  CDR3 for alpha chain variable domain of TCR clone 56649 (TRAV12-3, TRAJ53)
CAISPGSGGSNYKLTF

SEQ ID NO: 113298 - protein, 14 aa, Homo sapiens
  CDR3 for beta chain variable domain of TCR clone 56649 (TRBV4-2, TRBJ2-1)
CASGLDRAYNEQFF

SEQ ID NO: 113299 - protein, 14 aa, Homo sapiens
  CDR3 for alpha chain variable domain of TCR clone 56650 (TRAV12-2, TRAJ13)
CAVKKTGGYQKVTF

SEQ ID NO: 113300 - protein, 16 aa, Homo sapiens
  CDR3 for beta chain variable domain of TCR clone 56650 (TRBV29-1, TRBJ2-5)
SAARTERDPVLRARHA

SEQ ID NO: 113301 - protein, 16 aa, Homo sapiens
  CDR3 for alpha chain variable domain of TCR clone 56651 (TRAV3, TRAJ37)
CAVRGKGSGNTGKLIF

SEQ ID NO: 113302 - protein, 12 aa, Homo sapiens
  CDR3 for beta chain variable domain of TCR clone 56651 (TRBV11-2, TRBJ2-5)
CASSLVGETQYF

SEQ ID NO: 113303 - protein, 14 aa, Homo sapiens
  CDR3 for alpha chain variable domain of TCR clone 56652 (TRAV29/DV5, TRAJ36)
CAARRKTGANNLFF

SEQ ID NO: 113304 - protein, 15 aa, Homo sapiens
  CDR3 for beta chain variable domain of TCR clone 56652 (TRBV20-1, TRBJ1-1)
CSASRGVTGNTEAFF

SEQ ID NO: 113305 - protein, 12 aa, Homo sapiens
  CDR3 for alpha chain variable domain of TCR clone 56653 (TRAV13-1, TRAJ21)
CAAKEGFNNFYF

SEQ ID NO: 113306 - protein, 14 aa, Homo sapiens
  CDR3 for beta chain variable domain of TCR clone 56653 (TRBV18, TRBJ2-7)
CASSPRGGAYEQYF

SEQ ID NO: 113307 - protein, 14 aa, Homo sapiens
  CDR3 for alpha chain variable domain of TCR clone 56654 (TRAV21, TRAJ21)
CAVKGFGNFNKFYL

SEQ ID NO: 113308 - protein, 13 aa, Homo sapiens
  CDR3 for beta chain variable domain of TCR clone 56654 (TRBV18, TRBJ1-1)
CASSPETKPEAFF

SEQ ID NO: 113309 - protein, 16 aa, Homo sapiens
  CDR3 for alpha chain variable domain of TCR clone 56655 (TRAV12-2, TRAJ45)
CAVIFLSGGGADGLTF

SEQ ID NO: 113310 - protein, 19 aa, Homo sapiens
  CDR3 for beta chain variable domain of TCR clone 56655 (TRBV28, TRBJ2-4)
RASSFQPGGPAHSKNIQYF

SEQ ID NO: 113311 - protein, 16 aa, Homo sapiens
  CDR3 for alpha chain variable domain of TCR clone 56656 (TRAV23/DV6, TRAJ9)
CAASIGGNTGGCKTIF

SEQ ID NO: 113312 - protein, 14 aa, Homo sapiens
  CDR3 for beta chain variable domain of TCR clone 56656 (TRBV9, TRBJ2-7)
CASSVGVGSYEQYF

SEQ ID NO: 113313 - protein, 15 aa, Homo sapiens
  CDR3 for alpha chain variable domain of TCR clone 56657 (TRAV26-1, TRAJ44)
CIVRANTGTASKLTF

SEQ ID NO: 113314 - protein, 16 aa, Homo sapiens
  CDR3 for beta chain variable domain of TCR clone 56657 (TRBV7-7, TRBJ2-1)
CASSLDSGTSYNEQFF

SEQ ID NO: 113315 - protein, 14 aa, Homo sapiens
  CDR3 for alpha chain variable domain of TCR clone 56658 (TRAV27, TRAJ12)
CAGARMDSSYKLIF

SEQ ID NO: 113316 - protein, 12 aa, Homo sapiens
  CDR3 for beta chain variable domain of TCR clone 56658 (TRBV7-9, TRBJ2-7)
CASSLEGYEQYF

SEQ ID NO: 113317 - protein, 15 aa, Homo sapiens
  CDR3 for alpha chain variable domain of TCR clone 56659 (TRAV21, TRAJ24)
CAARSSTDSWGKLQF

SEQ ID NO: 113318 - protein, 14 aa, Homo sapiens
  CDR3 for beta chain variable domain of TCR clone 56659 (TRBV19, TRBJ2-1)
CASPTFVLSGEQFF

SEQ ID NO: 113319 - protein, 15 aa, Homo sapiens
  CDR3 for alpha chain variable domain of TCR clone 56660 (TRAV3, TRAJ45)
CDVRTPWGGADGLTF

SEQ ID NO: 113320 - protein, 16 aa, Homo sapiens
  CDR3 for beta chain variable domain of TCR clone 56660 (TRBV6-1, TRBJ2-2)
CASSFRQGANTGELFF

SEQ ID NO: 113321 - protein, 15 aa, Homo sapiens
  CDR3 for alpha chain variable domain of TCR clone 56661 (TRAV3, TRAJ17)
CAVSPKEAAGNELTF

SEQ ID NO: 113322 - protein, 12 aa, Homo sapiens
  CDR3 for beta chain variable domain of TCR clone 56661 (TRBV7-9, TRBJ1-6)
CASSLMTSPLHF

SEQ ID NO: 113323 - protein, 12 aa, Homo sapiens
  CDR3 for alpha chain variable domain of TCR clone 56662 (TRAV17, TRAJ49)
CATVTTGNQFYF

SEQ ID NO: 113324 - protein, 18 aa, Homo sapiens
  CDR3 for beta chain variable domain of TCR clone 56662 (TRBV11-2, TRBJ2-6)
CASSLNLFLGTGANVLTF

SEQ ID NO: 113325 - protein, 13 aa, Homo sapiens
  CDR3 for alpha chain variable domain of TCR clone 56663 (TRAV17, TRAJ5)
CAPMDTGRRALTF

SEQ ID NO: 113326 - protein, 11 aa, Homo sapiens
  CDR3 for beta chain variable domain of TCR clone 56663 (TRBV19, TRBJ1-1)
CASSIGSEASF

SEQ ID NO: 113327 - protein, 14 aa, Homo sapiens
  CDR3 for alpha chain variable domain of TCR clone 56664 (TRAV12-3, TRAJ10)
SHLPLTGGGNKLTF

SEQ ID NO: 113328 - protein, 16 aa, Homo sapiens
  CDR3 for beta chain variable domain of TCR clone 56664 (TRBV7-9, TRBJ2-1)
CASSDVAGGSYNEQFF

SEQ ID NO: 113329 - protein, 13 aa, Homo sapiens
  CDR3 for alpha chain variable domain of TCR clone 56665 (TRAV2, TRAJ29)
CATQNSGNTPLVF

SEQ ID NO: 113330 - protein, 14 aa, Homo sapiens
  CDR3 for beta chain variable domain of TCR clone 56665 (TRBV7-9, TRBJ2-4)
CASSIAMGGNIQYF

SEQ ID NO: 113331 - protein, 16 aa, Homo sapiens
  CDR3 for alpha chain variable domain of TCR clone 56666 (TRAV23/DV6, TRAJ9)
CAASIGGNTGGFKTIL

SEQ ID NO: 113332 - protein, 13 aa, Homo sapiens
  CDR3 for beta chain variable domain of TCR clone 56666 (TRBV10-3, TRBJ2-7)
CASKLAVNYEQYF

SEQ ID NO: 113333 - protein, 14 aa, Homo sapiens
  CDR3 for alpha chain variable domain of TCR clone 56667 (TRAV12-1, TRAJ17)
CVVNYKAAGNKLTF

SEQ ID NO: 113334 - protein, 14 aa, Homo sapiens
  CDR3 for beta chain variable domain of TCR clone 56667 (TRBV7-2, TRBJ1-1)
CASSFLTGTTEAFF

SEQ ID NO: 113335 - protein, 14 aa, Homo sapiens
  CDR3 for alpha chain variable domain of TCR clone 56668 (TRAV26-1, TRAJ34)
CIVRVAYNTDKLIL

SEQ ID NO: 113336 - protein, 15 aa, Homo sapiens
  CDR3 for beta chain variable domain of TCR clone 56668 (TRBV20-1, TRBJ2-7)
CSARVPAAYFYEQYL

SEQ ID NO: 113337 - protein, 16 aa, Homo sapiens
  CDR3 for alpha chain variable domain of TCR clone 56669 (TRAV8-3, TRAJ8)
CAVPRDGNTGFQKLVF

SEQ ID NO: 113338 - protein, 15 aa, Homo sapiens
  CDR3 for beta chain variable domain of TCR clone 56669 (TRBV6-1, TRBJ2-6)
CASSSRPSGANVPTF

SEQ ID NO: 113339 - protein, 14 aa, Homo sapiens
  CDR3 for alpha chain variable domain of TCR clone 56670 (TRAV1-2, TRAJ16)
CAVNRFSDGQKLLF

SEQ ID NO: 113340 - protein, 15 aa, Homo sapiens
  CDR3 for beta chain variable domain of TCR clone 56670 (TRBV13, TRBJ1-2)
CASSLGRQPGYGYTF

SEQ ID NO: 113341 - protein, 15 aa, Homo sapiens
  CDR3 for alpha chain variable domain of TCR clone 56671 (TRAV8-6, TRAJ45)
CAVSEQGGGADGLTF

SEQ ID NO: 113342 - protein, 14 aa, Homo sapiens
  CDR3 for beta chain variable domain of TCR clone 56671 (TRBV28, TRBJ2-5)
CASRGSSFWETQCF

SEQ ID NO: 113343 - protein, 14 aa, Homo sapiens
  CDR3 for alpha chain variable domain of TCR clone 56672 (TRAV13-2, TRAJ22)
CADGTLGSARQLTF

SEQ ID NO: 113344 - protein, 15 aa, Homo sapiens
  CDR3 for beta chain variable domain of TCR clone 56672 (TRBV6-3, TRBJ2-7)
CASSSPGTVFYGQYF

SEQ ID NO: 113345 - protein, 15 aa, Homo sapiens
  CDR3 for alpha chain variable domain of TCR clone 56673 (TRAV12-2, TRAJ43)
CAFDMCFGAGTRLTV

SEQ ID NO: 113346 - protein, 18 aa, Homo sapiens
  CDR3 for beta chain variable domain of TCR clone 56673 (TRBV20-1, TRBJ2-3)
CSASGLAGGPGTTDTQYF

SEQ ID NO: 113347 - protein, 13 aa, Homo sapiens
  CDR3 for alpha chain variable domain of TCR clone 56674 (TRAV12-2, TRAJ22)
CALYSGSARQLTF

SEQ ID NO: 113348 - protein, 13 aa, Homo sapiens
  CDR3 for beta chain variable domain of TCR clone 56674 (TRBV19, TRBJ2-1)
CASVEFRSNEQFF

SEQ ID NO: 113349 - protein, 16 aa, Homo sapiens
  CDR3 for alpha chain variable domain of TCR clone 56675 (TRAV30, TRAJ37)
CGTEIKGSSNTGKLIF

SEQ ID NO: 113350 - protein, 15 aa, Homo sapiens
  CDR3 for beta chain variable domain of TCR clone 56675 (TRBV19, TRBJ1-5)
CASSIDPAEDQPQHF

SEQ ID NO: 113351 - protein, 17 aa, Homo sapiens
  CDR3 for alpha chain variable domain of TCR clone 56676 (TRAV3, TRAJ32)
CAVRDRDYGGSQGNLIF

SEQ ID NO: 113352 - protein, 13 aa, Homo sapiens
  CDR3 for beta chain variable domain of TCR clone 56676 (TRBV10-3, TRBJ2-7)
CASKLAVNYEQYF

SEQ ID NO: 113353 - protein, 12 aa, Homo sapiens
  CDR3 for alpha chain variable domain of TCR clone 56677 (TRAV13-2, TRAJ8)
CAPWLGFRKLVF

SEQ ID NO: 113354 - protein, 15 aa, Homo sapiens
  CDR3 for beta chain variable domain of TCR clone 56677 (TRBV12-4, TRBJ2-5)
SASSLSGAFQETQYF

SEQ ID NO: 113355 - protein, 19 aa, Homo sapiens
  CDR3 for alpha chain variable domain of TCR clone 56678 (TRAV27, TRAJ53)
ASTSVQSRNSGGSNYKLTF

SEQ ID NO: 113356 - protein, 14 aa, Homo sapiens
  CDR3 for beta chain variable domain of TCR clone 56678 (TRBV11-1, TRBJ2-7)
CASTFAAPSYEQYF

SEQ ID NO: 113357 - protein, 14 aa, Homo sapiens
  CDR3 for alpha chain variable domain of TCR clone 56679 (TRAV1-2, TRAJ8)
CTVREDTGFQKLVF

SEQ ID NO: 113358 - protein, 15 aa, Homo sapiens
  CDR3 for beta chain variable domain of TCR clone 56679 (TRBV12-4, TRBJ2-5)
CASSPPTGLQETQYF

SEQ ID NO: 113359 - protein, 15 aa, Homo sapiens
  CDR3 for alpha chain variable domain of TCR clone 56680 (TRAV2, TRAJ15)
CAVEDRGPAGTALIF

SEQ ID NO: 113360 - protein, 13 aa, Homo sapiens
  CDR3 for beta chain variable domain of TCR clone 56680 (TRBV10-2, TRBJ2-7)
CASGASGGYEQYF

SEQ ID NO: 113361 - protein, 16 aa, Homo sapiens
  CDR3 for alpha chain variable domain of TCR clone 56681 (TRAV12-1, TRAJ43)
CVVSPHRFGAGTRLTV

SEQ ID NO: 113362 - protein, 13 aa, Homo sapiens
  CDR3 for beta chain variable domain of TCR clone 56681 (TRBV20-1, TRBJ1-1)
CSARGGGNTEAFF

SEQ ID NO: 113363 - protein, 16 aa, Homo sapiens
  CDR3 for alpha chain variable domain of TCR clone 56682 (TRAV3, TRAJ10)
CAVRDMRAGGGNKLTF

SEQ ID NO: 113364 - protein, 15 aa, Homo sapiens
  CDR3 for beta chain variable domain of TCR clone 56682 (TRBV11-2, TRBJ1-6)
CASTGLGTAVSPLHF

SEQ ID NO: 113365 - protein, 21 aa, Homo sapiens
  CDR3 for alpha chain variable domain of TCR clone 56683 (TRAV29/DV5, TRAJ52)
CSVLLCGKREAGGTSYGKLTF

SEQ ID NO: 113366 - protein, 13 aa, Homo sapiens
  CDR3 for beta chain variable domain of TCR clone 56683 (TRBV27, TRBJ1-4)
CASSLMGDEKLFF

SEQ ID NO: 113367 - protein, 15 aa, Homo sapiens
  CDR3 for alpha chain variable domain of TCR clone 56684 (TRAV3, TRAJ3)
CAVRDRDSNASKIIF

SEQ ID NO: 113368 - protein, 18 aa, Homo sapiens
  CDR3 for beta chain variable domain of TCR clone 56684 (TRBV25-1, TRBJ1-2)
CASSGLQNGQGLIFGYTF

SEQ ID NO: 113369 - protein, 18 aa, Homo sapiens
  CDR3 for alpha chain variable domain of TCR clone 56685 (TRAV13-1, TRAJ52)
CAAKNPNAGGTSYGKLTF

SEQ ID NO: 113370 - protein, 15 aa, Homo sapiens
  CDR3 for beta chain variable domain of TCR clone 56685 (TRBV6-1, TRBJ2-3)
CANSERGGITDTQYF

SEQ ID NO: 113371 - protein, 11 aa, Homo sapiens
  CDR3 for alpha chain variable domain of TCR clone 56686 (TRAV17, TRAJ9)
CATTGGFKTIF

SEQ ID NO: 113372 - protein, 14 aa, Homo sapiens
  CDR3 for beta chain variable domain of TCR clone 56686 (TRBV7-9, TRBJ2-2)
CASSGQADTGELFF

SEQ ID NO: 113373 - protein, 12 aa, Homo sapiens
  CDR3 for alpha chain variable domain of TCR clone 56687 (TRAV12-3, TRAJ17)
CAMTLTGNKLTF

SEQ ID NO: 113374 - protein, 16 aa, Homo sapiens
  CDR3 for beta chain variable domain of TCR clone 56687 (TRBV15, TRBJ1-2)
CATSRGPRTGGGGYTF

SEQ ID NO: 113375 - protein, 14 aa, Homo sapiens
  CDR3 for alpha chain variable domain of TCR clone 56688 (TRAV35, TRAJ33)
CAGSSQDSNYQLIW

SEQ ID NO: 113376 - protein, 14 aa, Homo sapiens
  CDR3 for beta chain variable domain of TCR clone 56688 (TRBV5-1, TRBJ1-4)
APAAWKDGNEKLFF

SEQ ID NO: 113377 - protein, 15 aa, Homo sapiens
  CDR3 for alpha chain variable domain of TCR clone 56689 (TRAV8-4, TRAJ10)
CAVSDGPGGGNKITF

SEQ ID NO: 113378 - protein, 13 aa, Homo sapiens
  CDR3 for beta chain variable domain of TCR clone 56689 (TRBV28, TRBJ1-3)
CASSFLGSGTIYF

SEQ ID NO: 113379 - protein, 17 aa, Homo sapiens
  CDR3 for alpha chain variable domain of TCR clone 56690 (TRAV4, )
CLVDIQNPDPAVYQLRD

SEQ ID NO: 113380 - protein, 15 aa, Homo sapiens
  CDR3 for beta chain variable domain of TCR clone 56690 (TRBV20-1, TRBJ1-5)
CSASRRGDLGQTQHF

SEQ ID NO: 113381 - protein, 10 aa, Homo sapiens
  CDR3 for alpha chain variable domain of TCR clone 56691 (TRAV12-2, TRAJ41)
CAVAGYALNF

SEQ ID NO: 113382 - protein, 15 aa, Homo sapiens
  CDR3 for beta chain variable domain of TCR clone 56691 (TRBV4-2, TRBJ2-1)
CASSQDVGLAGEQFF

SEQ ID NO: 113383 - protein, 15 aa, Homo sapiens
  CDR3 for alpha chain variable domain of TCR clone 56692 (TRAV21, TRAJ24)
CAARSSTDSWGKLQF

SEQ ID NO: 113384 - protein, 13 aa, Homo sapiens
  CDR3 for beta chain variable domain of TCR clone 56692 (TRBV11-2, TRBJ2-5)
CASSSIGEETQYF

SEQ ID NO: 113385 - protein, 14 aa, Homo sapiens
  CDR3 for alpha chain variable domain of TCR clone 56693 (TRAV16, TRAJ39)
CALSRNNAGNMLTF

SEQ ID NO: 113386 - protein, 16 aa, Homo sapiens
  CDR3 for beta chain variable domain of TCR clone 56693 (TRBV6-6, TRBJ2-1)
CASSYSFSGSYNEQFF

SEQ ID NO: 113387 - protein, 12 aa, Homo sapiens
  CDR3 for alpha chain variable domain of TCR clone 56694 (TRAV13-1, TRAJ21)
CAAKEGSNKIYF

SEQ ID NO: 113388 - protein, 17 aa, Homo sapiens
  CDR3 for beta chain variable domain of TCR clone 56694 (TRBV19, TRBJ2-7)
CASSISFYDSYPYEQYF

SEQ ID NO: 113389 - protein, 17 aa, Homo sapiens
  CDR3 for alpha chain variable domain of TCR clone 56695 (TRAV26-1, TRAJ28)
CIVRALYSGAGRYQLTF

SEQ ID NO: 113390 - protein, 12 aa, Homo sapiens
  CDR3 for beta chain variable domain of TCR clone 56695 (TRBV12-4, TRBJ2-1)
CASRQTENEQFF

SEQ ID NO: 113391 - protein, 16 aa, Homo sapiens
  CDR3 for alpha chain variable domain of TCR clone 56696 (TRAV30, TRAJ24)
CGTEIVDADSWGKFQF

SEQ ID NO: 113392 - protein, 13 aa, Homo sapiens
  CDR3 for beta chain variable domain of TCR clone 56696 (TRBV2, TRBJ1-1)
CASSVLMNTEAFF

SEQ ID NO: 113393 - protein, 13 aa, Homo sapiens
  CDR3 for alpha chain variable domain of TCR clone 56697 (TRAV8-2, TRAJ15)
CVVSGPGRNCSDL

SEQ ID NO: 113394 - protein, 16 aa, Homo sapiens
  CDR3 for beta chain variable domain of TCR clone 56697 (TRBV20-1, TRBJ1-4)
CSARPYGGELNERLFF

SEQ ID NO: 113395 - protein, 12 aa, Homo sapiens
  CDR3 for alpha chain variable domain of TCR clone 56698 (TRAV27, TRAJ35)
CEGADFGNVLHC

SEQ ID NO: 113396 - protein, 16 aa, Homo sapiens
  CDR3 for beta chain variable domain of TCR clone 56698 (TRBV6-1, TRBJ2-1)
CASILRQGSSYNEQFF

SEQ ID NO: 113397 - protein, 13 aa, Homo sapiens
  CDR3 for alpha chain variable domain of TCR clone 56699 (TRAV2, TRAJ24)
CAVATDSWGKLQF

SEQ ID NO: 113398 - protein, 14 aa, Homo sapiens
  CDR3 for beta chain variable domain of TCR clone 56699 (TRBV13, TRBJ2-5)
CASSLGRGQETQYF

SEQ ID NO: 113399 - protein, 13 aa, Homo sapiens
  CDR3 for alpha chain variable domain of TCR clone 56700 (TRAV12-3, TRAJ7)
CAMTPYGNNRLAF

SEQ ID NO: 113400 - protein, 15 aa, Homo sapiens
  CDR3 for beta chain variable domain of TCR clone 56700 (TRBV4-3, TRBJ2-3)
CASSQDGRATDTQYF

SEQ ID NO: 113401 - protein, 15 aa, Homo sapiens
  CDR3 for alpha chain variable domain of TCR clone 56701 (TRAV35, TRAJ50)
CAGQLRKTPYDKVIF

SEQ ID NO: 113402 - protein, 12 aa, Homo sapiens
  CDR3 for beta chain variable domain of TCR clone 56701 (TRBV5-1, TRBJ2-5)
CAGSLGLETQYF

SEQ ID NO: 113403 - protein, 16 aa, Homo sapiens
  CDR3 for alpha chain variable domain of TCR clone 56702 (TRAV30, TRAJ24)
CGTEIVDADSWGKFQF

SEQ ID NO: 113404 - protein, 15 aa, Homo sapiens
  CDR3 for beta chain variable domain of TCR clone 56702 (TRBV20-1, TRBJ2-7)
CSAESGTSGAYEQYF

SEQ ID NO: 113405 - protein, 14 aa, Homo sapiens
  CDR3 for alpha chain variable domain of TCR clone 56703 (TRAV12-2, TRAJ45)
CAVNIGGGADGLTF

SEQ ID NO: 113406 - protein, 13 aa, Homo sapiens
  CDR3 for beta chain variable domain of TCR clone 56703 (TRBV19, TRBJ2-2)
CASSIWSTGEPFF

SEQ ID NO: 113407 - protein, 17 aa, Homo sapiens
  CDR3 for alpha chain variable domain of TCR clone 56704 (TRAV8-3, TRAJ34)
CAIPGQLIFGTGTRLQV

SEQ ID NO: 113408 - protein, 15 aa, Homo sapiens
  CDR3 for beta chain variable domain of TCR clone 56704 (TRBV5-7, TRBJ2-1)
CASSRRLAGDNEQFF

SEQ ID NO: 113409 - protein, 15 aa, Homo sapiens
  CDR3 for alpha chain variable domain of TCR clone 56705 (TRAV17, TRAJ57)
CATGPSQGGPEKLVF

SEQ ID NO: 113410 - protein, 18 aa, Homo sapiens
  CDR3 for beta chain variable domain of TCR clone 56705 (TRBV7-9, TRBJ2-7)
CASSLTTSGSRTWYEQYF

SEQ ID NO: 113411 - protein, 16 aa, Homo sapiens
  CDR3 for alpha chain variable domain of TCR clone 56706 (TRAV23/DV6, TRAJ9)
CAASIGGNTGGFKTIF

SEQ ID NO: 113412 - protein, 16 aa, Homo sapiens
  CDR3 for beta chain variable domain of TCR clone 56706 (TRBV4-1, TRBJ2-7)
CASSQEWTSGPLEQYF

SEQ ID NO: 113413 - protein, 16 aa, Homo sapiens
  CDR3 for alpha chain variable domain of TCR clone 56707 (TRAV14/DV4, TRAJ53)
CAMREGGGGSNYKLTF

SEQ ID NO: 113414 - protein, 15 aa, Homo sapiens
  CDR3 for beta chain variable domain of TCR clone 56707 (TRBV3-1, TRBJ2-7)
CASSQEWTGSYEQYF

SEQ ID NO: 113415 - protein, 13 aa, Homo sapiens
  CDR3 for alpha chain variable domain of TCR clone 56708 (TRAV3, TRAJ20)
CCEAFCNNYKLSF

SEQ ID NO: 113416 - protein, 11 aa, Homo sapiens
  CDR3 for beta chain variable domain of TCR clone 56708 (TRBV11-2, TRBJ1-1)
CASSINTEAFF

SEQ ID NO: 113417 - protein, 11 aa, Homo sapiens
  CDR3 for alpha chain variable domain of TCR clone 56709 (TRAV21, TRAJ34)
CAHYNTDKLIF

SEQ ID NO: 113418 - protein, 15 aa, Homo sapiens
  CDR3 for beta chain variable domain of TCR clone 56709 (TRBV6-6, TRBJ2-7)
CASSYSYGGSYEQYF

SEQ ID NO: 113419 - protein, 15 aa, Homo sapiens
  CDR3 for alpha chain variable domain of TCR clone 56710 (TRAV17, TRAJ13)
CATDAGSGGYQKVNF

SEQ ID NO: 113420 - protein, 17 aa, Homo sapiens
  CDR3 for beta chain variable domain of TCR clone 56710 (TRBV11-2, TRBJ2-1)
CASSLYPPGVEYNEQFF

SEQ ID NO: 113421 - protein, 13 aa, Homo sapiens
  CDR3 for alpha chain variable domain of TCR clone 56711 (TRAV1-2, TRAJ9)
CAALNTGGFKTIF

SEQ ID NO: 113422 - protein, 13 aa, Homo sapiens
  CDR3 for beta chain variable domain of TCR clone 56711 (TRBV19, TRBJ1-2)
CGSSVPGQDGYTF

SEQ ID NO: 113423 - protein, 13 aa, Homo sapiens
  CDR3 for alpha chain variable domain of TCR clone 56712 (TRAV26-2, TRAJ43)
CILRAVNNDDMRF

SEQ ID NO: 113424 - protein, 15 aa, Homo sapiens
  CDR3 for beta chain variable domain of TCR clone 56712 (TRBV7-2, TRBJ2-1)
CASTHGTGIYNEQFF

SEQ ID NO: 113425 - protein, 11 aa, Homo sapiens
  CDR3 for alpha chain variable domain of TCR clone 56713 (TRAV13-1, TRAJ40)
CAVSGTYKYVF

SEQ ID NO: 113426 - protein, 13 aa, Homo sapiens
  CDR3 for beta chain variable domain of TCR clone 56713 (TRBV19, TRBJ1-5)
CASSIGGNQPQHF

SEQ ID NO: 113427 - protein, 16 aa, Homo sapiens
  CDR3 for alpha chain variable domain of TCR clone 56714 (TRAV14/DV4, TRAJ54)
CAMREGRIQGAQKLVF

SEQ ID NO: 113428 - protein, 12 aa, Homo sapiens
  CDR3 for beta chain variable domain of TCR clone 56714 (TRBV11-2, TRBJ2-2)
CASSLGGGELFF

SEQ ID NO: 113429 - protein, 16 aa, Homo sapiens
  CDR3 for alpha chain variable domain of TCR clone 56715 (TRAV30, TRAJ24)
CGTEIVDADSWGKFQV

SEQ ID NO: 113430 - protein, 18 aa, Homo sapiens
  CDR3 for beta chain variable domain of TCR clone 56715 (TRBV7-9, TRBJ2-7)
CASSLTTSGSRTWYEQYF

SEQ ID NO: 113431 - protein, 12 aa, Homo sapiens
  CDR3 for alpha chain variable domain of TCR clone 56716 (TRAV1-1, TRAJ30)
CAVRGRDDKIIF

SEQ ID NO: 113432 - protein, 22 aa, Homo sapiens
  CDR3 for beta chain variable domain of TCR clone 56716 (TRBV6-1, TRBJ1-3)
CASVQGGGWKHHIFWRGKLAHC

SEQ ID NO: 113433 - protein, 12 aa, Homo sapiens
  CDR3 for alpha chain variable domain of TCR clone 56717 (TRAV13-1, TRAJ49)
CAASPMGNQFYL

SEQ ID NO: 113434 - protein, 13 aa, Homo sapiens
  CDR3 for beta chain variable domain of TCR clone 56717 (TRBV20-1, TRBJ2-2)
CSASAAGTGELFF

SEQ ID NO: 113435 - protein, 15 aa, Homo sapiens
  CDR3 for alpha chain variable domain of TCR clone 56718 (TRAV8-2, TRAJ16)
CVVSDGFSDGQKLLF

SEQ ID NO: 113436 - protein, 14 aa, Homo sapiens
  CDR3 for beta chain variable domain of TCR clone 56718 (TRBV7-3, TRBJ1-1)
RASSLGTGYTEAFF

SEQ ID NO: 113437 - protein, 15 aa, Homo sapiens
  CDR3 for alpha chain variable domain of TCR clone 56719 (TRAV23/DV6, TRAJ47)
CAASIRNGIWKKTGL

SEQ ID NO: 113438 - protein, 13 aa, Homo sapiens
  CDR3 for beta chain variable domain of TCR clone 56719 (TRBV19, TRBJ1-2)
CASSQGQVYGYTF

SEQ ID NO: 113439 - protein, 14 aa, Homo sapiens
  CDR3 for alpha chain variable domain of TCR clone 56720 (TRAV12-2, TRAJ13)
CAVKKTGGYQKVTF

SEQ ID NO: 113440 - protein, 17 aa, Homo sapiens
  CDR3 for beta chain variable domain of TCR clone 56720 (TRBV7-3, TRBJ2-3)
CASSPRGQGYGTDTQYF

SEQ ID NO: 113441 - protein, 12 aa, Homo sapiens
  CDR3 for alpha chain variable domain of TCR clone 56721 (TRAV2, TRAJ10)
CASTGGGNKLTF

SEQ ID NO: 113442 - protein, 14 aa, Homo sapiens
  CDR3 for beta chain variable domain of TCR clone 56721 (TRBV7-2, TRBJ2-2)
CASRGQGAVGELFF

SEQ ID NO: 113443 - protein, 22 aa, Homo sapiens
  CDR3 for alpha chain variable domain of TCR clone 56722 (TRAV27, TRAJ41)
CAVRTQIPDIQNPDPAVYRLRD

SEQ ID NO: 113444 - protein, 16 aa, Homo sapiens
  CDR3 for beta chain variable domain of TCR clone 56722 (TRBV5-1, TRBJ2-3)
CASSLGLTVYTDTQYF

SEQ ID NO: 113445 - protein, 15 aa, Homo sapiens
  CDR3 for alpha chain variable domain of TCR clone 56723 (TRAV8-3, TRAJ11)
CAVGLLNSGYNTLTF

SEQ ID NO: 113446 - protein, 16 aa, Homo sapiens
  CDR3 for beta chain variable domain of TCR clone 56723 (TRBV7-9, TRBJ1-2)
CASSLGFSSGEDGYTF

SEQ ID NO: 113447 - protein, 14 aa, Homo sapiens
  CDR3 for alpha chain variable domain of TCR clone 56724 (TRAV23/DV6, TRAJ17)
CAARGRAAGNKLTF

SEQ ID NO: 113448 - protein, 12 aa, Homo sapiens
  CDR3 for beta chain variable domain of TCR clone 56724 (TRBV7-9, TRBJ2-3)
RASSFITDTQYF

SEQ ID NO: 113449 - protein, 17 aa, Homo sapiens
  CDR3 for alpha chain variable domain of TCR clone 56725 (TRAV38-1, TRAJ28)
CAFMKPTSGAGSYQLTL

SEQ ID NO: 113450 - protein, 15 aa, Homo sapiens
  CDR3 for beta chain variable domain of TCR clone 56725 (TRBV5-1, TRBJ2-4)
CASSLGGGGSYIQYF

SEQ ID NO: 113451 - protein, 16 aa, Homo sapiens
  CDR3 for alpha chain variable domain of TCR clone 56726 (TRAV20, TRAJ16)
CAVQDKRFSDGQKLLF

SEQ ID NO: 113452 - protein, 15 aa, Homo sapiens
  CDR3 for beta chain variable domain of TCR clone 56726 (TRBV3-1, TRBJ2-1)
CASSQQPSGGNEQFF

SEQ ID NO: 113453 - protein, 15 aa, Homo sapiens
  CDR3 for alpha chain variable domain of TCR clone 56727 (TRAV13-1, TRAJ50)
CAAKGSETSYDKVIF

SEQ ID NO: 113454 - protein, 13 aa, Homo sapiens
  CDR3 for beta chain variable domain of TCR clone 56727 (TRBV20-1, TRBJ2-3)
CGARAGGRDTQYF

SEQ ID NO: 113455 - protein, 14 aa, Homo sapiens
  CDR3 for alpha chain variable domain of TCR clone 56728 (TRAV13-2, TRAJ17)
CAENSKAAGNKLTF

SEQ ID NO: 113456 - protein, 16 aa, Homo sapiens
  CDR3 for beta chain variable domain of TCR clone 56728 (TRBV24-1, TRBJ2-3)
CATSDPGTGATDTQYF

SEQ ID NO: 113457 - protein, 17 aa, Homo sapiens
  CDR3 for alpha chain variable domain of TCR clone 56729 (TRAV3, TRAJ42)
CAVRDRDYGGSQGNLIF

SEQ ID NO: 113458 - protein, 15 aa, Homo sapiens
  CDR3 for beta chain variable domain of TCR clone 56729 (TRBV20-1, TRBJ2-7)
CSAESGTSGAYEQYF

SEQ ID NO: 113459 - protein, 13 aa, Homo sapiens
  CDR3 for alpha chain variable domain of TCR clone 56730 (TRAV35, TRAJ44)
CAGLSGTASKLTS

SEQ ID NO: 113460 - protein, 17 aa, Homo sapiens
  CDR3 for beta chain variable domain of TCR clone 56730 (TRBV7-8, TRBJ1-2)
CASSLRPLQGHLYGYTF

SEQ ID NO: 113461 - protein, 12 aa, Homo sapiens
  CDR3 for alpha chain variable domain of TCR clone 56731 (TRAV20, TRAJ24)
CAVYNSWGELQF

SEQ ID NO: 113462 - protein, 15 aa, Homo sapiens
  CDR3 for beta chain variable domain of TCR clone 56731 (TRBV20-1, TRBJ2-5)
CSARVPPSGRETQYF

SEQ ID NO: 113463 - protein, 10 aa, Homo sapiens
  CDR3 for alpha chain variable domain of TCR clone 56732 (TRAV4, TRAJ29)
CLVGPRGLLS

SEQ ID NO: 113464 - protein, 15 aa, Homo sapiens
  CDR3 for beta chain variable domain of TCR clone 56732 (TRBV5-4, TRBJ2-5)
CASSFFGEGMETQYF

SEQ ID NO: 113465 - protein, 14 aa, Homo sapiens
  CDR3 for alpha chain variable domain of TCR clone 56733 (TRAV13-2, TRAJ17)
CAENSKAAGNKLTF

SEQ ID NO: 113466 - protein, 15 aa, Homo sapiens
  CDR3 for beta chain variable domain of TCR clone 56733 (TRBV27, TRBJ2-1)
CASSNGGGYSNEQFF

SEQ ID NO: 113467 - protein, 14 aa, Homo sapiens
  CDR3 for alpha chain variable domain of TCR clone 56734 (TRAV8-2, TRAJ37)
CVVSISGNTGKLIF

SEQ ID NO: 113468 - protein, 14 aa, Homo sapiens
  CDR3 for beta chain variable domain of TCR clone 56734 (TRBV19, TRBJ2-1)
CASPTFVLSGEQFF

SEQ ID NO: 113469 - protein, 14 aa, Homo sapiens
  CDR3 for alpha chain variable domain of TCR clone 56735 (TRAV13-1, TRAJ44)
CAAKATGTASKLTF

SEQ ID NO: 113470 - protein, 14 aa, Homo sapiens
  CDR3 for beta chain variable domain of TCR clone 56735 (TRBV19, TRBJ2-2)
CASSTLHRSGELFL

SEQ ID NO: 113471 - protein, 13 aa, Homo sapiens
  CDR3 for alpha chain variable domain of TCR clone 56736 (TRAV3, TRAJ21)
CAAREPDFNKFYF

SEQ ID NO: 113472 - protein, 14 aa, Homo sapiens
  CDR3 for beta chain variable domain of TCR clone 56736 (TRBV20-1, TRBJ1-1)
CSARAVNGYTEAFF

SEQ ID NO: 113473 - protein, 11 aa, Homo sapiens
  CDR3 for alpha chain variable domain of TCR clone 56737 (TRAV13-1, TRAJ6)
RATLGSYIPTF

SEQ ID NO: 113474 - protein, 12 aa, Homo sapiens
  CDR3 for beta chain variable domain of TCR clone 56737 (TRBV11-2, TRBJ2-1)
CASSPGNNEQFF

SEQ ID NO: 113475 - protein, 13 aa, Homo sapiens
  CDR3 for alpha chain variable domain of TCR clone 56738 (TRAV2, TRAJ15)
CAVVSQAGTALIF

SEQ ID NO: 113476 - protein, 16 aa, Homo sapiens
  CDR3 for beta chain variable domain of TCR clone 56738 (TRBV5-1, TRBJ1-1)
CASSSGGNSLNTEAFF

SEQ ID NO: 113477 - protein, 15 aa, Homo sapiens
  CDR3 for alpha chain variable domain of TCR clone 56739 (TRAV12-2, TRAJ57)
CAVSRGQGGSERLVF

SEQ ID NO: 113478 - protein, 14 aa, Homo sapiens
  CDR3 for beta chain variable domain of TCR clone 56739 (TRBV20-1, TRBJ2-1)
CSAHPGLPYNEQFF

SEQ ID NO: 113479 - protein, 12 aa, Homo sapiens
  CDR3 for alpha chain variable domain of TCR clone 56740 (TRAV4, TRAJ6)
CLAPGGSYIPIF

SEQ ID NO: 113480 - protein, 17 aa, Homo sapiens
  CDR3 for beta chain variable domain of TCR clone 56740 (TRBV20-1, TRBJ2-2)
CSASGSGQGGLTGELFF

SEQ ID NO: 113481 - protein, 14 aa, Homo sapiens
  CDR3 for alpha chain variable domain of TCR clone 56741 (TRAV1-2, TRAJ16)
CAVNRFSDGQRLLF

SEQ ID NO: 113482 - protein, 12 aa, Homo sapiens
  CDR3 for beta chain variable domain of TCR clone 56741 (TRBV28, TRBJ2-6)
CAIQAGANVLTF

SEQ ID NO: 113483 - protein, 14 aa, Homo sapiens
  CDR3 for alpha chain variable domain of TCR clone 56742 (TRAV26-1, TRAJ39)
CIVRGSRAGYMLTF

SEQ ID NO: 113484 - protein, 15 aa, Homo sapiens
  CDR3 for beta chain variable domain of TCR clone 56742 (TRBV7-9, TRBJ1-5)
CASSQGHQPNQPQHF

SEQ ID NO: 113485 - protein, 11 aa, Homo sapiens
  CDR3 for alpha chain variable domain of TCR clone 56743 (TRAV1-2, TRAJ31)
CAVNNNARLMF

SEQ ID NO: 113486 - protein, 15 aa, Homo sapiens
  CDR3 for beta chain variable domain of TCR clone 56743 (TRBV28, TRBJ2-1)
CASSMIAGGRSEQFF

SEQ ID NO: 113487 - protein, 15 aa, Homo sapiens
  CDR3 for alpha chain variable domain of TCR clone 56744 (TRAV3, TRAJ9)
CAVRARNTGGFKTIF

SEQ ID NO: 113488 - protein, 13 aa, Homo sapiens
  CDR3 for beta chain variable domain of TCR clone 56744 (TRBV10-3, TRBJ2-7)
CASKLAVNYEQYF

SEQ ID NO: 113489 - protein, 16 aa, Homo sapiens
  CDR3 for alpha chain variable domain of TCR clone 56745 (TRAV12-1, TRAJ43)
CVVNPHRFGAGTSLTV

SEQ ID NO: 113490 - protein, 16 aa, Homo sapiens
  CDR3 for beta chain variable domain of TCR clone 56745 (TRBV27, TRBJ2-2)
CASSSTGGGDTGELFF

SEQ ID NO: 113491 - protein, 13 aa, Homo sapiens
  CDR3 for alpha chain variable domain of TCR clone 56746 (TRAV27, TRAJ16)
CAGACSDGQKLLF

SEQ ID NO: 113492 - protein, 14 aa, Homo sapiens
  CDR3 for beta chain variable domain of TCR clone 56746 (TRBV11-2, TRBJ1-3)
CASNLAVPGNTIYF

SEQ ID NO: 113493 - protein, 14 aa, Homo sapiens
  CDR3 for alpha chain variable domain of TCR clone 56747 (TRAV12-3, TRAJ10)
SHLPLTGGGNKLIF

SEQ ID NO: 113494 - protein, 14 aa, Homo sapiens
  CDR3 for beta chain variable domain of TCR clone 56747 (TRBV7-2, TRBJ1-2)
CASSQTGSTYGYTF

SEQ ID NO: 113495 - protein, 14 aa, Homo sapiens
  CDR3 for alpha chain variable domain of TCR clone 56748 (TRAV8-4, TRAJ13)
YAVTLSGGYQKVTF

SEQ ID NO: 113496 - protein, 14 aa, Homo sapiens
  CDR3 for beta chain variable domain of TCR clone 56748 (TRBV7-2, TRBJ1-2)
CASSQTGSTYGYTF

SEQ ID NO: 113497 - protein, 12 aa, Homo sapiens
  CDR3 for alpha chain variable domain of TCR clone 56749 (TRAV12-2, TRAJ3)
CAVWSSASKLIF

SEQ ID NO: 113498 - protein, 12 aa, Homo sapiens
  CDR3 for beta chain variable domain of TCR clone 56749 (TRBV11-2, TRBJ2-1)
CASSPGNNEQFF

SEQ ID NO: 113499 - protein, 13 aa, Homo sapiens
  CDR3 for alpha chain variable domain of TCR clone 56750 (TRAV13-1, TRAJ6)
CAARRGGSYIPTF

SEQ ID NO: 113500 - protein, 14 aa, Homo sapiens
  CDR3 for beta chain variable domain of TCR clone 56750 (TRBV19, TRBJ2-1)
CASPTFVLSGEQFF

SEQ ID NO: 113501 - protein, 15 aa, Homo sapiens
  CDR3 for alpha chain variable domain of TCR clone 56751 (TRAV2, TRAJ44)
CAVEAYTGTASKLTF

SEQ ID NO: 113502 - protein, 17 aa, Homo sapiens
  CDR3 for beta chain variable domain of TCR clone 56751 (TRBV12-4, TRBJ2-1)
CASNPGLAGGRINEQFF

SEQ ID NO: 113503 - protein, 12 aa, Homo sapiens
  CDR3 for alpha chain variable domain of TCR clone 56752 (TRAV12-1, TRAJ40)
CVVYSGTYKYIF

SEQ ID NO: 113504 - protein, 18 aa, Homo sapiens
  CDR3 for beta chain variable domain of TCR clone 56752 (TRBV11-2, TRBJ2-1)
CASSLGGASRGAPNTQFF

SEQ ID NO: 113505 - protein, 14 aa, Homo sapiens
  CDR3 for alpha chain variable domain of TCR clone 56753 (TRAV1-2, TRAJ16)
CAVNRFSDGQKLLF

SEQ ID NO: 113506 - protein, 14 aa, Homo sapiens
  CDR3 for beta chain variable domain of TCR clone 56753 (TRBV11-3, TRBJ1-6)
CASSFSGGDSPLHF

SEQ ID NO: 113507 - protein, 11 aa, Homo sapiens
  CDR3 for alpha chain variable domain of TCR clone 56754 (TRAV35, TRAJ30)
CAPGGDDKIIF

SEQ ID NO: 113508 - protein, 13 aa, Homo sapiens
  CDR3 for beta chain variable domain of TCR clone 56754 (TRBV7-6, TRBJ2-1)
CRQLGGGADEQFF

SEQ ID NO: 113509 - protein, 12 aa, Homo sapiens
  CDR3 for alpha chain variable domain of TCR clone 56755 (TRAV12-3, TRAJ17)
CAMTLTGNNLTF

SEQ ID NO: 113510 - protein, 13 aa, Homo sapiens
  CDR3 for beta chain variable domain of TCR clone 56755 (TRBV27, TRBJ2-1)
CASRTLGVGEQFF

SEQ ID NO: 113511 - protein, 14 aa, Homo sapiens
  CDR3 for alpha chain variable domain of TCR clone 56756 (TRAV12-3, TRAJ42)
CAMNYGGSQGNLIF

SEQ ID NO: 113512 - protein, 15 aa, Homo sapiens
  CDR3 for beta chain variable domain of TCR clone 56756 (TRBV11-3, TRBJ2-2)
CASSLGGRPTGELFF

SEQ ID NO: 113513 - protein, 17 aa, Homo sapiens
  CDR3 for alpha chain variable domain of TCR clone 56757 (TRAV8-6, TRAJ58)
CAVSSWVGETSGSRLTF

SEQ ID NO: 113514 - protein, 14 aa, Homo sapiens
  CDR3 for beta chain variable domain of TCR clone 56757 (TRBV4-2, TRBJ2-1)
CAAGLDRAYNEQFF

SEQ ID NO: 113515 - protein, 15 aa, Homo sapiens
  CDR3 for alpha chain variable domain of TCR clone 56758 (TRAV3, TRAJ5)
CAVRDRKTGRRALTF

SEQ ID NO: 113516 - protein, 15 aa, Homo sapiens
  CDR3 for beta chain variable domain of TCR clone 56758 (TRBV7-8, TRBJ2-1)
CASSLAESLYNEQFF

SEQ ID NO: 113517 - protein, 16 aa, Homo sapiens
  CDR3 for alpha chain variable domain of TCR clone 56759 (TRAV16, TRAJ57)
CAPYLITQGGSEKLVC

SEQ ID NO: 113518 - protein, 17 aa, Homo sapiens
  CDR3 for beta chain variable domain of TCR clone 56759 (TRBV24-1, TRBJ2-4)
CATSDAEARGVRNIQYF

SEQ ID NO: 113519 - protein, 15 aa, Homo sapiens
  CDR3 for alpha chain variable domain of TCR clone 56760 (TRAV3, TRAJ22)
CAVRDRGGSARQPTF

SEQ ID NO: 113520 - protein, 15 aa, Homo sapiens
  CDR3 for beta chain variable domain of TCR clone 56760 (TRBV27, TRBJ2-1)
CASSNGGGSSNEQFF

SEQ ID NO: 113521 - protein, 15 aa, Homo sapiens
  CDR3 for alpha chain variable domain of TCR clone 56761 (TRAV3, TRAJ9)
CAVRARNTGGFKTIF

SEQ ID NO: 113522 - protein, 16 aa, Homo sapiens
  CDR3 for beta chain variable domain of TCR clone 56761 (TRBV10-3, TRBJ2-1)
CAISGVGDGGGGEQFF

SEQ ID NO: 113523 - protein, 17 aa, Homo sapiens
  CDR3 for alpha chain variable domain of TCR clone 56762 (TRAV38-2/DV8, TRAJ45)
CAYRSRYSGGGADGRTF

SEQ ID NO: 113524 - protein, 15 aa, Homo sapiens
  CDR3 for beta chain variable domain of TCR clone 56762 (TRBV19, TRBJ2-1)
CASIKGRGPYNEQFF

SEQ ID NO: 113525 - protein, 11 aa, Homo sapiens
  CDR3 for alpha chain variable domain of TCR clone 56763 (TRAV12-3, TRAJ43)
CTMSVSNDMRF

SEQ ID NO: 113526 - protein, 17 aa, Homo sapiens
  CDR3 for beta chain variable domain of TCR clone 56763 (TRBV7-8, TRBJ2-6)
CASSAGTGGAGANVLTF

SEQ ID NO: 113527 - protein, 13 aa, Homo sapiens
  CDR3 for alpha chain variable domain of TCR clone 56764 (TRAV2, TRAJ29)
CAAQNSGNTPLVF

SEQ ID NO: 113528 - protein, 14 aa, Homo sapiens
  CDR3 for beta chain variable domain of TCR clone 56764 (TRBV7-9, TRBJ2-4)
CAGSLAMGGNIQYF

SEQ ID NO: 113529 - protein, 18 aa, Homo sapiens
  CDR3 for alpha chain variable domain of TCR clone 56765 (TRAV26-2, TRAJ45)
CILRVDKYSGGGADGLTF

SEQ ID NO: 113530 - protein, 18 aa, Homo sapiens
  CDR3 for beta chain variable domain of TCR clone 56765 (TRBV20-1, TRBJ2-3)
CSASGLAGGPGTTDTQYF

SEQ ID NO: 113531 - protein, 13 aa, Homo sapiens
  CDR3 for alpha chain variable domain of TCR clone 56766 (TRAV17, TRAJ9)
CATGSTGGFKTIF

SEQ ID NO: 113532 - protein, 14 aa, Homo sapiens
  CDR3 for beta chain variable domain of TCR clone 56766 (TRBV7-8, TRBJ2-7)
CASTFRGGPSEQYF

SEQ ID NO: 113533 - protein, 12 aa, Homo sapiens
  CDR3 for alpha chain variable domain of TCR clone 56767 (TRAV2, TRAJ10)
CASTGGGNKLTF

SEQ ID NO: 113534 - protein, 14 aa, Homo sapiens
  CDR3 for beta chain variable domain of TCR clone 56767 (TRBV7-2, TRBJ2-2)
CASRGQGAAGELSF

SEQ ID NO: 113535 - protein, 16 aa, Homo sapiens
  CDR3 for alpha chain variable domain of TCR clone 56768 (TRAV3, TRAJ37)
CAVRGKGSGNTCKLIF

SEQ ID NO: 113536 - protein, 16 aa, Homo sapiens
  CDR3 for beta chain variable domain of TCR clone 56768 (TRBV12-4, TRBJ1-5)
CASSRPVGGSNQPQHF

SEQ ID NO: 113537 - protein, 13 aa, Homo sapiens
  CDR3 for alpha chain variable domain of TCR clone 56769 (TRAV2, TRAJ21)
CAVEDLNFNKFYF

SEQ ID NO: 113538 - protein, 15 aa, Homo sapiens
  CDR3 for beta chain variable domain of TCR clone 56769 (TRBV28, TRBJ2-5)
CASSPGQGSIESQYF

SEQ ID NO: 113539 - protein, 14 aa, Homo sapiens
  CDR3 for alpha chain variable domain of TCR clone 56770 (TRAV3, TRAJ6)
CAVRDGMGRRKLNT

SEQ ID NO: 113540 - protein, 15 aa, Homo sapiens
  CDR3 for beta chain variable domain of TCR clone 56770 (TRBV9, TRBJ2-1)
CASSLAGSSYNEQFF

SEQ ID NO: 113541 - protein, 16 aa, Homo sapiens
  CDR3 for alpha chain variable domain of TCR clone 56771 (TRAV3, TRAJ37)
CAVRGRGSGNTGKLIF

SEQ ID NO: 113542 - protein, 11 aa, Homo sapiens
  CDR3 for beta chain variable domain of TCR clone 56771 (TRBV11-2, TRBJ2-2)
CASSLPGELFF

SEQ ID NO: 113543 - protein, 15 aa, Homo sapiens
  CDR3 for alpha chain variable domain of TCR clone 56772 (TRAV21, TRAJ53)
CATLSSGGSNYKLTF

SEQ ID NO: 113544 - protein, 13 aa, Homo sapiens
  CDR3 for beta chain variable domain of TCR clone 56772 (TRBV4-1, TRBJ2-2)
CASSQENTGELFF

SEQ ID NO: 113545 - protein, 11 aa, Homo sapiens
  CDR3 for alpha chain variable domain of TCR clone 56773 (TRAV35, TRAJ30)
FAGPGDDKIIF

SEQ ID NO: 113546 - protein, 14 aa, Homo sapiens
  CDR3 for beta chain variable domain of TCR clone 56773 (TRBV7-6, TRBJ1-6)
CASSQAGGGSPLHF

SEQ ID NO: 113547 - protein, 12 aa, Homo sapiens
  CDR3 for alpha chain variable domain of TCR clone 56774 (TRAV17, TRAJ53)
CAGGGSKYKLTF

SEQ ID NO: 113548 - protein, 16 aa, Homo sapiens
  CDR3 for beta chain variable domain of TCR clone 56774 (TRBV11-2, TRBJ2-3)
CASSFQGRGALDTQYF

SEQ ID NO: 113549 - protein, 14 aa, Homo sapiens
  CDR3 for alpha chain variable domain of TCR clone 56775 (TRAV1-2, TRAJ8)
CAVREDTGFQKLVF

SEQ ID NO: 113550 - protein, 13 aa, Homo sapiens
  CDR3 for beta chain variable domain of TCR clone 56775 (TRBV11-2, TRBJ2-5)
CASSFSSQETQYF

SEQ ID NO: 113551 - protein, 15 aa, Homo sapiens
  CDR3 for alpha chain variable domain of TCR clone 56776 (TRAV3, TRAJ17)
CAVRDTGAAGNKLTF

SEQ ID NO: 113552 - protein, 14 aa, Homo sapiens
  CDR3 for beta chain variable domain of TCR clone 56776 (TRBV6-3, TRBJ1-1)
CASSNLLPGAEAVF

SEQ ID NO: 113553 - protein, 15 aa, Homo sapiens
  CDR3 for alpha chain variable domain of TCR clone 56777 (TRAV8-3, TRAJ40)
CAAPSLGSGTYKYIF

SEQ ID NO: 113554 - protein, 15 aa, Homo sapiens
  CDR3 for beta chain variable domain of TCR clone 56777 (TRBV27, TRBJ2-5)
CASSLYPRGGETQYF

SEQ ID NO: 113555 - protein, 14 aa, Homo sapiens
  CDR3 for alpha chain variable domain of TCR clone 56778 (TRAV26-1, TRAJ38)
CIADNAGNNRKLIW

SEQ ID NO: 113556 - protein, 15 aa, Homo sapiens
  CDR3 for beta chain variable domain of TCR clone 56778 (TRBV9, TRBJ2-1)
CASSLAGSSCNEQFF

SEQ ID NO: 113557 - protein, 14 aa, Homo sapiens
  CDR3 for alpha chain variable domain of TCR clone 56779 (TRAV1-2, TRAJ29)
CAVRELTSATPLVF

SEQ ID NO: 113558 - protein, 16 aa, Homo sapiens
  CDR3 for beta chain variable domain of TCR clone 56779 (TRBV7-2, TRBJ1-2)
CASSSNQDRRGHGYTF

SEQ ID NO: 113559 - protein, 14 aa, Homo sapiens
  CDR3 for alpha chain variable domain of TCR clone 56780 (TRAV12-1, TRAJ17)
CVVNYKAAGNKLTF

SEQ ID NO: 113560 - protein, 15 aa, Homo sapiens
  CDR3 for beta chain variable domain of TCR clone 56780 (TRBV7-6, TRBJ2-3)
CASSYLAGEADTRYF

SEQ ID NO: 113561 - protein, 13 aa, Homo sapiens
  CDR3 for alpha chain variable domain of TCR clone 56781 (TRAV8-3, TRAJ43)
CAVGPDNNNEMRF

SEQ ID NO: 113562 - protein, 12 aa, Homo sapiens
  CDR3 for beta chain variable domain of TCR clone 56781 (TRBV7-2, TRBJ1-6)
CASSLSSSPLHF

SEQ ID NO: 113563 - protein, 14 aa, Homo sapiens
  CDR3 for alpha chain variable domain of TCR clone 56782 (TRAV20, TRAJ22)
CAVALGGSARQLTF

SEQ ID NO: 113564 - protein, 15 aa, Homo sapiens
  CDR3 for beta chain variable domain of TCR clone 56782 (TRBV7-2, TRBJ1-1)
RASSFAGDRDTEAFF

SEQ ID NO: 113565 - protein, 14 aa, Homo sapiens
  CDR3 for alpha chain variable domain of TCR clone 56783 (TRAV13-2, TRAJ17)
CAENPKAAGNKLTF

SEQ ID NO: 113566 - protein, 11 aa, Homo sapiens
  CDR3 for beta chain variable domain of TCR clone 56783 (TRBV6-3, TRBJ2-3)
CATGQADTQYF

SEQ ID NO: 113567 - protein, 14 aa, Homo sapiens
  CDR3 for alpha chain variable domain of TCR clone 56784 (TRAV12-2, TRAJ15)
CAPHTGQAGTTLIF

SEQ ID NO: 113568 - protein, 14 aa, Homo sapiens
  CDR3 for beta chain variable domain of TCR clone 56784 (TRBV6-1, TRBJ1-3)
CASVQGGGGNTIYF

SEQ ID NO: 113569 - protein, 18 aa, Homo sapiens
  CDR3 for alpha chain variable domain of TCR clone 56785 (TRAV26-2, TRAJ54)
CILRDVEVGIQGAQKLVF

SEQ ID NO: 113570 - protein, 17 aa, Homo sapiens
  CDR3 for beta chain variable domain of TCR clone 56785 (TRBV11-2, TRBJ2-1)
CASSLYPPGVEYNEQFF

SEQ ID NO: 113571 - protein, 18 aa, Homo sapiens
  CDR3 for alpha chain variable domain of TCR clone 56786 (TRAV13-1, TRAJ52)
CAASKRSAGGTSYGKLTF

SEQ ID NO: 113572 - protein, 13 aa, Homo sapiens
  CDR3 for beta chain variable domain of TCR clone 56786 (TRBV12-4, TRBJ1-2)
CASSLRQGKGYTY

SEQ ID NO: 113573 - protein, 13 aa, Homo sapiens
  CDR3 for alpha chain variable domain of TCR clone 56787 (TRAV1-2, TRAJ20)
CAVRDGNDYKLSF

SEQ ID NO: 113574 - protein, 16 aa, Homo sapiens
  CDR3 for beta chain variable domain of TCR clone 56787 (TRBV12-4, TRBJ1-5)
CASSRPVGGSNQPQHF

SEQ ID NO: 113575 - protein, 15 aa, Homo sapiens
  CDR3 for alpha chain variable domain of TCR clone 56788 (TRAV8-3, TRAJ45)
CASSYSGGGADGLTF

SEQ ID NO: 113576 - protein, 13 aa, Homo sapiens
  CDR3 for beta chain variable domain of TCR clone 56788 (TRBV20-1, TRBJ2-2)
CSASAAGTVELFF

SEQ ID NO: 113577 - protein, 12 aa, Homo sapiens
  CDR3 for alpha chain variable domain of TCR clone 56789 (TRAV12-3, TRAJ17)
CAMTLTGNKLTF

SEQ ID NO: 113578 - protein, 16 aa, Homo sapiens
  CDR3 for beta chain variable domain of TCR clone 56789 (TRBV2, TRBJ2-7)
CASSEPWTGPSYEQYF

SEQ ID NO: 113579 - protein, 13 aa, Homo sapiens
  CDR3 for alpha chain variable domain of TCR clone 56790 (TRAV21, TRAJ57)
CAVTQGGSEKLVF

SEQ ID NO: 113580 - protein, 16 aa, Homo sapiens
  CDR3 for beta chain variable domain of TCR clone 56790 (TRBV29-1, TRBJ2-7)
CSVEDAEDGTAYERYF

SEQ ID NO: 113581 - protein, 17 aa, Homo sapiens
  CDR3 for alpha chain variable domain of TCR clone 56791 (TRAV26-1, TRAJ37)
CIVRVITVSGNTGKLIF

SEQ ID NO: 113582 - protein, 14 aa, Homo sapiens
  CDR3 for beta chain variable domain of TCR clone 56791 (TRBV19, TRBJ2-1)
CASPTFVLSGEQFF

SEQ ID NO: 113583 - protein, 14 aa, Homo sapiens
  CDR3 for alpha chain variable domain of TCR clone 56792 (TRAV16, TRAJ37)
CALDISGNTGNLIF

SEQ ID NO: 113584 - protein, 14 aa, Homo sapiens
  CDR3 for beta chain variable domain of TCR clone 56792 (TRBV7-6, TRBJ2-7)
CASSFRQGADEQYF

SEQ ID NO: 113585 - protein, 11 aa, Homo sapiens
  CDR3 for alpha chain variable domain of TCR clone 56793 (TRAV21, TRAJ11)
CAVNGYSTLTF

SEQ ID NO: 113586 - protein, 13 aa, Homo sapiens
  CDR3 for beta chain variable domain of TCR clone 56793 (TRBV18, TRBJ2-3)
CASSTGRTDTQYF

SEQ ID NO: 113587 - protein, 15 aa, Homo sapiens
  CDR3 for alpha chain variable domain of TCR clone 56794 (TRAV8-3, TRAJ11)
CAVGLLTSGYSTLTF

SEQ ID NO: 113588 - protein, 16 aa, Homo sapiens
  CDR3 for beta chain variable domain of TCR clone 56794 (TRBV7-9, TRBJ1-2)
CASSLGFSSGEDGYTF

SEQ ID NO: 113589 - protein, 11 aa, Homo sapiens
  CDR3 for alpha chain variable domain of TCR clone 56795 (TRAV3, TRAJ21)
CAVGNFNEFYF

SEQ ID NO: 113590 - protein, 16 aa, Homo sapiens
  CDR3 for beta chain variable domain of TCR clone 56795 (TRBV19, TRBJ2-1)
CANSKAGPSSYNEQFF

SEQ ID NO: 113591 - protein, 13 aa, Homo sapiens
  CDR3 for alpha chain variable domain of TCR clone 56796 (TRAV27, TRAJ45)
CRSSGGGADGLTF

SEQ ID NO: 113592 - protein, 14 aa, Homo sapiens
  CDR3 for beta chain variable domain of TCR clone 56796 (TRBV18, TRBJ2-7)
CASSPRGGAYEQYF

SEQ ID NO: 113593 - protein, 13 aa, Homo sapiens
  CDR3 for alpha chain variable domain of TCR clone 56797 (TRAV38-2/DV8, TRAJ34)
CAYRTWNTDKPIF

SEQ ID NO: 113594 - protein, 17 aa, Homo sapiens
  CDR3 for beta chain variable domain of TCR clone 56797 (TRBV4-1, TRBJ2-3)
CASSQGYVSGGTDTQYF

SEQ ID NO: 113595 - protein, 14 aa, Homo sapiens
  CDR3 for alpha chain variable domain of TCR clone 56798 (TRAV9-2, TRAJ39)
CALYIYNAGNMLTF

SEQ ID NO: 113596 - protein, 14 aa, Homo sapiens
  CDR3 for beta chain variable domain of TCR clone 56798 (TRBV7-9, TRBJ2-1)
CASSPRDSPYEQFF

SEQ ID NO: 113597 - protein, 15 aa, Homo sapiens
  CDR3 for alpha chain variable domain of TCR clone 56799 (TRAV8-2, TRAJ40)
CVVLGTTSGTYKHIF

SEQ ID NO: 113598 - protein, 16 aa, Homo sapiens
  CDR3 for beta chain variable domain of TCR clone 56799 (TRBV7-3, TRBJ2-1)
CASSLEGYRSYNEQFF

SEQ ID NO: 113599 - protein, 18 aa, Homo sapiens
  CDR3 for alpha chain variable domain of TCR clone 56800 (TRAV21, TRAJ52)
CAVRPSPAGGTSSGKLTF

SEQ ID NO: 113600 - protein, 14 aa, Homo sapiens
  CDR3 for beta chain variable domain of TCR clone 56800 (TRBV4-1, TRBJ2-2)
CASSQAVNTGELFF

SEQ ID NO: 113601 - protein, 13 aa, Homo sapiens
  CDR3 for alpha chain variable domain of TCR clone 56801 (TRAV13-2, TRAJ48)
CAEMDFGNEKLTF

SEQ ID NO: 113602 - protein, 13 aa, Homo sapiens
  CDR3 for beta chain variable domain of TCR clone 56801 (TRBV19, TRBJ2-1)
CASSMYRVNEQFF

SEQ ID NO: 113603 - protein, 18 aa, Homo sapiens
  CDR3 for alpha chain variable domain of TCR clone 56802 (TRAV8-3, TRAJ4)
WVRDPTSNDPGGYNKLIF

SEQ ID NO: 113604 - protein, 13 aa, Homo sapiens
  CDR3 for beta chain variable domain of TCR clone 56802 (TRBV10-3, TRBJ2-7)
CASKLAVNYEQYF

SEQ ID NO: 113605 - protein, 11 aa, Homo sapiens
  CDR3 for alpha chain variable domain of TCR clone 56803 (TRAV1-1, TRAJ23)
CAVRQGGKLIF

SEQ ID NO: 113606 - protein, 15 aa, Homo sapiens
  CDR3 for beta chain variable domain of TCR clone 56803 (TRBV4-1, TRBJ2-7)
RASSQNTGRLYEQYF

SEQ ID NO: 113607 - protein, 17 aa, Homo sapiens
  CDR3 for alpha chain variable domain of TCR clone 56804 (TRAV12-2, TRAJ53)
CAPLTDSQEGSNYKLTF

SEQ ID NO: 113608 - protein, 16 aa, Homo sapiens
  CDR3 for beta chain variable domain of TCR clone 56804 (TRBV20-1, TRBJ2-3)
CSAVRDRGPIAGTQYF

SEQ ID NO: 113609 - protein, 14 aa, Homo sapiens
  CDR3 for alpha chain variable domain of TCR clone 56805 (TRAV12-3, TRAJ56)
CAMSVTGANSKMTF

SEQ ID NO: 113610 - protein, 17 aa, Homo sapiens
  CDR3 for beta chain variable domain of TCR clone 56805 (TRBV20-1, TRBJ2-3)
CSASLLGRGGSADTQYF

SEQ ID NO: 113611 - protein, 16 aa, Homo sapiens
  CDR3 for alpha chain variable domain of TCR clone 56806 (TRAV3, TRAJ21)
CAVRDIERGNFNKLYF

SEQ ID NO: 113612 - protein, 13 aa, Homo sapiens
  CDR3 for beta chain variable domain of TCR clone 56806 (TRBV4-2, TRBJ1-1)
CASSQAGNTEAFF

SEQ ID NO: 113613 - protein, 12 aa, Homo sapiens
  CDR3 for alpha chain variable domain of TCR clone 56807 (TRAV20, TRAJ54)
CAVQEGAQKLVF

SEQ ID NO: 113614 - protein, 17 aa, Homo sapiens
  CDR3 for beta chain variable domain of TCR clone 56807 (TRBV13, TRBJ2-3)
WASSLSRVAGGRNTQYF

SEQ ID NO: 113615 - protein, 13 aa, Homo sapiens
  CDR3 for alpha chain variable domain of TCR clone 56808 (TRAV12-1, TRAJ9)
CVVLNTGGFKTIF

SEQ ID NO: 113616 - protein, 13 aa, Homo sapiens
  CDR3 for beta chain variable domain of TCR clone 56808 (TRBV20-1, TRBJ1-1)
CSARGGGNTEAVF

SEQ ID NO: 113617 - protein, 14 aa, Homo sapiens
  CDR3 for alpha chain variable domain of TCR clone 56809 (TRAV2, TRAJ9)
CAVEDRSGGFKTIF

SEQ ID NO: 113618 - protein, 14 aa, Homo sapiens
  CDR3 for beta chain variable domain of TCR clone 56809 (TRBV11-2, TRBJ2-7)
CASSLGAGAYEQYF

SEQ ID NO: 113619 - protein, 10 aa, Homo sapiens
  CDR3 for alpha chain variable domain of TCR clone 56810 (TRAV2, TRAJ15)
RGQAGTALIF

SEQ ID NO: 113620 - protein, 13 aa, Homo sapiens
  CDR3 for beta chain variable domain of TCR clone 56810 (TRBV27, TRBJ2-1)
RASRTLGVGEQFF

SEQ ID NO: 113621 - protein, 14 aa, Homo sapiens
  CDR3 for alpha chain variable domain of TCR clone 56811 (TRAV13-1, TRAJ22)
CAASYSGSARRLTF

SEQ ID NO: 113622 - protein, 13 aa, Homo sapiens
  CDR3 for beta chain variable domain of TCR clone 56811 (TRBV6-3, TRBJ1-2)
CASSLTGDYGYTF

SEQ ID NO: 113623 - protein, 14 aa, Homo sapiens
  CDR3 for alpha chain variable domain of TCR clone 56812 (TRAV20, TRAJ29)
CAVQAWVGNTPLVF

SEQ ID NO: 113624 - protein, 15 aa, Homo sapiens
  CDR3 for beta chain variable domain of TCR clone 56812 (TRBV29-1, TRBJ2-7)
RSVEFFDRGSYEQYF

SEQ ID NO: 113625 - protein, 15 aa, Homo sapiens
  CDR3 for alpha chain variable domain of TCR clone 56813 (TRAV23/DV6, TRAJ18)
CAARYRGSTLWRLYF

SEQ ID NO: 113626 - protein, 13 aa, Homo sapiens
  CDR3 for beta chain variable domain of TCR clone 56813 (TRBV7-2, TRBJ2-7)
CASSSPSGSEQYF

SEQ ID NO: 113627 - protein, 16 aa, Homo sapiens
  CDR3 for alpha chain variable domain of TCR clone 56814 (TRAV12-1, TRAJ42)
CVLTPYYGGSQGNLIF

SEQ ID NO: 113628 - protein, 18 aa, Homo sapiens
  CDR3 for beta chain variable domain of TCR clone 56814 (TRBV24-1, TRBJ2-3)
CATSDLPRLAGGADTQYF

SEQ ID NO: 113629 - protein, 12 aa, Homo sapiens
  CDR3 for alpha chain variable domain of TCR clone 56815 (TRAV12-3, TRAJ17)
CAMALTGNKLTF

SEQ ID NO: 113630 - protein, 15 aa, Homo sapiens
  CDR3 for beta chain variable domain of TCR clone 56815 (TRBV11-3, TRBJ2-7)
CASSPGPASSYEQYF

SEQ ID NO: 113631 - protein, 15 aa, Homo sapiens
  CDR3 for alpha chain variable domain of TCR clone 56816 (TRAV2, TRAJ9)
CAVAALNTGGFKTIF

SEQ ID NO: 113632 - protein, 14 aa, Homo sapiens
  CDR3 for beta chain variable domain of TCR clone 56816 (TRBV7-8, TRBJ2-5)
CASSATGGQGTQYF

SEQ ID NO: 113633 - protein, 15 aa, Homo sapiens
  CDR3 for alpha chain variable domain of TCR clone 56817 (TRAV3, TRAJ4)
CAQNMFSGGYNKLIF

SEQ ID NO: 113634 - protein, 16 aa, Homo sapiens
  CDR3 for beta chain variable domain of TCR clone 56817 (TRBV3-1, TRBJ1-6)
CASSQEFQGSYSPLHL

SEQ ID NO: 113635 - protein, 14 aa, Homo sapiens
  CDR3 for alpha chain variable domain of TCR clone 56818 (TRAV30, TRAJ33)
CGTVAPRSNYQLIW

SEQ ID NO: 113636 - protein, 14 aa, Homo sapiens
  CDR3 for beta chain variable domain of TCR clone 56818 (TRBV7-2, TRBJ2-7)
CASSLPPGQGPQYF

SEQ ID NO: 113637 - protein, 14 aa, Homo sapiens
  CDR3 for alpha chain variable domain of TCR clone 56819 (TRAV1-2, TRAJ8)
CAVREDTGFQKLVF

SEQ ID NO: 113638 - protein, 12 aa, Homo sapiens
  CDR3 for beta chain variable domain of TCR clone 56819 (TRBV2, TRBJ2-1)
CAYGPPDNEQFF

SEQ ID NO: 113639 - protein, 11 aa, Homo sapiens
  CDR3 for alpha chain variable domain of TCR clone 56820 (TRAV2, TRAJ33)
CAVVSNYQLIW

SEQ ID NO: 113640 - protein, 15 aa, Homo sapiens
  CDR3 for beta chain variable domain of TCR clone 56820 (TRBV19, TRBJ1-2)
CASSVGQVLNYGYTF

SEQ ID NO: 113641 - protein, 17 aa, Homo sapiens
  CDR3 for alpha chain variable domain of TCR clone 56821 (TRAV3, TRAJ37)
CAVSVYLGSSNTGKLIF

SEQ ID NO: 113642 - protein, 14 aa, Homo sapiens
  CDR3 for beta chain variable domain of TCR clone 56821 (TRBV19, TRBJ2-5)
CASSMTGQQETQYF

SEQ ID NO: 113643 - protein, 10 aa, Homo sapiens
  CDR3 for alpha chain variable domain of TCR clone 56822 (TRAV26-1, TRAJ22)
CIVSLNFFWF

SEQ ID NO: 113644 - protein, 15 aa, Homo sapiens
  CDR3 for beta chain variable domain of TCR clone 56822 (TRBV4-2, TRBJ1-2)
CASSQRTGGRDGDTF

SEQ ID NO: 113645 - protein, 12 aa, Homo sapiens
  CDR3 for alpha chain variable domain of TCR clone 56823 (TRAV16, TRAJ13)
CITLRGYQKVTF

SEQ ID NO: 113646 - protein, 17 aa, Homo sapiens
  CDR3 for beta chain variable domain of TCR clone 56823 (TRBV28, TRBJ2-5)
CASSRQGGPAGAETQYF

SEQ ID NO: 113647 - protein, 19 aa, Homo sapiens
  CDR3 for alpha chain variable domain of TCR clone 56824 (TRAV3, TRAJ37)
CAVIDIVGGYPSNTGKLIF

SEQ ID NO: 113648 - protein, 14 aa, Homo sapiens
  CDR3 for beta chain variable domain of TCR clone 56824 (TRBV7-8, TRBJ2-3)
CASSLEAGTDTQYF

SEQ ID NO: 113649 - protein, 15 aa, Homo sapiens
  CDR3 for alpha chain variable domain of TCR clone 56825 (TRAV3, TRAJ20)
CAVRDIKLSDYKLSC

SEQ ID NO: 113650 - protein, 15 aa, Homo sapiens
  CDR3 for beta chain variable domain of TCR clone 56825 (TRBV7-9, TRBJ1-6)
CASSSPGRGNSPLHF

SEQ ID NO: 113651 - protein, 12 aa, Homo sapiens
  CDR3 for alpha chain variable domain of TCR clone 56826 (TRAV36/DV7, TRAJ54)
CAVVRGALKLVF

SEQ ID NO: 113652 - protein, 14 aa, Homo sapiens
  CDR3 for beta chain variable domain of TCR clone 56826 (TRBV7-3, TRBJ1-1)
CASSLKGGNTEAFF

SEQ ID NO: 113653 - protein, 14 aa, Homo sapiens
  CDR3 for alpha chain variable domain of TCR clone 56827 (TRAV1-2, TRAJ8)
CAVREDTGFQKLVF

SEQ ID NO: 113654 - protein, 12 aa, Homo sapiens
  CDR3 for beta chain variable domain of TCR clone 56827 (TRBV2, TRBJ2-1)
CAYGPTGNEQFF

SEQ ID NO: 113655 - protein, 13 aa, Homo sapiens
  CDR3 for alpha chain variable domain of TCR clone 56828 (TRAV3, TRAJ15)
CAVRDQAGTALIF

SEQ ID NO: 113656 - protein, 15 aa, Homo sapiens
  CDR3 for beta chain variable domain of TCR clone 56828 (TRBV11-1, TRBJ2-7)
CTSSLNYGASYEQYF

SEQ ID NO: 113657 - protein, 14 aa, Homo sapiens
  CDR3 for alpha chain variable domain of TCR clone 56829 (TRAV4, TRAJ17)
CLVGLQAAGNKLTF

SEQ ID NO: 113658 - protein, 19 aa, Homo sapiens
  CDR3 for beta chain variable domain of TCR clone 56829 (TRBV6-5, TRBJ2-1)
CASRSGGLAGESSYNEQFF

SEQ ID NO: 113659 - protein, 13 aa, Homo sapiens
  CDR3 for alpha chain variable domain of TCR clone 56830 (TRAV12-3, TRAJ9)
CAMRNTGGFKTII

SEQ ID NO: 113660 - protein, 15 aa, Homo sapiens
  CDR3 for beta chain variable domain of TCR clone 56830 (TRBV20-1, TRBJ2-7)
CSARDRVSGMDEQYF

SEQ ID NO: 113661 - protein, 15 aa, Homo sapiens
  CDR3 for alpha chain variable domain of TCR clone 56831 (TRAV8-3, TRAJ41)
CAVGSNSNSVYALNF

SEQ ID NO: 113662 - protein, 17 aa, Homo sapiens
  CDR3 for beta chain variable domain of TCR clone 56831 (TRBV25-1, TRBJ2-1)
CASSAYGQGRGVYEQFF

SEQ ID NO: 113663 - protein, 14 aa, Homo sapiens
  CDR3 for alpha chain variable domain of TCR clone 56832 (TRAV9-2, TRAJ39)
CALYIYNAGNMLTF

SEQ ID NO: 113664 - protein, 13 aa, Homo sapiens
  CDR3 for beta chain variable domain of TCR clone 56832 (TRBV2, TRBJ2-3)
CASILAGGQGQYF

SEQ ID NO: 113665 - protein, 12 aa, Homo sapiens
  CDR3 for alpha chain variable domain of TCR clone 56833 (TRAV1-1, TRAJ24)
CAVRGSWGKFQF

SEQ ID NO: 113666 - protein, 12 aa, Homo sapiens
  CDR3 for beta chain variable domain of TCR clone 56833 (TRBV24-1, TRBJ1-1)
CATLYPDTEAFF

SEQ ID NO: 113667 - protein, 17 aa, Homo sapiens
  CDR3 for alpha chain variable domain of TCR clone 56834 (TRAV13-1, TRAJ52)
CAASSGAGGTSYGKLTF

SEQ ID NO: 113668 - protein, 15 aa, Homo sapiens
  CDR3 for beta chain variable domain of TCR clone 56834 (TRBV2, TRBJ2-1)
CASGELAGSYNEQFF

SEQ ID NO: 113669 - protein, 10 aa, Homo sapiens
  CDR3 for alpha chain variable domain of TCR clone 56835 (TRAV26-2, TRAJ45)
IGGGADGLTF

SEQ ID NO: 113670 - protein, 20 aa, Homo sapiens
  CDR3 for beta chain variable domain of TCR clone 56835 (TRBV28, TRBJ2-1)
CASTPIGRSPGLAGGNEQFF

SEQ ID NO: 113671 - protein, 12 aa, Homo sapiens
  CDR3 for alpha chain variable domain of TCR clone 56836 (TRAV13-1, TRAJ15)
CAASQAGTALIF

SEQ ID NO: 113672 - protein, 14 aa, Homo sapiens
  CDR3 for beta chain variable domain of TCR clone 56836 (TRBV19, TRBJ2-2)
CASSTLNRSGELFF

SEQ ID NO: 113673 - protein, 11 aa, Homo sapiens
  CDR3 for alpha chain variable domain of TCR clone 56837 (TRAV22, TRAJ49)
CAVLTGNQFYF

SEQ ID NO: 113674 - protein, 11 aa, Homo sapiens
  CDR3 for beta chain variable domain of TCR clone 56837 (TRBV5-7, TRBJ2-1)
CASSLGGEQFF

SEQ ID NO: 113675 - protein, 14 aa, Homo sapiens
  CDR3 for alpha chain variable domain of TCR clone 56838 (TRAV1-2, TRAJ16)
CAVNRFSDGQKLLF

SEQ ID NO: 113676 - protein, 15 aa, Homo sapiens
  CDR3 for beta chain variable domain of TCR clone 56838 (TRBV5-1, TRBJ2-6)
CASSLDPSGANVLTF

SEQ ID NO: 113677 - protein, 12 aa, Homo sapiens
  CDR3 for alpha chain variable domain of TCR clone 56839 (TRAV21, TRAJ33)
CAKMDSNYQLIW

SEQ ID NO: 113678 - protein, 17 aa, Homo sapiens
  CDR3 for beta chain variable domain of TCR clone 56839 (TRBV20-1, TRBJ2-1)
CSASSSGLAGSYNEQFF

SEQ ID NO: 113679 - protein, 13 aa, Homo sapiens
  CDR3 for alpha chain variable domain of TCR clone 56840 (TRAV12-1, TRAJ26)
CVVRRNYGQNFVF

SEQ ID NO: 113680 - protein, 19 aa, Homo sapiens
  CDR3 for beta chain variable domain of TCR clone 56840 (TRBV25-1, TRBJ2-2)
CAILVYRVDRGRKTGELFF

SEQ ID NO: 113681 - protein, 14 aa, Homo sapiens
  CDR3 for alpha chain variable domain of TCR clone 56841 (TRAV1-2, TRAJ16)
CAVNRVSDGQKLLF

SEQ ID NO: 113682 - protein, 13 aa, Homo sapiens
  CDR3 for beta chain variable domain of TCR clone 56841 (TRBV7-3, TRBJ1-1)
CASSQDWGAEAFF

SEQ ID NO: 113683 - protein, 17 aa, Homo sapiens
  CDR3 for alpha chain variable domain of TCR clone 56842 (TRAV3, TRAJ6)
FAARDGPRAGGSYIPTF

SEQ ID NO: 113684 - protein, 20 aa, Homo sapiens
  CDR3 for beta chain variable domain of TCR clone 56842 (TRBV28, TRBJ2-1)
CASTPIGRSPGLAGGNEQFF

SEQ ID NO: 113685 - protein, 14 aa, Homo sapiens
  CDR3 for alpha chain variable domain of TCR clone 56843 (TRAV41, TRAJ42)
CAVSPRGSQGNLIF

SEQ ID NO: 113686 - protein, 14 aa, Homo sapiens
  CDR3 for beta chain variable domain of TCR clone 56843 (TRBV11-2, TRBJ2-7)
CASSLGAGAYEQYF

SEQ ID NO: 113687 - protein, 15 aa, Homo sapiens
  CDR3 for alpha chain variable domain of TCR clone 56844 (TRAV12-2, TRAJ43)
CAFDMRFGAGTRLTV

SEQ ID NO: 113688 - protein, 13 aa, Homo sapiens
  CDR3 for beta chain variable domain of TCR clone 56844 (TRBV20-1, TRBJ2-5)
CSARGDYQETQYF

SEQ ID NO: 113689 - protein, 14 aa, Homo sapiens
  CDR3 for alpha chain variable domain of TCR clone 56845 (TRAV1-2, TRAJ8)
CAVREDTGFQQLVF

SEQ ID NO: 113690 - protein, 15 aa, Homo sapiens
  CDR3 for beta chain variable domain of TCR clone 56845 (TRBV12-4, TRBJ2-5)
CASSPPTGLQETQYF

SEQ ID NO: 113691 - protein, 12 aa, Homo sapiens
  CDR3 for alpha chain variable domain of TCR clone 56846 (TRAV17, TRAJ30)
CVPERRDDKSIF

SEQ ID NO: 113692 - protein, 14 aa, Homo sapiens
  CDR3 for beta chain variable domain of TCR clone 56846 (TRBV7-7, TRBJ2-2)
CASSRDRSTGELFF

SEQ ID NO: 113693 - protein, 16 aa, Homo sapiens
  CDR3 for alpha chain variable domain of TCR clone 56847 (TRAV12-2, TRAJ28)
CAVITDSGAGGYQLTF

SEQ ID NO: 113694 - protein, 14 aa, Homo sapiens
  CDR3 for beta chain variable domain of TCR clone 56847 (TRBV25-1, TRBJ1-1)
CASTHLGGNTEAFF

SEQ ID NO: 113695 - protein, 15 aa, Homo sapiens
  CDR3 for alpha chain variable domain of TCR clone 56848 (TRAV26-1, TRAJ23)
RIVRVAGYQGGKLIF

SEQ ID NO: 113696 - protein, 12 aa, Homo sapiens
  CDR3 for beta chain variable domain of TCR clone 56848 (TRBV7-2, TRBJ2-5)
CASSQYQETQYF

SEQ ID NO: 113697 - protein, 14 aa, Homo sapiens
  CDR3 for alpha chain variable domain of TCR clone 56849 (TRAV35, TRAJ22)
CAGLRPGSARQLTF

SEQ ID NO: 113698 - protein, 14 aa, Homo sapiens
  CDR3 for beta chain variable domain of TCR clone 56849 (TRBV12-4, TRBJ1-1)
CASSFDRVNTEAFF

SEQ ID NO: 113699 - protein, 16 aa, Homo sapiens
  CDR3 for alpha chain variable domain of TCR clone 56850 (TRAV17, TRAJ53)
CATDALSGGSNYKLTF

SEQ ID NO: 113700 - protein, 12 aa, Homo sapiens
  CDR3 for beta chain variable domain of TCR clone 56850 (TRBV5-1, TRBJ2-7)
CASSCRGYEQYF

SEQ ID NO: 113701 - protein, 12 aa, Homo sapiens
  CDR3 for alpha chain variable domain of TCR clone 56851 (TRAV23/DV6, TRAJ16)
CAATGTGQKLLF

SEQ ID NO: 113702 - protein, 13 aa, Homo sapiens
  CDR3 for beta chain variable domain of TCR clone 56851 (TRBV7-3, TRBJ1-1)
CASSQDWGAEAFF

SEQ ID NO: 113703 - protein, 16 aa, Homo sapiens
  CDR3 for alpha chain variable domain of TCR clone 56852 (TRAV30, TRAJ24)
CGTEIVDADSWGKFQF

SEQ ID NO: 113704 - protein, 14 aa, Homo sapiens
  CDR3 for beta chain variable domain of TCR clone 56852 (TRBV2, TRBJ1-2)
CASSEGGRNYGYTF

SEQ ID NO: 113705 - protein, 14 aa, Homo sapiens
  CDR3 for alpha chain variable domain of TCR clone 56853 (TRAV1-2, TRAJ16)
CAVNRSSDGQKLLF

SEQ ID NO: 113706 - protein, 14 aa, Homo sapiens
  CDR3 for beta chain variable domain of TCR clone 56853 (TRBV7-3, TRBJ1-1)
CASSLKGGNTEAFF

SEQ ID NO: 113707 - protein, 15 aa, Homo sapiens
  CDR3 for alpha chain variable domain of TCR clone 56854 (TRAV35, TRAJ23)
CAGPLGNNQGGKRIF

SEQ ID NO: 113708 - protein, 14 aa, Homo sapiens
  CDR3 for beta chain variable domain of TCR clone 56854 (TRBV7-9, TRBJ1-1)
CASTPLQSYTEAFF

SEQ ID NO: 113709 - protein, 13 aa, Homo sapiens
  CDR3 for alpha chain variable domain of TCR clone 56855 (TRAV3, TRAJ15)
CAVRDQAGTALIF

SEQ ID NO: 113710 - protein, 15 aa, Homo sapiens
  CDR3 for beta chain variable domain of TCR clone 56855 (TRBV11-1, TRBJ2-7)
CASSWNYGASYEQYF

SEQ ID NO: 113711 - protein, 12 aa, Homo sapiens
  CDR3 for alpha chain variable domain of TCR clone 56856 (TRAV8-3, TRAJ22)
FGGQSSARQLTF

SEQ ID NO: 113712 - protein, 15 aa, Homo sapiens
  CDR3 for beta chain variable domain of TCR clone 56856 (TRBV28, TRBJ1-3)
CASSMGWASGNTIYF

SEQ ID NO: 113713 - protein, 13 aa, Homo sapiens
  CDR3 for alpha chain variable domain of TCR clone 56857 (TRAV17, TRAJ9)
CATDYTGGFKTIF

SEQ ID NO: 113714 - protein, 14 aa, Homo sapiens
  CDR3 for beta chain variable domain of TCR clone 56857 (TRBV19, TRBJ2-5)
CDSSMTGQQETQYF

SEQ ID NO: 113715 - protein, 15 aa, Homo sapiens
  CDR3 for alpha chain variable domain of TCR clone 56858 (TRAV27, TRAJ38)
CAALRNAGNNRKLIW

SEQ ID NO: 113716 - protein, 15 aa, Homo sapiens
  CDR3 for beta chain variable domain of TCR clone 56858 (TRBV5-1, TRBJ2-1)
CASSPPRAPYNEQFF

SEQ ID NO: 113717 - protein, 13 aa, Homo sapiens
  CDR3 for alpha chain variable domain of TCR clone 56859 (TRAV8-3, TRAJ36)
CAVGAPGANNLFF

SEQ ID NO: 113718 - protein, 15 aa, Homo sapiens
  CDR3 for beta chain variable domain of TCR clone 56859 (TRBV7-2, TRBJ1-2)
CASSPRAGWNYGYTF

SEQ ID NO: 113719 - protein, 15 aa, Homo sapiens
  CDR3 for alpha chain variable domain of TCR clone 56860 (TRAV8-3, TRAJ23)
CAVGDRYNQGGKPIF

SEQ ID NO: 113720 - protein, 16 aa, Homo sapiens
  CDR3 for beta chain variable domain of TCR clone 56860 (TRBV19, TRBJ2-1)
CASSKAGPSSYNEQFF

SEQ ID NO: 113721 - protein, 13 aa, Homo sapiens
  CDR3 for alpha chain variable domain of TCR clone 56861 (TRAV21, TRAJ27)
CAARPGSAGKSTF

SEQ ID NO: 113722 - protein, 15 aa, Homo sapiens
  CDR3 for beta chain variable domain of TCR clone 56861 (TRBV12-4, TRBJ2-5)
CASSPPTGLQETQYF

SEQ ID NO: 113723 - protein, 16 aa, Homo sapiens
  CDR3 for alpha chain variable domain of TCR clone 56862 (TRAV16, TRAJ52)
CALSAAGGTSYGKLTF

SEQ ID NO: 113724 - protein, 15 aa, Homo sapiens
  CDR3 for beta chain variable domain of TCR clone 56862 (TRBV20-1, TRBJ2-7)
CSARDRVSGMDEQYF

SEQ ID NO: 113725 - protein, 15 aa, Homo sapiens
  CDR3 for alpha chain variable domain of TCR clone 56863 (TRAV26-1, TRAJ15)
CIVRAANQAGTALIV

SEQ ID NO: 113726 - protein, 15 aa, Homo sapiens
  CDR3 for beta chain variable domain of TCR clone 56863 (TRBV20-1, TRBJ1-1)
CSARSAATSNTEAFF

SEQ ID NO: 113727 - protein, 13 aa, Homo sapiens
  CDR3 for alpha chain variable domain of TCR clone 56864 (TRAV12-3, TRAJ21)
CAPGPHNFDKFYF

SEQ ID NO: 113728 - protein, 16 aa, Homo sapiens
  CDR3 for beta chain variable domain of TCR clone 56864 (TRBV5-1, TRBJ2-2)
CASSSYREGDTGELFF

SEQ ID NO: 113729 - protein, 12 aa, Homo sapiens
  CDR3 for alpha chain variable domain of TCR clone 56865 (TRAV12-1, TRAJ40)
CVFYSGTYKYIF

SEQ ID NO: 113730 - protein, 18 aa, Homo sapiens
  CDR3 for beta chain variable domain of TCR clone 56865 (TRBV12-4, TRBJ2-2)
CASSLVAGTRGRTGDLFF

SEQ ID NO: 113731 - protein, 14 aa, Homo sapiens
  CDR3 for alpha chain variable domain of TCR clone 56866 (TRAV16, TRAJ32)
CALKSGGSTNKLIF

SEQ ID NO: 113732 - protein, 17 aa, Homo sapiens
  CDR3 for beta chain variable domain of TCR clone 56866 (TRBV20-1, TRBJ2-1)
CSASSSGLAGSYNEQFF

SEQ ID NO: 113733 - protein, 15 aa, Homo sapiens
  CDR3 for alpha chain variable domain of TCR clone 56867 (TRAV4, TRAJ39)
CLVGPNNNAGNMLAF

SEQ ID NO: 113734 - protein, 14 aa, Homo sapiens
  CDR3 for beta chain variable domain of TCR clone 56867 (TRBV27, TRBJ2-2)
CASSLGAATGELFF

SEQ ID NO: 113735 - protein, 15 aa, Homo sapiens
  CDR3 for alpha chain variable domain of TCR clone 56868 (TRAV26-1, TRAJ29)
CIVRVEGSGNTPLVF

SEQ ID NO: 113736 - protein, 15 aa, Homo sapiens
  CDR3 for beta chain variable domain of TCR clone 56868 (TRBV28, TRBJ2-5)
CASSPGQGSVETQYF

SEQ ID NO: 113737 - protein, 12 aa, Homo sapiens
  CDR3 for alpha chain variable domain of TCR clone 56869 (TRAV3, TRAJ39)
CAVIEWSNTLTF

SEQ ID NO: 113738 - protein, 14 aa, Homo sapiens
  CDR3 for beta chain variable domain of TCR clone 56869 (TRBV7-8, TRBJ2-3)
CASSFPDGQDTQYF

SEQ ID NO: 113739 - protein, 13 aa, Homo sapiens
  CDR3 for alpha chain variable domain of TCR clone 56870 (TRAV3, TRAJ21)
CAVREPDFNKFYF

SEQ ID NO: 113740 - protein, 16 aa, Homo sapiens
  CDR3 for beta chain variable domain of TCR clone 56870 (TRBV7-3, TRBJ2-1)
CASSLEGYRSYNEQFF

SEQ ID NO: 113741 - protein, 15 aa, Homo sapiens
  CDR3 for alpha chain variable domain of TCR clone 56871 (TRAV21, TRAJ24)
CAARSSTDSWGKLQF

SEQ ID NO: 113742 - protein, 14 aa, Homo sapiens
  CDR3 for beta chain variable domain of TCR clone 56871 (TRBV25-1, TRBJ1-1)
CASTHLGGNTEAFF

SEQ ID NO: 113743 - protein, 16 aa, Homo sapiens
  CDR3 for alpha chain variable domain of TCR clone 56872 (TRAV3, TRAJ23)
CAAKIGIYNQGGKLIF

SEQ ID NO: 113744 - protein, 17 aa, Homo sapiens
  CDR3 for beta chain variable domain of TCR clone 56872 (TRBV10-3, TRBJ2-6)
CAISESTAPSGANVLTF

SEQ ID NO: 113745 - protein, 15 aa, Homo sapiens
  CDR3 for alpha chain variable domain of TCR clone 56873 (TRAV17, TRAJ16)
CATALRFSDGQKLLL

SEQ ID NO: 113746 - protein, 12 aa, Homo sapiens
  CDR3 for beta chain variable domain of TCR clone 56873 (TRBV2, TRBJ2-7)
CASSDPDYEQYF

SEQ ID NO: 113747 - protein, 15 aa, Homo sapiens
  CDR3 for alpha chain variable domain of TCR clone 56874 (TRAV3, TRAJ22)
CAVRDRGGSARQMTF

SEQ ID NO: 113748 - protein, 20 aa, Homo sapiens
  CDR3 for beta chain variable domain of TCR clone 56874 (TRBV11-2, TRBJ1-6)
CASSLVFATGGSVHPSTLGT

SEQ ID NO: 113749 - protein, 12 aa, Homo sapiens
  CDR3 for alpha chain variable domain of TCR clone 56875 (TRAV8-3, TRAJ26)
CAGDNCGQNFVF

SEQ ID NO: 113750 - protein, 15 aa, Homo sapiens
  CDR3 for beta chain variable domain of TCR clone 56875 (TRBV11-2, TRBJ2-1)
CAGSLGTSGLNEQFF

SEQ ID NO: 113751 - protein, 17 aa, Homo sapiens
  CDR3 for alpha chain variable domain of TCR clone 56876 (TRAV3, TRAJ6)
CAVRDGPRAGGSYITTF

SEQ ID NO: 113752 - protein, 12 aa, Homo sapiens
  CDR3 for beta chain variable domain of TCR clone 56876 (TRBV11-2, TRBJ2-1)
CASSPGNNEQFF

SEQ ID NO: 113753 - protein, 15 aa, Homo sapiens
  CDR3 for alpha chain variable domain of TCR clone 56877 (TRAV13-1, TRAJ10)
CAATILTGGGNKLTF

SEQ ID NO: 113754 - protein, 15 aa, Homo sapiens
  CDR3 for beta chain variable domain of TCR clone 56877 (TRBV2, TRBJ2-7)
CASTLPGSGATEQYF

SEQ ID NO: 113755 - protein, 16 aa, Homo sapiens
  CDR3 for alpha chain variable domain of TCR clone 56878 (TRAV3, TRAJ10)
CAVRDMRAGGGNKLTF

SEQ ID NO: 113756 - protein, 14 aa, Homo sapiens
  CDR3 for beta chain variable domain of TCR clone 56878 (TRBV20-1, TRBJ1-1)
CSAQTRIGGTEAFF

SEQ ID NO: 113757 - protein, 15 aa, Homo sapiens
  CDR3 for alpha chain variable domain of TCR clone 56879 (TRAV3, TRAJ47)
CAVRDIGEYGNKLVF

SEQ ID NO: 113758 - protein, 16 aa, Homo sapiens
  CDR3 for beta chain variable domain of TCR clone 56879 (TRBV15, TRBJ2-3)
CATSRDLGIVTDTQYF

SEQ ID NO: 113759 - protein, 14 aa, Homo sapiens
  CDR3 for alpha chain variable domain of TCR clone 56880 (TRAV25, TRAJ23)
CAGQGDNQGGKLIF

SEQ ID NO: 113760 - protein, 12 aa, Homo sapiens
  CDR3 for beta chain variable domain of TCR clone 56880 (TRBV7-9, TRBJ1-1)
CASSVVRGEAFF

SEQ ID NO: 113761 - protein, 12 aa, Homo sapiens
  CDR3 for alpha chain variable domain of TCR clone 56881 (TRAV13-2, TRAJ23)
CAERHREGKLIF

SEQ ID NO: 113762 - protein, 12 aa, Homo sapiens
  CDR3 for beta chain variable domain of TCR clone 56881 (TRBV11-2, TRBJ2-2)
CASSLGGGELFF

SEQ ID NO: 113763 - protein, 14 aa, Homo sapiens
  CDR3 for alpha chain variable domain of TCR clone 56882 (TRAV17, TRAJ34)
CATDSLEGTDELIF

SEQ ID NO: 113764 - protein, 13 aa, Homo sapiens
  CDR3 for beta chain variable domain of TCR clone 56882 (TRBV11-2, TRBJ2-7)
CASSGTRPYEQYF

SEQ ID NO: 113765 - protein, 12 aa, Homo sapiens
  CDR3 for alpha chain variable domain of TCR clone 56883 (TRAV8-3, TRAJ16)
CAVGAPGQKLLF

SEQ ID NO: 113766 - protein, 16 aa, Homo sapiens
  CDR3 for beta chain variable domain of TCR clone 56883 (TRBV7-2, TRBJ1-1)
CASSLSGTHADTEAFF

SEQ ID NO: 113767 - protein, 20 aa, Homo sapiens
  CDR3 for alpha chain variable domain of TCR clone 56884 (TRAV21, TRAJ4)
AASQPGDSATLAGCYNKLIF

SEQ ID NO: 113768 - protein, 19 aa, Homo sapiens
  CDR3 for beta chain variable domain of TCR clone 56884 (TRBV18, TRBJ1-3)
CASSPLSRTGMSSGNTIYF

SEQ ID NO: 113769 - protein, 14 aa, Homo sapiens
  CDR3 for alpha chain variable domain of TCR clone 56885 (TRAV12-3, TRAJ58)
CAMSTETSGSGLTF

SEQ ID NO: 113770 - protein, 13 aa, Homo sapiens
  CDR3 for beta chain variable domain of TCR clone 56885 (TRBV27, TRBJ2-3)
CASSWGRTDTQYF

SEQ ID NO: 113771 - protein, 13 aa, Homo sapiens
  CDR3 for alpha chain variable domain of TCR clone 56886 (TRAV20, TRAJ37)
CAGCSSNTGKLIF

SEQ ID NO: 113772 - protein, 12 aa, Homo sapiens
  CDR3 for beta chain variable domain of TCR clone 56886 (TRBV7-8, TRBJ2-7)
CASSLGDREQYF

SEQ ID NO: 113773 - protein, 13 aa, Homo sapiens
  CDR3 for alpha chain variable domain of TCR clone 56887 (TRAV8-3, TRAJ44)
CAVVPGTASKLTF

SEQ ID NO: 113774 - protein, 15 aa, Homo sapiens
  CDR3 for beta chain variable domain of TCR clone 56887 (TRBV20-1, TRBJ2-7)
CSARDRVSGMDEQYF

SEQ ID NO: 113775 - protein, 13 aa, Homo sapiens
  CDR3 for alpha chain variable domain of TCR clone 56888 (TRAV12-2, TRAJ4)
CAVFSGCYNKLIF

SEQ ID NO: 113776 - protein, 13 aa, Homo sapiens
  CDR3 for beta chain variable domain of TCR clone 56888 (TRBV19, TRBJ1-5)
CASSIDRDQPQHF

SEQ ID NO: 113777 - protein, 19 aa, Homo sapiens
  CDR3 for alpha chain variable domain of TCR clone 56889 (TRAV38-1, TRAJ53)
CAFMKHGLESGGSNYKLTF

SEQ ID NO: 113778 - protein, 13 aa, Homo sapiens
  CDR3 for beta chain variable domain of TCR clone 56889 (TRBV19, TRBJ2-7)
CASSSRQSYEQYF

SEQ ID NO: 113779 - protein, 15 aa, Homo sapiens
  CDR3 for alpha chain variable domain of TCR clone 56890 (TRAV4, TRAJ10)
CLVGDGSGGGNKLTF

SEQ ID NO: 113780 - protein, 15 aa, Homo sapiens
  CDR3 for beta chain variable domain of TCR clone 56890 (TRBV11-2, TRBJ2-1)
CASSSPSTRYNEQFF

SEQ ID NO: 113781 - protein, 16 aa, Homo sapiens
  CDR3 for alpha chain variable domain of TCR clone 56891 (TRAV26-2, TRAJ48)
CILRPPFNFGSEKLTF

SEQ ID NO: 113782 - protein, 15 aa, Homo sapiens
  CDR3 for beta chain variable domain of TCR clone 56891 (TRBV20-1, TRBJ2-3)
CSARVEGTYTDTQYF

SEQ ID NO: 113783 - protein, 14 aa, Homo sapiens
  CDR3 for alpha chain variable domain of TCR clone 56892 (TRAV12-2, TRAJ17)
CAVLFKAAGNKPTF

SEQ ID NO: 113784 - protein, 14 aa, Homo sapiens
  CDR3 for beta chain variable domain of TCR clone 56892 (TRBV15, TRBJ1-2)
CATSRDFDRVGYTF

SEQ ID NO: 113785 - protein, 12 aa, Homo sapiens
  CDR3 for alpha chain variable domain of TCR clone 56893 (TRAV29/DV5, TRAJ49)
CAATDTGNQFYF

SEQ ID NO: 113786 - protein, 14 aa, Homo sapiens
  CDR3 for beta chain variable domain of TCR clone 56893 (TRBV7-3, TRBJ2-2)
CASSSGGYTGELFF

SEQ ID NO: 113787 - protein, 11 aa, Homo sapiens
  CDR3 for alpha chain variable domain of TCR clone 56894 (TRAV21, TRAJ34)
CAHYNTDKLIF

SEQ ID NO: 113788 - protein, 15 aa, Homo sapiens
  CDR3 for beta chain variable domain of TCR clone 56894 (TRBV7-2, TRBJ1-1)
CASSFAGDRDTEAFF

SEQ ID NO: 113789 - protein, 14 aa, Homo sapiens
  CDR3 for alpha chain variable domain of TCR clone 56895 (TRAV12-2, TRAJ44)
CAVDPAGTASKLTF

SEQ ID NO: 113790 - protein, 13 aa, Homo sapiens
  CDR3 for beta chain variable domain of TCR clone 56895 (TRBV20-1, TRBJ1-6)
CSAPLGVGSPLHF

SEQ ID NO: 113791 - protein, 14 aa, Homo sapiens
  CDR3 for alpha chain variable domain of TCR clone 56896 (TRAV12-1, TRAJ30)
CVVNIGGGDDKIIF

SEQ ID NO: 113792 - protein, 13 aa, Homo sapiens
  CDR3 for beta chain variable domain of TCR clone 56896 (TRBV12-5, TRBJ2-1)
CASGLGRGNEQFF

SEQ ID NO: 113793 - protein, 16 aa, Homo sapiens
  CDR3 for alpha chain variable domain of TCR clone 56897 (TRAV3, TRAJ37)
CAVRGKGSGNTGKLIF

SEQ ID NO: 113794 - protein, 14 aa, Homo sapiens
  CDR3 for beta chain variable domain of TCR clone 56897 (TRBV28, TRBJ1-2)
CASRIQGANYGYTF

SEQ ID NO: 113795 - protein, 14 aa, Homo sapiens
  CDR3 for alpha chain variable domain of TCR clone 56898 (TRAV26-1, TRAJ39)
CIVRGSRAGNMLTF

SEQ ID NO: 113796 - protein, 15 aa, Homo sapiens
  CDR3 for beta chain variable domain of TCR clone 56898 (TRBV7-9, TRBJ1-5)
CASIQGHQPNQPQHF

SEQ ID NO: 113797 - protein, 17 aa, Homo sapiens
  CDR3 for alpha chain variable domain of TCR clone 56899 (TRAV4, TRAJ13)
CLVGVQGSSGGYQKVTF

SEQ ID NO: 113798 - protein, 18 aa, Homo sapiens
  CDR3 for beta chain variable domain of TCR clone 56899 (TRBV15, TRBJ2-3)
CATSRDSARSWDTDTQYF

SEQ ID NO: 113799 - protein, 14 aa, Homo sapiens
  CDR3 for alpha chain variable domain of TCR clone 56900 (TRAV1-2, TRAJ16)
CAVNRFSDGQKLLF

SEQ ID NO: 113800 - protein, 11 aa, Homo sapiens
  CDR3 for beta chain variable domain of TCR clone 56900 (TRBV29-1, TRBJ2-5)
CSEDRTGTQYV

SEQ ID NO: 113801 - protein, 13 aa, Homo sapiens
  CDR3 for alpha chain variable domain of TCR clone 56901 (TRAV3, TRAJ21)
CAVREPDFNKFYF

SEQ ID NO: 113802 - protein, 13 aa, Homo sapiens
  CDR3 for beta chain variable domain of TCR clone 56901 (TRBV9, TRBJ2-1)
CASSPSVGNEQFF

SEQ ID NO: 113803 - protein, 13 aa, Homo sapiens
  CDR3 for alpha chain variable domain of TCR clone 56902 (TRAV25, TRAJ54)
CAGTIQGAQKLVF

SEQ ID NO: 113804 - protein, 15 aa, Homo sapiens
  CDR3 for beta chain variable domain of TCR clone 56902 (TRBV19, TRBJ1-5)
CASSILTGENQPLHF

SEQ ID NO: 113805 - protein, 15 aa, Homo sapiens
  CDR3 for alpha chain variable domain of TCR clone 56903 (TRAV4, TRAJ39)
CLVGPNNNAGNMRTF

SEQ ID NO: 113806 - protein, 13 aa, Homo sapiens
  CDR3 for beta chain variable domain of TCR clone 56903 (TRBV11-2, TRBJ2-5)
CASSSTGEETQYF

SEQ ID NO: 113807 - protein, 14 aa, Homo sapiens
  CDR3 for alpha chain variable domain of TCR clone 56904 (TRAV1-1, TRAJ28)
CAAPSGAGSYQLTF

SEQ ID NO: 113808 - protein, 15 aa, Homo sapiens
  CDR3 for beta chain variable domain of TCR clone 56904 (TRBV7-2, TRBJ1-2)
CASSLVSGGDYGYTL

SEQ ID NO: 113809 - protein, 12 aa, Homo sapiens
  CDR3 for alpha chain variable domain of TCR clone 56905 (TRAV2, TRAJ9)
CGVGAGGFKTIF

SEQ ID NO: 113810 - protein, 16 aa, Homo sapiens
  CDR3 for beta chain variable domain of TCR clone 56905 (TRBV13, TRBJ2-2)
CASSPRTGEHTGELFF

SEQ ID NO: 113811 - protein, 12 aa, Homo sapiens
  CDR3 for alpha chain variable domain of TCR clone 56906 (TRAV12-3, TRAJ17)
CAMTLTGNKLTF

SEQ ID NO: 113812 - protein, 14 aa, Homo sapiens
  CDR3 for beta chain variable domain of TCR clone 56906 (TRBV7-2, TRBJ2-1)
CASSLGVGYNEQFF

SEQ ID NO: 113813 - protein, 13 aa, Homo sapiens
  CDR3 for alpha chain variable domain of TCR clone 56907 (TRAV16, TRAJ28)
CALTGAGGYQLTF

SEQ ID NO: 113814 - protein, 16 aa, Homo sapiens
  CDR3 for beta chain variable domain of TCR clone 56907 (TRBV28, TRBJ1-5)
CASSLTGQGWNQPQHF

SEQ ID NO: 113815 - protein, 14 aa, Homo sapiens
  CDR3 for alpha chain variable domain of TCR clone 56908 (TRAV12-2, TRAJ13)
CAVKKTGGYKKVTF

SEQ ID NO: 113816 - protein, 13 aa, Homo sapiens
  CDR3 for beta chain variable domain of TCR clone 56908 (TRBV20-1, TRBJ1-1)
CSARGGGNTEAFF

SEQ ID NO: 113817 - protein, 14 aa, Homo sapiens
  CDR3 for alpha chain variable domain of TCR clone 56909 (TRAV38-1, TRAJ29)
CAFITPSGNIPLVF

SEQ ID NO: 113818 - protein, 14 aa, Homo sapiens
  CDR3 for beta chain variable domain of TCR clone 56909 (TRBV18, TRBJ2-7)
CASSPRGGAYEQYF

SEQ ID NO: 113819 - protein, 14 aa, Homo sapiens
  CDR3 for alpha chain variable domain of TCR clone 56910 (TRAV26-1, TRAJ48)
CIVRVPFGNEKLTF

SEQ ID NO: 113820 - protein, 16 aa, Homo sapiens
  CDR3 for beta chain variable domain of TCR clone 56910 (TRBV18, TRBJ2-1)
CASSPYPSIRGDEQFF

SEQ ID NO: 113821 - protein, 13 aa, Homo sapiens
  CDR3 for alpha chain variable domain of TCR clone 56911 (TRAV12-3, TRAJ33)
RAMSVNSNYQLIW

SEQ ID NO: 113822 - protein, 16 aa, Homo sapiens
  CDR3 for beta chain variable domain of TCR clone 56911 (TRBV13, TRBJ2-5)
CASSLRTGGSWETQYF

SEQ ID NO: 113823 - protein, 16 aa, Homo sapiens
  CDR3 for alpha chain variable domain of TCR clone 56912 (TRAV21, TRAJ37)
CAVRPRGSSNTGKLIF

SEQ ID NO: 113824 - protein, 16 aa, Homo sapiens
  CDR3 for beta chain variable domain of TCR clone 56912 (TRBV19, TRBJ2-1)
CASSKAGPSSYNEQFF

SEQ ID NO: 113825 - protein, 16 aa, Homo sapiens
  CDR3 for alpha chain variable domain of TCR clone 56913 (TRAV26-1, TRAJ36)
CIVRVPDQTGANNLFF

SEQ ID NO: 113826 - protein, 13 aa, Homo sapiens
  CDR3 for beta chain variable domain of TCR clone 56913 (TRBV10-3, TRBJ2-7)
CASKLAVNYEQYF

SEQ ID NO: 113827 - protein, 12 aa, Homo sapiens
  CDR3 for alpha chain variable domain of TCR clone 56914 (TRAV12-3, TRAJ17)
CAMTLTGNKLTF

SEQ ID NO: 113828 - protein, 12 aa, Homo sapiens
  CDR3 for beta chain variable domain of TCR clone 56914 (TRBV14, TRBJ2-5)
CASSHLKETQYF

SEQ ID NO: 113829 - protein, 14 aa, Homo sapiens
  CDR3 for alpha chain variable domain of TCR clone 56915 (TRAV12-2, TRAJ44)
CAVNPAGTASKLTF

SEQ ID NO: 113830 - protein, 13 aa, Homo sapiens
  CDR3 for beta chain variable domain of TCR clone 56915 (TRBV20-1, TRBJ1-6)
RSAPLGVGSPLHF

SEQ ID NO: 113831 - protein, 13 aa, Homo sapiens
  CDR3 for alpha chain variable domain of TCR clone 56916 (TRAV35, TRAJ48)
CAGHEFGNEKLTF

SEQ ID NO: 113832 - protein, 13 aa, Homo sapiens
  CDR3 for beta chain variable domain of TCR clone 56916 (TRBV7-2, TRBJ1-6)
CASSVVGSSPLHF

SEQ ID NO: 113833 - protein, 12 aa, Homo sapiens
  CDR3 for alpha chain variable domain of TCR clone 56917 (TRAV21, TRAJ49)
CVVSWTGNQFYF

SEQ ID NO: 113834 - protein, 18 aa, Homo sapiens
  CDR3 for beta chain variable domain of TCR clone 56917 (TRBV7-8, TRBJ2-1)
CASSPAEGLAGGLNEQFF

SEQ ID NO: 113835 - protein, 17 aa, Homo sapiens
  CDR3 for alpha chain variable domain of TCR clone 56918 (TRAV8-2, )
CVVNIQNPDPAVNQLRD

SEQ ID NO: 113836 - protein, 14 aa, Homo sapiens
  CDR3 for beta chain variable domain of TCR clone 56918 (TRBV7-9, TRBJ2-5)
CASSLVGGEETQYF

SEQ ID NO: 113837 - protein, 16 aa, Homo sapiens
  CDR3 for alpha chain variable domain of TCR clone 56919 (TRAV3, TRAJ10)
CAVRDIRAGGGNKLTF

SEQ ID NO: 113838 - protein, 15 aa, Homo sapiens
  CDR3 for beta chain variable domain of TCR clone 56919 (TRBV11-2, TRBJ1-6)
CASTGFGTAVSPLHF

SEQ ID NO: 113839 - protein, 18 aa, Homo sapiens
  CDR3 for alpha chain variable domain of TCR clone 56920 (TRAV26-1, TRAJ30)
CCVLLHHQSTNRDDKIIF

SEQ ID NO: 113840 - protein, 18 aa, Homo sapiens
  CDR3 for beta chain variable domain of TCR clone 56920 (TRBV4-1, TRBJ1-5)
CASSQDPRGQGLNQPQHF

SEQ ID NO: 113841 - protein, 15 aa, Homo sapiens
  CDR3 for alpha chain variable domain of TCR clone 56921 (TRAV17, TRAJ23)
CATGAEDNQGGKLIF

SEQ ID NO: 113842 - protein, 12 aa, Homo sapiens
  CDR3 for beta chain variable domain of TCR clone 56921 (TRBV2, TRBJ2-1)
CAKREGYNEQFF

SEQ ID NO: 113843 - protein, 13 aa, Homo sapiens
  CDR3 for alpha chain variable domain of TCR clone 56922 (TRAV2, TRAJ40)
CAVVTSGTYKYIF

SEQ ID NO: 113844 - protein, 15 aa, Homo sapiens
  CDR3 for beta chain variable domain of TCR clone 56922 (TRBV7-9, TRBJ1-4)
CASSARTGGNEKLFF

SEQ ID NO: 113845 - protein, 15 aa, Homo sapiens
  CDR3 for alpha chain variable domain of TCR clone 56923 (TRAV8-4, TRAJ3)
CAVTGANLVQQCFQD

SEQ ID NO: 113846 - protein, 16 aa, Homo sapiens
  CDR3 for beta chain variable domain of TCR clone 56923 (TRBV4-2, TRBJ1-1)
CASSQAGFGMNTEAFF

SEQ ID NO: 113847 - protein, 15 aa, Homo sapiens
  CDR3 for alpha chain variable domain of TCR clone 56924 (TRAV3, TRAJ22)
CAVRDRGGSARQLTF

SEQ ID NO: 113848 - protein, 13 aa, Homo sapiens
  CDR3 for beta chain variable domain of TCR clone 56924 (TRBV10-2, TRBJ2-7)
CASGASGGYEQYF

SEQ ID NO: 113849 - protein, 13 aa, Homo sapiens
  CDR3 for alpha chain variable domain of TCR clone 56925 (TRAV8-3, TRAJ41)
CAVGADSEYALNF

SEQ ID NO: 113850 - protein, 14 aa, Homo sapiens
  CDR3 for beta chain variable domain of TCR clone 56925 (TRBV2, TRBJ1-1)
CASRALLMNTEAFF

SEQ ID NO: 113851 - protein, 12 aa, Homo sapiens
  CDR3 for alpha chain variable domain of TCR clone 56926 (TRAV29/DV5, TRAJ34)
CAASGNTDKLIF

SEQ ID NO: 113852 - protein, 14 aa, Homo sapiens
  CDR3 for beta chain variable domain of TCR clone 56926 (TRBV16, TRBJ1-1)
CASSQAGPNTEAFF

SEQ ID NO: 113853 - protein, 13 aa, Homo sapiens
  CDR3 for alpha chain variable domain of TCR clone 56927 (TRAV22, TRAJ29)
CAVGGSGNTPLVF

SEQ ID NO: 113854 - protein, 13 aa, Homo sapiens
  CDR3 for beta chain variable domain of TCR clone 56927 (TRBV19, TRBJ2-7)
CASREAGGSEQYF

SEQ ID NO: 113855 - protein, 13 aa, Homo sapiens
  CDR3 for alpha chain variable domain of TCR clone 56928 (TRAV3, TRAJ27)
CAVRPLSAGKSTF

SEQ ID NO: 113856 - protein, 12 aa, Homo sapiens
  CDR3 for beta chain variable domain of TCR clone 56928 (TRBV7-9, TRBJ2-7)
CATRTDAYEQYF

SEQ ID NO: 113857 - protein, 11 aa, Homo sapiens
  CDR3 for alpha chain variable domain of TCR clone 56929 (TRAV13-2, TRAJ36)
CAETGANNLLF

SEQ ID NO: 113858 - protein, 13 aa, Homo sapiens
  CDR3 for beta chain variable domain of TCR clone 56929 (TRBV7-9, TRBJ2-4)
CATEGLAGNIQYF

SEQ ID NO: 113859 - protein, 11 aa, Homo sapiens
  CDR3 for alpha chain variable domain of TCR clone 56930 (TRAV3, TRAJ21)
CAVGNFNKFYF

SEQ ID NO: 113860 - protein, 15 aa, Homo sapiens
  CDR3 for beta chain variable domain of TCR clone 56930 (TRBV5-1, TRBJ2-7)
CASSLNGGPAREQYF

SEQ ID NO: 113861 - protein, 17 aa, Homo sapiens
  CDR3 for alpha chain variable domain of TCR clone 56931 (TRAV23/DV6, TRAJ57)
SAASSTLSQGGSEKLVF

SEQ ID NO: 113862 - protein, 14 aa, Homo sapiens
  CDR3 for beta chain variable domain of TCR clone 56931 (TRBV13, TRBJ2-5)
CASSLGQGKETQYF

SEQ ID NO: 113863 - protein, 12 aa, Homo sapiens
  CDR3 for alpha chain variable domain of TCR clone 56932 (TRAV6, TRAJ9)
CALHTGGFKTIF

SEQ ID NO: 113864 - protein, 14 aa, Homo sapiens
  CDR3 for beta chain variable domain of TCR clone 56932 (TRBV7-9, TRBJ2-1)
CASSQGQAGAEQFF

SEQ ID NO: 113865 - protein, 14 aa, Homo sapiens
  CDR3 for alpha chain variable domain of TCR clone 56933 (TRAV26-2, TRAJ38)
CILYNAGNNRKLIW

SEQ ID NO: 113866 - protein, 14 aa, Homo sapiens
  CDR3 for beta chain variable domain of TCR clone 56933 (TRBV19, TRBJ2-1)
CASPTFVLSGEQFL

SEQ ID NO: 113867 - protein, 17 aa, Homo sapiens
  CDR3 for alpha chain variable domain of TCR clone 56934 (TRAV4, TRAJ18)
CLVGERSVGSTLGRLYL

SEQ ID NO: 113868 - protein, 14 aa, Homo sapiens
  CDR3 for beta chain variable domain of TCR clone 56934 (TRBV6-5, TRBJ1-2)
CASSYDGTGGGYTF

SEQ ID NO: 113869 - protein, 13 aa, Homo sapiens
  CDR3 for alpha chain variable domain of TCR clone 56935 (TRAV8-3, TRAJ28)
CAVGAVGSYQLTF

SEQ ID NO: 113870 - protein, 17 aa, Homo sapiens
  CDR3 for beta chain variable domain of TCR clone 56935 (TRBV11-2, TRBJ2-1)
CASSLYPPGVEYDEQFF

SEQ ID NO: 113871 - protein, 13 aa, Homo sapiens
  CDR3 for alpha chain variable domain of TCR clone 56936 (TRAV35, TRAJ43)
CAGYPYNNNDMRF

SEQ ID NO: 113872 - protein, 15 aa, Homo sapiens
  CDR3 for beta chain variable domain of TCR clone 56936 (TRBV25-1, TRBJ1-4)
CASSKRTATNEKLFF

SEQ ID NO: 113873 - protein, 15 aa, Homo sapiens
  CDR3 for alpha chain variable domain of TCR clone 56937 (TRAV35, TRAJ50)
CAGQLRKTSYDKVIF

SEQ ID NO: 113874 - protein, 12 aa, Homo sapiens
  CDR3 for beta chain variable domain of TCR clone 56937 (TRBV5-1, TRBJ2-5)
CASSLSLETQYF

SEQ ID NO: 113875 - protein, 16 aa, Homo sapiens
  CDR3 for alpha chain variable domain of TCR clone 56938 (TRAV30, TRAJ24)
CGTEIVDVDSWGKFQF

SEQ ID NO: 113876 - protein, 15 aa, Homo sapiens
  CDR3 for beta chain variable domain of TCR clone 56938 (TRBV9, TRBJ2-1)
CASSLAGSSYNEQFF

SEQ ID NO: 113877 - protein, 13 aa, Homo sapiens
  CDR3 for alpha chain variable domain of TCR clone 56939 (TRAV8-4, TRAJ10)
CAAFTGGGNKLTL

SEQ ID NO: 113878 - protein, 15 aa, Homo sapiens
  CDR3 for beta chain variable domain of TCR clone 56939 (TRBV2, TRBJ2-3)
CASSDFEKATDTQYF

SEQ ID NO: 113879 - protein, 12 aa, Homo sapiens
  CDR3 for alpha chain variable domain of TCR clone 56940 (TRAV12-3, TRAJ17)
CAMTLTGNKLTF

SEQ ID NO: 113880 - protein, 12 aa, Homo sapiens
  CDR3 for beta chain variable domain of TCR clone 56940 (TRBV7-3, TRBJ2-5)
CASSSPGGTQYF

SEQ ID NO: 113881 - protein, 13 aa, Homo sapiens
  CDR3 for alpha chain variable domain of TCR clone 56941 (TRAV41, TRAJ48)
SVPVNFGDEKLTF

SEQ ID NO: 113882 - protein, 16 aa, Homo sapiens
  CDR3 for beta chain variable domain of TCR clone 56941 (TRBV12-5, TRBJ2-5)
CASGPRTSGNQETQYF

SEQ ID NO: 113883 - protein, 14 aa, Homo sapiens
  CDR3 for alpha chain variable domain of TCR clone 56942 (TRAV9-2, TRAJ39)
CALYIYNAGSMLTF

SEQ ID NO: 113884 - protein, 14 aa, Homo sapiens
  CDR3 for beta chain variable domain of TCR clone 56942 (TRBV25-1, TRBJ1-1)
CASTHLGGNTEAFF

SEQ ID NO: 113885 - protein, 12 aa, Homo sapiens
  CDR3 for alpha chain variable domain of TCR clone 56943 (TRAV12-2, TRAJ10)
WGVTGGGNKLTF

SEQ ID NO: 113886 - protein, 16 aa, Homo sapiens
  CDR3 for beta chain variable domain of TCR clone 56943 (TRBV5-1, TRBJ1-1)
CASSSGGNSLNTEAFF

SEQ ID NO: 113887 - protein, 14 aa, Homo sapiens
  CDR3 for alpha chain variable domain of TCR clone 56944 (TRAV12-3, TRAJ10)
SHLPLTGGGNKLTF

SEQ ID NO: 113888 - protein, 14 aa, Homo sapiens
  CDR3 for beta chain variable domain of TCR clone 56944 (TRBV19, TRBJ2-1)
CASPTFVLSGEQLF

SEQ ID NO: 113889 - protein, 16 aa, Homo sapiens
  CDR3 for alpha chain variable domain of TCR clone 56945 (TRAV3, TRAJ37)
CAVRGKGSGNTGKLIF

SEQ ID NO: 113890 - protein, 12 aa, Homo sapiens
  CDR3 for beta chain variable domain of TCR clone 56945 (TRBV11-2, TRBJ2-2)
CASSLPTGELFF

SEQ ID NO: 113891 - protein, 12 aa, Homo sapiens
  CDR3 for alpha chain variable domain of TCR clone 56946 (TRAV26-1, TRAJ13)
CIVSRGYQKVTF

SEQ ID NO: 113892 - protein, 16 aa, Homo sapiens
  CDR3 for beta chain variable domain of TCR clone 56946 (TRBV27, TRBJ2-1)
CASGLSKGFGLDEQFF

SEQ ID NO: 113893 - protein, 14 aa, Homo sapiens
  CDR3 for alpha chain variable domain of TCR clone 56947 (TRAV12-3, TRAJ10)
SHLPLTGGGNKLTF

SEQ ID NO: 113894 - protein, 13 aa, Homo sapiens
  CDR3 for beta chain variable domain of TCR clone 56947 (TRBV4-1, TRBJ2-2)
CASSQENAGELFF

SEQ ID NO: 113895 - protein, 17 aa, Homo sapiens
  CDR3 for alpha chain variable domain of TCR clone 56948 (TRAV13-1, TRAJ53)
CAASWKSSGGSNYKLTF

SEQ ID NO: 113896 - protein, 19 aa, Homo sapiens
  CDR3 for beta chain variable domain of TCR clone 56948 (TRBV7-9, TRBJ2-1)
CASRHNRGALLRSYNEQFF

SEQ ID NO: 113897 - protein, 13 aa, Homo sapiens
  CDR3 for alpha chain variable domain of TCR clone 56949 (TRAV30, TRAJ39)
CGTENNAGNMLTF

SEQ ID NO: 113898 - protein, 12 aa, Homo sapiens
  CDR3 for beta chain variable domain of TCR clone 56949 (TRBV11-2, TRBJ2-2)
CASSLGGGELFF

SEQ ID NO: 113899 - protein, 15 aa, Homo sapiens
  CDR3 for alpha chain variable domain of TCR clone 56950 (TRAV35, TRAJ40)
CAGQLGTSGTYKYIF

SEQ ID NO: 113900 - protein, 14 aa, Homo sapiens
  CDR3 for beta chain variable domain of TCR clone 56950 (TRBV19, TRBJ2-1)
CASPTFVLSGEQFF

SEQ ID NO: 113901 - protein, 16 aa, Homo sapiens
  CDR3 for alpha chain variable domain of TCR clone 56951 (TRAV1-2, TRAJ10)
CAVRGVLTGGGNKLTF

SEQ ID NO: 113902 - protein, 12 aa, Homo sapiens
  CDR3 for beta chain variable domain of TCR clone 56951 (TRBV5-1, TRBJ1-1)
CASSLTGAEAFF

SEQ ID NO: 113903 - protein, 16 aa, Homo sapiens
  CDR3 for alpha chain variable domain of TCR clone 56952 (TRAV3, TRAJ28)
CAVLPRSGAGGYQLTF

SEQ ID NO: 113904 - protein, 13 aa, Homo sapiens
  CDR3 for beta chain variable domain of TCR clone 56952 (TRBV12-4, TRBJ2-5)
CASRLAVQETQYF

SEQ ID NO: 113905 - protein, 16 aa, Homo sapiens
  CDR3 for alpha chain variable domain of TCR clone 56953 (TRAV30, TRAJ24)
CGTEIVDADSRGKFQF

SEQ ID NO: 113906 - protein, 14 aa, Homo sapiens
  CDR3 for beta chain variable domain of TCR clone 56953 (TRBV19, TRBJ2-1)
CASPTFVLSGEQFF

SEQ ID NO: 113907 - protein, 14 aa, Homo sapiens
  CDR3 for alpha chain variable domain of TCR clone 56954 (TRAV14/DV4, TRAJ20)
CAMRESLNDYKLSF

SEQ ID NO: 113908 - protein, 15 aa, Homo sapiens
  CDR3 for beta chain variable domain of TCR clone 56954 (TRBV7-9, TRBJ2-7)
CDSSLALAEAYEQYF

SEQ ID NO: 113909 - protein, 12 aa, Homo sapiens
  CDR3 for alpha chain variable domain of TCR clone 56955 (TRAV12-2, TRAJ21)
CAVRYNFNKFYF

SEQ ID NO: 113910 - protein, 14 aa, Homo sapiens
  CDR3 for beta chain variable domain of TCR clone 56955 (TRBV28, TRBJ2-1)
CASSYYTAYNERFF

SEQ ID NO: 113911 - protein, 14 aa, Homo sapiens
  CDR3 for alpha chain variable domain of TCR clone 56956 (TRAV2, TRAJ9)
CAVEDRSGGFKTIF

SEQ ID NO: 113912 - protein, 14 aa, Homo sapiens
  CDR3 for beta chain variable domain of TCR clone 56956 (TRBV11-2, TRBJ2-3)
CASSRLARTDTQYF

SEQ ID NO: 113913 - protein, 15 aa, Homo sapiens
  CDR3 for alpha chain variable domain of TCR clone 56957 (TRAV38-1, TRAJ37)
CAFIFGSGNTGKLIC

SEQ ID NO: 113914 - protein, 12 aa, Homo sapiens
  CDR3 for beta chain variable domain of TCR clone 56957 (TRBV7-9, TRBJ2-7)
CASSLEGYEQYF

SEQ ID NO: 113915 - protein, 16 aa, Homo sapiens
  CDR3 for alpha chain variable domain of TCR clone 56958 (TRAV13-2, TRAJ16)
CAEILRQMARSCSLQG

SEQ ID NO: 113916 - protein, 13 aa, Homo sapiens
  CDR3 for beta chain variable domain of TCR clone 56958 (TRBV12-4, TRBJ2-1)
CASSLAENNEQFF

SEQ ID NO: 113917 - protein, 10 aa, Homo sapiens
  CDR3 for alpha chain variable domain of TCR clone 56959 (TRAV26-1, TRAJ40)
CIAGTYKYIF

SEQ ID NO: 113918 - protein, 15 aa, Homo sapiens
  CDR3 for beta chain variable domain of TCR clone 56959 (TRBV19, TRBJ2-1)
CASSSPGVPLYEQFF

SEQ ID NO: 113919 - protein, 12 aa, Homo sapiens
  CDR3 for alpha chain variable domain of TCR clone 56960 (TRAV13-1, TRAJ27)
CAAHTNAGQSTF

SEQ ID NO: 113920 - protein, 14 aa, Homo sapiens
  CDR3 for beta chain variable domain of TCR clone 56960 (TRBV19, TRBJ2-2)
CASSGQGIAGELFF

SEQ ID NO: 113921 - protein, 18 aa, Homo sapiens
  CDR3 for alpha chain variable domain of TCR clone 56961 (TRAV26-1, TRAJ22)
CIVRVSFWFCKATDLWIW

SEQ ID NO: 113922 - protein, 12 aa, Homo sapiens
  CDR3 for beta chain variable domain of TCR clone 56961 (TRBV11-2, TRBJ2-2)
CASSLGGGELFF

SEQ ID NO: 113923 - protein, 12 aa, Homo sapiens
  CDR3 for alpha chain variable domain of TCR clone 56962 (TRAV12-3, TRAJ17)
CAMTLTGNKLTL

SEQ ID NO: 113924 - protein, 12 aa, Homo sapiens
  CDR3 for beta chain variable domain of TCR clone 56962 (TRBV2, TRBJ2-1)
CAYGPPGNEQFF

SEQ ID NO: 113925 - protein, 11 aa, Homo sapiens
  CDR3 for alpha chain variable domain of TCR clone 56963 (TRAV3, TRAJ21)
CAVGNFNKFYF

SEQ ID NO: 113926 - protein, 16 aa, Homo sapiens
  CDR3 for beta chain variable domain of TCR clone 56963 (TRBV11-3, TRBJ2-5)
CASSSVVAGSTETQYF

SEQ ID NO: 113927 - protein, 11 aa, Homo sapiens
  CDR3 for alpha chain variable domain of TCR clone 56964 (TRAV1-2, TRAJ20)
CAVANDYKLSF

SEQ ID NO: 113928 - protein, 18 aa, Homo sapiens
  CDR3 for beta chain variable domain of TCR clone 56964 (TRBV20-1, TRBJ2-6)
CSAETTRTHGSGANVLTF

SEQ ID NO: 113929 - protein, 15 aa, Homo sapiens
  CDR3 for alpha chain variable domain of TCR clone 56965 (TRAV21, TRAJ53)
CATLNSGGSHYKLTF

SEQ ID NO: 113930 - protein, 16 aa, Homo sapiens
  CDR3 for beta chain variable domain of TCR clone 56965 (TRBV9, TRBJ2-1)
CASSVGGGGNYNEQFF

SEQ ID NO: 113931 - protein, 14 aa, Homo sapiens
  CDR3 for alpha chain variable domain of TCR clone 56966 (TRAV20, TRAJ56)
CAVQFGGANIKLTF

SEQ ID NO: 113932 - protein, 14 aa, Homo sapiens
  CDR3 for beta chain variable domain of TCR clone 56966 (TRBV20-1, TRBJ2-7)
CSAKRGRSSYEQYF

SEQ ID NO: 113933 - protein, 12 aa, Homo sapiens
  CDR3 for alpha chain variable domain of TCR clone 56967 (TRAV29/DV5, TRAJ43)
CAAPYNNNDLRF

SEQ ID NO: 113934 - protein, 17 aa, Homo sapiens
  CDR3 for beta chain variable domain of TCR clone 56967 (TRBV19, TRBJ2-6)
CASSTGQVFSGANVLTF

SEQ ID NO: 113935 - protein, 13 aa, Homo sapiens
  CDR3 for alpha chain variable domain of TCR clone 56968 (TRAV1-2, TRAJ24)
CAVRADSWGKFQF

SEQ ID NO: 113936 - protein, 13 aa, Homo sapiens
  CDR3 for beta chain variable domain of TCR clone 56968 (TRBV20-1, TRBJ2-1)
CSAAGLAGDEQFF

SEQ ID NO: 113937 - protein, 13 aa, Homo sapiens
  CDR3 for alpha chain variable domain of TCR clone 56969 (TRAV21, TRAJ20)
CAVGLRVDYKLSF

SEQ ID NO: 113938 - protein, 14 aa, Homo sapiens
  CDR3 for beta chain variable domain of TCR clone 56969 (TRBV11-2, TRBJ2-5)
CASSRTGGIETQYF

SEQ ID NO: 113939 - protein, 14 aa, Homo sapiens
  CDR3 for alpha chain variable domain of TCR clone 56970 (TRAV1-2, TRAJ16)
CAVNRFSDGQRLLL

SEQ ID NO: 113940 - protein, 15 aa, Homo sapiens
  CDR3 for beta chain variable domain of TCR clone 56970 (TRBV9, TRBJ1-6)
CASSVAGTGDSPLHF

SEQ ID NO: 113941 - protein, 14 aa, Homo sapiens
  CDR3 for alpha chain variable domain of TCR clone 56971 (TRAV12-3, TRAJ58)
CAMSTETSGSRLTF

SEQ ID NO: 113942 - protein, 13 aa, Homo sapiens
  CDR3 for beta chain variable domain of TCR clone 56971 (TRBV27, TRBJ2-3)
CASSWGRKDTQYF

SEQ ID NO: 113943 - protein, 13 aa, Homo sapiens
  CDR3 for alpha chain variable domain of TCR clone 56972 (TRAV3, TRAJ21)
CAVREPDFNKFYF

SEQ ID NO: 113944 - protein, 14 aa, Homo sapiens
  CDR3 for beta chain variable domain of TCR clone 56972 (TRBV4-1, TRBJ2-2)
CASSQAVNTGEMFF

SEQ ID NO: 113945 - protein, 14 aa, Homo sapiens
  CDR3 for alpha chain variable domain of TCR clone 56973 (TRAV13-2, TRAJ10)
CAENITEGGNKLTF

SEQ ID NO: 113946 - protein, 15 aa, Homo sapiens
  CDR3 for beta chain variable domain of TCR clone 56973 (TRBV7-2, TRBJ2-7)
CASSLGGAKSGEQYF

SEQ ID NO: 113947 - protein, 12 aa, Homo sapiens
  CDR3 for alpha chain variable domain of TCR clone 56974 (TRAV2, TRAJ34)
CAVERNTDKLIL

SEQ ID NO: 113948 - protein, 14 aa, Homo sapiens
  CDR3 for beta chain variable domain of TCR clone 56974 (TRBV7-9, TRBJ2-1)
CASSDNSGYNEQFF

SEQ ID NO: 113949 - protein, 12 aa, Homo sapiens
  CDR3 for alpha chain variable domain of TCR clone 56975 (TRAV17, TRAJ12)
CATLRSSYKLIF

SEQ ID NO: 113950 - protein, 16 aa, Homo sapiens
  CDR3 for beta chain variable domain of TCR clone 56975 (TRBV28, TRBJ2-7)
FASSLFFETGGPEQYF

SEQ ID NO: 113951 - protein, 13 aa, Homo sapiens
  CDR3 for alpha chain variable domain of TCR clone 56976 (TRAV34, TRAJ22)
CGAGAGSARQLTF

SEQ ID NO: 113952 - protein, 16 aa, Homo sapiens
  CDR3 for beta chain variable domain of TCR clone 56976 (TRBV7-3, TRBJ2-1)
CASSKPLAGGYNEQLF

SEQ ID NO: 113953 - protein, 12 aa, Homo sapiens
  CDR3 for alpha chain variable domain of TCR clone 56977 (TRAV21, TRAJ23)
CAVGPQGGKLIF

SEQ ID NO: 113954 - protein, 14 aa, Homo sapiens
  CDR3 for beta chain variable domain of TCR clone 56977 (TRBV19, TRBJ2-1)
CASPTFVLSGEQFF

SEQ ID NO: 113955 - protein, 14 aa, Homo sapiens
  CDR3 for alpha chain variable domain of TCR clone 56978 (TRAV8-3, TRAJ39)
CAVGANNAGNMLTF

SEQ ID NO: 113956 - protein, 15 aa, Homo sapiens
  CDR3 for beta chain variable domain of TCR clone 56978 (TRBV4-3, TRBJ2-7)
CASSQGGRGTYEQYF

SEQ ID NO: 113957 - protein, 15 aa, Homo sapiens
  CDR3 for alpha chain variable domain of TCR clone 56979 (TRAV21, TRAJ53)
CATLNSGGSNYKLTF

SEQ ID NO: 113958 - protein, 14 aa, Homo sapiens
  CDR3 for beta chain variable domain of TCR clone 56979 (TRBV7-2, TRBJ1-1)
CASSFLTGTTEAFF

SEQ ID NO: 113959 - protein, 16 aa, Homo sapiens
  CDR3 for alpha chain variable domain of TCR clone 56980 (TRAV21, TRAJ37)
CAVRPRGSSNTGKLIF

SEQ ID NO: 113960 - protein, 16 aa, Homo sapiens
  CDR3 for beta chain variable domain of TCR clone 56980 (TRBV2, TRBJ2-1)
CAGSVGGSLSYNEQFF

SEQ ID NO: 113961 - protein, 13 aa, Homo sapiens
  CDR3 for alpha chain variable domain of TCR clone 56981 (TRAV3, TRAJ21)
CAVREPDFNKFYF

SEQ ID NO: 113962 - protein, 15 aa, Homo sapiens
  CDR3 for beta chain variable domain of TCR clone 56981 (TRBV12-4, TRBJ2-5)
CASSPPTGLQETQYF

SEQ ID NO: 113963 - protein, 13 aa, Homo sapiens
  CDR3 for alpha chain variable domain of TCR clone 56982 (TRAV2, TRAJ40)
CAVVTSGTYKYIF

SEQ ID NO: 113964 - protein, 14 aa, Homo sapiens
  CDR3 for beta chain variable domain of TCR clone 56982 (TRBV2, TRBJ2-1)
CASRTGSSYNEQFF

SEQ ID NO: 113965 - protein, 15 aa, Homo sapiens
  CDR3 for alpha chain variable domain of TCR clone 56983 (TRAV26-2, TRAJ28)
CILVESGAGSYQLTF

SEQ ID NO: 113966 - protein, 16 aa, Homo sapiens
  CDR3 for beta chain variable domain of TCR clone 56983 (TRBV4-2, TRBJ1-2)
CASSQESGGASYGYTF

SEQ ID NO: 113967 - protein, 13 aa, Homo sapiens
  CDR3 for alpha chain variable domain of TCR clone 56984 (TRAV26-1, TRAJ20)
CIVRVGNDYKLSF

SEQ ID NO: 113968 - protein, 17 aa, Homo sapiens
  CDR3 for beta chain variable domain of TCR clone 56984 (TRBV12-4, TRBJ2-1)
CASSPGLAGGRINEQFF

SEQ ID NO: 113969 - protein, 13 aa, Homo sapiens
  CDR3 for alpha chain variable domain of TCR clone 56985 (TRAV1-1, TRAJ9)
CAAKNTGGFKTIF

SEQ ID NO: 113970 - protein, 12 aa, Homo sapiens
  CDR3 for beta chain variable domain of TCR clone 56985 (TRBV7-8, TRBJ2-7)
CASSLGDREQYF

SEQ ID NO: 113971 - protein, 13 aa, Homo sapiens
  CDR3 for alpha chain variable domain of TCR clone 56986 (TRAV36/DV7, TRAJ49)
CAVEANTGNQFYF

SEQ ID NO: 113972 - protein, 13 aa, Homo sapiens
  CDR3 for beta chain variable domain of TCR clone 56986 (TRBV10-3, TRBJ2-7)
CASKLAVNYEQYS

SEQ ID NO: 113973 - protein, 13 aa, Homo sapiens
  CDR3 for alpha chain variable domain of TCR clone 56987 (TRAV2, TRAJ15)
CAVASQAGTALIL

SEQ ID NO: 113974 - protein, 15 aa, Homo sapiens
  CDR3 for beta chain variable domain of TCR clone 56987 (TRBV20-1, TRBJ2-7)
CSARDRVPGMDEQYF

SEQ ID NO: 113975 - protein, 15 aa, Homo sapiens
  CDR3 for alpha chain variable domain of TCR clone 56988 (TRAV8-4, TRAJ6)
CAVSAPSGGSYIPTF

SEQ ID NO: 113976 - protein, 15 aa, Homo sapiens
  CDR3 for beta chain variable domain of TCR clone 56988 (TRBV2, TRBJ2-1)
CAGSEARSAYNEQFF

SEQ ID NO: 113977 - protein, 14 aa, Homo sapiens
  CDR3 for alpha chain variable domain of TCR clone 56989 (TRAV12-3, TRAJ10)
SHLPPTGGGNKLTF

SEQ ID NO: 113978 - protein, 15 aa, Homo sapiens
  CDR3 for beta chain variable domain of TCR clone 56989 (TRBV7-2, TRBJ2-7)
CASSLKGALTYEQYF

SEQ ID NO: 113979 - protein, 16 aa, Homo sapiens
  CDR3 for alpha chain variable domain of TCR clone 56990 (TRAV22, TRAJ45)
CAVARGKRGGADGLTF

SEQ ID NO: 113980 - protein, 13 aa, Homo sapiens
  CDR3 for beta chain variable domain of TCR clone 56990 (TRBV27, TRBJ1-1)
CASSLSIGAEAFF

SEQ ID NO: 113981 - protein, 13 aa, Homo sapiens
  CDR3 for alpha chain variable domain of TCR clone 56991 (TRAV8-3, TRAJ20)
CAVGRPNDYKLSF

SEQ ID NO: 113982 - protein, 14 aa, Homo sapiens
  CDR3 for beta chain variable domain of TCR clone 56991 (TRBV12-5, TRBJ2-5)
CASGSRTHQETQYL

SEQ ID NO: 113983 - protein, 14 aa, Homo sapiens
  CDR3 for alpha chain variable domain of TCR clone 56992 (TRAV36/DV7, TRAJ48)
CAQRRDFGNEKLTF

SEQ ID NO: 113984 - protein, 14 aa, Homo sapiens
  CDR3 for beta chain variable domain of TCR clone 56992 (TRBV28, TRBJ2-4)
CASTQVTGVNMQYF

SEQ ID NO: 113985 - protein, 11 aa, Homo sapiens
  CDR3 for alpha chain variable domain of TCR clone 56993 (TRAV12-2, TRAJ49)
CALQGGNQFYF

SEQ ID NO: 113986 - protein, 13 aa, Homo sapiens
  CDR3 for beta chain variable domain of TCR clone 56993 (TRBV4-1, TRBJ1-1)
CASGQLGTGEAFF

SEQ ID NO: 113987 - protein, 14 aa, Homo sapiens
  CDR3 for alpha chain variable domain of TCR clone 56994 (TRAV1-2, TRAJ8)
CAVREDTGFQRLVF

SEQ ID NO: 113988 - protein, 16 aa, Homo sapiens
  CDR3 for beta chain variable domain of TCR clone 56994 (TRBV27, TRBJ2-2)
CASSFRGLVRTGELFF

SEQ ID NO: 113989 - protein, 12 aa, Homo sapiens
  CDR3 for alpha chain variable domain of TCR clone 56995 (TRAV12-3, TRAJ17)
CAMTLTGNKLTF

SEQ ID NO: 113990 - protein, 15 aa, Homo sapiens
  CDR3 for beta chain variable domain of TCR clone 56995 (TRBV12-4, TRBJ2-5)
CQQFFCQGAPRDQYF

SEQ ID NO: 113991 - protein, 17 aa, Homo sapiens
  CDR3 for alpha chain variable domain of TCR clone 56996 (TRAV3, TRAJ12)
CAVRDGGRMDSSYKLIF

SEQ ID NO: 113992 - protein, 14 aa, Homo sapiens
  CDR3 for beta chain variable domain of TCR clone 56996 (TRBV7-9, TRBJ1-2)
CASSRQGANYGDTF

SEQ ID NO: 113993 - protein, 14 aa, Homo sapiens
  CDR3 for alpha chain variable domain of TCR clone 56997 (TRAV3, TRAJ21)
CAVESQANSNKFYF

SEQ ID NO: 113994 - protein, 18 aa, Homo sapiens
  CDR3 for beta chain variable domain of TCR clone 56997 (TRBV7-9, TRBJ2-1)
CASSLAVSGTSGRNEQFF

SEQ ID NO: 113995 - protein, 14 aa, Homo sapiens
  CDR3 for alpha chain variable domain of TCR clone 56998 (TRAV13-1, TRAJ40)
CAASMTSGTYQYIF

SEQ ID NO: 113996 - protein, 15 aa, Homo sapiens
  CDR3 for beta chain variable domain of TCR clone 56998 (TRBV7-3, TRBJ2-1)
CASSPTGGGEVEQFF

SEQ ID NO: 113997 - protein, 14 aa, Homo sapiens
  CDR3 for alpha chain variable domain of TCR clone 56999 (TRAV12-2, TRAJ53)
CAVKGGGSNYKLTL

SEQ ID NO: 113998 - protein, 15 aa, Homo sapiens
  CDR3 for beta chain variable domain of TCR clone 56999 (TRBV11-2, TRBJ2-2)
CASSSDRVNAGELFF

SEQ ID NO: 113999 - protein, 13 aa, Homo sapiens
  CDR3 for alpha chain variable domain of TCR clone 57000 (TRAV13-2, TRAJ53)
CAENMGSNYKLTF

SEQ ID NO: 114000 - protein, 13 aa, Homo sapiens
  CDR3 for beta chain variable domain of TCR clone 57000 (TRBV4-1, TRBJ2-2)
CASSQENTGKLFF

SEQ ID NO: 114001 - protein, 14 aa, Homo sapiens
  CDR3 for alpha chain variable domain of TCR clone 57001 (TRAV16, TRAJ17)
CALSGRAAGNKLNF

SEQ ID NO: 114002 - protein, 17 aa, Homo sapiens
  CDR3 for beta chain variable domain of TCR clone 57001 (TRBV18, TRBJ2-6)
CASSPRQGAVGANVLTF

SEQ ID NO: 114003 - protein, 13 aa, Homo sapiens
  CDR3 for alpha chain variable domain of TCR clone 57002 (TRAV17, TRAJ21)
CATDGGNFNKFYF

SEQ ID NO: 114004 - protein, 15 aa, Homo sapiens
  CDR3 for beta chain variable domain of TCR clone 57002 (TRBV5-1, TRBJ2-1)
CASSPPRAPYNEQFF

SEQ ID NO: 114005 - protein, 11 aa, Homo sapiens
  CDR3 for alpha chain variable domain of TCR clone 57003 (TRAV2, TRAJ33)
CAVASNYQLIW

SEQ ID NO: 114006 - protein, 13 aa, Homo sapiens
  CDR3 for beta chain variable domain of TCR clone 57003 (TRBV7-2, TRBJ2-7)
CASSSPSGSEQYF

SEQ ID NO: 114007 - protein, 18 aa, Homo sapiens
  CDR3 for alpha chain variable domain of TCR clone 57004 (TRAV26-1, TRAJ52)
CIVRVEGAGGTSYGKLTC

SEQ ID NO: 114008 - protein, 13 aa, Homo sapiens
  CDR3 for beta chain variable domain of TCR clone 57004 (TRBV7-3, TRBJ1-2)
CASSLKRGYGYTF

SEQ ID NO: 114009 - protein, 12 aa, Homo sapiens
  CDR3 for alpha chain variable domain of TCR clone 57005 (TRAV1-2, TRAJ24)
CAVGGSWGKFKF

SEQ ID NO: 114010 - protein, 15 aa, Homo sapiens
  CDR3 for beta chain variable domain of TCR clone 57005 (TRBV6-1, TRBJ2-7)
CASSEGVGNPYEQYF

SEQ ID NO: 114011 - protein, 11 aa, Homo sapiens
  CDR3 for alpha chain variable domain of TCR clone 57006 (TRAV13-1, TRAJ43)
CAAHNNNDMRF

SEQ ID NO: 114012 - protein, 15 aa, Homo sapiens
  CDR3 for beta chain variable domain of TCR clone 57006 (TRBV6-1, TRBJ2-2)
CASSRLRGDTWELFF

SEQ ID NO: 114013 - protein, 13 aa, Homo sapiens
  CDR3 for alpha chain variable domain of TCR clone 57007 (TRAV12-3, TRAJ9)
CAMRNTGGFKTIF

SEQ ID NO: 114014 - protein, 14 aa, Homo sapiens
  CDR3 for beta chain variable domain of TCR clone 57007 (TRBV11-2, TRBJ2-7)
CASSTTGEGYEQYF

SEQ ID NO: 114015 - protein, 12 aa, Homo sapiens
  CDR3 for alpha chain variable domain of TCR clone 57008 (TRAV12-2, TRAJ10)
WGVTGGGNKLTS

SEQ ID NO: 114016 - protein, 16 aa, Homo sapiens
  CDR3 for beta chain variable domain of TCR clone 57008 (TRBV6-4, TRBJ1-2)
CASSEAVGDPNYGYTF

SEQ ID NO: 114017 - protein, 15 aa, Homo sapiens
  CDR3 for alpha chain variable domain of TCR clone 57009 (TRAV12-2, TRAJ53)
CAVNGGGGSNCKLTF

SEQ ID NO: 114018 - protein, 17 aa, Homo sapiens
  CDR3 for beta chain variable domain of TCR clone 57009 (TRBV7-3, TRBJ2-3)
CASSLMKRMRGADTQYF

SEQ ID NO: 114019 - protein, 16 aa, Homo sapiens
  CDR3 for alpha chain variable domain of TCR clone 57010 (TRAV17, TRAJ28)
CATASVSGAGSYQLTF

SEQ ID NO: 114020 - protein, 11 aa, Homo sapiens
  CDR3 for beta chain variable domain of TCR clone 57010 (TRBV7-9, TRBJ2-5)
CARSLGETQYF

SEQ ID NO: 114021 - protein, 10 aa, Homo sapiens
  CDR3 for alpha chain variable domain of TCR clone 57011 (TRAV23/DV6, TRAJ57)
CAASSTLSQG

SEQ ID NO: 114022 - protein, 16 aa, Homo sapiens
  CDR3 for beta chain variable domain of TCR clone 57011 (TRBV25-1, TRBJ1-1)
CASSGDRDRGRIEAFF

SEQ ID NO: 114023 - protein, 12 aa, Homo sapiens
  CDR3 for alpha chain variable domain of TCR clone 57012 (TRAV21, TRAJ33)
CAKMDSNYQLIW

SEQ ID NO: 114024 - protein, 14 aa, Homo sapiens
  CDR3 for beta chain variable domain of TCR clone 57012 (TRBV2, TRBJ2-7)
CTSSLTSGGYEQYF

SEQ ID NO: 114025 - protein, 10 aa, Homo sapiens
  CDR3 for alpha chain variable domain of TCR clone 57013 (TRAV12-1, TRAJ43)
CVVHNNDMRF

SEQ ID NO: 114026 - protein, 13 aa, Homo sapiens
  CDR3 for beta chain variable domain of TCR clone 57013 (TRBV12-4, TRBJ1-2)
RASSSGLTVISTF

SEQ ID NO: 114027 - protein, 17 aa, Homo sapiens
  CDR3 for alpha chain variable domain of TCR clone 57014 (TRAV3, TRAJ6)
CAVRDGPRAGGSYIPTF

SEQ ID NO: 114028 - protein, 15 aa, Homo sapiens
  CDR3 for beta chain variable domain of TCR clone 57014 (TRBV7-2, TRBJ2-1)
CASSLASGRVNEQFF

SEQ ID NO: 114029 - protein, 14 aa, Homo sapiens
  CDR3 for alpha chain variable domain of TCR clone 57015 (TRAV26-1, TRAJ38)
CIADNAGNNRKLIW

SEQ ID NO: 114030 - protein, 17 aa, Homo sapiens
  CDR3 for beta chain variable domain of TCR clone 57015 (TRBV7-9, TRBJ2-3)
CASSPTLAGDLTDTQYF

SEQ ID NO: 114031 - protein, 15 aa, Homo sapiens
  CDR3 for alpha chain variable domain of TCR clone 57016 (TRAV3, TRAJ13)
CAVRVYSGGYQKVTF

SEQ ID NO: 114032 - protein, 15 aa, Homo sapiens
  CDR3 for beta chain variable domain of TCR clone 57016 (TRBV5-7, TRBJ1-2)
CASSLGVAANYGYTS

SEQ ID NO: 114033 - protein, 13 aa, Homo sapiens
  CDR3 for alpha chain variable domain of TCR clone 57017 (TRAV12-1, TRAJ34)
CVVTSYNTDKLIF

SEQ ID NO: 114034 - protein, 13 aa, Homo sapiens
  CDR3 for beta chain variable domain of TCR clone 57017 (TRBV28, TRBJ2-7)
CASKAGGVYEQYF

SEQ ID NO: 114035 - protein, 15 aa, Homo sapiens
  CDR3 for alpha chain variable domain of TCR clone 57018 (TRAV13-1, TRAJ32)
CAASNGWWCYKQAHL

SEQ ID NO: 114036 - protein, 15 aa, Homo sapiens
  CDR3 for beta chain variable domain of TCR clone 57018 (TRBV20-1, TRBJ1-2)
CSAIRTGAVNYGYTF

SEQ ID NO: 114037 - protein, 12 aa, Homo sapiens
  CDR3 for alpha chain variable domain of TCR clone 57019 (TRAV21, TRAJ33)
CAKMDSNYQLIW

SEQ ID NO: 114038 - protein, 14 aa, Homo sapiens
  CDR3 for beta chain variable domain of TCR clone 57019 (TRBV4-1, TRBJ2-2)
CASSQAVNTGELFF

SEQ ID NO: 114039 - protein, 17 aa, Homo sapiens
  CDR3 for alpha chain variable domain of TCR clone 57020 (TRAV13-1, TRAJ52)
CAAGRNAGGTSYGKLTF

SEQ ID NO: 114040 - protein, 13 aa, Homo sapiens
  CDR3 for beta chain variable domain of TCR clone 57020 (TRBV7-2, TRBJ1-1)
CASNLKGAKVAFV

SEQ ID NO: 114041 - protein, 13 aa, Homo sapiens
  CDR3 for alpha chain variable domain of TCR clone 57021 (TRAV12-1, TRAJ29)
CVVRNSGDTPLVF

SEQ ID NO: 114042 - protein, 14 aa, Homo sapiens
  CDR3 for beta chain variable domain of TCR clone 57021 (TRBV7-2, TRBJ2-7)
CASRSQGAAYEQYF

SEQ ID NO: 114043 - protein, 14 aa, Homo sapiens
  CDR3 for alpha chain variable domain of TCR clone 57022 (TRAV35, TRAJ22)
CAELRPGSARQLTF

SEQ ID NO: 114044 - protein, 15 aa, Homo sapiens
  CDR3 for beta chain variable domain of TCR clone 57022 (TRBV12-4, TRBJ2-5)
CASSPPTGLQETQYF

SEQ ID NO: 114045 - protein, 13 aa, Homo sapiens
  CDR3 for alpha chain variable domain of TCR clone 57023 (TRAV26-1, TRAJ34)
CIVRPWITDKLIF

SEQ ID NO: 114046 - protein, 13 aa, Homo sapiens
  CDR3 for beta chain variable domain of TCR clone 57023 (TRBV5-1, TRBJ2-1)
CARSLGSYNEQFF

SEQ ID NO: 114047 - protein, 15 aa, Homo sapiens
  CDR3 for alpha chain variable domain of TCR clone 57024 (TRAV8-3, TRAJ37)
CAVGARASNTGKRIF

SEQ ID NO: 114048 - protein, 15 aa, Homo sapiens
  CDR3 for beta chain variable domain of TCR clone 57024 (TRBV5-4, TRBJ2-3)
CASSLAGRVTDTQYF

SEQ ID NO: 114049 - protein, 16 aa, Homo sapiens
  CDR3 for alpha chain variable domain of TCR clone 57025 (TRAV14/DV4, TRAJ39)
CAMREAYNNAGNMLTF

SEQ ID NO: 114050 - protein, 13 aa, Homo sapiens
  CDR3 for beta chain variable domain of TCR clone 57025 (TRBV4-1, TRBJ2-3)
CASSQPPTDTQYF

SEQ ID NO: 114051 - protein, 16 aa, Homo sapiens
  CDR3 for alpha chain variable domain of TCR clone 57026 (TRAV20, TRAJ22)
CAVQASSSGSARQLTF

SEQ ID NO: 114052 - protein, 15 aa, Homo sapiens
  CDR3 for beta chain variable domain of TCR clone 57026 (TRBV19, TRBJ1-1)
CASTSGQIQNTEAFF

SEQ ID NO: 114053 - protein, 16 aa, Homo sapiens
  CDR3 for alpha chain variable domain of TCR clone 57027 (TRAV23/DV6, TRAJ9)
CAASIGGNTGGFKTTF

SEQ ID NO: 114054 - protein, 14 aa, Homo sapiens
  CDR3 for beta chain variable domain of TCR clone 57027 (TRBV6-1, TRBJ1-3)
CASVQGGGGNTIYF

SEQ ID NO: 114055 - protein, 14 aa, Homo sapiens
  CDR3 for alpha chain variable domain of TCR clone 57028 (TRAV2, TRAJ3)
CAVRPYSSASKIIF

SEQ ID NO: 114056 - protein, 17 aa, Homo sapiens
  CDR3 for beta chain variable domain of TCR clone 57028 (TRBV7-6, TRBJ2-5)
SASSSPQAGDPSETQYF

SEQ ID NO: 114057 - protein, 10 aa, Homo sapiens
  CDR3 for alpha chain variable domain of TCR clone 57029 (TRAV1-2, TRAJ23)
CAGQGGKLIF

SEQ ID NO: 114058 - protein, 16 aa, Homo sapiens
  CDR3 for beta chain variable domain of TCR clone 57029 (TRBV11-2, TRBJ1-1)
CASSLRQGGDHSKAFF

SEQ ID NO: 114059 - protein, 17 aa, Homo sapiens
  CDR3 for alpha chain variable domain of TCR clone 57030 (TRAV2, TRAJ32)
CAVEDLNYGGATNKLIF

SEQ ID NO: 114060 - protein, 14 aa, Homo sapiens
  CDR3 for beta chain variable domain of TCR clone 57030 (TRBV7-2, TRBJ2-7)
CASSPKTSFYEQYF

SEQ ID NO: 114061 - protein, 16 aa, Homo sapiens
  CDR3 for alpha chain variable domain of TCR clone 57031 (TRAV3, TRAJ5)
CAVRNLMDTGRRALTF

SEQ ID NO: 114062 - protein, 17 aa, Homo sapiens
  CDR3 for beta chain variable domain of TCR clone 57031 (TRBV7-8, TRBJ2-6)
CASSAGTGGAGANVLTF

SEQ ID NO: 114063 - protein, 15 aa, Homo sapiens
  CDR3 for alpha chain variable domain of TCR clone 57032 (TRAV3, TRAJ3)
CAVRDRDSSASKIIF

SEQ ID NO: 114064 - protein, 18 aa, Homo sapiens
  CDR3 for beta chain variable domain of TCR clone 57032 (TRBV25-1, TRBJ1-2)
CASSGLQNGQGLISGYTF

SEQ ID NO: 114065 - protein, 13 aa, Homo sapiens
  CDR3 for alpha chain variable domain of TCR clone 57033 (TRAV17, TRAJ9)
CATDYTGGFKTIF

SEQ ID NO: 114066 - protein, 16 aa, Homo sapiens
  CDR3 for beta chain variable domain of TCR clone 57033 (TRBV7-7, TRBJ2-1)
CASSLDSGTSYNEQFF

SEQ ID NO: 114067 - protein, 14 aa, Homo sapiens
  CDR3 for alpha chain variable domain of TCR clone 57034 (TRAV17, TRAJ23)
CATALGGQGGKLIF

SEQ ID NO: 114068 - protein, 15 aa, Homo sapiens
  CDR3 for beta chain variable domain of TCR clone 57034 (TRBV7-3, TRBJ2-2)
CASKANGANTGELFF

SEQ ID NO: 114069 - protein, 17 aa, Homo sapiens
  CDR3 for alpha chain variable domain of TCR clone 57035 (TRAV23/DV6, TRAJ57)
CAASSTLSQGGSEKLVF

SEQ ID NO: 114070 - protein, 14 aa, Homo sapiens
  CDR3 for beta chain variable domain of TCR clone 57035 (TRBV19, TRBJ1-5)
CASGTEVYNQPQHF

SEQ ID NO: 114071 - protein, 15 aa, Homo sapiens
  CDR3 for alpha chain variable domain of TCR clone 57036 (TRAV26-1, TRAJ39)
CIVRDGSNAGNMLTF

SEQ ID NO: 114072 - protein, 16 aa, Homo sapiens
  CDR3 for beta chain variable domain of TCR clone 57036 (TRBV7-2, TRBJ1-3)
CASSRLEASSGNTMYF

SEQ ID NO: 114073 - protein, 15 aa, Homo sapiens
  CDR3 for alpha chain variable domain of TCR clone 57037 (TRAV26-1, TRAJ56)
CIVRLATGANSKLTF

SEQ ID NO: 114074 - protein, 15 aa, Homo sapiens
  CDR3 for beta chain variable domain of TCR clone 57037 (TRBV27, TRBJ2-7)
CASSPQREGQREQYF

SEQ ID NO: 114075 - protein, 13 aa, Homo sapiens
  CDR3 for alpha chain variable domain of TCR clone 57038 (TRAV16, TRAJ31)
CALSAHNNARLMF

SEQ ID NO: 114076 - protein, 17 aa, Homo sapiens
  CDR3 for beta chain variable domain of TCR clone 57038 (TRBV12-4, TRBJ2-1)
CASSPGLAGGRINELFF

SEQ ID NO: 114077 - protein, 18 aa, Homo sapiens
  CDR3 for alpha chain variable domain of TCR clone 57039 (TRAV26-1, TRAJ27)
CIVRPSFNYNTNAGKSTF

SEQ ID NO: 114078 - protein, 14 aa, Homo sapiens
  CDR3 for beta chain variable domain of TCR clone 57039 (TRBV10-3, TRBJ1-6)
CAISVDGDESPLLF

SEQ ID NO: 114079 - protein, 14 aa, Homo sapiens
  CDR3 for alpha chain variable domain of TCR clone 57040 (TRAV27, TRAJ23)
CAGALDNQGGKLIF

SEQ ID NO: 114080 - protein, 15 aa, Homo sapiens
  CDR3 for beta chain variable domain of TCR clone 57040 (TRBV7-3, TRBJ2-7)
CASSLTGQGKYEQYF

SEQ ID NO: 114081 - protein, 11 aa, Homo sapiens
  CDR3 for alpha chain variable domain of TCR clone 57041 (TRAV1-2, TRAJ40)
CAVPGTYKYIF

SEQ ID NO: 114082 - protein, 15 aa, Homo sapiens
  CDR3 for beta chain variable domain of TCR clone 57041 (TRBV19, TRBJ1-6)
CASSTQGAVGSPLHF

SEQ ID NO: 114083 - protein, 15 aa, Homo sapiens
  CDR3 for alpha chain variable domain of TCR clone 57042 (TRAV23/DV6, TRAJ18)
CAARYRGSTLGRLYF

SEQ ID NO: 114084 - protein, 13 aa, Homo sapiens
  CDR3 for beta chain variable domain of TCR clone 57042 (TRBV7-2, TRBJ2-7)
CASSSPRGSEQYF

SEQ ID NO: 114085 - protein, 15 aa, Homo sapiens
  CDR3 for alpha chain variable domain of TCR clone 57043 (TRAV2, TRAJ9)
CAVEDRGTGGFKTIF

SEQ ID NO: 114086 - protein, 15 aa, Homo sapiens
  CDR3 for beta chain variable domain of TCR clone 57043 (TRBV7-2, TRBJ2-1)
CASSSGLAGGNEQFF

SEQ ID NO: 114087 - protein, 13 aa, Homo sapiens
  CDR3 for alpha chain variable domain of TCR clone 57044 (TRAV8-3, TRAJ28)
CAVGAVGSYQLTF

SEQ ID NO: 114088 - protein, 11 aa, Homo sapiens
  CDR3 for beta chain variable domain of TCR clone 57044 (TRBV12-4, TRBJ2-3)
CASTATDTQYF

SEQ ID NO: 114089 - protein, 14 aa, Homo sapiens
  CDR3 for alpha chain variable domain of TCR clone 57045 (TRAV13-2, TRAJ45)
CAETSGGGADGLTF

SEQ ID NO: 114090 - protein, 15 aa, Homo sapiens
  CDR3 for beta chain variable domain of TCR clone 57045 (TRBV9, TRBJ1-6)
CASSVAGTGDSPLHF

SEQ ID NO: 114091 - protein, 15 aa, Homo sapiens
  CDR3 for alpha chain variable domain of TCR clone 57046 (TRAV13-2, TRAJ53)
CAERGSRGSNYKLTF

SEQ ID NO: 114092 - protein, 14 aa, Homo sapiens
  CDR3 for beta chain variable domain of TCR clone 57046 (TRBV4-1, TRBJ2-2)
CASGQYPDTGELFF

SEQ ID NO: 114093 - protein, 15 aa, Homo sapiens
  CDR3 for alpha chain variable domain of TCR clone 57047 (TRAV34, TRAJ38)
CGADFTPGNNRKLIW

SEQ ID NO: 114094 - protein, 12 aa, Homo sapiens
  CDR3 for beta chain variable domain of TCR clone 57047 (TRBV5-1, TRBJ2-7)
CASSFRGYEQYF

SEQ ID NO: 114095 - protein, 14 aa, Homo sapiens
  CDR3 for alpha chain variable domain of TCR clone 57048 (TRAV17, TRAJ39)
CATDPVRAGNMLTF

SEQ ID NO: 114096 - protein, 15 aa, Homo sapiens
  CDR3 for beta chain variable domain of TCR clone 57048 (TRBV7-9, TRBJ1-5)
CASSQGHQPNQPQHF

SEQ ID NO: 114097 - protein, 14 aa, Homo sapiens
  CDR3 for alpha chain variable domain of TCR clone 57049 (TRAV1-2, TRAJ16)
CAVNRFSDGQKLLF

SEQ ID NO: 114098 - protein, 14 aa, Homo sapiens
  CDR3 for beta chain variable domain of TCR clone 57049 (TRBV19, TRBJ2-1)
CTSPTFVLSGEQFF

SEQ ID NO: 114099 - protein, 15 aa, Homo sapiens
  CDR3 for alpha chain variable domain of TCR clone 57050 (TRAV12-3, TRAJ49)
CAMAVTPNTGNQFYF

SEQ ID NO: 114100 - protein, 18 aa, Homo sapiens
  CDR3 for beta chain variable domain of TCR clone 57050 (TRBV10-3, TRBJ2-3)
CAISESRVGPMRGDTQYF

SEQ ID NO: 114101 - protein, 13 aa, Homo sapiens
  CDR3 for alpha chain variable domain of TCR clone 57051 (TRAV13-2, TRAJ5)
CAESDTGRRALTF

SEQ ID NO: 114102 - protein, 14 aa, Homo sapiens
  CDR3 for beta chain variable domain of TCR clone 57051 (TRBV2, TRBJ1-1)
CASTQVGENTEDFF

SEQ ID NO: 114103 - protein, 13 aa, Homo sapiens
  CDR3 for alpha chain variable domain of TCR clone 57052 (TRAV27, TRAJ41)
CAGEGNSGYALNF

SEQ ID NO: 114104 - protein, 14 aa, Homo sapiens
  CDR3 for beta chain variable domain of TCR clone 57052 (TRBV25-1, TRBJ1-1)
CASTHLGGNTEALF

SEQ ID NO: 114105 - protein, 11 aa, Homo sapiens
  CDR3 for alpha chain variable domain of TCR clone 57053 (TRAV12-2, TRAJ29)
CAVTLRSPPVF

SEQ ID NO: 114106 - protein, 16 aa, Homo sapiens
  CDR3 for beta chain variable domain of TCR clone 57053 (TRBV19, TRBJ1-5)
CASSIDRGGPRQPQHL

SEQ ID NO: 114107 - protein, 13 aa, Homo sapiens
  CDR3 for alpha chain variable domain of TCR clone 57054 (TRAV3, TRAJ21)
CAVREPDFNKFYF

SEQ ID NO: 114108 - protein, 14 aa, Homo sapiens
  CDR3 for beta chain variable domain of TCR clone 57054 (TRBV7-8, TRBJ2-3)
CASSLEAGTDTQYF

SEQ ID NO: 114109 - protein, 11 aa, Homo sapiens
  CDR3 for alpha chain variable domain of TCR clone 57055 (TRAV12-1, TRAJ21)
CVVYSFNKFYF

SEQ ID NO: 114110 - protein, 14 aa, Homo sapiens
  CDR3 for beta chain variable domain of TCR clone 57055 (TRBV19, TRBJ2-7)
CASSMGQGAIEQYF

SEQ ID NO: 114111 - protein, 11 aa, Homo sapiens
  CDR3 for alpha chain variable domain of TCR clone 57056 (TRAV35, TRAJ30)
CAGPGDDKIIF

SEQ ID NO: 114112 - protein, 14 aa, Homo sapiens
  CDR3 for beta chain variable domain of TCR clone 57056 (TRBV7-6, TRBJ1-6)
CASSQAGGGSPLHL

SEQ ID NO: 114113 - protein, 13 aa, Homo sapiens
  CDR3 for alpha chain variable domain of TCR clone 57057 (TRAV27, TRAJ45)
CRSSGGGADGLTF

SEQ ID NO: 114114 - protein, 14 aa, Homo sapiens
  CDR3 for beta chain variable domain of TCR clone 57057 (TRBV7-9, TRBJ2-1)
CASSPMVGFGEQFF

SEQ ID NO: 114115 - protein, 15 aa, Homo sapiens
  CDR3 for alpha chain variable domain of TCR clone 57058 (TRAV12-2, TRAJ57)
CAVSRGQGGSEKLVL

SEQ ID NO: 114116 - protein, 15 aa, Homo sapiens
  CDR3 for beta chain variable domain of TCR clone 57058 (TRBV5-1, TRBJ2-1)
CASSPPRAPYNEQFF

SEQ ID NO: 114117 - protein, 15 aa, Homo sapiens
  CDR3 for alpha chain variable domain of TCR clone 57059 (TRAV17, TRAJ57)
CATGPSQGVSEKLVF

SEQ ID NO: 114118 - protein, 17 aa, Homo sapiens
  CDR3 for beta chain variable domain of TCR clone 57059 (TRBV20-1, TRBJ2-1)
CSASSSGLAGSYNEQFF

SEQ ID NO: 114119 - protein, 12 aa, Homo sapiens
  CDR3 for alpha chain variable domain of TCR clone 57060 (TRAV8-3, TRAJ26)
CAGDNYGQNFVF

SEQ ID NO: 114120 - protein, 13 aa, Homo sapiens
  CDR3 for beta chain variable domain of TCR clone 57060 (TRBV15, TRBJ1-6)
CATSGGLNSPLHF

SEQ ID NO: 114121 - protein, 12 aa, Homo sapiens
  CDR3 for alpha chain variable domain of TCR clone 57061 (TRAV8-3, TRAJ20)
CAVDFNDCKLSF

SEQ ID NO: 114122 - protein, 13 aa, Homo sapiens
  CDR3 for beta chain variable domain of TCR clone 57061 (TRBV5-7, TRBJ2-3)
CASSLGRTDTQYF

SEQ ID NO: 114123 - protein, 12 aa, Homo sapiens
  CDR3 for alpha chain variable domain of TCR clone 57062 (TRAV12-1, TRAJ40)
CVVYSGAYKYIF

SEQ ID NO: 114124 - protein, 18 aa, Homo sapiens
  CDR3 for beta chain variable domain of TCR clone 57062 (TRBV11-2, TRBJ2-3)
CASSLGGASREAPNTQYF

SEQ ID NO: 114125 - protein, 13 aa, Homo sapiens
  CDR3 for alpha chain variable domain of TCR clone 57063 (TRAV12-3, TRAJ31)
CAMSANNNARLMF

SEQ ID NO: 114126 - protein, 16 aa, Homo sapiens
  CDR3 for beta chain variable domain of TCR clone 57063 (TRBV7-9, TRBJ1-2)
CASSLGFSSGKDGYTF

SEQ ID NO: 114127 - protein, 15 aa, Homo sapiens
  CDR3 for alpha chain variable domain of TCR clone 57064 (TRAV12-1, TRAJ44)
YVVDTPQGTASKLTF

SEQ ID NO: 114128 - protein, 14 aa, Homo sapiens
  CDR3 for beta chain variable domain of TCR clone 57064 (TRBV7-9, TRBJ2-1)
CASSPRDSLYEQFF

SEQ ID NO: 114129 - protein, 11 aa, Homo sapiens
  CDR3 for alpha chain variable domain of TCR clone 57065 (TRAV1-2, TRAJ40)
YAVPGTYEYIF

SEQ ID NO: 114130 - protein, 16 aa, Homo sapiens
  CDR3 for beta chain variable domain of TCR clone 57065 (TRBV29-1, TRBJ2-7)
CSVEVVGTSGSYEQYF

SEQ ID NO: 114131 - protein, 15 aa, Homo sapiens
  CDR3 for alpha chain variable domain of TCR clone 57066 (TRAV17, TRAJ57)
CATGPSQGGSEKLVF

SEQ ID NO: 114132 - protein, 15 aa, Homo sapiens
  CDR3 for beta chain variable domain of TCR clone 57066 (TRBV12-4, TRBJ2-5)
CASTLNSGRGETQYF

SEQ ID NO: 114133 - protein, 14 aa, Homo sapiens
  CDR3 for alpha chain variable domain of TCR clone 57067 (TRAV26-1, TRAJ45)
CIEVTGGGADGLTF

SEQ ID NO: 114134 - protein, 16 aa, Homo sapiens
  CDR3 for beta chain variable domain of TCR clone 57067 (TRBV10-2, TRBJ1-1)
CASGEFGEGASTEAFF

SEQ ID NO: 114135 - protein, 17 aa, Homo sapiens
  CDR3 for alpha chain variable domain of TCR clone 57068 (TRAV3, TRAJ12)
CAVRDGGRMDSSYKLIF

SEQ ID NO: 114136 - protein, 13 aa, Homo sapiens
  CDR3 for beta chain variable domain of TCR clone 57068 (TRBV20-1, TRBJ2-3)
CSARLAGTDTQYF

SEQ ID NO: 114137 - protein, 15 aa, Homo sapiens
  CDR3 for alpha chain variable domain of TCR clone 57069 (TRAV14/DV4, TRAJ10)
CAMRELTGGGNKLTF

SEQ ID NO: 114138 - protein, 18 aa, Homo sapiens
  CDR3 for beta chain variable domain of TCR clone 57069 (TRBV7-9, TRBJ2-7)
CASSLTTSGSRTWCEQYF

SEQ ID NO: 114139 - protein, 14 aa, Homo sapiens
  CDR3 for alpha chain variable domain of TCR clone 57070 (TRAV35, TRAJ29)
CAGQLTSGNTPLVF

SEQ ID NO: 114140 - protein, 15 aa, Homo sapiens
  CDR3 for beta chain variable domain of TCR clone 57070 (TRBV2, TRBJ2-1)
CASSELAGSYNEQFF

SEQ ID NO: 114141 - protein, 12 aa, Homo sapiens
  CDR3 for alpha chain variable domain of TCR clone 57071 (TRAV8-3, TRAJ20)
CAVGGGDHKLSF

SEQ ID NO: 114142 - protein, 12 aa, Homo sapiens
  CDR3 for beta chain variable domain of TCR clone 57071 (TRBV3-1, TRBJ2-7)
CASSQVRYEQYF

SEQ ID NO: 114143 - protein, 15 aa, Homo sapiens
  CDR3 for alpha chain variable domain of TCR clone 57072 (TRAV21, TRAJ24)
CAARSSTDSWGRLQF

SEQ ID NO: 114144 - protein, 15 aa, Homo sapiens
  CDR3 for beta chain variable domain of TCR clone 57072 (TRBV20-1, TRBJ1-1)
CSASRGVTGNTEAFF

SEQ ID NO: 114145 - protein, 10 aa, Homo sapiens
  CDR3 for alpha chain variable domain of TCR clone 57073 (TRAV1-2, TRAJ20)
CALNDYKLSF

SEQ ID NO: 114146 - protein, 14 aa, Homo sapiens
  CDR3 for beta chain variable domain of TCR clone 57073 (TRBV19, TRBJ2-1)
CASPTVVLSGEQFF

SEQ ID NO: 114147 - protein, 13 aa, Homo sapiens
  CDR3 for alpha chain variable domain of TCR clone 57074 (TRAV21, TRAJ20)
CAVGLRVDYKLSC

SEQ ID NO: 114148 - protein, 13 aa, Homo sapiens
  CDR3 for beta chain variable domain of TCR clone 57074 (TRBV6-1, TRBJ1-1)
CASSRQGNTEAFF

SEQ ID NO: 114149 - protein, 13 aa, Homo sapiens
  CDR3 for alpha chain variable domain of TCR clone 57075 (TRAV12-3, TRAJ7)
CAMTPYGNKRLAF

SEQ ID NO: 114150 - protein, 16 aa, Homo sapiens
  CDR3 for beta chain variable domain of TCR clone 57075 (TRBV20-1, TRBJ1-4)
CSARPYGGELNEKLFF

SEQ ID NO: 114151 - protein, 15 aa, Homo sapiens
  CDR3 for alpha chain variable domain of TCR clone 57076 (TRAV12-1, TRAJ45)
CVVLSGGGGADGLTF

SEQ ID NO: 114152 - protein, 15 aa, Homo sapiens
  CDR3 for beta chain variable domain of TCR clone 57076 (TRBV19, TRBJ2-1)
CASSSPGVPLDEQFF

SEQ ID NO: 114153 - protein, 12 aa, Homo sapiens
  CDR3 for alpha chain variable domain of TCR clone 57077 (TRAV2, TRAJ9)
CAVGAGGFKTIF

SEQ ID NO: 114154 - protein, 16 aa, Homo sapiens
  CDR3 for beta chain variable domain of TCR clone 57077 (TRBV13, TRBJ2-2)
CASSPKTGEHTGELFF

SEQ ID NO: 114155 - protein, 17 aa, Homo sapiens
  CDR3 for alpha chain variable domain of TCR clone 57078 (TRAV26-1, TRAJ37)
CIVRVITVSSNTGKLIF

SEQ ID NO: 114156 - protein, 13 aa, Homo sapiens
  CDR3 for beta chain variable domain of TCR clone 57078 (TRBV28, TRBJ2-2)
CASIRESTGELFF

SEQ ID NO: 114157 - protein, 14 aa, Homo sapiens
  CDR3 for alpha chain variable domain of TCR clone 57079 (TRAV17, TRAJ57)
CATDPQGGSEKLVF

SEQ ID NO: 114158 - protein, 16 aa, Homo sapiens
  CDR3 for beta chain variable domain of TCR clone 57079 (TRBV27, TRBJ2-2)
CASSFRGLVRTGGLFF

SEQ ID NO: 114159 - protein, 18 aa, Homo sapiens
  CDR3 for alpha chain variable domain of TCR clone 57080 (TRAV21, TRAJ52)
CAVRPSPAGGTSYGKLTF

SEQ ID NO: 114160 - protein, 13 aa, Homo sapiens
  CDR3 for beta chain variable domain of TCR clone 57080 (TRBV15, TRBJ1-6)
CATSGGLNSPLHF

SEQ ID NO: 114161 - protein, 16 aa, Homo sapiens
  CDR3 for alpha chain variable domain of TCR clone 57081 (TRAV20, TRAJ22)
CAVQASSSGSARQLTF

SEQ ID NO: 114162 - protein, 14 aa, Homo sapiens
  CDR3 for beta chain variable domain of TCR clone 57081 (TRBV7-2, TRBJ2-7)
CASSPKTSFYEQYF

SEQ ID NO: 114163 - protein, 13 aa, Homo sapiens
  CDR3 for alpha chain variable domain of TCR clone 57082 (TRAV21, TRAJ27)
FAAPPGNAGKSTF

SEQ ID NO: 114164 - protein, 14 aa, Homo sapiens
  CDR3 for beta chain variable domain of TCR clone 57082 (TRBV7-6, TRBJ2-3)
CASSLGTVTDTQYF

SEQ ID NO: 114165 - protein, 16 aa, Homo sapiens
  CDR3 for alpha chain variable domain of TCR clone 57083 (TRAV14/DV4, TRAJ20)
CAMREGRSRDDYKLSF

SEQ ID NO: 114166 - protein, 15 aa, Homo sapiens
  CDR3 for beta chain variable domain of TCR clone 57083 (TRBV6-5, TRBJ2-1)
CASSYDAGAGNEQFF

SEQ ID NO: 114167 - protein, 17 aa, Homo sapiens
  CDR3 for alpha chain variable domain of TCR clone 57084 (TRAV3, TRAJ38)
CAVRDCLNAGNNRKLIW

SEQ ID NO: 114168 - protein, 14 aa, Homo sapiens
  CDR3 for beta chain variable domain of TCR clone 57084 (TRBV5-5, TRBJ1-5)
CASGGQGVDQPQHF

SEQ ID NO: 114169 - protein, 14 aa, Homo sapiens
  CDR3 for alpha chain variable domain of TCR clone 57085 (TRAV1-2, TRAJ16)
CAVNRFSDGQKLLF

SEQ ID NO: 114170 - protein, 15 aa, Homo sapiens
  CDR3 for beta chain variable domain of TCR clone 57085 (TRBV9, TRBJ1-6)
CACSVAGTGDSPLHF

SEQ ID NO: 114171 - protein, 13 aa, Homo sapiens
  CDR3 for alpha chain variable domain of TCR clone 57086 (TRAV12-1, TRAJ26)
CVVRRNYGQNLVF

SEQ ID NO: 114172 - protein, 15 aa, Homo sapiens
  CDR3 for beta chain variable domain of TCR clone 57086 (TRBV28, TRBJ2-1)
CASSIIAGGRSEQFF

SEQ ID NO: 114173 - protein, 11 aa, Homo sapiens
  CDR3 for alpha chain variable domain of TCR clone 57087 (TRAV12-2, TRAJ23)
RAYNQGGKLIF

SEQ ID NO: 114174 - protein, 16 aa, Homo sapiens
  CDR3 for beta chain variable domain of TCR clone 57087 (TRBV20-1, TRBJ2-6)
CSASSQGYDGANVLTF

SEQ ID NO: 114175 - protein, 12 aa, Homo sapiens
  CDR3 for alpha chain variable domain of TCR clone 57088 (TRAV12-1, TRAJ40)
CVFYSGTYKYIF

SEQ ID NO: 114176 - protein, 14 aa, Homo sapiens
  CDR3 for beta chain variable domain of TCR clone 57088 (TRBV7-2, TRBJ2-5)
CASSPRGSSETQYF

SEQ ID NO: 114177 - protein, 14 aa, Homo sapiens
  CDR3 for alpha chain variable domain of TCR clone 57089 (TRAV26-1, TRAJ39)
CIFRGSRAGNMLTF

SEQ ID NO: 114178 - protein, 15 aa, Homo sapiens
  CDR3 for beta chain variable domain of TCR clone 57089 (TRBV7-9, TRBJ1-5)
CASSQGHQPNQPQHF

SEQ ID NO: 114179 - protein, 16 aa, Homo sapiens
  CDR3 for alpha chain variable domain of TCR clone 57090 (TRAV30, TRAJ24)
CGTEIVDADSWGKFPF

SEQ ID NO: 114180 - protein, 15 aa, Homo sapiens
  CDR3 for beta chain variable domain of TCR clone 57090 (TRBV20-1, TRBJ2-7)
CSARDRVSGMDEQYF

SEQ ID NO: 114181 - protein, 16 aa, Homo sapiens
  CDR3 for alpha chain variable domain of TCR clone 57091 (TRAV1-2, TRAJ16)
NVLDGLEEKDGQKLLF

SEQ ID NO: 114182 - protein, 16 aa, Homo sapiens
  CDR3 for beta chain variable domain of TCR clone 57091 (TRBV2, TRBJ2-1)
CASRSPAGGKYNEQFF

SEQ ID NO: 114183 - protein, 16 aa, Homo sapiens
  CDR3 for alpha chain variable domain of TCR clone 57092 (TRAV13-1, TRAJ45)
CAARGSRKGGDDGLTF

SEQ ID NO: 114184 - protein, 13 aa, Homo sapiens
  CDR3 for beta chain variable domain of TCR clone 57092 (TRBV12-4, TRBJ2-5)
CASRKRGKETQYF

SEQ ID NO: 114185 - protein, 12 aa, Homo sapiens
  CDR3 for alpha chain variable domain of TCR clone 57093 (TRAV12-2, TRAJ4)
GWPEGGYNKRIF

SEQ ID NO: 114186 - protein, 16 aa, Homo sapiens
  CDR3 for beta chain variable domain of TCR clone 57093 (TRBV6-1, TRBJ2-5)
CASSETLDRGAETQYF

SEQ ID NO: 114187 - protein, 12 aa, Homo sapiens
  CDR3 for alpha chain variable domain of TCR clone 57094 (TRAV14/DV4, TRAJ9)
CAMNPGGFKTIF

SEQ ID NO: 114188 - protein, 16 aa, Homo sapiens
  CDR3 for beta chain variable domain of TCR clone 57094 (TRBV28, TRBJ2-5)
CASSFSTAGGWETQYF

SEQ ID NO: 114189 - protein, 14 aa, Homo sapiens
  CDR3 for alpha chain variable domain of TCR clone 57095 (TRAV12-2, TRAJ13)
CAVKKTGGYQKVTF

SEQ ID NO: 114190 - protein, 13 aa, Homo sapiens
  CDR3 for beta chain variable domain of TCR clone 57095 (TRBV6-4, TRBJ2-1)
CASSVEREEEQFF

SEQ ID NO: 114191 - protein, 14 aa, Homo sapiens
  CDR3 for alpha chain variable domain of TCR clone 57096 (TRAV1-2, TRAJ16)
CAVNRFSGGQKLLF

SEQ ID NO: 114192 - protein, 13 aa, Homo sapiens
  CDR3 for beta chain variable domain of TCR clone 57096 (TRBV19, TRBJ2-7)
CASSTSGSYEQYF

SEQ ID NO: 114193 - protein, 14 aa, Homo sapiens
  CDR3 for alpha chain variable domain of TCR clone 57097 (TRAV8-3, TRAJ9)
CAVVYNTGGFKTNF

SEQ ID NO: 114194 - protein, 14 aa, Homo sapiens
  CDR3 for beta chain variable domain of TCR clone 57097 (TRBV7-3, TRBJ2-2)
CASSSGGYTGELFF

SEQ ID NO: 114195 - protein, 17 aa, Homo sapiens
  CDR3 for alpha chain variable domain of TCR clone 57098 (TRAV14/DV4, TRAJ10)
CAMREGRTTGGGNKLTF

SEQ ID NO: 114196 - protein, 14 aa, Homo sapiens
  CDR3 for beta chain variable domain of TCR clone 57098 (TRBV3-1, TRBJ1-5)
CASSPLWSNQPQHF

SEQ ID NO: 114197 - protein, 13 aa, Homo sapiens
  CDR3 for alpha chain variable domain of TCR clone 57099 (TRAV3, TRAJ29)
CAVRDIIDTPLVF

SEQ ID NO: 114198 - protein, 14 aa, Homo sapiens
  CDR3 for beta chain variable domain of TCR clone 57099 (TRBV27, TRBJ2-1)
CASSVTGGYNEQFF

SEQ ID NO: 114199 - protein, 14 aa, Homo sapiens
  CDR3 for alpha chain variable domain of TCR clone 57100 (TRAV23/DV6, TRAJ8)
CAASKTTGFQKLVF

SEQ ID NO: 114200 - protein, 15 aa, Homo sapiens
  CDR3 for beta chain variable domain of TCR clone 57100 (TRBV28, TRBJ2-3)
CASSPDRQGANTQYF

SEQ ID NO: 114201 - protein, 14 aa, Homo sapiens
  CDR3 for alpha chain variable domain of TCR clone 57101 (TRAV4, TRAJ32)
CLVNYGGATIKLIF

SEQ ID NO: 114202 - protein, 14 aa, Homo sapiens
  CDR3 for beta chain variable domain of TCR clone 57101 (TRBV15, TRBJ2-5)
CATSGGTRTETQYF

SEQ ID NO: 114203 - protein, 16 aa, Homo sapiens
  CDR3 for alpha chain variable domain of TCR clone 57102 (TRAV3, TRAJ37)
CAVRPHGSGNTGKLIF

SEQ ID NO: 114204 - protein, 16 aa, Homo sapiens
  CDR3 for beta chain variable domain of TCR clone 57102 (TRBV9, TRBJ1-2)
CASSVGEKVSPYGYTF

SEQ ID NO: 114205 - protein, 14 aa, Homo sapiens
  CDR3 for alpha chain variable domain of TCR clone 57103 (TRAV12-3, TRAJ10)
SHLPLPGGGNKLTF

SEQ ID NO: 114206 - protein, 13 aa, Homo sapiens
  CDR3 for beta chain variable domain of TCR clone 57103 (TRBV9, TRBJ2-1)
CASSPSGGNEQFF

SEQ ID NO: 114207 - protein, 15 aa, Homo sapiens
  CDR3 for alpha chain variable domain of TCR clone 57104 (TRAV26-1, TRAJ44)
CIVRSNTGTASKLTF

SEQ ID NO: 114208 - protein, 16 aa, Homo sapiens
  CDR3 for beta chain variable domain of TCR clone 57104 (TRBV7-7, TRBJ2-1)
CASSLASGTSYNEQFF

SEQ ID NO: 114209 - protein, 13 aa, Homo sapiens
  CDR3 for alpha chain variable domain of TCR clone 57105 (TRAV29/DV5, TRAJ31)
CAASRNNNARLMF

SEQ ID NO: 114210 - protein, 15 aa, Homo sapiens
  CDR3 for beta chain variable domain of TCR clone 57105 (TRBV7-2, TRBJ2-1)
CASSSGLAGGNEQFF

SEQ ID NO: 114211 - protein, 11 aa, Homo sapiens
  CDR3 for alpha chain variable domain of TCR clone 57106 (TRAV19, TRAJ24)
CAPLHYRQLTA

SEQ ID NO: 114212 - protein, 13 aa, Homo sapiens
  CDR3 for beta chain variable domain of TCR clone 57106 (TRBV12-5, TRBJ2-3)
CASGDRQSDTQYF

SEQ ID NO: 114213 - protein, 17 aa, Homo sapiens
  CDR3 for alpha chain variable domain of TCR clone 57107 (TRAV3, TRAJ6)
CAVRDGPRAGGSYIPTF

SEQ ID NO: 114214 - protein, 16 aa, Homo sapiens
  CDR3 for beta chain variable domain of TCR clone 57107 (TRBV6-1, TRBJ1-3)
CASVQGGVETPYILER

SEQ ID NO: 114215 - protein, 14 aa, Homo sapiens
  CDR3 for alpha chain variable domain of TCR clone 57108 (TRAV21, TRAJ35)
CAEMPIGFGNVLHC

SEQ ID NO: 114216 - protein, 12 aa, Homo sapiens
  CDR3 for beta chain variable domain of TCR clone 57108 (TRBV7-9, TRBJ2-7)
CASSIKREEQYF

SEQ ID NO: 114217 - protein, 18 aa, Homo sapiens
  CDR3 for alpha chain variable domain of TCR clone 57109 (TRAV12-3, TRAJ52)
CAMSVGGAGGTSYGKLTF

SEQ ID NO: 114218 - protein, 15 aa, Homo sapiens
  CDR3 for beta chain variable domain of TCR clone 57109 (TRBV27, TRBJ1-6)
CASSFGRGLGSPLHF

SEQ ID NO: 114219 - protein, 13 aa, Homo sapiens
  CDR3 for alpha chain variable domain of TCR clone 57110 (TRAV12-2, TRAJ10)
CAVPTGGGNKLTF

SEQ ID NO: 114220 - protein, 11 aa, Homo sapiens
  CDR3 for beta chain variable domain of TCR clone 57110 (TRBV6-1, TRBJ2-1)
CASISSNEQLF

SEQ ID NO: 114221 - protein, 15 aa, Homo sapiens
  CDR3 for alpha chain variable domain of TCR clone 57111 (TRAV12-3, TRAJ27)
CAMRAYNTTAGKSTF

SEQ ID NO: 114222 - protein, 13 aa, Homo sapiens
  CDR3 for beta chain variable domain of TCR clone 57111 (TRBV11-2, TRBJ2-5)
CASSRGPSETQYF

SEQ ID NO: 114223 - protein, 11 aa, Homo sapiens
  CDR3 for alpha chain variable domain of TCR clone 57112 (TRAV2, TRAJ31)
CAAGPPARLMF

SEQ ID NO: 114224 - protein, 16 aa, Homo sapiens
  CDR3 for beta chain variable domain of TCR clone 57112 (TRBV4-2, TRBJ1-1)
CASSQAGFGMNTEAFF

SEQ ID NO: 114225 - protein, 15 aa, Homo sapiens
  CDR3 for alpha chain variable domain of TCR clone 57113 (TRAV3, TRAJ22)
CAVRDRGGSARQLTF

SEQ ID NO: 114226 - protein, 16 aa, Homo sapiens
  CDR3 for beta chain variable domain of TCR clone 57113 (TRBV5-4, TRBJ2-3)
CASQQPGEGGADTQYF

SEQ ID NO: 114227 - protein, 12 aa, Homo sapiens
  CDR3 for alpha chain variable domain of TCR clone 57114 (TRAV12-2, TRAJ10)
WGVTGGGNKLTF

SEQ ID NO: 114228 - protein, 18 aa, Homo sapiens
  CDR3 for beta chain variable domain of TCR clone 57114 (TRBV7-2, TRBJ2-3)
CASSLKREGSGITDTQYF

SEQ ID NO: 114229 - protein, 16 aa, Homo sapiens
  CDR3 for alpha chain variable domain of TCR clone 57115 (TRAV27, TRAJ13)
CAGAKSDSGGYQKVTF

SEQ ID NO: 114230 - protein, 15 aa, Homo sapiens
  CDR3 for beta chain variable domain of TCR clone 57115 (TRBV29-1, TRBJ2-1)
CSVGRHDLFYNEQFF

SEQ ID NO: 114231 - protein, 14 aa, Homo sapiens
  CDR3 for alpha chain variable domain of TCR clone 57116 (TRAV1-2, TRAJ8)
CAVREDTGFQKLVF

SEQ ID NO: 114232 - protein, 16 aa, Homo sapiens
  CDR3 for beta chain variable domain of TCR clone 57116 (TRBV29-1, TRBJ2-7)
CSVEDAEDGTAYEQYF

SEQ ID NO: 114233 - protein, 14 aa, Homo sapiens
  CDR3 for alpha chain variable domain of TCR clone 57117 (TRAV1-2, TRAJ8)
CAVREDTGFQKLVF

SEQ ID NO: 114234 - protein, 15 aa, Homo sapiens
  CDR3 for beta chain variable domain of TCR clone 57117 (TRBV10-1, TRBJ2-3)
CASSATSGGFDTQYF

SEQ ID NO: 114235 - protein, 16 aa, Homo sapiens
  CDR3 for alpha chain variable domain of TCR clone 57118 (TRAV16, TRAJ37)
CSKWPDGSSNTGELIF

SEQ ID NO: 114236 - protein, 13 aa, Homo sapiens
  CDR3 for beta chain variable domain of TCR clone 57118 (TRBV7-2, TRBJ2-2)
CASSLAVTGELFF

SEQ ID NO: 114237 - protein, 13 aa, Homo sapiens
  CDR3 for alpha chain variable domain of TCR clone 57119 (TRAV8-3, TRAJ23)
CAGIYNQGGKLIF

SEQ ID NO: 114238 - protein, 14 aa, Homo sapiens
  CDR3 for beta chain variable domain of TCR clone 57119 (TRBV7-3, TRBJ2-7)
CASSLSGVSYEQYF

SEQ ID NO: 114239 - protein, 14 aa, Homo sapiens
  CDR3 for alpha chain variable domain of TCR clone 57120 (TRAV38-1, TRAJ45)
CASHSGGGADGLTF

SEQ ID NO: 114240 - protein, 10 aa, Homo sapiens
  CDR3 for beta chain variable domain of TCR clone 57120 (TRBV20-1, TRBJ2-5)
CSARFETQYF

SEQ ID NO: 114241 - protein, 14 aa, Homo sapiens
  CDR3 for alpha chain variable domain of TCR clone 57121 (TRAV12-2, TRAJ40)
RAVKIPSGTYKYIF

SEQ ID NO: 114242 - protein, 17 aa, Homo sapiens
  CDR3 for beta chain variable domain of TCR clone 57121 (TRBV13, TRBJ2-3)
CASSLSRVAGGRNTQYF

SEQ ID NO: 114243 - protein, 18 aa, Homo sapiens
  CDR3 for alpha chain variable domain of TCR clone 57122 (TRAV21, TRAJ52)
CAVRPSPAGGTSYGKLTF

SEQ ID NO: 114244 - protein, 15 aa, Homo sapiens
  CDR3 for beta chain variable domain of TCR clone 57122 (TRBV28, TRBJ2-5)
CASSSGRTIQETQYF

SEQ ID NO: 114245 - protein, 13 aa, Homo sapiens
  CDR3 for alpha chain variable domain of TCR clone 57123 (TRAV12-1, TRAJ7)
CVVNMRGNSRLAF

SEQ ID NO: 114246 - protein, 15 aa, Homo sapiens
  CDR3 for beta chain variable domain of TCR clone 57123 (TRBV27, TRBJ2-3)
CASSLGLAATDTQYF

SEQ ID NO: 114247 - protein, 14 aa, Homo sapiens
  CDR3 for alpha chain variable domain of TCR clone 57124 (TRAV12-3, TRAJ54)
CAMRGIQGAQKLGF

SEQ ID NO: 114248 - protein, 13 aa, Homo sapiens
  CDR3 for beta chain variable domain of TCR clone 57124 (TRBV19, TRBJ1-1)
CASSPSNGGEAFF

SEQ ID NO: 114249 - protein, 15 aa, Homo sapiens
  CDR3 for alpha chain variable domain of TCR clone 57125 (TRAV27, TRAJ38)
CAGRFNAGNNRKLIW

SEQ ID NO: 114250 - protein, 13 aa, Homo sapiens
  CDR3 for beta chain variable domain of TCR clone 57125 (TRBV12-5, TRBJ2-3)
CASQNRGTDTRYF

SEQ ID NO: 114251 - protein, 17 aa, Homo sapiens
  CDR3 for alpha chain variable domain of TCR clone 57126 (TRAV13-1, TRAJ28)
CAASPPYSGAGSYKLTF

SEQ ID NO: 114252 - protein, 15 aa, Homo sapiens
  CDR3 for beta chain variable domain of TCR clone 57126 (TRBV6-3, TRBJ2-2)
CASSFLATLTGELFF

SEQ ID NO: 114253 - protein, 14 aa, Homo sapiens
  CDR3 for alpha chain variable domain of TCR clone 57127 (TRAV1-2, TRAJ16)
CAVNRFSDGKKLLF

SEQ ID NO: 114254 - protein, 13 aa, Homo sapiens
  CDR3 for beta chain variable domain of TCR clone 57127 (TRBV4-1, TRBJ2-1)
CASSQAGGDEQFF

SEQ ID NO: 114255 - protein, 17 aa, Homo sapiens
  CDR3 for alpha chain variable domain of TCR clone 57128 (TRAV16, TRAJ58)
CITVLSNGETSGSRLTF

SEQ ID NO: 114256 - protein, 13 aa, Homo sapiens
  CDR3 for beta chain variable domain of TCR clone 57128 (TRBV20-1, TRBJ2-2)
CSASAAGTGELFL

SEQ ID NO: 114257 - protein, 13 aa, Homo sapiens
  CDR3 for alpha chain variable domain of TCR clone 57129 (TRAV8-3, TRAJ44)
CAVVPGPASKLTF

SEQ ID NO: 114258 - protein, 14 aa, Homo sapiens
  CDR3 for beta chain variable domain of TCR clone 57129 (TRBV11-2, TRBJ2-3)
CASRRLARTDTQYF

SEQ ID NO: 114259 - protein, 18 aa, Homo sapiens
  CDR3 for alpha chain variable domain of TCR clone 57130 (TRAV16, TRAJ52)
CALSGVDAGGTSYGKLTL

SEQ ID NO: 114260 - protein, 15 aa, Homo sapiens
  CDR3 for beta chain variable domain of TCR clone 57130 (TRBV11-3, TRBJ2-3)
CASSAGTVVTNTQYF

SEQ ID NO: 114261 - protein, 13 aa, Homo sapiens
  CDR3 for alpha chain variable domain of TCR clone 57131 (TRAV3, TRAJ21)
CAVREPDFNKFYF

SEQ ID NO: 114262 - protein, 15 aa, Homo sapiens
  CDR3 for beta chain variable domain of TCR clone 57131 (TRBV27, TRBJ2-7)
CASSTAGTGSYEQYF

SEQ ID NO: 114263 - protein, 12 aa, Homo sapiens
  CDR3 for alpha chain variable domain of TCR clone 57132 (TRAV29/DV5, TRAJ49)
CAATDTGNQFYF

SEQ ID NO: 114264 - protein, 19 aa, Homo sapiens
  CDR3 for beta chain variable domain of TCR clone 57132 (TRBV25-1, TRBJ2-2)
CAILVYRVGRGRKTGELFF

SEQ ID NO: 114265 - protein, 13 aa, Homo sapiens
  CDR3 for alpha chain variable domain of TCR clone 57133 (TRAV13-1, TRAJ39)
CAASIWAGNMLTF

SEQ ID NO: 114266 - protein, 15 aa, Homo sapiens
  CDR3 for beta chain variable domain of TCR clone 57133 (TRBV7-9, TRBJ1-1)
CASSLLEQGSTEAFF

SEQ ID NO: 114267 - protein, 15 aa, Homo sapiens
  CDR3 for alpha chain variable domain of TCR clone 57134 (TRAV8-3, TRAJ45)
CASSYSGGGADGLTF

SEQ ID NO: 114268 - protein, 14 aa, Homo sapiens
  CDR3 for beta chain variable domain of TCR clone 57134 (TRBV7-7, TRBJ2-2)
CASSRDRSTGELFF

SEQ ID NO: 114269 - protein, 11 aa, Homo sapiens
  CDR3 for alpha chain variable domain of TCR clone 57135 (TRAV2, TRAJ21)
CAVFNFNKFYF

SEQ ID NO: 114270 - protein, 13 aa, Homo sapiens
  CDR3 for beta chain variable domain of TCR clone 57135 (TRBV7-9, TRBJ1-2)
CASSLKQNYGYTF

SEQ ID NO: 114271 - protein, 14 aa, Homo sapiens
  CDR3 for alpha chain variable domain of TCR clone 57136 (TRAV20, TRAJ20)
CAVRRGYNDYKLSF

SEQ ID NO: 114272 - protein, 13 aa, Homo sapiens
  CDR3 for beta chain variable domain of TCR clone 57136 (TRBV19, TRBJ2-5)
CASSETAPGTQYF

SEQ ID NO: 114273 - protein, 13 aa, Homo sapiens
  CDR3 for alpha chain variable domain of TCR clone 57137 (TRAV3, TRAJ40)
CAVREPDFYKYIF

SEQ ID NO: 114274 - protein, 14 aa, Homo sapiens
  CDR3 for beta chain variable domain of TCR clone 57137 (TRBV23-1, TRBJ2-5)
CASSFLRSQETQYF

SEQ ID NO: 114275 - protein, 13 aa, Homo sapiens
  CDR3 for alpha chain variable domain of TCR clone 57138 (TRAV29/DV5, TRAJ31)
CTASRNNNARLMF

SEQ ID NO: 114276 - protein, 12 aa, Homo sapiens
  CDR3 for beta chain variable domain of TCR clone 57138 (TRBV11-2, TRBJ2-1)
CASSPGNNEQFF

SEQ ID NO: 114277 - protein, 16 aa, Homo sapiens
  CDR3 for alpha chain variable domain of TCR clone 57139 (TRAV30, TRAJ24)
CGTEIVDADSWGKFQF

SEQ ID NO: 114278 - protein, 16 aa, Homo sapiens
  CDR3 for beta chain variable domain of TCR clone 57139 (TRBV28, TRBJ2-7)
CASSSPVGTGGPWQYF

SEQ ID NO: 114279 - protein, 11 aa, Homo sapiens
  CDR3 for alpha chain variable domain of TCR clone 57140 (TRAV1-1, TRAJ23)
CAVRQGGKLIF

SEQ ID NO: 114280 - protein, 20 aa, Homo sapiens
  CDR3 for beta chain variable domain of TCR clone 57140 (TRBV7-8, TRBJ2-2)
CASSHLFPGPPVHITGELFF

SEQ ID NO: 114281 - protein, 12 aa, Homo sapiens
  CDR3 for alpha chain variable domain of TCR clone 57141 (TRAV13-2, TRAJ8)
CSPWLGFQKLVF

SEQ ID NO: 114282 - protein, 13 aa, Homo sapiens
  CDR3 for beta chain variable domain of TCR clone 57141 (TRBV12-4, TRBJ1-5)
CASSPDRAQPQHF

SEQ ID NO: 114283 - protein, 16 aa, Homo sapiens
  CDR3 for alpha chain variable domain of TCR clone 57142 (TRAV20, TRAJ22)
CDVQASSSGSARQLTF

SEQ ID NO: 114284 - protein, 13 aa, Homo sapiens
  CDR3 for beta chain variable domain of TCR clone 57142 (TRBV7-2, TRBJ2-5)
CASSQTSVETQYF

SEQ ID NO: 114285 - protein, 12 aa, Homo sapiens
  CDR3 for alpha chain variable domain of TCR clone 57143 (TRAV35, TRAJ49)
CARWNTGNQFYF

SEQ ID NO: 114286 - protein, 16 aa, Homo sapiens
  CDR3 for beta chain variable domain of TCR clone 57143 (TRBV5-1, TRBJ2-2)
CASSLWDTTNTGELFF

SEQ ID NO: 114287 - protein, 13 aa, Homo sapiens
  CDR3 for alpha chain variable domain of TCR clone 57144 (TRAV38-2/DV8, TRAJ34)
CAYRDYNTDKLIF

SEQ ID NO: 114288 - protein, 15 aa, Homo sapiens
  CDR3 for beta chain variable domain of TCR clone 57144 (TRBV20-1, TRBJ2-5)
CSAEGTGGLQETQYF

SEQ ID NO: 114289 - protein, 14 aa, Homo sapiens
  CDR3 for alpha chain variable domain of TCR clone 57145 (TRAV26-1, TRAJ26)
CIVRATFLGQNFVF

SEQ ID NO: 114290 - protein, 16 aa, Homo sapiens
  CDR3 for beta chain variable domain of TCR clone 57145 (TRBV12-4, TRBJ2-7)
CASRATGTGPSYEQYF

SEQ ID NO: 114291 - protein, 13 aa, Homo sapiens
  CDR3 for alpha chain variable domain of TCR clone 57146 (TRAV30, TRAJ6)
CGFIEGGSYIPTF

SEQ ID NO: 114292 - protein, 13 aa, Homo sapiens
  CDR3 for beta chain variable domain of TCR clone 57146 (TRBV5-4, TRBJ2-5)
CASSPVAQETQYF

SEQ ID NO: 114293 - protein, 15 aa, Homo sapiens
  CDR3 for alpha chain variable domain of TCR clone 57147 (TRAV8-3, TRAJ45)
CASSYSGGGAAGLTF

SEQ ID NO: 114294 - protein, 18 aa, Homo sapiens
  CDR3 for beta chain variable domain of TCR clone 57147 (TRBV18, TRBJ1-3)
CASSPRGGAGPSGNTIYF

SEQ ID NO: 114295 - protein, 14 aa, Homo sapiens
  CDR3 for alpha chain variable domain of TCR clone 57148 (TRAV35, TRAJ50)
CAGHRRTSYDKVIF

SEQ ID NO: 114296 - protein, 13 aa, Homo sapiens
  CDR3 for beta chain variable domain of TCR clone 57148 (TRBV7-7, TRBJ2-3)
CASSLSRADTQYF

SEQ ID NO: 114297 - protein, 16 aa, Homo sapiens
  CDR3 for alpha chain variable domain of TCR clone 57149 (TRAV30, TRAJ24)
CGTEIVDADSWGNSSL

SEQ ID NO: 114298 - protein, 13 aa, Homo sapiens
  CDR3 for beta chain variable domain of TCR clone 57149 (TRBV7-2, TRBJ1-4)
CASSLAGLEKLFF

SEQ ID NO: 114299 - protein, 18 aa, Homo sapiens
  CDR3 for alpha chain variable domain of TCR clone 57150 (TRAV21, TRAJ52)
CAVRPSPAGGTSYGKLTF

SEQ ID NO: 114300 - protein, 13 aa, Homo sapiens
  CDR3 for beta chain variable domain of TCR clone 57150 (TRBV2, TRBJ2-7)
CASSVGGSGEQYF

SEQ ID NO: 114301 - protein, 11 aa, Homo sapiens
  CDR3 for alpha chain variable domain of TCR clone 57151 (TRAV13-1, TRAJ6)
CATLGSYIPTF

SEQ ID NO: 114302 - protein, 14 aa, Homo sapiens
  CDR3 for beta chain variable domain of TCR clone 57151 (TRBV7-3, TRBJ1-5)
RASSFSGCNQPQHF

SEQ ID NO: 114303 - protein, 11 aa, Homo sapiens
  CDR3 for alpha chain variable domain of TCR clone 57152 (TRAV39, TRAJ49)
CAVDISNQFYF

SEQ ID NO: 114304 - protein, 11 aa, Homo sapiens
  CDR3 for beta chain variable domain of TCR clone 57152 (TRBV7-8, TRBJ2-7)
CASSLSLEQYF

SEQ ID NO: 114305 - protein, 14 aa, Homo sapiens
  CDR3 for alpha chain variable domain of TCR clone 57153 (TRAV17, TRAJ24)
CATLTTDSWGKFQF

SEQ ID NO: 114306 - protein, 16 aa, Homo sapiens
  CDR3 for beta chain variable domain of TCR clone 57153 (TRBV4-2, TRBJ2-7)
CASSHDGGSLRGEQYF

SEQ ID NO: 114307 - protein, 14 aa, Homo sapiens
  CDR3 for alpha chain variable domain of TCR clone 57154 (TRAV16, TRAJ33)
CALSAMDSNYQLIW

SEQ ID NO: 114308 - protein, 16 aa, Homo sapiens
  CDR3 for beta chain variable domain of TCR clone 57154 (TRBV12-5, TRBJ2-5)
CASGPRTSGNQETQYF

SEQ ID NO: 114309 - protein, 12 aa, Homo sapiens
  CDR3 for alpha chain variable domain of TCR clone 57155 (TRAV12-2, TRAJ10)
WGVTGGGNKLTF

SEQ ID NO: 114310 - protein, 13 aa, Homo sapiens
  CDR3 for beta chain variable domain of TCR clone 57155 (TRBV6-1, TRBJ1-1)
CASSRQGNTEAFF

SEQ ID NO: 114311 - protein, 21 aa, Homo sapiens
  CDR3 for alpha chain variable domain of TCR clone 57156 (TRAV12-1, TRAJ37)
CVVNGGLWQHRQTNLWARDNF

SEQ ID NO: 114312 - protein, 12 aa, Homo sapiens
  CDR3 for beta chain variable domain of TCR clone 57156 (TRBV20-1, TRBJ1-2)
RSAPGFNYGYTF

SEQ ID NO: 114313 - protein, 10 aa, Homo sapiens
  CDR3 for alpha chain variable domain of TCR clone 57157 (TRAV8-4, TRAJ43)
CAVSADDMRF

SEQ ID NO: 114314 - protein, 11 aa, Homo sapiens
  CDR3 for beta chain variable domain of TCR clone 57157 (TRBV29-1, TRBJ2-5)
CSEDRTGTQYF

SEQ ID NO: 114315 - protein, 14 aa, Homo sapiens
  CDR3 for alpha chain variable domain of TCR clone 57158 (TRAV1-2, TRAJ16)
CAVNRFSDGQKLLF

SEQ ID NO: 114316 - protein, 17 aa, Homo sapiens
  CDR3 for beta chain variable domain of TCR clone 57158 (TRBV7-3, TRBJ2-3)
RASSLMKRMRGADTQYF

SEQ ID NO: 114317 - protein, 13 aa, Homo sapiens
  CDR3 for alpha chain variable domain of TCR clone 57159 (TRAV13-1, TRAJ21)
CAASTYNFNKFYF

SEQ ID NO: 114318 - protein, 13 aa, Homo sapiens
  CDR3 for beta chain variable domain of TCR clone 57159 (TRBV27, TRBJ1-4)
CASSLMGDEKLFF

SEQ ID NO: 114319 - protein, 15 aa, Homo sapiens
  CDR3 for alpha chain variable domain of TCR clone 57160 (TRAV35, TRAJ40)
CAGQLGTSGTYKYIF

SEQ ID NO: 114320 - protein, 14 aa, Homo sapiens
  CDR3 for beta chain variable domain of TCR clone 57160 (TRBV7-3, TRBJ2-1)
CASSLAGGTNEHFF

SEQ ID NO: 114321 - protein, 11 aa, Homo sapiens
  CDR3 for alpha chain variable domain of TCR clone 57161 (TRAV12-3, TRAJ41)
CAMNAREALNL

SEQ ID NO: 114322 - protein, 16 aa, Homo sapiens
  CDR3 for beta chain variable domain of TCR clone 57161 (TRBV7-8, TRBJ2-3)
CASSTEGQRETDTQYF

SEQ ID NO: 114323 - protein, 11 aa, Homo sapiens
  CDR3 for alpha chain variable domain of TCR clone 57162 (TRAV3, TRAJ21)
CAVGNFNKFYF

SEQ ID NO: 114324 - protein, 13 aa, Homo sapiens
  CDR3 for beta chain variable domain of TCR clone 57162 (TRBV7-9, TRBJ1-2)
CASSVKQNYGYTF

SEQ ID NO: 114325 - protein, 16 aa, Homo sapiens
  CDR3 for alpha chain variable domain of TCR clone 57163 (TRAV12-3, TRAJ53)
CAMSPGSGGSNYKLTF

SEQ ID NO: 114326 - protein, 11 aa, Homo sapiens
  CDR3 for beta chain variable domain of TCR clone 57163 (TRBV11-2, TRBJ2-2)
CASSLPGELFF

SEQ ID NO: 114327 - protein, 16 aa, Homo sapiens
  CDR3 for alpha chain variable domain of TCR clone 57164 (TRAV8-3, TRAJ52)
CAVQPAGGTSYGKLTF

SEQ ID NO: 114328 - protein, 15 aa, Homo sapiens
  CDR3 for beta chain variable domain of TCR clone 57164 (TRBV11-2, TRBJ2-7)
CASSLAGVVATEQYF

SEQ ID NO: 114329 - protein, 12 aa, Homo sapiens
  CDR3 for alpha chain variable domain of TCR clone 57165 (TRAV13-2, TRAJ23)
CAERHRGGKLIF

SEQ ID NO: 114330 - protein, 13 aa, Homo sapiens
  CDR3 for beta chain variable domain of TCR clone 57165 (TRBV20-1, TRBJ1-3)
CSARVQGRDTIYF

SEQ ID NO: 114331 - protein, 15 aa, Homo sapiens
  CDR3 for alpha chain variable domain of TCR clone 57166 (TRAV21, TRAJ52)
CAVRGGGTSYGKLTF

SEQ ID NO: 114332 - protein, 13 aa, Homo sapiens
  CDR3 for beta chain variable domain of TCR clone 57166 (TRBV10-3, TRBJ2-7)
CASKLAVNYEQYF

SEQ ID NO: 114333 - protein, 11 aa, Homo sapiens
  CDR3 for alpha chain variable domain of TCR clone 57167 (TRAV2, TRAJ33)
CAVGSNYQLIW

SEQ ID NO: 114334 - protein, 14 aa, Homo sapiens
  CDR3 for beta chain variable domain of TCR clone 57167 (TRBV11-2, TRBJ2-3)
CASSRLARTDTQYF

SEQ ID NO: 114335 - protein, 14 aa, Homo sapiens
  CDR3 for alpha chain variable domain of TCR clone 57168 (TRAV35, TRAJ22)
CAGLRPGSARQLTF

SEQ ID NO: 114336 - protein, 14 aa, Homo sapiens
  CDR3 for beta chain variable domain of TCR clone 57168 (TRBV12-4, TRBJ2-5)
CQQSPDRPQGTQYF

SEQ ID NO: 114337 - protein, 12 aa, Homo sapiens
  CDR3 for alpha chain variable domain of TCR clone 57169 (TRAV12-3, TRAJ17)
CAMTLTGNKLTF

SEQ ID NO: 114338 - protein, 17 aa, Homo sapiens
  CDR3 for beta chain variable domain of TCR clone 57169 (TRBV18, TRBJ2-2)
CASSQRSSGQGPGELFF

SEQ ID NO: 114339 - protein, 12 aa, Homo sapiens
  CDR3 for alpha chain variable domain of TCR clone 57170 (TRAV16, TRAJ10)
CSRTGGGNKPTF

SEQ ID NO: 114340 - protein, 15 aa, Homo sapiens
  CDR3 for beta chain variable domain of TCR clone 57170 (TRBV9, TRBJ1-6)
CASSVAGTGDSPLHF

SEQ ID NO: 114341 - protein, 18 aa, Homo sapiens
  CDR3 for alpha chain variable domain of TCR clone 57171 (TRAV29/DV5, TRAJ52)
CAAGFRGAGGTSYGKLTF

SEQ ID NO: 114342 - protein, 16 aa, Homo sapiens
  CDR3 for beta chain variable domain of TCR clone 57171 (TRBV11-1, TRBJ1-1)
CASSPRGAHMNSEAFF

SEQ ID NO: 114343 - protein, 13 aa, Homo sapiens
  CDR3 for alpha chain variable domain of TCR clone 57172 (TRAV36/DV7, TRAJ53)
CALSGGSNYKLTF

SEQ ID NO: 114344 - protein, 13 aa, Homo sapiens
  CDR3 for beta chain variable domain of TCR clone 57172 (TRBV28, TRBJ2-7)
CASSLPPRYEQYF

SEQ ID NO: 114345 - protein, 13 aa, Homo sapiens
  CDR3 for alpha chain variable domain of TCR clone 57173 (TRAV8-3, TRAJ47)
CAVSMEYGNKLVF

SEQ ID NO: 114346 - protein, 15 aa, Homo sapiens
  CDR3 for beta chain variable domain of TCR clone 57173 (TRBV4-1, TRBJ1-4)
CASSDTGGTNEKLFF

SEQ ID NO: 114347 - protein, 13 aa, Homo sapiens
  CDR3 for alpha chain variable domain of TCR clone 57174 (TRAV1-2, TRAJ9)
CAALNTGGFKTIF

SEQ ID NO: 114348 - protein, 15 aa, Homo sapiens
  CDR3 for beta chain variable domain of TCR clone 57174 (TRBV15, TRBJ1-5)
CATSREQGGNQPQHF

SEQ ID NO: 114349 - protein, 13 aa, Homo sapiens
  CDR3 for alpha chain variable domain of TCR clone 57175 (TRAV17, TRAJ9)
CATDYTGCFKTIF

SEQ ID NO: 114350 - protein, 14 aa, Homo sapiens
  CDR3 for beta chain variable domain of TCR clone 57175 (TRBV19, TRBJ2-5)
CASSMTGQQETQYF

SEQ ID NO: 114351 - protein, 14 aa, Homo sapiens
  CDR3 for alpha chain variable domain of TCR clone 57176 (TRAV35, TRAJ40)
CAGSTTSGTYKYIF

SEQ ID NO: 114352 - protein, 13 aa, Homo sapiens
  CDR3 for beta chain variable domain of TCR clone 57176 (TRBV20-1, TRBJ1-6)
CSAPLGVGSPLYF

SEQ ID NO: 114353 - protein, 13 aa, Homo sapiens
  CDR3 for alpha chain variable domain of TCR clone 57177 (TRAV13-2, TRAJ48)
CAEMDFGNEKLTF

SEQ ID NO: 114354 - protein, 13 aa, Homo sapiens
  CDR3 for beta chain variable domain of TCR clone 57177 (TRBV7-9, TRBJ1-2)
CASSLKQNYGYSF

SEQ ID NO: 114355 - protein, 12 aa, Homo sapiens
  CDR3 for alpha chain variable domain of TCR clone 57178 (TRAV36/DV7, TRAJ40)
CAVGTGTYKYIF

SEQ ID NO: 114356 - protein, 14 aa, Homo sapiens
  CDR3 for beta chain variable domain of TCR clone 57178 (TRBV19, TRBJ2-3)
YASSIDLGGDTQYF

SEQ ID NO: 114357 - protein, 11 aa, Homo sapiens
  CDR3 for alpha chain variable domain of TCR clone 57179 (TRAV1-2, TRAJ20)
CAVSNDYKLSF

SEQ ID NO: 114358 - protein, 15 aa, Homo sapiens
  CDR3 for beta chain variable domain of TCR clone 57179 (TRBV20-1, TRBJ2-7)
CSARDRVSGMDEQYF

SEQ ID NO: 114359 - protein, 13 aa, Homo sapiens
  CDR3 for alpha chain variable domain of TCR clone 57180 (TRAV17, TRAJ9)
CATDNTGGFKTIF

SEQ ID NO: 114360 - protein, 16 aa, Homo sapiens
  CDR3 for beta chain variable domain of TCR clone 57180 (TRBV7-7, TRBJ2-1)
CASSLASGTSYNEQFF

SEQ ID NO: 114361 - protein, 11 aa, Homo sapiens
  CDR3 for alpha chain variable domain of TCR clone 57181 (TRAV1-2, TRAJ40)
CAVPGTYKYIF

SEQ ID NO: 114362 - protein, 16 aa, Homo sapiens
  CDR3 for beta chain variable domain of TCR clone 57181 (TRBV29-1, TRBJ2-7)
CSIEVVGTSGSYEQYF

SEQ ID NO: 114363 - protein, 13 aa, Homo sapiens
  CDR3 for alpha chain variable domain of TCR clone 57182 (TRAV3, TRAJ27)
CAVRPLGAGKSTF

SEQ ID NO: 114364 - protein, 14 aa, Homo sapiens
  CDR3 for beta chain variable domain of TCR clone 57182 (TRBV12-4, TRBJ1-1)
CASSLGTGGTEAFF

SEQ ID NO: 114365 - protein, 16 aa, Homo sapiens
  CDR3 for alpha chain variable domain of TCR clone 57183 (TRAV26-1, TRAJ32)
CIVRTNYGGATNKLIF

SEQ ID NO: 114366 - protein, 14 aa, Homo sapiens
  CDR3 for beta chain variable domain of TCR clone 57183 (TRBV6-1, TRBJ1-3)
CASVQGGGGNTMYF

SEQ ID NO: 114367 - protein, 15 aa, Homo sapiens
  CDR3 for alpha chain variable domain of TCR clone 57184 (TRAV4, TRAJ39)
CLVCPNNNAGNMLTF

SEQ ID NO: 114368 - protein, 13 aa, Homo sapiens
  CDR3 for beta chain variable domain of TCR clone 57184 (TRBV11-2, TRBJ2-5)
CASSSTGEETQYF

SEQ ID NO: 114369 - protein, 12 aa, Homo sapiens
  CDR3 for alpha chain variable domain of TCR clone 57185 (TRAV26-1, TRAJ13)
CIVSRGYQKVTS

SEQ ID NO: 114370 - protein, 16 aa, Homo sapiens
  CDR3 for beta chain variable domain of TCR clone 57185 (TRBV27, TRBJ2-1)
CASSLSKGFGLDEQFF

SEQ ID NO: 114371 - protein, 16 aa, Homo sapiens
  CDR3 for alpha chain variable domain of TCR clone 57186 (TRAV30, TRAJ26)
CGTESVGDNYGQNFAF

SEQ ID NO: 114372 - protein, 13 aa, Homo sapiens
  CDR3 for beta chain variable domain of TCR clone 57186 (TRBV19, TRBJ1-2)
CAGSISEDYGYTF

SEQ ID NO: 114373 - protein, 16 aa, Homo sapiens
  CDR3 for alpha chain variable domain of TCR clone 57187 (TRAV22, TRAJ45)
CAVERGKRGGADGLTF

SEQ ID NO: 114374 - protein, 15 aa, Homo sapiens
  CDR3 for beta chain variable domain of TCR clone 57187 (TRBV27, TRBJ2-7)
CASSLGSSVSPEQYF

SEQ ID NO: 114375 - protein, 14 aa, Homo sapiens
  CDR3 for alpha chain variable domain of TCR clone 57188 (TRAV23/DV6, TRAJ6)
CAAIPSGGSYIPTF

SEQ ID NO: 114376 - protein, 17 aa, Homo sapiens
  CDR3 for beta chain variable domain of TCR clone 57188 (TRBV7-2, TRBJ2-3)
CASSLGGGAAWRDTQYF

SEQ ID NO: 114377 - protein, 15 aa, Homo sapiens
  CDR3 for alpha chain variable domain of TCR clone 57189 (TRAV8-3, TRAJ7)
CAVGSISYGDNRLAF

SEQ ID NO: 114378 - protein, 15 aa, Homo sapiens
  CDR3 for beta chain variable domain of TCR clone 57189 (TRBV4-2, TRBJ1-1)
CASSQEDLPRTEAFF

SEQ ID NO: 114379 - protein, 16 aa, Homo sapiens
  CDR3 for alpha chain variable domain of TCR clone 57190 (TRAV20, TRAJ53)
CAVQGNSGGSNYKLTF

SEQ ID NO: 114380 - protein, 15 aa, Homo sapiens
  CDR3 for beta chain variable domain of TCR clone 57190 (TRBV20-1, TRBJ2-7)
CSARDRVSGMDEQYF

SEQ ID NO: 114381 - protein, 13 aa, Homo sapiens
  CDR3 for alpha chain variable domain of TCR clone 57191 (TRAV38-1, TRAJ42)
CARWGGSQGNLIF

SEQ ID NO: 114382 - protein, 12 aa, Homo sapiens
  CDR3 for beta chain variable domain of TCR clone 57191 (TRBV12-4, TRBJ2-7)
CASSLGGYEQYF

SEQ ID NO: 114383 - protein, 12 aa, Homo sapiens
  CDR3 for alpha chain variable domain of TCR clone 57192 (TRAV8-3, TRAJ26)
CAGDNYGQNFVF

SEQ ID NO: 114384 - protein, 15 aa, Homo sapiens
  CDR3 for beta chain variable domain of TCR clone 57192 (TRBV20-1, TRBJ2-3)
CSARRGEAITDTQYL

SEQ ID NO: 114385 - protein, 14 aa, Homo sapiens
  CDR3 for alpha chain variable domain of TCR clone 57193 (TRAV26-1, TRAJ34)
CIVRVAYNTDKHIF

SEQ ID NO: 114386 - protein, 15 aa, Homo sapiens
  CDR3 for beta chain variable domain of TCR clone 57193 (TRBV20-1, TRBJ2-7)
CSARVPAAYFYEQYF

SEQ ID NO: 114387 - protein, 15 aa, Homo sapiens
  CDR3 for alpha chain variable domain of TCR clone 57194 (TRAV21, TRAJ22)
CAVRLFLWFCKATDL

SEQ ID NO: 114388 - protein, 14 aa, Homo sapiens
  CDR3 for beta chain variable domain of TCR clone 57194 (TRBV19, TRBJ1-5)
CASRAPDSFLSQHF

SEQ ID NO: 114389 - protein, 17 aa, Homo sapiens
  CDR3 for alpha chain variable domain of TCR clone 57195 (TRAV3, TRAJ42)
CAVRDRDYGGSQGNLIF

SEQ ID NO: 114390 - protein, 15 aa, Homo sapiens
  CDR3 for beta chain variable domain of TCR clone 57195 (TRBV7-2, TRBJ2-1)
CASSLASGRVNEQFF

SEQ ID NO: 114391 - protein, 11 aa, Homo sapiens
  CDR3 for alpha chain variable domain of TCR clone 57196 (TRAV12-1, TRAJ30)
CVVNGQDKIIF

SEQ ID NO: 114392 - protein, 13 aa, Homo sapiens
  CDR3 for beta chain variable domain of TCR clone 57196 (TRBV7-7, TRBJ1-1)
CASSLGANTEAFF

SEQ ID NO: 114393 - protein, 11 aa, Homo sapiens
  CDR3 for alpha chain variable domain of TCR clone 57197 (TRAV12-3, TRAJ27)
CAMANAGKSTF

SEQ ID NO: 114394 - protein, 12 aa, Homo sapiens
  CDR3 for beta chain variable domain of TCR clone 57197 (TRBV12-4, TRBJ1-1)
CQQSGTGFEAFF

SEQ ID NO: 114395 - protein, 17 aa, Homo sapiens
  CDR3 for alpha chain variable domain of TCR clone 57198 (TRAV13-1, TRAJ52)
CAAGRNAGGTSYGKLTF

SEQ ID NO: 114396 - protein, 13 aa, Homo sapiens
  CDR3 for beta chain variable domain of TCR clone 57198 (TRBV7-2, TRBJ1-1)
CASNLKGAKVDFF

SEQ ID NO: 114397 - protein, 14 aa, Homo sapiens
  CDR3 for alpha chain variable domain of TCR clone 57199 (TRAV1-1, TRAJ27)
CAVIYNTNAGKSTF

SEQ ID NO: 114398 - protein, 18 aa, Homo sapiens
  CDR3 for beta chain variable domain of TCR clone 57199 (TRBV7-3, TRBJ2-1)
CASSLTLASGRAMVCSSS

SEQ ID NO: 114399 - protein, 16 aa, Homo sapiens
  CDR3 for alpha chain variable domain of TCR clone 57200 (TRAV20, TRAJ10)
CAVLRGLTGGGNKLTF

SEQ ID NO: 114400 - protein, 14 aa, Homo sapiens
  CDR3 for beta chain variable domain of TCR clone 57200 (TRBV19, TRBJ1-5)
CASRAPDSFISQHF

SEQ ID NO: 114401 - protein, 14 aa, Homo sapiens
  CDR3 for alpha chain variable domain of TCR clone 57201 (TRAV1-2, TRAJ8)
CAVREDTGFQKLVF

SEQ ID NO: 114402 - protein, 14 aa, Homo sapiens
  CDR3 for beta chain variable domain of TCR clone 57201 (TRBV19, TRBJ2-7)
CASTVQGRPYEQYF

SEQ ID NO: 114403 - protein, 12 aa, Homo sapiens
  CDR3 for alpha chain variable domain of TCR clone 57202 (TRAV17, TRAJ28)
WDSGAGSYQPTF

SEQ ID NO: 114404 - protein, 13 aa, Homo sapiens
  CDR3 for beta chain variable domain of TCR clone 57202 (TRBV11-3, TRBJ1-1)
CASSRQPNTEAFF

SEQ ID NO: 114405 - protein, 15 aa, Homo sapiens
  CDR3 for alpha chain variable domain of TCR clone 57203 (TRAV3, TRAJ22)
CAVRDRGGPARQLTF

SEQ ID NO: 114406 - protein, 15 aa, Homo sapiens
  CDR3 for beta chain variable domain of TCR clone 57203 (TRBV19, TRBJ2-5)
CASSIVRASQETQYF

SEQ ID NO: 114407 - protein, 12 aa, Homo sapiens
  CDR3 for alpha chain variable domain of TCR clone 57204 (TRAV12-2, TRAJ10)
WGVTGGGSKLTF

SEQ ID NO: 114408 - protein, 16 aa, Homo sapiens
  CDR3 for beta chain variable domain of TCR clone 57204 (TRBV6-4, TRBJ1-2)
CASSEAVGDPNYGYTF

SEQ ID NO: 114409 - protein, 15 aa, Homo sapiens
  CDR3 for alpha chain variable domain of TCR clone 57205 (TRAV8-4, TRAJ3)
CAVTGESLVQQCFQD

SEQ ID NO: 114410 - protein, 16 aa, Homo sapiens
  CDR3 for beta chain variable domain of TCR clone 57205 (TRBV4-2, TRBJ1-1)
CASSQAGFGTNTEAFF

SEQ ID NO: 114411 - protein, 16 aa, Homo sapiens
  CDR3 for alpha chain variable domain of TCR clone 57206 (TRAV12-3, TRAJ3)
CASRGPLYSSASKIIF

SEQ ID NO: 114412 - protein, 12 aa, Homo sapiens
  CDR3 for beta chain variable domain of TCR clone 57206 (TRBV24-1, TRBJ1-1)
CATLYPDTEAFF

SEQ ID NO: 114413 - protein, 12 aa, Homo sapiens
  CDR3 for alpha chain variable domain of TCR clone 57207 (TRAV12-3, TRAJ17)
CAMTLTGNKLTF

SEQ ID NO: 114414 - protein, 15 aa, Homo sapiens
  CDR3 for beta chain variable domain of TCR clone 57207 (TRBV11-3, TRBJ2-3)
CASLKDGREGDMQYF

SEQ ID NO: 114415 - protein, 11 aa, Homo sapiens
  CDR3 for alpha chain variable domain of TCR clone 57208 (TRAV23/DV6, TRAJ58)
CAARLLRGETS

SEQ ID NO: 114416 - protein, 13 aa, Homo sapiens
  CDR3 for beta chain variable domain of TCR clone 57208 (TRBV7-3, TRBJ1-1)
CASSQDWGAEAFF

SEQ ID NO: 114417 - protein, 12 aa, Homo sapiens
  CDR3 for alpha chain variable domain of TCR clone 57209 (TRAV12-3, TRAJ17)
CAMTLTGNKLTF

SEQ ID NO: 114418 - protein, 17 aa, Homo sapiens
  CDR3 for beta chain variable domain of TCR clone 57209 (TRBV11-2, TRBJ2-1)
CASSSYPPGVEYNEQFF

SEQ ID NO: 114419 - protein, 14 aa, Homo sapiens
  CDR3 for alpha chain variable domain of TCR clone 57210 (TRAV1-2, TRAJ16)
CAVNWFSDGQRLLF

SEQ ID NO: 114420 - protein, 15 aa, Homo sapiens
  CDR3 for beta chain variable domain of TCR clone 57210 (TRBV7-9, TRBJ1-6)
CASSSPGRGNSPLHF

SEQ ID NO: 114421 - protein, 16 aa, Homo sapiens
  CDR3 for alpha chain variable domain of TCR clone 57211 (TRAV1-2, TRAJ10)
CAVRGVLTGGGNKLTF

SEQ ID NO: 114422 - protein, 15 aa, Homo sapiens
  CDR3 for beta chain variable domain of TCR clone 57211 (TRBV12-4, TRBJ2-5)
CASSPPTGLQETQYF

SEQ ID NO: 114423 - protein, 13 aa, Homo sapiens
  CDR3 for alpha chain variable domain of TCR clone 57212 (TRAV2, TRAJ40)
CAVVTSGTYKYTF

SEQ ID NO: 114424 - protein, 14 aa, Homo sapiens
  CDR3 for beta chain variable domain of TCR clone 57212 (TRBV19, TRBJ2-3)
CASSAPRGTDTQYF

SEQ ID NO: 114425 - protein, 15 aa, Homo sapiens
  CDR3 for alpha chain variable domain of TCR clone 57213 (TRAV1-2, TRAJ10)
CAVRGFTGGGNKLTF

SEQ ID NO: 114426 - protein, 16 aa, Homo sapiens
  CDR3 for beta chain variable domain of TCR clone 57213 (TRBV4-1, TRBJ2-1)
CASSQGAGQGSDEQFF

SEQ ID NO: 114427 - protein, 14 aa, Homo sapiens
  CDR3 for alpha chain variable domain of TCR clone 57214 (TRAV12-2, TRAJ13)
CAVKKTGGYQKVTF

SEQ ID NO: 114428 - protein, 15 aa, Homo sapiens
  CDR3 for beta chain variable domain of TCR clone 57214 (TRBV28, TRBJ2-7)
CASSPGGRGFYEQYF

SEQ ID NO: 114429 - protein, 17 aa, Homo sapiens
  CDR3 for alpha chain variable domain of TCR clone 57215 (TRAV4, TRAJ18)
CLVGERSVGSTLGRLYF

SEQ ID NO: 114430 - protein, 14 aa, Homo sapiens
  CDR3 for beta chain variable domain of TCR clone 57215 (TRBV6-5, TRBJ1-2)
RASSYDGTGGGYTF

SEQ ID NO: 114431 - protein, 12 aa, Homo sapiens
  CDR3 for alpha chain variable domain of TCR clone 57216 (TRAV23/DV6, TRAJ31)
CAARRTGARLMF

SEQ ID NO: 114432 - protein, 13 aa, Homo sapiens
  CDR3 for beta chain variable domain of TCR clone 57216 (TRBV28, TRBJ2-7)
CASKAGGVYEQYF

SEQ ID NO: 114433 - protein, 14 aa, Homo sapiens
  CDR3 for alpha chain variable domain of TCR clone 57217 (TRAV29/DV5, TRAJ36)
CAARRKTGANNLFF

SEQ ID NO: 114434 - protein, 15 aa, Homo sapiens
  CDR3 for beta chain variable domain of TCR clone 57217 (TRBV5-1, TRBJ1-5)
CASSFWVVSPSILVM

SEQ ID NO: 114435 - protein, 16 aa, Homo sapiens
  CDR3 for alpha chain variable domain of TCR clone 57218 (TRAV13-1, TRAJ18)
CAASRMRGSTLGRRYF

SEQ ID NO: 114436 - protein, 16 aa, Homo sapiens
  CDR3 for beta chain variable domain of TCR clone 57218 (TRBV27, TRBJ1-1)
CASSSRGRTGYTEAFF

SEQ ID NO: 114437 - protein, 14 aa, Homo sapiens
  CDR3 for alpha chain variable domain of TCR clone 57219 (TRAV12-1, TRAJ27)
CGEHIRTNAGKSTF

SEQ ID NO: 114438 - protein, 15 aa, Homo sapiens
  CDR3 for beta chain variable domain of TCR clone 57219 (TRBV19, TRBJ1-1)
FASTSGQIQNTEAFF

SEQ ID NO: 114439 - protein, 12 aa, Homo sapiens
  CDR3 for alpha chain variable domain of TCR clone 57220 (TRAV12-3, TRAJ17)
CAMTLTGNKLTF

SEQ ID NO: 114440 - protein, 16 aa, Homo sapiens
  CDR3 for beta chain variable domain of TCR clone 57220 (TRBV12-4, TRBJ2-5)
CASSFFVRGRQETQYL

SEQ ID NO: 114441 - protein, 15 aa, Homo sapiens
  CDR3 for alpha chain variable domain of TCR clone 57221 (TRAV13-2, TRAJ16)
CAEDDRFSDGQKLLF

SEQ ID NO: 114442 - protein, 17 aa, Homo sapiens
  CDR3 for beta chain variable domain of TCR clone 57221 (TRBV12-4, TRBJ2-1)
CASSPGLAGGRINEQFF

SEQ ID NO: 114443 - protein, 17 aa, Homo sapiens
  CDR3 for alpha chain variable domain of TCR clone 57222 (TRAV23/DV6, TRAJ57)
CAASSTLSQGGSEKLVF

SEQ ID NO: 114444 - protein, 13 aa, Homo sapiens
  CDR3 for beta chain variable domain of TCR clone 57222 (TRBV19, TRBJ2-1)
CATSRGVYNEQFF

SEQ ID NO: 114445 - protein, 13 aa, Homo sapiens
  CDR3 for alpha chain variable domain of TCR clone 57223 (TRAV12-3, TRAJ13)
CAMSPGGYQKVTF

SEQ ID NO: 114446 - protein, 17 aa, Homo sapiens
  CDR3 for beta chain variable domain of TCR clone 57223 (TRBV13, TRBJ2-3)
CASSLSRVAGGRNTQYF

SEQ ID NO: 114447 - protein, 15 aa, Homo sapiens
  CDR3 for alpha chain variable domain of TCR clone 57224 (TRAV34, TRAJ38)
CGADFTPGNNRKLIW

SEQ ID NO: 114448 - protein, 11 aa, Homo sapiens
  CDR3 for beta chain variable domain of TCR clone 57224 (TRBV29-1, TRBJ2-5)
CSEDRTGTQYF

SEQ ID NO: 114449 - protein, 14 aa, Homo sapiens
  CDR3 for alpha chain variable domain of TCR clone 57225 (TRAV1-1, TRAJ27)
CAVIYNTNAGKSTF

SEQ ID NO: 114450 - protein, 15 aa, Homo sapiens
  CDR3 for beta chain variable domain of TCR clone 57225 (TRBV7-2, TRBJ2-1)
CASSSGLAGGNEQFC

SEQ ID NO: 114451 - protein, 17 aa, Homo sapiens
  CDR3 for alpha chain variable domain of TCR clone 57226 (TRAV3, TRAJ42)
CAVRDRDYGGSQGNLIF

SEQ ID NO: 114452 - protein, 12 aa, Homo sapiens
  CDR3 for beta chain variable domain of TCR clone 57226 (TRBV11-2, TRBJ2-1)
CASRPGNNEQFF

SEQ ID NO: 114453 - protein, 11 aa, Homo sapiens
  CDR3 for alpha chain variable domain of TCR clone 57227 (TRAV21, TRAJ11)
CAVNGYSTLTF

SEQ ID NO: 114454 - protein, 15 aa, Homo sapiens
  CDR3 for beta chain variable domain of TCR clone 57227 (TRBV19, TRBJ1-2)
CASSVGQVLNYGYTF

SEQ ID NO: 114455 - protein, 15 aa, Homo sapiens
  CDR3 for alpha chain variable domain of TCR clone 57228 (TRAV2, TRAJ9)
CAVEDRGTGGFKTIV

SEQ ID NO: 114456 - protein, 16 aa, Homo sapiens
  CDR3 for beta chain variable domain of TCR clone 57228 (TRBV24-1, TRBJ2-3)
CATSDPGTGATDTQYF

SEQ ID NO: 114457 - protein, 13 aa, Homo sapiens
  CDR3 for alpha chain variable domain of TCR clone 57229 (TRAV17, TRAJ9)
CATASTGGFKTIF

SEQ ID NO: 114458 - protein, 12 aa, Homo sapiens
  CDR3 for beta chain variable domain of TCR clone 57229 (TRBV11-2, TRBJ2-2)
CASSLPTGELFF

SEQ ID NO: 114459 - protein, 13 aa, Homo sapiens
  CDR3 for alpha chain variable domain of TCR clone 57230 (TRAV2, TRAJ21)
CAVEDLNFNKLYF

SEQ ID NO: 114460 - protein, 15 aa, Homo sapiens
  CDR3 for beta chain variable domain of TCR clone 57230 (TRBV28, TRBJ2-5)
CASSPGQGSIETQYF

SEQ ID NO: 114461 - protein, 15 aa, Homo sapiens
  CDR3 for alpha chain variable domain of TCR clone 57231 (TRAV17, TRAJ37)
CATDGGSSNTGKLIF

SEQ ID NO: 114462 - protein, 15 aa, Homo sapiens
  CDR3 for beta chain variable domain of TCR clone 57231 (TRBV28, TRBJ2-5)
CASSSGRTIQATQYF

SEQ ID NO: 114463 - protein, 14 aa, Homo sapiens
  CDR3 for alpha chain variable domain of TCR clone 57232 (TRAV1-2, TRAJ16)
CAVNRFSGGQKLLF

SEQ ID NO: 114464 - protein, 15 aa, Homo sapiens
  CDR3 for beta chain variable domain of TCR clone 57232 (TRBV9, TRBJ1-6)
YASSVAGTGDSPLHF

SEQ ID NO: 114465 - protein, 14 aa, Homo sapiens
  CDR3 for alpha chain variable domain of TCR clone 57233 (TRAV8-3, TRAJ39)
CAVGANNAGDMLTF

SEQ ID NO: 114466 - protein, 12 aa, Homo sapiens
  CDR3 for beta chain variable domain of TCR clone 57233 (TRBV28, TRBJ1-3)
CASVSSGNTIYF

SEQ ID NO: 114467 - protein, 17 aa, Homo sapiens
  CDR3 for alpha chain variable domain of TCR clone 57234 (TRAV17, TRAJ7)
CATLGRLAFGKVNQVVV

SEQ ID NO: 114468 - protein, 13 aa, Homo sapiens
  CDR3 for beta chain variable domain of TCR clone 57234 (TRBV12-4, TRBJ2-7)
CASSLERVREQYF

SEQ ID NO: 114469 - protein, 15 aa, Homo sapiens
  CDR3 for alpha chain variable domain of TCR clone 57235 (TRAV35, TRAJ23)
CAGPLGNNQGGKLIF

SEQ ID NO: 114470 - protein, 14 aa, Homo sapiens
  CDR3 for beta chain variable domain of TCR clone 57235 (TRBV7-9, TRBJ1-1)
RASTPLQSYTEAFF

SEQ ID NO: 114471 - protein, 13 aa, Homo sapiens
  CDR3 for alpha chain variable domain of TCR clone 57236 (TRAV12-3, TRAJ9)
CAMRSTGGFKTIF

SEQ ID NO: 114472 - protein, 14 aa, Homo sapiens
  CDR3 for beta chain variable domain of TCR clone 57236 (TRBV11-2, TRBJ2-7)
CASSSTGEGYEQYF

SEQ ID NO: 114473 - protein, 13 aa, Homo sapiens
  CDR3 for alpha chain variable domain of TCR clone 57237 (TRAV17, TRAJ9)
CATDYTGGFKTIF

SEQ ID NO: 114474 - protein, 16 aa, Homo sapiens
  CDR3 for beta chain variable domain of TCR clone 57237 (TRBV7-7, TRBJ2-1)
RASSLASGTSYNEQFF

SEQ ID NO: 114475 - protein, 16 aa, Homo sapiens
  CDR3 for alpha chain variable domain of TCR clone 57238 (TRAV8-3, TRAJ13)
CALGAYPSGGYQKVTF

SEQ ID NO: 114476 - protein, 15 aa, Homo sapiens
  CDR3 for beta chain variable domain of TCR clone 57238 (TRBV19, TRBJ1-5)
CASSIVWADNQPQHF

SEQ ID NO: 114477 - protein, 13 aa, Homo sapiens
  CDR3 for alpha chain variable domain of TCR clone 57239 (TRAV8-3, TRAJ28)
CAVGAVGSYQLTF

SEQ ID NO: 114478 - protein, 15 aa, Homo sapiens
  CDR3 for beta chain variable domain of TCR clone 57239 (TRBV7-9, TRBJ1-5)
CASSQGHQPNQPQHY

SEQ ID NO: 114479 - protein, 12 aa, Homo sapiens
  CDR3 for alpha chain variable domain of TCR clone 57240 (TRAV13-1, TRAJ40)
CAASWATYEYIF

SEQ ID NO: 114480 - protein, 15 aa, Homo sapiens
  CDR3 for beta chain variable domain of TCR clone 57240 (TRBV7-8, TRBJ2-1)
CASSSRLAAYNEQFF

SEQ ID NO: 114481 - protein, 12 aa, Homo sapiens
  CDR3 for alpha chain variable domain of TCR clone 57241 (TRAV21, TRAJ49)
CAVRNTGNQFYF

SEQ ID NO: 114482 - protein, 17 aa, Homo sapiens
  CDR3 for beta chain variable domain of TCR clone 57241 (TRBV5-1, TRBJ2-5)
CASSPVALGQNQETQYF

SEQ ID NO: 114483 - protein, 13 aa, Homo sapiens
  CDR3 for alpha chain variable domain of TCR clone 57242 (TRAV12-3, TRAJ13)
CAMTSGGYQEVTF

SEQ ID NO: 114484 - protein, 13 aa, Homo sapiens
  CDR3 for beta chain variable domain of TCR clone 57242 (TRBV7-9, TRBJ1-2)
CASSLKQNYCYTF

SEQ ID NO: 114485 - protein, 13 aa, Homo sapiens
  CDR3 for alpha chain variable domain of TCR clone 57243 (TRAV8-3, TRAJ44)
CAVVPGTASKLTF

SEQ ID NO: 114486 - protein, 14 aa, Homo sapiens
  CDR3 for beta chain variable domain of TCR clone 57243 (TRBV11-2, TRBJ2-3)
CTSRRLARTDTQYF

SEQ ID NO: 114487 - protein, 13 aa, Homo sapiens
  CDR3 for alpha chain variable domain of TCR clone 57244 (TRAV13-1, TRAJ40)
CAARTSGTYKYIF

SEQ ID NO: 114488 - protein, 17 aa, Homo sapiens
  CDR3 for beta chain variable domain of TCR clone 57244 (TRBV4-1, TRBJ2-3)
CASSHGYVSGGTDTQYF

SEQ ID NO: 114489 - protein, 14 aa, Homo sapiens
  CDR3 for alpha chain variable domain of TCR clone 57245 (TRAV3, TRAJ40)
CAVRDRRGTYKYIF

SEQ ID NO: 114490 - protein, 15 aa, Homo sapiens
  CDR3 for beta chain variable domain of TCR clone 57245 (TRBV28, TRBJ2-1)
CASSIIAEGRSEQFF

SEQ ID NO: 114491 - protein, 13 aa, Homo sapiens
  CDR3 for alpha chain variable domain of TCR clone 57246 (TRAV30, TRAJ34)
CGTVGYNSDKLIF

SEQ ID NO: 114492 - protein, 16 aa, Homo sapiens
  CDR3 for beta chain variable domain of TCR clone 57246 (TRBV7-9, TRBJ1-2)
CASSLGFSSGEDGYTF

SEQ ID NO: 114493 - protein, 13 aa, Homo sapiens
  CDR3 for alpha chain variable domain of TCR clone 57247 (TRAV3, TRAJ15)
FAVRDQAGTALIF

SEQ ID NO: 114494 - protein, 15 aa, Homo sapiens
  CDR3 for beta chain variable domain of TCR clone 57247 (TRBV11-1, TRBJ2-7)
CASSLNYGASYEQYF

SEQ ID NO: 114495 - protein, 12 aa, Homo sapiens
  CDR3 for alpha chain variable domain of TCR clone 57248 (TRAV13-1, TRAJ48)
CAANFGNEKLTF

SEQ ID NO: 114496 - protein, 12 aa, Homo sapiens
  CDR3 for beta chain variable domain of TCR clone 57248 (TRBV19, TRBJ1-5)
CASSIAQQPQHF

SEQ ID NO: 114497 - protein, 16 aa, Homo sapiens
  CDR3 for alpha chain variable domain of TCR clone 57249 (TRAV8-3, TRAJ4)
RDPTSNDPGGYNKLIF

SEQ ID NO: 114498 - protein, 13 aa, Homo sapiens
  CDR3 for beta chain variable domain of TCR clone 57249 (TRBV20-1, TRBJ1-2)
CSATGIQGSGYTF

SEQ ID NO: 114499 - protein, 13 aa, Homo sapiens
  CDR3 for alpha chain variable domain of TCR clone 57250 (TRAV1-2, TRAJ24)
CAVRADSWGKFQF

SEQ ID NO: 114500 - protein, 13 aa, Homo sapiens
  CDR3 for beta chain variable domain of TCR clone 57250 (TRBV20-1, TRBJ2-1)
CSATGLAGDKQFF

SEQ ID NO: 114501 - protein, 14 aa, Homo sapiens
  CDR3 for alpha chain variable domain of TCR clone 57251 (TRAV35, TRAJ50)
CAGHRKTSYDKVVF

SEQ ID NO: 114502 - protein, 13 aa, Homo sapiens
  CDR3 for beta chain variable domain of TCR clone 57251 (TRBV7-7, TRBJ2-3)
CASSLSRADTQDF

SEQ ID NO: 114503 - protein, 18 aa, Homo sapiens
  CDR3 for alpha chain variable domain of TCR clone 57252 (TRAV9-2, TRAJ52)
CALSRHNAGGTSYGKLTF

SEQ ID NO: 114504 - protein, 13 aa, Homo sapiens
  CDR3 for beta chain variable domain of TCR clone 57252 (TRBV7-8, TRBJ2-7)
CASSFAGLYEQYF

SEQ ID NO: 114505 - protein, 14 aa, Homo sapiens
  CDR3 for alpha chain variable domain of TCR clone 57253 (TRAV1-2, TRAJ16)
CAVNRCSDGQKLLF

SEQ ID NO: 114506 - protein, 15 aa, Homo sapiens
  CDR3 for beta chain variable domain of TCR clone 57253 (TRBV9, TRBJ1-6)
CASSVAGTGDSPLHF

SEQ ID NO: 114507 - protein, 16 aa, Homo sapiens
  CDR3 for alpha chain variable domain of TCR clone 57254 (TRAV4, TRAJ22)
CLVGDLYSCSARQLTF

SEQ ID NO: 114508 - protein, 16 aa, Homo sapiens
  CDR3 for beta chain variable domain of TCR clone 57254 (TRBV7-9, TRBJ2-1)
CASSDVAGGSYNEQFF

SEQ ID NO: 114509 - protein, 19 aa, Homo sapiens
  CDR3 for alpha chain variable domain of TCR clone 57255 (TRAV17, TRAJ17)
CATDGRPGVIKAAGNKLTF

SEQ ID NO: 114510 - protein, 17 aa, Homo sapiens
  CDR3 for beta chain variable domain of TCR clone 57255 (TRBV12-4, TRBJ1-1)
CASSLSGFRTMNTGAFF

SEQ ID NO: 114511 - protein, 13 aa, Homo sapiens
  CDR3 for alpha chain variable domain of TCR clone 57256 (TRAV12-3, TRAJ58)
CAMGETSDSRLTF

SEQ ID NO: 114512 - protein, 15 aa, Homo sapiens
  CDR3 for beta chain variable domain of TCR clone 57256 (TRBV20-1, TRBJ2-5)
CSATPLTGDQETQYF

SEQ ID NO: 114513 - protein, 14 aa, Homo sapiens
  CDR3 for alpha chain variable domain of TCR clone 57257 (TRAV20, TRAJ29)
CAVQAWVGNTPLVF

SEQ ID NO: 114514 - protein, 14 aa, Homo sapiens
  CDR3 for beta chain variable domain of TCR clone 57257 (TRBV25-1, TRBJ1-1)
CASTHLGGNTEAFF

SEQ ID NO: 114515 - protein, 14 aa, Homo sapiens
  CDR3 for alpha chain variable domain of TCR clone 57258 (TRAV20, TRAJ56)
CAVQFGGANSKLTF

SEQ ID NO: 114516 - protein, 14 aa, Homo sapiens
  CDR3 for beta chain variable domain of TCR clone 57258 (TRBV7-2, TRBJ1-1)
CASSFSTGTTEAFF

SEQ ID NO: 114517 - protein, 11 aa, Homo sapiens
  CDR3 for alpha chain variable domain of TCR clone 57259 (TRAV2, TRAJ21)
CAVFNFNTFYF

SEQ ID NO: 114518 - protein, 14 aa, Homo sapiens
  CDR3 for beta chain variable domain of TCR clone 57259 (TRBV15, TRBJ2-3)
CATRSGTSTDTQYF

SEQ ID NO: 114519 - protein, 16 aa, Homo sapiens
  CDR3 for alpha chain variable domain of TCR clone 57260 (TRAV30, TRAJ24)
CGTEIVDADSWGKFQL

SEQ ID NO: 114520 - protein, 12 aa, Homo sapiens
  CDR3 for beta chain variable domain of TCR clone 57260 (TRBV11-2, TRBJ2-2)
CASSLGGGELFF

SEQ ID NO: 114521 - protein, 14 aa, Homo sapiens
  CDR3 for alpha chain variable domain of TCR clone 57261 (TRAV8-2, TRAJ37)
CVVSIPGNTGKLIF

SEQ ID NO: 114522 - protein, 11 aa, Homo sapiens
  CDR3 for beta chain variable domain of TCR clone 57261 (TRBV18, TRBJ2-5)
CASSPRETQYF

SEQ ID NO: 114523 - protein, 13 aa, Homo sapiens
  CDR3 for alpha chain variable domain of TCR clone 57262 (TRAV27, TRAJ41)
CAGEGNSGYALNF

SEQ ID NO: 114524 - protein, 14 aa, Homo sapiens
  CDR3 for beta chain variable domain of TCR clone 57262 (TRBV7-2, TRBJ1-1)
CASSFLTGMTEAFF

SEQ ID NO: 114525 - protein, 15 aa, Homo sapiens
  CDR3 for alpha chain variable domain of TCR clone 57263 (TRAV35, TRAJ40)
CAGQLGTSGTYKYIF

SEQ ID NO: 114526 - protein, 14 aa, Homo sapiens
  CDR3 for beta chain variable domain of TCR clone 57263 (TRBV7-3, TRBJ2-1)
CASSLAGGTNEQVF

SEQ ID NO: 114527 - protein, 11 aa, Homo sapiens
  CDR3 for alpha chain variable domain of TCR clone 57264 (TRAV17, TRAJ9)
CATTGGFKTIF

SEQ ID NO: 114528 - protein, 14 aa, Homo sapiens
  CDR3 for beta chain variable domain of TCR clone 57264 (TRBV7-9, TRBJ2-2)
CASSGLADTVELFF

SEQ ID NO: 114529 - protein, 16 aa, Homo sapiens
  CDR3 for alpha chain variable domain of TCR clone 57265 (TRAV4, TRAJ22)
CLVGDLYSGSARQLTF

SEQ ID NO: 114530 - protein, 13 aa, Homo sapiens
  CDR3 for beta chain variable domain of TCR clone 57265 (TRBV7-3, TRBJ1-1)
CASSQDWGAEAFF

SEQ ID NO: 114531 - protein, 11 aa, Homo sapiens
  CDR3 for alpha chain variable domain of TCR clone 57266 (TRAV21, TRAJ11)
CAVNGYSTLTF

SEQ ID NO: 114532 - protein, 15 aa, Homo sapiens
  CDR3 for beta chain variable domain of TCR clone 57266 (TRBV27, TRBJ2-1)
CASSNGGGSSNEQFF

SEQ ID NO: 114533 - protein, 11 aa, Homo sapiens
  CDR3 for alpha chain variable domain of TCR clone 57267 (TRAV8-3, TRAJ15)
CAVGPGPALIF

SEQ ID NO: 114534 - protein, 18 aa, Homo sapiens
  CDR3 for beta chain variable domain of TCR clone 57267 (TRBV18, TRBJ2-3)
CASSYTSGAAGGTDTQYF

SEQ ID NO: 114535 - protein, 12 aa, Homo sapiens
  CDR3 for alpha chain variable domain of TCR clone 57268 (TRAV21, TRAJ31)
CAGWGNNARLMF

SEQ ID NO: 114536 - protein, 16 aa, Homo sapiens
  CDR3 for beta chain variable domain of TCR clone 57268 (TRBV27, TRBJ2-5)
CASSYGPGGQKETQYF

SEQ ID NO: 114537 - protein, 17 aa, Homo sapiens
  CDR3 for alpha chain variable domain of TCR clone 57269 (TRAV23/DV6, TRAJ57)
CAASSTLSQGRSEKLVF

SEQ ID NO: 114538 - protein, 14 aa, Homo sapiens
  CDR3 for beta chain variable domain of TCR clone 57269 (TRBV25-1, TRBJ1-1)
CASTHLGGNTEAFF

SEQ ID NO: 114539 - protein, 14 aa, Homo sapiens
  CDR3 for alpha chain variable domain of TCR clone 57270 (TRAV1-2, TRAJ15)
CAVRDRQAGTALIF

SEQ ID NO: 114540 - protein, 15 aa, Homo sapiens
  CDR3 for beta chain variable domain of TCR clone 57270 (TRBV20-1, TRBJ2-7)
CSARDRVSGMDEQYF

SEQ ID NO: 114541 - protein, 14 aa, Homo sapiens
  CDR3 for alpha chain variable domain of TCR clone 57271 (TRAV38-1, TRAJ40)
CALRPTAGTYKYIF

SEQ ID NO: 114542 - protein, 14 aa, Homo sapiens
  CDR3 for beta chain variable domain of TCR clone 57271 (TRBV25-1, TRBJ1-1)
CASTHLGGNTEAFF

SEQ ID NO: 114543 - protein, 15 aa, Homo sapiens
  CDR3 for alpha chain variable domain of TCR clone 57272 (TRAV4, TRAJ42)
CLVGGYGGSQGNLIF

SEQ ID NO: 114544 - protein, 16 aa, Homo sapiens
  CDR3 for beta chain variable domain of TCR clone 57272 (TRBV27, TRBJ1-1)
CASSTRTGGVCTEAFF

SEQ ID NO: 114545 - protein, 15 aa, Homo sapiens
  CDR3 for alpha chain variable domain of TCR clone 57273 (TRAV17, TRAJ16)
CATALRFSDGQKLLF

SEQ ID NO: 114546 - protein, 15 aa, Homo sapiens
  CDR3 for beta chain variable domain of TCR clone 57273 (TRBV6-5, TRBJ2-1)
CASSYDAGAGNEQFF

SEQ ID NO: 114547 - protein, 14 aa, Homo sapiens
  CDR3 for alpha chain variable domain of TCR clone 57274 (TRAV1-2, TRAJ8)
CAVREDTGFQKLVF

SEQ ID NO: 114548 - protein, 14 aa, Homo sapiens
  CDR3 for beta chain variable domain of TCR clone 57274 (TRBV18, TRBJ1-2)
CASSPDRVVYGYTF

SEQ ID NO: 114549 - protein, 15 aa, Homo sapiens
  CDR3 for alpha chain variable domain of TCR clone 57275 (TRAV1-2, TRAJ38)
CAVSENAGNNRKLIW

SEQ ID NO: 114550 - protein, 16 aa, Homo sapiens
  CDR3 for beta chain variable domain of TCR clone 57275 (TRBV4-1, TRBJ2-7)
CAGSLTAGQATYEQYF

SEQ ID NO: 114551 - protein, 15 aa, Homo sapiens
  CDR3 for alpha chain variable domain of TCR clone 57276 (TRAV3, TRAJ13)
CAVRVYSGGYQKVTF

SEQ ID NO: 114552 - protein, 15 aa, Homo sapiens
  CDR3 for beta chain variable domain of TCR clone 57276 (TRBV7-2, TRBJ2-7)
CASSWGQGAIYEQYF

SEQ ID NO: 114553 - protein, 12 aa, Homo sapiens
  CDR3 for alpha chain variable domain of TCR clone 57277 (TRAV1-2, TRAJ37)
CAFPGNTGKLIF

SEQ ID NO: 114554 - protein, 17 aa, Homo sapiens
  CDR3 for beta chain variable domain of TCR clone 57277 (TRBV4-2, TRBJ1-1)
CASSQVATGGVNTEAFF

SEQ ID NO: 114555 - protein, 19 aa, Homo sapiens
  CDR3 for alpha chain variable domain of TCR clone 57278 (TRAV4, TRAJ42)
CCVLLPRGGYGGSQGNLIF

SEQ ID NO: 114556 - protein, 16 aa, Homo sapiens
  CDR3 for beta chain variable domain of TCR clone 57278 (TRBV27, TRBJ1-1)
CASSTRTGGVGTEAFF

SEQ ID NO: 114557 - protein, 14 aa, Homo sapiens
  CDR3 for alpha chain variable domain of TCR clone 57279 (TRAV1-2, TRAJ16)
CAVNRFSDGQKLLF

SEQ ID NO: 114558 - protein, 20 aa, Homo sapiens
  CDR3 for beta chain variable domain of TCR clone 57279 (TRBV7-8, TRBJ2-2)
CASSHLFPGPTIPITGELFF

SEQ ID NO: 114559 - protein, 11 aa, Homo sapiens
  CDR3 for alpha chain variable domain of TCR clone 57280 (TRAV2, TRAJ33)
CAVDSNYQLIW

SEQ ID NO: 114560 - protein, 14 aa, Homo sapiens
  CDR3 for beta chain variable domain of TCR clone 57280 (TRBV11-2, TRBJ2-3)
CASSRLARTDTRYF

SEQ ID NO: 114561 - protein, 11 aa, Homo sapiens
  CDR3 for alpha chain variable domain of TCR clone 57281 (TRAV4, TRAJ31)
CLAGLNARLMF

SEQ ID NO: 114562 - protein, 16 aa, Homo sapiens
  CDR3 for beta chain variable domain of TCR clone 57281 (TRBV15, TRBJ2-6)
CATSVNGGFLANVLTF

SEQ ID NO: 114563 - protein, 12 aa, Homo sapiens
  CDR3 for alpha chain variable domain of TCR clone 57282 (TRAV12-2, TRAJ40)
CAVTPGTYKYIF

SEQ ID NO: 114564 - protein, 16 aa, Homo sapiens
  CDR3 for beta chain variable domain of TCR clone 57282 (TRBV15, TRBJ1-2)
CATSRGPRTGGGGYTF

SEQ ID NO: 114565 - protein, 12 aa, Homo sapiens
  CDR3 for alpha chain variable domain of TCR clone 57283 (TRAV8-3, TRAJ20)
CAVGGGDYKLSF

SEQ ID NO: 114566 - protein, 14 aa, Homo sapiens
  CDR3 for beta chain variable domain of TCR clone 57283 (TRBV19, TRBJ2-1)
CASPTFVLSGEQFF

SEQ ID NO: 114567 - protein, 16 aa, Homo sapiens
  CDR3 for alpha chain variable domain of TCR clone 57284 (TRAV3, TRAJ10)
CAVRDMRAGGGNKLTF

SEQ ID NO: 114568 - protein, 11 aa, Homo sapiens
  CDR3 for beta chain variable domain of TCR clone 57284 (TRBV11-2, TRBJ2-2)
CASSLPGELFF

SEQ ID NO: 114569 - protein, 21 aa, Homo sapiens
  CDR3 for alpha chain variable domain of TCR clone 57285 (TRAV1-1, TRAJ6)
CLLLLRCERLERTGGGYIPTF

SEQ ID NO: 114570 - protein, 14 aa, Homo sapiens
  CDR3 for beta chain variable domain of TCR clone 57285 (TRBV4-1, TRBJ2-2)
CASSQAVNTGELFF

SEQ ID NO: 114571 - protein, 20 aa, Homo sapiens
  CDR3 for alpha chain variable domain of TCR clone 57286 (TRAV1-1, TRAJ4)
CLLLLRCEGFLSGGYNKLIF

SEQ ID NO: 114572 - protein, 16 aa, Homo sapiens
  CDR3 for beta chain variable domain of TCR clone 57286 (TRBV28, TRBJ1-4)
CASSPPYRGRSEKLFL

SEQ ID NO: 114573 - protein, 14 aa, Homo sapiens
  CDR3 for alpha chain variable domain of TCR clone 57287 (TRAV13-2, TRAJ29)
CAENIEPGNKPLVF

SEQ ID NO: 114574 - protein, 14 aa, Homo sapiens
  CDR3 for beta chain variable domain of TCR clone 57287 (TRBV19, TRBJ2-2)
CATTGHANTGELFF

SEQ ID NO: 114575 - protein, 13 aa, Homo sapiens
  CDR3 for alpha chain variable domain of TCR clone 57288 (TRAV8-3, TRAJ28)
CAVGAVGSYQLTF

SEQ ID NO: 114576 - protein, 14 aa, Homo sapiens
  CDR3 for beta chain variable domain of TCR clone 57288 (TRBV7-2, TRBJ2-7)
CASRSQGAAYVQYF

SEQ ID NO: 114577 - protein, 12 aa, Homo sapiens
  CDR3 for alpha chain variable domain of TCR clone 57289 (TRAV13-1, TRAJ15)
CAASQAGTALIF

SEQ ID NO: 114578 - protein, 14 aa, Homo sapiens
  CDR3 for beta chain variable domain of TCR clone 57289 (TRBV19, TRBJ2-2)
CASSTLHRSGELFS

SEQ ID NO: 114579 - protein, 12 aa, Homo sapiens
  CDR3 for alpha chain variable domain of TCR clone 57290 (TRAV3, TRAJ26)
CAVRDYSQNFVF

SEQ ID NO: 114580 - protein, 16 aa, Homo sapiens
  CDR3 for beta chain variable domain of TCR clone 57290 (TRBV11-2, TRBJ1-2)
CASSPSGREANYGYTF

SEQ ID NO: 114581 - protein, 13 aa, Homo sapiens
  CDR3 for alpha chain variable domain of TCR clone 57291 (TRAV2, TRAJ40)
CAVVTSGTYKYIF

SEQ ID NO: 114582 - protein, 14 aa, Homo sapiens
  CDR3 for beta chain variable domain of TCR clone 57291 (TRBV7-2, TRBJ2-7)
CASSPKTSFCEQYF

SEQ ID NO: 114583 - protein, 13 aa, Homo sapiens
  CDR3 for alpha chain variable domain of TCR clone 57292 (TRAV35, TRAJ44)
CAGLSGTASKLTF

SEQ ID NO: 114584 - protein, 17 aa, Homo sapiens
  CDR3 for beta chain variable domain of TCR clone 57292 (TRBV7-8, TRBJ1-2)
CASSLRPLQGHLHGYTF

SEQ ID NO: 114585 - protein, 14 aa, Homo sapiens
  CDR3 for alpha chain variable domain of TCR clone 57293 (TRAV8-1, TRAJ30)
CAVNGYQRDDKIIF

SEQ ID NO: 114586 - protein, 15 aa, Homo sapiens
  CDR3 for beta chain variable domain of TCR clone 57293 (TRBV5-1, TRBJ2-7)
CASSLNGGPAREQYF

SEQ ID NO: 114587 - protein, 14 aa, Homo sapiens
  CDR3 for alpha chain variable domain of TCR clone 57294 (TRAV12-2, TRAJ13)
CAVKKTGGYQKVTF

SEQ ID NO: 114588 - protein, 15 aa, Homo sapiens
  CDR3 for beta chain variable domain of TCR clone 57294 (TRBV11-2, TRBJ2-1)
CASSKNRGLIYEQFF

SEQ ID NO: 114589 - protein, 14 aa, Homo sapiens
  CDR3 for alpha chain variable domain of TCR clone 57295 (TRAV1-2, TRAJ29)
CAVRELTSATPLVF

SEQ ID NO: 114590 - protein, 14 aa, Homo sapiens
  CDR3 for beta chain variable domain of TCR clone 57295 (TRBV3-1, TRBJ2-5)
CASSQGPEQETQYF

SEQ ID NO: 114591 - protein, 14 aa, Homo sapiens
  CDR3 for alpha chain variable domain of TCR clone 57296 (TRAV20, TRAJ56)
CAVQFGGANSKLTF

SEQ ID NO: 114592 - protein, 14 aa, Homo sapiens
  CDR3 for beta chain variable domain of TCR clone 57296 (TRBV20-1, TRBJ2-7)
CSAKRGMSSYEQYF

SEQ ID NO: 114593 - protein, 14 aa, Homo sapiens
  CDR3 for alpha chain variable domain of TCR clone 57297 (TRAV12-2, TRAJ11)
CAVEGGSGYSTLTF

SEQ ID NO: 114594 - protein, 15 aa, Homo sapiens
  CDR3 for beta chain variable domain of TCR clone 57297 (TRBV20-1, TRBJ2-7)
CSARDRVSGMDEQYF

SEQ ID NO: 114595 - protein, 13 aa, Homo sapiens
  CDR3 for alpha chain variable domain of TCR clone 57298 (TRAV27, TRAJ8)
CAGGPTGFQKLVF

SEQ ID NO: 114596 - protein, 15 aa, Homo sapiens
  CDR3 for beta chain variable domain of TCR clone 57298 (TRBV11-3, TRBJ2-3)
CASLKDGREGDTQYF

SEQ ID NO: 114597 - protein, 11 aa, Homo sapiens
  CDR3 for alpha chain variable domain of TCR clone 57299 (TRAV4, TRAJ23)
CLVAPGGKLIF

SEQ ID NO: 114598 - protein, 15 aa, Homo sapiens
  CDR3 for beta chain variable domain of TCR clone 57299 (TRBV7-2, TRBJ2-1)
CASSFQADKYNEQFF

SEQ ID NO: 114599 - protein, 14 aa, Homo sapiens
  CDR3 for alpha chain variable domain of TCR clone 57300 (TRAV2, TRAJ9)
CAVEDRSGGFKTIF

SEQ ID NO: 114600 - protein, 13 aa, Homo sapiens
  CDR3 for beta chain variable domain of TCR clone 57300 (TRBV27, TRBJ1-1)
CASSISIGAEAFF

SEQ ID NO: 114601 - protein, 14 aa, Homo sapiens
  CDR3 for alpha chain variable domain of TCR clone 57301 (TRAV8-4, TRAJ13)
CAVTLSGGYQKVTF

SEQ ID NO: 114602 - protein, 12 aa, Homo sapiens
  CDR3 for beta chain variable domain of TCR clone 57301 (TRBV2, TRBJ2-1)
CAKREGYNEQFF

SEQ ID NO: 114603 - protein, 15 aa, Homo sapiens
  CDR3 for alpha chain variable domain of TCR clone 57302 (TRAV20, TRAJ43)
CAVQAGKSSNNDMRF

SEQ ID NO: 114604 - protein, 15 aa, Homo sapiens
  CDR3 for beta chain variable domain of TCR clone 57302 (TRBV10-2, TRBJ2-6)
CASSEQGTGANVLTF

SEQ ID NO: 114605 - protein, 14 aa, Homo sapiens
  CDR3 for alpha chain variable domain of TCR clone 57303 (TRAV1-2, TRAJ16)
CAVNRFSAGQKLLF

SEQ ID NO: 114606 - protein, 16 aa, Homo sapiens
  CDR3 for beta chain variable domain of TCR clone 57303 (TRBV20-1, TRBJ1-4)
CSAPGQGLLTNEKLFF

SEQ ID NO: 114607 - protein, 14 aa, Homo sapiens
  CDR3 for alpha chain variable domain of TCR clone 57304 (TRAV12-2, TRAJ40)
CAVKIPSGTYKYIF

SEQ ID NO: 114608 - protein, 13 aa, Homo sapiens
  CDR3 for beta chain variable domain of TCR clone 57304 (TRBV20-1, TRBJ2-2)
CSASAAGTGELFF

SEQ ID NO: 114609 - protein, 14 aa, Homo sapiens
  CDR3 for alpha chain variable domain of TCR clone 57305 (TRAV2, TRAJ37)
YAVDFTSNTGKLIF

SEQ ID NO: 114610 - protein, 13 aa, Homo sapiens
  CDR3 for beta chain variable domain of TCR clone 57305 (TRBV20-1, TRBJ1-1)
CSAPLGGGTEAFF

SEQ ID NO: 114611 - protein, 13 aa, Homo sapiens
  CDR3 for alpha chain variable domain of TCR clone 57306 (TRAV8-6, TRAJ49)
CAVITNTGNQFYF

SEQ ID NO: 114612 - protein, 14 aa, Homo sapiens
  CDR3 for beta chain variable domain of TCR clone 57306 (TRBV5-1, TRBJ2-7)
CARSRGESLYEQYF

SEQ ID NO: 114613 - protein, 14 aa, Homo sapiens
  CDR3 for alpha chain variable domain of TCR clone 57307 (TRAV12-3, TRAJ9)
CAMSPNTGGFKTIF

SEQ ID NO: 114614 - protein, 14 aa, Homo sapiens
  CDR3 for beta chain variable domain of TCR clone 57307 (TRBV25-1, TRBJ1-1)
CASTHLGGNTEAFF

SEQ ID NO: 114615 - protein, 14 aa, Homo sapiens
  CDR3 for alpha chain variable domain of TCR clone 57308 (TRAV12-2, TRAJ13)
CAVKKTGGYQKVTF

SEQ ID NO: 114616 - protein, 15 aa, Homo sapiens
  CDR3 for beta chain variable domain of TCR clone 57308 (TRBV5-5, TRBJ1-5)
CASSLKGGGEQPQHF

SEQ ID NO: 114617 - protein, 11 aa, Homo sapiens
  CDR3 for alpha chain variable domain of TCR clone 57309 (TRAV13-1, TRAJ5)
CAPKGRRALTF

SEQ ID NO: 114618 - protein, 12 aa, Homo sapiens
  CDR3 for beta chain variable domain of TCR clone 57309 (TRBV11-2, TRBJ1-1)
CQQLSLQPAAFF

SEQ ID NO: 114619 - protein, 15 aa, Homo sapiens
  CDR3 for alpha chain variable domain of TCR clone 57310 (TRAV8-3, TRAJ7)
CAVGSTSYGNNRLAF

SEQ ID NO: 114620 - protein, 15 aa, Homo sapiens
  CDR3 for beta chain variable domain of TCR clone 57310 (TRBV4-2, TRBJ1-1)
CASSQEDLPRTEAFF

SEQ ID NO: 114621 - protein, 11 aa, Homo sapiens
  CDR3 for alpha chain variable domain of TCR clone 57311 (TRAV21, TRAJ9)
CAVPGVFKTIF

SEQ ID NO: 114622 - protein, 17 aa, Homo sapiens
  CDR3 for beta chain variable domain of TCR clone 57311 (TRBV7-9, TRBJ2-5)
CATSGGARDPVLRARHA

SEQ ID NO: 114623 - protein, 17 aa, Homo sapiens
  CDR3 for alpha chain variable domain of TCR clone 57312 (TRAV16, TRAJ42)
CAISPKLYGGSQGNLIF

SEQ ID NO: 114624 - protein, 13 aa, Homo sapiens
  CDR3 for beta chain variable domain of TCR clone 57312 (TRBV19, TRBJ1-5)
CASSTRRDQPQHF

SEQ ID NO: 114625 - protein, 13 aa, Homo sapiens
  CDR3 for alpha chain variable domain of TCR clone 57313 (TRAV2, TRAJ15)
CAVASQAGTALIF

SEQ ID NO: 114626 - protein, 16 aa, Homo sapiens
  CDR3 for beta chain variable domain of TCR clone 57313 (TRBV5-1, TRBJ1-1)
CASSPGDSSLNTEAFF

SEQ ID NO: 114627 - protein, 16 aa, Homo sapiens
  CDR3 for alpha chain variable domain of TCR clone 57314 (TRAV26-2, TRAJ48)
CILRPPFNFRNEKLTF

SEQ ID NO: 114628 - protein, 15 aa, Homo sapiens
  CDR3 for beta chain variable domain of TCR clone 57314 (TRBV20-1, TRBJ2-3)
CSARVEGTYTDTQYF

SEQ ID NO: 114629 - protein, 16 aa, Homo sapiens
  CDR3 for alpha chain variable domain of TCR clone 57315 (TRAV3, TRAJ37)
CAVRGKGSGNTGKLSF

SEQ ID NO: 114630 - protein, 13 aa, Homo sapiens
  CDR3 for beta chain variable domain of TCR clone 57315 (TRBV14, TRBJ2-7)
CASSQDRRYEQYF

SEQ ID NO: 114631 - protein, 13 aa, Homo sapiens
  CDR3 for alpha chain variable domain of TCR clone 57316 (TRAV2, TRAJ38)
CAYGAGNNRKLIW

SEQ ID NO: 114632 - protein, 13 aa, Homo sapiens
  CDR3 for beta chain variable domain of TCR clone 57316 (TRBV6-1, TRBJ1-6)
CACSSSWDSPLHF

SEQ ID NO: 114633 - protein, 14 aa, Homo sapiens
  CDR3 for alpha chain variable domain of TCR clone 57317 (TRAV8-3, TRAJ9)
CAVVYNTGGFKTIF

SEQ ID NO: 114634 - protein, 14 aa, Homo sapiens
  CDR3 for beta chain variable domain of TCR clone 57317 (TRBV12-5, TRBJ2-5)
CASGSRTHQETQYF

SEQ ID NO: 114635 - protein, 14 aa, Homo sapiens
  CDR3 for alpha chain variable domain of TCR clone 57318 (TRAV26-1, TRAJ48)
CIVRVGSGNEKLTF

SEQ ID NO: 114636 - protein, 13 aa, Homo sapiens
  CDR3 for beta chain variable domain of TCR clone 57318 (TRBV11-3, TRBJ2-3)
CASSHDTKDTQYF

SEQ ID NO: 114637 - protein, 10 aa, Homo sapiens
  CDR3 for alpha chain variable domain of TCR clone 57319 (TRAV1-2, TRAJ23)
CAGPGGKLIF

SEQ ID NO: 114638 - protein, 16 aa, Homo sapiens
  CDR3 for beta chain variable domain of TCR clone 57319 (TRBV11-2, TRBJ1-1)
CASSLRQGGEHSKAFF

SEQ ID NO: 114639 - protein, 17 aa, Homo sapiens
  CDR3 for alpha chain variable domain of TCR clone 57320 (TRAV3, TRAJ42)
CAVRDRDYGGSQGNLIF

SEQ ID NO: 114640 - protein, 13 aa, Homo sapiens
  CDR3 for beta chain variable domain of TCR clone 57320 (TRBV20-1, TRBJ2-5)
CSARRGTGATQYF

SEQ ID NO: 114641 - protein, 13 aa, Homo sapiens
  CDR3 for alpha chain variable domain of TCR clone 57321 (TRAV12-3, TRAJ7)
CAMSASGNNRLAF

SEQ ID NO: 114642 - protein, 14 aa, Homo sapiens
  CDR3 for beta chain variable domain of TCR clone 57321 (TRBV13, TRBJ2-5)
CASSLGPRGGTQYF

SEQ ID NO: 114643 - protein, 18 aa, Homo sapiens
  CDR3 for alpha chain variable domain of TCR clone 57322 (TRAV21, TRAJ52)
CAVRPSLAGGTSYGKLTF

SEQ ID NO: 114644 - protein, 17 aa, Homo sapiens
  CDR3 for beta chain variable domain of TCR clone 57322 (TRBV13, TRBJ2-3)
RASSLSRVAGGRNTQYF

SEQ ID NO: 114645 - protein, 15 aa, Homo sapiens
  CDR3 for alpha chain variable domain of TCR clone 57323 (TRAV8-3, TRAJ6)
CAVGPLGGGSYIPTF

SEQ ID NO: 114646 - protein, 14 aa, Homo sapiens
  CDR3 for beta chain variable domain of TCR clone 57323 (TRBV19, TRBJ2-2)
CASSTEQGAGELFF

SEQ ID NO: 114647 - protein, 12 aa, Homo sapiens
  CDR3 for alpha chain variable domain of TCR clone 57324 (TRAV10, TRAJ34)
CVVSGKHRQAHL

SEQ ID NO: 114648 - protein, 14 aa, Homo sapiens
  CDR3 for beta chain variable domain of TCR clone 57324 (TRBV19, TRBJ2-1)
CASPTFVVSGEQFF

SEQ ID NO: 114649 - protein, 14 aa, Homo sapiens
  CDR3 for alpha chain variable domain of TCR clone 57325 (TRAV35, TRAJ54)
CAGYLIQGAQKLVF

SEQ ID NO: 114650 - protein, 14 aa, Homo sapiens
  CDR3 for beta chain variable domain of TCR clone 57325 (TRBV7-2, TRBJ2-5)
CASGVGWAEETQYF

SEQ ID NO: 114651 - protein, 11 aa, Homo sapiens
  CDR3 for alpha chain variable domain of TCR clone 57326 (TRAV3, TRAJ13)
CAVTSYQKVTF

SEQ ID NO: 114652 - protein, 15 aa, Homo sapiens
  CDR3 for beta chain variable domain of TCR clone 57326 (TRBV7-9, TRBJ2-7)
CASSSPGLAVYEQYF

SEQ ID NO: 114653 - protein, 11 aa, Homo sapiens
  CDR3 for alpha chain variable domain of TCR clone 57327 (TRAV39, TRAJ49)
CAVDISIQFYF

SEQ ID NO: 114654 - protein, 11 aa, Homo sapiens
  CDR3 for beta chain variable domain of TCR clone 57327 (TRBV7-8, TRBJ2-7)
CASSLSLEQYF

SEQ ID NO: 114655 - protein, 14 aa, Homo sapiens
  CDR3 for alpha chain variable domain of TCR clone 57328 (TRAV6, TRAJ6)
CAPPTSGGSYIPTF

SEQ ID NO: 114656 - protein, 17 aa, Homo sapiens
  CDR3 for beta chain variable domain of TCR clone 57328 (TRBV5-1, TRBJ2-5)
CASSPVALGQNQETQYF

SEQ ID NO: 114657 - protein, 14 aa, Homo sapiens
  CDR3 for alpha chain variable domain of TCR clone 57329 (TRAV16, TRAJ32)
CALKSGGATNKLIF

SEQ ID NO: 114658 - protein, 13 aa, Homo sapiens
  CDR3 for beta chain variable domain of TCR clone 57329 (TRBV14, TRBJ2-7)
CASSQDRRYEQYF

SEQ ID NO: 114659 - protein, 11 aa, Homo sapiens
  CDR3 for alpha chain variable domain of TCR clone 57330 (TRAV4, TRAJ23)
CLVAPGGKLIF

SEQ ID NO: 114660 - protein, 15 aa, Homo sapiens
  CDR3 for beta chain variable domain of TCR clone 57330 (TRBV7-2, TRBJ2-1)
CASSFQAYEYNEQFF

SEQ ID NO: 114661 - protein, 13 aa, Homo sapiens
  CDR3 for alpha chain variable domain of TCR clone 57331 (TRAV13-1, TRAJ11)
CAASIGGYSTLTF

SEQ ID NO: 114662 - protein, 14 aa, Homo sapiens
  CDR3 for beta chain variable domain of TCR clone 57331 (TRBV4-2, TRBJ2-1)
CASGLDRAYNEQFF

SEQ ID NO: 114663 - protein, 18 aa, Homo sapiens
  CDR3 for alpha chain variable domain of TCR clone 57332 (TRAV21, TRAJ52)
CAVRPSPAGGTSYGKLTF

SEQ ID NO: 114664 - protein, 16 aa, Homo sapiens
  CDR3 for beta chain variable domain of TCR clone 57332 (TRBV13, TRBJ2-3)
CASSLSRVAGEEYAVF

SEQ ID NO: 114665 - protein, 14 aa, Homo sapiens
  CDR3 for alpha chain variable domain of TCR clone 57333 (TRAV25, TRAJ44)
CAVFPTGTASKLTF

SEQ ID NO: 114666 - protein, 14 aa, Homo sapiens
  CDR3 for beta chain variable domain of TCR clone 57333 (TRBV12-5, TRBJ2-5)
CASGSRTHQETQYF

SEQ ID NO: 114667 - protein, 15 aa, Homo sapiens
  CDR3 for alpha chain variable domain of TCR clone 57334 (TRAV3, TRAJ22)
CAVRDRGGSARQLTF

SEQ ID NO: 114668 - protein, 12 aa, Homo sapiens
  CDR3 for beta chain variable domain of TCR clone 57334 (TRBV11-3, TRBJ1-4)
CASSSGSPGLFF

SEQ ID NO: 114669 - protein, 14 aa, Homo sapiens
  CDR3 for alpha chain variable domain of TCR clone 57335 (TRAV35, TRAJ10)
CAGILTGGGSKLTF

SEQ ID NO: 114670 - protein, 16 aa, Homo sapiens
  CDR3 for beta chain variable domain of TCR clone 57335 (TRBV12-5, TRBJ2-5)
CASGPRTSGNQETQYF

SEQ ID NO: 114671 - protein, 13 aa, Homo sapiens
  CDR3 for alpha chain variable domain of TCR clone 57336 (TRAV12-2, TRAJ20)
CAVYPSNDYKLSF

SEQ ID NO: 114672 - protein, 14 aa, Homo sapiens
  CDR3 for beta chain variable domain of TCR clone 57336 (TRBV18, TRBJ2-7)
CASSPRGGAYEQYF

SEQ ID NO: 114673 - protein, 17 aa, Homo sapiens
  CDR3 for alpha chain variable domain of TCR clone 57337 (TRAV26-2, TRAJ42)
CILRDVGYGGSRGNLIF

SEQ ID NO: 114674 - protein, 16 aa, Homo sapiens
  CDR3 for beta chain variable domain of TCR clone 57337 (TRBV12-4, TRBJ2-7)
CASSLIGGTGTYEQYF

SEQ ID NO: 114675 - protein, 11 aa, Homo sapiens
  CDR3 for alpha chain variable domain of TCR clone 57338 (TRAV2, TRAJ13)
CAPGGYQKVTF

SEQ ID NO: 114676 - protein, 17 aa, Homo sapiens
  CDR3 for beta chain variable domain of TCR clone 57338 (TRBV7-3, TRBJ2-3)
CASSLMKRMRGADTQYF

SEQ ID NO: 114677 - protein, 14 aa, Homo sapiens
  CDR3 for alpha chain variable domain of TCR clone 57339 (TRAV16, TRAJ33)
CALSAMDSNYQLIW

SEQ ID NO: 114678 - protein, 17 aa, Homo sapiens
  CDR3 for beta chain variable domain of TCR clone 57339 (TRBV25-1, TRBJ2-7)
CACSDARVVFSSYEQYF

SEQ ID NO: 114679 - protein, 12 aa, Homo sapiens
  CDR3 for alpha chain variable domain of TCR clone 57340 (TRAV23/DV6, TRAJ31)
CAARRIGARLMF

SEQ ID NO: 114680 - protein, 16 aa, Homo sapiens
  CDR3 for beta chain variable domain of TCR clone 57340 (TRBV28, TRBJ2-7)
CTSVPAKRGGVYEQYF

SEQ ID NO: 114681 - protein, 17 aa, Homo sapiens
  CDR3 for alpha chain variable domain of TCR clone 57341 (TRAV29/DV5, TRAJ10)
CSVLLGRATGGGNKLTF

SEQ ID NO: 114682 - protein, 13 aa, Homo sapiens
  CDR3 for beta chain variable domain of TCR clone 57341 (TRBV7-9, TRBJ1-2)
CASSLKQNYGYTF

SEQ ID NO: 114683 - protein, 14 aa, Homo sapiens
  CDR3 for alpha chain variable domain of TCR clone 57342 (TRAV1-2, TRAJ16)
CAVNRFSDGQKLLF

SEQ ID NO: 114684 - protein, 14 aa, Homo sapiens
  CDR3 for beta chain variable domain of TCR clone 57342 (TRBV6-6, TRBJ2-7)
CASSDSGAGYEQYF

SEQ ID NO: 114685 - protein, 13 aa, Homo sapiens
  CDR3 for alpha chain variable domain of TCR clone 57343 (TRAV13-1, TRAJ49)
CAAMLYTGNQFYF

SEQ ID NO: 114686 - protein, 15 aa, Homo sapiens
  CDR3 for beta chain variable domain of TCR clone 57343 (TRBV12-4, TRBJ1-5)
CANTRGSGFGQPQHF

SEQ ID NO: 114687 - protein, 16 aa, Homo sapiens
  CDR3 for alpha chain variable domain of TCR clone 57344 (TRAV3, TRAJ10)
CAVRDMRAGGGNKLPF

SEQ ID NO: 114688 - protein, 14 aa, Homo sapiens
  CDR3 for beta chain variable domain of TCR clone 57344 (TRBV25-1, TRBJ1-1)
CASTHLGGNTEAFF

SEQ ID NO: 114689 - protein, 13 aa, Homo sapiens
  CDR3 for alpha chain variable domain of TCR clone 57345 (TRAV27, TRAJ6)
CAGGTRGSYIPKF

SEQ ID NO: 114690 - protein, 13 aa, Homo sapiens
  CDR3 for beta chain variable domain of TCR clone 57345 (TRBV4-1, TRBJ2-2)
CASSQENTGELFF

SEQ ID NO: 114691 - protein, 14 aa, Homo sapiens
  CDR3 for alpha chain variable domain of TCR clone 57346 (TRAV1-2, TRAJ16)
CAVNRFSDGQKLLF

SEQ ID NO: 114692 - protein, 13 aa, Homo sapiens
  CDR3 for beta chain variable domain of TCR clone 57346 (TRBV27, TRBJ2-1)
CASSSGSYNEQFF

SEQ ID NO: 114693 - protein, 13 aa, Homo sapiens
  CDR3 for alpha chain variable domain of TCR clone 57347 (TRAV13-2, TRAJ48)
CAEMDFGNEKLTF

SEQ ID NO: 114694 - protein, 13 aa, Homo sapiens
  CDR3 for beta chain variable domain of TCR clone 57347 (TRBV7-3, TRBJ1-1)
CASSQDWGAEAFF

SEQ ID NO: 114695 - protein, 11 aa, Homo sapiens
  CDR3 for alpha chain variable domain of TCR clone 57348 (TRAV2, TRAJ33)
CAVESNYQLIW

SEQ ID NO: 114696 - protein, 14 aa, Homo sapiens
  CDR3 for beta chain variable domain of TCR clone 57348 (TRBV11-2, TRBJ2-3)
CASSRLARTDTQYF

SEQ ID NO: 114697 - protein, 13 aa, Homo sapiens
  CDR3 for alpha chain variable domain of TCR clone 57349 (TRAV3, TRAJ30)
CAVRDRGDDKSIF

SEQ ID NO: 114698 - protein, 16 aa, Homo sapiens
  CDR3 for beta chain variable domain of TCR clone 57349 (TRBV7-3, TRBJ2-2)
CASSLKRGTLSGELFF

SEQ ID NO: 114699 - protein, 16 aa, Homo sapiens
  CDR3 for alpha chain variable domain of TCR clone 57350 (TRAV21, TRAJ37)
CAVRTAGSSNTGKLIF

SEQ ID NO: 114700 - protein, 14 aa, Homo sapiens
  CDR3 for beta chain variable domain of TCR clone 57350 (TRBV7-9, TRBJ2-7)
CASSIGQGAGEQYF

SEQ ID NO: 114701 - protein, 13 aa, Homo sapiens
  CDR3 for alpha chain variable domain of TCR clone 57351 (TRAV8-3, TRAJ28)
CAVGAVGSYQLTF

SEQ ID NO: 114702 - protein, 14 aa, Homo sapiens
  CDR3 for beta chain variable domain of TCR clone 57351 (TRBV7-2, TRBJ2-7)
CSSRSQGAAYEQYF

SEQ ID NO: 114703 - protein, 17 aa, Homo sapiens
  CDR3 for alpha chain variable domain of TCR clone 57352 (TRAV16, TRAJ58)
CITVLSNGETSDSRLTF

SEQ ID NO: 114704 - protein, 17 aa, Homo sapiens
  CDR3 for beta chain variable domain of TCR clone 57352 (TRBV18, TRBJ2-1)
CASSKGLSGGADNEQFF

SEQ ID NO: 114705 - protein, 15 aa, Homo sapiens
  CDR3 for alpha chain variable domain of TCR clone 57353 (TRAV17, TRAJ28)
CATVDSGAGSYQLTF

SEQ ID NO: 114706 - protein, 13 aa, Homo sapiens
  CDR3 for beta chain variable domain of TCR clone 57353 (TRBV5-4, TRBJ2-5)
CASSRKEGETQYF

SEQ ID NO: 114707 - protein, 13 aa, Homo sapiens
  CDR3 for alpha chain variable domain of TCR clone 57354 (TRAV36/DV7, TRAJ38)
CVANAGNNRKLIW

SEQ ID NO: 114708 - protein, 14 aa, Homo sapiens
  CDR3 for beta chain variable domain of TCR clone 57354 (TRBV7-2, TRBJ2-7)
CASSRRWEVNEQYF

SEQ ID NO: 114709 - protein, 14 aa, Homo sapiens
  CDR3 for alpha chain variable domain of TCR clone 57355 (TRAV12-3, TRAJ10)
SHLPLTGGGNKLTF

SEQ ID NO: 114710 - protein, 14 aa, Homo sapiens
  CDR3 for beta chain variable domain of TCR clone 57355 (TRBV6-1, TRBJ1-3)
CASVQGGGGNTICF

SEQ ID NO: 114711 - protein, 16 aa, Homo sapiens
  CDR3 for alpha chain variable domain of TCR clone 57356 (TRAV16, TRAJ4)
CITVLPFSGGYNKLIF

SEQ ID NO: 114712 - protein, 14 aa, Homo sapiens
  CDR3 for beta chain variable domain of TCR clone 57356 (TRBV19, TRBJ2-7)
CASSRGQGAIEQYF

SEQ ID NO: 114713 - protein, 14 aa, Homo sapiens
  CDR3 for alpha chain variable domain of TCR clone 57357 (TRAV14/DV4, TRAJ54)
CAMREVPGAQKLVF

SEQ ID NO: 114714 - protein, 15 aa, Homo sapiens
  CDR3 for beta chain variable domain of TCR clone 57357 (TRBV20-1, TRBJ2-7)
CSARDRVSGMDEQYF

SEQ ID NO: 114715 - protein, 12 aa, Homo sapiens
  CDR3 for alpha chain variable domain of TCR clone 57358 (TRAV21, TRAJ30)
CAVMNRDDKIIF

SEQ ID NO: 114716 - protein, 15 aa, Homo sapiens
  CDR3 for beta chain variable domain of TCR clone 57358 (TRBV20-1, TRBJ2-7)
CSARDRVSGMDEQYF

SEQ ID NO: 114717 - protein, 14 aa, Homo sapiens
  CDR3 for alpha chain variable domain of TCR clone 57359 (TRAV16, TRAJ39)
CALSKNNAGNMLTF

SEQ ID NO: 114718 - protein, 14 aa, Homo sapiens
  CDR3 for beta chain variable domain of TCR clone 57359 (TRBV15, TRBJ2-7)
CATSNPVTSYEQYF

SEQ ID NO: 114719 - protein, 14 aa, Homo sapiens
  CDR3 for alpha chain variable domain of TCR clone 57360 (TRAV12-1, TRAJ17)
CVVNYKAAGNKLTF

SEQ ID NO: 114720 - protein, 11 aa, Homo sapiens
  CDR3 for beta chain variable domain of TCR clone 57360 (TRBV4-1, TRBJ2-2)
CASEHTGELFF

SEQ ID NO: 114721 - protein, 14 aa, Homo sapiens
  CDR3 for alpha chain variable domain of TCR clone 57361 (TRAV1-2, TRAJ16)
CAVNRFSYGQKLLF

SEQ ID NO: 114722 - protein, 12 aa, Homo sapiens
  CDR3 for beta chain variable domain of TCR clone 57361 (TRBV20-1, TRBJ1-5)
CSAAGWDQPQHF

SEQ ID NO: 114723 - protein, 15 aa, Homo sapiens
  CDR3 for alpha chain variable domain of TCR clone 57362 (TRAV23/DV6, TRAJ18)
FAARYRGSTLGRLYF

SEQ ID NO: 114724 - protein, 13 aa, Homo sapiens
  CDR3 for beta chain variable domain of TCR clone 57362 (TRBV7-2, TRBJ2-7)
CASSSPSGSEQYF

SEQ ID NO: 114725 - protein, 16 aa, Homo sapiens
  CDR3 for alpha chain variable domain of TCR clone 57363 (TRAV38-2/DV8, TRAJ37)
CAYRRPRSSNTGKLIF

SEQ ID NO: 114726 - protein, 15 aa, Homo sapiens
  CDR3 for beta chain variable domain of TCR clone 57363 (TRBV15, TRBJ2-7)
CATSRGVTPTYEQYF

SEQ ID NO: 114727 - protein, 18 aa, Homo sapiens
  CDR3 for alpha chain variable domain of TCR clone 57364 (TRAV9-2, TRAJ52)
CALSRHNAGGTSYGKLTF

SEQ ID NO: 114728 - protein, 13 aa, Homo sapiens
  CDR3 for beta chain variable domain of TCR clone 57364 (TRBV7-9, TRBJ1-2)
CASSLKQNYGCTF

SEQ ID NO: 114729 - protein, 15 aa, Homo sapiens
  CDR3 for alpha chain variable domain of TCR clone 57365 (TRAV3, TRAJ20)
CAVRDIKLSDYKLSF

SEQ ID NO: 114730 - protein, 15 aa, Homo sapiens
  CDR3 for beta chain variable domain of TCR clone 57365 (TRBV7-9, TRBJ1-6)
CASSSPGSGNSPLHF

SEQ ID NO: 114731 - protein, 14 aa, Homo sapiens
  CDR3 for alpha chain variable domain of TCR clone 57366 (TRAV12-3, TRAJ6)
CAMSATGGSYIPTF

SEQ ID NO: 114732 - protein, 16 aa, Homo sapiens
  CDR3 for beta chain variable domain of TCR clone 57366 (TRBV4-2, TRBJ2-1)
CASGPRAGQGANEQFF

SEQ ID NO: 114733 - protein, 14 aa, Homo sapiens
  CDR3 for alpha chain variable domain of TCR clone 57367 (TRAV30, TRAJ33)
CGTVAPRSNYQLIW

SEQ ID NO: 114734 - protein, 14 aa, Homo sapiens
  CDR3 for beta chain variable domain of TCR clone 57367 (TRBV19, TRBJ2-1)
CASPTFVLSGEQFF

SEQ ID NO: 114735 - protein, 14 aa, Homo sapiens
  CDR3 for alpha chain variable domain of TCR clone 57368 (TRAV1-2, TRAJ8)
CAVREDTGFQKLVF

SEQ ID NO: 114736 - protein, 14 aa, Homo sapiens
  CDR3 for beta chain variable domain of TCR clone 57368 (TRBV13, TRBJ2-7)
CASSLKGASYEQYF

SEQ ID NO: 114737 - protein, 19 aa, Homo sapiens
  CDR3 for alpha chain variable domain of TCR clone 57369 (TRAV1-2, TRAJ26)
CLLPLCCERPDNYGQNFVF

SEQ ID NO: 114738 - protein, 13 aa, Homo sapiens
  CDR3 for beta chain variable domain of TCR clone 57369 (TRBV10-3, TRBJ2-7)
CASKLAVNYEQYF

SEQ ID NO: 114739 - protein, 12 aa, Homo sapiens
  CDR3 for alpha chain variable domain of TCR clone 57370 (TRAV1-2, TRAJ17)
CAVRAVGNKLTF

SEQ ID NO: 114740 - protein, 16 aa, Homo sapiens
  CDR3 for beta chain variable domain of TCR clone 57370 (TRBV20-1, TRBJ2-1)
CSAPGLAGSYSDEQFF

SEQ ID NO: 114741 - protein, 14 aa, Homo sapiens
  CDR3 for alpha chain variable domain of TCR clone 57371 (TRAV17, TRAJ16)
CATADFSDGQKLLF

SEQ ID NO: 114742 - protein, 14 aa, Homo sapiens
  CDR3 for beta chain variable domain of TCR clone 57371 (TRBV18, TRBJ2-1)
CQLTPSASYNEQFF

SEQ ID NO: 114743 - protein, 13 aa, Homo sapiens
  CDR3 for alpha chain variable domain of TCR clone 57372 (TRAV3, TRAJ15)
CAVREQAGTALIF

SEQ ID NO: 114744 - protein, 15 aa, Homo sapiens
  CDR3 for beta chain variable domain of TCR clone 57372 (TRBV11-1, TRBJ2-7)
CASSLNYGASYEQYF

SEQ ID NO: 114745 - protein, 14 aa, Homo sapiens
  CDR3 for alpha chain variable domain of TCR clone 57373 (TRAV1-2, TRAJ8)
CAVREDTGFQKLVF

SEQ ID NO: 114746 - protein, 14 aa, Homo sapiens
  CDR3 for beta chain variable domain of TCR clone 57373 (TRBV12-5, TRBJ2-5)
CASGPRTHQETQYF

SEQ ID NO: 114747 - protein, 15 aa, Homo sapiens
  CDR3 for alpha chain variable domain of TCR clone 57374 (TRAV26-1, TRAJ29)
CIVRVEGSGNTSLVF

SEQ ID NO: 114748 - protein, 15 aa, Homo sapiens
  CDR3 for beta chain variable domain of TCR clone 57374 (TRBV7-9, TRBJ1-5)
CASSQGHQPNQPQHF

SEQ ID NO: 114749 - protein, 19 aa, Homo sapiens
  CDR3 for alpha chain variable domain of TCR clone 57375 (TRAV3, TRAJ6)
CAVRDRNPSRAGGSYIPTF

SEQ ID NO: 114750 - protein, 15 aa, Homo sapiens
  CDR3 for beta chain variable domain of TCR clone 57375 (TRBV18, TRBJ2-7)
CASSPTFMDSYEQYF

SEQ ID NO: 114751 - protein, 15 aa, Homo sapiens
  CDR3 for alpha chain variable domain of TCR clone 57376 (TRAV12-3, TRAJ27)
CAMRAYNTNAGKPTF

SEQ ID NO: 114752 - protein, 13 aa, Homo sapiens
  CDR3 for beta chain variable domain of TCR clone 57376 (TRBV11-2, TRBJ2-5)
CASSRGPSETQYF

SEQ ID NO: 114753 - protein, 14 aa, Homo sapiens
  CDR3 for alpha chain variable domain of TCR clone 57377 (TRAV29/DV5, TRAJ48)
CAAMALFGNKKLTF

SEQ ID NO: 114754 - protein, 15 aa, Homo sapiens
  CDR3 for beta chain variable domain of TCR clone 57377 (TRBV7-2, TRBJ2-1)
CASTHGTGIYNEQFF

SEQ ID NO: 114755 - protein, 18 aa, Homo sapiens
  CDR3 for alpha chain variable domain of TCR clone 57378 (TRAV26-2, TRAJ32)
CILGAPLNYGGATNKLIF

SEQ ID NO: 114756 - protein, 13 aa, Homo sapiens
  CDR3 for beta chain variable domain of TCR clone 57378 (TRBV7-3, TRBJ2-1)
CASSLWPYNEQFF

SEQ ID NO: 114757 - protein, 14 aa, Homo sapiens
  CDR3 for alpha chain variable domain of TCR clone 57379 (TRAV6, TRAJ6)
CALPTSGGSYIPTF

SEQ ID NO: 114758 - protein, 17 aa, Homo sapiens
  CDR3 for beta chain variable domain of TCR clone 57379 (TRBV5-1, TRBJ2-5)
CASSPVALGQNQETRYF

SEQ ID NO: 114759 - protein, 14 aa, Homo sapiens
  CDR3 for alpha chain variable domain of TCR clone 57380 (TRAV12-2, TRAJ40)
CAVKIPSGTYKYIF

SEQ ID NO: 114760 - protein, 14 aa, Homo sapiens
  CDR3 for beta chain variable domain of TCR clone 57380 (TRBV11-2, TRBJ2-5)
CASSRTGGIETQYF

SEQ ID NO: 114761 - protein, 11 aa, Homo sapiens
  CDR3 for alpha chain variable domain of TCR clone 57381 (TRAV35, TRAJ30)
CVGERDDKIIF

SEQ ID NO: 114762 - protein, 14 aa, Homo sapiens
  CDR3 for beta chain variable domain of TCR clone 57381 (TRBV15, TRBJ2-5)
CATSGDRGQETQYF

SEQ ID NO: 114763 - protein, 17 aa, Homo sapiens
  CDR3 for alpha chain variable domain of TCR clone 57382 (TRAV3, TRAJ6)
CAVRDGPRAGGSYIPTF

SEQ ID NO: 114764 - protein, 15 aa, Homo sapiens
  CDR3 for beta chain variable domain of TCR clone 57382 (TRBV6-1, TRBJ2-1)
CASSELRGQYNEQFF

SEQ ID NO: 114765 - protein, 14 aa, Homo sapiens
  CDR3 for alpha chain variable domain of TCR clone 57383 (TRAV17, TRAJ16)
CATSDFSDGQKLLF

SEQ ID NO: 114766 - protein, 15 aa, Homo sapiens
  CDR3 for beta chain variable domain of TCR clone 57383 (TRBV18, TRBJ2-1)
CASSPPSASYNEQFL

SEQ ID NO: 114767 - protein, 11 aa, Homo sapiens
  CDR3 for alpha chain variable domain of TCR clone 57384 (TRAV17, TRAJ49)
CATDAGNQFYF

SEQ ID NO: 114768 - protein, 14 aa, Homo sapiens
  CDR3 for beta chain variable domain of TCR clone 57384 (TRBV20-1, TRBJ1-1)
CSARDRGQGSEAFF

SEQ ID NO: 114769 - protein, 15 aa, Homo sapiens
  CDR3 for alpha chain variable domain of TCR clone 57385 (TRAV17, TRAJ56)
CAMDANTGANSKLTF

SEQ ID NO: 114770 - protein, 14 aa, Homo sapiens
  CDR3 for beta chain variable domain of TCR clone 57385 (TRBV19, TRBJ1-5)
CASSLGTGGQPQHF

SEQ ID NO: 114771 - protein, 11 aa, Homo sapiens
  CDR3 for alpha chain variable domain of TCR clone 57386 (TRAV1-1, TRAJ23)
CAVRQGGKLIF

SEQ ID NO: 114772 - protein, 16 aa, Homo sapiens
  CDR3 for beta chain variable domain of TCR clone 57386 (TRBV11-2, TRBJ2-7)
CASSPTTGGVSYEQYF

SEQ ID NO: 114773 - protein, 10 aa, Homo sapiens
  CDR3 for alpha chain variable domain of TCR clone 57387 (TRAV4, TRAJ15)
CLPLWTALIF

SEQ ID NO: 114774 - protein, 15 aa, Homo sapiens
  CDR3 for beta chain variable domain of TCR clone 57387 (TRBV5-1, TRBJ2-1)
CASSFSGTGYNEQFF

SEQ ID NO: 114775 - protein, 15 aa, Homo sapiens
  CDR3 for alpha chain variable domain of TCR clone 57388 (TRAV3, TRAJ20)
CAVRDIKLSDYKLSF

SEQ ID NO: 114776 - protein, 18 aa, Homo sapiens
  CDR3 for beta chain variable domain of TCR clone 57388 (TRBV20-1, TRBJ2-5)
GSQTGDSGRLGGKETQYF

SEQ ID NO: 114777 - protein, 15 aa, Homo sapiens
  CDR3 for alpha chain variable domain of TCR clone 57389 (TRAV23/DV6, TRAJ18)
CAARYRGSTLGRLYY

SEQ ID NO: 114778 - protein, 13 aa, Homo sapiens
  CDR3 for beta chain variable domain of TCR clone 57389 (TRBV7-2, TRBJ2-7)
CASSSPSGSEQYF

SEQ ID NO: 114779 - protein, 16 aa, Homo sapiens
  CDR3 for alpha chain variable domain of TCR clone 57390 (TRAV26-1, TRAJ32)
CIVRTNYGGATNKLIF

SEQ ID NO: 114780 - protein, 14 aa, Homo sapiens
  CDR3 for beta chain variable domain of TCR clone 57390 (TRBV5-1, TRBJ2-7)
CASSFGTGLYEQYF

SEQ ID NO: 114781 - protein, 13 aa, Homo sapiens
  CDR3 for alpha chain variable domain of TCR clone 57391 (TRAV8-3, TRAJ6)
CAVGSGGSYIPTF

SEQ ID NO: 114782 - protein, 14 aa, Homo sapiens
  CDR3 for beta chain variable domain of TCR clone 57391 (TRBV11-2, TRBJ1-1)
CASSTQRGRAEAFF

SEQ ID NO: 114783 - protein, 15 aa, Homo sapiens
  CDR3 for alpha chain variable domain of TCR clone 57392 (TRAV21, TRAJ24)
CAARSSTDSWGKLQF

SEQ ID NO: 114784 - protein, 13 aa, Homo sapiens
  CDR3 for beta chain variable domain of TCR clone 57392 (TRBV11-2, TRBJ2-5)
CASSSTGEGTQYF

SEQ ID NO: 114785 - protein, 13 aa, Homo sapiens
  CDR3 for alpha chain variable domain of TCR clone 57393 (TRAV3, TRAJ36)
CAVRYTGANNLFF

SEQ ID NO: 114786 - protein, 15 aa, Homo sapiens
  CDR3 for beta chain variable domain of TCR clone 57393 (TRBV24-1, TRBJ2-1)
CATSGSGGFYNEQFF

SEQ ID NO: 114787 - protein, 14 aa, Homo sapiens
  CDR3 for alpha chain variable domain of TCR clone 57394 (TRAV27, TRAJ40)
CAGSLLIGTYKYIF

SEQ ID NO: 114788 - protein, 15 aa, Homo sapiens
  CDR3 for beta chain variable domain of TCR clone 57394 (TRBV6-3, TRBJ1-4)
CASSSPGQENEKLFF

SEQ ID NO: 114789 - protein, 11 aa, Homo sapiens
  CDR3 for alpha chain variable domain of TCR clone 57395 (TRAV23/DV6, TRAJ20)
CAARDDYKLSF

SEQ ID NO: 114790 - protein, 12 aa, Homo sapiens
  CDR3 for beta chain variable domain of TCR clone 57395 (TRBV3-1, TRBJ2-3)
CASSSGDRAEYF

SEQ ID NO: 114791 - protein, 14 aa, Homo sapiens
  CDR3 for alpha chain variable domain of TCR clone 57396 (TRAV12-3, TRAJ9)
CAMSPNTGGFKTIF

SEQ ID NO: 114792 - protein, 14 aa, Homo sapiens
  CDR3 for beta chain variable domain of TCR clone 57396 (TRBV7-2, TRBJ2-7)
CASRSQGAAYEQYF

SEQ ID NO: 114793 - protein, 18 aa, Homo sapiens
  CDR3 for alpha chain variable domain of TCR clone 57397 (TRAV13-1, TRAJ52)
CAAKNPNAGGTSYGKLTF

SEQ ID NO: 114794 - protein, 15 aa, Homo sapiens
  CDR3 for beta chain variable domain of TCR clone 57397 (TRBV6-1, TRBJ2-3)
CASSERGGITDAQYF

SEQ ID NO: 114795 - protein, 14 aa, Homo sapiens
  CDR3 for alpha chain variable domain of TCR clone 57398 (TRAV8-3, TRAJ4)
CAVGAAGGYNKLIF

SEQ ID NO: 114796 - protein, 15 aa, Homo sapiens
  CDR3 for beta chain variable domain of TCR clone 57398 (TRBV6-5, TRBJ2-1)
CASSYYAGAGNEQFF

SEQ ID NO: 114797 - protein, 14 aa, Homo sapiens
  CDR3 for alpha chain variable domain of TCR clone 57399 (TRAV8-6, TRAJ53)
CATLVLGSNYKLTF

SEQ ID NO: 114798 - protein, 15 aa, Homo sapiens
  CDR3 for beta chain variable domain of TCR clone 57399 (TRBV20-1, TRBJ2-3)
CSAEPLAGHGDTQYF

SEQ ID NO: 114799 - protein, 11 aa, Homo sapiens
  CDR3 for alpha chain variable domain of TCR clone 57400 (TRAV21, TRAJ41)
CAVRSGHALNF

SEQ ID NO: 114800 - protein, 13 aa, Homo sapiens
  CDR3 for beta chain variable domain of TCR clone 57400 (TRBV7-2, TRBJ2-5)
CASSQTSVETQYF

SEQ ID NO: 114801 - protein, 13 aa, Homo sapiens
  CDR3 for alpha chain variable domain of TCR clone 57401 (TRAV13-1, TRAJ43)
CAASVGWDNDMRF

SEQ ID NO: 114802 - protein, 14 aa, Homo sapiens
  CDR3 for beta chain variable domain of TCR clone 57401 (TRBV4-1, TRBJ2-2)
CASSQAVNTGELFF

SEQ ID NO: 114803 - protein, 18 aa, Homo sapiens
  CDR3 for alpha chain variable domain of TCR clone 57402 (TRAV1-1, TRAJ12)
CLLLLRCERGDSSYKLIF

SEQ ID NO: 114804 - protein, 15 aa, Homo sapiens
  CDR3 for beta chain variable domain of TCR clone 57402 (TRBV18, TRBJ2-5)
RASTDRGPRQETQYF

SEQ ID NO: 114805 - protein, 11 aa, Homo sapiens
  CDR3 for alpha chain variable domain of TCR clone 57403 (TRAV13-1, TRAJ40)
CAVSGTYKYIF

SEQ ID NO: 114806 - protein, 14 aa, Homo sapiens
  CDR3 for beta chain variable domain of TCR clone 57403 (TRBV7-9, TRBJ1-2)
CASSRQGANYGYTF

SEQ ID NO: 114807 - protein, 14 aa, Homo sapiens
  CDR3 for alpha chain variable domain of TCR clone 57404 (TRAV2, TRAJ9)
CAVEDRSGGLKTIF

SEQ ID NO: 114808 - protein, 16 aa, Homo sapiens
  CDR3 for beta chain variable domain of TCR clone 57404 (TRBV7-3, TRBJ2-2)
CASSLKRGTLSGELFF

SEQ ID NO: 114809 - protein, 16 aa, Homo sapiens
  CDR3 for alpha chain variable domain of TCR clone 57405 (TRAV22, TRAJ45)
CAVERGKRGGADGLTF

SEQ ID NO: 114810 - protein, 13 aa, Homo sapiens
  CDR3 for beta chain variable domain of TCR clone 57405 (TRBV27, TRBJ1-1)
CASSLSVGAEAFF

SEQ ID NO: 114811 - protein, 16 aa, Homo sapiens
  CDR3 for alpha chain variable domain of TCR clone 57406 (TRAV3, TRAJ10)
CAVRDMGAGGGNKLTF

SEQ ID NO: 114812 - protein, 13 aa, Homo sapiens
  CDR3 for beta chain variable domain of TCR clone 57406 (TRBV6-1, TRBJ1-1)
CASSRQGNTEAFF

SEQ ID NO: 114813 - protein, 14 aa, Homo sapiens
  CDR3 for alpha chain variable domain of TCR clone 57407 (TRAV10, TRAJ34)
CVLSRGGDTDKLIF

SEQ ID NO: 114814 - protein, 17 aa, Homo sapiens
  CDR3 for beta chain variable domain of TCR clone 57407 (TRBV6-3, TRBJ2-3)
CASRRPLGGGSTDTQYF

SEQ ID NO: 114815 - protein, 12 aa, Homo sapiens
  CDR3 for alpha chain variable domain of TCR clone 57408 (TRAV1-1, TRAJ39)
CAVPVVGNMLTF

SEQ ID NO: 114816 - protein, 12 aa, Homo sapiens
  CDR3 for beta chain variable domain of TCR clone 57408 (TRBV29-1, TRBJ2-7)
CSARDRPYEQYF

SEQ ID NO: 114817 - protein, 13 aa, Homo sapiens
  CDR3 for alpha chain variable domain of TCR clone 57409 (TRAV21, TRAJ45)
CAVMGGGADGLTF

SEQ ID NO: 114818 - protein, 14 aa, Homo sapiens
  CDR3 for beta chain variable domain of TCR clone 57409 (TRBV4-3, TRBJ1-4)
CASSPVQRNEKLFF

SEQ ID NO: 114819 - protein, 11 aa, Homo sapiens
  CDR3 for alpha chain variable domain of TCR clone 57410 (TRAV1-2, TRAJ40)
CAVPGTYKYIF

SEQ ID NO: 114820 - protein, 16 aa, Homo sapiens
  CDR3 for beta chain variable domain of TCR clone 57410 (TRBV29-1, TRBJ2-7)
CSVEVVVTSGSHEQYF

SEQ ID NO: 114821 - protein, 11 aa, Homo sapiens
  CDR3 for alpha chain variable domain of TCR clone 57411 (TRAV2, TRAJ33)
CAVDSNYQLIW

SEQ ID NO: 114822 - protein, 16 aa, Homo sapiens
  CDR3 for beta chain variable domain of TCR clone 57411 (TRBV19, TRBJ2-2)
CASRSPGTGATGELFF

SEQ ID NO: 114823 - protein, 10 aa, Homo sapiens
  CDR3 for alpha chain variable domain of TCR clone 57412 (TRAV1-2, TRAJ18)
CAVRGEAQPW

SEQ ID NO: 114824 - protein, 14 aa, Homo sapiens
  CDR3 for beta chain variable domain of TCR clone 57412 (TRBV19, TRBJ2-7)
CASNFRDTFTGMYF

SEQ ID NO: 114825 - protein, 14 aa, Homo sapiens
  CDR3 for alpha chain variable domain of TCR clone 57413 (TRAV8-4, TRAJ13)
CAVTLSGGYQKVTF

SEQ ID NO: 114826 - protein, 14 aa, Homo sapiens
  CDR3 for beta chain variable domain of TCR clone 57413 (TRBV7-2, TRBJ1-2)
CASSQTGSTYSYTF

SEQ ID NO: 114827 - protein, 15 aa, Homo sapiens
  CDR3 for alpha chain variable domain of TCR clone 57414 (TRAV4, TRAJ10)
CLVGDEEGGGNKLTF

SEQ ID NO: 114828 - protein, 15 aa, Homo sapiens
  CDR3 for beta chain variable domain of TCR clone 57414 (TRBV7-2, TRBJ2-7)
CASSLTGQGTYEQYS

SEQ ID NO: 114829 - protein, 14 aa, Homo sapiens
  CDR3 for alpha chain variable domain of TCR clone 57415 (TRAV26-1, TRAJ34)
CIARVAYNTDELIF

SEQ ID NO: 114830 - protein, 15 aa, Homo sapiens
  CDR3 for beta chain variable domain of TCR clone 57415 (TRBV20-1, TRBJ2-7)
CSARVPAAYFYEQYF

SEQ ID NO: 114831 - protein, 17 aa, Homo sapiens
  CDR3 for alpha chain variable domain of TCR clone 57416 (TRAV26-2, TRAJ42)
CILRDVGYGGSQGNLIF

SEQ ID NO: 114832 - protein, 16 aa, Homo sapiens
  CDR3 for beta chain variable domain of TCR clone 57416 (TRBV12-4, TRBJ2-7)
CASSLIGGTGTHEQYF

SEQ ID NO: 114833 - protein, 11 aa, Homo sapiens
  CDR3 for alpha chain variable domain of TCR clone 57417 (TRAV3, TRAJ13)
CAVTSYQKVTF

SEQ ID NO: 114834 - protein, 15 aa, Homo sapiens
  CDR3 for beta chain variable domain of TCR clone 57417 (TRBV7-9, TRBJ2-7)
CASSSSGRAVYEQYF

SEQ ID NO: 114835 - protein, 14 aa, Homo sapiens
  CDR3 for alpha chain variable domain of TCR clone 57418 (TRAV13-1, TRAJ44)
CAAKATGTASKLTF

SEQ ID NO: 114836 - protein, 17 aa, Homo sapiens
  CDR3 for beta chain variable domain of TCR clone 57418 (TRBV7-3, TRBJ2-3)
RASSLVKRMRGADTQYF

SEQ ID NO: 114837 - protein, 12 aa, Homo sapiens
  CDR3 for alpha chain variable domain of TCR clone 57419 (TRAV22, TRAJ22)
CAPGGSARQLTF

SEQ ID NO: 114838 - protein, 16 aa, Homo sapiens
  CDR3 for beta chain variable domain of TCR clone 57419 (TRBV4-1, TRBJ2-7)
CASSQEWTSGPLEQYF

SEQ ID NO: 114839 - protein, 13 aa, Homo sapiens
  CDR3 for alpha chain variable domain of TCR clone 57420 (TRAV4, TRAJ42)
CLVGGGSQGNLIF

SEQ ID NO: 114840 - protein, 16 aa, Homo sapiens
  CDR3 for beta chain variable domain of TCR clone 57420 (TRBV5-1, TRBJ2-3)
CARSLQGRVGADTQYF

SEQ ID NO: 114841 - protein, 16 aa, Homo sapiens
  CDR3 for alpha chain variable domain of TCR clone 57421 (TRAV1-2, TRAJ17)
CAVRDGFKATGNKLTF

SEQ ID NO: 114842 - protein, 13 aa, Homo sapiens
  CDR3 for beta chain variable domain of TCR clone 57421 (TRBV6-1, TRBJ2-5)
CQQLRGGEETQYF

SEQ ID NO: 114843 - protein, 16 aa, Homo sapiens
  CDR3 for alpha chain variable domain of TCR clone 57422 (TRAV30, TRAJ24)
CSTEVVDADSWGKFQF

SEQ ID NO: 114844 - protein, 14 aa, Homo sapiens
  CDR3 for beta chain variable domain of TCR clone 57422 (TRBV12-5, TRBJ2-5)
CASGSRTHQETQYF

SEQ ID NO: 114845 - protein, 12 aa, Homo sapiens
  CDR3 for alpha chain variable domain of TCR clone 57423 (TRAV13-1, TRAJ52)
LPGGTSYGKLTF

SEQ ID NO: 114846 - protein, 16 aa, Homo sapiens
  CDR3 for beta chain variable domain of TCR clone 57423 (TRBV28, TRBJ2-7)
CASSPWVATGDLSQYF

SEQ ID NO: 114847 - protein, 16 aa, Homo sapiens
  CDR3 for alpha chain variable domain of TCR clone 57424 (TRAV4, TRAJ6)
CLVGVYASGGSYIPTF

SEQ ID NO: 114848 - protein, 15 aa, Homo sapiens
  CDR3 for beta chain variable domain of TCR clone 57424 (TRBV14, TRBJ2-5)
CASSQGDGDQETQYF

SEQ ID NO: 114849 - protein, 15 aa, Homo sapiens
  CDR3 for alpha chain variable domain of TCR clone 57425 (TRAV23/DV6, TRAJ57)
CAASSTLSPGGSEKL

SEQ ID NO: 114850 - protein, 14 aa, Homo sapiens
  CDR3 for beta chain variable domain of TCR clone 57425 (TRBV25-1, TRBJ1-1)
CASTHLGGNTEAFF

SEQ ID NO: 114851 - protein, 11 aa, Homo sapiens
  CDR3 for alpha chain variable domain of TCR clone 57426 (TRAV1-2, TRAJ40)
CAVPGTHKYIF

SEQ ID NO: 114852 - protein, 16 aa, Homo sapiens
  CDR3 for beta chain variable domain of TCR clone 57426 (TRBV29-1, TRBJ2-7)
CSVEVVGTSGSYEQYF

SEQ ID NO: 114853 - protein, 13 aa, Homo sapiens
  CDR3 for alpha chain variable domain of TCR clone 57427 (TRAV35, TRAJ21)
CAGQLSNFNKFYF

SEQ ID NO: 114854 - protein, 11 aa, Homo sapiens
  CDR3 for beta chain variable domain of TCR clone 57427 (TRBV7-6, TRBJ2-5)
CASSSQDTQYF

SEQ ID NO: 114855 - protein, 15 aa, Homo sapiens
  CDR3 for alpha chain variable domain of TCR clone 57428 (TRAV1-2, TRAJ9)
CAVRDDGTGGFKTIF

SEQ ID NO: 114856 - protein, 16 aa, Homo sapiens
  CDR3 for beta chain variable domain of TCR clone 57428 (TRBV28, TRBJ2-2)
CASSLEGGSNTGELFF

SEQ ID NO: 114857 - protein, 14 aa, Homo sapiens
  CDR3 for alpha chain variable domain of TCR clone 57429 (TRAV1-1, TRAJ27)
CAVIYNTNAGKSNF

SEQ ID NO: 114858 - protein, 14 aa, Homo sapiens
  CDR3 for beta chain variable domain of TCR clone 57429 (TRBV6-5, TRBJ1-2)
CASSYDGTGGGYTF

SEQ ID NO: 114859 - protein, 13 aa, Homo sapiens
  CDR3 for alpha chain variable domain of TCR clone 57430 (TRAV12-1, TRAJ16)
CVVSGPDGQKLLF

SEQ ID NO: 114860 - protein, 14 aa, Homo sapiens
  CDR3 for beta chain variable domain of TCR clone 57430 (TRBV7-7, TRBJ2-2)
CATRQDSDTGELFF

SEQ ID NO: 114861 - protein, 14 aa, Homo sapiens
  CDR3 for alpha chain variable domain of TCR clone 57431 (TRAV12-3, TRAJ10)
SHLPLTGGGNKLTF

SEQ ID NO: 114862 - protein, 15 aa, Homo sapiens
  CDR3 for beta chain variable domain of TCR clone 57431 (TRBV11-3, TRBJ1-1)
CASSLGGPGDTEAFF

SEQ ID NO: 114863 - protein, 14 aa, Homo sapiens
  CDR3 for alpha chain variable domain of TCR clone 57432 (TRAV17, TRAJ16)
CATADFSDGQKLLF

SEQ ID NO: 114864 - protein, 12 aa, Homo sapiens
  CDR3 for beta chain variable domain of TCR clone 57432 (TRBV24-1, TRBJ1-1)
GATLYPDTEAFF

SEQ ID NO: 114865 - protein, 14 aa, Homo sapiens
  CDR3 for alpha chain variable domain of TCR clone 57433 (TRAV12-1, TRAJ10)
CVVNWAGGGNKLTF

SEQ ID NO: 114866 - protein, 14 aa, Homo sapiens
  CDR3 for beta chain variable domain of TCR clone 57433 (TRBV7-9, TRBJ2-7)
CASSLDRPTDEQYF

SEQ ID NO: 114867 - protein, 19 aa, Homo sapiens
  CDR3 for alpha chain variable domain of TCR clone 57434 (TRAV3, TRAJ6)
CALRDRNPSRSGGSYIPTF

SEQ ID NO: 114868 - protein, 15 aa, Homo sapiens
  CDR3 for beta chain variable domain of TCR clone 57434 (TRBV18, TRBJ2-7)
CASSPTFMDSYEQYF

SEQ ID NO: 114869 - protein, 15 aa, Homo sapiens
  CDR3 for alpha chain variable domain of TCR clone 57435 (TRAV39, TRAJ32)
CAVDMEGGATNKPIF

SEQ ID NO: 114870 - protein, 17 aa, Homo sapiens
  CDR3 for beta chain variable domain of TCR clone 57435 (TRBV7-2, TRBJ1-4)
CASSFKAGPTTNEKLFF

SEQ ID NO: 114871 - protein, 11 aa, Homo sapiens
  CDR3 for alpha chain variable domain of TCR clone 57436 (TRAV17, TRAJ9)
CVFTGGFKTIF

SEQ ID NO: 114872 - protein, 14 aa, Homo sapiens
  CDR3 for beta chain variable domain of TCR clone 57436 (TRBV7-9, TRBJ2-2)
CASSLVQDTGELFF

SEQ ID NO: 114873 - protein, 16 aa, Homo sapiens
  CDR3 for alpha chain variable domain of TCR clone 57437 (TRAV19, TRAJ20)
CALSGWRVPNDYKLSF

SEQ ID NO: 114874 - protein, 13 aa, Homo sapiens
  CDR3 for beta chain variable domain of TCR clone 57437 (TRBV7-9, TRBJ1-2)
CASSLKQNYGYTF

SEQ ID NO: 114875 - protein, 14 aa, Homo sapiens
  CDR3 for alpha chain variable domain of TCR clone 57438 (TRAV13-1, TRAJ26)
CSASSAHYGQNFVF

SEQ ID NO: 114876 - protein, 17 aa, Homo sapiens
  CDR3 for beta chain variable domain of TCR clone 57438 (TRBV25-1, TRBJ2-5)
CASSRRGGRGGQETQYF

SEQ ID NO: 114877 - protein, 21 aa, Homo sapiens
  CDR3 for alpha chain variable domain of TCR clone 57439 (TRAV12-1, TRAJ32)
SSVIQPPTSMNYGGATNKLIF

SEQ ID NO: 114878 - protein, 18 aa, Homo sapiens
  CDR3 for beta chain variable domain of TCR clone 57439 (TRBV20-1, TRBJ2-3)
RSASGLAGGPGTTDTQYF

SEQ ID NO: 114879 - protein, 13 aa, Homo sapiens
  CDR3 for alpha chain variable domain of TCR clone 57440 (TRAV16, TRAJ27)
CALRRTNAGKSTF

SEQ ID NO: 114880 - protein, 15 aa, Homo sapiens
  CDR3 for beta chain variable domain of TCR clone 57440 (TRBV18, TRBJ2-1)
YASSPPSASYNEQFF

SEQ ID NO: 114881 - protein, 15 aa, Homo sapiens
  CDR3 for alpha chain variable domain of TCR clone 57441 (TRAV26-1, TRAJ29)
CIVRVEGSGKHTSCL

SEQ ID NO: 114882 - protein, 15 aa, Homo sapiens
  CDR3 for beta chain variable domain of TCR clone 57441 (TRBV7-9, TRBJ1-5)
CASSQGHQPNQPQHF

SEQ ID NO: 114883 - protein, 20 aa, Homo sapiens
  CDR3 for alpha chain variable domain of TCR clone 57442 (TRAV4, TRAJ29)
CCVLLPRGRVPFSGNTPLVF

SEQ ID NO: 114884 - protein, 17 aa, Homo sapiens
  CDR3 for beta chain variable domain of TCR clone 57442 (TRBV25-1, TRBJ2-7)
CASSDARVVFSSYEQYF

SEQ ID NO: 114885 - protein, 14 aa, Homo sapiens
  CDR3 for alpha chain variable domain of TCR clone 57443 (TRAV12-2, TRAJ17)
CAVLFKAAGNKLTF

SEQ ID NO: 114886 - protein, 17 aa, Homo sapiens
  CDR3 for beta chain variable domain of TCR clone 57443 (TRBV20-1, TRBJ2-1)
CSAPPRLAGTRYNEQFF

SEQ ID NO: 114887 - protein, 13 aa, Homo sapiens
  CDR3 for alpha chain variable domain of TCR clone 57444 (TRAV27, TRAJ6)
CAGGTRGSYIPTF

SEQ ID NO: 114888 - protein, 13 aa, Homo sapiens
  CDR3 for beta chain variable domain of TCR clone 57444 (TRBV4-1, TRBJ2-5)
CASSLTRGGTQYF

SEQ ID NO: 114889 - protein, 13 aa, Homo sapiens
  CDR3 for alpha chain variable domain of TCR clone 57445 (TRAV3, TRAJ20)
CAVRSLNDYKLSF

SEQ ID NO: 114890 - protein, 13 aa, Homo sapiens
  CDR3 for beta chain variable domain of TCR clone 57445 (TRBV6-1, TRBJ2-1)
FAGMDPTNNEQFF

SEQ ID NO: 114891 - protein, 16 aa, Homo sapiens
  CDR3 for alpha chain variable domain of TCR clone 57446 (TRAV8-3, TRAJ8)
CAVPRDGNTGFRKLVF

SEQ ID NO: 114892 - protein, 14 aa, Homo sapiens
  CDR3 for beta chain variable domain of TCR clone 57446 (TRBV11-2, TRBJ2-7)
CASSSTGEGYEQYF

SEQ ID NO: 114893 - protein, 15 aa, Homo sapiens
  CDR3 for alpha chain variable domain of TCR clone 57447 (TRAV26-1, TRAJ40)
CIVRVTTSGTYKYIF

SEQ ID NO: 114894 - protein, 12 aa, Homo sapiens
  CDR3 for beta chain variable domain of TCR clone 57447 (TRBV7-9, TRBJ1-4)
CASSTDREKLFC

SEQ ID NO: 114895 - protein, 17 aa, Homo sapiens
  CDR3 for alpha chain variable domain of TCR clone 57448 (TRAV3, TRAJ6)
CAVRDGPRAGGSYIPTF

SEQ ID NO: 114896 - protein, 20 aa, Homo sapiens
  CDR3 for beta chain variable domain of TCR clone 57448 (TRBV28, TRBJ2-1)
CASTHIGRSPGLAGGNEQFF

SEQ ID NO: 114897 - protein, 13 aa, Homo sapiens
  CDR3 for alpha chain variable domain of TCR clone 57449 (TRAV12-1, TRAJ29)
CVVSGPGNTPLVF

SEQ ID NO: 114898 - protein, 13 aa, Homo sapiens
  CDR3 for beta chain variable domain of TCR clone 57449 (TRBV7-2, TRBJ2-5)
CASSRGGLETQYF

SEQ ID NO: 114899 - protein, 12 aa, Homo sapiens
  CDR3 for alpha chain variable domain of TCR clone 57450 (TRAV12-2, TRAJ7)
CAVMRENNRLAF

SEQ ID NO: 114900 - protein, 17 aa, Homo sapiens
  CDR3 for beta chain variable domain of TCR clone 57450 (TRBV7-9, TRBJ2-3)
CASSPTVAGDLTDTQYF

SEQ ID NO: 114901 - protein, 13 aa, Homo sapiens
  CDR3 for alpha chain variable domain of TCR clone 57451 (TRAV21, TRAJ27)
CAARPGNAGKSTF

SEQ ID NO: 114902 - protein, 12 aa, Homo sapiens
  CDR3 for beta chain variable domain of TCR clone 57451 (TRBV6-3, TRBJ2-7)
CASSFTPYEQYF

SEQ ID NO: 114903 - protein, 16 aa, Homo sapiens
  CDR3 for alpha chain variable domain of TCR clone 57452 (TRAV13-1, TRAJ22)
CAAKGGRSGSARQLTF

SEQ ID NO: 114904 - protein, 15 aa, Homo sapiens
  CDR3 for beta chain variable domain of TCR clone 57452 (TRBV9, TRBJ1-6)
CAGSVAGTGDSPLHF

SEQ ID NO: 114905 - protein, 12 aa, Homo sapiens
  CDR3 for alpha chain variable domain of TCR clone 57453 (TRAV8-3, TRAJ27)
CAVGAEAGKSPF

SEQ ID NO: 114906 - protein, 14 aa, Homo sapiens
  CDR3 for beta chain variable domain of TCR clone 57453 (TRBV2, TRBJ2-1)
CASRLIVGHDEQFF

SEQ ID NO: 114907 - protein, 15 aa, Homo sapiens
  CDR3 for alpha chain variable domain of TCR clone 57454 (TRAV8-3, TRAJ11)
CAVGLLNSGYSTLTF

SEQ ID NO: 114908 - protein, 15 aa, Homo sapiens
  CDR3 for beta chain variable domain of TCR clone 57454 (TRBV13, TRBJ2-1)
CASSLLYGLNNEQFF

SEQ ID NO: 114909 - protein, 14 aa, Homo sapiens
  CDR3 for alpha chain variable domain of TCR clone 57455 (TRAV12-1, TRAJ29)
CVVNEGSGNTPIVF

SEQ ID NO: 114910 - protein, 13 aa, Homo sapiens
  CDR3 for beta chain variable domain of TCR clone 57455 (TRBV7-9, TRBJ2-3)
CASSPGSTDTQYF

SEQ ID NO: 114911 - protein, 13 aa, Homo sapiens
  CDR3 for alpha chain variable domain of TCR clone 57456 (TRAV8-3, TRAJ28)
CAVGAVGSYQLTF

SEQ ID NO: 114912 - protein, 15 aa, Homo sapiens
  CDR3 for beta chain variable domain of TCR clone 57456 (TRBV7-9, TRBJ1-5)
CASSQGHQPNQRQHF

SEQ ID NO: 114913 - protein, 17 aa, Homo sapiens
  CDR3 for alpha chain variable domain of TCR clone 57457 (TRAV3, TRAJ42)
CAVRDRDYGGSQGNLIF

SEQ ID NO: 114914 - protein, 14 aa, Homo sapiens
  CDR3 for beta chain variable domain of TCR clone 57457 (TRBV12-5, TRBJ2-5)
RASGSRTHQETQYF

SEQ ID NO: 114915 - protein, 14 aa, Homo sapiens
  CDR3 for alpha chain variable domain of TCR clone 57458 (TRAV1-2, TRAJ8)
CAVREDTGFQRLVF

SEQ ID NO: 114916 - protein, 15 aa, Homo sapiens
  CDR3 for beta chain variable domain of TCR clone 57458 (TRBV7-3, TRBJ2-2)
CASSETGQGTGELFF

SEQ ID NO: 114917 - protein, 14 aa, Homo sapiens
  CDR3 for alpha chain variable domain of TCR clone 57459 (TRAV12-2, TRAJ24)
CAVTPADSWGKLQF

SEQ ID NO: 114918 - protein, 12 aa, Homo sapiens
  CDR3 for beta chain variable domain of TCR clone 57459 (TRBV3-1, TRBJ2-1)
CAGSQGSSGQFF

SEQ ID NO: 114919 - protein, 17 aa, Homo sapiens
  CDR3 for alpha chain variable domain of TCR clone 57460 (TRAV4, TRAJ42)
CLVGVLNYGGSQGNLIF

SEQ ID NO: 114920 - protein, 12 aa, Homo sapiens
  CDR3 for beta chain variable domain of TCR clone 57460 (TRBV20-1, TRBJ2-1)
CSAQYTYNERFF

SEQ ID NO: 114921 - protein, 14 aa, Homo sapiens
  CDR3 for alpha chain variable domain of TCR clone 57461 (TRAV13-1, TRAJ44)
CAAKATGTASELTF

SEQ ID NO: 114922 - protein, 17 aa, Homo sapiens
  CDR3 for beta chain variable domain of TCR clone 57461 (TRBV7-3, TRBJ2-3)
RASSLMKRMRGADTQYF

SEQ ID NO: 114923 - protein, 15 aa, Homo sapiens
  CDR3 for alpha chain variable domain of TCR clone 57462 (TRAV3, TRAJ47)
CAVRDIGEYGNKLDF

SEQ ID NO: 114924 - protein, 14 aa, Homo sapiens
  CDR3 for beta chain variable domain of TCR clone 57462 (TRBV13, TRBJ2-5)
CASSLERVGETQYF

SEQ ID NO: 114925 - protein, 10 aa, Homo sapiens
  CDR3 for alpha chain variable domain of TCR clone 57463 (TRAV8-4, TRAJ43)
CAVSADDMRF

SEQ ID NO: 114926 - protein, 14 aa, Homo sapiens
  CDR3 for beta chain variable domain of TCR clone 57463 (TRBV19, TRBJ2-1)
CASPTFVLSGEQFF

SEQ ID NO: 114927 - protein, 10 aa, Homo sapiens
  CDR3 for alpha chain variable domain of TCR clone 57464 (TRAV20, TRAJ37)
GASNTGKLIF

SEQ ID NO: 114928 - protein, 11 aa, Homo sapiens
  CDR3 for beta chain variable domain of TCR clone 57464 (TRBV12-4, TRBJ2-3)
CASTATDTQYF

SEQ ID NO: 114929 - protein, 14 aa, Homo sapiens
  CDR3 for alpha chain variable domain of TCR clone 57465 (TRAV2, TRAJ9)
CAVEDRGGGFKTIF

SEQ ID NO: 114930 - protein, 14 aa, Homo sapiens
  CDR3 for beta chain variable domain of TCR clone 57465 (TRBV7-9, TRBJ2-7)
CASSPSGGQNEQYF

SEQ ID NO: 114931 - protein, 13 aa, Homo sapiens
  CDR3 for alpha chain variable domain of TCR clone 57466 (TRAV21, TRAJ27)
CAARPGNAGKSTF

SEQ ID NO: 114932 - protein, 14 aa, Homo sapiens
  CDR3 for beta chain variable domain of TCR clone 57466 (TRBV11-2, TRBJ2-7)
CASSLGAGAYEQYL

SEQ ID NO: 114933 - protein, 14 aa, Homo sapiens
  CDR3 for alpha chain variable domain of TCR clone 57467 (TRAV26-1, TRAJ39)
CIVRGSRAGNMLTF

SEQ ID NO: 114934 - protein, 13 aa, Homo sapiens
  CDR3 for beta chain variable domain of TCR clone 57467 (TRBV7-3, TRBJ1-1)
CASSQDWGAEAFF

SEQ ID NO: 114935 - protein, 13 aa, Homo sapiens
  CDR3 for alpha chain variable domain of TCR clone 57468 (TRAV13-1, TRAJ41)
CADAPNSGYAPNF

SEQ ID NO: 114936 - protein, 13 aa, Homo sapiens
  CDR3 for beta chain variable domain of TCR clone 57468 (TRBV19, TRBJ2-7)
CASEGTTTYEQYF

SEQ ID NO: 114937 - protein, 15 aa, Homo sapiens
  CDR3 for alpha chain variable domain of TCR clone 57469 (TRAV27, TRAJ38)
RAARRNAGNNRKLIW

SEQ ID NO: 114938 - protein, 15 aa, Homo sapiens
  CDR3 for beta chain variable domain of TCR clone 57469 (TRBV5-1, TRBJ2-1)
CASSPPRAPYNEQFF

SEQ ID NO: 114939 - protein, 16 aa, Homo sapiens
  CDR3 for alpha chain variable domain of TCR clone 57470 (TRAV3, TRAJ37)
CAVRGKGSGNTGKLIF

SEQ ID NO: 114940 - protein, 13 aa, Homo sapiens
  CDR3 for beta chain variable domain of TCR clone 57470 (TRBV7-9, TRBJ2-5)
CASLPSGRETQYF

SEQ ID NO: 114941 - protein, 13 aa, Homo sapiens
  CDR3 for alpha chain variable domain of TCR clone 57471 (TRAV13-2, TRAJ53)
CAENMGSNYKRTF

SEQ ID NO: 114942 - protein, 13 aa, Homo sapiens
  CDR3 for beta chain variable domain of TCR clone 57471 (TRBV4-1, TRBJ2-2)
CASSQENTGELFF

SEQ ID NO: 114943 - protein, 20 aa, Homo sapiens
  CDR3 for alpha chain variable domain of TCR clone 57472 (TRAV26-1, TRAJ17)
CVLLHRQSSGSKAAGNKLTF

SEQ ID NO: 114944 - protein, 14 aa, Homo sapiens
  CDR3 for beta chain variable domain of TCR clone 57472 (TRBV28, TRBJ1-2)
CASRIQGANYGYTF

SEQ ID NO: 114945 - protein, 16 aa, Homo sapiens
  CDR3 for alpha chain variable domain of TCR clone 57473 (TRAV3, TRAJ37)
CAVRPHGSGNTGKLIF

SEQ ID NO: 114946 - protein, 16 aa, Homo sapiens
  CDR3 for beta chain variable domain of TCR clone 57473 (TRBV6-4, TRBJ1-2)
CASSEAVGDPNYGYTF

SEQ ID NO: 114947 - protein, 13 aa, Homo sapiens
  CDR3 for alpha chain variable domain of TCR clone 57474 (TRAV8-3, TRAJ28)
CAVGAVGSYQLTF

SEQ ID NO: 114948 - protein, 15 aa, Homo sapiens
  CDR3 for beta chain variable domain of TCR clone 57474 (TRBV7-9, TRBJ1-5)
CASSQGHQRNQPQHF

SEQ ID NO: 114949 - protein, 14 aa, Homo sapiens
  CDR3 for alpha chain variable domain of TCR clone 57475 (TRAV12-2, TRAJ40)
CAVKVPSGTYKYIF

SEQ ID NO: 114950 - protein, 14 aa, Homo sapiens
  CDR3 for beta chain variable domain of TCR clone 57475 (TRBV7-9, TRBJ1-2)
CASSRQGANYGYTF

SEQ ID NO: 114951 - protein, 12 aa, Homo sapiens
  CDR3 for alpha chain variable domain of TCR clone 57476 (TRAV2, TRAJ24)
CVATDSWGKFQF

SEQ ID NO: 114952 - protein, 13 aa, Homo sapiens
  CDR3 for beta chain variable domain of TCR clone 57476 (TRBV5-8, TRBJ1-1)
CASSLGGGTEAFF

SEQ ID NO: 114953 - protein, 14 aa, Homo sapiens
  CDR3 for alpha chain variable domain of TCR clone 57477 (TRAV9-2, TRAJ38)
CAQNNAGNNRKLIW

SEQ ID NO: 114954 - protein, 13 aa, Homo sapiens
  CDR3 for beta chain variable domain of TCR clone 57477 (TRBV14, TRBJ2-1)
RASSREGGTEQFF

SEQ ID NO: 114955 - protein, 14 aa, Homo sapiens
  CDR3 for alpha chain variable domain of TCR clone 57478 (TRAV9-2, TRAJ39)
CALYIYNAGNMLTF

SEQ ID NO: 114956 - protein, 16 aa, Homo sapiens
  CDR3 for beta chain variable domain of TCR clone 57478 (TRBV4-2, TRBJ1-1)
CASSQAGFGMNTEAFF

SEQ ID NO: 114957 - protein, 14 aa, Homo sapiens
  CDR3 for alpha chain variable domain of TCR clone 57479 (TRAV12-2, TRAJ13)
CAVKKTGGYQKVTF

SEQ ID NO: 114958 - protein, 19 aa, Homo sapiens
  CDR3 for beta chain variable domain of TCR clone 57479 (TRBV19, TRBJ2-5)
CASSIGQVTDFFLGETQYF

SEQ ID NO: 114959 - protein, 13 aa, Homo sapiens
  CDR3 for alpha chain variable domain of TCR clone 57480 (TRAV20, TRAJ37)
GAGCSSNTGKLIF

SEQ ID NO: 114960 - protein, 11 aa, Homo sapiens
  CDR3 for beta chain variable domain of TCR clone 57480 (TRBV12-4, TRBJ2-3)
CASTATDTQYF

SEQ ID NO: 114961 - protein, 14 aa, Homo sapiens
  CDR3 for alpha chain variable domain of TCR clone 57481 (TRAV23/DV6, TRAJ22)
CAASVSGSARQLTF

SEQ ID NO: 114962 - protein, 15 aa, Homo sapiens
  CDR3 for beta chain variable domain of TCR clone 57481 (TRBV5-7, TRBJ2-3)
CASSPWDRATDTQYF

SEQ ID NO: 114963 - protein, 12 aa, Homo sapiens
  CDR3 for alpha chain variable domain of TCR clone 57482 (TRAV12-1, TRAJ40)
CVFYSGTYKYIF

SEQ ID NO: 114964 - protein, 18 aa, Homo sapiens
  CDR3 for beta chain variable domain of TCR clone 57482 (TRBV12-4, TRBJ2-2)
CASSLVAGTRGRTGELFC

SEQ ID NO: 114965 - protein, 15 aa, Homo sapiens
  CDR3 for alpha chain variable domain of TCR clone 57483 (TRAV21, TRAJ52)
CAVRGGGTSYGKLTS

SEQ ID NO: 114966 - protein, 12 aa, Homo sapiens
  CDR3 for beta chain variable domain of TCR clone 57483 (TRBV11-2, TRBJ2-2)
CASSLGGGELFF

SEQ ID NO: 114967 - protein, 14 aa, Homo sapiens
  CDR3 for alpha chain variable domain of TCR clone 57484 (TRAV12-2, TRAJ44)
CAVNKAGTASKLTF

SEQ ID NO: 114968 - protein, 16 aa, Homo sapiens
  CDR3 for beta chain variable domain of TCR clone 57484 (TRBV12-5, TRBJ2-5)
CASGPRTSGNQETQYF

SEQ ID NO: 114969 - protein, 14 aa, Homo sapiens
  CDR3 for alpha chain variable domain of TCR clone 57485 (TRAV17, TRAJ32)
CATDPGGATNKLIF

SEQ ID NO: 114970 - protein, 14 aa, Homo sapiens
  CDR3 for beta chain variable domain of TCR clone 57485 (TRBV2, TRBJ1-5)
CASSENRGSQPQHF

SEQ ID NO: 114971 - protein, 13 aa, Homo sapiens
  CDR3 for alpha chain variable domain of TCR clone 57486 (TRAV12-2, TRAJ4)
CAVRSGGYNKLIF

SEQ ID NO: 114972 - protein, 15 aa, Homo sapiens
  CDR3 for beta chain variable domain of TCR clone 57486 (TRBV10-3, TRBJ2-1)
CAISDVQDRAYEQFS

SEQ ID NO: 114973 - protein, 12 aa, Homo sapiens
  CDR3 for alpha chain variable domain of TCR clone 57487 (TRAV13-1, TRAJ53)
AASGGSNYKLTF

SEQ ID NO: 114974 - protein, 15 aa, Homo sapiens
  CDR3 for beta chain variable domain of TCR clone 57487 (TRBV5-1, TRBJ2-1)
CASRPPRAPYNEQFF

SEQ ID NO: 114975 - protein, 15 aa, Homo sapiens
  CDR3 for alpha chain variable domain of TCR clone 57488 (TRAV8-3, TRAJ40)
RATPSLGSGTYKYIF

SEQ ID NO: 114976 - protein, 16 aa, Homo sapiens
  CDR3 for beta chain variable domain of TCR clone 57488 (TRBV7-3, TRBJ2-3)
CASSLSGYRPEDTQYF

SEQ ID NO: 114977 - protein, 12 aa, Homo sapiens
  CDR3 for alpha chain variable domain of TCR clone 57489 (TRAV12-3, TRAJ17)
CAMTLTGNKLTF

SEQ ID NO: 114978 - protein, 12 aa, Homo sapiens
  CDR3 for beta chain variable domain of TCR clone 57489 (TRBV24-1, TRBJ2-7)
CATSDPGYEQYF

SEQ ID NO: 114979 - protein, 15 aa, Homo sapiens
  CDR3 for alpha chain variable domain of TCR clone 57490 (TRAV3, TRAJ22)
CAVRDRGGSERQLTF

SEQ ID NO: 114980 - protein, 16 aa, Homo sapiens
  CDR3 for beta chain variable domain of TCR clone 57490 (TRBV5-4, TRBJ2-3)
CASQQPGAGGADTQYF

SEQ ID NO: 114981 - protein, 10 aa, Homo sapiens
  CDR3 for alpha chain variable domain of TCR clone 57491 (TRAV16, TRAJ22)
SAMYLRQLTF

SEQ ID NO: 114982 - protein, 18 aa, Homo sapiens
  CDR3 for beta chain variable domain of TCR clone 57491 (TRBV4-1, TRBJ1-5)
CASSQDPRGQGLNQPQHF

SEQ ID NO: 114983 - protein, 15 aa, Homo sapiens
  CDR3 for alpha chain variable domain of TCR clone 57492 (TRAV8-4, TRAJ47)
CAVSDPAEYGNKLVF

SEQ ID NO: 114984 - protein, 15 aa, Homo sapiens
  CDR3 for beta chain variable domain of TCR clone 57492 (TRBV11-2, TRBJ2-1)
CASSLGPDSYNEQFF

SEQ ID NO: 114985 - protein, 20 aa, Homo sapiens
  CDR3 for alpha chain variable domain of TCR clone 57493 (TRAV26-1, TRAJ42)
CCVLLHRQTYYGGSQGNIIF

SEQ ID NO: 114986 - protein, 16 aa, Homo sapiens
  CDR3 for beta chain variable domain of TCR clone 57493 (TRBV7-3, TRBJ2-2)
CASSLKRGTLSGELFF

SEQ ID NO: 114987 - protein, 14 aa, Homo sapiens
  CDR3 for alpha chain variable domain of TCR clone 57494 (TRAV12-3, TRAJ10)
SHLPLTGGGNKLTF

SEQ ID NO: 114988 - protein, 14 aa, Homo sapiens
  CDR3 for beta chain variable domain of TCR clone 57494 (TRBV2, TRBJ2-3)
RASSEGQNTDTQYF

SEQ ID NO: 114989 - protein, 13 aa, Homo sapiens
  CDR3 for alpha chain variable domain of TCR clone 57495 (TRAV4, TRAJ42)
CLVGGGIQGNLIF

SEQ ID NO: 114990 - protein, 16 aa, Homo sapiens
  CDR3 for beta chain variable domain of TCR clone 57495 (TRBV5-1, TRBJ2-3)
CASSLQGRVGADTQYF

SEQ ID NO: 114991 - protein, 13 aa, Homo sapiens
  CDR3 for alpha chain variable domain of TCR clone 57496 (TRAV35, TRAJ42)
CAGFPGGQGNLIF

SEQ ID NO: 114992 - protein, 14 aa, Homo sapiens
  CDR3 for beta chain variable domain of TCR clone 57496 (TRBV4-1, TRBJ2-2)
CASSQAVNTGELFF

SEQ ID NO: 114993 - protein, 17 aa, Homo sapiens
  CDR3 for alpha chain variable domain of TCR clone 57497 (TRAV17, TRAJ7)
CATLGRLAFGKGNQVVV

SEQ ID NO: 114994 - protein, 13 aa, Homo sapiens
  CDR3 for beta chain variable domain of TCR clone 57497 (TRBV12-4, TRBJ2-7)
CASSLERVREQHF

SEQ ID NO: 114995 - protein, 14 aa, Homo sapiens
  CDR3 for alpha chain variable domain of TCR clone 57498 (TRAV34, TRAJ44)
CGADGTGTASKLTS

SEQ ID NO: 114996 - protein, 12 aa, Homo sapiens
  CDR3 for beta chain variable domain of TCR clone 57498 (TRBV6-3, TRBJ2-7)
CASSRQGYEQYF

SEQ ID NO: 114997 - protein, 11 aa, Homo sapiens
  CDR3 for alpha chain variable domain of TCR clone 57499 (TRAV21, TRAJ11)
CAVNGYSTLTF

SEQ ID NO: 114998 - protein, 20 aa, Homo sapiens
  CDR3 for beta chain variable domain of TCR clone 57499 (TRBV7-8, TRBJ2-2)
CASSHLFPGPTIHITGELFF

SEQ ID NO: 114999 - protein, 15 aa, Homo sapiens
  CDR3 for alpha chain variable domain of TCR clone 57500 (TRAV38-2/DV8, TRAJ48)
CAYRSGGVGNEKLTF

SEQ ID NO: 115000 - protein, 16 aa, Homo sapiens
  CDR3 for beta chain variable domain of TCR clone 57500 (TRBV28, TRBJ2-7)
CASSPWVATGDLSQYF

SEQ ID NO: 115001 - protein, 12 aa, Homo sapiens
  CDR3 for alpha chain variable domain of TCR clone 57501 (TRAV27, TRAJ33)
CAGDGSNYQLIR

SEQ ID NO: 115002 - protein, 15 aa, Homo sapiens
  CDR3 for beta chain variable domain of TCR clone 57501 (TRBV6-5, TRBJ2-7)
CASSYSASGNYEQYF

SEQ ID NO: 115003 - protein, 11 aa, Homo sapiens
  CDR3 for alpha chain variable domain of TCR clone 57502 (TRAV4, TRAJ23)
CLVAPGGKLIL

SEQ ID NO: 115004 - protein, 15 aa, Homo sapiens
  CDR3 for beta chain variable domain of TCR clone 57502 (TRBV7-2, TRBJ2-1)
CASSFQADEYNEQFF

SEQ ID NO: 115005 - protein, 13 aa, Homo sapiens
  CDR3 for alpha chain variable domain of TCR clone 57503 (TRAV38-2/DV8, TRAJ53)
CASGGGSNYKLTF

SEQ ID NO: 115006 - protein, 16 aa, Homo sapiens
  CDR3 for beta chain variable domain of TCR clone 57503 (TRBV28, TRBJ1-5)
RASRFRGAVQNQPQHF

SEQ ID NO: 115007 - protein, 14 aa, Homo sapiens
  CDR3 for alpha chain variable domain of TCR clone 57504 (TRAV12-3, TRAJ41)
CATSAGNSGYALNF

SEQ ID NO: 115008 - protein, 11 aa, Homo sapiens
  CDR3 for beta chain variable domain of TCR clone 57504 (TRBV7-2, TRBJ2-3)
CASSSSDTQYF

SEQ ID NO: 115009 - protein, 16 aa, Homo sapiens
  CDR3 for alpha chain variable domain of TCR clone 57505 (TRAV30, TRAJ57)
CGTGWAPQGGSEKRVF

SEQ ID NO: 115010 - protein, 14 aa, Homo sapiens
  CDR3 for beta chain variable domain of TCR clone 57505 (TRBV18, TRBJ1-1)
CASSPGFQGVEAFF

SEQ ID NO: 115011 - protein, 14 aa, Homo sapiens
  CDR3 for alpha chain variable domain of TCR clone 57506 (TRAV12-2, TRAJ17)
CAVLFKAAGNKLTF

SEQ ID NO: 115012 - protein, 15 aa, Homo sapiens
  CDR3 for beta chain variable domain of TCR clone 57506 (TRBV19, TRBJ2-4)
CASRGPRRGENIQYF

SEQ ID NO: 115013 - protein, 14 aa, Homo sapiens
  CDR3 for alpha chain variable domain of TCR clone 57507 (TRAV8-4, TRAJ40)
CAVIPTSGTYKYIF

SEQ ID NO: 115014 - protein, 15 aa, Homo sapiens
  CDR3 for beta chain variable domain of TCR clone 57507 (TRBV7-2, TRBJ2-1)
CASTSASGDYNEQLF

SEQ ID NO: 115015 - protein, 14 aa, Homo sapiens
  CDR3 for alpha chain variable domain of TCR clone 57508 (TRAV9-2, TRAJ39)
RALYIYNAGNMLTF

SEQ ID NO: 115016 - protein, 19 aa, Homo sapiens
  CDR3 for beta chain variable domain of TCR clone 57508 (TRBV28, TRBJ2-7)
CASSYSGTSRLGWVYEQYF

SEQ ID NO: 115017 - protein, 13 aa, Homo sapiens
  CDR3 for alpha chain variable domain of TCR clone 57509 (TRAV1-2, TRAJ9)
CAALNAGGFKTIF

SEQ ID NO: 115018 - protein, 16 aa, Homo sapiens
  CDR3 for beta chain variable domain of TCR clone 57509 (TRBV28, TRBJ1-4)
CASSSRTGAANEKLFF

SEQ ID NO: 115019 - protein, 15 aa, Homo sapiens
  CDR3 for alpha chain variable domain of TCR clone 57510 (TRAV8-3, TRAJ40)
CAAPSLGSRTYKYIF

SEQ ID NO: 115020 - protein, 13 aa, Homo sapiens
  CDR3 for beta chain variable domain of TCR clone 57510 (TRBV10-3, TRBJ2-7)
CASKLAVNYEQYF

SEQ ID NO: 115021 - protein, 14 aa, Homo sapiens
  CDR3 for alpha chain variable domain of TCR clone 57511 (TRAV36/DV7, TRAJ16)
CAVNRFSDGQKLLF

SEQ ID NO: 115022 - protein, 15 aa, Homo sapiens
  CDR3 for beta chain variable domain of TCR clone 57511 (TRBV5-1, TRBJ2-2)
CASSSQGGNTGELFF

SEQ ID NO: 115023 - protein, 16 aa, Homo sapiens
  CDR3 for alpha chain variable domain of TCR clone 57512 (TRAV30, TRAJ24)
CGTEIVDADSWGKFQF

SEQ ID NO: 115024 - protein, 13 aa, Homo sapiens
  CDR3 for beta chain variable domain of TCR clone 57512 (TRBV7-7, TRBJ2-2)
CASSLTSAGELFF

SEQ ID NO: 115025 - protein, 11 aa, Homo sapiens
  CDR3 for alpha chain variable domain of TCR clone 57513 (TRAV13-1, TRAJ15)
CAATPGAAPIF

SEQ ID NO: 115026 - protein, 13 aa, Homo sapiens
  CDR3 for beta chain variable domain of TCR clone 57513 (TRBV7-2, TRBJ2-1)
CASSLGVYNEQFF

SEQ ID NO: 115027 - protein, 14 aa, Homo sapiens
  CDR3 for alpha chain variable domain of TCR clone 57514 (TRAV12-2, TRAJ45)
CAVYSGGGADGLTF

SEQ ID NO: 115028 - protein, 15 aa, Homo sapiens
  CDR3 for beta chain variable domain of TCR clone 57514 (TRBV5-5, TRBJ2-2)
CASSRQASGAGELFF

SEQ ID NO: 115029 - protein, 12 aa, Homo sapiens
  CDR3 for alpha chain variable domain of TCR clone 57515 (TRAV17, TRAJ12)
CATLRSSYKLIF

SEQ ID NO: 115030 - protein, 16 aa, Homo sapiens
  CDR3 for beta chain variable domain of TCR clone 57515 (TRBV28, TRBJ2-7)
CASSLVFETGGPEQYF

SEQ ID NO: 115031 - protein, 15 aa, Homo sapiens
  CDR3 for alpha chain variable domain of TCR clone 57516 (TRAV3, TRAJ42)
CAVRGGTGSQGNLIF

SEQ ID NO: 115032 - protein, 14 aa, Homo sapiens
  CDR3 for beta chain variable domain of TCR clone 57516 (TRBV19, TRBJ1-2)
CASGSLFARDVYTF

SEQ ID NO: 115033 - protein, 13 aa, Homo sapiens
  CDR3 for alpha chain variable domain of TCR clone 57517 (TRAV12-2, TRAJ39)
CAMNNNAGNMLTF

SEQ ID NO: 115034 - protein, 13 aa, Homo sapiens
  CDR3 for beta chain variable domain of TCR clone 57517 (TRBV2, TRBJ1-5)
CATAGPGNQPQHF

SEQ ID NO: 115035 - protein, 12 aa, Homo sapiens
  CDR3 for alpha chain variable domain of TCR clone 57518 (TRAV13-2, TRAJ23)
CAERHRRGKLIF

SEQ ID NO: 115036 - protein, 14 aa, Homo sapiens
  CDR3 for beta chain variable domain of TCR clone 57518 (TRBV2, TRBJ2-7)
CASSLTSGGYEQYF

SEQ ID NO: 115037 - protein, 14 aa, Homo sapiens
  CDR3 for alpha chain variable domain of TCR clone 57519 (TRAV1-2, TRAJ16)
CAVNRFSDGQKLLF

SEQ ID NO: 115038 - protein, 11 aa, Homo sapiens
  CDR3 for beta chain variable domain of TCR clone 57519 (TRBV11-2, TRBJ2-2)
CASSLPGELFS

SEQ ID NO: 115039 - protein, 14 aa, Homo sapiens
  CDR3 for alpha chain variable domain of TCR clone 57520 (TRAV12-2, TRAJ45)
CAVYSGGGADGLTF

SEQ ID NO: 115040 - protein, 13 aa, Homo sapiens
  CDR3 for beta chain variable domain of TCR clone 57520 (TRBV5-5, TRBJ1-2)
CASSFWRGEDYTF

SEQ ID NO: 115041 - protein, 12 aa, Homo sapiens
  CDR3 for alpha chain variable domain of TCR clone 57521 (TRAV12-1, TRAJ40)
CVVYSGTYKYIF

SEQ ID NO: 115042 - protein, 15 aa, Homo sapiens
  CDR3 for beta chain variable domain of TCR clone 57521 (TRBV7-9, TRBJ1-5)
CASSQGHQPNQPQHF

SEQ ID NO: 115043 - protein, 13 aa, Homo sapiens
  CDR3 for alpha chain variable domain of TCR clone 57522 (TRAV26-1, TRAJ30)
CIVNMNRDGKIIF

SEQ ID NO: 115044 - protein, 16 aa, Homo sapiens
  CDR3 for beta chain variable domain of TCR clone 57522 (TRBV16, TRBJ2-7)
CASSRPAGGSSYEQYF

SEQ ID NO: 115045 - protein, 14 aa, Homo sapiens
  CDR3 for alpha chain variable domain of TCR clone 57523 (TRAV2, TRAJ9)
CAVEDRSGGFKTIF

SEQ ID NO: 115046 - protein, 13 aa, Homo sapiens
  CDR3 for beta chain variable domain of TCR clone 57523 (TRBV12-4, TRBJ2-7)
CASSPTETYEQYF

SEQ ID NO: 115047 - protein, 14 aa, Homo sapiens
  CDR3 for alpha chain variable domain of TCR clone 57524 (TRAV12-3, TRAJ10)
SHLPLAGGGNKLTF

SEQ ID NO: 115048 - protein, 15 aa, Homo sapiens
  CDR3 for beta chain variable domain of TCR clone 57524 (TRBV11-2, TRBJ1-3)
CASSLDGTVGNTIYF

SEQ ID NO: 115049 - protein, 14 aa, Homo sapiens
  CDR3 for alpha chain variable domain of TCR clone 57525 (TRAV1-2, TRAJ16)
CAVNRFSGGQKLLF

SEQ ID NO: 115050 - protein, 15 aa, Homo sapiens
  CDR3 for beta chain variable domain of TCR clone 57525 (TRBV11-3, TRBJ2-3)
CASLKDGREGDTQYF

SEQ ID NO: 115051 - protein, 18 aa, Homo sapiens
  CDR3 for alpha chain variable domain of TCR clone 57526 (TRAV21, TRAJ52)
CAVRPSPAGATSYGKLTF

SEQ ID NO: 115052 - protein, 17 aa, Homo sapiens
  CDR3 for beta chain variable domain of TCR clone 57526 (TRBV13, TRBJ2-3)
CASSLSRVAGGRNTQYF

SEQ ID NO: 115053 - protein, 12 aa, Homo sapiens
  CDR3 for alpha chain variable domain of TCR clone 57527 (TRAV23/DV6, TRAJ53)
CAASKLGSGGSN

SEQ ID NO: 115054 - protein, 14 aa, Homo sapiens
  CDR3 for beta chain variable domain of TCR clone 57527 (TRBV7-9, TRBJ2-3)
CASSLEQETNTQYF

SEQ ID NO: 115055 - protein, 12 aa, Homo sapiens
  CDR3 for alpha chain variable domain of TCR clone 57528 (TRAV25, TRAJ17)
CAGEAAGNKLTF

SEQ ID NO: 115056 - protein, 13 aa, Homo sapiens
  CDR3 for beta chain variable domain of TCR clone 57528 (TRBV19, TRBJ2-2)
CASSGRGTGELFF

SEQ ID NO: 115057 - protein, 15 aa, Homo sapiens
  CDR3 for alpha chain variable domain of TCR clone 57529 (TRAV2, TRAJ9)
CAVEDRGTGGFKTIF

SEQ ID NO: 115058 - protein, 14 aa, Homo sapiens
  CDR3 for beta chain variable domain of TCR clone 57529 (TRBV12-5, TRBJ2-5)
CASGPRTHQETQYF

SEQ ID NO: 115059 - protein, 10 aa, Homo sapiens
  CDR3 for alpha chain variable domain of TCR clone 57530 (TRAV30, TRAJ48)
CGIGNEKLTF

SEQ ID NO: 115060 - protein, 14 aa, Homo sapiens
  CDR3 for beta chain variable domain of TCR clone 57530 (TRBV7-2, TRBJ2-5)
CASSLFGREETQYF

SEQ ID NO: 115061 - protein, 14 aa, Homo sapiens
  CDR3 for alpha chain variable domain of TCR clone 57531 (TRAV12-3, TRAJ10)
SHLPLPGGGNKLTF

SEQ ID NO: 115062 - protein, 13 aa, Homo sapiens
  CDR3 for beta chain variable domain of TCR clone 57531 (TRBV27, TRBJ1-1)
CASSLSIGAEAFF

SEQ ID NO: 115063 - protein, 14 aa, Homo sapiens
  CDR3 for alpha chain variable domain of TCR clone 57532 (TRAV1-2, TRAJ16)
CAVNRFSDGQKLLF

SEQ ID NO: 115064 - protein, 12 aa, Homo sapiens
  CDR3 for beta chain variable domain of TCR clone 57532 (TRBV24-1, TRBJ2-3)
CATSDSTDTQYF

SEQ ID NO: 115065 - protein, 15 aa, Homo sapiens
  CDR3 for alpha chain variable domain of TCR clone 57533 (TRAV12-1, TRAJ10)
CVVNKLTGGGSKLTF

SEQ ID NO: 115066 - protein, 17 aa, Homo sapiens
  CDR3 for beta chain variable domain of TCR clone 57533 (TRBV5-1, TRBJ1-6)
CASSPSLQGSDNSPLHF

SEQ ID NO: 115067 - protein, 22 aa, Homo sapiens
  CDR3 for alpha chain variable domain of TCR clone 57534 (TRAV4, )
CLVGPHNYDIQNPDPAVYQLRY

SEQ ID NO: 115068 - protein, 17 aa, Homo sapiens
  CDR3 for beta chain variable domain of TCR clone 57534 (TRBV24-1, TRBJ2-1)
CATSDVSTSGTYNEQFF

SEQ ID NO: 115069 - protein, 18 aa, Homo sapiens
  CDR3 for alpha chain variable domain of TCR clone 57535 (TRAV12-3, TRAJ52)
CAMSVGGAGGTSYGKLTF

SEQ ID NO: 115070 - protein, 15 aa, Homo sapiens
  CDR3 for beta chain variable domain of TCR clone 57535 (TRBV28, TRBJ2-5)
CASSPGQGSIETQYF

SEQ ID NO: 115071 - protein, 13 aa, Homo sapiens
  CDR3 for alpha chain variable domain of TCR clone 57536 (TRAV12-1, TRAJ40)
CVVPTSGTYKYIF

SEQ ID NO: 115072 - protein, 18 aa, Homo sapiens
  CDR3 for beta chain variable domain of TCR clone 57536 (TRBV7-6, TRBJ2-1)
CASSQRTSGMSSYNEQFF

SEQ ID NO: 115073 - protein, 14 aa, Homo sapiens
  CDR3 for alpha chain variable domain of TCR clone 57537 (TRAV13-1, TRAJ13)
CGASRVGGYQKVTF

SEQ ID NO: 115074 - protein, 14 aa, Homo sapiens
  CDR3 for beta chain variable domain of TCR clone 57537 (TRBV5-1, TRBJ2-7)
CASSATGGYDEQYF

SEQ ID NO: 115075 - protein, 14 aa, Homo sapiens
  CDR3 for alpha chain variable domain of TCR clone 57538 (TRAV23/DV6, TRAJ4)
CAAPSSGGYNKLIF

SEQ ID NO: 115076 - protein, 15 aa, Homo sapiens
  CDR3 for beta chain variable domain of TCR clone 57538 (TRBV7-2, TRBJ2-1)
CASSSGLAGGNEQFF

SEQ ID NO: 115077 - protein, 16 aa, Homo sapiens
  CDR3 for alpha chain variable domain of TCR clone 57539 (TRAV30, TRAJ24)
CGTEIVDADSWGKFQF

SEQ ID NO: 115078 - protein, 14 aa, Homo sapiens
  CDR3 for beta chain variable domain of TCR clone 57539 (TRBV12-5, TRBJ2-5)
RASGSRTHQGTQYF

SEQ ID NO: 115079 - protein, 13 aa, Homo sapiens
  CDR3 for alpha chain variable domain of TCR clone 57540 (TRAV26-2, TRAJ43)
CILRAVNNNDMRF

SEQ ID NO: 115080 - protein, 15 aa, Homo sapiens
  CDR3 for beta chain variable domain of TCR clone 57540 (TRBV12-4, TRBJ2-5)
CASSPPTGLQETQYF

SEQ ID NO: 115081 - protein, 14 aa, Homo sapiens
  CDR3 for alpha chain variable domain of TCR clone 57541 (TRAV17, TRAJ16)
CATADFSDGQKLLF

SEQ ID NO: 115082 - protein, 13 aa, Homo sapiens
  CDR3 for beta chain variable domain of TCR clone 57541 (TRBV7-9, TRBJ1-2)
CASSLKQNYGYTF

SEQ ID NO: 115083 - protein, 12 aa, Homo sapiens
  CDR3 for alpha chain variable domain of TCR clone 57542 (TRAV17, TRAJ20)
CATQSNDYKPSF

SEQ ID NO: 115084 - protein, 13 aa, Homo sapiens
  CDR3 for beta chain variable domain of TCR clone 57542 (TRBV10-3, TRBJ1-1)
CAIIPEGGTEAFF

SEQ ID NO: 115085 - protein, 16 aa, Homo sapiens
  CDR3 for alpha chain variable domain of TCR clone 57543 (TRAV30, TRAJ24)
CGTEIVDADSWGKFQF

SEQ ID NO: 115086 - protein, 13 aa, Homo sapiens
  CDR3 for beta chain variable domain of TCR clone 57543 (TRBV25-1, TRBJ2-7)
CASSEDGDYEQYF

SEQ ID NO: 115087 - protein, 12 aa, Homo sapiens
  CDR3 for alpha chain variable domain of TCR clone 57544 (TRAV27, TRAJ35)
CAGADFGNVLHC

SEQ ID NO: 115088 - protein, 15 aa, Homo sapiens
  CDR3 for beta chain variable domain of TCR clone 57544 (TRBV19, TRBJ2-1)
CASSISSGGCNEQFF

SEQ ID NO: 115089 - protein, 16 aa, Homo sapiens
  CDR3 for alpha chain variable domain of TCR clone 57545 (TRAV26-1, TRAJ52)
CIVSSAGGTSYGKLTF

SEQ ID NO: 115090 - protein, 15 aa, Homo sapiens
  CDR3 for beta chain variable domain of TCR clone 57545 (TRBV7-3, TRBJ2-1)
CASSPTGGGEVEQFF

SEQ ID NO: 115091 - protein, 14 aa, Homo sapiens
  CDR3 for alpha chain variable domain of TCR clone 57546 (TRAV1-2, TRAJ16)
CAVNRFSDGQKLLF

SEQ ID NO: 115092 - protein, 12 aa, Homo sapiens
  CDR3 for beta chain variable domain of TCR clone 57546 (TRBV11-2, TRBJ2-1)
CASSPGNNEQCF

SEQ ID NO: 115093 - protein, 18 aa, Homo sapiens
  CDR3 for alpha chain variable domain of TCR clone 57547 (TRAV21, TRAJ52)
CAVRPSPAGGTSYGKLTY

SEQ ID NO: 115094 - protein, 15 aa, Homo sapiens
  CDR3 for beta chain variable domain of TCR clone 57547 (TRBV10-3, TRBJ2-3)
CAISLTSGGTDTQYF

SEQ ID NO: 115095 - protein, 21 aa, Homo sapiens
  CDR3 for alpha chain variable domain of TCR clone 57548 (TRAV30, TRAJ43)
GLPAQLLRNLLPIIELNDMRF

SEQ ID NO: 115096 - protein, 14 aa, Homo sapiens
  CDR3 for beta chain variable domain of TCR clone 57548 (TRBV27, TRBJ2-1)
CASRHLGGGKERFF

SEQ ID NO: 115097 - protein, 13 aa, Homo sapiens
  CDR3 for alpha chain variable domain of TCR clone 57549 (TRAV16, TRAJ9)
CALRATGGFKTIF

SEQ ID NO: 115098 - protein, 16 aa, Homo sapiens
  CDR3 for beta chain variable domain of TCR clone 57549 (TRBV5-1, TRBJ1-3)
CASSRSGEDSGNTMYF

SEQ ID NO: 115099 - protein, 11 aa, Homo sapiens
  CDR3 for alpha chain variable domain of TCR clone 57550 (TRAV12-2, TRAJ39)
CAVNNMLTFGG

SEQ ID NO: 115100 - protein, 16 aa, Homo sapiens
  CDR3 for beta chain variable domain of TCR clone 57550 (TRBV12-5, TRBJ2-5)
CASGPRTSGNQETQYF

SEQ ID NO: 115101 - protein, 12 aa, Homo sapiens
  CDR3 for alpha chain variable domain of TCR clone 57551 (TRAV1-2, TRAJ33)
CAALDSNYQLIW

SEQ ID NO: 115102 - protein, 17 aa, Homo sapiens
  CDR3 for beta chain variable domain of TCR clone 57551 (TRBV7-8, TRBJ2-6)
CASSAGTGGAGANVLTF

SEQ ID NO: 115103 - protein, 13 aa, Homo sapiens
  CDR3 for alpha chain variable domain of TCR clone 57552 (TRAV12-1, TRAJ16)
CVGNGPDGQKLLF

SEQ ID NO: 115104 - protein, 13 aa, Homo sapiens
  CDR3 for beta chain variable domain of TCR clone 57552 (TRBV2, TRBJ1-1)
CARNPTGGFHAFF

SEQ ID NO: 115105 - protein, 14 aa, Homo sapiens
  CDR3 for alpha chain variable domain of TCR clone 57553 (TRAV12-2, TRAJ13)
CAVKKTGGYQKVTF

SEQ ID NO: 115106 - protein, 16 aa, Homo sapiens
  CDR3 for beta chain variable domain of TCR clone 57553 (TRBV6-4, TRBJ1-4)
CASSETGQDPNEKLFF

SEQ ID NO: 115107 - protein, 13 aa, Homo sapiens
  CDR3 for alpha chain variable domain of TCR clone 57554 (TRAV12-1, TRAJ11)
CVVNRAGYSTLTF

SEQ ID NO: 115108 - protein, 15 aa, Homo sapiens
  CDR3 for beta chain variable domain of TCR clone 57554 (TRBV7-3, TRBJ2-2)
CASSETGQGAGELFF

SEQ ID NO: 115109 - protein, 13 aa, Homo sapiens
  CDR3 for alpha chain variable domain of TCR clone 57555 (TRAV8-3, TRAJ37)
CAVPSSNTGKLIF

SEQ ID NO: 115110 - protein, 16 aa, Homo sapiens
  CDR3 for beta chain variable domain of TCR clone 57555 (TRBV11-1, TRBJ1-1)
CATNPRDRAFNTEAFF

SEQ ID NO: 115111 - protein, 16 aa, Homo sapiens
  CDR3 for alpha chain variable domain of TCR clone 57556 (TRAV17, TRAJ28)
CATASVSEAGSYQLTF

SEQ ID NO: 115112 - protein, 11 aa, Homo sapiens
  CDR3 for beta chain variable domain of TCR clone 57556 (TRBV7-9, TRBJ2-5)
CASSLGETQYF

SEQ ID NO: 115113 - protein, 14 aa, Homo sapiens
  CDR3 for alpha chain variable domain of TCR clone 57557 (TRAV16, TRAJ17)
CALSGRAAGNKLTF

SEQ ID NO: 115114 - protein, 17 aa, Homo sapiens
  CDR3 for beta chain variable domain of TCR clone 57557 (TRBV18, TRBJ2-6)
CASSPRQGAVGANDLTF

SEQ ID NO: 115115 - protein, 17 aa, Homo sapiens
  CDR3 for alpha chain variable domain of TCR clone 57558 (TRAV13-1, TRAJ52)
CAAGRNAGGTSYGKLTF

SEQ ID NO: 115116 - protein, 13 aa, Homo sapiens
  CDR3 for beta chain variable domain of TCR clone 57558 (TRBV7-2, TRBJ1-1)
CASNLKGAKVAFC

SEQ ID NO: 115117 - protein, 14 aa, Homo sapiens
  CDR3 for alpha chain variable domain of TCR clone 57559 (TRAV26-1, TRAJ21)
CIVRPPYNFNKFYF

SEQ ID NO: 115118 - protein, 11 aa, Homo sapiens
  CDR3 for beta chain variable domain of TCR clone 57559 (TRBV10-3, TRBJ2-7)
CAISEGLEQYF

SEQ ID NO: 115119 - protein, 15 aa, Homo sapiens
  CDR3 for alpha chain variable domain of TCR clone 57560 (TRAV20, TRAJ53)
CAVQASGGSNYKLTF

SEQ ID NO: 115120 - protein, 12 aa, Homo sapiens
  CDR3 for beta chain variable domain of TCR clone 57560 (TRBV7-6, TRBJ2-5)
CASSLFQETQYF

SEQ ID NO: 115121 - protein, 16 aa, Homo sapiens
  CDR3 for alpha chain variable domain of TCR clone 57561 (TRAV12-2, TRAJ50)
CAVGTATKTSYAKVIF

SEQ ID NO: 115122 - protein, 12 aa, Homo sapiens
  CDR3 for beta chain variable domain of TCR clone 57561 (TRBV12-4, TRBJ1-5)
CASSLGRQPQHF

SEQ ID NO: 115123 - protein, 15 aa, Homo sapiens
  CDR3 for alpha chain variable domain of TCR clone 57562 (TRAV8-3, TRAJ45)
CASSYSGGGSDGLTF

SEQ ID NO: 115124 - protein, 13 aa, Homo sapiens
  CDR3 for beta chain variable domain of TCR clone 57562 (TRBV7-9, TRBJ2-7)
CASSFAGAYEQYF

SEQ ID NO: 115125 - protein, 20 aa, Homo sapiens
  CDR3 for alpha chain variable domain of TCR clone 57563 (TRAV12-3, TRAJ41)
SLFIRDSQPSDSATPEALNF

SEQ ID NO: 115126 - protein, 15 aa, Homo sapiens
  CDR3 for beta chain variable domain of TCR clone 57563 (TRBV5-1, TRBJ2-7)
CASSLDLTSFYEQYF

SEQ ID NO: 115127 - protein, 13 aa, Homo sapiens
  CDR3 for alpha chain variable domain of TCR clone 57564 (TRAV27, TRAJ57)
CRSAQGGSEKLVF

SEQ ID NO: 115128 - protein, 11 aa, Homo sapiens
  CDR3 for beta chain variable domain of TCR clone 57564 (TRBV11-2, TRBJ1-1)
CASSIDTEAFF

SEQ ID NO: 115129 - protein, 14 aa, Homo sapiens
  CDR3 for alpha chain variable domain of TCR clone 57565 (TRAV8-3, TRAJ30)
CAVGDMSRDDKIIF

SEQ ID NO: 115130 - protein, 17 aa, Homo sapiens
  CDR3 for beta chain variable domain of TCR clone 57565 (TRBV19, TRBJ2-2)
CASSRNPGGFGTGELFF

SEQ ID NO: 115131 - protein, 13 aa, Homo sapiens
  CDR3 for alpha chain variable domain of TCR clone 57566 (TRAV13-1, TRAJ6)
RAASKGGSYIPTF

SEQ ID NO: 115132 - protein, 13 aa, Homo sapiens
  CDR3 for beta chain variable domain of TCR clone 57566 (TRBV7-9, TRBJ2-5)
CASLPSGRETQYF

SEQ ID NO: 115133 - protein, 14 aa, Homo sapiens
  CDR3 for alpha chain variable domain of TCR clone 57567 (TRAV1-2, TRAJ8)
CAVREDTGFQKLVF

SEQ ID NO: 115134 - protein, 15 aa, Homo sapiens
  CDR3 for beta chain variable domain of TCR clone 57567 (TRBV13, TRBJ1-2)
CASSLGRQPGYGYTF

SEQ ID NO: 115135 - protein, 14 aa, Homo sapiens
  CDR3 for alpha chain variable domain of TCR clone 57568 (TRAV1-2, TRAJ8)
CAVREDTGFQKLVF

SEQ ID NO: 115136 - protein, 12 aa, Homo sapiens
  CDR3 for beta chain variable domain of TCR clone 57568 (TRBV24-1, TRBJ1-1)
CATLYPETEAFF

SEQ ID NO: 115137 - protein, 13 aa, Homo sapiens
  CDR3 for alpha chain variable domain of TCR clone 57569 (TRAV21, TRAJ10)
CAVRPGGGNKLTF

SEQ ID NO: 115138 - protein, 14 aa, Homo sapiens
  CDR3 for beta chain variable domain of TCR clone 57569 (TRBV5-4, TRBJ2-7)
WASSADAGSYEQYF

SEQ ID NO: 115139 - protein, 13 aa, Homo sapiens
  CDR3 for alpha chain variable domain of TCR clone 57570 (TRAV35, TRAJ36)
CAGPRIGANNLFF

SEQ ID NO: 115140 - protein, 15 aa, Homo sapiens
  CDR3 for beta chain variable domain of TCR clone 57570 (TRBV28, TRBJ2-5)
CASSPLWSYQETQYF

SEQ ID NO: 115141 - protein, 13 aa, Homo sapiens
  CDR3 for alpha chain variable domain of TCR clone 57571 (TRAV3, TRAJ21)
CAVGTSTNFTLDL

SEQ ID NO: 115142 - protein, 16 aa, Homo sapiens
  CDR3 for beta chain variable domain of TCR clone 57571 (TRBV19, TRBJ2-1)
CASSKAGPSSYNEQFF

SEQ ID NO: 115143 - protein, 17 aa, Homo sapiens
  CDR3 for alpha chain variable domain of TCR clone 57572 (TRAV4, TRAJ18)
CLVGEGSVGSTLGRLYF

SEQ ID NO: 115144 - protein, 15 aa, Homo sapiens
  CDR3 for beta chain variable domain of TCR clone 57572 (TRBV10-3, TRBJ2-3)
CAISLTSGGTDTQYF

SEQ ID NO: 115145 - protein, 14 aa, Homo sapiens
  CDR3 for alpha chain variable domain of TCR clone 57573 (TRAV2, TRAJ37)
CAVEGSSNTGKLIF

SEQ ID NO: 115146 - protein, 15 aa, Homo sapiens
  CDR3 for beta chain variable domain of TCR clone 57573 (TRBV7-3, TRBJ2-2)
CASSETGQGTGELFF

SEQ ID NO: 115147 - protein, 13 aa, Homo sapiens
  CDR3 for alpha chain variable domain of TCR clone 57574 (TRAV3, TRAJ21)
CAVREPDFNKFYF

SEQ ID NO: 115148 - protein, 14 aa, Homo sapiens
  CDR3 for beta chain variable domain of TCR clone 57574 (TRBV7-7, TRBJ2-2)
CASRAGLNTGELFF

SEQ ID NO: 115149 - protein, 11 aa, Homo sapiens
  CDR3 for alpha chain variable domain of TCR clone 57575 (TRAV12-2, TRAJ31)
CAVTRWARLML

SEQ ID NO: 115150 - protein, 15 aa, Homo sapiens
  CDR3 for beta chain variable domain of TCR clone 57575 (TRBV19, TRBJ2-7)
CASSIGGGLVNEQYF

SEQ ID NO: 115151 - protein, 13 aa, Homo sapiens
  CDR3 for alpha chain variable domain of TCR clone 57576 (TRAV38-2/DV8, TRAJ34)
CAYRTWNTDKLIF

SEQ ID NO: 115152 - protein, 12 aa, Homo sapiens
  CDR3 for beta chain variable domain of TCR clone 57576 (TRBV19, TRBJ1-5)
CASSIAQQPQHF

SEQ ID NO: 115153 - protein, 15 aa, Homo sapiens
  CDR3 for alpha chain variable domain of TCR clone 57577 (TRAV25, TRAJ52)
CAGRPGGTSSGKLTF

SEQ ID NO: 115154 - protein, 17 aa, Homo sapiens
  CDR3 for beta chain variable domain of TCR clone 57577 (TRBV7-8, TRBJ2-6)
CASSAGTGGAGANVLTF

SEQ ID NO: 115155 - protein, 16 aa, Homo sapiens
  CDR3 for alpha chain variable domain of TCR clone 57578 (TRAV4, TRAJ22)
CLVGDLYSGSARQLTF

SEQ ID NO: 115156 - protein, 16 aa, Homo sapiens
  CDR3 for beta chain variable domain of TCR clone 57578 (TRBV7-9, TRBJ2-1)
CVSSDVAGGSYNEQFF

SEQ ID NO: 115157 - protein, 14 aa, Homo sapiens
  CDR3 for alpha chain variable domain of TCR clone 57579 (TRAV1-2, TRAJ8)
CAVREDTGFQKLVF

SEQ ID NO: 115158 - protein, 15 aa, Homo sapiens
  CDR3 for beta chain variable domain of TCR clone 57579 (TRBV7-9, TRBJ1-4)
CASSARTGGNENLFF

SEQ ID NO: 115159 - protein, 14 aa, Homo sapiens
  CDR3 for alpha chain variable domain of TCR clone 57580 (TRAV1-2, TRAJ16)
CAVNRVSDGQKLLF

SEQ ID NO: 115160 - protein, 14 aa, Homo sapiens
  CDR3 for beta chain variable domain of TCR clone 57580 (TRBV7-9, TRBJ2-3)
CASSLEDGTDTQYF

SEQ ID NO: 115161 - protein, 11 aa, Homo sapiens
  CDR3 for alpha chain variable domain of TCR clone 57581 (TRAV12-1, TRAJ30)
CVVNGQDKIIS

SEQ ID NO: 115162 - protein, 12 aa, Homo sapiens
  CDR3 for beta chain variable domain of TCR clone 57581 (TRBV27, TRBJ2-2)
CASKLFTGELFF

SEQ ID NO: 115163 - protein, 13 aa, Homo sapiens
  CDR3 for alpha chain variable domain of TCR clone 57582 (TRAV3, TRAJ21)
CAVREPDFNKFYF

SEQ ID NO: 115164 - protein, 12 aa, Homo sapiens
  CDR3 for beta chain variable domain of TCR clone 57582 (TRBV5-1, TRBJ2-4)
LAGEWAKNIQYF

SEQ ID NO: 115165 - protein, 13 aa, Homo sapiens
  CDR3 for alpha chain variable domain of TCR clone 57583 (TRAV17, TRAJ9)
CATAITGGFKTIF

SEQ ID NO: 115166 - protein, 16 aa, Homo sapiens
  CDR3 for beta chain variable domain of TCR clone 57583 (TRBV15, TRBJ2-1)
CATSRDLAGGYNEQFF

SEQ ID NO: 115167 - protein, 13 aa, Homo sapiens
  CDR3 for alpha chain variable domain of TCR clone 57584 (TRAV8-6, TRAJ49)
CAVITNTGNQFYF

SEQ ID NO: 115168 - protein, 17 aa, Homo sapiens
  CDR3 for beta chain variable domain of TCR clone 57584 (TRBV20-1, TRBJ2-2)
CSASGSGQGGLTGELFF

SEQ ID NO: 115169 - protein, 14 aa, Homo sapiens
  CDR3 for alpha chain variable domain of TCR clone 57585 (TRAV12-2, TRAJ44)
CAVNPAGTASQLTF

SEQ ID NO: 115170 - protein, 13 aa, Homo sapiens
  CDR3 for beta chain variable domain of TCR clone 57585 (TRBV20-1, TRBJ1-6)
CSAPLGVGSPLHF

SEQ ID NO: 115171 - protein, 15 aa, Homo sapiens
  CDR3 for alpha chain variable domain of TCR clone 57586 (TRAV2, TRAJ9)
CAVEDRGTGGLKTIF

SEQ ID NO: 115172 - protein, 14 aa, Homo sapiens
  CDR3 for beta chain variable domain of TCR clone 57586 (TRBV4-1, TRBJ2-2)
CASSQAVNTGELFF

SEQ ID NO: 115173 - protein, 12 aa, Homo sapiens
  CDR3 for alpha chain variable domain of TCR clone 57587 (TRAV12-3, TRAJ17)
CAMTLTGNKLTF

SEQ ID NO: 115174 - protein, 14 aa, Homo sapiens
  CDR3 for beta chain variable domain of TCR clone 57587 (TRBV7-2, TRBJ2-7)
CASSPKASFYEQYF

SEQ ID NO: 115175 - protein, 12 aa, Homo sapiens
  CDR3 for alpha chain variable domain of TCR clone 57588 (TRAV13-1, TRAJ54)
CAASGGAQKLVF

SEQ ID NO: 115176 - protein, 13 aa, Homo sapiens
  CDR3 for beta chain variable domain of TCR clone 57588 (TRBV12-4, TRBJ1-2)
CASSLRQGKGYTF

SEQ ID NO: 115177 - protein, 14 aa, Homo sapiens
  CDR3 for alpha chain variable domain of TCR clone 57589 (TRAV17, TRAJ32)
CATDPGGATNKLIF

SEQ ID NO: 115178 - protein, 13 aa, Homo sapiens
  CDR3 for beta chain variable domain of TCR clone 57589 (TRBV7-2, TRBJ2-2)
CASSLAVTGELFF

SEQ ID NO: 115179 - protein, 13 aa, Homo sapiens
  CDR3 for alpha chain variable domain of TCR clone 57590 (TRAV12-1, TRAJ40)
CVVPTSGTYKYIF

SEQ ID NO: 115180 - protein, 18 aa, Homo sapiens
  CDR3 for beta chain variable domain of TCR clone 57590 (TRBV7-6, TRBJ2-1)
CASSRRTSGMSSYNEQFF

SEQ ID NO: 115181 - protein, 11 aa, Homo sapiens
  CDR3 for alpha chain variable domain of TCR clone 57591 (TRAV12-1, TRAJ15)
CVVNAGTALIF

SEQ ID NO: 115182 - protein, 16 aa, Homo sapiens
  CDR3 for beta chain variable domain of TCR clone 57591 (TRBV28, TRBJ2-1)
CASSSRMRDSYNEQFF

SEQ ID NO: 115183 - protein, 15 aa, Homo sapiens
  CDR3 for alpha chain variable domain of TCR clone 57592 (TRAV14/DV4, TRAJ48)
CAVTLSNFGNEKLTF

SEQ ID NO: 115184 - protein, 16 aa, Homo sapiens
  CDR3 for beta chain variable domain of TCR clone 57592 (TRBV12-4, TRBJ2-1)
CASSAVGQGNGDEQFF

SEQ ID NO: 115185 - protein, 11 aa, Homo sapiens
  CDR3 for alpha chain variable domain of TCR clone 57593 (TRAV22, TRAJ20)
CAPLHDYKLSF

SEQ ID NO: 115186 - protein, 13 aa, Homo sapiens
  CDR3 for beta chain variable domain of TCR clone 57593 (TRBV18, TRBJ2-5)
CASSLQGQETQYF

SEQ ID NO: 115187 - protein, 15 aa, Homo sapiens
  CDR3 for alpha chain variable domain of TCR clone 57594 (TRAV27, TRAJ33)
CAGADIMDRNYQLIW

SEQ ID NO: 115188 - protein, 13 aa, Homo sapiens
  CDR3 for beta chain variable domain of TCR clone 57594 (TRBV28, TRBJ1-2)
CASSLQGRGGYTF

SEQ ID NO: 115189 - protein, 14 aa, Homo sapiens
  CDR3 for alpha chain variable domain of TCR clone 57595 (TRAV1-2, TRAJ16)
CAVNRFSDGQKLLF

SEQ ID NO: 115190 - protein, 16 aa, Homo sapiens
  CDR3 for beta chain variable domain of TCR clone 57595 (TRBV12-5, TRBJ2-5)
CASGPRTGGNQETQYF

SEQ ID NO: 115191 - protein, 14 aa, Homo sapiens
  CDR3 for alpha chain variable domain of TCR clone 57596 (TRAV8-4, TRAJ9)
GAVRINTGGFKTIF

SEQ ID NO: 115192 - protein, 15 aa, Homo sapiens
  CDR3 for beta chain variable domain of TCR clone 57596 (TRBV10-2, TRBJ2-6)
CASSEQGTGANVLTF

SEQ ID NO: 115193 - protein, 14 aa, Homo sapiens
  CDR3 for alpha chain variable domain of TCR clone 57597 (TRAV17, TRAJ22)
CATSPSGSARQLAF

SEQ ID NO: 115194 - protein, 15 aa, Homo sapiens
  CDR3 for beta chain variable domain of TCR clone 57597 (TRBV4-1, TRBJ2-5)
CASSQWDLYQETQYF

SEQ ID NO: 115195 - protein, 14 aa, Homo sapiens
  CDR3 for alpha chain variable domain of TCR clone 57598 (TRAV1-2, TRAJ16)
CAVNRFSDGQKPLF

SEQ ID NO: 115196 - protein, 14 aa, Homo sapiens
  CDR3 for beta chain variable domain of TCR clone 57598 (TRBV18, TRBJ2-7)
CASSPRGGAYEQYF

SEQ ID NO: 115197 - protein, 14 aa, Homo sapiens
  CDR3 for alpha chain variable domain of TCR clone 57599 (TRAV8-2, TRAJ11)
CGVSEKSGYSTLTF

SEQ ID NO: 115198 - protein, 16 aa, Homo sapiens
  CDR3 for beta chain variable domain of TCR clone 57599 (TRBV28, TRBJ2-1)
CASSSPEYPRDNEQFF

SEQ ID NO: 115199 - protein, 12 aa, Homo sapiens
  CDR3 for alpha chain variable domain of TCR clone 57600 (TRAV13-1, TRAJ21)
CAAKEGFNKFYF

SEQ ID NO: 115200 - protein, 14 aa, Homo sapiens
  CDR3 for beta chain variable domain of TCR clone 57600 (TRBV28, TRBJ2-3)
CASSLTDLLDTQYF

SEQ ID NO: 115201 - protein, 16 aa, Homo sapiens
  CDR3 for alpha chain variable domain of TCR clone 57601 (TRAV30, TRAJ24)
CGTEIVDADSWGKFQF

SEQ ID NO: 115202 - protein, 19 aa, Homo sapiens
  CDR3 for beta chain variable domain of TCR clone 57601 (TRBV25-1, TRBJ2-2)
CAILVYWVDRGRKTGELFF

SEQ ID NO: 115203 - protein, 17 aa, Homo sapiens
  CDR3 for alpha chain variable domain of TCR clone 57602 (TRAV3, TRAJ6)
CAVRDGPRAGGSYIPTF

SEQ ID NO: 115204 - protein, 15 aa, Homo sapiens
  CDR3 for beta chain variable domain of TCR clone 57602 (TRBV7-2, TRBJ2-1)
CASSFQADEYNEQFF

SEQ ID NO: 115205 - protein, 13 aa, Homo sapiens
  CDR3 for alpha chain variable domain of TCR clone 57603 (TRAV38-2/DV8, TRAJ34)
CAYRNYNTDELIF

SEQ ID NO: 115206 - protein, 15 aa, Homo sapiens
  CDR3 for beta chain variable domain of TCR clone 57603 (TRBV20-1, TRBJ2-5)
CSAEGTGGLQETQYF

SEQ ID NO: 115207 - protein, 11 aa, Homo sapiens
  CDR3 for alpha chain variable domain of TCR clone 57604 (TRAV3, TRAJ21)
CAVGNFNKFYF

SEQ ID NO: 115208 - protein, 15 aa, Homo sapiens
  CDR3 for beta chain variable domain of TCR clone 57604 (TRBV9, TRBJ2-1)
CASSLAGSSYNEQFF

SEQ ID NO: 115209 - protein, 14 aa, Homo sapiens
  CDR3 for alpha chain variable domain of TCR clone 57605 (TRAV29/DV5, TRAJ36)
CAARRKTGANNLFF

SEQ ID NO: 115210 - protein, 15 aa, Homo sapiens
  CDR3 for beta chain variable domain of TCR clone 57605 (TRBV25-1, TRBJ1-4)
RASSPGDSTNEKLFF

SEQ ID NO: 115211 - protein, 14 aa, Homo sapiens
  CDR3 for alpha chain variable domain of TCR clone 57606 (TRAV12-1, TRAJ13)
CVVIDSGGYQKVTS

SEQ ID NO: 115212 - protein, 12 aa, Homo sapiens
  CDR3 for beta chain variable domain of TCR clone 57606 (TRBV29-1, TRBJ2-3)
CSVTGGADTQYF

SEQ ID NO: 115213 - protein, 16 aa, Homo sapiens
  CDR3 for alpha chain variable domain of TCR clone 57607 (TRAV27, TRAJ52)
CAGAPAGGTSYGKLTF

SEQ ID NO: 115214 - protein, 13 aa, Homo sapiens
  CDR3 for beta chain variable domain of TCR clone 57607 (TRBV19, TRBJ2-7)
CASSPRQSYEQYF

SEQ ID NO: 115215 - protein, 15 aa, Homo sapiens
  CDR3 for alpha chain variable domain of TCR clone 57608 (TRAV3, TRAJ17)
CAVRDTGDAGNKLTF

SEQ ID NO: 115216 - protein, 14 aa, Homo sapiens
  CDR3 for beta chain variable domain of TCR clone 57608 (TRBV6-3, TRBJ1-1)
CASSNLLPGAEAFF

SEQ ID NO: 115217 - protein, 15 aa, Homo sapiens
  CDR3 for alpha chain variable domain of TCR clone 57609 (TRAV21, TRAJ22)
CAVRLFFWFCKATDL

SEQ ID NO: 115218 - protein, 14 aa, Homo sapiens
  CDR3 for beta chain variable domain of TCR clone 57609 (TRBV19, TRBJ1-5)
CASRAPDSFRSQHF

SEQ ID NO: 115219 - protein, 19 aa, Homo sapiens
  CDR3 for alpha chain variable domain of TCR clone 57610 (TRAV13-1, TRAJ52)
CAASPYQNAGGTSYGKLTF

SEQ ID NO: 115220 - protein, 14 aa, Homo sapiens
  CDR3 for beta chain variable domain of TCR clone 57610 (TRBV19, TRBJ2-7)
CASTVQGRPYEQYL

SEQ ID NO: 115221 - protein, 12 aa, Homo sapiens
  CDR3 for alpha chain variable domain of TCR clone 57611 (TRAV12-3, TRAJ17)
CAMTLTGNKLTF

SEQ ID NO: 115222 - protein, 14 aa, Homo sapiens
  CDR3 for beta chain variable domain of TCR clone 57611 (TRBV18, TRBJ1-2)
CASSPDRVVYGYTF

SEQ ID NO: 115223 - protein, 14 aa, Homo sapiens
  CDR3 for alpha chain variable domain of TCR clone 57612 (TRAV1-2, TRAJ6)
FAVSLSGGSYIPTF

SEQ ID NO: 115224 - protein, 15 aa, Homo sapiens
  CDR3 for beta chain variable domain of TCR clone 57612 (TRBV28, TRBJ2-7)
CASSPGGRGFYEQYF

SEQ ID NO: 115225 - protein, 14 aa, Homo sapiens
  CDR3 for alpha chain variable domain of TCR clone 57613 (TRAV2, TRAJ9)
CAVEDRSGGFKTIF

SEQ ID NO: 115226 - protein, 15 aa, Homo sapiens
  CDR3 for beta chain variable domain of TCR clone 57613 (TRBV4-1, TRBJ1-4)
CASSDTGGTNEKLFF

SEQ ID NO: 115227 - protein, 16 aa, Homo sapiens
  CDR3 for alpha chain variable domain of TCR clone 57614 (TRAV30, TRAJ24)
CGTEIVDADSWGKFQF

SEQ ID NO: 115228 - protein, 16 aa, Homo sapiens
  CDR3 for beta chain variable domain of TCR clone 57614 (TRBV7-3, TRBJ2-2)
CASSLKRGTLSGEPFF

SEQ ID NO: 115229 - protein, 13 aa, Homo sapiens
  CDR3 for alpha chain variable domain of TCR clone 57615 (TRAV21, TRAJ20)
CAVGLRVDYKLSL

SEQ ID NO: 115230 - protein, 11 aa, Homo sapiens
  CDR3 for beta chain variable domain of TCR clone 57615 (TRBV29-1, TRBJ2-5)
CSEDRTGTQYF

SEQ ID NO: 115231 - protein, 12 aa, Homo sapiens
  CDR3 for alpha chain variable domain of TCR clone 57616 (TRAV12-3, TRAJ17)
CAMTLTGNKLTF

SEQ ID NO: 115232 - protein, 17 aa, Homo sapiens
  CDR3 for beta chain variable domain of TCR clone 57616 (TRBV7-2, TRBJ2-2)
CASSPRGAGEGTGELFF

SEQ ID NO: 115233 - protein, 15 aa, Homo sapiens
  CDR3 for alpha chain variable domain of TCR clone 57617 (TRAV2, TRAJ15)
CAVEDRGQAGTALIF

SEQ ID NO: 115234 - protein, 13 aa, Homo sapiens
  CDR3 for beta chain variable domain of TCR clone 57617 (TRBV10-2, TRBJ2-7)
CASGASGGYKQYF

SEQ ID NO: 115235 - protein, 14 aa, Homo sapiens
  CDR3 for alpha chain variable domain of TCR clone 57618 (TRAV1-2, TRAJ8)
CAVREDTGFQKLVF

SEQ ID NO: 115236 - protein, 14 aa, Homo sapiens
  CDR3 for beta chain variable domain of TCR clone 57618 (TRBV11-2, TRBJ1-2)
CASSLGTANYGYTF

SEQ ID NO: 115237 - protein, 12 aa, Homo sapiens
  CDR3 for alpha chain variable domain of TCR clone 57619 (TRAV3, TRAJ20)
CAMRDPDYKLSF

SEQ ID NO: 115238 - protein, 14 aa, Homo sapiens
  CDR3 for beta chain variable domain of TCR clone 57619 (TRBV7-2, TRBJ2-7)
CASSPKTSFYEQYF

SEQ ID NO: 115239 - protein, 14 aa, Homo sapiens
  CDR3 for alpha chain variable domain of TCR clone 57620 (TRAV38-2/DV8, TRAJ54)
AAMYQIQGAQKLGF

SEQ ID NO: 115240 - protein, 17 aa, Homo sapiens
  CDR3 for beta chain variable domain of TCR clone 57620 (TRBV6-1, TRBJ2-3)
CASSEALRLISTDTQYF

SEQ ID NO: 115241 - protein, 13 aa, Homo sapiens
  CDR3 for alpha chain variable domain of TCR clone 57621 (TRAV27, TRAJ45)
CRSPGGGADGLTF

SEQ ID NO: 115242 - protein, 13 aa, Homo sapiens
  CDR3 for beta chain variable domain of TCR clone 57621 (TRBV7-7, TRBJ2-5)
CASSRSGQETQYF

SEQ ID NO: 115243 - protein, 15 aa, Homo sapiens
  CDR3 for alpha chain variable domain of TCR clone 57622 (TRAV25, TRAJ52)
CAGRPGGTSYGKLTF

SEQ ID NO: 115244 - protein, 15 aa, Homo sapiens
  CDR3 for beta chain variable domain of TCR clone 57622 (TRBV5-7, TRBJ1-2)
CAGSSPGQGNYGYTF

SEQ ID NO: 115245 - protein, 12 aa, Homo sapiens
  CDR3 for alpha chain variable domain of TCR clone 57623 (TRAV13-2, TRAJ23)
CAERHRGGKLIF

SEQ ID NO: 115246 - protein, 15 aa, Homo sapiens
  CDR3 for beta chain variable domain of TCR clone 57623 (TRBV20-1, TRBJ2-5)
CSARGLAEGGETQYF

SEQ ID NO: 115247 - protein, 15 aa, Homo sapiens
  CDR3 for alpha chain variable domain of TCR clone 57624 (TRAV3, TRAJ3)
CAVRDMSSSASKIIF

SEQ ID NO: 115248 - protein, 16 aa, Homo sapiens
  CDR3 for beta chain variable domain of TCR clone 57624 (TRBV19, TRBJ2-1)
CASSKAGPSSYNEQFF

SEQ ID NO: 115249 - protein, 14 aa, Homo sapiens
  CDR3 for alpha chain variable domain of TCR clone 57625 (TRAV12-2, TRAJ13)
CAVKKTGGYQKVTF

SEQ ID NO: 115250 - protein, 14 aa, Homo sapiens
  CDR3 for beta chain variable domain of TCR clone 57625 (TRBV13, TRBJ2-1)
CASSAGQGAYEQFF

SEQ ID NO: 115251 - protein, 15 aa, Homo sapiens
  CDR3 for alpha chain variable domain of TCR clone 57626 (TRAV12-1, TRAJ41)
CVVNSRTGSGYALNF

SEQ ID NO: 115252 - protein, 13 aa, Homo sapiens
  CDR3 for beta chain variable domain of TCR clone 57626 (TRBV7-9, TRBJ1-2)
CASSLKQNYGYTF

SEQ ID NO: 115253 - protein, 15 aa, Homo sapiens
  CDR3 for alpha chain variable domain of TCR clone 57627 (TRAV17, TRAJ22)
CATAPISGSARRLTF

SEQ ID NO: 115254 - protein, 14 aa, Homo sapiens
  CDR3 for beta chain variable domain of TCR clone 57627 (TRBV9, TRBJ2-1)
CASSVDPRGKEQFF

SEQ ID NO: 115255 - protein, 11 aa, Homo sapiens
  CDR3 for alpha chain variable domain of TCR clone 57628 (TRAV23/DV6, TRAJ35)
CYKGGANNLFF

SEQ ID NO: 115256 - protein, 16 aa, Homo sapiens
  CDR3 for beta chain variable domain of TCR clone 57628 (TRBV7-2, TRBJ1-3)
CASSSGRVLSGNTIYF

SEQ ID NO: 115257 - protein, 16 aa, Homo sapiens
  CDR3 for alpha chain variable domain of TCR clone 57629 (TRAV14/DV4, TRAJ53)
CAMREGGGGSSYKLTF

SEQ ID NO: 115258 - protein, 16 aa, Homo sapiens
  CDR3 for beta chain variable domain of TCR clone 57629 (TRBV4-3, TRBJ2-1)
CASSQERLAGFNEQFF

SEQ ID NO: 115259 - protein, 13 aa, Homo sapiens
  CDR3 for alpha chain variable domain of TCR clone 57630 (TRAV2, TRAJ21)
CAVEDLNFNKFYF

SEQ ID NO: 115260 - protein, 16 aa, Homo sapiens
  CDR3 for beta chain variable domain of TCR clone 57630 (TRBV12-5, TRBJ2-5)
CASGPRTSGNQETQYF

SEQ ID NO: 115261 - protein, 14 aa, Homo sapiens
  CDR3 for alpha chain variable domain of TCR clone 57631 (TRAV2, TRAJ39)
CAVEGDSAGNMLTF

SEQ ID NO: 115262 - protein, 14 aa, Homo sapiens
  CDR3 for beta chain variable domain of TCR clone 57631 (TRBV28, TRBJ2-4)
CASSPRARGNIQYF

SEQ ID NO: 115263 - protein, 12 aa, Homo sapiens
  CDR3 for alpha chain variable domain of TCR clone 57632 (TRAV29/DV5, TRAJ34)
CAARHNTDKLIF

SEQ ID NO: 115264 - protein, 15 aa, Homo sapiens
  CDR3 for beta chain variable domain of TCR clone 57632 (TRBV19, TRBJ2-7)
CASSPAGSVEALRYF

SEQ ID NO: 115265 - protein, 12 aa, Homo sapiens
  CDR3 for alpha chain variable domain of TCR clone 57633 (TRAV2, TRAJ33)
CAFMVSNYQLIW

SEQ ID NO: 115266 - protein, 16 aa, Homo sapiens
  CDR3 for beta chain variable domain of TCR clone 57633 (TRBV2, TRBJ2-7)
CASSEPWTGPSYEQYF

SEQ ID NO: 115267 - protein, 17 aa, Homo sapiens
  CDR3 for alpha chain variable domain of TCR clone 57634 (TRAV3, TRAJ6)
CAVRDGPRAGGSYIPTF

SEQ ID NO: 115268 - protein, 11 aa, Homo sapiens
  CDR3 for beta chain variable domain of TCR clone 57634 (TRBV7-8, TRBJ2-7)
CASSLSLEQYF

SEQ ID NO: 115269 - protein, 15 aa, Homo sapiens
  CDR3 for alpha chain variable domain of TCR clone 57635 (TRAV14/DV4, TRAJ10)
CAMRELTGGGNKLTL

SEQ ID NO: 115270 - protein, 13 aa, Homo sapiens
  CDR3 for beta chain variable domain of TCR clone 57635 (TRBV27, TRBJ2-1)
CASRTLGVGEQFF

SEQ ID NO: 115271 - protein, 12 aa, Homo sapiens
  CDR3 for alpha chain variable domain of TCR clone 57636 (TRAV23/DV6, TRAJ16)
CAARGRGQKLPF

SEQ ID NO: 115272 - protein, 15 aa, Homo sapiens
  CDR3 for beta chain variable domain of TCR clone 57636 (TRBV15, TRBJ2-1)
CATSRPGQGLHEQFF

SEQ ID NO: 115273 - protein, 15 aa, Homo sapiens
  CDR3 for alpha chain variable domain of TCR clone 57637 (TRAV26-1, TRAJ3)
CIVRSGYSSASKIIF

SEQ ID NO: 115274 - protein, 13 aa, Homo sapiens
  CDR3 for beta chain variable domain of TCR clone 57637 (TRBV13, TRBJ2-5)
CQLPSTSGRDQYF

SEQ ID NO: 115275 - protein, 11 aa, Homo sapiens
  CDR3 for alpha chain variable domain of TCR clone 57638 (TRAV2, TRAJ13)
CASGGYQKVTF

SEQ ID NO: 115276 - protein, 16 aa, Homo sapiens
  CDR3 for beta chain variable domain of TCR clone 57638 (TRBV19, TRBJ1-1)
CASRFGGPVTGTEAFF

SEQ ID NO: 115277 - protein, 12 aa, Homo sapiens
  CDR3 for alpha chain variable domain of TCR clone 57639 (TRAV8-3, TRAJ26)
CAGDNYGQNFVF

SEQ ID NO: 115278 - protein, 10 aa, Homo sapiens
  CDR3 for beta chain variable domain of TCR clone 57639 (TRBV7-8, TRBJ2-2)
CASSAGTKHR

SEQ ID NO: 115279 - protein, 12 aa, Homo sapiens
  CDR3 for alpha chain variable domain of TCR clone 57640 (TRAV3, TRAJ43)
CSVRDPNNDMRF

SEQ ID NO: 115280 - protein, 15 aa, Homo sapiens
  CDR3 for beta chain variable domain of TCR clone 57640 (TRBV27, TRBJ1-5)
CASSLGTGFDQPQHF

SEQ ID NO: 115281 - protein, 11 aa, Homo sapiens
  CDR3 for alpha chain variable domain of TCR clone 57641 (TRAV3, TRAJ21)
CAVGNFNKFYF

SEQ ID NO: 115282 - protein, 15 aa, Homo sapiens
  CDR3 for beta chain variable domain of TCR clone 57641 (TRBV6-6, TRBJ2-7)
CASSYSYGGSYEQYF

SEQ ID NO: 115283 - protein, 14 aa, Homo sapiens
  CDR3 for alpha chain variable domain of TCR clone 57642 (TRAV12-3, TRAJ10)
SHLPLTGGGTKLTF

SEQ ID NO: 115284 - protein, 11 aa, Homo sapiens
  CDR3 for beta chain variable domain of TCR clone 57642 (TRBV19, TRBJ1-1)
CASSIGSEAFF

SEQ ID NO: 115285 - protein, 15 aa, Homo sapiens
  CDR3 for alpha chain variable domain of TCR clone 57643 (TRAV12-3, TRAJ6)
CAMSATTGGSYIPTF

SEQ ID NO: 115286 - protein, 16 aa, Homo sapiens
  CDR3 for beta chain variable domain of TCR clone 57643 (TRBV20-1, TRBJ1-4)
CSAPGQGLLTNEKLFF

SEQ ID NO: 115287 - protein, 14 aa, Homo sapiens
  CDR3 for alpha chain variable domain of TCR clone 57644 (TRAV2, TRAJ3)
RAVDRYSSASKIIF

SEQ ID NO: 115288 - protein, 16 aa, Homo sapiens
  CDR3 for beta chain variable domain of TCR clone 57644 (TRBV20-1, TRBJ1-5)
CSAELPGQQTNQPQHF

SEQ ID NO: 115289 - protein, 14 aa, Homo sapiens
  CDR3 for alpha chain variable domain of TCR clone 57645 (TRAV3, TRAJ21)
SAVRDAYNFNKFYF

SEQ ID NO: 115290 - protein, 15 aa, Homo sapiens
  CDR3 for beta chain variable domain of TCR clone 57645 (TRBV6-5, TRBJ1-5)
CASSYSWDSNQPQHF

SEQ ID NO: 115291 - protein, 13 aa, Homo sapiens
  CDR3 for alpha chain variable domain of TCR clone 57646 (TRAV20, TRAJ48)
CAVHLFGNEKLAF

SEQ ID NO: 115292 - protein, 15 aa, Homo sapiens
  CDR3 for beta chain variable domain of TCR clone 57646 (TRBV6-5, TRBJ2-6)
CASSQWEAGANVLTF

SEQ ID NO: 115293 - protein, 16 aa, Homo sapiens
  CDR3 for alpha chain variable domain of TCR clone 57647 (TRAV30, TRAJ24)
CGPEIVDADSWGKFQF

SEQ ID NO: 115294 - protein, 16 aa, Homo sapiens
  CDR3 for beta chain variable domain of TCR clone 57647 (TRBV2, TRBJ1-3)
CASSGGAGRSGNTIYF

SEQ ID NO: 115295 - protein, 12 aa, Homo sapiens
  CDR3 for alpha chain variable domain of TCR clone 57648 (TRAV17, TRAJ53)
CAGGGSNYKLTF

SEQ ID NO: 115296 - protein, 16 aa, Homo sapiens
  CDR3 for beta chain variable domain of TCR clone 57648 (TRBV11-3, TRBJ2-3)
CASSFQGRGALDTQYF

SEQ ID NO: 115297 - protein, 12 aa, Homo sapiens
  CDR3 for alpha chain variable domain of TCR clone 57649 (TRAV12-1, TRAJ40)
CVLYSGTYRYIF

SEQ ID NO: 115298 - protein, 18 aa, Homo sapiens
  CDR3 for beta chain variable domain of TCR clone 57649 (TRBV12-4, TRBJ2-2)
CASSLVAGTRGRTGELFF

SEQ ID NO: 115299 - protein, 12 aa, Homo sapiens
  CDR3 for alpha chain variable domain of TCR clone 57650 (TRAV13-1, TRAJ21)
CAAKEGFNKFYF

SEQ ID NO: 115300 - protein, 14 aa, Homo sapiens
  CDR3 for beta chain variable domain of TCR clone 57650 (TRBV5-4, TRBJ1-1)
CASSLYSRRDEAFF

SEQ ID NO: 115301 - protein, 11 aa, Homo sapiens
  CDR3 for alpha chain variable domain of TCR clone 57651 (TRAV1-2, TRAJ20)
CAVANGYKLSF

SEQ ID NO: 115302 - protein, 18 aa, Homo sapiens
  CDR3 for beta chain variable domain of TCR clone 57651 (TRBV20-1, TRBJ2-6)
CSAETTPTHGSGAKVLTF

SEQ ID NO: 115303 - protein, 15 aa, Homo sapiens
  CDR3 for alpha chain variable domain of TCR clone 57652 (TRAV3, TRAJ9)
CAVRDINTGGFKIIF

SEQ ID NO: 115304 - protein, 13 aa, Homo sapiens
  CDR3 for beta chain variable domain of TCR clone 57652 (TRBV19, TRBJ2-7)
CASSIPSVREQYF

SEQ ID NO: 115305 - protein, 14 aa, Homo sapiens
  CDR3 for alpha chain variable domain of TCR clone 57653 (TRAV12-2, TRAJ40)
CAVKIPSGTYKYIF

SEQ ID NO: 115306 - protein, 14 aa, Homo sapiens
  CDR3 for beta chain variable domain of TCR clone 57653 (TRBV20-1, TRBJ1-1)
CSAQTRIGGTEAFF

SEQ ID NO: 115307 - protein, 13 aa, Homo sapiens
  CDR3 for alpha chain variable domain of TCR clone 57654 (TRAV2, TRAJ40)
CAVVTSGTYKYIF

SEQ ID NO: 115308 - protein, 15 aa, Homo sapiens
  CDR3 for beta chain variable domain of TCR clone 57654 (TRBV19, TRBJ2-4)
CASRGPRRGENIQYF

SEQ ID NO: 115309 - protein, 15 aa, Homo sapiens
  CDR3 for alpha chain variable domain of TCR clone 57655 (TRAV36/DV7, TRAJ53)
CAVEGSGGSNYKLTF

SEQ ID NO: 115310 - protein, 16 aa, Homo sapiens
  CDR3 for beta chain variable domain of TCR clone 57655 (TRBV27, TRBJ2-2)
CASSLSGLWVTGELFF

SEQ ID NO: 115311 - protein, 16 aa, Homo sapiens
  CDR3 for alpha chain variable domain of TCR clone 57656 (TRAV12-2, TRAJ45)
CAVNRGSGGGADGLTF

SEQ ID NO: 115312 - protein, 15 aa, Homo sapiens
  CDR3 for beta chain variable domain of TCR clone 57656 (TRBV9, TRBJ1-4)
CASSGTGGAYEKLFF

SEQ ID NO: 115313 - protein, 12 aa, Homo sapiens
  CDR3 for alpha chain variable domain of TCR clone 57657 (TRAV12-2, TRAJ10)
WGVTGGGNKLTF

SEQ ID NO: 115314 - protein, 13 aa, Homo sapiens
  CDR3 for beta chain variable domain of TCR clone 57657 (TRBV12-5, TRBJ2-3)
CASGDRQSDTQYF

SEQ ID NO: 115315 - protein, 12 aa, Homo sapiens
  CDR3 for alpha chain variable domain of TCR clone 57658 (TRAV38-1, TRAJ20)
CAFTWNDYKLSF

SEQ ID NO: 115316 - protein, 14 aa, Homo sapiens
  CDR3 for beta chain variable domain of TCR clone 57658 (TRBV19, TRBJ2-1)
CASSMGSGATEQFF

SEQ ID NO: 115317 - protein, 11 aa, Homo sapiens
  CDR3 for alpha chain variable domain of TCR clone 57659 (TRAV3, TRAJ21)
CAVGNFSKFHF

SEQ ID NO: 115318 - protein, 16 aa, Homo sapiens
  CDR3 for beta chain variable domain of TCR clone 57659 (TRBV19, TRBJ2-1)
CASSKAGPSSYNEQFF

SEQ ID NO: 115319 - protein, 16 aa, Homo sapiens
  CDR3 for alpha chain variable domain of TCR clone 57660 (TRAV17, TRAJ53)
CATDAPSGGSNYKLTF

SEQ ID NO: 115320 - protein, 15 aa, Homo sapiens
  CDR3 for beta chain variable domain of TCR clone 57660 (TRBV20-1, TRBJ2-7)
CSARDRVSGMDEQYF

SEQ ID NO: 115321 - protein, 13 aa, Homo sapiens
  CDR3 for alpha chain variable domain of TCR clone 57661 (TRAV27, TRAJ27)
CTGGITNAGKSTF

SEQ ID NO: 115322 - protein, 13 aa, Homo sapiens
  CDR3 for beta chain variable domain of TCR clone 57661 (TRBV20-1, TRBJ1-2)
CSASLGVGYGYTF

SEQ ID NO: 115323 - protein, 15 aa, Homo sapiens
  CDR3 for alpha chain variable domain of TCR clone 57662 (TRAV12-3, TRAJ6)
CAMSATTGGIYIPTF

SEQ ID NO: 115324 - protein, 16 aa, Homo sapiens
  CDR3 for beta chain variable domain of TCR clone 57662 (TRBV20-1, TRBJ1-2)
CSASMGQGVANYGYTF

SEQ ID NO: 115325 - protein, 14 aa, Homo sapiens
  CDR3 for alpha chain variable domain of TCR clone 57663 (TRAV17, TRAJ22)
CATSPSGSARQLTF

SEQ ID NO: 115326 - protein, 15 aa, Homo sapiens
  CDR3 for beta chain variable domain of TCR clone 57663 (TRBV7-9, TRBJ2-2)
CASSFGQLNTGELFF

SEQ ID NO: 115327 - protein, 14 aa, Homo sapiens
  CDR3 for alpha chain variable domain of TCR clone 57664 (TRAV1-2, TRAJ8)
CAVREHTGFQKLVF

SEQ ID NO: 115328 - protein, 15 aa, Homo sapiens
  CDR3 for beta chain variable domain of TCR clone 57664 (TRBV6-3, TRBJ2-7)
CASSSPGTVFYEQYF

SEQ ID NO: 115329 - protein, 14 aa, Homo sapiens
  CDR3 for alpha chain variable domain of TCR clone 57665 (TRAV1-2, TRAJ16)
CAVNRFSDGQELLF

SEQ ID NO: 115330 - protein, 14 aa, Homo sapiens
  CDR3 for beta chain variable domain of TCR clone 57665 (TRBV13, TRBJ2-5)
CASSLGRGQETQYF

SEQ ID NO: 115331 - protein, 13 aa, Homo sapiens
  CDR3 for alpha chain variable domain of TCR clone 57666 (TRAV12-1, TRAJ26)
SATYLYYGRNFVF

SEQ ID NO: 115332 - protein, 15 aa, Homo sapiens
  CDR3 for beta chain variable domain of TCR clone 57666 (TRBV5-1, TRBJ2-6)
CASSLDPSGANVLTF

SEQ ID NO: 115333 - protein, 16 aa, Homo sapiens
  CDR3 for alpha chain variable domain of TCR clone 57667 (TRAV26-1, TRAJ40)
CIVRGYLTSGTYKYIF

SEQ ID NO: 115334 - protein, 14 aa, Homo sapiens
  CDR3 for beta chain variable domain of TCR clone 57667 (TRBV5-1, TRBJ1-4)
CASSSGQGGEKLFF

SEQ ID NO: 115335 - protein, 16 aa, Homo sapiens
  CDR3 for alpha chain variable domain of TCR clone 57668 (TRAV30, TRAJ24)
CGTEIVDADSWGKFQF

SEQ ID NO: 115336 - protein, 15 aa, Homo sapiens
  CDR3 for beta chain variable domain of TCR clone 57668 (TRBV28, TRBJ2-1)
CASSGLAEVDNEQFF

SEQ ID NO: 115337 - protein, 16 aa, Homo sapiens
  CDR3 for alpha chain variable domain of TCR clone 57669 (TRAV4, TRAJ22)
CLVGDLYYGSARQLTF

SEQ ID NO: 115338 - protein, 16 aa, Homo sapiens
  CDR3 for beta chain variable domain of TCR clone 57669 (TRBV7-9, TRBJ2-1)
CASSDVAGGSYNEQFF

SEQ ID NO: 115339 - protein, 13 aa, Homo sapiens
  CDR3 for alpha chain variable domain of TCR clone 57670 (TRAV13-1, TRAJ5)
FAASDTGRRALTF

SEQ ID NO: 115340 - protein, 12 aa, Homo sapiens
  CDR3 for beta chain variable domain of TCR clone 57670 (TRBV28, TRBJ2-3)
CASSLYRDTQYF

SEQ ID NO: 115341 - protein, 15 aa, Homo sapiens
  CDR3 for alpha chain variable domain of TCR clone 57671 (TRAV8-3, TRAJ20)
CAVEAKGSNDYKLSF

SEQ ID NO: 115342 - protein, 12 aa, Homo sapiens
  CDR3 for beta chain variable domain of TCR clone 57671 (TRBV7-2, TRBJ1-2)
CASRDSIYGYAF

SEQ ID NO: 115343 - protein, 14 aa, Homo sapiens
  CDR3 for alpha chain variable domain of TCR clone 57672 (TRAV38-1, TRAJ45)
CAYYSGGGADGLTF

SEQ ID NO: 115344 - protein, 20 aa, Homo sapiens
  CDR3 for beta chain variable domain of TCR clone 57672 (TRBV28, TRBJ2-1)
CASTPIGRSPGLAGGNEQFC

SEQ ID NO: 115345 - protein, 13 aa, Homo sapiens
  CDR3 for alpha chain variable domain of TCR clone 57673 (TRAV21, TRAJ20)
CAVGLRVDYKLSF

SEQ ID NO: 115346 - protein, 11 aa, Homo sapiens
  CDR3 for beta chain variable domain of TCR clone 57673 (TRBV19, TRBJ1-1)
CASSIGSEAFF

SEQ ID NO: 115347 - protein, 14 aa, Homo sapiens
  CDR3 for alpha chain variable domain of TCR clone 57674 (TRAV12-3, TRAJ10)
SHLPLTGGGNKLTF

SEQ ID NO: 115348 - protein, 15 aa, Homo sapiens
  CDR3 for beta chain variable domain of TCR clone 57674 (TRBV4-1, TRBJ1-4)
CAGSDTGGTNEKLFF

SEQ ID NO: 115349 - protein, 12 aa, Homo sapiens
  CDR3 for alpha chain variable domain of TCR clone 57675 (TRAV1-2, TRAJ42)
CVAGGSQGNLIL

SEQ ID NO: 115350 - protein, 14 aa, Homo sapiens
  CDR3 for beta chain variable domain of TCR clone 57675 (TRBV5-4, TRBJ2-5)
CASSLVRGQETQYF

SEQ ID NO: 115351 - protein, 15 aa, Homo sapiens
  CDR3 for alpha chain variable domain of TCR clone 57676 (TRAV12-1, TRAJ34)
CVVPPGGGNTDKLIF

SEQ ID NO: 115352 - protein, 14 aa, Homo sapiens
  CDR3 for beta chain variable domain of TCR clone 57676 (TRBV19, TRBJ2-7)
CASSIFAGTYEQYF

SEQ ID NO: 115353 - protein, 14 aa, Homo sapiens
  CDR3 for alpha chain variable domain of TCR clone 57677 (TRAV3, TRAJ9)
CAVRLDTGGFKTIF

SEQ ID NO: 115354 - protein, 14 aa, Homo sapiens
  CDR3 for beta chain variable domain of TCR clone 57677 (TRBV20-1, TRBJ1-1)
CSAQTRIGGTEAFF

SEQ ID NO: 115355 - protein, 14 aa, Homo sapiens
  CDR3 for alpha chain variable domain of TCR clone 57678 (TRAV26-1, TRAJ38)
FIADNAGNNRKLIW

SEQ ID NO: 115356 - protein, 14 aa, Homo sapiens
  CDR3 for beta chain variable domain of TCR clone 57678 (TRBV4-1, TRBJ2-2)
CASSQAVNTGELFF

SEQ ID NO: 115357 - protein, 14 aa, Homo sapiens
  CDR3 for alpha chain variable domain of TCR clone 57679 (TRAV13-1, TRAJ35)
CAASKGGFGNVLHF

SEQ ID NO: 115358 - protein, 16 aa, Homo sapiens
  CDR3 for beta chain variable domain of TCR clone 57679 (TRBV2, TRBJ1-4)
CASNLLQGATNEKLFF

SEQ ID NO: 115359 - protein, 13 aa, Homo sapiens
  CDR3 for alpha chain variable domain of TCR clone 57680 (TRAV13-1, TRAJ10)
CAATVGGGNKLTF

SEQ ID NO: 115360 - protein, 12 aa, Homo sapiens
  CDR3 for beta chain variable domain of TCR clone 57680 (TRBV7-3, TRBJ2-1)
CASSFQSGPQFF

SEQ ID NO: 115361 - protein, 12 aa, Homo sapiens
  CDR3 for alpha chain variable domain of TCR clone 57681 (TRAV1-1, TRAJ39)
CAVPVVGNMLTF

SEQ ID NO: 115362 - protein, 15 aa, Homo sapiens
  CDR3 for beta chain variable domain of TCR clone 57681 (TRBV27, TRBJ2-1)
CASSNGEGPPMSSSS

SEQ ID NO: 115363 - protein, 16 aa, Homo sapiens
  CDR3 for alpha chain variable domain of TCR clone 57682 (TRAV30, TRAJ24)
CGTEVVDADSWGKFQF

SEQ ID NO: 115364 - protein, 14 aa, Homo sapiens
  CDR3 for beta chain variable domain of TCR clone 57682 (TRBV7-9, TRBJ2-4)
CASSLAMGGNIQYF

SEQ ID NO: 115365 - protein, 13 aa, Homo sapiens
  CDR3 for alpha chain variable domain of TCR clone 57683 (TRAV27, TRAJ41)
CAGEGNSGYALNF

SEQ ID NO: 115366 - protein, 13 aa, Homo sapiens
  CDR3 for beta chain variable domain of TCR clone 57683 (TRBV20-1, TRBJ1-1)
CSARGGGNTEAFF

SEQ ID NO: 115367 - protein, 12 aa, Homo sapiens
  CDR3 for alpha chain variable domain of TCR clone 57684 (TRAV25, TRAJ10)
TILTGGGNKLTF

SEQ ID NO: 115368 - protein, 15 aa, Homo sapiens
  CDR3 for beta chain variable domain of TCR clone 57684 (TRBV11-3, TRBJ2-2)
CASSLGGRPTGELFF

SEQ ID NO: 115369 - protein, 14 aa, Homo sapiens
  CDR3 for alpha chain variable domain of TCR clone 57685 (TRAV1-2, TRAJ16)
CAVDRFSDGQKLLF

SEQ ID NO: 115370 - protein, 16 aa, Homo sapiens
  CDR3 for beta chain variable domain of TCR clone 57685 (TRBV9, TRBJ2-1)
CASSVGGGGNYNEQFF

SEQ ID NO: 115371 - protein, 13 aa, Homo sapiens
  CDR3 for alpha chain variable domain of TCR clone 57686 (TRAV27, TRAJ56)
CAGKPGANSKLTF

SEQ ID NO: 115372 - protein, 18 aa, Homo sapiens
  CDR3 for beta chain variable domain of TCR clone 57686 (TRBV11-2, TRBJ2-3)
CASSLGGASRGAPNTQYL

SEQ ID NO: 115373 - protein, 12 aa, Homo sapiens
  CDR3 for alpha chain variable domain of TCR clone 57687 (TRAV12-2, TRAJ7)
CAVMRGNNRLAS

SEQ ID NO: 115374 - protein, 15 aa, Homo sapiens
  CDR3 for beta chain variable domain of TCR clone 57687 (TRBV2, TRBJ2-1)
CASSELAGGYNEQFF

SEQ ID NO: 115375 - protein, 16 aa, Homo sapiens
  CDR3 for alpha chain variable domain of TCR clone 57688 (TRAV30, TRAJ24)
CGTEIVDADSWGKFQL

SEQ ID NO: 115376 - protein, 12 aa, Homo sapiens
  CDR3 for beta chain variable domain of TCR clone 57688 (TRBV11-2, TRBJ2-2)
CASSLPTGELFF

SEQ ID NO: 115377 - protein, 13 aa, Homo sapiens
  CDR3 for alpha chain variable domain of TCR clone 57689 (TRAV2, TRAJ40)
CAVVTSGTYKYIS

SEQ ID NO: 115378 - protein, 16 aa, Homo sapiens
  CDR3 for beta chain variable domain of TCR clone 57689 (TRBV7-9, TRBJ1-3)
CASSLGAGSSGNTIYF

SEQ ID NO: 115379 - protein, 18 aa, Homo sapiens
  CDR3 for alpha chain variable domain of TCR clone 57690 (TRAV21, TRAJ52)
CAVRPSPAGGTSYGKLNF

SEQ ID NO: 115380 - protein, 17 aa, Homo sapiens
  CDR3 for beta chain variable domain of TCR clone 57690 (TRBV13, TRBJ2-3)
CASSLSRVAGGRNTQYF

SEQ ID NO: 115381 - protein, 14 aa, Homo sapiens
  CDR3 for alpha chain variable domain of TCR clone 57691 (TRAV12-2, TRAJ17)
CAVLFKAAGNKLTF

SEQ ID NO: 115382 - protein, 14 aa, Homo sapiens
  CDR3 for beta chain variable domain of TCR clone 57691 (TRBV19, TRBJ2-1)
CAGPTFVLSGEQFF

SEQ ID NO: 115383 - protein, 16 aa, Homo sapiens
  CDR3 for alpha chain variable domain of TCR clone 57692 (TRAV30, TRAJ24)
CGTEIVDADSWGKFQF

SEQ ID NO: 115384 - protein, 15 aa, Homo sapiens
  CDR3 for beta chain variable domain of TCR clone 57692 (TRBV11-2, TRBJ2-1)
CASSLGTSGLNEQFF

SEQ ID NO: 115385 - protein, 20 aa, Homo sapiens
  CDR3 for alpha chain variable domain of TCR clone 57693 (TRAV12-2, TRAJ52)
SPVIQPPARAGGTSYGKLTF

SEQ ID NO: 115386 - protein, 16 aa, Homo sapiens
  CDR3 for beta chain variable domain of TCR clone 57693 (TRBV15, TRBJ1-2)
CATSRGTRTGGGGYTF

SEQ ID NO: 115387 - protein, 14 aa, Homo sapiens
  CDR3 for alpha chain variable domain of TCR clone 57694 (TRAV2, TRAJ39)
CAVEGDNAGNMLTF

SEQ ID NO: 115388 - protein, 15 aa, Homo sapiens
  CDR3 for beta chain variable domain of TCR clone 57694 (TRBV4-1, TRBJ2-7)
CASSQNTGRLYEQYF

SEQ ID NO: 115389 - protein, 17 aa, Homo sapiens
  CDR3 for alpha chain variable domain of TCR clone 57695 (TRAV8-3, TRAJ34)
CAIPGKPIFGTGTRLQV

SEQ ID NO: 115390 - protein, 15 aa, Homo sapiens
  CDR3 for beta chain variable domain of TCR clone 57695 (TRBV5-7, TRBJ2-1)
CASSRRLAGDNEQFF

SEQ ID NO: 115391 - protein, 15 aa, Homo sapiens
  CDR3 for alpha chain variable domain of TCR clone 57696 (TRAV3, TRAJ13)
CAVRDIAGGYQKVTF

SEQ ID NO: 115392 - protein, 13 aa, Homo sapiens
  CDR3 for beta chain variable domain of TCR clone 57696 (TRBV2, TRBJ2-2)
CASSKKNTGELSF

SEQ ID NO: 115393 - protein, 16 aa, Homo sapiens
  CDR3 for alpha chain variable domain of TCR clone 57697 (TRAV3, TRAJ10)
CAVRDRLTGGGNKLTF

SEQ ID NO: 115394 - protein, 15 aa, Homo sapiens
  CDR3 for beta chain variable domain of TCR clone 57697 (TRBV11-3, TRBJ2-3)
CASLKDGREGDTQYF

SEQ ID NO: 115395 - protein, 22 aa, Homo sapiens
  CDR3 for alpha chain variable domain of TCR clone 57698 (TRAV21, )
CAVRQDAGNNHIQNPDPAVYQL

SEQ ID NO: 115396 - protein, 16 aa, Homo sapiens
  CDR3 for beta chain variable domain of TCR clone 57698 (TRBV4-2, TRBJ1-1)
RASRPLDGGGDTEAFF

SEQ ID NO: 115397 - protein, 15 aa, Homo sapiens
  CDR3 for alpha chain variable domain of TCR clone 57699 (TRAV25, TRAJ52)
CAGRPGGTSYGKLTF

SEQ ID NO: 115398 - protein, 11 aa, Homo sapiens
  CDR3 for beta chain variable domain of TCR clone 57699 (TRBV12-4, TRBJ2-3)
CASTATDTQYF

SEQ ID NO: 115399 - protein, 17 aa, Homo sapiens
  CDR3 for alpha chain variable domain of TCR clone 57700 (TRAV3, TRAJ6)
CAVRGGPRAGGSYIPTF

SEQ ID NO: 115400 - protein, 15 aa, Homo sapiens
  CDR3 for beta chain variable domain of TCR clone 57700 (TRBV19, TRBJ1-5)
CASSIVWADNQPQHF

SEQ ID NO: 115401 - protein, 15 aa, Homo sapiens
  CDR3 for alpha chain variable domain of TCR clone 57701 (TRAV8-6, TRAJ10)
CAVSDQAGGGNKLTF

SEQ ID NO: 115402 - protein, 15 aa, Homo sapiens
  CDR3 for beta chain variable domain of TCR clone 57701 (TRBV5-1, TRBJ2-7)
CASSLNGGPAREQYF

SEQ ID NO: 115403 - protein, 14 aa, Homo sapiens
  CDR3 for alpha chain variable domain of TCR clone 57702 (TRAV27, TRAJ45)
CAGAQEEVLPDSPL

SEQ ID NO: 115404 - protein, 17 aa, Homo sapiens
  CDR3 for beta chain variable domain of TCR clone 57702 (TRBV11-2, TRBJ2-1)
CASSLYPPGVEYNEQFF

SEQ ID NO: 115405 - protein, 14 aa, Homo sapiens
  CDR3 for alpha chain variable domain of TCR clone 57703 (TRAV8-2, TRAJ11)
CVVSEKSGYSTITF

SEQ ID NO: 115406 - protein, 16 aa, Homo sapiens
  CDR3 for beta chain variable domain of TCR clone 57703 (TRBV28, TRBJ2-1)
CASSSPEYPRDNEQFF

SEQ ID NO: 115407 - protein, 14 aa, Homo sapiens
  CDR3 for alpha chain variable domain of TCR clone 57704 (TRAV8-3, TRAJ4)
CAVGAAGGYNKLIF

SEQ ID NO: 115408 - protein, 15 aa, Homo sapiens
  CDR3 for beta chain variable domain of TCR clone 57704 (TRBV6-5, TRBJ2-1)
CASSYDAGAGNDQFF

SEQ ID NO: 115409 - protein, 15 aa, Homo sapiens
  CDR3 for alpha chain variable domain of TCR clone 57705 (TRAV12-3, TRAJ6)
CAMSAASGGSYIPTF

SEQ ID NO: 115410 - protein, 13 aa, Homo sapiens
  CDR3 for beta chain variable domain of TCR clone 57705 (TRBV20-1, TRBJ1-2)
CSASTEGIYGYTF

SEQ ID NO: 115411 - protein, 13 aa, Homo sapiens
  CDR3 for alpha chain variable domain of TCR clone 57706 (TRAV21, TRAJ57)
CAVTQGGSEKLVF

SEQ ID NO: 115412 - protein, 16 aa, Homo sapiens
  CDR3 for beta chain variable domain of TCR clone 57706 (TRBV29-1, TRBJ2-7)
YSVEDAEDGTAYEQYF

SEQ ID NO: 115413 - protein, 11 aa, Homo sapiens
  CDR3 for alpha chain variable domain of TCR clone 57707 (TRAV12-3, TRAJ27)
CAMANAGKSTF

SEQ ID NO: 115414 - protein, 15 aa, Homo sapiens
  CDR3 for beta chain variable domain of TCR clone 57707 (TRBV4-1, TRBJ1-4)
CASSDTGGTNEKLFF

SEQ ID NO: 115415 - protein, 12 aa, Homo sapiens
  CDR3 for alpha chain variable domain of TCR clone 57708 (TRAV12-1, TRAJ17)
CAMTLTGNKLTF

SEQ ID NO: 115416 - protein, 13 aa, Homo sapiens
  CDR3 for beta chain variable domain of TCR clone 57708 (TRBV7-3, TRBJ1-1)
CASSQDWGAEAFF

SEQ ID NO: 115417 - protein, 12 aa, Homo sapiens
  CDR3 for alpha chain variable domain of TCR clone 57709 (TRAV1-1, TRAJ43)
RAPRVSSNDMRF

SEQ ID NO: 115418 - protein, 15 aa, Homo sapiens
  CDR3 for beta chain variable domain of TCR clone 57709 (TRBV5-1, TRBJ2-7)
CASSLGDFTTYEQYF

SEQ ID NO: 115419 - protein, 16 aa, Homo sapiens
  CDR3 for alpha chain variable domain of TCR clone 57710 (TRAV12-3, TRAJ53)
CAMSPGSGGSNYKLTF

SEQ ID NO: 115420 - protein, 15 aa, Homo sapiens
  CDR3 for beta chain variable domain of TCR clone 57710 (TRBV7-3, TRBJ2-3)
CASSLQGGHTDTQYF

SEQ ID NO: 115421 - protein, 16 aa, Homo sapiens
  CDR3 for alpha chain variable domain of TCR clone 57711 (TRAV26-1, TRAJ48)
CCVLLHRLGGNEKLTF

SEQ ID NO: 115422 - protein, 13 aa, Homo sapiens
  CDR3 for beta chain variable domain of TCR clone 57711 (TRBV18, TRBJ2-7)
CASFRDSAYEQYF

SEQ ID NO: 115423 - protein, 14 aa, Homo sapiens
  CDR3 for alpha chain variable domain of TCR clone 57712 (TRAV17, TRAJ57)
CATDPQGGSEKLVF

SEQ ID NO: 115424 - protein, 16 aa, Homo sapiens
  CDR3 for beta chain variable domain of TCR clone 57712 (TRBV27, TRBJ2-2)
CASSSSGVSNTGELFF

SEQ ID NO: 115425 - protein, 17 aa, Homo sapiens
  CDR3 for alpha chain variable domain of TCR clone 57713 (TRAV3, TRAJ6)
CAVSRRTDTGGSYIPTF

SEQ ID NO: 115426 - protein, 18 aa, Homo sapiens
  CDR3 for beta chain variable domain of TCR clone 57713 (TRBV7-2, TRBJ2-3)
CARSLETSRGRKADTQYF

SEQ ID NO: 115427 - protein, 16 aa, Homo sapiens
  CDR3 for alpha chain variable domain of TCR clone 57714 (TRAV30, TRAJ24)
CGTEIVDADSWGKFQF

SEQ ID NO: 115428 - protein, 14 aa, Homo sapiens
  CDR3 for beta chain variable domain of TCR clone 57714 (TRBV19, TRBJ2-5)
CASSMTGQQETQYF

SEQ ID NO: 115429 - protein, 13 aa, Homo sapiens
  CDR3 for alpha chain variable domain of TCR clone 57715 (TRAV27, TRAJ45)
CRSSGGGADGLTF

SEQ ID NO: 115430 - protein, 17 aa, Homo sapiens
  CDR3 for beta chain variable domain of TCR clone 57715 (TRBV11-2, TRBJ2-1)
CASSLYPPGVEYHEQFF

SEQ ID NO: 115431 - protein, 15 aa, Homo sapiens
  CDR3 for alpha chain variable domain of TCR clone 57716 (TRAV8-4, TRAJ3)
CAVTGENLVQQGFQD

SEQ ID NO: 115432 - protein, 16 aa, Homo sapiens
  CDR3 for beta chain variable domain of TCR clone 57716 (TRBV4-2, TRBJ1-1)
CASSQAGFGMNTEAFF

SEQ ID NO: 115433 - protein, 14 aa, Homo sapiens
  CDR3 for alpha chain variable domain of TCR clone 57717 (TRAV8-4, TRAJ8)
CAVSEDTGFQKLVF

SEQ ID NO: 115434 - protein, 13 aa, Homo sapiens
  CDR3 for beta chain variable domain of TCR clone 57717 (TRBV6-1, TRBJ2-7)
CASSEARTGEQYF

SEQ ID NO: 115435 - protein, 13 aa, Homo sapiens
  CDR3 for alpha chain variable domain of TCR clone 57718 (TRAV3, TRAJ21)
CAVREPDFNKFYF

SEQ ID NO: 115436 - protein, 15 aa, Homo sapiens
  CDR3 for beta chain variable domain of TCR clone 57718 (TRBV7-2, TRBJ1-2)
CASSPRAGWNYGYTF

SEQ ID NO: 115437 - protein, 13 aa, Homo sapiens
  CDR3 for alpha chain variable domain of TCR clone 57719 (TRAV20, TRAJ37)
CAGCSSNTGKLIF

SEQ ID NO: 115438 - protein, 11 aa, Homo sapiens
  CDR3 for beta chain variable domain of TCR clone 57719 (TRBV12-4, TRBJ2-3)
CASTATDTQHF

SEQ ID NO: 115439 - protein, 15 aa, Homo sapiens
  CDR3 for alpha chain variable domain of TCR clone 57720 (TRAV13-1, TRAJ17)
CAASIERAAGNKLTF

SEQ ID NO: 115440 - protein, 15 aa, Homo sapiens
  CDR3 for beta chain variable domain of TCR clone 57720 (TRBV7-9, TRBJ2-7)
CASSSSGLAVYEQYF

SEQ ID NO: 115441 - protein, 16 aa, Homo sapiens
  CDR3 for alpha chain variable domain of TCR clone 57721 (TRAV17, TRAJ52)
CATSNAGGTSYGKLTF

SEQ ID NO: 115442 - protein, 12 aa, Homo sapiens
  CDR3 for beta chain variable domain of TCR clone 57721 (TRBV11-2, TRBJ2-2)
CASSLGGGELFF

SEQ ID NO: 115443 - protein, 15 aa, Homo sapiens
  CDR3 for alpha chain variable domain of TCR clone 57722 (TRAV12-1, TRAJ44)
CVVDTPQGTASKLTF

SEQ ID NO: 115444 - protein, 13 aa, Homo sapiens
  CDR3 for beta chain variable domain of TCR clone 57722 (TRBV11-2, TRBJ2-1)
CASSLGLAGGRFF

SEQ ID NO: 115445 - protein, 14 aa, Homo sapiens
  CDR3 for alpha chain variable domain of TCR clone 57723 (TRAV12-1, TRAJ12)
CVVTRMDSSYKLIF

SEQ ID NO: 115446 - protein, 14 aa, Homo sapiens
  CDR3 for beta chain variable domain of TCR clone 57723 (TRBV25-1, TRBJ1-1)
CASTHLGGNTEAFF

SEQ ID NO: 115447 - protein, 11 aa, Homo sapiens
  CDR3 for alpha chain variable domain of TCR clone 57724 (TRAV12-1, TRAJ26)
CVVAYGQNFVF

SEQ ID NO: 115448 - protein, 15 aa, Homo sapiens
  CDR3 for beta chain variable domain of TCR clone 57724 (TRBV12-4, TRBJ2-5)
CASSGTGQAQEAQYF

SEQ ID NO: 115449 - protein, 12 aa, Homo sapiens
  CDR3 for alpha chain variable domain of TCR clone 57725 (TRAV5, TRAJ27)
CAEITNAGKSTF

SEQ ID NO: 115450 - protein, 15 aa, Homo sapiens
  CDR3 for beta chain variable domain of TCR clone 57725 (TRBV11-3, TRBJ1-2)
CASSLEGVQRNGYTF

SEQ ID NO: 115451 - protein, 11 aa, Homo sapiens
  CDR3 for alpha chain variable domain of TCR clone 57726 (TRAV21, TRAJ31)
CAVRNNARLMF

SEQ ID NO: 115452 - protein, 14 aa, Homo sapiens
  CDR3 for beta chain variable domain of TCR clone 57726 (TRBV25-1, TRBJ1-1)
CASTHLGGNTEAFF

SEQ ID NO: 115453 - protein, 12 aa, Homo sapiens
  CDR3 for alpha chain variable domain of TCR clone 57727 (TRAV35, TRAJ39)
LAPTNAGNMLTF

SEQ ID NO: 115454 - protein, 16 aa, Homo sapiens
  CDR3 for beta chain variable domain of TCR clone 57727 (TRBV2, TRBJ2-3)
CASSTSVEGVTDTQYF

SEQ ID NO: 115455 - protein, 14 aa, Homo sapiens
  CDR3 for alpha chain variable domain of TCR clone 57728 (TRAV12-1, TRAJ3)
CVVSPGSSASKIIF

SEQ ID NO: 115456 - protein, 18 aa, Homo sapiens
  CDR3 for beta chain variable domain of TCR clone 57728 (TRBV4-2, TRBJ1-2)
CASSQDKVGHTVNYGHTF

SEQ ID NO: 115457 - protein, 13 aa, Homo sapiens
  CDR3 for alpha chain variable domain of TCR clone 57729 (TRAV12-2, TRAJ47)
CAVFMEYGNKLVF

SEQ ID NO: 115458 - protein, 14 aa, Homo sapiens
  CDR3 for beta chain variable domain of TCR clone 57729 (TRBV4-1, TRBJ1-5)
CASSQGLTNQPQHF

SEQ ID NO: 115459 - protein, 12 aa, Homo sapiens
  CDR3 for alpha chain variable domain of TCR clone 57730 (TRAV8-3, TRAJ27)
CAVGAEAGKSTF

SEQ ID NO: 115460 - protein, 14 aa, Homo sapiens
  CDR3 for beta chain variable domain of TCR clone 57730 (TRBV2, TRBJ2-1)
CASRSIVGHDEQFF

SEQ ID NO: 115461 - protein, 16 aa, Homo sapiens
  CDR3 for alpha chain variable domain of TCR clone 57731 (TRAV27, TRAJ52)
CAGAPAGGTSYGKLTF

SEQ ID NO: 115462 - protein, 13 aa, Homo sapiens
  CDR3 for beta chain variable domain of TCR clone 57731 (TRBV7-7, TRBJ2-3)
CASSLSRADTQYF

SEQ ID NO: 115463 - protein, 16 aa, Homo sapiens
  CDR3 for alpha chain variable domain of TCR clone 57732 (TRAV3, TRAJ3)
CAVRDRAKSSASKIIF

SEQ ID NO: 115464 - protein, 13 aa, Homo sapiens
  CDR3 for beta chain variable domain of TCR clone 57732 (TRBV10-3, TRBJ2-7)
CAPKLAVNYEQYF

SEQ ID NO: 115465 - protein, 12 aa, Homo sapiens
  CDR3 for alpha chain variable domain of TCR clone 57733 (TRAV12-3, TRAJ17)
CAMTLTGNKLTF

SEQ ID NO: 115466 - protein, 15 aa, Homo sapiens
  CDR3 for beta chain variable domain of TCR clone 57733 (TRBV20-1, TRBJ2-7)
CSARDRVSGMEQQYF

SEQ ID NO: 115467 - protein, 15 aa, Homo sapiens
  CDR3 for alpha chain variable domain of TCR clone 57734 (TRAV12-1, TRAJ45)
CGEPKTGGGADGLTF

SEQ ID NO: 115468 - protein, 13 aa, Homo sapiens
  CDR3 for beta chain variable domain of TCR clone 57734 (TRBV7-2, TRBJ2-7)
CASSSPSGSEQYF

SEQ ID NO: 115469 - protein, 15 aa, Homo sapiens
  CDR3 for alpha chain variable domain of TCR clone 57735 (TRAV29/DV5, TRAJ29)
CAASERSSGNTPLVV

SEQ ID NO: 115470 - protein, 17 aa, Homo sapiens
  CDR3 for beta chain variable domain of TCR clone 57735 (TRBV4-1, TRBJ1-4)
CASSQEGPRGVEEKLFF

SEQ ID NO: 115471 - protein, 16 aa, Homo sapiens
  CDR3 for alpha chain variable domain of TCR clone 57736 (TRAV26-1, TRAJ28)
CIVRVGLWGWELPTHF

SEQ ID NO: 115472 - protein, 16 aa, Homo sapiens
  CDR3 for beta chain variable domain of TCR clone 57736 (TRBV20-1, TRBJ1-2)
CSASMGQGVANYGYAF

SEQ ID NO: 115473 - protein, 14 aa, Homo sapiens
  CDR3 for alpha chain variable domain of TCR clone 57737 (TRAV35, TRAJ13)
CAGSPSGGYQKVTF

SEQ ID NO: 115474 - protein, 13 aa, Homo sapiens
  CDR3 for beta chain variable domain of TCR clone 57737 (TRBV29-1, TRBJ1-1)
CSVGDSRNTKAFF

SEQ ID NO: 115475 - protein, 11 aa, Homo sapiens
  CDR3 for alpha chain variable domain of TCR clone 57738 (TRAV3, TRAJ21)
CAVGNFNKFYF

SEQ ID NO: 115476 - protein, 14 aa, Homo sapiens
  CDR3 for beta chain variable domain of TCR clone 57738 (TRBV19, TRBJ2-2)
CASSKLGTTGELFF

SEQ ID NO: 115477 - protein, 13 aa, Homo sapiens
  CDR3 for alpha chain variable domain of TCR clone 57739 (TRAV2, TRAJ40)
CAVVTSGTYKYIF

SEQ ID NO: 115478 - protein, 13 aa, Homo sapiens
  CDR3 for beta chain variable domain of TCR clone 57739 (TRBV3-1, TRBJ1-1)
CASSPGVITEAFF

SEQ ID NO: 115479 - protein, 14 aa, Homo sapiens
  CDR3 for alpha chain variable domain of TCR clone 57740 (TRAV1-2, TRAJ8)
CAVREDTGFQKLVF

SEQ ID NO: 115480 - protein, 15 aa, Homo sapiens
  CDR3 for beta chain variable domain of TCR clone 57740 (TRBV7-2, TRBJ1-2)
CASSPRAGWNYGYTF

SEQ ID NO: 115481 - protein, 15 aa, Homo sapiens
  CDR3 for alpha chain variable domain of TCR clone 57741 (TRAV12-1, TRAJ44)
CVVDTPQGTAGKLTF

SEQ ID NO: 115482 - protein, 14 aa, Homo sapiens
  CDR3 for beta chain variable domain of TCR clone 57741 (TRBV7-9, TRBJ2-1)
CASSPRDSLYEQFF

SEQ ID NO: 115483 - protein, 14 aa, Homo sapiens
  CDR3 for alpha chain variable domain of TCR clone 57742 (TRAV1-2, TRAJ16)
CAVNRFSDGQKLPF

SEQ ID NO: 115484 - protein, 17 aa, Homo sapiens
  CDR3 for beta chain variable domain of TCR clone 57742 (TRBV13, TRBJ2-3)
CASSLSRVAGGRNTQYF

SEQ ID NO: 115485 - protein, 11 aa, Homo sapiens
  CDR3 for alpha chain variable domain of TCR clone 57743 (TRAV2, TRAJ23)
CAVETRGKLIF

SEQ ID NO: 115486 - protein, 14 aa, Homo sapiens
  CDR3 for beta chain variable domain of TCR clone 57743 (TRBV2, TRBJ2-3)
CASSEGQNTDTQYL

SEQ ID NO: 115487 - protein, 14 aa, Homo sapiens
  CDR3 for alpha chain variable domain of TCR clone 57744 (TRAV1-2, TRAJ16)
CDVNRFSDGQKLLF

SEQ ID NO: 115488 - protein, 15 aa, Homo sapiens
  CDR3 for beta chain variable domain of TCR clone 57744 (TRBV7-9, TRBJ1-6)
CASSSPGRGNSPLHF

SEQ ID NO: 115489 - protein, 11 aa, Homo sapiens
  CDR3 for alpha chain variable domain of TCR clone 57745 (TRAV2, TRAJ33)
CAVDINYQLIW

SEQ ID NO: 115490 - protein, 15 aa, Homo sapiens
  CDR3 for beta chain variable domain of TCR clone 57745 (TRBV19, TRBJ1-2)
CASSVGQVLNYGYTF

SEQ ID NO: 115491 - protein, 11 aa, Homo sapiens
  CDR3 for alpha chain variable domain of TCR clone 57746 (TRAV21, TRAJ11)
CAVTGYSTLTF

SEQ ID NO: 115492 - protein, 11 aa, Homo sapiens
  CDR3 for beta chain variable domain of TCR clone 57746 (TRBV19, TRBJ1-1)
CASSIGSEAFF

SEQ ID NO: 115493 - protein, 14 aa, Homo sapiens
  CDR3 for alpha chain variable domain of TCR clone 57747 (TRAV1-2, TRAJ8)
CAVREDTGFQKLVF

SEQ ID NO: 115494 - protein, 16 aa, Homo sapiens
  CDR3 for beta chain variable domain of TCR clone 57747 (TRBV20-1, TRBJ2-1)
CSASASGYSSYNEQFF

SEQ ID NO: 115495 - protein, 14 aa, Homo sapiens
  CDR3 for alpha chain variable domain of TCR clone 57748 (TRAV26-1, TRAJ21)
CIVRPPYNFNKFYF

SEQ ID NO: 115496 - protein, 16 aa, Homo sapiens
  CDR3 for beta chain variable domain of TCR clone 57748 (TRBV19, TRBJ2-1)
CASSKAGPSSYNEQFF

SEQ ID NO: 115497 - protein, 15 aa, Homo sapiens
  CDR3 for alpha chain variable domain of TCR clone 57749 (TRAV25, TRAJ52)
CAGRPGGTSYGKLTF

SEQ ID NO: 115498 - protein, 17 aa, Homo sapiens
  CDR3 for beta chain variable domain of TCR clone 57749 (TRBV7-8, TRBJ2-6)
CASSAGTGGAGSNVLTF

SEQ ID NO: 115499 - protein, 14 aa, Homo sapiens
  CDR3 for alpha chain variable domain of TCR clone 57750 (TRAV1-2, TRAJ8)
CAVREDTGFQKLVF

SEQ ID NO: 115500 - protein, 14 aa, Homo sapiens
  CDR3 for beta chain variable domain of TCR clone 57750 (TRBV24-1, TRBJ1-1)
CATSIPRGDTEAFF

SEQ ID NO: 115501 - protein, 14 aa, Homo sapiens
  CDR3 for alpha chain variable domain of TCR clone 57751 (TRAV13-1, TRAJ44)
CAAKATGTASKLTF

SEQ ID NO: 115502 - protein, 14 aa, Homo sapiens
  CDR3 for beta chain variable domain of TCR clone 57751 (TRBV6-1, TRBJ1-3)
CASVQGGGGNTIYF

SEQ ID NO: 115503 - protein, 13 aa, Homo sapiens
  CDR3 for alpha chain variable domain of TCR clone 57752 (TRAV6, TRAJ20)
CALAVSNDCKLSF

SEQ ID NO: 115504 - protein, 16 aa, Homo sapiens
  CDR3 for beta chain variable domain of TCR clone 57752 (TRBV7-9, TRBJ2-1)
CASSDVAGGSYNEQFF

SEQ ID NO: 115505 - protein, 11 aa, Homo sapiens
  CDR3 for alpha chain variable domain of TCR clone 57753 (TRAV12-1, TRAJ8)
CVVTCFQKLVF

SEQ ID NO: 115506 - protein, 14 aa, Homo sapiens
  CDR3 for beta chain variable domain of TCR clone 57753 (TRBV19, TRBJ2-1)
CASGKSTQYNEQFF

SEQ ID NO: 115507 - protein, 12 aa, Homo sapiens
  CDR3 for alpha chain variable domain of TCR clone 57754 (TRAV21, TRAJ23)
CAVGPQGGKLIF

SEQ ID NO: 115508 - protein, 16 aa, Homo sapiens
  CDR3 for beta chain variable domain of TCR clone 57754 (TRBV5-7, TRBJ2-1)
CASSGGLAGTYNEQFF

SEQ ID NO: 115509 - protein, 20 aa, Homo sapiens
  CDR3 for alpha chain variable domain of TCR clone 57755 (TRAV26-1, TRAJ42)
CCVLLHRQTYYGGSQGNLTF

SEQ ID NO: 115510 - protein, 16 aa, Homo sapiens
  CDR3 for beta chain variable domain of TCR clone 57755 (TRBV7-3, TRBJ2-2)
CASSLKRGTLSGELFF

SEQ ID NO: 115511 - protein, 15 aa, Homo sapiens
  CDR3 for alpha chain variable domain of TCR clone 57756 (TRAV3, TRAJ5)
CAVRDRKTGRRALTF

SEQ ID NO: 115512 - protein, 15 aa, Homo sapiens
  CDR3 for beta chain variable domain of TCR clone 57756 (TRBV7-8, TRBJ2-1)
CASSLADSLYNDQFF

SEQ ID NO: 115513 - protein, 13 aa, Homo sapiens
  CDR3 for alpha chain variable domain of TCR clone 57757 (TRAV21, TRAJ57)
CAVTQGGSEKLVF

SEQ ID NO: 115514 - protein, 11 aa, Homo sapiens
  CDR3 for beta chain variable domain of TCR clone 57757 (TRBV11-2, TRBJ2-2)
CASSLPGELFF

SEQ ID NO: 115515 - protein, 12 aa, Homo sapiens
  CDR3 for alpha chain variable domain of TCR clone 57758 (TRAV17, TRAJ30)
CVPERRDGKIIF

SEQ ID NO: 115516 - protein, 14 aa, Homo sapiens
  CDR3 for beta chain variable domain of TCR clone 57758 (TRBV7-7, TRBJ2-2)
CASSRDRSTGELFF

SEQ ID NO: 115517 - protein, 14 aa, Homo sapiens
  CDR3 for alpha chain variable domain of TCR clone 57759 (TRAV12-2, TRAJ13)
CAVRKTGGYQKVTF

SEQ ID NO: 115518 - protein, 15 aa, Homo sapiens
  CDR3 for beta chain variable domain of TCR clone 57759 (TRBV27, TRBJ2-1)
CASSNGGGSSNGQFF

SEQ ID NO: 115519 - protein, 14 aa, Homo sapiens
  CDR3 for alpha chain variable domain of TCR clone 57760 (TRAV12-2, TRAJ45)
CAVNIGGGADGLTF

SEQ ID NO: 115520 - protein, 13 aa, Homo sapiens
  CDR3 for beta chain variable domain of TCR clone 57760 (TRBV19, TRBJ2-2)
FASSIWSTGELFF

SEQ ID NO: 115521 - protein, 16 aa, Homo sapiens
  CDR3 for alpha chain variable domain of TCR clone 57761 (TRAV30, TRAJ24)
CGTEIVDADSWGKFQF

SEQ ID NO: 115522 - protein, 13 aa, Homo sapiens
  CDR3 for beta chain variable domain of TCR clone 57761 (TRBV7-2, TRBJ2-7)
CASSFGQEKEQYL

SEQ ID NO: 115523 - protein, 15 aa, Homo sapiens
  CDR3 for alpha chain variable domain of TCR clone 57762 (TRAV35, TRAJ40)
CAGQLGTSGTYKYIF

SEQ ID NO: 115524 - protein, 15 aa, Homo sapiens
  CDR3 for beta chain variable domain of TCR clone 57762 (TRBV6-6, TRBJ2-5)
CASSPGGGLEETQYF

SEQ ID NO: 115525 - protein, 17 aa, Homo sapiens
  CDR3 for alpha chain variable domain of TCR clone 57763 (TRAV3, TRAJ12)
CAVRDGGRMDSSYKLIF

SEQ ID NO: 115526 - protein, 14 aa, Homo sapiens
  CDR3 for beta chain variable domain of TCR clone 57763 (TRBV7-9, TRBJ1-2)
CASSRQGANYGYSF

SEQ ID NO: 115527 - protein, 18 aa, Homo sapiens
  CDR3 for alpha chain variable domain of TCR clone 57764 (TRAV26-1, TRAJ5)
CIVRVIPPRDTGRRALTF

SEQ ID NO: 115528 - protein, 15 aa, Homo sapiens
  CDR3 for beta chain variable domain of TCR clone 57764 (TRBV7-9, TRBJ2-7)
CASSLPMGQANEQYF

SEQ ID NO: 115529 - protein, 11 aa, Homo sapiens
  CDR3 for alpha chain variable domain of TCR clone 57765 (TRAV38-1, TRAJ35)
CAFMSLDRLWE

SEQ ID NO: 115530 - protein, 17 aa, Homo sapiens
  CDR3 for beta chain variable domain of TCR clone 57765 (TRBV4-1, TRBJ1-4)
CASSQEGPRGVEEKLFF

SEQ ID NO: 115531 - protein, 14 aa, Homo sapiens
  CDR3 for alpha chain variable domain of TCR clone 57766 (TRAV35, TRAJ33)
RAGSSQDSNYQLIW

SEQ ID NO: 115532 - protein, 15 aa, Homo sapiens
  CDR3 for beta chain variable domain of TCR clone 57766 (TRBV5-1, TRBJ1-4)
FAPAAWKDGNEKLFF

SEQ ID NO: 115533 - protein, 14 aa, Homo sapiens
  CDR3 for alpha chain variable domain of TCR clone 57767 (TRAV12-1, TRAJ17)
CVVNYKAAGNKLTF

SEQ ID NO: 115534 - protein, 17 aa, Homo sapiens
  CDR3 for beta chain variable domain of TCR clone 57767 (TRBV28, TRBJ2-1)
CASSSARQALTYNEQFF

SEQ ID NO: 115535 - protein, 14 aa, Homo sapiens
  CDR3 for alpha chain variable domain of TCR clone 57768 (TRAV9-2, TRAJ6)
CALSDPGGSYIPTF

SEQ ID NO: 115536 - protein, 15 aa, Homo sapiens
  CDR3 for beta chain variable domain of TCR clone 57768 (TRBV11-2, TRBJ1-6)
CASTLRETGNSPLHF

SEQ ID NO: 115537 - protein, 12 aa, Homo sapiens
  CDR3 for alpha chain variable domain of TCR clone 57769 (TRAV12-3, TRAJ17)
CAMTLTGNKLTF

SEQ ID NO: 115538 - protein, 15 aa, Homo sapiens
  CDR3 for beta chain variable domain of TCR clone 57769 (TRBV4-1, TRBJ1-2)
CASSQGQGAAYGYTF

SEQ ID NO: 115539 - protein, 15 aa, Homo sapiens
  CDR3 for alpha chain variable domain of TCR clone 57770 (TRAV35, TRAJ40)
CAGVPGASGTYKYIF

SEQ ID NO: 115540 - protein, 14 aa, Homo sapiens
  CDR3 for beta chain variable domain of TCR clone 57770 (TRBV11-3, TRBJ2-5)
CASSRTGGIETQYF

SEQ ID NO: 115541 - protein, 18 aa, Homo sapiens
  CDR3 for alpha chain variable domain of TCR clone 57771 (TRAV13-1, TRAJ52)
CAASKRSAGGTSYGKLTF

SEQ ID NO: 115542 - protein, 14 aa, Homo sapiens
  CDR3 for beta chain variable domain of TCR clone 57771 (TRBV4-2, TRBJ2-1)
CASGLDRAYNEQFF

SEQ ID NO: 115543 - protein, 16 aa, Homo sapiens
  CDR3 for alpha chain variable domain of TCR clone 57772 (TRAV23/DV6, TRAJ9)
CTASIGGNTGGFKTIF

SEQ ID NO: 115544 - protein, 14 aa, Homo sapiens
  CDR3 for beta chain variable domain of TCR clone 57772 (TRBV9, TRBJ2-7)
CASSVGVGSYEQYF

SEQ ID NO: 115545 - protein, 12 aa, Homo sapiens
  CDR3 for alpha chain variable domain of TCR clone 57773 (TRAV16, TRAJ10)
CSRTGGGNKLTF

SEQ ID NO: 115546 - protein, 11 aa, Homo sapiens
  CDR3 for beta chain variable domain of TCR clone 57773 (TRBV10-3, TRBJ2-7)
CAISEGLEQYF

SEQ ID NO: 115547 - protein, 13 aa, Homo sapiens
  CDR3 for alpha chain variable domain of TCR clone 57774 (TRAV2, TRAJ40)
CAVVTSGAYKYIF

SEQ ID NO: 115548 - protein, 14 aa, Homo sapiens
  CDR3 for beta chain variable domain of TCR clone 57774 (TRBV19, TRBJ2-1)
CASPTFVLSGEQFL

SEQ ID NO: 115549 - protein, 16 aa, Homo sapiens
  CDR3 for alpha chain variable domain of TCR clone 57775 (TRAV30, TRAJ24)
CGTEIVDADSWGKFQF

SEQ ID NO: 115550 - protein, 15 aa, Homo sapiens
  CDR3 for beta chain variable domain of TCR clone 57775 (TRBV5-5, TRBJ1-5)
CASSSTPGSNQPQHF

SEQ ID NO: 115551 - protein, 13 aa, Homo sapiens
  CDR3 for alpha chain variable domain of TCR clone 57776 (TRAV2, TRAJ40)
CAVVTSGSYKYIF

SEQ ID NO: 115552 - protein, 15 aa, Homo sapiens
  CDR3 for beta chain variable domain of TCR clone 57776 (TRBV11-3, TRBJ2-3)
CASLKDGREGDTQYF

SEQ ID NO: 115553 - protein, 14 aa, Homo sapiens
  CDR3 for alpha chain variable domain of TCR clone 57777 (TRAV19, TRAJ16)
CALSEVSDGQKLLF

SEQ ID NO: 115554 - protein, 16 aa, Homo sapiens
  CDR3 for beta chain variable domain of TCR clone 57777 (TRBV5-1, TRBJ1-1)
CASSSGGNSLNTEAFF

SEQ ID NO: 115555 - protein, 15 aa, Homo sapiens
  CDR3 for alpha chain variable domain of TCR clone 57778 (TRAV13-1, TRAJ3)
CAASKLASSASKIIF

SEQ ID NO: 115556 - protein, 16 aa, Homo sapiens
  CDR3 for beta chain variable domain of TCR clone 57778 (TRBV25-1, TRBJ1-5)
CASGAPTVNSNQHQHF

SEQ ID NO: 115557 - protein, 12 aa, Homo sapiens
  CDR3 for alpha chain variable domain of TCR clone 57779 (TRAV4, TRAJ34)
CLVGEGTYKLIF

SEQ ID NO: 115558 - protein, 13 aa, Homo sapiens
  CDR3 for beta chain variable domain of TCR clone 57779 (TRBV2, TRBJ2-7)
CATSMGLVYEQYF

SEQ ID NO: 115559 - protein, 14 aa, Homo sapiens
  CDR3 for alpha chain variable domain of TCR clone 57780 (TRAV16, TRAJ29)
CALSGRAGNTPLVF

SEQ ID NO: 115560 - protein, 12 aa, Homo sapiens
  CDR3 for beta chain variable domain of TCR clone 57780 (TRBV11-2, TRBJ2-1)
RASSPGNNEQFF

SEQ ID NO: 115561 - protein, 10 aa, Homo sapiens
  CDR3 for alpha chain variable domain of TCR clone 57781 (TRAV1-2, TRAJ31)
CVSEDARLMF

SEQ ID NO: 115562 - protein, 14 aa, Homo sapiens
  CDR3 for beta chain variable domain of TCR clone 57781 (TRBV19, TRBJ2-1)
CASPTFVLSGEQFV

SEQ ID NO: 115563 - protein, 13 aa, Homo sapiens
  CDR3 for alpha chain variable domain of TCR clone 57782 (TRAV20, TRAJ20)
CAVQAGSGYKLSF

SEQ ID NO: 115564 - protein, 14 aa, Homo sapiens
  CDR3 for beta chain variable domain of TCR clone 57782 (TRBV25-1, TRBJ1-1)
CASTHLGGNTEAFF

SEQ ID NO: 115565 - protein, 18 aa, Homo sapiens
  CDR3 for alpha chain variable domain of TCR clone 57783 (TRAV21, TRAJ52)
CAVRPSPAGGTSYGKLTF

SEQ ID NO: 115566 - protein, 15 aa, Homo sapiens
  CDR3 for beta chain variable domain of TCR clone 57783 (TRBV7-9, TRBJ2-7)
CASSSAGLAVYEQYF

SEQ ID NO: 115567 - protein, 12 aa, Homo sapiens
  CDR3 for alpha chain variable domain of TCR clone 57784 (TRAV26-2, TRAJ21)
FILKGNFNKFYF

SEQ ID NO: 115568 - protein, 14 aa, Homo sapiens
  CDR3 for beta chain variable domain of TCR clone 57784 (TRBV7-9, TRBJ1-1)
CASTPLQSYTEAFF

SEQ ID NO: 115569 - protein, 16 aa, Homo sapiens
  CDR3 for alpha chain variable domain of TCR clone 57785 (TRAV1-2, TRAJ10)
CAVRGVLTGGGNKLTF

SEQ ID NO: 115570 - protein, 15 aa, Homo sapiens
  CDR3 for beta chain variable domain of TCR clone 57785 (TRBV10-2, TRBJ2-6)
CASSEQGTGANVLTF

SEQ ID NO: 115571 - protein, 11 aa, Homo sapiens
  CDR3 for alpha chain variable domain of TCR clone 57786 (TRAV12-3, TRAJ49)
CAANTGNQFYS

SEQ ID NO: 115572 - protein, 15 aa, Homo sapiens
  CDR3 for beta chain variable domain of TCR clone 57786 (TRBV11-2, TRBJ2-1)
CASSLGTSGLNEQFF

SEQ ID NO: 115573 - protein, 13 aa, Homo sapiens
  CDR3 for alpha chain variable domain of TCR clone 57787 (TRAV3, TRAJ4)
CAVRDGGYNKRIF

SEQ ID NO: 115574 - protein, 14 aa, Homo sapiens
  CDR3 for beta chain variable domain of TCR clone 57787 (TRBV12-4, TRBJ1-2)
CASSSSAAGSSYTF

SEQ ID NO: 115575 - protein, 20 aa, Homo sapiens
  CDR3 for alpha chain variable domain of TCR clone 57788 (TRAV26-1, TRAJ42)
CCVLLHRQTYYGGSQGNLIF

SEQ ID NO: 115576 - protein, 16 aa, Homo sapiens
  CDR3 for beta chain variable domain of TCR clone 57788 (TRBV7-3, TRBJ2-2)
CASSLKRGTLSEELFF

SEQ ID NO: 115577 - protein, 13 aa, Homo sapiens
  CDR3 for alpha chain variable domain of TCR clone 57789 (TRAV13-2, TRAJ13)
CAERPGGYQKVTF

SEQ ID NO: 115578 - protein, 16 aa, Homo sapiens
  CDR3 for beta chain variable domain of TCR clone 57789 (TRBV5-1, TRBJ2-2)
CASSSRTGGRTGELFF

SEQ ID NO: 115579 - protein, 17 aa, Homo sapiens
  CDR3 for alpha chain variable domain of TCR clone 57790 (TRAV3, TRAJ6)
CAVRDGPRAGGSYIPTF

SEQ ID NO: 115580 - protein, 14 aa, Homo sapiens
  CDR3 for beta chain variable domain of TCR clone 57790 (TRBV19, TRBJ2-7)
CASTVQGRPYEQYF

SEQ ID NO: 115581 - protein, 15 aa, Homo sapiens
  CDR3 for alpha chain variable domain of TCR clone 57791 (TRAV3, TRAJ29)
CAVRDINSGKTPLVF

SEQ ID NO: 115582 - protein, 16 aa, Homo sapiens
  CDR3 for beta chain variable domain of TCR clone 57791 (TRBV4-1, TRBJ2-5)
CASSQTFYGDQETQYF

SEQ ID NO: 115583 - protein, 18 aa, Homo sapiens
  CDR3 for alpha chain variable domain of TCR clone 57792 (TRAV29/DV5, TRAJ52)
CTAGFRGAGGTSYGKLTF

SEQ ID NO: 115584 - protein, 16 aa, Homo sapiens
  CDR3 for beta chain variable domain of TCR clone 57792 (TRBV7-3, TRBJ2-2)
CASSLKRGTLSGELFF

SEQ ID NO: 115585 - protein, 13 aa, Homo sapiens
  CDR3 for alpha chain variable domain of TCR clone 57793 (TRAV2, TRAJ36)
CAVDQTGANNLFF

SEQ ID NO: 115586 - protein, 12 aa, Homo sapiens
  CDR3 for beta chain variable domain of TCR clone 57793 (TRBV19, TRBJ1-1)
CASMNRYTEALF

SEQ ID NO: 115587 - protein, 13 aa, Homo sapiens
  CDR3 for alpha chain variable domain of TCR clone 57794 (TRAV35, TRAJ21)
CAGQLSNFNKFYF

SEQ ID NO: 115588 - protein, 11 aa, Homo sapiens
  CDR3 for beta chain variable domain of TCR clone 57794 (TRBV7-6, TRBJ2-5)
CAGSSQETQYF

SEQ ID NO: 115589 - protein, 12 aa, Homo sapiens
  CDR3 for alpha chain variable domain of TCR clone 57795 (TRAV13-1, TRAJ15)
CAASQAGTALIF

SEQ ID NO: 115590 - protein, 18 aa, Homo sapiens
  CDR3 for beta chain variable domain of TCR clone 57795 (TRBV7-9, TRBJ2-3)
CASSLPINGQISTNTQYF

SEQ ID NO: 115591 - protein, 20 aa, Homo sapiens
  CDR3 for alpha chain variable domain of TCR clone 57796 (TRAV4, TRAJ18)
PERHCCVLLIGGSTLGRLYF

SEQ ID NO: 115592 - protein, 12 aa, Homo sapiens
  CDR3 for beta chain variable domain of TCR clone 57796 (TRBV6-3, TRBJ2-7)
CASSLTPYEQYF

SEQ ID NO: 115593 - protein, 14 aa, Homo sapiens
  CDR3 for alpha chain variable domain of TCR clone 57797 (TRAV9-2, TRAJ53)
CALFSGGSNYKLTF

SEQ ID NO: 115594 - protein, 13 aa, Homo sapiens
  CDR3 for beta chain variable domain of TCR clone 57797 (TRBV7-9, TRBJ1-2)
CASSLKQNYGYTF

SEQ ID NO: 115595 - protein, 13 aa, Homo sapiens
  CDR3 for alpha chain variable domain of TCR clone 57798 (TRAV20, TRAJ37)
CAGCSSTTGKLIF

SEQ ID NO: 115596 - protein, 11 aa, Homo sapiens
  CDR3 for beta chain variable domain of TCR clone 57798 (TRBV12-4, TRBJ2-3)
CASTATDTQYF

SEQ ID NO: 115597 - protein, 14 aa, Homo sapiens
  CDR3 for alpha chain variable domain of TCR clone 57799 (TRAV13-1, TRAJ45)
CASTSGGGADGLTF

SEQ ID NO: 115598 - protein, 15 aa, Homo sapiens
  CDR3 for beta chain variable domain of TCR clone 57799 (TRBV27, TRBJ1-4)
CASSAQQDLNEKLFF

SEQ ID NO: 115599 - protein, 16 aa, Homo sapiens
  CDR3 for alpha chain variable domain of TCR clone 57800 (TRAV12-3, TRAJ53)
CAMSPGSGGSNYKLTF

SEQ ID NO: 115600 - protein, 12 aa, Homo sapiens
  CDR3 for beta chain variable domain of TCR clone 57800 (TRBV7-8, TRBJ2-7)
CASSLGEREQYF

SEQ ID NO: 115601 - protein, 14 aa, Homo sapiens
  CDR3 for alpha chain variable domain of TCR clone 57801 (TRAV1-2, TRAJ16)
CAVNRFSDGQKLLF

SEQ ID NO: 115602 - protein, 12 aa, Homo sapiens
  CDR3 for beta chain variable domain of TCR clone 57801 (TRBV28, TRBJ2-6)
CANQAGANVLTF

SEQ ID NO: 115603 - protein, 14 aa, Homo sapiens
  CDR3 for alpha chain variable domain of TCR clone 57802 (TRAV1-2, TRAJ16)
CAVNRFSDGQKPLF

SEQ ID NO: 115604 - protein, 13 aa, Homo sapiens
  CDR3 for beta chain variable domain of TCR clone 57802 (TRBV4-2, TRBJ1-1)
CASSQAGNTEAFF

SEQ ID NO: 115605 - protein, 12 aa, Homo sapiens
  CDR3 for alpha chain variable domain of TCR clone 57803 (TRAV2, TRAJ9)
CAVGTGGFKTIF

SEQ ID NO: 115606 - protein, 16 aa, Homo sapiens
  CDR3 for beta chain variable domain of TCR clone 57803 (TRBV13, TRBJ2-2)
CASSPRTGEHTGELFF

SEQ ID NO: 115607 - protein, 11 aa, Homo sapiens
  CDR3 for alpha chain variable domain of TCR clone 57804 (TRAV13-1, TRAJ6)
CATLGSYIPTF

SEQ ID NO: 115608 - protein, 13 aa, Homo sapiens
  CDR3 for beta chain variable domain of TCR clone 57804 (TRBV6-6, TRBJ2-1)
CASSLHQGDEQFF

SEQ ID NO: 115609 - protein, 15 aa, Homo sapiens
  CDR3 for alpha chain variable domain of TCR clone 57805 (TRAV2, TRAJ15)
CAVEDRGQAGTALVF

SEQ ID NO: 115610 - protein, 17 aa, Homo sapiens
  CDR3 for beta chain variable domain of TCR clone 57805 (TRBV20-1, TRBJ2-3)
CSARGTGGPTGTDTQYF

SEQ ID NO: 115611 - protein, 10 aa, Homo sapiens
  CDR3 for alpha chain variable domain of TCR clone 57806 (TRAV13-1, TRAJ8)
CAAPFQKLVL

SEQ ID NO: 115612 - protein, 20 aa, Homo sapiens
  CDR3 for beta chain variable domain of TCR clone 57806 (TRBV3-1, TRBJ2-6)
CASSTRPGLEGGAGANVLTF

SEQ ID NO: 115613 - protein, 12 aa, Homo sapiens
  CDR3 for alpha chain variable domain of TCR clone 57807 (TRAV29/DV5, TRAJ49)
CAATDTGNQFYF

SEQ ID NO: 115614 - protein, 14 aa, Homo sapiens
  CDR3 for beta chain variable domain of TCR clone 57807 (TRBV19, TRBJ2-1)
CASPTFVLSGEQFF

SEQ ID NO: 115615 - protein, 17 aa, Homo sapiens
  CDR3 for alpha chain variable domain of TCR clone 57808 (TRAV3, TRAJ6)
CAVRDGPRAGGSYIPTF

SEQ ID NO: 115616 - protein, 15 aa, Homo sapiens
  CDR3 for beta chain variable domain of TCR clone 57808 (TRBV5-1, TRBJ1-1)
CASSSTTGTNTEAFF

SEQ ID NO: 115617 - protein, 13 aa, Homo sapiens
  CDR3 for alpha chain variable domain of TCR clone 57809 (TRAV2, TRAJ47)
CAVDREYGNELVF

SEQ ID NO: 115618 - protein, 17 aa, Homo sapiens
  CDR3 for beta chain variable domain of TCR clone 57809 (TRBV15, TRBJ1-5)
CATSRVKGIYSNQPQHF

SEQ ID NO: 115619 - protein, 13 aa, Homo sapiens
  CDR3 for alpha chain variable domain of TCR clone 57810 (TRAV13-1, TRAJ49)
CAAIWALGNQFYF

SEQ ID NO: 115620 - protein, 14 aa, Homo sapiens
  CDR3 for beta chain variable domain of TCR clone 57810 (TRBV7-3, TRBJ2-1)
CASSLAGGTNEQFF

SEQ ID NO: 115621 - protein, 13 aa, Homo sapiens
  CDR3 for alpha chain variable domain of TCR clone 57811 (TRAV8-1, TRAJ23)
CAVTGCREESLSS

SEQ ID NO: 115622 - protein, 14 aa, Homo sapiens
  CDR3 for beta chain variable domain of TCR clone 57811 (TRBV20-1, TRBJ1-1)
CSAQTRIGGTEAFF

SEQ ID NO: 115623 - protein, 17 aa, Homo sapiens
  CDR3 for alpha chain variable domain of TCR clone 57812 (TRAV26-1, TRAJ37)
CIVRVITVSSNTGKLIF

SEQ ID NO: 115624 - protein, 11 aa, Homo sapiens
  CDR3 for beta chain variable domain of TCR clone 57812 (TRBV29-1, TRBJ2-5)
CSENRTGTQYF

SEQ ID NO: 115625 - protein, 11 aa, Homo sapiens
  CDR3 for alpha chain variable domain of TCR clone 57813 (TRAV17, TRAJ49)
CATNTGSQFYF

SEQ ID NO: 115626 - protein, 12 aa, Homo sapiens
  CDR3 for beta chain variable domain of TCR clone 57813 (TRBV2, TRBJ2-7)
CASSGGSGIPYF

SEQ ID NO: 115627 - protein, 14 aa, Homo sapiens
  CDR3 for alpha chain variable domain of TCR clone 57814 (TRAV23/DV6, TRAJ37)
CAASTSSNTGKLIF

SEQ ID NO: 115628 - protein, 12 aa, Homo sapiens
  CDR3 for beta chain variable domain of TCR clone 57814 (TRBV7-7, TRBJ1-1)
CQQLGANTEAFF

SEQ ID NO: 115629 - protein, 18 aa, Homo sapiens
  CDR3 for alpha chain variable domain of TCR clone 57815 (TRAV12-3, TRAJ52)
CAMSVGGAGGTSYGKLTF

SEQ ID NO: 115630 - protein, 15 aa, Homo sapiens
  CDR3 for beta chain variable domain of TCR clone 57815 (TRBV27, TRBJ1-6)
CASSFDRGLGSPLDF

SEQ ID NO: 115631 - protein, 15 aa, Homo sapiens
  CDR3 for alpha chain variable domain of TCR clone 57816 (TRAV4, TRAJ39)
CLVGPNNNASNMLTF

SEQ ID NO: 115632 - protein, 13 aa, Homo sapiens
  CDR3 for beta chain variable domain of TCR clone 57816 (TRBV11-2, TRBJ2-5)
CASSSTGEETQYF

SEQ ID NO: 115633 - protein, 12 aa, Homo sapiens
  CDR3 for alpha chain variable domain of TCR clone 57817 (TRAV12-3, TRAJ17)
CAMTPTGNKLTF

SEQ ID NO: 115634 - protein, 13 aa, Homo sapiens
  CDR3 for beta chain variable domain of TCR clone 57817 (TRBV12-4, TRBJ1-1)
CASSPGTGFEAFF

SEQ ID NO: 115635 - protein, 13 aa, Homo sapiens
  CDR3 for alpha chain variable domain of TCR clone 57818 (TRAV13-1, TRAJ7)
CAMSASGNNRLAF

SEQ ID NO: 115636 - protein, 14 aa, Homo sapiens
  CDR3 for beta chain variable domain of TCR clone 57818 (TRBV13, TRBJ2-5)
CASSLGPRGETQYF

SEQ ID NO: 115637 - protein, 13 aa, Homo sapiens
  CDR3 for alpha chain variable domain of TCR clone 57819 (TRAV12-1, TRAJ31)
CVVIQNNNARLMF

SEQ ID NO: 115638 - protein, 15 aa, Homo sapiens
  CDR3 for beta chain variable domain of TCR clone 57819 (TRBV6-3, TRBJ2-7)
CASSSPGTVFYEQYF

SEQ ID NO: 115639 - protein, 14 aa, Homo sapiens
  CDR3 for alpha chain variable domain of TCR clone 57820 (TRAV23/DV6, TRAJ8)
CAASKNTGFQKLVF

SEQ ID NO: 115640 - protein, 16 aa, Homo sapiens
  CDR3 for beta chain variable domain of TCR clone 57820 (TRBV4-1, TRBJ2-6)
CASSQVGDHGANVLTF

SEQ ID NO: 115641 - protein, 14 aa, Homo sapiens
  CDR3 for alpha chain variable domain of TCR clone 57821 (TRAV1-2, TRAJ16)
CAVNRFSDGQKLLF

SEQ ID NO: 115642 - protein, 20 aa, Homo sapiens
  CDR3 for beta chain variable domain of TCR clone 57821 (TRBV19, TRBJ2-1)
CASSISRTVTSTRLNNEQFF

SEQ ID NO: 115643 - protein, 14 aa, Homo sapiens
  CDR3 for alpha chain variable domain of TCR clone 57822 (TRAV8-4, TRAJ9)
CAVRINTGGFKTSF

SEQ ID NO: 115644 - protein, 15 aa, Homo sapiens
  CDR3 for beta chain variable domain of TCR clone 57822 (TRBV10-2, TRBJ2-6)
CASSEQGTGANVLTF

SEQ ID NO: 115645 - protein, 12 aa, Homo sapiens
  CDR3 for alpha chain variable domain of TCR clone 57823 (TRAV35, TRAJ31)
CAAASNNARLMF

SEQ ID NO: 115646 - protein, 14 aa, Homo sapiens
  CDR3 for beta chain variable domain of TCR clone 57823 (TRBV2, TRBJ2-2)
CASSLSGGNGELFF

SEQ ID NO: 115647 - protein, 14 aa, Homo sapiens
  CDR3 for alpha chain variable domain of TCR clone 57824 (TRAV8-2, TRAJ23)
CVVSDDNQGGKLIF

SEQ ID NO: 115648 - protein, 16 aa, Homo sapiens
  CDR3 for beta chain variable domain of TCR clone 57824 (TRBV4-2, TRBJ2-5)
CASSRELVGSQETQYF

SEQ ID NO: 115649 - protein, 15 aa, Homo sapiens
  CDR3 for alpha chain variable domain of TCR clone 57825 (TRAV12-3, TRAJ6)
CAMSATTGGSYIPTF

SEQ ID NO: 115650 - protein, 14 aa, Homo sapiens
  CDR3 for beta chain variable domain of TCR clone 57825 (TRBV7-2, TRBJ2-5)
CQQRDTSGSRDQYF

SEQ ID NO: 115651 - protein, 11 aa, Homo sapiens
  CDR3 for alpha chain variable domain of TCR clone 57826 (TRAV13-1, TRAJ6)
CATLGSYILTF

SEQ ID NO: 115652 - protein, 12 aa, Homo sapiens
  CDR3 for beta chain variable domain of TCR clone 57826 (TRBV11-2, TRBJ2-1)
CASSPGNNEQFF

SEQ ID NO: 115653 - protein, 14 aa, Homo sapiens
  CDR3 for alpha chain variable domain of TCR clone 57827 (TRAV12-2, TRAJ40)
CAVKIPSGTYKYIF

SEQ ID NO: 115654 - protein, 13 aa, Homo sapiens
  CDR3 for beta chain variable domain of TCR clone 57827 (TRBV11-2, TRBJ2-5)
CASSFSSQETQYF

SEQ ID NO: 115655 - protein, 14 aa, Homo sapiens
  CDR3 for alpha chain variable domain of TCR clone 57828 (TRAV17, TRAJ22)
CATSPSGSARQLTF

SEQ ID NO: 115656 - protein, 14 aa, Homo sapiens
  CDR3 for beta chain variable domain of TCR clone 57828 (TRBV7-6, TRBJ2-3)
CASSLGTVTDTQYF

SEQ ID NO: 115657 - protein, 14 aa, Homo sapiens
  CDR3 for alpha chain variable domain of TCR clone 57829 (TRAV12-2, TRAJ15)
CAPHTGQAGTALIF

SEQ ID NO: 115658 - protein, 14 aa, Homo sapiens
  CDR3 for beta chain variable domain of TCR clone 57829 (TRBV12-4, TRBJ1-1)
CGSSLGTGGTEAFF

SEQ ID NO: 115659 - protein, 12 aa, Homo sapiens
  CDR3 for alpha chain variable domain of TCR clone 57830 (TRAV13-1, TRAJ27)
CAAQTNAGKSTF

SEQ ID NO: 115660 - protein, 14 aa, Homo sapiens
  CDR3 for beta chain variable domain of TCR clone 57830 (TRBV19, TRBJ2-2)
CASSGQGIAGELFF

SEQ ID NO: 115661 - protein, 12 aa, Homo sapiens
  CDR3 for alpha chain variable domain of TCR clone 57831 (TRAV12-3, TRAJ17)
CAMTLTGNRLTF

SEQ ID NO: 115662 - protein, 15 aa, Homo sapiens
  CDR3 for beta chain variable domain of TCR clone 57831 (TRBV20-1, TRBJ2-7)
CSARNRVSGMDEQYF

SEQ ID NO: 115663 - protein, 11 aa, Homo sapiens
  CDR3 for alpha chain variable domain of TCR clone 57832 (TRAV3, TRAJ21)
CAVGNFNKFYF

SEQ ID NO: 115664 - protein, 14 aa, Homo sapiens
  CDR3 for beta chain variable domain of TCR clone 57832 (TRBV11-2, TRBJ2-5)
CASSRTGGIETQYF

SEQ ID NO: 115665 - protein, 14 aa, Homo sapiens
  CDR3 for alpha chain variable domain of TCR clone 57833 (TRAV12-2, TRAJ40)
CAVKIPSGTYKYIF

SEQ ID NO: 115666 - protein, 16 aa, Homo sapiens
  CDR3 for beta chain variable domain of TCR clone 57833 (TRBV7-8, TRBJ2-3)
CASSTEGQRETDTQYF

SEQ ID NO: 115667 - protein, 11 aa, Homo sapiens
  CDR3 for alpha chain variable domain of TCR clone 57834 (TRAV1-2, TRAJ40)
CAVPGTYKYIF

SEQ ID NO: 115668 - protein, 15 aa, Homo sapiens
  CDR3 for beta chain variable domain of TCR clone 57834 (TRBV7-9, TRBJ2-7)
CASSIALAEAYEQYF

SEQ ID NO: 115669 - protein, 15 aa, Homo sapiens
  CDR3 for alpha chain variable domain of TCR clone 57835 (TRAV13-1, TRAJ43)
CAASGGFGAGTRLTV

SEQ ID NO: 115670 - protein, 12 aa, Homo sapiens
  CDR3 for beta chain variable domain of TCR clone 57835 (TRBV3-1, TRBJ2-5)
CASSQRGETQYF

SEQ ID NO: 115671 - protein, 10 aa, Homo sapiens
  CDR3 for alpha chain variable domain of TCR clone 57836 (TRAV23/DV6, TRAJ3)
CAATTFALGG

SEQ ID NO: 115672 - protein, 15 aa, Homo sapiens
  CDR3 for beta chain variable domain of TCR clone 57836 (TRBV19, TRBJ1-6)
CASSTRGAVGSPLHF

SEQ ID NO: 115673 - protein, 14 aa, Homo sapiens
  CDR3 for alpha chain variable domain of TCR clone 57837 (TRAV13-1, TRAJ35)
CAASKGGFGNVLHC

SEQ ID NO: 115674 - protein, 13 aa, Homo sapiens
  CDR3 for beta chain variable domain of TCR clone 57837 (TRBV7-3, TRBJ1-1)
CASSQDWGAKALF

SEQ ID NO: 115675 - protein, 12 aa, Homo sapiens
  CDR3 for alpha chain variable domain of TCR clone 57838 (TRAV12-2, TRAJ7)
CAHGRGEQQTRF

SEQ ID NO: 115676 - protein, 17 aa, Homo sapiens
  CDR3 for beta chain variable domain of TCR clone 57838 (TRBV11-2, TRBJ2-1)
CASSLYPPGVEYNEQFF

SEQ ID NO: 115677 - protein, 16 aa, Homo sapiens
  CDR3 for alpha chain variable domain of TCR clone 57839 (TRAV22, TRAJ48)
CAVIWGSNFGNEKLTF

SEQ ID NO: 115678 - protein, 18 aa, Homo sapiens
  CDR3 for beta chain variable domain of TCR clone 57839 (TRBV7-2, TRBJ2-3)
CASSLRRADPPCTDTQYF

SEQ ID NO: 115679 - protein, 12 aa, Homo sapiens
  CDR3 for alpha chain variable domain of TCR clone 57840 (TRAV3, TRAJ31)
CAAQRANAILMF

SEQ ID NO: 115680 - protein, 16 aa, Homo sapiens
  CDR3 for beta chain variable domain of TCR clone 57840 (TRBV4-2, TRBJ1-1)
CASSPSPGRAAPEAFF

SEQ ID NO: 115681 - protein, 13 aa, Homo sapiens
  CDR3 for alpha chain variable domain of TCR clone 57841 (TRAV20, TRAJ21)
WAVEGYNFNKFYF

SEQ ID NO: 115682 - protein, 15 aa, Homo sapiens
  CDR3 for beta chain variable domain of TCR clone 57841 (TRBV11-3, TRBJ2-3)
CASLKDGREGDTQYF

SEQ ID NO: 115683 - protein, 15 aa, Homo sapiens
  CDR3 for alpha chain variable domain of TCR clone 57842 (TRAV17, TRAJ10)
CATDASGGGGNNLTF

SEQ ID NO: 115684 - protein, 14 aa, Homo sapiens
  CDR3 for beta chain variable domain of TCR clone 57842 (TRBV20-1, TRBJ2-5)
CSVPYRGRAETQYF

SEQ ID NO: 115685 - protein, 13 aa, Homo sapiens
  CDR3 for alpha chain variable domain of TCR clone 57843 (TRAV3, TRAJ27)
CAVRPLGAGISTF

SEQ ID NO: 115686 - protein, 13 aa, Homo sapiens
  CDR3 for beta chain variable domain of TCR clone 57843 (TRBV7-9, TRBJ2-3)
CASSPGSTDTQYF

SEQ ID NO: 115687 - protein, 13 aa, Homo sapiens
  CDR3 for alpha chain variable domain of TCR clone 57844 (TRAV20, TRAJ48)
CAVRLFGNEKLTF

SEQ ID NO: 115688 - protein, 15 aa, Homo sapiens
  CDR3 for beta chain variable domain of TCR clone 57844 (TRBV6-5, TRBJ2-6)
CASSQWEAGANVLTF

SEQ ID NO: 115689 - protein, 12 aa, Homo sapiens
  CDR3 for alpha chain variable domain of TCR clone 57845 (TRAV13-1, TRAJ49)
CAAPTTGNQFYF

SEQ ID NO: 115690 - protein, 17 aa, Homo sapiens
  CDR3 for beta chain variable domain of TCR clone 57845 (TRBV25-1, TRBJ2-7)
CASSDARVVFSSYEQYF

SEQ ID NO: 115691 - protein, 14 aa, Homo sapiens
  CDR3 for alpha chain variable domain of TCR clone 57846 (TRAV34, TRAJ44)
CGADGTGTASKLTF

SEQ ID NO: 115692 - protein, 14 aa, Homo sapiens
  CDR3 for beta chain variable domain of TCR clone 57846 (TRBV6-1, TRBJ1-3)
CASVQGGGGNTIYF

SEQ ID NO: 115693 - protein, 12 aa, Homo sapiens
  CDR3 for alpha chain variable domain of TCR clone 57847 (TRAV13-1, TRAJ21)
CAAKEGFNKFYF

SEQ ID NO: 115694 - protein, 13 aa, Homo sapiens
  CDR3 for beta chain variable domain of TCR clone 57847 (TRBV19, TRBJ2-7)
CASSARQSYEQYF

SEQ ID NO: 115695 - protein, 12 aa, Homo sapiens
  CDR3 for alpha chain variable domain of TCR clone 57848 (TRAV3, TRAJ39)
CAVIDWSNMLTF

SEQ ID NO: 115696 - protein, 14 aa, Homo sapiens
  CDR3 for beta chain variable domain of TCR clone 57848 (TRBV7-8, TRBJ2-3)
CASSFPDGQDTQYF

SEQ ID NO: 115697 - protein, 14 aa, Homo sapiens
  CDR3 for alpha chain variable domain of TCR clone 57849 (TRAV8-3, TRAJ39)
CAVGANNVGNMLTF

SEQ ID NO: 115698 - protein, 12 aa, Homo sapiens
  CDR3 for beta chain variable domain of TCR clone 57849 (TRBV28, TRBJ1-3)
CASVSSGNTIYF

SEQ ID NO: 115699 - protein, 12 aa, Homo sapiens
  CDR3 for alpha chain variable domain of TCR clone 57850 (TRAV1-2, TRAJ26)
CAVSPYGQNFVF

SEQ ID NO: 115700 - protein, 14 aa, Homo sapiens
  CDR3 for beta chain variable domain of TCR clone 57850 (TRBV5-1, TRBJ2-7)
CASSCASGVNEQYF

SEQ ID NO: 115701 - protein, 12 aa, Homo sapiens
  CDR3 for alpha chain variable domain of TCR clone 57851 (TRAV29/DV5, TRAJ15)
CASNQAGTALIF

SEQ ID NO: 115702 - protein, 15 aa, Homo sapiens
  CDR3 for beta chain variable domain of TCR clone 57851 (TRBV11-2, TRBJ2-2)
CASSPDRVNAGELFF

SEQ ID NO: 115703 - protein, 16 aa, Homo sapiens
  CDR3 for alpha chain variable domain of TCR clone 57852 (TRAV8-3, TRAJ44)
CAVGTLMTGTASKLTF

SEQ ID NO: 115704 - protein, 13 aa, Homo sapiens
  CDR3 for beta chain variable domain of TCR clone 57852 (TRBV11-2, TRBJ2-1)
CASSVRLTHEQFF

SEQ ID NO: 115705 - protein, 14 aa, Homo sapiens
  CDR3 for alpha chain variable domain of TCR clone 57853 (TRAV26-1, TRAJ34)
CIVRVAYNTDKLIF

SEQ ID NO: 115706 - protein, 15 aa, Homo sapiens
  CDR3 for beta chain variable domain of TCR clone 57853 (TRBV20-1, TRBJ2-7)
CSARVPSAYFYEQYF

SEQ ID NO: 115707 - protein, 12 aa, Homo sapiens
  CDR3 for alpha chain variable domain of TCR clone 57854 (TRAV35, TRAJ49)
CAGWSTGNQFYF

SEQ ID NO: 115708 - protein, 16 aa, Homo sapiens
  CDR3 for beta chain variable domain of TCR clone 57854 (TRBV5-1, TRBJ2-2)
CASSLWDTTNTGELFF

SEQ ID NO: 115709 - protein, 14 aa, Homo sapiens
  CDR3 for alpha chain variable domain of TCR clone 57855 (TRAV1-2, TRAJ16)
CAVNRFSDGQKLLF

SEQ ID NO: 115710 - protein, 16 aa, Homo sapiens
  CDR3 for beta chain variable domain of TCR clone 57855 (TRBV19, TRBJ2-1)
CASSRAGPSSYNEQFF

SEQ ID NO: 115711 - protein, 13 aa, Homo sapiens
  CDR3 for alpha chain variable domain of TCR clone 57856 (TRAV8-1, TRAJ41)
CAVNPGSGYALNF

SEQ ID NO: 115712 - protein, 14 aa, Homo sapiens
  CDR3 for beta chain variable domain of TCR clone 57856 (TRBV6-5, TRBJ1-2)
CASTRGGGSDGYTF

SEQ ID NO: 115713 - protein, 14 aa, Homo sapiens
  CDR3 for alpha chain variable domain of TCR clone 57857 (TRAV13-2, TRAJ9)
CAENPETGGFKTIF

SEQ ID NO: 115714 - protein, 16 aa, Homo sapiens
  CDR3 for beta chain variable domain of TCR clone 57857 (TRBV28, TRBJ2-5)
CASSFSPAGGWETQYF

SEQ ID NO: 115715 - protein, 15 aa, Homo sapiens
  CDR3 for alpha chain variable domain of TCR clone 57858 (TRAV12-2, TRAJ43)
CAFDMRFGAGTRLTV

SEQ ID NO: 115716 - protein, 18 aa, Homo sapiens
  CDR3 for beta chain variable domain of TCR clone 57858 (TRBV14, TRBJ2-3)
CASSQDRGVPQIRSILAQ

SEQ ID NO: 115717 - protein, 10 aa, Homo sapiens
  CDR3 for alpha chain variable domain of TCR clone 57859 (TRAV1-2, TRAJ20)
CACNDYKLSF

SEQ ID NO: 115718 - protein, 16 aa, Homo sapiens
  CDR3 for beta chain variable domain of TCR clone 57859 (TRBV20-1, TRBJ2-1)
CSARDLKQGMNNERFF

SEQ ID NO: 115719 - protein, 15 aa, Homo sapiens
  CDR3 for alpha chain variable domain of TCR clone 57860 (TRAV4, TRAJ39)
CLVGPNTNAGNMLTF

SEQ ID NO: 115720 - protein, 13 aa, Homo sapiens
  CDR3 for beta chain variable domain of TCR clone 57860 (TRBV11-2, TRBJ2-5)
CASSSTGEETQYF

SEQ ID NO: 115721 - protein, 15 aa, Homo sapiens
  CDR3 for alpha chain variable domain of TCR clone 57861 (TRAV17, TRAJ23)
CATDAEDNQGGKLIF

SEQ ID NO: 115722 - protein, 15 aa, Homo sapiens
  CDR3 for beta chain variable domain of TCR clone 57861 (TRBV6-5, TRBJ2-1)
CASSYDAGAGNEQFF

SEQ ID NO: 115723 - protein, 14 aa, Homo sapiens
  CDR3 for alpha chain variable domain of TCR clone 57862 (TRAV8-2, TRAJ4)
CVVSPSGGYNKLIF

SEQ ID NO: 115724 - protein, 14 aa, Homo sapiens
  CDR3 for beta chain variable domain of TCR clone 57862 (TRBV4-1, TRBJ1-4)
RSSDTGGTNEKLFF

SEQ ID NO: 115725 - protein, 17 aa, Homo sapiens
  CDR3 for alpha chain variable domain of TCR clone 57863 (TRAV36/DV7, TRAJ42)
CAGGGMNYGGSQGNLIF

SEQ ID NO: 115726 - protein, 16 aa, Homo sapiens
  CDR3 for beta chain variable domain of TCR clone 57863 (TRBV6-1, TRBJ2-1)
CASILRQGSSYNEQFF

SEQ ID NO: 115727 - protein, 15 aa, Homo sapiens
  CDR3 for alpha chain variable domain of TCR clone 57864 (TRAV26-1, TRAJ29)
CIVRVEGSGNTPLVF

SEQ ID NO: 115728 - protein, 13 aa, Homo sapiens
  CDR3 for beta chain variable domain of TCR clone 57864 (TRBV18, TRBJ2-5)
CQLTWGVQETQYF

SEQ ID NO: 115729 - protein, 14 aa, Homo sapiens
  CDR3 for alpha chain variable domain of TCR clone 57865 (TRAV38-1, TRAJ45)
CAYYSGEGADGLTF

SEQ ID NO: 115730 - protein, 20 aa, Homo sapiens
  CDR3 for beta chain variable domain of TCR clone 57865 (TRBV28, TRBJ2-1)
CASTPIGRSPGLAGGNEQFF

SEQ ID NO: 115731 - protein, 15 aa, Homo sapiens
  CDR3 for alpha chain variable domain of TCR clone 57866 (TRAV12-3, TRAJ27)
CAMRAHNTNAGKSTF

SEQ ID NO: 115732 - protein, 13 aa, Homo sapiens
  CDR3 for beta chain variable domain of TCR clone 57866 (TRBV11-2, TRBJ2-5)
CASSRGPSETQYF

SEQ ID NO: 115733 - protein, 14 aa, Homo sapiens
  CDR3 for alpha chain variable domain of TCR clone 57867 (TRAV13-1, TRAJ10)
CAAKEPGGGDKLTF

SEQ ID NO: 115734 - protein, 15 aa, Homo sapiens
  CDR3 for beta chain variable domain of TCR clone 57867 (TRBV27, TRBJ2-1)
CASSNGGGSSNEQFF

SEQ ID NO: 115735 - protein, 14 aa, Homo sapiens
  CDR3 for alpha chain variable domain of TCR clone 57868 (TRAV16, TRAJ32)
CALKSGGATNKLIF

SEQ ID NO: 115736 - protein, 13 aa, Homo sapiens
  CDR3 for beta chain variable domain of TCR clone 57868 (TRBV15, TRBJ1-6)
CATSGGPNSPLHF

SEQ ID NO: 115737 - protein, 15 aa, Homo sapiens
  CDR3 for alpha chain variable domain of TCR clone 57869 (TRAV26-1, TRAJ29)
CIVRVEGSGNTPLVF

SEQ ID NO: 115738 - protein, 15 aa, Homo sapiens
  CDR3 for beta chain variable domain of TCR clone 57869 (TRBV12-4, TRBJ1-1)
CQQQDRVVASTEAFF

SEQ ID NO: 115739 - protein, 15 aa, Homo sapiens
  CDR3 for alpha chain variable domain of TCR clone 57870 (TRAV1-2, TRAJ35)
CAVRDPGGFGNVLHC

SEQ ID NO: 115740 - protein, 14 aa, Homo sapiens
  CDR3 for beta chain variable domain of TCR clone 57870 (TRBV5-1, TRBJ2-1)
CASSLDDRFDEQFS

SEQ ID NO: 115741 - protein, 16 aa, Homo sapiens
  CDR3 for alpha chain variable domain of TCR clone 57871 (TRAV3, TRAJ21)
CAVRDRSASTNFTSDL

SEQ ID NO: 115742 - protein, 16 aa, Homo sapiens
  CDR3 for beta chain variable domain of TCR clone 57871 (TRBV7-2, TRBJ2-5)
CASSLESAGGRETQYF

SEQ ID NO: 115743 - protein, 12 aa, Homo sapiens
  CDR3 for alpha chain variable domain of TCR clone 57872 (TRAV2, TRAJ9)
CAVGAGGFKTIF

SEQ ID NO: 115744 - protein, 14 aa, Homo sapiens
  CDR3 for beta chain variable domain of TCR clone 57872 (TRBV19, TRBJ1-2)
CASSIGAGSYGYTF

SEQ ID NO: 115745 - protein, 14 aa, Homo sapiens
  CDR3 for alpha chain variable domain of TCR clone 57873 (TRAV38-1, TRAJ29)
CAFITPSGNTPLVF

SEQ ID NO: 115746 - protein, 15 aa, Homo sapiens
  CDR3 for beta chain variable domain of TCR clone 57873 (TRBV7-8, TRBJ1-1)
CASSRGQGGDTEAFF

SEQ ID NO: 115747 - protein, 14 aa, Homo sapiens
  CDR3 for alpha chain variable domain of TCR clone 57874 (TRAV12-2, TRAJ9)
CAVNALEGGFKTIF

SEQ ID NO: 115748 - protein, 15 aa, Homo sapiens
  CDR3 for beta chain variable domain of TCR clone 57874 (TRBV7-8, TRBJ2-1)
CASSLADSLYNEQFF

SEQ ID NO: 115749 - protein, 15 aa, Homo sapiens
  CDR3 for alpha chain variable domain of TCR clone 57875 (TRAV38-1, TRAJ28)
CAFIRSGAGSYQLTF

SEQ ID NO: 115750 - protein, 13 aa, Homo sapiens
  CDR3 for beta chain variable domain of TCR clone 57875 (TRBV19, TRBJ1-2)
CASSVPGQDGYTF

SEQ ID NO: 115751 - protein, 16 aa, Homo sapiens
  CDR3 for alpha chain variable domain of TCR clone 57876 (TRAV12-2, TRAJ28)
CAVITDSGAGRYQLTF

SEQ ID NO: 115752 - protein, 14 aa, Homo sapiens
  CDR3 for beta chain variable domain of TCR clone 57876 (TRBV25-1, TRBJ1-1)
CASTHLGGNTEAFF

SEQ ID NO: 115753 - protein, 13 aa, Homo sapiens
  CDR3 for alpha chain variable domain of TCR clone 57877 (TRAV8-3, TRAJ28)
CAVGAVGSYPLTF

SEQ ID NO: 115754 - protein, 14 aa, Homo sapiens
  CDR3 for beta chain variable domain of TCR clone 57877 (TRBV7-2, TRBJ2-7)
CASRSQGAAYEQYF

SEQ ID NO: 115755 - protein, 12 aa, Homo sapiens
  CDR3 for alpha chain variable domain of TCR clone 57878 (TRAV1-1, TRAJ23)
CAVTNQGGKLIF

SEQ ID NO: 115756 - protein, 16 aa, Homo sapiens
  CDR3 for beta chain variable domain of TCR clone 57878 (TRBV19, TRBJ2-2)
CASRSPGTGATGELFF

SEQ ID NO: 115757 - protein, 13 aa, Homo sapiens
  CDR3 for alpha chain variable domain of TCR clone 57879 (TRAV25, TRAJ23)
CAGVNNQGGKLIF

SEQ ID NO: 115758 - protein, 16 aa, Homo sapiens
  CDR3 for beta chain variable domain of TCR clone 57879 (TRBV20-1, TRBJ1-4)
CSAPGQGLLTNEKLFF

SEQ ID NO: 115759 - protein, 15 aa, Homo sapiens
  CDR3 for alpha chain variable domain of TCR clone 57880 (TRAV29/DV5, TRAJ29)
CAASERSSGNTPLVL

SEQ ID NO: 115760 - protein, 17 aa, Homo sapiens
  CDR3 for beta chain variable domain of TCR clone 57880 (TRBV4-1, TRBJ1-4)
CASSQEGPRGVEEKLFF

SEQ ID NO: 115761 - protein, 15 aa, Homo sapiens
  CDR3 for alpha chain variable domain of TCR clone 57881 (TRAV23/DV6, TRAJ13)
CAAWPGGGGYQKVTF

SEQ ID NO: 115762 - protein, 15 aa, Homo sapiens
  CDR3 for beta chain variable domain of TCR clone 57881 (TRBV20-1, TRBJ1-1)
CSASRGVTGNTEAFF

SEQ ID NO: 115763 - protein, 19 aa, Homo sapiens
  CDR3 for alpha chain variable domain of TCR clone 57882 (TRAV1-2, TRAJ26)
CLLPLCCERPDNYVQNFVF

SEQ ID NO: 115764 - protein, 15 aa, Homo sapiens
  CDR3 for beta chain variable domain of TCR clone 57882 (TRBV9, TRBJ1-6)
CASSVAGTGDSPLHF

SEQ ID NO: 115765 - protein, 15 aa, Homo sapiens
  CDR3 for alpha chain variable domain of TCR clone 57883 (TRAV17, TRAJ57)
CATGPSQGGSKKLVF

SEQ ID NO: 115766 - protein, 12 aa, Homo sapiens
  CDR3 for beta chain variable domain of TCR clone 57883 (TRBV28, TRBJ2-3)
CASSLYRDTQYF

SEQ ID NO: 115767 - protein, 13 aa, Homo sapiens
  CDR3 for alpha chain variable domain of TCR clone 57884 (TRAV12-1, TRAJ13)
CVVTSGGYQKVTF

SEQ ID NO: 115768 - protein, 14 aa, Homo sapiens
  CDR3 for beta chain variable domain of TCR clone 57884 (TRBV27, TRBJ2-7)
CASSLAGLSHEQYF

SEQ ID NO: 115769 - protein, 13 aa, Homo sapiens
  CDR3 for alpha chain variable domain of TCR clone 57885 (TRAV1-2, TRAJ9)
CAALNTGGFKTIF

SEQ ID NO: 115770 - protein, 12 aa, Homo sapiens
  CDR3 for beta chain variable domain of TCR clone 57885 (TRBV29-1, TRBJ2-3)
CSVTGGADTQYF

SEQ ID NO: 115771 - protein, 17 aa, Homo sapiens
  CDR3 for alpha chain variable domain of TCR clone 57886 (TRAV6, TRAJ3)
CALDRPTGYSSASKIIF

SEQ ID NO: 115772 - protein, 14 aa, Homo sapiens
  CDR3 for beta chain variable domain of TCR clone 57886 (TRBV12-4, TRBJ1-2)
CASSPLGTVGGYTF

SEQ ID NO: 115773 - protein, 13 aa, Homo sapiens
  CDR3 for alpha chain variable domain of TCR clone 57887 (TRAV21, TRAJ57)
CAVIEGGSEKLFF

SEQ ID NO: 115774 - protein, 15 aa, Homo sapiens
  CDR3 for beta chain variable domain of TCR clone 57887 (TRBV10-3, TRBJ2-5)
CAISEFGRGQETQYF

SEQ ID NO: 115775 - protein, 14 aa, Homo sapiens
  CDR3 for alpha chain variable domain of TCR clone 57888 (TRAV35, TRAJ46)
CAGPQKSSGDKLTF

SEQ ID NO: 115776 - protein, 12 aa, Homo sapiens
  CDR3 for beta chain variable domain of TCR clone 57888 (TRBV19, TRBJ2-1)
CASSMQDTEKFF

SEQ ID NO: 115777 - protein, 12 aa, Homo sapiens
  CDR3 for alpha chain variable domain of TCR clone 57889 (TRAV21, TRAJ29)
CAVTSGNTPLVF

SEQ ID NO: 115778 - protein, 15 aa, Homo sapiens
  CDR3 for beta chain variable domain of TCR clone 57889 (TRBV12-4, TRBJ1-2)
CASRLGVAGNYGYTS

SEQ ID NO: 115779 - protein, 13 aa, Homo sapiens
  CDR3 for alpha chain variable domain of TCR clone 57890 (TRAV12-3, TRAJ33)
CAMSLNSNYQLIW

SEQ ID NO: 115780 - protein, 13 aa, Homo sapiens
  CDR3 for beta chain variable domain of TCR clone 57890 (TRBV7-2, TRBJ2-2)
CASSVAVTGELFF

SEQ ID NO: 115781 - protein, 14 aa, Homo sapiens
  CDR3 for alpha chain variable domain of TCR clone 57891 (TRAV2, TRAJ9)
CAVEDLSGGFKTIF

SEQ ID NO: 115782 - protein, 14 aa, Homo sapiens
  CDR3 for beta chain variable domain of TCR clone 57891 (TRBV28, TRBJ2-7)
CASTFYGRAHEQYF

SEQ ID NO: 115783 - protein, 13 aa, Homo sapiens
  CDR3 for alpha chain variable domain of TCR clone 57892 (TRAV12-2, TRAJ4)
CAGFSGGYNKPIF

SEQ ID NO: 115784 - protein, 14 aa, Homo sapiens
  CDR3 for beta chain variable domain of TCR clone 57892 (TRBV24-1, TRBJ1-1)
CATSIPRGDTEAFF

SEQ ID NO: 115785 - protein, 14 aa, Homo sapiens
  CDR3 for alpha chain variable domain of TCR clone 57893 (TRAV1-2, TRAJ13)
CAVREDTGFQKLVF

SEQ ID NO: 115786 - protein, 16 aa, Homo sapiens
  CDR3 for beta chain variable domain of TCR clone 57893 (TRBV12-5, TRBJ2-5)
CASGPRTSGNQETQYF

SEQ ID NO: 115787 - protein, 19 aa, Homo sapiens
  CDR3 for alpha chain variable domain of TCR clone 57894 (TRAV8-4, TRAJ3)
CAVTGENLVQQCFQDNLWL

SEQ ID NO: 115788 - protein, 16 aa, Homo sapiens
  CDR3 for beta chain variable domain of TCR clone 57894 (TRBV4-2, TRBJ1-1)
CASSQAGFGMNTEAFF

SEQ ID NO: 115789 - protein, 23 aa, Homo sapiens
  CDR3 for alpha chain variable domain of TCR clone 57895 (TRAV26-1, TRAJ38)
CIADNAGNNHIQNPDPAVYQLSN

SEQ ID NO: 115790 - protein, 13 aa, Homo sapiens
  CDR3 for beta chain variable domain of TCR clone 57895 (TRBV20-1, TRBJ1-1)
CSARGGGNTEAFF

SEQ ID NO: 115791 - protein, 12 aa, Homo sapiens
  CDR3 for alpha chain variable domain of TCR clone 57896 (TRAV2, TRAJ33)
CAVWGSNCQLIW

SEQ ID NO: 115792 - protein, 16 aa, Homo sapiens
  CDR3 for beta chain variable domain of TCR clone 57896 (TRBV20-1, TRBJ1-4)
CSAPGQGLLTNEKLFF

SEQ ID NO: 115793 - protein, 16 aa, Homo sapiens
  CDR3 for alpha chain variable domain of TCR clone 57897 (TRAV21, TRAJ37)
CAVRTAGSSNTCKLIF

SEQ ID NO: 115794 - protein, 13 aa, Homo sapiens
  CDR3 for beta chain variable domain of TCR clone 57897 (TRBV7-9, TRBJ2-5)
CASLPSGRETQYF

SEQ ID NO: 115795 - protein, 14 aa, Homo sapiens
  CDR3 for alpha chain variable domain of TCR clone 57898 (TRAV20, TRAJ22)
CAVAWGGSARQLTF

SEQ ID NO: 115796 - protein, 15 aa, Homo sapiens
  CDR3 for beta chain variable domain of TCR clone 57898 (TRBV7-2, TRBJ1-1)
CASSFAGDRDTEAFF

SEQ ID NO: 115797 - protein, 16 aa, Homo sapiens
  CDR3 for alpha chain variable domain of TCR clone 57899 (TRAV13-1, TRAJ48)
CAASIFGSFGNEKLTF

SEQ ID NO: 115798 - protein, 16 aa, Homo sapiens
  CDR3 for beta chain variable domain of TCR clone 57899 (TRBV7-2, TRBJ2-6)
CASSERRASGANVLTF

SEQ ID NO: 115799 - protein, 13 aa, Homo sapiens
  CDR3 for alpha chain variable domain of TCR clone 57900 (TRAV8-3, TRAJ20)
CAVGRPNGYKLSF

SEQ ID NO: 115800 - protein, 14 aa, Homo sapiens
  CDR3 for beta chain variable domain of TCR clone 57900 (TRBV12-5, TRBJ2-5)
CASGSRTHQETQYF

SEQ ID NO: 115801 - protein, 13 aa, Homo sapiens
  CDR3 for alpha chain variable domain of TCR clone 57901 (TRAV39, TRAJ58)
CAGAETSGSRLTF

SEQ ID NO: 115802 - protein, 13 aa, Homo sapiens
  CDR3 for beta chain variable domain of TCR clone 57901 (TRBV15, TRBJ2-7)
CATSTTGHYEQYF

SEQ ID NO: 115803 - protein, 10 aa, Homo sapiens
  CDR3 for alpha chain variable domain of TCR clone 57902 (TRAV12-1, TRAJ37)
ARGNTGELIF

SEQ ID NO: 115804 - protein, 15 aa, Homo sapiens
  CDR3 for beta chain variable domain of TCR clone 57902 (TRBV7-2, TRBJ2-3)
CASNLEQGGTDTQYF

SEQ ID NO: 115805 - protein, 15 aa, Homo sapiens
  CDR3 for alpha chain variable domain of TCR clone 57903 (TRAV35, TRAJ40)
CAGQLGTSGTYKYIF

SEQ ID NO: 115806 - protein, 14 aa, Homo sapiens
  CDR3 for beta chain variable domain of TCR clone 57903 (TRBV23-1, TRBJ2-7)
CASILLRDRARAVL

SEQ ID NO: 115807 - protein, 11 aa, Homo sapiens
  CDR3 for alpha chain variable domain of TCR clone 57904 (TRAV2, TRAJ33)
CAVDSNYQLIW

SEQ ID NO: 115808 - protein, 12 aa, Homo sapiens
  CDR3 for beta chain variable domain of TCR clone 57904 (TRBV11-2, TRBJ2-2)
CASSLGGGELFS

SEQ ID NO: 115809 - protein, 14 aa, Homo sapiens
  CDR3 for alpha chain variable domain of TCR clone 57905 (TRAV12-2, TRAJ17)
CAALFKAAGNKLTF

SEQ ID NO: 115810 - protein, 13 aa, Homo sapiens
  CDR3 for beta chain variable domain of TCR clone 57905 (TRBV19, TRBJ1-2)
CASSVPGQDGYTF

SEQ ID NO: 115811 - protein, 12 aa, Homo sapiens
  CDR3 for alpha chain variable domain of TCR clone 57906 (TRAV3, TRAJ20)
CAVRAGDYKLSF

SEQ ID NO: 115812 - protein, 13 aa, Homo sapiens
  CDR3 for beta chain variable domain of TCR clone 57906 (TRBV9, TRBJ2-1)
CASSVGQGGEQFF

SEQ ID NO: 115813 - protein, 19 aa, Homo sapiens
  CDR3 for alpha chain variable domain of TCR clone 57907 (TRAV26-1, TRAJ22)
CCVLSHRWVFSGSARQLTF

SEQ ID NO: 115814 - protein, 19 aa, Homo sapiens
  CDR3 for beta chain variable domain of TCR clone 57907 (TRBV19, TRBJ2-5)
CASSIGQVTDFFLGETQYF

SEQ ID NO: 115815 - protein, 16 aa, Homo sapiens
  CDR3 for alpha chain variable domain of TCR clone 57908 (TRAV14/DV4, TRAJ54)
CAMREGRVQGAQKLVF

SEQ ID NO: 115816 - protein, 15 aa, Homo sapiens
  CDR3 for beta chain variable domain of TCR clone 57908 (TRBV7-2, TRBJ2-1)
CASTHGTGIYNEQFF

SEQ ID NO: 115817 - protein, 17 aa, Homo sapiens
  CDR3 for alpha chain variable domain of TCR clone 57909 (TRAV26-1, TRAJ53)
CIVRVDDSGGSNYKLTF

SEQ ID NO: 115818 - protein, 15 aa, Homo sapiens
  CDR3 for beta chain variable domain of TCR clone 57909 (TRBV20-1, TRBJ2-7)
CSVRVPAAYFYEQYF

SEQ ID NO: 115819 - protein, 14 aa, Homo sapiens
  CDR3 for alpha chain variable domain of TCR clone 57910 (TRAV13-1, TRAJ35)
CAASKGGFGNVLHC

SEQ ID NO: 115820 - protein, 14 aa, Homo sapiens
  CDR3 for beta chain variable domain of TCR clone 57910 (TRBV7-7, TRBJ2-2)
CASSMGQNTGELFF

SEQ ID NO: 115821 - protein, 14 aa, Homo sapiens
  CDR3 for alpha chain variable domain of TCR clone 57911 (TRAV27, TRAJ13)
CRSSNSGGYQKVTF

SEQ ID NO: 115822 - protein, 15 aa, Homo sapiens
  CDR3 for beta chain variable domain of TCR clone 57911 (TRBV7-2, TRBJ2-3)
CASSSTGLETDTQYF

SEQ ID NO: 115823 - protein, 16 aa, Homo sapiens
  CDR3 for alpha chain variable domain of TCR clone 57912 (TRAV30, TRAJ24)
CGTEIVDADSWGKFQF

SEQ ID NO: 115824 - protein, 10 aa, Homo sapiens
  CDR3 for beta chain variable domain of TCR clone 57912 (TRBV7-3, TRBJ2-2)
CASKANGANT

SEQ ID NO: 115825 - protein, 15 aa, Homo sapiens
  CDR3 for alpha chain variable domain of TCR clone 57913 (TRAV12-3, TRAJ42)
CAMSGHGGSQGNLIF

SEQ ID NO: 115826 - protein, 14 aa, Homo sapiens
  CDR3 for beta chain variable domain of TCR clone 57913 (TRBV7-2, TRBJ2-7)
CASSTKTSFYEQYF

SEQ ID NO: 115827 - protein, 18 aa, Homo sapiens
  CDR3 for alpha chain variable domain of TCR clone 57914 (TRAV12-3, TRAJ52)
FAMSRTNAGGTSYGKLTF

SEQ ID NO: 115828 - protein, 17 aa, Homo sapiens
  CDR3 for beta chain variable domain of TCR clone 57914 (TRBV7-3, TRBJ2-3)
CASSLMKRMRGADTQYF

SEQ ID NO: 115829 - protein, 13 aa, Homo sapiens
  CDR3 for alpha chain variable domain of TCR clone 57915 (TRAV35, TRAJ42)
CAGFPGSQGNLIF

SEQ ID NO: 115830 - protein, 14 aa, Homo sapiens
  CDR3 for beta chain variable domain of TCR clone 57915 (TRBV19, TRBJ2-1)
CASPTFVLSCEQFF

SEQ ID NO: 115831 - protein, 14 aa, Homo sapiens
  CDR3 for alpha chain variable domain of TCR clone 57916 (TRAV21, TRAJ52)
PSPAGGTSYGKLTF

SEQ ID NO: 115832 - protein, 17 aa, Homo sapiens
  CDR3 for beta chain variable domain of TCR clone 57916 (TRBV13, TRBJ2-3)
CASSLSRVAGGRNTQYF

SEQ ID NO: 115833 - protein, 12 aa, Homo sapiens
  CDR3 for alpha chain variable domain of TCR clone 57917 (TRAV16, TRAJ10)
CSRTGGGNKLTF

SEQ ID NO: 115834 - protein, 15 aa, Homo sapiens
  CDR3 for beta chain variable domain of TCR clone 57917 (TRBV6-3, TRBJ2-7)
CASSSPGTVFYKQYF

SEQ ID NO: 115835 - protein, 15 aa, Homo sapiens
  CDR3 for alpha chain variable domain of TCR clone 57918 (TRAV2, TRAJ24)
CAVVRLKNSWGKLQF

SEQ ID NO: 115836 - protein, 15 aa, Homo sapiens
  CDR3 for beta chain variable domain of TCR clone 57918 (TRBV11-2, TRBJ2-1)
CASSLTSGGYNEQFF

SEQ ID NO: 115837 - protein, 16 aa, Homo sapiens
  CDR3 for alpha chain variable domain of TCR clone 57919 (TRAV3, TRAJ10)
CAVRDMRAGGGNKLTF

SEQ ID NO: 115838 - protein, 19 aa, Homo sapiens
  CDR3 for beta chain variable domain of TCR clone 57919 (TRBV6-3, TRBJ1-2)
CASSYSKGRTGPPNYCYTF

SEQ ID NO: 115839 - protein, 15 aa, Homo sapiens
  CDR3 for alpha chain variable domain of TCR clone 57920 (TRAV21, TRAJ24)
CAARSSTDSWGKLQF

SEQ ID NO: 115840 - protein, 13 aa, Homo sapiens
  CDR3 for beta chain variable domain of TCR clone 57920 (TRBV11-2, TRBJ2-5)
SASSSTGEETQYF

SEQ ID NO: 115841 - protein, 12 aa, Homo sapiens
  CDR3 for alpha chain variable domain of TCR clone 57921 (TRAV27, TRAJ33)
CAGDGSNYQLIW

SEQ ID NO: 115842 - protein, 14 aa, Homo sapiens
  CDR3 for beta chain variable domain of TCR clone 57921 (TRBV13, TRBJ2-5)
CASSLGRGQETQYF

SEQ ID NO: 115843 - protein, 11 aa, Homo sapiens
  CDR3 for alpha chain variable domain of TCR clone 57922 (TRAV2, TRAJ33)
CAVDSNYQLIW

SEQ ID NO: 115844 - protein, 16 aa, Homo sapiens
  CDR3 for beta chain variable domain of TCR clone 57922 (TRBV2, TRBJ2-1)
CASSVGGSLSYNEQFF

SEQ ID NO: 115845 - protein, 12 aa, Homo sapiens
  CDR3 for alpha chain variable domain of TCR clone 57923 (TRAV12-3, TRAJ31)
CAMSVPNARPMF

SEQ ID NO: 115846 - protein, 12 aa, Homo sapiens
  CDR3 for beta chain variable domain of TCR clone 57923 (TRBV11-2, TRBJ2-1)
CASSVQREGQFF

SEQ ID NO: 115847 - protein, 17 aa, Homo sapiens
  CDR3 for alpha chain variable domain of TCR clone 57924 (TRAV3, TRAJ42)
CAVRDRDYGGSQGNLIF

SEQ ID NO: 115848 - protein, 13 aa, Homo sapiens
  CDR3 for beta chain variable domain of TCR clone 57924 (TRBV12-4, TRBJ1-1)
CASSLGGTTEAFF

SEQ ID NO: 115849 - protein, 12 aa, Homo sapiens
  CDR3 for alpha chain variable domain of TCR clone 57925 (TRAV1-1, TRAJ43)
CAPRVSSNDMRF

SEQ ID NO: 115850 - protein, 17 aa, Homo sapiens
  CDR3 for beta chain variable domain of TCR clone 57925 (TRBV5-1, TRBJ2-7)
CASSLGTLQPTSSTSGR

SEQ ID NO: 115851 - protein, 13 aa, Homo sapiens
  CDR3 for alpha chain variable domain of TCR clone 57926 (TRAV12-1, TRAJ26)
CVVRRNYCQNFVF

SEQ ID NO: 115852 - protein, 15 aa, Homo sapiens
  CDR3 for beta chain variable domain of TCR clone 57926 (TRBV28, TRBJ2-1)
CASSIIAGGRSEQFF

SEQ ID NO: 115853 - protein, 17 aa, Homo sapiens
  CDR3 for alpha chain variable domain of TCR clone 57927 (TRAV35, TRAJ47)
GLLDCRTHTEYGNKLVF

SEQ ID NO: 115854 - protein, 11 aa, Homo sapiens
  CDR3 for beta chain variable domain of TCR clone 57927 (TRBV29-1, TRBJ1-1)
CSIEVGTRTFF

SEQ ID NO: 115855 - protein, 13 aa, Homo sapiens
  CDR3 for alpha chain variable domain of TCR clone 57928 (TRAV3, TRAJ15)
CAVRDQAGTAPIF

SEQ ID NO: 115856 - protein, 13 aa, Homo sapiens
  CDR3 for beta chain variable domain of TCR clone 57928 (TRBV2, TRBJ2-7)
CASSVGGSGEQYF

SEQ ID NO: 115857 - protein, 11 aa, Homo sapiens
  CDR3 for alpha chain variable domain of TCR clone 57929 (TRAV12-3, TRAJ43)
CAMSVSNDMRF

SEQ ID NO: 115858 - protein, 12 aa, Homo sapiens
  CDR3 for beta chain variable domain of TCR clone 57929 (TRBV11-2, TRBJ2-1)
CASSPGNNEQFF

SEQ ID NO: 115859 - protein, 16 aa, Homo sapiens
  CDR3 for alpha chain variable domain of TCR clone 57930 (TRAV35, TRAJ28)
CAGQRYSGAGSYQLTF

SEQ ID NO: 115860 - protein, 13 aa, Homo sapiens
  CDR3 for beta chain variable domain of TCR clone 57930 (TRBV19, TRBJ1-2)
CASGQGQVYGYTF

SEQ ID NO: 115861 - protein, 14 aa, Homo sapiens
  CDR3 for alpha chain variable domain of TCR clone 57931 (TRAV8-4, TRAJ13)
CAVTLSGGYQKVTF

SEQ ID NO: 115862 - protein, 14 aa, Homo sapiens
  CDR3 for beta chain variable domain of TCR clone 57931 (TRBV7-2, TRBJ1-2)
CASSQTGLTYGYTF

SEQ ID NO: 115863 - protein, 14 aa, Homo sapiens
  CDR3 for alpha chain variable domain of TCR clone 57932 (TRAV1-2, TRAJ8)
CAVREDTGFQKLVF

SEQ ID NO: 115864 - protein, 13 aa, Homo sapiens
  CDR3 for beta chain variable domain of TCR clone 57932 (TRBV27, TRBJ2-1)
CASRTLGVGEQFF

SEQ ID NO: 115865 - protein, 16 aa, Homo sapiens
  CDR3 for alpha chain variable domain of TCR clone 57933 (TRAV3, TRAJ37)
CAVRGKGSDNTGKLIF

SEQ ID NO: 115866 - protein, 13 aa, Homo sapiens
  CDR3 for beta chain variable domain of TCR clone 57933 (TRBV14, TRBJ2-7)
CASSQDRRYEQYF

SEQ ID NO: 115867 - protein, 13 aa, Homo sapiens
  CDR3 for alpha chain variable domain of TCR clone 57934 (TRAV9-2, TRAJ53)
CALSGGRNYKLTF

SEQ ID NO: 115868 - protein, 17 aa, Homo sapiens
  CDR3 for beta chain variable domain of TCR clone 57934 (TRBV11-2, TRBJ2-1)
CASSLYPPGVEYNEQFF

SEQ ID NO: 115869 - protein, 10 aa, Homo sapiens
  CDR3 for alpha chain variable domain of TCR clone 57935 (TRAV23/DV6, TRAJ43)
CAVAVAALEQ

SEQ ID NO: 115870 - protein, 16 aa, Homo sapiens
  CDR3 for beta chain variable domain of TCR clone 57935 (TRBV18, TRBJ1-2)
CASSPPERVTIYGYTF

SEQ ID NO: 115871 - protein, 14 aa, Homo sapiens
  CDR3 for alpha chain variable domain of TCR clone 57936 (TRAV14/DV4, TRAJ54)
CAMREAPGAQKLVF

SEQ ID NO: 115872 - protein, 15 aa, Homo sapiens
  CDR3 for beta chain variable domain of TCR clone 57936 (TRBV7-2, TRBJ2-2)
CASRRPGQNTGEQFF

SEQ ID NO: 115873 - protein, 14 aa, Homo sapiens
  CDR3 for alpha chain variable domain of TCR clone 57937 (TRAV8-3, TRAJ4)
CAVGASGGYNKLIF

SEQ ID NO: 115874 - protein, 16 aa, Homo sapiens
  CDR3 for beta chain variable domain of TCR clone 57937 (TRBV4-3, TRBJ2-2)
CASSHRQGSGTGELFF

SEQ ID NO: 115875 - protein, 19 aa, Homo sapiens
  CDR3 for alpha chain variable domain of TCR clone 57938 (TRAV13-1, TRAJ52)
CAASPYQNAGGTSYGKLTF

SEQ ID NO: 115876 - protein, 17 aa, Homo sapiens
  CDR3 for beta chain variable domain of TCR clone 57938 (TRBV13, TRBJ2-3)
CASSLSRVAGGRNTQYF

SEQ ID NO: 115877 - protein, 11 aa, Homo sapiens
  CDR3 for alpha chain variable domain of TCR clone 57939 (TRAV21, TRAJ48)
CAVDGNEKSTF

SEQ ID NO: 115878 - protein, 16 aa, Homo sapiens
  CDR3 for beta chain variable domain of TCR clone 57939 (TRBV12-4, TRBJ1-5)
CASSSGPRGSNQPQHF

SEQ ID NO: 115879 - protein, 16 aa, Homo sapiens
  CDR3 for alpha chain variable domain of TCR clone 57940 (TRAV14/DV4, TRAJ15)
CAMREGPAQAGTALSF

SEQ ID NO: 115880 - protein, 12 aa, Homo sapiens
  CDR3 for beta chain variable domain of TCR clone 57940 (TRBV28, TRBJ2-6)
CAIQAGANVLTF

SEQ ID NO: 115881 - protein, 14 aa, Homo sapiens
  CDR3 for alpha chain variable domain of TCR clone 57941 (TRAV29/DV5, TRAJ45)
CAASFRGGADGLTF

SEQ ID NO: 115882 - protein, 15 aa, Homo sapiens
  CDR3 for beta chain variable domain of TCR clone 57941 (TRBV11-2, TRBJ2-1)
CASSLTSGGYNEQFF

SEQ ID NO: 115883 - protein, 14 aa, Homo sapiens
  CDR3 for alpha chain variable domain of TCR clone 57942 (TRAV1-2, TRAJ8)
CAVREDTGFQKLVF

SEQ ID NO: 115884 - protein, 13 aa, Homo sapiens
  CDR3 for beta chain variable domain of TCR clone 57942 (TRBV24-1, TRBJ2-1)
CATSAGPYNEQFF

SEQ ID NO: 115885 - protein, 13 aa, Homo sapiens
  CDR3 for alpha chain variable domain of TCR clone 57943 (TRAV2, TRAJ24)
YAVSTDSWGKLQF

SEQ ID NO: 115886 - protein, 14 aa, Homo sapiens
  CDR3 for beta chain variable domain of TCR clone 57943 (TRBV13, TRBJ2-5)
CASSLGTAQETQYF

SEQ ID NO: 115887 - protein, 12 aa, Homo sapiens
  CDR3 for alpha chain variable domain of TCR clone 57944 (TRAV25, TRAJ31)
CAGHLNNARLMF

SEQ ID NO: 115888 - protein, 15 aa, Homo sapiens
  CDR3 for beta chain variable domain of TCR clone 57944 (TRBV27, TRBJ2-7)
CASSFGPASNYEQYF

SEQ ID NO: 115889 - protein, 14 aa, Homo sapiens
  CDR3 for alpha chain variable domain of TCR clone 57945 (TRAV26-1, TRAJ49)
CIVRLTNTGNQLYF

SEQ ID NO: 115890 - protein, 13 aa, Homo sapiens
  CDR3 for beta chain variable domain of TCR clone 57945 (TRBV4-1, TRBJ2-7)
CASSQGQAYEQYF

SEQ ID NO: 115891 - protein, 13 aa, Homo sapiens
  CDR3 for alpha chain variable domain of TCR clone 57946 (TRAV3, TRAJ27)
CAVRPLGAGKSTF

SEQ ID NO: 115892 - protein, 15 aa, Homo sapiens
  CDR3 for beta chain variable domain of TCR clone 57946 (TRBV19, TRBJ1-2)
CASSVGQVLNYGYTF

SEQ ID NO: 115893 - protein, 16 aa, Homo sapiens
  CDR3 for alpha chain variable domain of TCR clone 57947 (TRAV20, TRAJ10)
CAVLRGLTGGGNKLTF

SEQ ID NO: 115894 - protein, 14 aa, Homo sapiens
  CDR3 for beta chain variable domain of TCR clone 57947 (TRBV19, TRBJ1-5)
CAGRAPDSFLSQHF

SEQ ID NO: 115895 - protein, 11 aa, Homo sapiens
  CDR3 for alpha chain variable domain of TCR clone 57948 (TRAV12-1, TRAJ34)
CVVNKGRELIF

SEQ ID NO: 115896 - protein, 12 aa, Homo sapiens
  CDR3 for beta chain variable domain of TCR clone 57948 (TRBV2, TRBJ2-1)
CAYGPPGDEQFF

SEQ ID NO: 115897 - protein, 12 aa, Homo sapiens
  CDR3 for alpha chain variable domain of TCR clone 57949 (TRAV17, TRAJ20)
CATYSNDYKLSF

SEQ ID NO: 115898 - protein, 11 aa, Homo sapiens
  CDR3 for beta chain variable domain of TCR clone 57949 (TRBV4-1, TRBJ2-2)
CASEHTGELLF

SEQ ID NO: 115899 - protein, 11 aa, Homo sapiens
  CDR3 for alpha chain variable domain of TCR clone 57950 (TRAV1-1, TRAJ20)
SAVFNDYKLSF

SEQ ID NO: 115900 - protein, 16 aa, Homo sapiens
  CDR3 for beta chain variable domain of TCR clone 57950 (TRBV29-1, TRBJ2-2)
CSVEKTSEGNTGELFF

SEQ ID NO: 115901 - protein, 13 aa, Homo sapiens
  CDR3 for alpha chain variable domain of TCR clone 57951 (TRAV26-1, TRAJ36)
CIAVRRGANNLFF

SEQ ID NO: 115902 - protein, 19 aa, Homo sapiens
  CDR3 for beta chain variable domain of TCR clone 57951 (TRBV27, TRBJ2-1)
CASSLEILPPGAAGNEQFF

SEQ ID NO: 115903 - protein, 14 aa, Homo sapiens
  CDR3 for alpha chain variable domain of TCR clone 57952 (TRAV1-2, TRAJ8)
CAVREDTGFQKLVF

SEQ ID NO: 115904 - protein, 15 aa, Homo sapiens
  CDR3 for beta chain variable domain of TCR clone 57952 (TRBV12-4, TRBJ2-5)
CAGSPPTGLQETQYF

SEQ ID NO: 115905 - protein, 13 aa, Homo sapiens
  CDR3 for alpha chain variable domain of TCR clone 57953 (TRAV12-1, TRAJ7)
CVVNMRGNNRLAF

SEQ ID NO: 115906 - protein, 15 aa, Homo sapiens
  CDR3 for beta chain variable domain of TCR clone 57953 (TRBV27, TRBJ2-3)
CASSLGLAATETQYF

SEQ ID NO: 115907 - protein, 15 aa, Homo sapiens
  CDR3 for alpha chain variable domain of TCR clone 57954 (TRAV26-2, TRAJ28)
CILVESGAGSYQLTF

SEQ ID NO: 115908 - protein, 16 aa, Homo sapiens
  CDR3 for beta chain variable domain of TCR clone 57954 (TRBV4-2, TRBJ1-2)
CASSQEIGGASYGYAF

SEQ ID NO: 115909 - protein, 15 aa, Homo sapiens
  CDR3 for alpha chain variable domain of TCR clone 57955 (TRAV8-2, TRAJ40)
CVVLGTTSGTYKYIF

SEQ ID NO: 115910 - protein, 16 aa, Homo sapiens
  CDR3 for beta chain variable domain of TCR clone 57955 (TRBV7-3, TRBJ2-1)
CASSLQGYRSYNEQFF

SEQ ID NO: 115911 - protein, 11 aa, Homo sapiens
  CDR3 for alpha chain variable domain of TCR clone 57956 (TRAV21, TRAJ34)
CAHYNANKLIF

SEQ ID NO: 115912 - protein, 13 aa, Homo sapiens
  CDR3 for beta chain variable domain of TCR clone 57956 (TRBV7-6, TRBJ1-2)
CASSLVADYGYTF

SEQ ID NO: 115913 - protein, 16 aa, Homo sapiens
  CDR3 for alpha chain variable domain of TCR clone 57957 (TRAV3, TRAJ37)
CAVRPHGSGNTGKLIF

SEQ ID NO: 115914 - protein, 14 aa, Homo sapiens
  CDR3 for beta chain variable domain of TCR clone 57957 (TRBV12-4, TRBJ1-1)
CASSLGTGGTEAFF

SEQ ID NO: 115915 - protein, 15 aa, Homo sapiens
  CDR3 for alpha chain variable domain of TCR clone 57958 (TRAV12-3, TRAJ6)
CAMSATTGGSYIPTF

SEQ ID NO: 115916 - protein, 16 aa, Homo sapiens
  CDR3 for beta chain variable domain of TCR clone 57958 (TRBV28, TRBJ2-7)
CASSSGTSGRGYEQYF

SEQ ID NO: 115917 - protein, 15 aa, Homo sapiens
  CDR3 for alpha chain variable domain of TCR clone 57959 (TRAV2, TRAJ15)
YAVEDRGQAGTALIF

SEQ ID NO: 115918 - protein, 13 aa, Homo sapiens
  CDR3 for beta chain variable domain of TCR clone 57959 (TRBV10-2, TRBJ2-7)
CASGASGGYEQYF

SEQ ID NO: 115919 - protein, 12 aa, Homo sapiens
  CDR3 for alpha chain variable domain of TCR clone 57960 (TRAV8-6, TRAJ36)
CAVSDWLGQTTS

SEQ ID NO: 115920 - protein, 16 aa, Homo sapiens
  CDR3 for beta chain variable domain of TCR clone 57960 (TRBV20-1, TRBJ1-4)
CSAPGQGLLTNEKLFF

SEQ ID NO: 115921 - protein, 16 aa, Homo sapiens
  CDR3 for alpha chain variable domain of TCR clone 57961 (TRAV19, TRAJ39)
CALSEPPNNAGNMLTF

SEQ ID NO: 115922 - protein, 15 aa, Homo sapiens
  CDR3 for beta chain variable domain of TCR clone 57961 (TRBV7-6, TRBJ2-1)
CASSPGQGPYNEQFF

SEQ ID NO: 115923 - protein, 11 aa, Homo sapiens
  CDR3 for alpha chain variable domain of TCR clone 57962 (TRAV17, TRAJ49)
CATNTGNQFYF

SEQ ID NO: 115924 - protein, 12 aa, Homo sapiens
  CDR3 for beta chain variable domain of TCR clone 57962 (TRBV2, TRBJ2-7)
CASSGGCGIPYF

SEQ ID NO: 115925 - protein, 12 aa, Homo sapiens
  CDR3 for alpha chain variable domain of TCR clone 57963 (TRAV17, TRAJ12)
CATLRSSYKLIF

SEQ ID NO: 115926 - protein, 16 aa, Homo sapiens
  CDR3 for beta chain variable domain of TCR clone 57963 (TRBV28, TRBJ2-7)
CTSSLFFETGGPEQYF

SEQ ID NO: 115927 - protein, 16 aa, Homo sapiens
  CDR3 for alpha chain variable domain of TCR clone 57964 (TRAV30, TRAJ24)
CGTEIVDADSWGKFQF

SEQ ID NO: 115928 - protein, 12 aa, Homo sapiens
  CDR3 for beta chain variable domain of TCR clone 57964 (TRBV12-4, TRBJ1-4)
CASSFLSEKLFF

SEQ ID NO: 115929 - protein, 13 aa, Homo sapiens
  CDR3 for alpha chain variable domain of TCR clone 57965 (TRAV12-3, TRAJ7)
CATTPYGNNRLAF

SEQ ID NO: 115930 - protein, 13 aa, Homo sapiens
  CDR3 for beta chain variable domain of TCR clone 57965 (TRBV10-3, TRBJ1-2)
CAINADLNYGYTF

SEQ ID NO: 115931 - protein, 13 aa, Homo sapiens
  CDR3 for alpha chain variable domain of TCR clone 57966 (TRAV8-3, TRAJ36)
CAVGATGANNLFF

SEQ ID NO: 115932 - protein, 13 aa, Homo sapiens
  CDR3 for beta chain variable domain of TCR clone 57966 (TRBV12-4, TRBJ1-2)
CASGLRQGKGYTF

SEQ ID NO: 115933 - protein, 14 aa, Homo sapiens
  CDR3 for alpha chain variable domain of TCR clone 57967 (TRAV35, TRAJ22)
CAGLRPGSARQLTF

SEQ ID NO: 115934 - protein, 17 aa, Homo sapiens
  CDR3 for beta chain variable domain of TCR clone 57967 (TRBV13, TRBJ2-3)
CASSLSRVAGGRNTQYF

SEQ ID NO: 115935 - protein, 14 aa, Homo sapiens
  CDR3 for alpha chain variable domain of TCR clone 57968 (TRAV26-1, TRAJ38)
CIADNAGNNRKLIW

SEQ ID NO: 115936 - protein, 16 aa, Homo sapiens
  CDR3 for beta chain variable domain of TCR clone 57968 (TRBV5-1, TRBJ2-1)
CASSLEGRGLYNEQFF

SEQ ID NO: 115937 - protein, 16 aa, Homo sapiens
  CDR3 for alpha chain variable domain of TCR clone 57969 (TRAV16, TRAJ4)
CALSRMFSGGYNKLIF

SEQ ID NO: 115938 - protein, 13 aa, Homo sapiens
  CDR3 for beta chain variable domain of TCR clone 57969 (TRBV19, TRBJ1-2)
CASSVPGQDGYTF

SEQ ID NO: 115939 - protein, 12 aa, Homo sapiens
  CDR3 for alpha chain variable domain of TCR clone 57970 (TRAV3, TRAJ26)
CAVRDYGQNFVF

SEQ ID NO: 115940 - protein, 14 aa, Homo sapiens
  CDR3 for beta chain variable domain of TCR clone 57970 (TRBV7-9, TRBJ2-5)
CASSLAFGQETQYF

SEQ ID NO: 115941 - protein, 17 aa, Homo sapiens
  CDR3 for alpha chain variable domain of TCR clone 57971 (TRAV21, TRAJ13)
CAVPRSFWGLPESYLWN

SEQ ID NO: 115942 - protein, 15 aa, Homo sapiens
  CDR3 for beta chain variable domain of TCR clone 57971 (TRBV7-9, TRBJ1-6)
CASSSPGRGNSPLHF

SEQ ID NO: 115943 - protein, 16 aa, Homo sapiens
  CDR3 for alpha chain variable domain of TCR clone 57972 (TRAV3, TRAJ3)
CAVRDRAKSSASKIIL

SEQ ID NO: 115944 - protein, 13 aa, Homo sapiens
  CDR3 for beta chain variable domain of TCR clone 57972 (TRBV10-3, TRBJ2-7)
CASKLAVNYEQYF

SEQ ID NO: 115945 - protein, 11 aa, Homo sapiens
  CDR3 for alpha chain variable domain of TCR clone 57973 (TRAV16, TRAJ20)
CALSDGFKAAL

SEQ ID NO: 115946 - protein, 13 aa, Homo sapiens
  CDR3 for beta chain variable domain of TCR clone 57973 (TRBV7-3, TRBJ2-1)
CASSLDSYNEQFF

SEQ ID NO: 115947 - protein, 14 aa, Homo sapiens
  CDR3 for alpha chain variable domain of TCR clone 57974 (TRAV3, TRAJ6)
CAVRDWGGSYIPTF

SEQ ID NO: 115948 - protein, 17 aa, Homo sapiens
  CDR3 for beta chain variable domain of TCR clone 57974 (TRBV6-5, TRBJ2-1)
CASRLSGRFESYSEQFF

SEQ ID NO: 115949 - protein, 12 aa, Homo sapiens
  CDR3 for alpha chain variable domain of TCR clone 57975 (TRAV21, TRAJ11)
CAATSGYSTLTF

SEQ ID NO: 115950 - protein, 15 aa, Homo sapiens
  CDR3 for beta chain variable domain of TCR clone 57975 (TRBV6-1, TRBJ2-3)
CASSERGGITDPQYF

SEQ ID NO: 115951 - protein, 15 aa, Homo sapiens
  CDR3 for alpha chain variable domain of TCR clone 57976 (TRAV12-2, TRAJ43)
CAFDMRFGAGTRLTV

SEQ ID NO: 115952 - protein, 18 aa, Homo sapiens
  CDR3 for beta chain variable domain of TCR clone 57976 (TRBV20-1, TRBJ2-3)
CSASGLAGGPGTTYTQYF

SEQ ID NO: 115953 - protein, 13 aa, Homo sapiens
  CDR3 for alpha chain variable domain of TCR clone 57977 (TRAV8-3, TRAJ43)
CAVGIYNNNDIRF

SEQ ID NO: 115954 - protein, 16 aa, Homo sapiens
  CDR3 for beta chain variable domain of TCR clone 57977 (TRBV7-2, TRBJ2-5)
CASSLVLWTKQETQYF

SEQ ID NO: 115955 - protein, 11 aa, Homo sapiens
  CDR3 for alpha chain variable domain of TCR clone 57978 (TRAV1-2, TRAJ20)
CAVANDYKLSF

SEQ ID NO: 115956 - protein, 14 aa, Homo sapiens
  CDR3 for beta chain variable domain of TCR clone 57978 (TRBV7-9, TRBJ1-1)
CASTPLQSYTEAFL

SEQ ID NO: 115957 - protein, 15 aa, Homo sapiens
  CDR3 for alpha chain variable domain of TCR clone 57979 (TRAV26-1, TRAJ29)
CIVRVEGSGNTPLVF

SEQ ID NO: 115958 - protein, 13 aa, Homo sapiens
  CDR3 for beta chain variable domain of TCR clone 57979 (TRBV7-9, TRBJ2-5)
CASTPVGQETQYF

SEQ ID NO: 115959 - protein, 17 aa, Homo sapiens
  CDR3 for alpha chain variable domain of TCR clone 57980 (TRAV4, TRAJ13)
CLVGVQGSSGGHQKVTF

SEQ ID NO: 115960 - protein, 18 aa, Homo sapiens
  CDR3 for beta chain variable domain of TCR clone 57980 (TRBV15, TRBJ2-3)
CATSRDGARSWDTDTQYF

SEQ ID NO: 115961 - protein, 18 aa, Homo sapiens
  CDR3 for alpha chain variable domain of TCR clone 57981 (TRAV13-1, TRAJ52)
CAASKRSAGGTSYGKLTF

SEQ ID NO: 115962 - protein, 15 aa, Homo sapiens
  CDR3 for beta chain variable domain of TCR clone 57981 (TRBV11-2, TRBJ2-2)
CASSSDRVNAGELFF

SEQ ID NO: 115963 - protein, 14 aa, Homo sapiens
  CDR3 for alpha chain variable domain of TCR clone 57982 (TRAV13-1, TRAJ40)
CAASMTSGTYRYIF

SEQ ID NO: 115964 - protein, 15 aa, Homo sapiens
  CDR3 for beta chain variable domain of TCR clone 57982 (TRBV7-3, TRBJ2-1)
CASSPTGGGEVEQFF

SEQ ID NO: 115965 - protein, 14 aa, Homo sapiens
  CDR3 for alpha chain variable domain of TCR clone 57983 (TRAV8-3, TRAJ21)
CAVDARDNFNKFYF

SEQ ID NO: 115966 - protein, 16 aa, Homo sapiens
  CDR3 for beta chain variable domain of TCR clone 57983 (TRBV20-1, TRBJ2-1)
CSARDLAGHSYNEQFL

SEQ ID NO: 115967 - protein, 14 aa, Homo sapiens
  CDR3 for alpha chain variable domain of TCR clone 57984 (TRAV26-1, TRAJ45)
CIEVTGGGADGLTF

SEQ ID NO: 115968 - protein, 13 aa, Homo sapiens
  CDR3 for beta chain variable domain of TCR clone 57984 (TRBV7-6, TRBJ1-2)
CTSSLVADYGYTF

SEQ ID NO: 115969 - protein, 14 aa, Homo sapiens
  CDR3 for alpha chain variable domain of TCR clone 57985 (TRAV8-3, TRAJ4)
CAVGAAGGYNKLIF

SEQ ID NO: 115970 - protein, 16 aa, Homo sapiens
  CDR3 for beta chain variable domain of TCR clone 57985 (TRBV4-3, TRBJ2-2)
CASSHLQGSGTGELFF

SEQ ID NO: 115971 - protein, 13 aa, Homo sapiens
  CDR3 for alpha chain variable domain of TCR clone 57986 (TRAV16, TRAJ48)
CSPLNFGNEKLTF

SEQ ID NO: 115972 - protein, 11 aa, Homo sapiens
  CDR3 for beta chain variable domain of TCR clone 57986 (TRBV7-9, TRBJ2-3)
CASSPTETQYF

SEQ ID NO: 115973 - protein, 16 aa, Homo sapiens
  CDR3 for alpha chain variable domain of TCR clone 57987 (TRAV30, TRAJ24)
CGTEIVDADSWGKFQF

SEQ ID NO: 115974 - protein, 15 aa, Homo sapiens
  CDR3 for beta chain variable domain of TCR clone 57987 (TRBV7-3, TRBJ2-1)
CASSLSSGSFDEQFF

SEQ ID NO: 115975 - protein, 13 aa, Homo sapiens
  CDR3 for alpha chain variable domain of TCR clone 57988 (TRAV17, TRAJ9)
CDTDYTGGFKTIF

SEQ ID NO: 115976 - protein, 16 aa, Homo sapiens
  CDR3 for beta chain variable domain of TCR clone 57988 (TRBV7-7, TRBJ2-1)
CASSLASGTSYNEQFF

SEQ ID NO: 115977 - protein, 15 aa, Homo sapiens
  CDR3 for alpha chain variable domain of TCR clone 57989 (TRAV8-3, TRAJ23)
CAVGDRYNQGGKLIF

SEQ ID NO: 115978 - protein, 17 aa, Homo sapiens
  CDR3 for beta chain variable domain of TCR clone 57989 (TRBV4-1, TRBJ1-4)
SASSQEGPRGVEEKLFF

SEQ ID NO: 115979 - protein, 15 aa, Homo sapiens
  CDR3 for alpha chain variable domain of TCR clone 57990 (TRAV13-1, TRAJ17)
CAASIERAAGNELTF

SEQ ID NO: 115980 - protein, 12 aa, Homo sapiens
  CDR3 for beta chain variable domain of TCR clone 57990 (TRBV5-7, TRBJ1-1)
CASSLGRGKAFF

SEQ ID NO: 115981 - protein, 15 aa, Homo sapiens
  CDR3 for alpha chain variable domain of TCR clone 57991 (TRAV8-4, TRAJ11)
CAVSRALSGYSPLTF

SEQ ID NO: 115982 - protein, 13 aa, Homo sapiens
  CDR3 for beta chain variable domain of TCR clone 57991 (TRBV10-3, TRBJ2-7)
CASKLAVNYEQYF

SEQ ID NO: 115983 - protein, 15 aa, Homo sapiens
  CDR3 for alpha chain variable domain of TCR clone 57992 (TRAV17, TRAJ37)
CATDHGSSNTGKLIF

SEQ ID NO: 115984 - protein, 14 aa, Homo sapiens
  CDR3 for beta chain variable domain of TCR clone 57992 (TRBV7-2, TRBJ2-3)
CASSWTSGADTQYF

SEQ ID NO: 115985 - protein, 12 aa, Homo sapiens
  CDR3 for alpha chain variable domain of TCR clone 57993 (TRAV12-3, TRAJ20)
CAMVRGDYKLSF

SEQ ID NO: 115986 - protein, 13 aa, Homo sapiens
  CDR3 for beta chain variable domain of TCR clone 57993 (TRBV24-1, TRBJ1-4)
CATNNGRSEKLFF

SEQ ID NO: 115987 - protein, 14 aa, Homo sapiens
  CDR3 for alpha chain variable domain of TCR clone 57994 (TRAV1-2, TRAJ16)
CAVNRFSDGQKLLF

SEQ ID NO: 115988 - protein, 16 aa, Homo sapiens
  CDR3 for beta chain variable domain of TCR clone 57994 (TRBV27, TRBJ2-2)
CASSFRVLVRTGELFF

SEQ ID NO: 115989 - protein, 13 aa, Homo sapiens
  CDR3 for alpha chain variable domain of TCR clone 57995 (TRAV26-2, TRAJ37)
CIRGSSNAGKLIF

SEQ ID NO: 115990 - protein, 16 aa, Homo sapiens
  CDR3 for beta chain variable domain of TCR clone 57995 (TRBV7-2, TRBJ2-5)
CASSPGGARRGETQYF

SEQ ID NO: 115991 - protein, 22 aa, Homo sapiens
  CDR3 for alpha chain variable domain of TCR clone 57996 (TRAV13-1, TRAJ32)
CAASNGWWCYKQAHLWNWHSAC

SEQ ID NO: 115992 - protein, 15 aa, Homo sapiens
  CDR3 for beta chain variable domain of TCR clone 57996 (TRBV20-1, TRBJ1-2)
CSAIRTGAFNYGYTF

SEQ ID NO: 115993 - protein, 13 aa, Homo sapiens
  CDR3 for alpha chain variable domain of TCR clone 57997 (TRAV12-1, TRAJ30)
CVVNTYRGDKIIF

SEQ ID NO: 115994 - protein, 13 aa, Homo sapiens
  CDR3 for beta chain variable domain of TCR clone 57997 (TRBV9, TRBJ1-2)
CASSRLGGGGYTF

SEQ ID NO: 115995 - protein, 12 aa, Homo sapiens
  CDR3 for alpha chain variable domain of TCR clone 57998 (TRAV12-3, TRAJ17)
CAMALTGNKLTF

SEQ ID NO: 115996 - protein, 14 aa, Homo sapiens
  CDR3 for beta chain variable domain of TCR clone 57998 (TRBV7-2, TRBJ1-2)
CASSSQGAHYGYTF

SEQ ID NO: 115997 - protein, 15 aa, Homo sapiens
  CDR3 for alpha chain variable domain of TCR clone 57999 (TRAV27, TRAJ38)
CAARRNAGNNRTLIW

SEQ ID NO: 115998 - protein, 13 aa, Homo sapiens
  CDR3 for beta chain variable domain of TCR clone 57999 (TRBV20-1, TRBJ1-1)
CSARAGGNTEAFF

SEQ ID NO: 115999 - protein, 16 aa, Homo sapiens
  CDR3 for alpha chain variable domain of TCR clone 58000 (TRAV30, TRAJ24)
CGTEIVDADSWGNFQF

SEQ ID NO: 116000 - protein, 12 aa, Homo sapiens
  CDR3 for beta chain variable domain of TCR clone 58000 (TRBV11-2, TRBJ2-2)
CASSLGGGELFF

SEQ ID NO: 116001 - protein, 12 aa, Homo sapiens
  CDR3 for alpha chain variable domain of TCR clone 58001 (TRAV2, TRAJ9)
CAVGAGGFKTIF

SEQ ID NO: 116002 - protein, 13 aa, Homo sapiens
  CDR3 for beta chain variable domain of TCR clone 58001 (TRBV19, TRBJ1-2)
CASSVPGQDGYTF

SEQ ID NO: 116003 - protein, 13 aa, Homo sapiens
  CDR3 for alpha chain variable domain of TCR clone 58002 (TRAV13-1, TRAJ21)
CAASIYNFNKFYF

SEQ ID NO: 116004 - protein, 14 aa, Homo sapiens
  CDR3 for beta chain variable domain of TCR clone 58002 (TRBV11-2, TRBJ1-2)
CASSLGTANYGYTF

SEQ ID NO: 116005 - protein, 15 aa, Homo sapiens
  CDR3 for alpha chain variable domain of TCR clone 58003 (TRAV20, TRAJ52)
CAVQAGGTSYGKLTF

SEQ ID NO: 116006 - protein, 14 aa, Homo sapiens
  CDR3 for beta chain variable domain of TCR clone 58003 (TRBV7-3, TRBJ2-2)
CASSSGGYTGELFF

SEQ ID NO: 116007 - protein, 23 aa, Homo sapiens
  CDR3 for alpha chain variable domain of TCR clone 58004 (TRAV1-1, TRAJ11)
LLQELQMKDSASYFCAGYSTLTF

SEQ ID NO: 116008 - protein, 12 aa, Homo sapiens
  CDR3 for beta chain variable domain of TCR clone 58004 (TRBV11-2, TRBJ2-2)
CASSLGGGELFF

SEQ ID NO: 116009 - protein, 14 aa, Homo sapiens
  CDR3 for alpha chain variable domain of TCR clone 58005 (TRAV20, TRAJ22)
CAVQVSGSARQLTF

SEQ ID NO: 116010 - protein, 13 aa, Homo sapiens
  CDR3 for beta chain variable domain of TCR clone 58005 (TRBV20-1, TRBJ2-5)
CSAREWGKETQYF

SEQ ID NO: 116011 - protein, 17 aa, Homo sapiens
  CDR3 for alpha chain variable domain of TCR clone 58006 (TRAV3, TRAJ42)
CAVRDRDYGGSQGNLIF

SEQ ID NO: 116012 - protein, 16 aa, Homo sapiens
  CDR3 for beta chain variable domain of TCR clone 58006 (TRBV7-3, TRBJ2-2)
CASSLKRGTWSGELFF

SEQ ID NO: 116013 - protein, 14 aa, Homo sapiens
  CDR3 for alpha chain variable domain of TCR clone 58007 (TRAV1-2, TRAJ8)
CAVREDTGFQKLVF

SEQ ID NO: 116014 - protein, 14 aa, Homo sapiens
  CDR3 for beta chain variable domain of TCR clone 58007 (TRBV10-3, TRBJ1-1)
CAISDTDRGVEAFF

SEQ ID NO: 116015 - protein, 13 aa, Homo sapiens
  CDR3 for alpha chain variable domain of TCR clone 58008 (TRAV27, TRAJ57)
CRKHQGGSEKLVF

SEQ ID NO: 116016 - protein, 14 aa, Homo sapiens
  CDR3 for beta chain variable domain of TCR clone 58008 (TRBV28, TRBJ1-5)
CASSRTGLNRPQHF

SEQ ID NO: 116017 - protein, 12 aa, Homo sapiens
  CDR3 for alpha chain variable domain of TCR clone 58009 (TRAV16, TRAJ22)
CALEVSARQLTF

SEQ ID NO: 116018 - protein, 13 aa, Homo sapiens
  CDR3 for beta chain variable domain of TCR clone 58009 (TRBV11-2, TRBJ2-5)
CASSFSSQETQYF

SEQ ID NO: 116019 - protein, 17 aa, Homo sapiens
  CDR3 for alpha chain variable domain of TCR clone 58010 (TRAV3, TRAJ6)
LAVRDGPRAGGSYIPTF

SEQ ID NO: 116020 - protein, 14 aa, Homo sapiens
  CDR3 for beta chain variable domain of TCR clone 58010 (TRBV7-2, TRBJ2-7)
CASSPKTSFYEQYF

SEQ ID NO: 116021 - protein, 16 aa, Homo sapiens
  CDR3 for alpha chain variable domain of TCR clone 58011 (TRAV2, TRAJ4)
CAVEDRFSGSYNKLIF

SEQ ID NO: 116022 - protein, 13 aa, Homo sapiens
  CDR3 for beta chain variable domain of TCR clone 58011 (TRBV7-7, TRBJ2-5)
CASSRSGQETQYF

SEQ ID NO: 116023 - protein, 11 aa, Homo sapiens
  CDR3 for alpha chain variable domain of TCR clone 58012 (TRAV1-1, TRAJ23)
CDVRQGGKLIF

SEQ ID NO: 116024 - protein, 20 aa, Homo sapiens
  CDR3 for beta chain variable domain of TCR clone 58012 (TRBV7-8, TRBJ2-2)
CASSHLFPGPTIHITGELFF

SEQ ID NO: 116025 - protein, 14 aa, Homo sapiens
  CDR3 for alpha chain variable domain of TCR clone 58013 (TRAV12-2, TRAJ6)
CASKWGGGSYIPTF

SEQ ID NO: 116026 - protein, 12 aa, Homo sapiens
  CDR3 for beta chain variable domain of TCR clone 58013 (TRBV20-1, TRBJ1-2)
CSASWQGYGYTF

SEQ ID NO: 116027 - protein, 14 aa, Homo sapiens
  CDR3 for alpha chain variable domain of TCR clone 58014 (TRAV17, TRAJ32)
CATGPGGATNKLIF

SEQ ID NO: 116028 - protein, 14 aa, Homo sapiens
  CDR3 for beta chain variable domain of TCR clone 58014 (TRBV2, TRBJ1-5)
CASSENRGGQPQHF

SEQ ID NO: 116029 - protein, 14 aa, Homo sapiens
  CDR3 for alpha chain variable domain of TCR clone 58015 (TRAV8-1, TRAJ23)
CAVGTYNQGGKLIF

SEQ ID NO: 116030 - protein, 16 aa, Homo sapiens
  CDR3 for beta chain variable domain of TCR clone 58015 (TRBV18, TRBJ1-5)
CASSPSTGNSNQHQHS

SEQ ID NO: 116031 - protein, 14 aa, Homo sapiens
  CDR3 for alpha chain variable domain of TCR clone 58016 (TRAV12-3, TRAJ41)
CAMSAGNSGYALNF

SEQ ID NO: 116032 - protein, 11 aa, Homo sapiens
  CDR3 for beta chain variable domain of TCR clone 58016 (TRBV7-2, TRBJ2-3)
CASNSSDTQYF

SEQ ID NO: 116033 - protein, 14 aa, Homo sapiens
  CDR3 for alpha chain variable domain of TCR clone 58017 (TRAV12-3, TRAJ10)
SHLPLTGGGNKLTF

SEQ ID NO: 116034 - protein, 16 aa, Homo sapiens
  CDR3 for beta chain variable domain of TCR clone 58017 (TRBV7-2, TRBJ1-2)
CASSSNQDRRGHGYTF

SEQ ID NO: 116035 - protein, 14 aa, Homo sapiens
  CDR3 for alpha chain variable domain of TCR clone 58018 (TRAV13-1, TRAJ24)
CAASRTDSWGKLQF

SEQ ID NO: 116036 - protein, 15 aa, Homo sapiens
  CDR3 for beta chain variable domain of TCR clone 58018 (TRBV7-9, TRBJ1-5)
RASSQGHQPNQPQHF

SEQ ID NO: 116037 - protein, 14 aa, Homo sapiens
  CDR3 for alpha chain variable domain of TCR clone 58019 (TRAV16, TRAJ33)
CALSAVDSNYQLIW

SEQ ID NO: 116038 - protein, 14 aa, Homo sapiens
  CDR3 for beta chain variable domain of TCR clone 58019 (TRBV4-2, TRBJ2-1)
CASGLDRAYNEQFF

SEQ ID NO: 116039 - protein, 17 aa, Homo sapiens
  CDR3 for alpha chain variable domain of TCR clone 58020 (TRAV3, TRAJ6)
CAVRDGPRAGGSYIPTF

SEQ ID NO: 116040 - protein, 13 aa, Homo sapiens
  CDR3 for beta chain variable domain of TCR clone 58020 (TRBV2, TRBJ1-1)
CASSEGGNTEAFF

SEQ ID NO: 116041 - protein, 13 aa, Homo sapiens
  CDR3 for alpha chain variable domain of TCR clone 58021 (TRAV3, TRAJ20)
CAVRSLNDYKLSF

SEQ ID NO: 116042 - protein, 13 aa, Homo sapiens
  CDR3 for beta chain variable domain of TCR clone 58021 (TRBV7-3, TRBJ1-1)
CARSQDWGAEAFF

SEQ ID NO: 116043 - protein, 14 aa, Homo sapiens
  CDR3 for alpha chain variable domain of TCR clone 58022 (TRAV1-2, TRAJ8)
RAVREDTGFQKLVF

SEQ ID NO: 116044 - protein, 13 aa, Homo sapiens
  CDR3 for beta chain variable domain of TCR clone 58022 (TRBV12-4, TRBJ1-2)
CASSSGLTVISTF

SEQ ID NO: 116045 - protein, 17 aa, Homo sapiens
  CDR3 for alpha chain variable domain of TCR clone 58023 (TRAV12-2, TRAJ52)
CAVNPYAGGTSYGKLTF

SEQ ID NO: 116046 - protein, 14 aa, Homo sapiens
  CDR3 for beta chain variable domain of TCR clone 58023 (TRBV6-1, TRBJ1-3)
CASVQGGGGNTIYF

SEQ ID NO: 116047 - protein, 12 aa, Homo sapiens
  CDR3 for alpha chain variable domain of TCR clone 58024 (TRAV21, TRAJ31)
CAVWGNDARLMF

SEQ ID NO: 116048 - protein, 16 aa, Homo sapiens
  CDR3 for beta chain variable domain of TCR clone 58024 (TRBV27, TRBJ2-5)
CASSYGPGGQKETQYF

SEQ ID NO: 116049 - protein, 12 aa, Homo sapiens
  CDR3 for alpha chain variable domain of TCR clone 58025 (TRAV12-2, TRAJ10)
WGVTGGGNKLTF

SEQ ID NO: 116050 - protein, 14 aa, Homo sapiens
  CDR3 for beta chain variable domain of TCR clone 58025 (TRBV27, TRBJ2-7)
CASATGTGRREQYF

SEQ ID NO: 116051 - protein, 12 aa, Homo sapiens
  CDR3 for alpha chain variable domain of TCR clone 58026 (TRAV16, TRAJ10)
CSRTGGGSKLTF

SEQ ID NO: 116052 - protein, 15 aa, Homo sapiens
  CDR3 for beta chain variable domain of TCR clone 58026 (TRBV6-3, TRBJ2-7)
CASSSPGAVFYEQYF

SEQ ID NO: 116053 - protein, 10 aa, Homo sapiens
  CDR3 for alpha chain variable domain of TCR clone 58027 (TRAV23/DV6, TRAJ31)
CARGGARLMF

SEQ ID NO: 116054 - protein, 14 aa, Homo sapiens
  CDR3 for beta chain variable domain of TCR clone 58027 (TRBV7-8, TRBJ1-2)
CASSPDSVSYGYTF

SEQ ID NO: 116055 - protein, 11 aa, Homo sapiens
  CDR3 for alpha chain variable domain of TCR clone 58028 (TRAV13-2, TRAJ23)
CAESPRGKLIF

SEQ ID NO: 116056 - protein, 14 aa, Homo sapiens
  CDR3 for beta chain variable domain of TCR clone 58028 (TRBV11-2, TRBJ2-3)
CASSRLARTDTQYF

SEQ ID NO: 116057 - protein, 14 aa, Homo sapiens
  CDR3 for alpha chain variable domain of TCR clone 58029 (TRAV2, TRAJ37)
CAVDFTSNTGKLIF

SEQ ID NO: 116058 - protein, 15 aa, Homo sapiens
  CDR3 for beta chain variable domain of TCR clone 58029 (TRBV20-1, TRBJ1-1)
SSASRGVTGNTEAFF

SEQ ID NO: 116059 - protein, 12 aa, Homo sapiens
  CDR3 for alpha chain variable domain of TCR clone 58030 (TRAV2, TRAJ31)
CAVEDNNARLMF

SEQ ID NO: 116060 - protein, 12 aa, Homo sapiens
  CDR3 for beta chain variable domain of TCR clone 58030 (TRBV28, TRBJ2-3)
CASSLYRDTQYY

SEQ ID NO: 116061 - protein, 16 aa, Homo sapiens
  CDR3 for alpha chain variable domain of TCR clone 58031 (TRAV12-3, TRAJ53)
RAMSPGSGGSNYKLTF

SEQ ID NO: 116062 - protein, 14 aa, Homo sapiens
  CDR3 for beta chain variable domain of TCR clone 58031 (TRBV2, TRBJ2-7)
CASSLTSGGYEQYF

SEQ ID NO: 116063 - protein, 18 aa, Homo sapiens
  CDR3 for alpha chain variable domain of TCR clone 58032 (TRAV21, TRAJ52)
CAVGPSPAGGTSYGKLTF

SEQ ID NO: 116064 - protein, 16 aa, Homo sapiens
  CDR3 for beta chain variable domain of TCR clone 58032 (TRBV7-3, TRBJ2-1)
CASSLEGYRSYNEQFF

SEQ ID NO: 116065 - protein, 13 aa, Homo sapiens
  CDR3 for alpha chain variable domain of TCR clone 58033 (TRAV12-3, TRAJ21)
CAPGPHNFNKFYF

SEQ ID NO: 116066 - protein, 13 aa, Homo sapiens
  CDR3 for beta chain variable domain of TCR clone 58033 (TRBV4-2, TRBJ1-1)
RASSQAGNTEAFF

SEQ ID NO: 116067 - protein, 14 aa, Homo sapiens
  CDR3 for alpha chain variable domain of TCR clone 58034 (TRAV12-3, TRAJ22)
CAMSLFGSAKQLTF

SEQ ID NO: 116068 - protein, 11 aa, Homo sapiens
  CDR3 for beta chain variable domain of TCR clone 58034 (TRBV12-4, TRBJ2-2)
CASSSAGELFF

SEQ ID NO: 116069 - protein, 15 aa, Homo sapiens
  CDR3 for alpha chain variable domain of TCR clone 58035 (TRAV3, TRAJ5)
CAVRDLDTGRRALTF

SEQ ID NO: 116070 - protein, 13 aa, Homo sapiens
  CDR3 for beta chain variable domain of TCR clone 58035 (TRBV12-4, TRBJ2-7)
CASSATETYEQYF

SEQ ID NO: 116071 - protein, 13 aa, Homo sapiens
  CDR3 for alpha chain variable domain of TCR clone 58036 (TRAV20, TRAJ37)
CAGCSSNTGKLIF

SEQ ID NO: 116072 - protein, 12 aa, Homo sapiens
  CDR3 for beta chain variable domain of TCR clone 58036 (TRBV12-4, TRBJ1-3)
CASSFSGNTIYF

SEQ ID NO: 116073 - protein, 13 aa, Homo sapiens
  CDR3 for alpha chain variable domain of TCR clone 58037 (TRAV12-1, TRAJ29)
CVVNGPGNTPLVF

SEQ ID NO: 116074 - protein, 14 aa, Homo sapiens
  CDR3 for beta chain variable domain of TCR clone 58037 (TRBV7-9, TRBJ2-7)
CASSLGTDPNEQYF

SEQ ID NO: 116075 - protein, 12 aa, Homo sapiens
  CDR3 for alpha chain variable domain of TCR clone 58038 (TRAV29/DV5, TRAJ34)
CAARHNTAKLIF

SEQ ID NO: 116076 - protein, 15 aa, Homo sapiens
  CDR3 for beta chain variable domain of TCR clone 58038 (TRBV19, TRBJ2-7)
CASSPAGSGEALRYF

SEQ ID NO: 116077 - protein, 16 aa, Homo sapiens
  CDR3 for alpha chain variable domain of TCR clone 58039 (TRAV4, TRAJ22)
RLVGDLYSGSARQLTF

SEQ ID NO: 116078 - protein, 14 aa, Homo sapiens
  CDR3 for beta chain variable domain of TCR clone 58039 (TRBV28, TRBJ2-3)
CASSWRGRADTQYF

SEQ ID NO: 116079 - protein, 17 aa, Homo sapiens
  CDR3 for alpha chain variable domain of TCR clone 58040 (TRAV13-1, TRAJ31)
CAPRDRLMFGDGNQLVV

SEQ ID NO: 116080 - protein, 12 aa, Homo sapiens
  CDR3 for beta chain variable domain of TCR clone 58040 (TRBV7-9, TRBJ2-7)
CASSLEGYEQYF

SEQ ID NO: 116081 - protein, 15 aa, Homo sapiens
  CDR3 for alpha chain variable domain of TCR clone 58041 (TRAV26-1, TRAJ40)
CIVRVTTSGTYKYIF

SEQ ID NO: 116082 - protein, 12 aa, Homo sapiens
  CDR3 for beta chain variable domain of TCR clone 58041 (TRBV7-9, TRBJ2-7)
CASSIKREEQYF

SEQ ID NO: 116083 - protein, 15 aa, Homo sapiens
  CDR3 for alpha chain variable domain of TCR clone 58042 (TRAV4, TRAJ39)
CLVGPNNNAGNMLTF

SEQ ID NO: 116084 - protein, 13 aa, Homo sapiens
  CDR3 for beta chain variable domain of TCR clone 58042 (TRBV11-2, TRBJ2-5)
CASSSTGEEIQYF

SEQ ID NO: 116085 - protein, 19 aa, Homo sapiens
  CDR3 for alpha chain variable domain of TCR clone 58043 (TRAV25, TRAJ43)
TATQTTDVGTYFFAVFMRF

SEQ ID NO: 116086 - protein, 13 aa, Homo sapiens
  CDR3 for beta chain variable domain of TCR clone 58043 (TRBV7-9, TRBJ1-2)
CASSLKQNYGYTF

SEQ ID NO: 116087 - protein, 14 aa, Homo sapiens
  CDR3 for alpha chain variable domain of TCR clone 58044 (TRAV13-1, TRAJ9)
CAASALTGGFKTIF

SEQ ID NO: 116088 - protein, 14 aa, Homo sapiens
  CDR3 for beta chain variable domain of TCR clone 58044 (TRBV7-2, TRBJ1-1)
CASSFLTGTTEAFF

SEQ ID NO: 116089 - protein, 16 aa, Homo sapiens
  CDR3 for alpha chain variable domain of TCR clone 58045 (TRAV30, TRAJ24)
CGTEIVDADSWGKFQF

SEQ ID NO: 116090 - protein, 19 aa, Homo sapiens
  CDR3 for beta chain variable domain of TCR clone 58045 (TRBV25-1, TRBJ2-2)
CAILVYRVDRRRKTGELFF

SEQ ID NO: 116091 - protein, 14 aa, Homo sapiens
  CDR3 for alpha chain variable domain of TCR clone 58046 (TRAV13-2, TRAJ12)
CAETLMDSSYKLIF

SEQ ID NO: 116092 - protein, 11 aa, Homo sapiens
  CDR3 for beta chain variable domain of TCR clone 58046 (TRBV12-4, TRBJ2-3)
CASTATDTQYF

SEQ ID NO: 116093 - protein, 17 aa, Homo sapiens
  CDR3 for alpha chain variable domain of TCR clone 58047 (TRAV3, TRAJ6)
CAVRDGPRAGGSYIPTF

SEQ ID NO: 116094 - protein, 17 aa, Homo sapiens
  CDR3 for beta chain variable domain of TCR clone 58047 (TRBV4-1, TRBJ1-4)
CASSQEGPRGVEEKLFF

SEQ ID NO: 116095 - protein, 16 aa, Homo sapiens
  CDR3 for alpha chain variable domain of TCR clone 58048 (TRAV30, TRAJ24)
CGTEIVDADSCGKFQF

SEQ ID NO: 116096 - protein, 15 aa, Homo sapiens
  CDR3 for beta chain variable domain of TCR clone 58048 (TRBV7-9, TRBJ1-4)
CASSARTGGNEKLFF

SEQ ID NO: 116097 - protein, 14 aa, Homo sapiens
  CDR3 for alpha chain variable domain of TCR clone 58049 (TRAV8-3, TRAJ9)
CAVVYNTGGFKTIF

SEQ ID NO: 116098 - protein, 14 aa, Homo sapiens
  CDR3 for beta chain variable domain of TCR clone 58049 (TRBV7-3, TRBJ2-2)
CASSSGEYTGELFF

SEQ ID NO: 116099 - protein, 14 aa, Homo sapiens
  CDR3 for alpha chain variable domain of TCR clone 58050 (TRAV12-2, TRAJ33)
CAVKRARSNYPLIW

SEQ ID NO: 116100 - protein, 12 aa, Homo sapiens
  CDR3 for beta chain variable domain of TCR clone 58050 (TRBV24-1, TRBJ2-3)
CATSDSTDTQYF

SEQ ID NO: 116101 - protein, 18 aa, Homo sapiens
  CDR3 for alpha chain variable domain of TCR clone 58051 (TRAV21, TRAJ52)
CAVRPSPAGGTSYGKLTF

SEQ ID NO: 116102 - protein, 15 aa, Homo sapiens
  CDR3 for beta chain variable domain of TCR clone 58051 (TRBV20-1, TRBJ2-7)
CSARKGLAESYEKYF

SEQ ID NO: 116103 - protein, 17 aa, Homo sapiens
  CDR3 for alpha chain variable domain of TCR clone 58052 (TRAV4, TRAJ13)
CLVGVRGSSGGYQKVTF

SEQ ID NO: 116104 - protein, 18 aa, Homo sapiens
  CDR3 for beta chain variable domain of TCR clone 58052 (TRBV15, TRBJ2-3)
CATSRDGARSWDTDTQYF

SEQ ID NO: 116105 - protein, 11 aa, Homo sapiens
  CDR3 for alpha chain variable domain of TCR clone 58053 (TRAV1-1, TRAJ23)
CAVRQGGKLIF

SEQ ID NO: 116106 - protein, 13 aa, Homo sapiens
  CDR3 for beta chain variable domain of TCR clone 58053 (TRBV7-3, TRBJ1-1)
CASSHDWGAEAFF

SEQ ID NO: 116107 - protein, 12 aa, Homo sapiens
  CDR3 for alpha chain variable domain of TCR clone 58054 (TRAV21, TRAJ33)
CAKMDSNYQLIW

SEQ ID NO: 116108 - protein, 18 aa, Homo sapiens
  CDR3 for beta chain variable domain of TCR clone 58054 (TRBV11-2, TRBJ2-3)
CASSLGGASRGAPNTQYF

SEQ ID NO: 116109 - protein, 14 aa, Homo sapiens
  CDR3 for alpha chain variable domain of TCR clone 58055 (TRAV17, TRAJ32)
CATDPGGATNKRIF

SEQ ID NO: 116110 - protein, 14 aa, Homo sapiens
  CDR3 for beta chain variable domain of TCR clone 58055 (TRBV2, TRBJ1-5)
CASSENRGGQPQHF

SEQ ID NO: 116111 - protein, 10 aa, Homo sapiens
  CDR3 for alpha chain variable domain of TCR clone 58056 (TRAV26-2, TRAJ49)
CILKGSQFYF

SEQ ID NO: 116112 - protein, 14 aa, Homo sapiens
  CDR3 for beta chain variable domain of TCR clone 58056 (TRBV19, TRBJ2-1)
CASPTFVLSGEQFF

SEQ ID NO: 116113 - protein, 15 aa, Homo sapiens
  CDR3 for alpha chain variable domain of TCR clone 58057 (TRAV26-2, TRAJ28)
CILVESGAGSYQPTF

SEQ ID NO: 116114 - protein, 11 aa, Homo sapiens
  CDR3 for beta chain variable domain of TCR clone 58057 (TRBV25-1, TRBJ2-7)
CASSTSYEQYF

SEQ ID NO: 116115 - protein, 13 aa, Homo sapiens
  CDR3 for alpha chain variable domain of TCR clone 58058 (TRAV8-3, TRAJ48)
CAVVRFGNEKLTF

SEQ ID NO: 116116 - protein, 16 aa, Homo sapiens
  CDR3 for beta chain variable domain of TCR clone 58058 (TRBV20-1, TRBJ2-5)
CSARDLASGIQETQYF

SEQ ID NO: 116117 - protein, 12 aa, Homo sapiens
  CDR3 for alpha chain variable domain of TCR clone 58059 (TRAV13-2, TRAJ8)
CAPWLGFQKLVF

SEQ ID NO: 116118 - protein, 13 aa, Homo sapiens
  CDR3 for beta chain variable domain of TCR clone 58059 (TRBV7-2, TRBJ2-1)
CASSLGVYNEQFF

SEQ ID NO: 116119 - protein, 14 aa, Homo sapiens
  CDR3 for alpha chain variable domain of TCR clone 58060 (TRAV1-2, TRAJ8)
CAVREDTGFQKLVF

SEQ ID NO: 116120 - protein, 15 aa, Homo sapiens
  CDR3 for beta chain variable domain of TCR clone 58060 (TRBV7-3, TRBJ2-2)
CASSETGQGTGEMFF

SEQ ID NO: 116121 - protein, 14 aa, Homo sapiens
  CDR3 for alpha chain variable domain of TCR clone 58061 (TRAV12-3, TRAJ54)
CAMRGIQGSQKLVF

SEQ ID NO: 116122 - protein, 13 aa, Homo sapiens
  CDR3 for beta chain variable domain of TCR clone 58061 (TRBV19, TRBJ1-1)
CASSPSNGGEAFF

SEQ ID NO: 116123 - protein, 12 aa, Homo sapiens
  CDR3 for alpha chain variable domain of TCR clone 58062 (TRAV12-3, TRAJ41)
CAMSYSGYALNF

SEQ ID NO: 116124 - protein, 13 aa, Homo sapiens
  CDR3 for beta chain variable domain of TCR clone 58062 (TRBV7-3, TRBJ2-1)
CASILDSYNEQFF

SEQ ID NO: 116125 - protein, 17 aa, Homo sapiens
  CDR3 for alpha chain variable domain of TCR clone 58063 (TRAV3, TRAJ12)
CAVRDGGRMDSSYNLIF

SEQ ID NO: 116126 - protein, 16 aa, Homo sapiens
  CDR3 for beta chain variable domain of TCR clone 58063 (TRBV9, TRBJ2-2)
CASSAMGKGNTGELFF

SEQ ID NO: 116127 - protein, 15 aa, Homo sapiens
  CDR3 for alpha chain variable domain of TCR clone 58064 (TRAV26-1, TRAJ40)
CIVRVTTSGTCKYIF

SEQ ID NO: 116128 - protein, 12 aa, Homo sapiens
  CDR3 for beta chain variable domain of TCR clone 58064 (TRBV7-9, TRBJ1-4)
CASSTDREKLFF

SEQ ID NO: 116129 - protein, 16 aa, Homo sapiens
  CDR3 for alpha chain variable domain of TCR clone 58065 (TRAV30, TRAJ24)
CGTEIVDADSWGKFQF

SEQ ID NO: 116130 - protein, 19 aa, Homo sapiens
  CDR3 for beta chain variable domain of TCR clone 58065 (TRBV25-1, TRBJ2-2)
RAILVYRVDRGRKTGELFF

SEQ ID NO: 116131 - protein, 14 aa, Homo sapiens
  CDR3 for alpha chain variable domain of TCR clone 58066 (TRAV8-1, TRAJ39)
CAVNASNAGNMLTF

SEQ ID NO: 116132 - protein, 13 aa, Homo sapiens
  CDR3 for beta chain variable domain of TCR clone 58066 (TRBV12-4, TRBJ2-5)
CASGPGTEETQYF

SEQ ID NO: 116133 - protein, 12 aa, Homo sapiens
  CDR3 for alpha chain variable domain of TCR clone 58067 (TRAV17, TRAJ39)
CATGAAGNMLTF

SEQ ID NO: 116134 - protein, 16 aa, Homo sapiens
  CDR3 for beta chain variable domain of TCR clone 58067 (TRBV5-1, TRBJ1-2)
CASSLDVNRGSYGYTF

SEQ ID NO: 116135 - protein, 16 aa, Homo sapiens
  CDR3 for alpha chain variable domain of TCR clone 58068 (TRAV3, TRAJ10)
CAVRDMRAGGGNRLTF

SEQ ID NO: 116136 - protein, 17 aa, Homo sapiens
  CDR3 for beta chain variable domain of TCR clone 58068 (TRBV28, TRBJ2-5)
CASSTPEGDALQETQYF

SEQ ID NO: 116137 - protein, 12 aa, Homo sapiens
  CDR3 for alpha chain variable domain of TCR clone 58069 (TRAV22, TRAJ29)
CAPPSGNTPLFF

SEQ ID NO: 116138 - protein, 14 aa, Homo sapiens
  CDR3 for beta chain variable domain of TCR clone 58069 (TRBV11-2, TRBJ2-7)
CASSLGAGAYEQYF

SEQ ID NO: 116139 - protein, 17 aa, Homo sapiens
  CDR3 for alpha chain variable domain of TCR clone 58070 (TRAV12-2, TRAJ52)
CAVNPYAGGTSYGKLTF

SEQ ID NO: 116140 - protein, 16 aa, Homo sapiens
  CDR3 for beta chain variable domain of TCR clone 58070 (TRBV5-5, TRBJ2-2)
CASSGRREGATGELVF

SEQ ID NO: 116141 - protein, 15 aa, Homo sapiens
  CDR3 for alpha chain variable domain of TCR clone 58071 (TRAV26-1, TRAJ44)
CIVRANTGTPSKLTF

SEQ ID NO: 116142 - protein, 16 aa, Homo sapiens
  CDR3 for beta chain variable domain of TCR clone 58071 (TRBV7-7, TRBJ2-1)
CASSLASGTSYNEQFF

SEQ ID NO: 116143 - protein, 15 aa, Homo sapiens
  CDR3 for alpha chain variable domain of TCR clone 58072 (TRAV38-1, TRAJ37)
CAFIFGSGNTGKLIF

SEQ ID NO: 116144 - protein, 14 aa, Homo sapiens
  CDR3 for beta chain variable domain of TCR clone 58072 (TRBV7-2, TRBJ1-1)
CASSFLTGTTEAFF

SEQ ID NO: 116145 - protein, 13 aa, Homo sapiens
  CDR3 for alpha chain variable domain of TCR clone 58073 (TRAV13-2, TRAJ22)
CRDPSGSARQLTF

SEQ ID NO: 116146 - protein, 15 aa, Homo sapiens
  CDR3 for beta chain variable domain of TCR clone 58073 (TRBV11-3, TRBJ2-1)
CASSLAGQTYNEQSF

SEQ ID NO: 116147 - protein, 15 aa, Homo sapiens
  CDR3 for alpha chain variable domain of TCR clone 58074 (TRAV8-3, TRAJ15)
CAVGAPNQAGTALIF

SEQ ID NO: 116148 - protein, 14 aa, Homo sapiens
  CDR3 for beta chain variable domain of TCR clone 58074 (TRBV20-1, TRBJ2-1)
CSPNDEASHNEQFF

SEQ ID NO: 116149 - protein, 13 aa, Homo sapiens
  CDR3 for alpha chain variable domain of TCR clone 58075 (TRAV27, TRAJ41)
CAGEGNSGYALNF

SEQ ID NO: 116150 - protein, 14 aa, Homo sapiens
  CDR3 for beta chain variable domain of TCR clone 58075 (TRBV7-2, TRBJ1-1)
CASSFSTGTTEAFF

SEQ ID NO: 116151 - protein, 13 aa, Homo sapiens
  CDR3 for alpha chain variable domain of TCR clone 58076 (TRAV12-3, TRAJ33)
CAMSLNSNYQLIW

SEQ ID NO: 116152 - protein, 15 aa, Homo sapiens
  CDR3 for beta chain variable domain of TCR clone 58076 (TRBV20-1, TRBJ2-7)
CSAESGTSGAYGQYF

SEQ ID NO: 116153 - protein, 16 aa, Homo sapiens
  CDR3 for alpha chain variable domain of TCR clone 58077 (TRAV12-2, TRAJ10)
CAVSRVLTGGGNKLTF

SEQ ID NO: 116154 - protein, 12 aa, Homo sapiens
  CDR3 for beta chain variable domain of TCR clone 58077 (TRBV28, TRBJ2-7)
CASSFSSYEQYF

SEQ ID NO: 116155 - protein, 16 aa, Homo sapiens
  CDR3 for alpha chain variable domain of TCR clone 58078 (TRAV8-3, TRAJ13)
CAVGAYPSGGYQKVTF

SEQ ID NO: 116156 - protein, 16 aa, Homo sapiens
  CDR3 for beta chain variable domain of TCR clone 58078 (TRBV19, TRBJ2-2)
CASRSPGTGATGELFF

SEQ ID NO: 116157 - protein, 15 aa, Homo sapiens
  CDR3 for alpha chain variable domain of TCR clone 58079 (TRAV2, TRAJ22)
CAVPSRWGSARQLTF

SEQ ID NO: 116158 - protein, 11 aa, Homo sapiens
  CDR3 for beta chain variable domain of TCR clone 58079 (TRBV27, TRBJ2-3)
CASSLGDTQYF

SEQ ID NO: 116159 - protein, 12 aa, Homo sapiens
  CDR3 for alpha chain variable domain of TCR clone 58080 (TRAV3, TRAJ31)
CAVRPRGPGLMF

SEQ ID NO: 116160 - protein, 17 aa, Homo sapiens
  CDR3 for beta chain variable domain of TCR clone 58080 (TRBV7-9, TRBJ1-5)
CASSASQGGYSNQPQHF

SEQ ID NO: 116161 - protein, 14 aa, Homo sapiens
  CDR3 for alpha chain variable domain of TCR clone 58081 (TRAV2, TRAJ37)
CAVDFTSNTGRLIF

SEQ ID NO: 116162 - protein, 15 aa, Homo sapiens
  CDR3 for beta chain variable domain of TCR clone 58081 (TRBV20-1, TRBJ1-1)
CSASRGVTGNTEALF

SEQ ID NO: 116163 - protein, 13 aa, Homo sapiens
  CDR3 for alpha chain variable domain of TCR clone 58082 (TRAV17, TRAJ22)
CAHHSGSARQLTL

SEQ ID NO: 116164 - protein, 16 aa, Homo sapiens
  CDR3 for beta chain variable domain of TCR clone 58082 (TRBV4-1, TRBJ1-2)
CASSQDAGQVLYGYTF

SEQ ID NO: 116165 - protein, 17 aa, Homo sapiens
  CDR3 for alpha chain variable domain of TCR clone 58083 (TRAV4, TRAJ13)
CLVGVQGSSGGYQKVTF

SEQ ID NO: 116166 - protein, 16 aa, Homo sapiens
  CDR3 for beta chain variable domain of TCR clone 58083 (TRBV28, TRBJ2-7)
CASSLFSETGGPEQYF

SEQ ID NO: 116167 - protein, 12 aa, Homo sapiens
  CDR3 for alpha chain variable domain of TCR clone 58084 (TRAV12-1, TRAJ40)
CVFYSGTYKYIF

SEQ ID NO: 116168 - protein, 14 aa, Homo sapiens
  CDR3 for beta chain variable domain of TCR clone 58084 (TRBV25-1, TRBJ1-1)
CASTHLGGNTEAFF

SEQ ID NO: 116169 - protein, 11 aa, Homo sapiens
  CDR3 for alpha chain variable domain of TCR clone 58085 (TRAV13-1, TRAJ39)
CASHAGNMLTF

SEQ ID NO: 116170 - protein, 12 aa, Homo sapiens
  CDR3 for beta chain variable domain of TCR clone 58085 (TRBV28, TRBJ2-3)
CASSLYRDTQYF

SEQ ID NO: 116171 - protein, 15 aa, Homo sapiens
  CDR3 for alpha chain variable domain of TCR clone 58086 (TRAV26-1, TRAJ29)
CIVRVEGSGNTPLVF

SEQ ID NO: 116172 - protein, 17 aa, Homo sapiens
  CDR3 for beta chain variable domain of TCR clone 58086 (TRBV7-3, TRBJ2-3)
RASSLMKRMRGADTQYF

SEQ ID NO: 116173 - protein, 13 aa, Homo sapiens
  CDR3 for alpha chain variable domain of TCR clone 58087 (TRAV12-2, TRAJ20)
CAVYPSNDYKLSF

SEQ ID NO: 116174 - protein, 15 aa, Homo sapiens
  CDR3 for beta chain variable domain of TCR clone 58087 (TRBV6-1, TRBJ2-5)
CASGEGWGIQETQYF

SEQ ID NO: 116175 - protein, 13 aa, Homo sapiens
  CDR3 for alpha chain variable domain of TCR clone 58088 (TRAV2, TRAJ24)
CAVTTDSWGNLQF

SEQ ID NO: 116176 - protein, 14 aa, Homo sapiens
  CDR3 for beta chain variable domain of TCR clone 58088 (TRBV13, TRBJ2-5)
CASSLGRGQETQYF

SEQ ID NO: 116177 - protein, 12 aa, Homo sapiens
  CDR3 for alpha chain variable domain of TCR clone 58089 (TRAV13-1, TRAJ53)
AASGGSNYKLTL

SEQ ID NO: 116178 - protein, 16 aa, Homo sapiens
  CDR3 for beta chain variable domain of TCR clone 58089 (TRBV28, TRBJ2-6)
CASSNRRGSGANVLTF

SEQ ID NO: 116179 - protein, 16 aa, Homo sapiens
  CDR3 for alpha chain variable domain of TCR clone 58090 (TRAV21, TRAJ45)
CAVSWGSGGGADGLTF

SEQ ID NO: 116180 - protein, 13 aa, Homo sapiens
  CDR3 for beta chain variable domain of TCR clone 58090 (TRBV7-3, TRBJ1-1)
CASSQDWGAETFF

SEQ ID NO: 116181 - protein, 14 aa, Homo sapiens
  CDR3 for alpha chain variable domain of TCR clone 58091 (TRAV12-2, TRAJ40)
CAVKIPSGTYKYIF

SEQ ID NO: 116182 - protein, 20 aa, Homo sapiens
  CDR3 for beta chain variable domain of TCR clone 58091 (TRBV28, TRBJ2-1)
CASTHIGRSPGLAGGNEQFF

SEQ ID NO: 116183 - protein, 15 aa, Homo sapiens
  CDR3 for alpha chain variable domain of TCR clone 58092 (TRAV38-1, TRAJ37)
CAFIHGTGNTGKLIF

SEQ ID NO: 116184 - protein, 14 aa, Homo sapiens
  CDR3 for beta chain variable domain of TCR clone 58092 (TRBV29-1, TRBJ2-5)
CSVETSGSGETQYF

SEQ ID NO: 116185 - protein, 15 aa, Homo sapiens
  CDR3 for alpha chain variable domain of TCR clone 58093 (TRAV13-2, TRAJ45)
CAEHHSGGGADGLTF

SEQ ID NO: 116186 - protein, 15 aa, Homo sapiens
  CDR3 for beta chain variable domain of TCR clone 58093 (TRBV7-2, TRBJ2-7)
CASSLALGSAYERYF

SEQ ID NO: 116187 - protein, 15 aa, Homo sapiens
  CDR3 for alpha chain variable domain of TCR clone 58094 (TRAV26-1, TRAJ29)
CIVRVEGSGNTPLVF

SEQ ID NO: 116188 - protein, 15 aa, Homo sapiens
  CDR3 for beta chain variable domain of TCR clone 58094 (TRBV7-9, TRBJ1-5)
CASSQGHQPNQPQHY

SEQ ID NO: 116189 - protein, 12 aa, Homo sapiens
  CDR3 for alpha chain variable domain of TCR clone 58095 (TRAV3, TRAJ31)
CAVRDGNARLMF

SEQ ID NO: 116190 - protein, 18 aa, Homo sapiens
  CDR3 for beta chain variable domain of TCR clone 58095 (TRBV7-2, TRBJ2-3)
CASSLKREGSGITETQYF

SEQ ID NO: 116191 - protein, 16 aa, Homo sapiens
  CDR3 for alpha chain variable domain of TCR clone 58096 (TRAV3, TRAJ28)
CAVLPRSGAGSYQLTL

SEQ ID NO: 116192 - protein, 13 aa, Homo sapiens
  CDR3 for beta chain variable domain of TCR clone 58096 (TRBV12-4, TRBJ2-5)
CASRLAVQETQYF

SEQ ID NO: 116193 - protein, 14 aa, Homo sapiens
  CDR3 for alpha chain variable domain of TCR clone 58097 (TRAV26-1, TRAJ45)
CIEVTGGGADGLTF

SEQ ID NO: 116194 - protein, 15 aa, Homo sapiens
  CDR3 for beta chain variable domain of TCR clone 58097 (TRBV27, TRBJ2-1)
CASSNGGGSSNEQFF

SEQ ID NO: 116195 - protein, 13 aa, Homo sapiens
  CDR3 for alpha chain variable domain of TCR clone 58098 (TRAV16, TRAJ34)
CALTGYNTDKLIF

SEQ ID NO: 116196 - protein, 17 aa, Homo sapiens
  CDR3 for beta chain variable domain of TCR clone 58098 (TRBV13, TRBJ2-3)
CASSLSRVAGGRNTQYF

SEQ ID NO: 116197 - protein, 13 aa, Homo sapiens
  CDR3 for alpha chain variable domain of TCR clone 58099 (TRAV12-2, TRAJ6)
CAVNVSRKLHTYI

SEQ ID NO: 116198 - protein, 13 aa, Homo sapiens
  CDR3 for beta chain variable domain of TCR clone 58099 (TRBV12-4, TRBJ2-3)
CASSSPLGGTQYF

SEQ ID NO: 116199 - protein, 14 aa, Homo sapiens
  CDR3 for alpha chain variable domain of TCR clone 58100 (TRAV2, TRAJ23)
CAVGLRNQGGKLIF

SEQ ID NO: 116200 - protein, 11 aa, Homo sapiens
  CDR3 for beta chain variable domain of TCR clone 58100 (TRBV29-1, TRBJ2-5)
CSEDRTGTQYF

SEQ ID NO: 116201 - protein, 14 aa, Homo sapiens
  CDR3 for alpha chain variable domain of TCR clone 58101 (TRAV27, TRAJ36)
CAGPPKRGANNLFF

SEQ ID NO: 116202 - protein, 15 aa, Homo sapiens
  CDR3 for beta chain variable domain of TCR clone 58101 (TRBV18, TRBJ2-7)
RASSPASTPNYEQYF

SEQ ID NO: 116203 - protein, 14 aa, Homo sapiens
  CDR3 for alpha chain variable domain of TCR clone 58102 (TRAV1-2, TRAJ16)
CAVNRFSDGQKLLF

SEQ ID NO: 116204 - protein, 16 aa, Homo sapiens
  CDR3 for beta chain variable domain of TCR clone 58102 (TRBV27, TRBJ2-2)
CASSFRGLVRTGELFS

SEQ ID NO: 116205 - protein, 13 aa, Homo sapiens
  CDR3 for alpha chain variable domain of TCR clone 58103 (TRAV8-1, TRAJ8)
CAVNRTGFQKLVF

SEQ ID NO: 116206 - protein, 17 aa, Homo sapiens
  CDR3 for beta chain variable domain of TCR clone 58103 (TRBV7-9, TRBJ1-5)
CASSASQGGYSNQPQHF

SEQ ID NO: 116207 - protein, 15 aa, Homo sapiens
  CDR3 for alpha chain variable domain of TCR clone 58104 (TRAV3, TRAJ47)
CAVRDIGEYGNKLFF

SEQ ID NO: 116208 - protein, 14 aa, Homo sapiens
  CDR3 for beta chain variable domain of TCR clone 58104 (TRBV13, TRBJ2-5)
CASSLERVGETQYF

SEQ ID NO: 116209 - protein, 16 aa, Homo sapiens
  CDR3 for alpha chain variable domain of TCR clone 58105 (TRAV12-1, TRAJ42)
CVVTPYYGGSQGNLIF

SEQ ID NO: 116210 - protein, 13 aa, Homo sapiens
  CDR3 for beta chain variable domain of TCR clone 58105 (TRBV2, TRBJ1-1)
CASSEGGNTEAFF

SEQ ID NO: 116211 - protein, 12 aa, Homo sapiens
  CDR3 for alpha chain variable domain of TCR clone 58106 (TRAV12-3, TRAJ17)
CAMTLTGNKLTF

SEQ ID NO: 116212 - protein, 16 aa, Homo sapiens
  CDR3 for beta chain variable domain of TCR clone 58106 (TRBV5-4, TRBJ2-1)
CASSLVGSGQDNEQFF

SEQ ID NO: 116213 - protein, 14 aa, Homo sapiens
  CDR3 for alpha chain variable domain of TCR clone 58107 (TRAV20, TRAJ32)
CCGRYGGATNKLIF

SEQ ID NO: 116214 - protein, 16 aa, Homo sapiens
  CDR3 for beta chain variable domain of TCR clone 58107 (TRBV19, TRBJ2-2)
CASRPPGTGATGELFF

SEQ ID NO: 116215 - protein, 11 aa, Homo sapiens
  CDR3 for alpha chain variable domain of TCR clone 58108 (TRAV35, TRAJ12)
RRMDSSYKLIF

SEQ ID NO: 116216 - protein, 14 aa, Homo sapiens
  CDR3 for beta chain variable domain of TCR clone 58108 (TRBV19, TRBJ1-1)
CASSPNRGDTEAFL

SEQ ID NO: 116217 - protein, 15 aa, Homo sapiens
  CDR3 for alpha chain variable domain of TCR clone 58109 (TRAV1-2, TRAJ30)
CAVRPHGNRDDKIIF

SEQ ID NO: 116218 - protein, 14 aa, Homo sapiens
  CDR3 for beta chain variable domain of TCR clone 58109 (TRBV12-5, TRBJ2-5)
CASGSRTHQETQYF

SEQ ID NO: 116219 - protein, 13 aa, Homo sapiens
  CDR3 for alpha chain variable domain of TCR clone 58110 (TRAV29/DV5, TRAJ31)
CAASRNNNARLMF

SEQ ID NO: 116220 - protein, 12 aa, Homo sapiens
  CDR3 for beta chain variable domain of TCR clone 58110 (TRBV12-4, TRBJ2-7)
CASSLGGYEQYF

SEQ ID NO: 116221 - protein, 17 aa, Homo sapiens
  CDR3 for alpha chain variable domain of TCR clone 58111 (TRAV23/DV6, TRAJ57)
CAASSILSQGGSEKLVF

SEQ ID NO: 116222 - protein, 14 aa, Homo sapiens
  CDR3 for beta chain variable domain of TCR clone 58111 (TRBV25-1, TRBJ1-1)
CASTHLGGNTEAFF

SEQ ID NO: 116223 - protein, 13 aa, Homo sapiens
  CDR3 for alpha chain variable domain of TCR clone 58112 (TRAV38-1, TRAJ42)
CARWGGSQGNLIF

SEQ ID NO: 116224 - protein, 17 aa, Homo sapiens
  CDR3 for beta chain variable domain of TCR clone 58112 (TRBV20-1, TRBJ2-1)
GSARDPLAGVWDNEQFF

SEQ ID NO: 116225 - protein, 15 aa, Homo sapiens
  CDR3 for alpha chain variable domain of TCR clone 58113 (TRAV8-2, TRAJ16)
CVVRDGFSDGQKLLF

SEQ ID NO: 116226 - protein, 15 aa, Homo sapiens
  CDR3 for beta chain variable domain of TCR clone 58113 (TRBV12-4, TRBJ2-5)
CASSPPTGLQETQYF

SEQ ID NO: 116227 - protein, 11 aa, Homo sapiens
  CDR3 for alpha chain variable domain of TCR clone 58114 (TRAV23/DV6, TRAJ21)
SAANNFNKFYF

SEQ ID NO: 116228 - protein, 12 aa, Homo sapiens
  CDR3 for beta chain variable domain of TCR clone 58114 (TRBV11-2, TRBJ2-1)
CASSPGNNEQFF

SEQ ID NO: 116229 - protein, 13 aa, Homo sapiens
  CDR3 for alpha chain variable domain of TCR clone 58115 (TRAV35, TRAJ36)
CAGPRIGATNLFF

SEQ ID NO: 116230 - protein, 15 aa, Homo sapiens
  CDR3 for beta chain variable domain of TCR clone 58115 (TRBV28, TRBJ2-5)
CASSPPWSYQETQYF

SEQ ID NO: 116231 - protein, 14 aa, Homo sapiens
  CDR3 for alpha chain variable domain of TCR clone 58116 (TRAV1-2, TRAJ16)
CAVNRFSGGQKLLF

SEQ ID NO: 116232 - protein, 13 aa, Homo sapiens
  CDR3 for beta chain variable domain of TCR clone 58116 (TRBV19, TRBJ1-5)
CASKVGPWEPQHF

SEQ ID NO: 116233 - protein, 12 aa, Homo sapiens
  CDR3 for alpha chain variable domain of TCR clone 58117 (TRAV21, TRAJ58)
CAAETSGPRLTF

SEQ ID NO: 116234 - protein, 15 aa, Homo sapiens
  CDR3 for beta chain variable domain of TCR clone 58117 (TRBV20-1, TRBJ2-7)
CSARDPVKGEGEQYF

SEQ ID NO: 116235 - protein, 13 aa, Homo sapiens
  CDR3 for alpha chain variable domain of TCR clone 58118 (TRAV2, TRAJ40)
CAVVTSGTYKYIF

SEQ ID NO: 116236 - protein, 14 aa, Homo sapiens
  CDR3 for beta chain variable domain of TCR clone 58118 (TRBV19, TRBJ2-1)
CASPTVGLSGEQFF

SEQ ID NO: 116237 - protein, 13 aa, Homo sapiens
  CDR3 for alpha chain variable domain of TCR clone 58119 (TRAV26-1, TRAJ36)
CIVVGTGANNLFF

SEQ ID NO: 116238 - protein, 15 aa, Homo sapiens
  CDR3 for beta chain variable domain of TCR clone 58119 (TRBV27, TRBJ2-1)
CASSNGGGPSNEQFF

SEQ ID NO: 116239 - protein, 11 aa, Homo sapiens
  CDR3 for alpha chain variable domain of TCR clone 58120 (TRAV12-2, TRAJ23)
CARGRGGKLVF

SEQ ID NO: 116240 - protein, 14 aa, Homo sapiens
  CDR3 for beta chain variable domain of TCR clone 58120 (TRBV28, TRBJ2-5)
CASSLGDRAETQYF

SEQ ID NO: 116241 - protein, 12 aa, Homo sapiens
  CDR3 for alpha chain variable domain of TCR clone 58121 (TRAV36/DV7, TRAJ54)
CAVVRGAQKLVF

SEQ ID NO: 116242 - protein, 14 aa, Homo sapiens
  CDR3 for beta chain variable domain of TCR clone 58121 (TRBV7-3, TRBJ1-1)
CASSLKVGNTEAFF

SEQ ID NO: 116243 - protein, 11 aa, Homo sapiens
  CDR3 for alpha chain variable domain of TCR clone 58122 (TRAV2, TRAJ13)
CASGGYQKVTF

SEQ ID NO: 116244 - protein, 20 aa, Homo sapiens
  CDR3 for beta chain variable domain of TCR clone 58122 (TRBV6-1, TRBJ2-5)
CASSETLDRGAETSTSGQAR

SEQ ID NO: 116245 - protein, 17 aa, Homo sapiens
  CDR3 for alpha chain variable domain of TCR clone 58123 (TRAV3, TRAJ42)
CAVRDRDDGGSQGNLIF

SEQ ID NO: 116246 - protein, 15 aa, Homo sapiens
  CDR3 for beta chain variable domain of TCR clone 58123 (TRBV6-6, TRBJ2-7)
CASSYSYGGSYEQYF

SEQ ID NO: 116247 - protein, 14 aa, Homo sapiens
  CDR3 for alpha chain variable domain of TCR clone 58124 (TRAV17, TRAJ54)
CATDANQGAQKLVF

SEQ ID NO: 116248 - protein, 13 aa, Homo sapiens
  CDR3 for beta chain variable domain of TCR clone 58124 (TRBV7-3, TRBJ1-1)
CASSQDWGAEAFF

SEQ ID NO: 116249 - protein, 16 aa, Homo sapiens
  CDR3 for alpha chain variable domain of TCR clone 58125 (TRAV30, TRAJ24)
CGTEIVDADSWGKFQF

SEQ ID NO: 116250 - protein, 13 aa, Homo sapiens
  CDR3 for beta chain variable domain of TCR clone 58125 (TRBV14, TRBJ1-1)
CASSREFGTEAFF

SEQ ID NO: 116251 - protein, 11 aa, Homo sapiens
  CDR3 for alpha chain variable domain of TCR clone 58126 (TRAV1-1, TRAJ23)
CAVRQGGKLIF

SEQ ID NO: 116252 - protein, 16 aa, Homo sapiens
  CDR3 for beta chain variable domain of TCR clone 58126 (TRBV4-2, TRBJ1-1)
CASSQAGFGMNTEAFF

SEQ ID NO: 116253 - protein, 14 aa, Homo sapiens
  CDR3 for alpha chain variable domain of TCR clone 58127 (TRAV8-3, TRAJ4)
CAVGAAGGYNKLIF

SEQ ID NO: 116254 - protein, 15 aa, Homo sapiens
  CDR3 for beta chain variable domain of TCR clone 58127 (TRBV6-5, TRBJ2-1)
CASSYDAGAGNEQFC

SEQ ID NO: 116255 - protein, 13 aa, Homo sapiens
  CDR3 for alpha chain variable domain of TCR clone 58128 (TRAV30, TRAJ34)
CGTVGYNTDKLIF

SEQ ID NO: 116256 - protein, 16 aa, Homo sapiens
  CDR3 for beta chain variable domain of TCR clone 58128 (TRBV7-9, TRBJ1-2)
CASSLGFSSGKDGYTF

SEQ ID NO: 116257 - protein, 14 aa, Homo sapiens
  CDR3 for alpha chain variable domain of TCR clone 58129 (TRAV1-2, TRAJ8)
CAVREDTGSQKLVF

SEQ ID NO: 116258 - protein, 13 aa, Homo sapiens
  CDR3 for beta chain variable domain of TCR clone 58129 (TRBV27, TRBJ1-1)
CASSLSIGAEAFF

SEQ ID NO: 116259 - protein, 11 aa, Homo sapiens
  CDR3 for alpha chain variable domain of TCR clone 58130 (TRAV35, TRAJ30)
CAPGGDDKIIF

SEQ ID NO: 116260 - protein, 15 aa, Homo sapiens
  CDR3 for beta chain variable domain of TCR clone 58130 (TRBV9, TRBJ1-6)
CASSVAGTGDSPLHL

SEQ ID NO: 116261 - protein, 13 aa, Homo sapiens
  CDR3 for alpha chain variable domain of TCR clone 58131 (TRAV21, TRAJ15)
CAVANQAGTALIF

SEQ ID NO: 116262 - protein, 14 aa, Homo sapiens
  CDR3 for beta chain variable domain of TCR clone 58131 (TRBV27, TRBJ2-2)
CASSLGAAAGELFF

SEQ ID NO: 116263 - protein, 15 aa, Homo sapiens
  CDR3 for alpha chain variable domain of TCR clone 58132 (TRAV2, TRAJ22)
CAVPSRGGSARQLTF

SEQ ID NO: 116264 - protein, 14 aa, Homo sapiens
  CDR3 for beta chain variable domain of TCR clone 58132 (TRBV7-8, TRBJ2-3)
CASSLEAGTDTQYF

SEQ ID NO: 116265 - protein, 11 aa, Homo sapiens
  CDR3 for alpha chain variable domain of TCR clone 58133 (TRAV35, TRAJ34)
CWARNTDKLIF

SEQ ID NO: 116266 - protein, 13 aa, Homo sapiens
  CDR3 for beta chain variable domain of TCR clone 58133 (TRBV19, TRBJ2-7)
RASSIDRTYEQYF

SEQ ID NO: 116267 - protein, 14 aa, Homo sapiens
  CDR3 for alpha chain variable domain of TCR clone 58134 (TRAV8-2, TRAJ11)
CVVSEKSGYSTLTF

SEQ ID NO: 116268 - protein, 14 aa, Homo sapiens
  CDR3 for beta chain variable domain of TCR clone 58134 (TRBV7-2, TRBJ2-7)
CASSPKTSFYEQYF

SEQ ID NO: 116269 - protein, 14 aa, Homo sapiens
  CDR3 for alpha chain variable domain of TCR clone 58135 (TRAV12-3, TRAJ10)
SHLPLTGGGNKLTF

SEQ ID NO: 116270 - protein, 15 aa, Homo sapiens
  CDR3 for beta chain variable domain of TCR clone 58135 (TRBV7-3, TRBJ2-7)
CASSLTPTGYDEQYF

SEQ ID NO: 116271 - protein, 12 aa, Homo sapiens
  CDR3 for alpha chain variable domain of TCR clone 58136 (TRAV2, TRAJ31)
CAVEDNNARLMF

SEQ ID NO: 116272 - protein, 16 aa, Homo sapiens
  CDR3 for beta chain variable domain of TCR clone 58136 (TRBV10-3, TRBJ2-1)
SAISGVGDGGGGEQFF

SEQ ID NO: 116273 - protein, 15 aa, Homo sapiens
  CDR3 for alpha chain variable domain of TCR clone 58137 (TRAV8-3, TRAJ35)
CAVGATIGFGNVLHC

SEQ ID NO: 116274 - protein, 14 aa, Homo sapiens
  CDR3 for beta chain variable domain of TCR clone 58137 (TRBV7-9, TRBJ2-1)
CASSPQDSLYEQFF

SEQ ID NO: 116275 - protein, 13 aa, Homo sapiens
  CDR3 for alpha chain variable domain of TCR clone 58138 (TRAV12-1, TRAJ34)
CVVTGYNTDELIF

SEQ ID NO: 116276 - protein, 13 aa, Homo sapiens
  CDR3 for beta chain variable domain of TCR clone 58138 (TRBV28, TRBJ2-7)
CASKAGGVYEQYF

SEQ ID NO: 116277 - protein, 11 aa, Homo sapiens
  CDR3 for alpha chain variable domain of TCR clone 58139 (TRAV3, TRAJ21)
WAVGNFNKFYF

SEQ ID NO: 116278 - protein, 17 aa, Homo sapiens
  CDR3 for beta chain variable domain of TCR clone 58139 (TRBV20-1, TRBJ2-1)
CSASSSGLAGSYNEQFF

SEQ ID NO: 116279 - protein, 15 aa, Homo sapiens
  CDR3 for alpha chain variable domain of TCR clone 58140 (TRAV20, TRAJ53)
CAVRASGGSNYKLTF

SEQ ID NO: 116280 - protein, 12 aa, Homo sapiens
  CDR3 for beta chain variable domain of TCR clone 58140 (TRBV7-6, TRBJ2-5)
CASSLSQETQYF

SEQ ID NO: 116281 - protein, 15 aa, Homo sapiens
  CDR3 for alpha chain variable domain of TCR clone 58141 (TRAV8-3, TRAJ40)
CAAPSLGSGTYKYIF

SEQ ID NO: 116282 - protein, 16 aa, Homo sapiens
  CDR3 for beta chain variable domain of TCR clone 58141 (TRBV13, TRBJ2-2)
CASSPRTGEHTGELFF

SEQ ID NO: 116283 - protein, 17 aa, Homo sapiens
  CDR3 for alpha chain variable domain of TCR clone 58142 (TRAV8-3, TRAJ52)
CAVGAEAGGTSYGKLTF

SEQ ID NO: 116284 - protein, 15 aa, Homo sapiens
  CDR3 for beta chain variable domain of TCR clone 58142 (TRBV6-1, TRBJ2-3)
CASSERGGITDTQYF

SEQ ID NO: 116285 - protein, 14 aa, Homo sapiens
  CDR3 for alpha chain variable domain of TCR clone 58143 (TRAV1-1, TRAJ30)
CAVRSLNRDDKIIF

SEQ ID NO: 116286 - protein, 14 aa, Homo sapiens
  CDR3 for beta chain variable domain of TCR clone 58143 (TRBV7-8, TRBJ2-3)
CASSLEAGTGTQYF

SEQ ID NO: 116287 - protein, 14 aa, Homo sapiens
  CDR3 for alpha chain variable domain of TCR clone 58144 (TRAV1-2, TRAJ6)
CAVSLSGGNYIPTF

SEQ ID NO: 116288 - protein, 15 aa, Homo sapiens
  CDR3 for beta chain variable domain of TCR clone 58144 (TRBV28, TRBJ2-7)
CASSPGGRGFYEQYF

SEQ ID NO: 116289 - protein, 12 aa, Homo sapiens
  CDR3 for alpha chain variable domain of TCR clone 58145 (TRAV12-3, TRAJ54)
CGADRGAQKLVF

SEQ ID NO: 116290 - protein, 15 aa, Homo sapiens
  CDR3 for beta chain variable domain of TCR clone 58145 (TRBV27, TRBJ2-1)
CASSLAGGPLNEQFF

SEQ ID NO: 116291 - protein, 15 aa, Homo sapiens
  CDR3 for alpha chain variable domain of TCR clone 58146 (TRAV14/DV4, TRAJ26)
CAMREGQNYGQNFVF

SEQ ID NO: 116292 - protein, 13 aa, Homo sapiens
  CDR3 for beta chain variable domain of TCR clone 58146 (TRBV24-1, TRBJ2-2)
CATSDWSTGKLFF

SEQ ID NO: 116293 - protein, 12 aa, Homo sapiens
  CDR3 for alpha chain variable domain of TCR clone 58147 (TRAV13-1, TRAJ48)
CAANFGNERLTF

SEQ ID NO: 116294 - protein, 14 aa, Homo sapiens
  CDR3 for beta chain variable domain of TCR clone 58147 (TRBV9, TRBJ1-2)
CASSVSTRSYGYTF

SEQ ID NO: 116295 - protein, 16 aa, Homo sapiens
  CDR3 for alpha chain variable domain of TCR clone 58148 (TRAV16, TRAJ4)
CALSRMFSGGYNKLIF

SEQ ID NO: 116296 - protein, 11 aa, Homo sapiens
  CDR3 for beta chain variable domain of TCR clone 58148 (TRBV29-1, TRBJ2-5)
CSEDRTGTQYF

SEQ ID NO: 116297 - protein, 13 aa, Homo sapiens
  CDR3 for alpha chain variable domain of TCR clone 58149 (TRAV30, TRAJ24)
CGTVTDSWGKLQF

SEQ ID NO: 116298 - protein, 15 aa, Homo sapiens
  CDR3 for beta chain variable domain of TCR clone 58149 (TRBV3-1, TRBJ2-5)
CASSANLGGPETQYF

SEQ ID NO: 116299 - protein, 13 aa, Homo sapiens
  CDR3 for alpha chain variable domain of TCR clone 58150 (TRAV38-1, TRAJ42)
CARLGGSQGNLIF

SEQ ID NO: 116300 - protein, 17 aa, Homo sapiens
  CDR3 for beta chain variable domain of TCR clone 58150 (TRBV20-1, TRBJ2-1)
CSARDPLAGVWDNEQFF

SEQ ID NO: 116301 - protein, 15 aa, Homo sapiens
  CDR3 for alpha chain variable domain of TCR clone 58151 (TRAV8-2, TRAJ24)
CVVSDRTDSWGKLQF

SEQ ID NO: 116302 - protein, 13 aa, Homo sapiens
  CDR3 for beta chain variable domain of TCR clone 58151 (TRBV7-9, TRBJ1-2)
CASSIKQNYGYTF

SEQ ID NO: 116303 - protein, 12 aa, Homo sapiens
  CDR3 for alpha chain variable domain of TCR clone 58152 (TRAV21, TRAJ31)
CAVSPTRGRLMF

SEQ ID NO: 116304 - protein, 14 aa, Homo sapiens
  CDR3 for beta chain variable domain of TCR clone 58152 (TRBV28, TRBJ2-7)
CASSLLRISYEQYF

SEQ ID NO: 116305 - protein, 15 aa, Homo sapiens
  CDR3 for alpha chain variable domain of TCR clone 58153 (TRAV8-3, TRAJ45)
CASSYSGGSADGLTF

SEQ ID NO: 116306 - protein, 13 aa, Homo sapiens
  CDR3 for beta chain variable domain of TCR clone 58153 (TRBV10-3, TRBJ2-7)
CASKLAVNYEQYF

SEQ ID NO: 116307 - protein, 12 aa, Homo sapiens
  CDR3 for alpha chain variable domain of TCR clone 58154 (TRAV13-1, TRAJ21)
CAAKEGSNKFYF

SEQ ID NO: 116308 - protein, 15 aa, Homo sapiens
  CDR3 for beta chain variable domain of TCR clone 58154 (TRBV15, TRBJ1-5)
CATSRDPVSNQPQHF

SEQ ID NO: 116309 - protein, 15 aa, Homo sapiens
  CDR3 for alpha chain variable domain of TCR clone 58155 (TRAV8-3, TRAJ45)
CASPYSGGGADGLTF

SEQ ID NO: 116310 - protein, 17 aa, Homo sapiens
  CDR3 for beta chain variable domain of TCR clone 58155 (TRBV7-8, TRBJ1-2)
CASSLRPLQGHLYGYTF

SEQ ID NO: 116311 - protein, 14 aa, Homo sapiens
  CDR3 for alpha chain variable domain of TCR clone 58156 (TRAV1-2, TRAJ16)
CAVNRFSDGQKLLF

SEQ ID NO: 116312 - protein, 13 aa, Homo sapiens
  CDR3 for beta chain variable domain of TCR clone 58156 (TRBV20-1, TRBJ2-7)
CSATHTSGYEQYF

SEQ ID NO: 116313 - protein, 16 aa, Homo sapiens
  CDR3 for alpha chain variable domain of TCR clone 58157 (TRAV1-2, TRAJ10)
CAVRGVLTGGGNKLTF

SEQ ID NO: 116314 - protein, 16 aa, Homo sapiens
  CDR3 for beta chain variable domain of TCR clone 58157 (TRBV5-1, TRBJ2-2)
CASSLWDTTNTGELFF

SEQ ID NO: 116315 - protein, 16 aa, Homo sapiens
  CDR3 for alpha chain variable domain of TCR clone 58158 (TRAV16, TRAJ52)
CALSAAGGTSYGKLTF

SEQ ID NO: 116316 - protein, 12 aa, Homo sapiens
  CDR3 for beta chain variable domain of TCR clone 58158 (TRBV12-4, TRBJ1-3)
CANSFSGNTIYF

SEQ ID NO: 116317 - protein, 15 aa, Homo sapiens
  CDR3 for alpha chain variable domain of TCR clone 58159 (TRAV8-1, TRAJ6)
CAVNAGAGGSYIPTF

SEQ ID NO: 116318 - protein, 14 aa, Homo sapiens
  CDR3 for beta chain variable domain of TCR clone 58159 (TRBV25-1, TRBJ1-6)
CASSLAADISPLHF

SEQ ID NO: 116319 - protein, 14 aa, Homo sapiens
  CDR3 for alpha chain variable domain of TCR clone 58160 (TRAV1-2, TRAJ16)
CAVNRFSDGQKLPF

SEQ ID NO: 116320 - protein, 15 aa, Homo sapiens
  CDR3 for beta chain variable domain of TCR clone 58160 (TRBV12-4, TRBJ2-5)
CASSPPTGLQETQYF

SEQ ID NO: 116321 - protein, 16 aa, Homo sapiens
  CDR3 for alpha chain variable domain of TCR clone 58161 (TRAV8-3, TRAJ44)
CAVGASNTGTASKLTL

SEQ ID NO: 116322 - protein, 15 aa, Homo sapiens
  CDR3 for beta chain variable domain of TCR clone 58161 (TRBV27, TRBJ1-5)
CASTFNRGSNQPQHF

SEQ ID NO: 116323 - protein, 12 aa, Homo sapiens
  CDR3 for alpha chain variable domain of TCR clone 58162 (TRAV27, TRAJ37)
CADSGNTGKLIF

SEQ ID NO: 116324 - protein, 14 aa, Homo sapiens
  CDR3 for beta chain variable domain of TCR clone 58162 (TRBV7-9, TRBJ2-7)
CASSLGGSSYEQYF

SEQ ID NO: 116325 - protein, 14 aa, Homo sapiens
  CDR3 for alpha chain variable domain of TCR clone 58163 (TRAV12-2, TRAJ40)
CAVKIPSGTYKYIF

SEQ ID NO: 116326 - protein, 13 aa, Homo sapiens
  CDR3 for beta chain variable domain of TCR clone 58163 (TRBV7-9, TRBJ1-2)
CASSLKQNYGYSF

SEQ ID NO: 116327 - protein, 14 aa, Homo sapiens
  CDR3 for alpha chain variable domain of TCR clone 58164 (TRAV2, TRAJ3)
CAVRPYSSAPKIIF

SEQ ID NO: 116328 - protein, 17 aa, Homo sapiens
  CDR3 for beta chain variable domain of TCR clone 58164 (TRBV7-6, TRBJ2-5)
CASSSPQAGDPSETQYF

SEQ ID NO: 116329 - protein, 13 aa, Homo sapiens
  CDR3 for alpha chain variable domain of TCR clone 58165 (TRAV35, TRAJ43)
CAGYPYNNNDMRF

SEQ ID NO: 116330 - protein, 15 aa, Homo sapiens
  CDR3 for beta chain variable domain of TCR clone 58165 (TRBV25-1, TRBJ1-4)
CASSKRIAINEKLFF

SEQ ID NO: 116331 - protein, 20 aa, Homo sapiens
  CDR3 for alpha chain variable domain of TCR clone 58166 (TRAV1-2, TRAJ34)
LLKELQMKDSASPNTDKLIF

SEQ ID NO: 116332 - protein, 14 aa, Homo sapiens
  CDR3 for beta chain variable domain of TCR clone 58166 (TRBV19, TRBJ1-5)
CASRAPDSFLSQHF

SEQ ID NO: 116333 - protein, 15 aa, Homo sapiens
  CDR3 for alpha chain variable domain of TCR clone 58167 (TRAV13-1, TRAJ32)
CAASIYGGATNKLIF

SEQ ID NO: 116334 - protein, 14 aa, Homo sapiens
  CDR3 for beta chain variable domain of TCR clone 58167 (TRBV7-9, TRBJ2-1)
CASSLASGGNEQFF

SEQ ID NO: 116335 - protein, 10 aa, Homo sapiens
  CDR3 for alpha chain variable domain of TCR clone 58168 (TRAV1-2, TRAJ18)
CAVRGEAQPW

SEQ ID NO: 116336 - protein, 13 aa, Homo sapiens
  CDR3 for beta chain variable domain of TCR clone 58168 (TRBV20-1, TRBJ1-1)
CSARVGGNTETFF

SEQ ID NO: 116337 - protein, 16 aa, Homo sapiens
  CDR3 for alpha chain variable domain of TCR clone 58169 (TRAV3, TRAJ10)
CAVRDMRAGGGNKLTF

SEQ ID NO: 116338 - protein, 11 aa, Homo sapiens
  CDR3 for beta chain variable domain of TCR clone 58169 (TRBV29-1, TRBJ2-5)
CSEDRTRTQYF

SEQ ID NO: 116339 - protein, 14 aa, Homo sapiens
  CDR3 for alpha chain variable domain of TCR clone 58170 (TRAV12-1, TRAJ17)
CVVNYKAAGNKLTF

SEQ ID NO: 116340 - protein, 14 aa, Homo sapiens
  CDR3 for beta chain variable domain of TCR clone 58170 (TRBV7-9, TRBJ2-1)
CASSPRDSLYEQFF

SEQ ID NO: 116341 - protein, 12 aa, Homo sapiens
  CDR3 for alpha chain variable domain of TCR clone 58171 (TRAV3, TRAJ39)
CAVIEWSNMLTF

SEQ ID NO: 116342 - protein, 14 aa, Homo sapiens
  CDR3 for beta chain variable domain of TCR clone 58171 (TRBV7-8, TRBJ2-3)
CASSFPDAQDTQYF

SEQ ID NO: 116343 - protein, 14 aa, Homo sapiens
  CDR3 for alpha chain variable domain of TCR clone 58172 (TRAV12-3, TRAJ11)
CAMTTNSGYSTLTF

SEQ ID NO: 116344 - protein, 16 aa, Homo sapiens
  CDR3 for beta chain variable domain of TCR clone 58172 (TRBV20-1, TRBJ1-1)
CSARALAQGMNTEAFF

SEQ ID NO: 116345 - protein, 20 aa, Homo sapiens
  CDR3 for alpha chain variable domain of TCR clone 58173 (TRAV12-1, TRAJ42)
SSVIQPPTSVKGGSQGNLIF

SEQ ID NO: 116346 - protein, 18 aa, Homo sapiens
  CDR3 for beta chain variable domain of TCR clone 58173 (TRBV11-2, TRBJ2-3)
CASSLGGASRGAPNTKYF

SEQ ID NO: 116347 - protein, 14 aa, Homo sapiens
  CDR3 for alpha chain variable domain of TCR clone 58174 (TRAV1-2, TRAJ16)
CAVNRFSDGQKLLF

SEQ ID NO: 116348 - protein, 15 aa, Homo sapiens
  CDR3 for beta chain variable domain of TCR clone 58174 (TRBV20-1, TRBJ2-7)
CSARGRVSGMDEQYF

SEQ ID NO: 116349 - protein, 23 aa, Homo sapiens
  CDR3 for alpha chain variable domain of TCR clone 58175 (TRAV1-1, TRAJ11)
LLQELQMKDSASYFCAGYSTLTF

SEQ ID NO: 116350 - protein, 15 aa, Homo sapiens
  CDR3 for beta chain variable domain of TCR clone 58175 (TRBV6-5, TRBJ2-1)
CASRGDVDSYNEQFF

SEQ ID NO: 116351 - protein, 19 aa, Homo sapiens
  CDR3 for alpha chain variable domain of TCR clone 58176 (TRAV38-1, TRAJ53)
CAFMKHGLDSGGSNYKLTF

SEQ ID NO: 116352 - protein, 13 aa, Homo sapiens
  CDR3 for beta chain variable domain of TCR clone 58176 (TRBV19, TRBJ2-7)
CASSPRQSYEQYF

SEQ ID NO: 116353 - protein, 10 aa, Homo sapiens
  CDR3 for alpha chain variable domain of TCR clone 58177 (TRAV8-3, TRAJ27)
CAVGPSKTNA

SEQ ID NO: 116354 - protein, 15 aa, Homo sapiens
  CDR3 for beta chain variable domain of TCR clone 58177 (TRBV7-2, TRBJ2-1)
CASSSGLAGGNEQFF

SEQ ID NO: 116355 - protein, 16 aa, Homo sapiens
  CDR3 for alpha chain variable domain of TCR clone 58178 (TRAV14/DV4, TRAJ21)
CAMGEGPENNFNKFYF

SEQ ID NO: 116356 - protein, 12 aa, Homo sapiens
  CDR3 for beta chain variable domain of TCR clone 58178 (TRBV29-1, TRBJ2-2)
CSVDKYTGELFF

SEQ ID NO: 116357 - protein, 14 aa, Homo sapiens
  CDR3 for alpha chain variable domain of TCR clone 58179 (TRAV1-2, TRAJ8)
CAVREDTGSQKLVF

SEQ ID NO: 116358 - protein, 14 aa, Homo sapiens
  CDR3 for beta chain variable domain of TCR clone 58179 (TRBV11-2, TRBJ2-3)
CASSRLARTDTQYF

SEQ ID NO: 116359 - protein, 12 aa, Homo sapiens
  CDR3 for alpha chain variable domain of TCR clone 58180 (TRAV1-1, TRAJ43)
CASRVSSNDMRF

SEQ ID NO: 116360 - protein, 15 aa, Homo sapiens
  CDR3 for beta chain variable domain of TCR clone 58180 (TRBV5-1, TRBJ2-7)
CASSLGDFTTYEQYF

SEQ ID NO: 116361 - protein, 14 aa, Homo sapiens
  CDR3 for alpha chain variable domain of TCR clone 58181 (TRAV12-1, TRAJ22)
CVVNVGGSARQLTF

SEQ ID NO: 116362 - protein, 12 aa, Homo sapiens
  CDR3 for beta chain variable domain of TCR clone 58181 (TRBV11-2, TRBJ2-2)
CASSLGGGELFF

SEQ ID NO: 116363 - protein, 12 aa, Homo sapiens
  CDR3 for alpha chain variable domain of TCR clone 58182 (TRAV27, TRAJ9)
CAGESGGFKTIF

SEQ ID NO: 116364 - protein, 14 aa, Homo sapiens
  CDR3 for beta chain variable domain of TCR clone 58182 (TRBV6-1, TRBJ2-1)
CASAKDGFYNGQFF

SEQ ID NO: 116365 - protein, 16 aa, Homo sapiens
  CDR3 for alpha chain variable domain of TCR clone 58183 (TRAV30, TRAJ24)
CGTEIVDADSWGKFQF

SEQ ID NO: 116366 - protein, 14 aa, Homo sapiens
  CDR3 for beta chain variable domain of TCR clone 58183 (TRBV7-2, TRBJ2-7)
CASSPKTSFYEQYV

SEQ ID NO: 116367 - protein, 15 aa, Homo sapiens
  CDR3 for alpha chain variable domain of TCR clone 58184 (TRAV38-1, TRAJ37)
CAFIFGSGNKGKLIF

SEQ ID NO: 116368 - protein, 12 aa, Homo sapiens
  CDR3 for beta chain variable domain of TCR clone 58184 (TRBV7-9, TRBJ2-7)
CASSLEGYEQYF

SEQ ID NO: 116369 - protein, 14 aa, Homo sapiens
  CDR3 for alpha chain variable domain of TCR clone 58185 (TRAV17, TRAJ42)
CAQNYRGSQGNLIF

SEQ ID NO: 116370 - protein, 13 aa, Homo sapiens
  CDR3 for beta chain variable domain of TCR clone 58185 (TRBV20-1, TRBJ1-2)
CSAPRSGRYGYTF

SEQ ID NO: 116371 - protein, 15 aa, Homo sapiens
  CDR3 for alpha chain variable domain of TCR clone 58186 (TRAV17, TRAJ28)
CATVDSGAGSYQLTI

SEQ ID NO: 116372 - protein, 13 aa, Homo sapiens
  CDR3 for beta chain variable domain of TCR clone 58186 (TRBV5-4, TRBJ2-5)
CASSRQEGETQYF

SEQ ID NO: 116373 - protein, 12 aa, Homo sapiens
  CDR3 for alpha chain variable domain of TCR clone 58187 (TRAV2, TRAJ10)
YASTGGGNKLTF

SEQ ID NO: 116374 - protein, 14 aa, Homo sapiens
  CDR3 for beta chain variable domain of TCR clone 58187 (TRBV19, TRBJ2-5)
CASSMTGQQETQYF

SEQ ID NO: 116375 - protein, 16 aa, Homo sapiens
  CDR3 for alpha chain variable domain of TCR clone 58188 (TRAV12-3, TRAJ53)
CAMSPGRGGSNYKLTF

SEQ ID NO: 116376 - protein, 13 aa, Homo sapiens
  CDR3 for beta chain variable domain of TCR clone 58188 (TRBV10-3, TRBJ2-7)
CASKLAVNYEQYF

SEQ ID NO: 116377 - protein, 14 aa, Homo sapiens
  CDR3 for alpha chain variable domain of TCR clone 58189 (TRAV12-2, TRAJ8)
CAVKENTGFQKLVF

SEQ ID NO: 116378 - protein, 13 aa, Homo sapiens
  CDR3 for beta chain variable domain of TCR clone 58189 (TRBV18, TRBJ1-2)
CASSASAMEGYTF

SEQ ID NO: 116379 - protein, 15 aa, Homo sapiens
  CDR3 for alpha chain variable domain of TCR clone 58190 (TRAV8-3, TRAJ40)
CAVGPYTSGTYKHIF

SEQ ID NO: 116380 - protein, 16 aa, Homo sapiens
  CDR3 for beta chain variable domain of TCR clone 58190 (TRBV7-2, TRBJ2-7)
CASSLDPGGGSGEQYF

SEQ ID NO: 116381 - protein, 12 aa, Homo sapiens
  CDR3 for alpha chain variable domain of TCR clone 58191 (TRAV1-2, TRAJ4)
CAVRAAGNKLIF

SEQ ID NO: 116382 - protein, 16 aa, Homo sapiens
  CDR3 for beta chain variable domain of TCR clone 58191 (TRBV20-1, TRBJ2-1)
CSAPGLAGSYSDEQFF

SEQ ID NO: 116383 - protein, 12 aa, Homo sapiens
  CDR3 for alpha chain variable domain of TCR clone 58192 (TRAV13-1, TRAJ49)
CAASPMGNPFYF

SEQ ID NO: 116384 - protein, 13 aa, Homo sapiens
  CDR3 for beta chain variable domain of TCR clone 58192 (TRBV20-1, TRBJ2-2)
CSASAAGTGELFF

SEQ ID NO: 116385 - protein, 13 aa, Homo sapiens
  CDR3 for alpha chain variable domain of TCR clone 58193 (TRAV25, TRAJ29)
CAGRFVGNTPLVF

SEQ ID NO: 116386 - protein, 15 aa, Homo sapiens
  CDR3 for beta chain variable domain of TCR clone 58193 (TRBV29-1, TRBJ2-1)
CSVRTSLSPYNEQFF

SEQ ID NO: 116387 - protein, 13 aa, Homo sapiens
  CDR3 for alpha chain variable domain of TCR clone 58194 (TRAV3, TRAJ21)
CAVREPDFNKFYF

SEQ ID NO: 116388 - protein, 16 aa, Homo sapiens
  CDR3 for beta chain variable domain of TCR clone 58194 (TRBV7-7, TRBJ2-1)
CASSLASGTSYNEQFF

SEQ ID NO: 116389 - protein, 12 aa, Homo sapiens
  CDR3 for alpha chain variable domain of TCR clone 58195 (TRAV22, TRAJ22)
CAPGGSARQLTL

SEQ ID NO: 116390 - protein, 13 aa, Homo sapiens
  CDR3 for beta chain variable domain of TCR clone 58195 (TRBV15, TRBJ1-6)
CATSGGLNSPLHF

SEQ ID NO: 116391 - protein, 10 aa, Homo sapiens
  CDR3 for alpha chain variable domain of TCR clone 58196 (TRAV20, TRAJ22)
SAAPARQLTF

SEQ ID NO: 116392 - protein, 14 aa, Homo sapiens
  CDR3 for beta chain variable domain of TCR clone 58196 (TRBV19, TRBJ2-1)
CASSMGSGATEQFF

SEQ ID NO: 116393 - protein, 13 aa, Homo sapiens
  CDR3 for alpha chain variable domain of TCR clone 58197 (TRAV8-6, TRAJ5)
CAVLDTGRKALTF

SEQ ID NO: 116394 - protein, 12 aa, Homo sapiens
  CDR3 for beta chain variable domain of TCR clone 58197 (TRBV7-9, TRBJ1-6)
CASSASESPLHF

SEQ ID NO: 116395 - protein, 13 aa, Homo sapiens
  CDR3 for alpha chain variable domain of TCR clone 58198 (TRAV23/DV6, TRAJ12)
RAPRVDSSYKLIF

SEQ ID NO: 116396 - protein, 12 aa, Homo sapiens
  CDR3 for beta chain variable domain of TCR clone 58198 (TRBV7-6, TRBJ2-5)
CASSLSQETQYF

SEQ ID NO: 116397 - protein, 14 aa, Homo sapiens
  CDR3 for alpha chain variable domain of TCR clone 58199 (TRAV29/DV5, TRAJ45)
CAASFRGGADGITF

SEQ ID NO: 116398 - protein, 11 aa, Homo sapiens
  CDR3 for beta chain variable domain of TCR clone 58199 (TRBV11-2, TRBJ2-2)
CASSLPGELFF

SEQ ID NO: 116399 - protein, 14 aa, Homo sapiens
  CDR3 for alpha chain variable domain of TCR clone 58200 (TRAV25, TRAJ35)
CARRMEGFGKVLHC

SEQ ID NO: 116400 - protein, 13 aa, Homo sapiens
  CDR3 for beta chain variable domain of TCR clone 58200 (TRBV7-2, TRBJ1-4)
CASSLAGLEKLFF

SEQ ID NO: 116401 - protein, 16 aa, Homo sapiens
  CDR3 for alpha chain variable domain of TCR clone 58201 (TRAV8-3, TRAJ42)
CAVGEGNGGSQGNLIF

SEQ ID NO: 116402 - protein, 14 aa, Homo sapiens
  CDR3 for beta chain variable domain of TCR clone 58201 (TRBV7-2, TRBJ2-1)
CASSRGGARNGQFF

SEQ ID NO: 116403 - protein, 15 aa, Homo sapiens
  CDR3 for alpha chain variable domain of TCR clone 58202 (TRAV29/DV5, TRAJ24)
CASSGATDSWGKFQF

SEQ ID NO: 116404 - protein, 12 aa, Homo sapiens
  CDR3 for beta chain variable domain of TCR clone 58202 (TRBV11-2, TRBJ2-2)
CASSLPTGELFF

SEQ ID NO: 116405 - protein, 12 aa, Homo sapiens
  CDR3 for alpha chain variable domain of TCR clone 58203 (TRAV12-3, TRAJ17)
CAMTLTGNKLTF

SEQ ID NO: 116406 - protein, 14 aa, Homo sapiens
  CDR3 for beta chain variable domain of TCR clone 58203 (TRBV23-1, TRBJ2-5)
CASSFLRSQETQYF

SEQ ID NO: 116407 - protein, 15 aa, Homo sapiens
  CDR3 for alpha chain variable domain of TCR clone 58204 (TRAV13-1, TRAJ44)
CAASRGGCTASKLTF

SEQ ID NO: 116408 - protein, 14 aa, Homo sapiens
  CDR3 for beta chain variable domain of TCR clone 58204 (TRBV7-2, TRBJ2-5)
CASSPRGSSETQYF

SEQ ID NO: 116409 - protein, 15 aa, Homo sapiens
  CDR3 for alpha chain variable domain of TCR clone 58205 (TRAV20, TRAJ6)
CALRLQSGGSYIPTF

SEQ ID NO: 116410 - protein, 14 aa, Homo sapiens
  CDR3 for beta chain variable domain of TCR clone 58205 (TRBV12-4, TRBJ2-7)
CASSASGGWYEQYF

SEQ ID NO: 116411 - protein, 13 aa, Homo sapiens
  CDR3 for alpha chain variable domain of TCR clone 58206 (TRAV8-3, TRAJ48)
CVVVPFGNEKLTF

SEQ ID NO: 116412 - protein, 15 aa, Homo sapiens
  CDR3 for beta chain variable domain of TCR clone 58206 (TRBV11-2, TRBJ2-1)
CASSSPSTRYNEQFF

SEQ ID NO: 116413 - protein, 14 aa, Homo sapiens
  CDR3 for alpha chain variable domain of TCR clone 58207 (TRAV1-2, TRAJ27)
CAVRSGTNAGKSTF

SEQ ID NO: 116414 - protein, 15 aa, Homo sapiens
  CDR3 for beta chain variable domain of TCR clone 58207 (TRBV18, TRBJ2-7)
CASSPPQGRTYEQYF

SEQ ID NO: 116415 - protein, 14 aa, Homo sapiens
  CDR3 for alpha chain variable domain of TCR clone 58208 (TRAV1-2, TRAJ15)
CAVRDRQAGTALIF

SEQ ID NO: 116416 - protein, 12 aa, Homo sapiens
  CDR3 for beta chain variable domain of TCR clone 58208 (TRBV12-4, TRBJ2-7)
CASSLGGYEQYF

SEQ ID NO: 116417 - protein, 14 aa, Homo sapiens
  CDR3 for alpha chain variable domain of TCR clone 58209 (TRAV12-3, TRAJ58)
CAMSTETSSSRLTF

SEQ ID NO: 116418 - protein, 13 aa, Homo sapiens
  CDR3 for beta chain variable domain of TCR clone 58209 (TRBV27, TRBJ2-3)
CASSWGRTDTQYF

SEQ ID NO: 116419 - protein, 11 aa, Homo sapiens
  CDR3 for alpha chain variable domain of TCR clone 58210 (TRAV17, TRAJ9)
CGFTEGFKTIF

SEQ ID NO: 116420 - protein, 14 aa, Homo sapiens
  CDR3 for beta chain variable domain of TCR clone 58210 (TRBV7-9, TRBJ2-2)
CASSLVQDTGELFF

SEQ ID NO: 116421 - protein, 11 aa, Homo sapiens
  CDR3 for alpha chain variable domain of TCR clone 58211 (TRAV21, TRAJ34)
CAHYNTGKLIF

SEQ ID NO: 116422 - protein, 13 aa, Homo sapiens
  CDR3 for beta chain variable domain of TCR clone 58211 (TRBV7-6, TRBJ1-2)
CASSLVADYGYTF

SEQ ID NO: 116423 - protein, 13 aa, Homo sapiens
  CDR3 for alpha chain variable domain of TCR clone 58212 (TRAV20, TRAJ37)
CAGCSSNTGKLIF

SEQ ID NO: 116424 - protein, 21 aa, Homo sapiens
  CDR3 for beta chain variable domain of TCR clone 58212 (TRBV4-3, TRBJ2-3)
PCSQKTRPCISAPAAPDTQYF

SEQ ID NO: 116425 - protein, 15 aa, Homo sapiens
  CDR3 for alpha chain variable domain of TCR clone 58213 (TRAV3, TRAJ17)
CAVRDTGAAGNKITF

SEQ ID NO: 116426 - protein, 15 aa, Homo sapiens
  CDR3 for beta chain variable domain of TCR clone 58213 (TRBV20-1, TRBJ2-7)
CSARDRVSGMDEQYF

SEQ ID NO: 116427 - protein, 12 aa, Homo sapiens
  CDR3 for alpha chain variable domain of TCR clone 58214 (TRAV35, TRAJ39)
LAPINAGNMLTF

SEQ ID NO: 116428 - protein, 16 aa, Homo sapiens
  CDR3 for beta chain variable domain of TCR clone 58214 (TRBV2, TRBJ2-3)
CASSTSVEGVTDTQYF

SEQ ID NO: 116429 - protein, 19 aa, Homo sapiens
  CDR3 for alpha chain variable domain of TCR clone 58215 (TRAV26-1, TRAJ52)
CIVRAHRNAGGTSFGKLTF

SEQ ID NO: 116430 - protein, 15 aa, Homo sapiens
  CDR3 for beta chain variable domain of TCR clone 58215 (TRBV29-1, TRBJ2-1)
CSGRDRKSSYNEQFF

SEQ ID NO: 116431 - protein, 15 aa, Homo sapiens
  CDR3 for alpha chain variable domain of TCR clone 58216 (TRAV12-3, TRAJ11)
CAMSEENSGYGTLTF

SEQ ID NO: 116432 - protein, 16 aa, Homo sapiens
  CDR3 for beta chain variable domain of TCR clone 58216 (TRBV5-1, TRBJ2-7)
CASSLEGLAGLYEQYF

SEQ ID NO: 116433 - protein, 13 aa, Homo sapiens
  CDR3 for alpha chain variable domain of TCR clone 58217 (TRAV8-3, TRAJ4)
WVFYSGGYNKLIF

SEQ ID NO: 116434 - protein, 13 aa, Homo sapiens
  CDR3 for beta chain variable domain of TCR clone 58217 (TRBV7-9, TRBJ1-2)
CASSLKQNYGYTF

SEQ ID NO: 116435 - protein, 14 aa, Homo sapiens
  CDR3 for alpha chain variable domain of TCR clone 58218 (TRAV3, TRAJ7)
CAVREEEREQKTRF

SEQ ID NO: 116436 - protein, 12 aa, Homo sapiens
  CDR3 for beta chain variable domain of TCR clone 58218 (TRBV7-8, TRBJ2-7)
CASSLGDREQYF

SEQ ID NO: 116437 - protein, 12 aa, Homo sapiens
  CDR3 for alpha chain variable domain of TCR clone 58219 (TRAV12-1, TRAJ30)
CVVNPRDDKIIF

SEQ ID NO: 116438 - protein, 14 aa, Homo sapiens
  CDR3 for beta chain variable domain of TCR clone 58219 (TRBV11-2, TRBJ2-5)
CASRPLAGRETQYF

SEQ ID NO: 116439 - protein, 14 aa, Homo sapiens
  CDR3 for alpha chain variable domain of TCR clone 58220 (TRAV17, TRAJ4)
CATAPLGGYNKLLF

SEQ ID NO: 116440 - protein, 13 aa, Homo sapiens
  CDR3 for beta chain variable domain of TCR clone 58220 (TRBV12-4, TRBJ1-3)
CASSLASGNTIYF

SEQ ID NO: 116441 - protein, 12 aa, Homo sapiens
  CDR3 for alpha chain variable domain of TCR clone 58221 (TRAV2, TRAJ31)
CAVEDNNARLMF

SEQ ID NO: 116442 - protein, 16 aa, Homo sapiens
  CDR3 for beta chain variable domain of TCR clone 58221 (TRBV7-6, TRBJ2-3)
CASSRGLAGSTDTQYF

SEQ ID NO: 116443 - protein, 13 aa, Homo sapiens
  CDR3 for alpha chain variable domain of TCR clone 58222 (TRAV17, TRAJ15)
RATDARAGTALIF

SEQ ID NO: 116444 - protein, 15 aa, Homo sapiens
  CDR3 for beta chain variable domain of TCR clone 58222 (TRBV20-1, TRBJ2-7)
CSARDRVSGMDEQYF

SEQ ID NO: 116445 - protein, 17 aa, Homo sapiens
  CDR3 for alpha chain variable domain of TCR clone 58223 (TRAV26-2, TRAJ42)
CILRDVGYGGCQGNLIF

SEQ ID NO: 116446 - protein, 16 aa, Homo sapiens
  CDR3 for beta chain variable domain of TCR clone 58223 (TRBV6-5, TRBJ2-1)
CASSETLAGHYNEQFF

SEQ ID NO: 116447 - protein, 13 aa, Homo sapiens
  CDR3 for alpha chain variable domain of TCR clone 58224 (TRAV13-1, TRAJ39)
CAASIWAGNMLTF

SEQ ID NO: 116448 - protein, 15 aa, Homo sapiens
  CDR3 for beta chain variable domain of TCR clone 58224 (TRBV11-3, TRBJ2-3)
CASLKDGREGDTQYF

SEQ ID NO: 116449 - protein, 16 aa, Homo sapiens
  CDR3 for alpha chain variable domain of TCR clone 58225 (TRAV30, TRAJ24)
CGTEIVDDDSWGKFQF

SEQ ID NO: 116450 - protein, 13 aa, Homo sapiens
  CDR3 for beta chain variable domain of TCR clone 58225 (TRBV18, TRBJ1-1)
CASSGGRNTEAFF

SEQ ID NO: 116451 - protein, 15 aa, Homo sapiens
  CDR3 for alpha chain variable domain of TCR clone 58226 (TRAV26-1, TRAJ29)
CIVRVEGSGNTPLAS

SEQ ID NO: 116452 - protein, 15 aa, Homo sapiens
  CDR3 for beta chain variable domain of TCR clone 58226 (TRBV7-9, TRBJ1-5)
CASSQGHQPNQPQHF

SEQ ID NO: 116453 - protein, 11 aa, Homo sapiens
  CDR3 for alpha chain variable domain of TCR clone 58227 (TRAV35, TRAJ34)
CWARNTDKLIF

SEQ ID NO: 116454 - protein, 15 aa, Homo sapiens
  CDR3 for beta chain variable domain of TCR clone 58227 (TRBV19, TRBJ1-2)
CASSVGQVLNYGYTF

SEQ ID NO: 116455 - protein, 15 aa, Homo sapiens
  CDR3 for alpha chain variable domain of TCR clone 58228 (TRAV3, TRAJ5)
CAVRDLDTGRRALTF

SEQ ID NO: 116456 - protein, 15 aa, Homo sapiens
  CDR3 for beta chain variable domain of TCR clone 58228 (TRBV19, TRBJ1-1)
CASMGFRDVNTEAFF

SEQ ID NO: 116457 - protein, 14 aa, Homo sapiens
  CDR3 for alpha chain variable domain of TCR clone 58229 (TRAV26-1, TRAJ38)
CIADNAGNNRKLIW

SEQ ID NO: 116458 - protein, 13 aa, Homo sapiens
  CDR3 for beta chain variable domain of TCR clone 58229 (TRBV7-3, TRBJ2-5)
CASSFRGGETQYF

SEQ ID NO: 116459 - protein, 14 aa, Homo sapiens
  CDR3 for alpha chain variable domain of TCR clone 58230 (TRAV1-2, TRAJ16)
CAVNRFSDGQKLLF

SEQ ID NO: 116460 - protein, 15 aa, Homo sapiens
  CDR3 for beta chain variable domain of TCR clone 58230 (TRBV11-2, TRBJ2-1)
CASSPAGQSLNEQFF

SEQ ID NO: 116461 - protein, 12 aa, Homo sapiens
  CDR3 for alpha chain variable domain of TCR clone 58231 (TRAV23/DV6, TRAJ16)
CAATGTGQKLPF

SEQ ID NO: 116462 - protein, 15 aa, Homo sapiens
  CDR3 for beta chain variable domain of TCR clone 58231 (TRBV28, TRBJ1-2)
CASSSYRGLVYGYTF

SEQ ID NO: 116463 - protein, 14 aa, Homo sapiens
  CDR3 for alpha chain variable domain of TCR clone 58232 (TRAV13-1, TRAJ44)
CAAKATGPASKLTF

SEQ ID NO: 116464 - protein, 12 aa, Homo sapiens
  CDR3 for beta chain variable domain of TCR clone 58232 (TRBV7-8, TRBJ2-7)
CASSLGDREQYF

SEQ ID NO: 116465 - protein, 16 aa, Homo sapiens
  CDR3 for alpha chain variable domain of TCR clone 58233 (TRAV16, TRAJ52)
CALSAAGGTSYGNLTF

SEQ ID NO: 116466 - protein, 17 aa, Homo sapiens
  CDR3 for beta chain variable domain of TCR clone 58233 (TRBV11-2, TRBJ2-1)
CASSLYPPGVEYNEQFF

SEQ ID NO: 116467 - protein, 11 aa, Homo sapiens
  CDR3 for alpha chain variable domain of TCR clone 58234 (TRAV3, TRAJ21)
CAVGNFNKFYF

SEQ ID NO: 116468 - protein, 16 aa, Homo sapiens
  CDR3 for beta chain variable domain of TCR clone 58234 (TRBV25-1, TRBJ1-1)
CASSGDRDRGRIEAFF

SEQ ID NO: 116469 - protein, 15 aa, Homo sapiens
  CDR3 for alpha chain variable domain of TCR clone 58235 (TRAV12-3, TRAJ6)
CAMSAASGGSYIPTF

SEQ ID NO: 116470 - protein, 13 aa, Homo sapiens
  CDR3 for beta chain variable domain of TCR clone 58235 (TRBV20-1, TRBJ1-2)
CSAGTERIYGYTF

SEQ ID NO: 116471 - protein, 14 aa, Homo sapiens
  CDR3 for alpha chain variable domain of TCR clone 58236 (TRAV4, TRAJ26)
CLVGPHDYGQNFVF

SEQ ID NO: 116472 - protein, 17 aa, Homo sapiens
  CDR3 for beta chain variable domain of TCR clone 58236 (TRBV24-1, TRBJ2-1)
CATSDVSTSGTYNEQFF

SEQ ID NO: 116473 - protein, 10 aa, Homo sapiens
  CDR3 for alpha chain variable domain of TCR clone 58237 (TRAV1-2, TRAJ31)
CVSEDARLMF

SEQ ID NO: 116474 - protein, 14 aa, Homo sapiens
  CDR3 for beta chain variable domain of TCR clone 58237 (TRBV19, TRBJ2-1)
CASPTFVVSGEQFF

SEQ ID NO: 116475 - protein, 13 aa, Homo sapiens
  CDR3 for alpha chain variable domain of TCR clone 58238 (TRAV12-1, TRAJ40)
CVVPTSGTYKYIF

SEQ ID NO: 116476 - protein, 18 aa, Homo sapiens
  CDR3 for beta chain variable domain of TCR clone 58238 (TRBV7-6, TRBJ2-1)
CASSARTSGMSSYNEQFF

SEQ ID NO: 116477 - protein, 12 aa, Homo sapiens
  CDR3 for alpha chain variable domain of TCR clone 58239 (TRAV3, TRAJ27)
CAVRDGEGKSTF

SEQ ID NO: 116478 - protein, 13 aa, Homo sapiens
  CDR3 for beta chain variable domain of TCR clone 58239 (TRBV10-3, TRBJ1-2)
CAINADLNYGYTF

SEQ ID NO: 116479 - protein, 13 aa, Homo sapiens
  CDR3 for alpha chain variable domain of TCR clone 58240 (TRAV21, TRAJ27)
CAARPGNAGKSTF

SEQ ID NO: 116480 - protein, 11 aa, Homo sapiens
  CDR3 for beta chain variable domain of TCR clone 58240 (TRBV11-2, TRBJ2-2)
CASSLPRELFF

SEQ ID NO: 116481 - protein, 16 aa, Homo sapiens
  CDR3 for alpha chain variable domain of TCR clone 58241 (TRAV3, TRAJ37)
CAVRGRGSGITGKLIF

SEQ ID NO: 116482 - protein, 13 aa, Homo sapiens
  CDR3 for beta chain variable domain of TCR clone 58241 (TRBV14, TRBJ2-7)
CASSQDRRGEQYF

SEQ ID NO: 116483 - protein, 15 aa, Homo sapiens
  CDR3 for alpha chain variable domain of TCR clone 58242 (TRAV35, TRAJ58)
CAGRRQETSGSGLTF

SEQ ID NO: 116484 - protein, 11 aa, Homo sapiens
  CDR3 for beta chain variable domain of TCR clone 58242 (TRBV11-2, TRBJ1-1)
CASSINTEAFF

SEQ ID NO: 116485 - protein, 18 aa, Homo sapiens
  CDR3 for alpha chain variable domain of TCR clone 58243 (TRAV26-1, TRAJ23)
CIVRFGLEVWNQGGKLIF

SEQ ID NO: 116486 - protein, 16 aa, Homo sapiens
  CDR3 for beta chain variable domain of TCR clone 58243 (TRBV12-4, TRBJ2-5)
CASSFFVRGRQETQYF

SEQ ID NO: 116487 - protein, 16 aa, Homo sapiens
  CDR3 for alpha chain variable domain of TCR clone 58244 (TRAV16, TRAJ4)
CALSRMFSGGYNKLIF

SEQ ID NO: 116488 - protein, 16 aa, Homo sapiens
  CDR3 for beta chain variable domain of TCR clone 58244 (TRBV24-1, TRBJ2-3)
CATSDPGTGPTDTQYF

SEQ ID NO: 116489 - protein, 14 aa, Homo sapiens
  CDR3 for alpha chain variable domain of TCR clone 58245 (TRAV23/DV6, TRAJ11)
CAASLESGYSILTF

SEQ ID NO: 116490 - protein, 13 aa, Homo sapiens
  CDR3 for beta chain variable domain of TCR clone 58245 (TRBV4-1, TRBJ2-5)
CASSLTRGETQYF

SEQ ID NO: 116491 - protein, 14 aa, Homo sapiens
  CDR3 for alpha chain variable domain of TCR clone 58246 (TRAV1-2, TRAJ16)
CAVNRFPDGQKLPF

SEQ ID NO: 116492 - protein, 15 aa, Homo sapiens
  CDR3 for beta chain variable domain of TCR clone 58246 (TRBV9, TRBJ1-6)
CASSVAGTGDSPLHF

SEQ ID NO: 116493 - protein, 11 aa, Homo sapiens
  CDR3 for alpha chain variable domain of TCR clone 58247 (TRAV35, TRAJ30)
CAGERDDKIIF

SEQ ID NO: 116494 - protein, 14 aa, Homo sapiens
  CDR3 for beta chain variable domain of TCR clone 58247 (TRBV15, TRBJ2-5)
CATSGDRRQETQYF

SEQ ID NO: 116495 - protein, 15 aa, Homo sapiens
  CDR3 for alpha chain variable domain of TCR clone 58248 (TRAV21, TRAJ53)
CANLNSGGSNYKLTF

SEQ ID NO: 116496 - protein, 16 aa, Homo sapiens
  CDR3 for beta chain variable domain of TCR clone 58248 (TRBV9, TRBJ2-1)
CASSVGGGGNYNEQFF

SEQ ID NO: 116497 - protein, 11 aa, Homo sapiens
  CDR3 for alpha chain variable domain of TCR clone 58249 (TRAV8-3, TRAJ42)
CAVGQGGIMEE

SEQ ID NO: 116498 - protein, 11 aa, Homo sapiens
  CDR3 for beta chain variable domain of TCR clone 58249 (TRBV7-2, TRBJ2-3)
CASSSSDTQYF

SEQ ID NO: 116499 - protein, 14 aa, Homo sapiens
  CDR3 for alpha chain variable domain of TCR clone 58250 (TRAV8-4, TRAJ13)
CAVSEGGGYQKVTF

SEQ ID NO: 116500 - protein, 13 aa, Homo sapiens
  CDR3 for beta chain variable domain of TCR clone 58250 (TRBV29-1, TRBJ1-2)
CSVTHRDWDGYTF

SEQ ID NO: 116501 - protein, 12 aa, Homo sapiens
  CDR3 for alpha chain variable domain of TCR clone 58251 (TRAV1-1, TRAJ20)
CAVREDDYKLSF

SEQ ID NO: 116502 - protein, 15 aa, Homo sapiens
  CDR3 for beta chain variable domain of TCR clone 58251 (TRBV5-6, TRBJ2-7)
CASSLPGQVFYEQYF

SEQ ID NO: 116503 - protein, 13 aa, Homo sapiens
  CDR3 for alpha chain variable domain of TCR clone 58252 (TRAV20, TRAJ37)
CAGCSSNTGKLIF

SEQ ID NO: 116504 - protein, 11 aa, Homo sapiens
  CDR3 for beta chain variable domain of TCR clone 58252 (TRBV12-4, TRBJ2-3)
CASNATDTQYF

SEQ ID NO: 116505 - protein, 16 aa, Homo sapiens
  CDR3 for alpha chain variable domain of TCR clone 58253 (TRAV30, TRAJ24)
CGTEIVDADSWGKFQF

SEQ ID NO: 116506 - protein, 13 aa, Homo sapiens
  CDR3 for beta chain variable domain of TCR clone 58253 (TRBV7-3, TRBJ1-1)
CASSQDWGAEAFF

SEQ ID NO: 116507 - protein, 15 aa, Homo sapiens
  CDR3 for alpha chain variable domain of TCR clone 58254 (TRAV8-2, TRAJ28)
CVVSESGAGSYQLTF

SEQ ID NO: 116508 - protein, 13 aa, Homo sapiens
  CDR3 for beta chain variable domain of TCR clone 58254 (TRBV12-4, TRBJ1-2)
CASSLRQGKGYTF

SEQ ID NO: 116509 - protein, 17 aa, Homo sapiens
  CDR3 for alpha chain variable domain of TCR clone 58255 (TRAV3, TRAJ38)
CAVRDCLNAGNNRKLIW

SEQ ID NO: 116510 - protein, 14 aa, Homo sapiens
  CDR3 for beta chain variable domain of TCR clone 58255 (TRBV7-2, TRBJ2-7)
CASSPKTSFYEQYF

SEQ ID NO: 116511 - protein, 15 aa, Homo sapiens
  CDR3 for alpha chain variable domain of TCR clone 58256 (TRAV8-3, TRAJ45)
CASSYSGGGADGLPF

SEQ ID NO: 116512 - protein, 15 aa, Homo sapiens
  CDR3 for beta chain variable domain of TCR clone 58256 (TRBV27, TRBJ1-4)
CASSPRHATNEKLFF

SEQ ID NO: 116513 - protein, 15 aa, Homo sapiens
  CDR3 for alpha chain variable domain of TCR clone 58257 (TRAV3, TRAJ5)
CAVIDRKTGRRALTF

SEQ ID NO: 116514 - protein, 15 aa, Homo sapiens
  CDR3 for beta chain variable domain of TCR clone 58257 (TRBV7-8, TRBJ2-1)
CASSLADSLYNEQFF

SEQ ID NO: 116515 - protein, 13 aa, Homo sapiens
  CDR3 for alpha chain variable domain of TCR clone 58258 (TRAV12-1, TRAJ37)
CVVNAGNTGRLIF

SEQ ID NO: 116516 - protein, 14 aa, Homo sapiens
  CDR3 for beta chain variable domain of TCR clone 58258 (TRBV7-2, TRBJ2-3)
CASRRGLAADTQYF

SEQ ID NO: 116517 - protein, 16 aa, Homo sapiens
  CDR3 for alpha chain variable domain of TCR clone 58259 (TRAV16, TRAJ4)
CALSRMFSGGYNKLIF

SEQ ID NO: 116518 - protein, 16 aa, Homo sapiens
  CDR3 for beta chain variable domain of TCR clone 58259 (TRBV12-4, TRBJ1-5)
RASSRPVGGSNQPQHF

SEQ ID NO: 116519 - protein, 12 aa, Homo sapiens
  CDR3 for alpha chain variable domain of TCR clone 58260 (TRAV3, TRAJ20)
CAVRDGDYKLSF

SEQ ID NO: 116520 - protein, 16 aa, Homo sapiens
  CDR3 for beta chain variable domain of TCR clone 58260 (TRBV7-3, TRBJ2-2)
CASSLKRGTLSGELFF

SEQ ID NO: 116521 - protein, 14 aa, Homo sapiens
  CDR3 for alpha chain variable domain of TCR clone 58261 (TRAV13-2, TRAJ49)
YAEILSNTGNQFYF

SEQ ID NO: 116522 - protein, 15 aa, Homo sapiens
  CDR3 for beta chain variable domain of TCR clone 58261 (TRBV5-1, TRBJ2-1)
CASSQAGYWWNEQFF

SEQ ID NO: 116523 - protein, 16 aa, Homo sapiens
  CDR3 for alpha chain variable domain of TCR clone 58262 (TRAV26-1, TRAJ37)
CIYARHGSSNTGKLIF

SEQ ID NO: 116524 - protein, 13 aa, Homo sapiens
  CDR3 for beta chain variable domain of TCR clone 58262 (TRBV10-3, TRBJ2-7)
CASKLAVNYEQYF

SEQ ID NO: 116525 - protein, 12 aa, Homo sapiens
  CDR3 for alpha chain variable domain of TCR clone 58263 (TRAV12-2, TRAJ42)
CAVGGSQGNLIF

SEQ ID NO: 116526 - protein, 14 aa, Homo sapiens
  CDR3 for beta chain variable domain of TCR clone 58263 (TRBV6-6, TRBJ2-7)
CASSDSGAGYEQYF

SEQ ID NO: 116527 - protein, 14 aa, Homo sapiens
  CDR3 for alpha chain variable domain of TCR clone 58264 (TRAV21, TRAJ37)
CAVKGSSNTSKLIF

SEQ ID NO: 116528 - protein, 14 aa, Homo sapiens
  CDR3 for beta chain variable domain of TCR clone 58264 (TRBV7-2, TRBJ2-1)
CASSRGGARNEQFF

SEQ ID NO: 116529 - protein, 15 aa, Homo sapiens
  CDR3 for alpha chain variable domain of TCR clone 58265 (TRAV14/DV4, TRAJ10)
CAMRELTGGGNKITF

SEQ ID NO: 116530 - protein, 18 aa, Homo sapiens
  CDR3 for beta chain variable domain of TCR clone 58265 (TRBV7-9, TRBJ2-7)
CASSLTTSGSRTWYEQYF

SEQ ID NO: 116531 - protein, 11 aa, Homo sapiens
  CDR3 for alpha chain variable domain of TCR clone 58266 (TRAV2, TRAJ33)
CFMDSNYQLIW

SEQ ID NO: 116532 - protein, 16 aa, Homo sapiens
  CDR3 for beta chain variable domain of TCR clone 58266 (TRBV2, TRBJ2-7)
CASSEPWTGPSYEQYF

SEQ ID NO: 116533 - protein, 16 aa, Homo sapiens
  CDR3 for alpha chain variable domain of TCR clone 58267 (TRAV35, TRAJ28)
CAGQKYSGAGSYQLTF

SEQ ID NO: 116534 - protein, 14 aa, Homo sapiens
  CDR3 for beta chain variable domain of TCR clone 58267 (TRBV12-4, TRBJ2-3)
CASSLQSSTDTQYF

SEQ ID NO: 116535 - protein, 13 aa, Homo sapiens
  CDR3 for alpha chain variable domain of TCR clone 58268 (TRAV12-3, TRAJ9)
CAMSNTGGFKTIF

SEQ ID NO: 116536 - protein, 14 aa, Homo sapiens
  CDR3 for beta chain variable domain of TCR clone 58268 (TRBV11-2, TRBJ2-7)
CASSSTGEGYEQYF

SEQ ID NO: 116537 - protein, 17 aa, Homo sapiens
  CDR3 for alpha chain variable domain of TCR clone 58269 (TRAV3, TRAJ42)
CAVGDRDYGGSQGNLIF

SEQ ID NO: 116538 - protein, 13 aa, Homo sapiens
  CDR3 for beta chain variable domain of TCR clone 58269 (TRBV10-3, TRBJ2-7)
CASKLAVNYEQYF

SEQ ID NO: 116539 - protein, 15 aa, Homo sapiens
  CDR3 for alpha chain variable domain of TCR clone 58270 (TRAV26-1, TRAJ29)
CIVRVEGSGNTPLVF

SEQ ID NO: 116540 - protein, 15 aa, Homo sapiens
  CDR3 for beta chain variable domain of TCR clone 58270 (TRBV7-9, TRBJ1-5)
CASSQGHQPNQPQHF

SEQ ID NO: 116541 - protein, 11 aa, Homo sapiens
  CDR3 for alpha chain variable domain of TCR clone 58271 (TRAV2, TRAJ13)
CASGGYQKVTF

SEQ ID NO: 116542 - protein, 17 aa, Homo sapiens
  CDR3 for beta chain variable domain of TCR clone 58271 (TRBV4-1, TRBJ2-7)
CASSRDPLGVRGGEQYF

SEQ ID NO: 116543 - protein, 16 aa, Homo sapiens
  CDR3 for alpha chain variable domain of TCR clone 58272 (TRAV30, TRAJ24)
CGTEIVDADNWGKFQF

SEQ ID NO: 116544 - protein, 15 aa, Homo sapiens
  CDR3 for beta chain variable domain of TCR clone 58272 (TRBV7-9, TRBJ1-4)
CASSARTGGNEKLFF

SEQ ID NO: 116545 - protein, 15 aa, Homo sapiens
  CDR3 for alpha chain variable domain of TCR clone 58273 (TRAV1-2, TRAJ35)
CAVRDPGGFGNVLHC

SEQ ID NO: 116546 - protein, 14 aa, Homo sapiens
  CDR3 for beta chain variable domain of TCR clone 58273 (TRBV5-1, TRBJ2-1)
CASSLDDRSDEQFF

SEQ ID NO: 116547 - protein, 12 aa, Homo sapiens
  CDR3 for alpha chain variable domain of TCR clone 58274 (TRAV12-3, TRAJ17)
CAMTLTGNKLTF

SEQ ID NO: 116548 - protein, 12 aa, Homo sapiens
  CDR3 for beta chain variable domain of TCR clone 58274 (TRBV11-2, TRBJ2-1)
CASSPGNNGQFF

SEQ ID NO: 116549 - protein, 12 aa, Homo sapiens
  CDR3 for alpha chain variable domain of TCR clone 58275 (TRAV21, TRAJ23)
CAVGPQGGKLIL

SEQ ID NO: 116550 - protein, 13 aa, Homo sapiens
  CDR3 for beta chain variable domain of TCR clone 58275 (TRBV20-1, TRBJ2-7)
CSARTGAGYEQYF

SEQ ID NO: 116551 - protein, 15 aa, Homo sapiens
  CDR3 for alpha chain variable domain of TCR clone 58276 (TRAV35, TRAJ58)
CAGRRQETSGSRLTF

SEQ ID NO: 116552 - protein, 16 aa, Homo sapiens
  CDR3 for beta chain variable domain of TCR clone 58276 (TRBV7-3, TRBJ2-3)
CASSLSGYRPEDTQYF

SEQ ID NO: 116553 - protein, 13 aa, Homo sapiens
  CDR3 for alpha chain variable domain of TCR clone 58277 (TRAV1-1, TRAJ28)
CVTSGAGSYQLTF

SEQ ID NO: 116554 - protein, 17 aa, Homo sapiens
  CDR3 for beta chain variable domain of TCR clone 58277 (TRBV18, TRBJ2-2)
CASSQRSSGQGLGELFF

SEQ ID NO: 116555 - protein, 14 aa, Homo sapiens
  CDR3 for alpha chain variable domain of TCR clone 58278 (TRAV1-2, TRAJ8)
CAVREDTGFQKLVF

SEQ ID NO: 116556 - protein, 14 aa, Homo sapiens
  CDR3 for beta chain variable domain of TCR clone 58278 (TRBV7-9, TRBJ1-1)
CASTPLQYYTEAFF

SEQ ID NO: 116557 - protein, 14 aa, Homo sapiens
  CDR3 for alpha chain variable domain of TCR clone 58279 (TRAV9-2, TRAJ39)
CALYIYNAGNMLTF

SEQ ID NO: 116558 - protein, 15 aa, Homo sapiens
  CDR3 for beta chain variable domain of TCR clone 58279 (TRBV11-1, TRBJ2-7)
CASSLNYGASYEQYF

SEQ ID NO: 116559 - protein, 17 aa, Homo sapiens
  CDR3 for alpha chain variable domain of TCR clone 58280 (TRAV17, TRAJ28)
CATDPRRGGAGSYQLTS

SEQ ID NO: 116560 - protein, 16 aa, Homo sapiens
  CDR3 for beta chain variable domain of TCR clone 58280 (TRBV25-1, TRBJ1-1)
CASSGDRDRGRIEAFF

SEQ ID NO: 116561 - protein, 14 aa, Homo sapiens
  CDR3 for alpha chain variable domain of TCR clone 58281 (TRAV8-6, TRAJ20)
CAVSDRRVRDKLSF

SEQ ID NO: 116562 - protein, 14 aa, Homo sapiens
  CDR3 for beta chain variable domain of TCR clone 58281 (TRBV7-2, TRBJ2-7)
CASSPKTSFYEQYF

SEQ ID NO: 116563 - protein, 15 aa, Homo sapiens
  CDR3 for alpha chain variable domain of TCR clone 58282 (TRAV17, TRAJ13)
CATDAGSGGYQRVTF

SEQ ID NO: 116564 - protein, 17 aa, Homo sapiens
  CDR3 for beta chain variable domain of TCR clone 58282 (TRBV11-2, TRBJ2-1)
CASSLYPPGVEYNEQFF

SEQ ID NO: 116565 - protein, 14 aa, Homo sapiens
  CDR3 for alpha chain variable domain of TCR clone 58283 (TRAV12-2, TRAJ45)
CAVYSGGGADGLTF

SEQ ID NO: 116566 - protein, 14 aa, Homo sapiens
  CDR3 for beta chain variable domain of TCR clone 58283 (TRBV20-1, TRBJ1-5)
CSARDGGSGQPQHF

SEQ ID NO: 116567 - protein, 14 aa, Homo sapiens
  CDR3 for alpha chain variable domain of TCR clone 58284 (TRAV13-2, TRAJ15)
CAENPNQAGTALIF

SEQ ID NO: 116568 - protein, 16 aa, Homo sapiens
  CDR3 for beta chain variable domain of TCR clone 58284 (TRBV12-4, TRBJ1-2)
CASSPTATGKTRGYAF

SEQ ID NO: 116569 - protein, 13 aa, Homo sapiens
  CDR3 for alpha chain variable domain of TCR clone 58285 (TRAV23/DV6, TRAJ16)
CAASISDGQKLLF

SEQ ID NO: 116570 - protein, 14 aa, Homo sapiens
  CDR3 for beta chain variable domain of TCR clone 58285 (TRBV7-2, TRBJ2-7)
CASSPKTSFYEQYF

SEQ ID NO: 116571 - protein, 13 aa, Homo sapiens
  CDR3 for alpha chain variable domain of TCR clone 58286 (TRAV16, TRAJ48)
CSPLNFGNEKLTF

SEQ ID NO: 116572 - protein, 11 aa, Homo sapiens
  CDR3 for beta chain variable domain of TCR clone 58286 (TRBV7-9, TRBJ2-3)
CASSPTDTRYF

SEQ ID NO: 116573 - protein, 10 aa, Homo sapiens
  CDR3 for alpha chain variable domain of TCR clone 58287 (TRAV8-4, TRAJ43)
CAVSADDMRF

SEQ ID NO: 116574 - protein, 15 aa, Homo sapiens
  CDR3 for beta chain variable domain of TCR clone 58287 (TRBV9, TRBJ1-6)
CASSVAGTGDSPLHF

SEQ ID NO: 116575 - protein, 12 aa, Homo sapiens
  CDR3 for alpha chain variable domain of TCR clone 58288 (TRAV13-1, TRAJ48)
CAANFGNEKLTF

SEQ ID NO: 116576 - protein, 13 aa, Homo sapiens
  CDR3 for beta chain variable domain of TCR clone 58288 (TRBV7-3, TRBJ1-1)
CASRQDWGAEAFF

SEQ ID NO: 116577 - protein, 17 aa, Homo sapiens
  CDR3 for alpha chain variable domain of TCR clone 58289 (TRAV13-1, TRAJ28)
CAASPPYSGAGSYQLTF

SEQ ID NO: 116578 - protein, 20 aa, Homo sapiens
  CDR3 for beta chain variable domain of TCR clone 58289 (TRBV11-2, TRBJ2-2)
LRTRPCISVPAASLPGSCFF

SEQ ID NO: 116579 - protein, 14 aa, Homo sapiens
  CDR3 for alpha chain variable domain of TCR clone 58290 (TRAV8-2, TRAJ4)
CVVSPSGGYNKLIF

SEQ ID NO: 116580 - protein, 15 aa, Homo sapiens
  CDR3 for beta chain variable domain of TCR clone 58290 (TRBV10-2, TRBJ2-5)
CASRGSGGPQEAQYF

SEQ ID NO: 116581 - protein, 14 aa, Homo sapiens
  CDR3 for alpha chain variable domain of TCR clone 58291 (TRAV12-3, TRAJ10)
SHLPLTGGGNELTF

SEQ ID NO: 116582 - protein, 15 aa, Homo sapiens
  CDR3 for beta chain variable domain of TCR clone 58291 (TRBV27, TRBJ1-5)
CASSLGTGFDQPQHF

SEQ ID NO: 116583 - protein, 15 aa, Homo sapiens
  CDR3 for alpha chain variable domain of TCR clone 58292 (TRAV12-1, TRAJ47)
CVVTNRLKGGNKLVF

SEQ ID NO: 116584 - protein, 19 aa, Homo sapiens
  CDR3 for beta chain variable domain of TCR clone 58292 (TRBV20-1, TRBJ2-5)
CSARPHGLAGTSKSGTQYF

SEQ ID NO: 116585 - protein, 18 aa, Homo sapiens
  CDR3 for alpha chain variable domain of TCR clone 58293 (TRAV21, TRAJ45)
CCGGPQGGSGGGADGLTF

SEQ ID NO: 116586 - protein, 12 aa, Homo sapiens
  CDR3 for beta chain variable domain of TCR clone 58293 (TRBV29-1, TRBJ1-3)
CSTRDSGDTIYF

SEQ ID NO: 116587 - protein, 14 aa, Homo sapiens
  CDR3 for alpha chain variable domain of TCR clone 58294 (TRAV13-2, TRAJ43)
CAEIPTYNNNDMRC

SEQ ID NO: 116588 - protein, 15 aa, Homo sapiens
  CDR3 for beta chain variable domain of TCR clone 58294 (TRBV7-9, TRBJ2-2)
CASGPLDTFPGELFF

SEQ ID NO: 116589 - protein, 13 aa, Homo sapiens
  CDR3 for alpha chain variable domain of TCR clone 58295 (TRAV27, TRAJ45)
CRSSGGGADGLTF

SEQ ID NO: 116590 - protein, 17 aa, Homo sapiens
  CDR3 for beta chain variable domain of TCR clone 58295 (TRBV11-2, TRBJ2-1)
CASSLYPPRVEYNEQFF

SEQ ID NO: 116591 - protein, 14 aa, Homo sapiens
  CDR3 for alpha chain variable domain of TCR clone 58296 (TRAV8-3, TRAJ27)
CAGGRNTNAGKSTF

SEQ ID NO: 116592 - protein, 15 aa, Homo sapiens
  CDR3 for beta chain variable domain of TCR clone 58296 (TRBV11-3, TRBJ2-5)
RASSLRGRVQETQYF

SEQ ID NO: 116593 - protein, 16 aa, Homo sapiens
  CDR3 for alpha chain variable domain of TCR clone 58297 (TRAV35, TRAJ28)
CAGQKYSGAGSYQLTF

SEQ ID NO: 116594 - protein, 16 aa, Homo sapiens
  CDR3 for beta chain variable domain of TCR clone 58297 (TRBV7-3, TRBJ2-2)
CASSLKRGTLSGELFF

SEQ ID NO: 116595 - protein, 11 aa, Homo sapiens
  CDR3 for alpha chain variable domain of TCR clone 58298 (TRAV35, TRAJ34)
CWSRNTDKLIF

SEQ ID NO: 116596 - protein, 14 aa, Homo sapiens
  CDR3 for beta chain variable domain of TCR clone 58298 (TRBV5-1, TRBJ2-7)
CASSRGESLYEQYF

SEQ ID NO: 116597 - protein, 12 aa, Homo sapiens
  CDR3 for alpha chain variable domain of TCR clone 58299 (TRAV3, TRAJ20)
CAVRYPDYKLSF

SEQ ID NO: 116598 - protein, 13 aa, Homo sapiens
  CDR3 for beta chain variable domain of TCR clone 58299 (TRBV9, TRBJ2-1)
CASSVGQGGEQFF

SEQ ID NO: 116599 - protein, 14 aa, Homo sapiens
  CDR3 for alpha chain variable domain of TCR clone 58300 (TRAV12-1, TRAJ33)
CVVDPEDSNYQLIW

SEQ ID NO: 116600 - protein, 11 aa, Homo sapiens
  CDR3 for beta chain variable domain of TCR clone 58300 (TRBV7-6, TRBJ2-1)
CASSNYGEQFF

SEQ ID NO: 116601 - protein, 10 aa, Homo sapiens
  CDR3 for alpha chain variable domain of TCR clone 58301 (TRAV3, TRAJ20)
CAVRPSVTTT

SEQ ID NO: 116602 - protein, 15 aa, Homo sapiens
  CDR3 for beta chain variable domain of TCR clone 58301 (TRBV19, TRBJ2-6)
CASVRRDSGANVLTF

SEQ ID NO: 116603 - protein, 10 aa, Homo sapiens
  CDR3 for alpha chain variable domain of TCR clone 58302 (TRAV30, TRAJ32)
CGTEKDVVVL

SEQ ID NO: 116604 - protein, 13 aa, Homo sapiens
  CDR3 for beta chain variable domain of TCR clone 58302 (TRBV10-3, TRBJ2-7)
CASKLAVNYEQYF

SEQ ID NO: 116605 - protein, 13 aa, Homo sapiens
  CDR3 for alpha chain variable domain of TCR clone 58303 (TRAV12-1, TRAJ6)
CVVYPGGSYIPTF

SEQ ID NO: 116606 - protein, 13 aa, Homo sapiens
  CDR3 for beta chain variable domain of TCR clone 58303 (TRBV4-2, TRBJ1-1)
CASSQAGNTEAFL

SEQ ID NO: 116607 - protein, 23 aa, Homo sapiens
  CDR3 for alpha chain variable domain of TCR clone 58304 (TRAV14/DV4, TRAJ34)
CAMREGRPHRQAHLWDWDQITSL

SEQ ID NO: 116608 - protein, 14 aa, Homo sapiens
  CDR3 for beta chain variable domain of TCR clone 58304 (TRBV19, TRBJ2-1)
CASPTFVLSGEQFF

SEQ ID NO: 116609 - protein, 13 aa, Homo sapiens
  CDR3 for alpha chain variable domain of TCR clone 58305 (TRAV12-3, TRAJ43)
CAMIRPNNNGMRF

SEQ ID NO: 116610 - protein, 12 aa, Homo sapiens
  CDR3 for beta chain variable domain of TCR clone 58305 (TRBV11-2, TRBJ2-5)
CASSLGQETQYF

SEQ ID NO: 116611 - protein, 15 aa, Homo sapiens
  CDR3 for alpha chain variable domain of TCR clone 58306 (TRAV23/DV6, TRAJ18)
CAARYRGSTLGRLYF

SEQ ID NO: 116612 - protein, 13 aa, Homo sapiens
  CDR3 for beta chain variable domain of TCR clone 58306 (TRBV7-9, TRBJ1-2)
CASSLKQNYGYTF

SEQ ID NO: 116613 - protein, 16 aa, Homo sapiens
  CDR3 for alpha chain variable domain of TCR clone 58307 (TRAV21, TRAJ37)
CAVRTAGSSNTGKLIF

SEQ ID NO: 116614 - protein, 13 aa, Homo sapiens
  CDR3 for beta chain variable domain of TCR clone 58307 (TRBV7-9, TRBJ2-5)
CASLPSGREIQYF

SEQ ID NO: 116615 - protein, 16 aa, Homo sapiens
  CDR3 for alpha chain variable domain of TCR clone 58308 (TRAV21, TRAJ37)
CAIRTAGSSNTGKLIF

SEQ ID NO: 116616 - protein, 13 aa, Homo sapiens
  CDR3 for beta chain variable domain of TCR clone 58308 (TRBV7-9, TRBJ2-5)
CAGLPSGRETQYF

SEQ ID NO: 116617 - protein, 13 aa, Homo sapiens
  CDR3 for alpha chain variable domain of TCR clone 58309 (TRAV2, TRAJ40)
CAVVTSGTYKYTF

SEQ ID NO: 116618 - protein, 14 aa, Homo sapiens
  CDR3 for beta chain variable domain of TCR clone 58309 (TRBV19, TRBJ2-1)
CASPTVVLSGEQFF

SEQ ID NO: 116619 - protein, 11 aa, Homo sapiens
  CDR3 for alpha chain variable domain of TCR clone 58310 (TRAV2, TRAJ23)
CAVETRGKLIF

SEQ ID NO: 116620 - protein, 14 aa, Homo sapiens
  CDR3 for beta chain variable domain of TCR clone 58310 (TRBV2, TRBJ2-3)
CASSEGQNTDTQYF

SEQ ID NO: 116621 - protein, 15 aa, Homo sapiens
  CDR3 for alpha chain variable domain of TCR clone 58311 (TRAV12-2, TRAJ53)
CAVNGGGGSNYKLTF

SEQ ID NO: 116622 - protein, 15 aa, Homo sapiens
  CDR3 for beta chain variable domain of TCR clone 58311 (TRBV20-1, TRBJ2-7)
CSARDRVSGMDVQYF

SEQ ID NO: 116623 - protein, 13 aa, Homo sapiens
  CDR3 for alpha chain variable domain of TCR clone 58312 (TRAV13-2, TRAJ53)
CAENMGSNYKLTF

SEQ ID NO: 116624 - protein, 15 aa, Homo sapiens
  CDR3 for beta chain variable domain of TCR clone 58312 (TRBV27, TRBJ1-5)
CASSLGTGFDQPQHF

SEQ ID NO: 116625 - protein, 14 aa, Homo sapiens
  CDR3 for alpha chain variable domain of TCR clone 58313 (TRAV26-1, TRAJ38)
CIADNAGNNRKLIW

SEQ ID NO: 116626 - protein, 15 aa, Homo sapiens
  CDR3 for beta chain variable domain of TCR clone 58313 (TRBV4-3, TRBJ2-1)
CASSQESAIYNEQFF

SEQ ID NO: 116627 - protein, 14 aa, Homo sapiens
  CDR3 for alpha chain variable domain of TCR clone 58314 (TRAV12-3, TRAJ10)
GHLPLTGGGNKLTF

SEQ ID NO: 116628 - protein, 11 aa, Homo sapiens
  CDR3 for beta chain variable domain of TCR clone 58314 (TRBV19, TRBJ1-1)
CASSIGSEAFF

SEQ ID NO: 116629 - protein, 13 aa, Homo sapiens
  CDR3 for alpha chain variable domain of TCR clone 58315 (TRAV16, TRAJ54)
CALKVRGAQKLVF

SEQ ID NO: 116630 - protein, 13 aa, Homo sapiens
  CDR3 for beta chain variable domain of TCR clone 58315 (TRBV20-1, TRBJ1-1)
CSARGGGNTEASF

SEQ ID NO: 116631 - protein, 12 aa, Homo sapiens
  CDR3 for alpha chain variable domain of TCR clone 58316 (TRAV21, TRAJ33)
CAKMDSNYQLIW

SEQ ID NO: 116632 - protein, 14 aa, Homo sapiens
  CDR3 for beta chain variable domain of TCR clone 58316 (TRBV2, TRBJ2-7)
CVSSLTSGGYEQYF

SEQ ID NO: 116633 - protein, 14 aa, Homo sapiens
  CDR3 for alpha chain variable domain of TCR clone 58317 (TRAV13-2, TRAJ26)
CEENLGNYGQNFVF

SEQ ID NO: 116634 - protein, 14 aa, Homo sapiens
  CDR3 for beta chain variable domain of TCR clone 58317 (TRBV19, TRBJ1-3)
CASNRGNSGNTIYF

SEQ ID NO: 116635 - protein, 18 aa, Homo sapiens
  CDR3 for alpha chain variable domain of TCR clone 58318 (TRAV21, TRAJ52)
CAVRPSPAGGTSYGKLTF

SEQ ID NO: 116636 - protein, 15 aa, Homo sapiens
  CDR3 for beta chain variable domain of TCR clone 58318 (TRBV20-1, TRBJ2-7)
CSARVPAAYFYEQYF

SEQ ID NO: 116637 - protein, 20 aa, Homo sapiens
  CDR3 for alpha chain variable domain of TCR clone 58319 (TRAV12-2, TRAJ52)
SPVIQPPARAGSTSYGKLTF

SEQ ID NO: 116638 - protein, 16 aa, Homo sapiens
  CDR3 for beta chain variable domain of TCR clone 58319 (TRBV15, TRBJ1-2)
CATSRGPRTGGGGYTF

SEQ ID NO: 116639 - protein, 11 aa, Homo sapiens
  CDR3 for alpha chain variable domain of TCR clone 58320 (TRAV21, TRAJ48)
CAVDGNEKLTF

SEQ ID NO: 116640 - protein, 15 aa, Homo sapiens
  CDR3 for beta chain variable domain of TCR clone 58320 (TRBV2, TRBJ2-1)
CASSELAGSYNEQLF

SEQ ID NO: 116641 - protein, 16 aa, Homo sapiens
  CDR3 for alpha chain variable domain of TCR clone 58321 (TRAV3, TRAJ37)
CAVRGKGSGNTGKLIF

SEQ ID NO: 116642 - protein, 13 aa, Homo sapiens
  CDR3 for beta chain variable domain of TCR clone 58321 (TRBV14, TRBJ2-7)
GASSQDRRYEQYF

SEQ ID NO: 116643 - protein, 13 aa, Homo sapiens
  CDR3 for alpha chain variable domain of TCR clone 58322 (TRAV20, TRAJ21)
CAVEGYNFNKFYF

SEQ ID NO: 116644 - protein, 14 aa, Homo sapiens
  CDR3 for beta chain variable domain of TCR clone 58322 (TRBV3-1, TRBJ2-5)
CASSQGPDQGTQYF

SEQ ID NO: 116645 - protein, 14 aa, Homo sapiens
  CDR3 for alpha chain variable domain of TCR clone 58323 (TRAV12-1, TRAJ12)
CVVTSGDSSYELIF

SEQ ID NO: 116646 - protein, 14 aa, Homo sapiens
  CDR3 for beta chain variable domain of TCR clone 58323 (TRBV19, TRBJ2-7)
CASSIEASSYEQYF

SEQ ID NO: 116647 - protein, 12 aa, Homo sapiens
  CDR3 for alpha chain variable domain of TCR clone 58324 (TRAV13-2, TRAJ16)
CAASPYGQKLLF

SEQ ID NO: 116648 - protein, 13 aa, Homo sapiens
  CDR3 for beta chain variable domain of TCR clone 58324 (TRBV7-9, TRBJ1-2)
CASSLKQNYGYTF

SEQ ID NO: 116649 - protein, 16 aa, Homo sapiens
  CDR3 for alpha chain variable domain of TCR clone 58325 (TRAV3, TRAJ37)
CAVRGKGSGNTGKLIF

SEQ ID NO: 116650 - protein, 16 aa, Homo sapiens
  CDR3 for beta chain variable domain of TCR clone 58325 (TRBV19, TRBJ2-1)
CASSKAGPSSYNEQFF

SEQ ID NO: 116651 - protein, 13 aa, Homo sapiens
  CDR3 for alpha chain variable domain of TCR clone 58326 (TRAV12-3, TRAJ13)
CAMGTGGYQKVTF

SEQ ID NO: 116652 - protein, 14 aa, Homo sapiens
  CDR3 for beta chain variable domain of TCR clone 58326 (TRBV7-2, TRBJ2-5)
CASNTGGELKTQYF

SEQ ID NO: 116653 - protein, 12 aa, Homo sapiens
  CDR3 for alpha chain variable domain of TCR clone 58327 (TRAV12-3, TRAJ20)
CAMVRGDYKLSF

SEQ ID NO: 116654 - protein, 16 aa, Homo sapiens
  CDR3 for beta chain variable domain of TCR clone 58327 (TRBV20-1, TRBJ1-4)
CSAPGQGLLTNEKLFF

SEQ ID NO: 116655 - protein, 13 aa, Homo sapiens
  CDR3 for alpha chain variable domain of TCR clone 58328 (TRAV12-1, TRAJ6)
CVVFPGGSYIPTF

SEQ ID NO: 116656 - protein, 14 aa, Homo sapiens
  CDR3 for beta chain variable domain of TCR clone 58328 (TRBV20-1, TRBJ1-3)
CSTSPTGAGNTIYF

SEQ ID NO: 116657 - protein, 19 aa, Homo sapiens
  CDR3 for alpha chain variable domain of TCR clone 58329 (TRAV13-1, TRAJ52)
CAASPYQNAGGTSYGKLTF

SEQ ID NO: 116658 - protein, 16 aa, Homo sapiens
  CDR3 for beta chain variable domain of TCR clone 58329 (TRBV19, TRBJ2-1)
CASSKAGPSSYNEQFF

SEQ ID NO: 116659 - protein, 13 aa, Homo sapiens
  CDR3 for alpha chain variable domain of TCR clone 58330 (TRAV6, TRAJ4)
CALLRGGYNKLVF

SEQ ID NO: 116660 - protein, 16 aa, Homo sapiens
  CDR3 for beta chain variable domain of TCR clone 58330 (TRBV5-1, TRBJ2-1)
CASSIRSGGSYNEQFF

SEQ ID NO: 116661 - protein, 13 aa, Homo sapiens
  CDR3 for alpha chain variable domain of TCR clone 58331 (TRAV20, TRAJ54)
CAVQAGGAQKLVF

SEQ ID NO: 116662 - protein, 12 aa, Homo sapiens
  CDR3 for beta chain variable domain of TCR clone 58331 (TRBV14, TRBJ2-7)
CASSRLKGEQYF

SEQ ID NO: 116663 - protein, 16 aa, Homo sapiens
  CDR3 for alpha chain variable domain of TCR clone 58332 (TRAV12-3, TRAJ53)
CAMSPGSGGSNYKLKF

SEQ ID NO: 116664 - protein, 13 aa, Homo sapiens
  CDR3 for beta chain variable domain of TCR clone 58332 (TRBV7-2, TRBJ2-5)
CASSQTSVETQYF

SEQ ID NO: 116665 - protein, 15 aa, Homo sapiens
  CDR3 for alpha chain variable domain of TCR clone 58333 (TRAV4, TRAJ39)
CLVGPNNNAGNMLTF

SEQ ID NO: 116666 - protein, 16 aa, Homo sapiens
  CDR3 for beta chain variable domain of TCR clone 58333 (TRBV13, TRBJ2-2)
CASSTRTGEHTGELFF

SEQ ID NO: 116667 - protein, 11 aa, Homo sapiens
  CDR3 for alpha chain variable domain of TCR clone 58334 (TRAV2, TRAJ37)
CAVDNTGKLIF

SEQ ID NO: 116668 - protein, 16 aa, Homo sapiens
  CDR3 for beta chain variable domain of TCR clone 58334 (TRBV15, TRBJ2-6)
CATSINGGFLANVLTF

SEQ ID NO: 116669 - protein, 13 aa, Homo sapiens
  CDR3 for alpha chain variable domain of TCR clone 58335 (TRAV17, TRAJ4)
CATKSGDYNKLIF

SEQ ID NO: 116670 - protein, 14 aa, Homo sapiens
  CDR3 for beta chain variable domain of TCR clone 58335 (TRBV20-1, TRBJ1-5)
CSARDDRGNQPQHF

SEQ ID NO: 116671 - protein, 13 aa, Homo sapiens
  CDR3 for alpha chain variable domain of TCR clone 58336 (TRAV13-1, TRAJ49)
CAAMLYTGNQFYF

SEQ ID NO: 116672 - protein, 15 aa, Homo sapiens
  CDR3 for beta chain variable domain of TCR clone 58336 (TRBV12-4, TRBJ1-5)
CASTRGSGFGQLQHF

SEQ ID NO: 116673 - protein, 15 aa, Homo sapiens
  CDR3 for alpha chain variable domain of TCR clone 58337 (TRAV26-1, TRAJ29)
CIVRVTNSGNIPLVF

SEQ ID NO: 116674 - protein, 12 aa, Homo sapiens
  CDR3 for beta chain variable domain of TCR clone 58337 (TRBV20-1, TRBJ1-2)
CSASWQGYGYTF

SEQ ID NO: 116675 - protein, 18 aa, Homo sapiens
  CDR3 for alpha chain variable domain of TCR clone 58338 (TRAV21, TRAJ52)
CAVRPPPAGGTSYGKLTF

SEQ ID NO: 116676 - protein, 13 aa, Homo sapiens
  CDR3 for beta chain variable domain of TCR clone 58338 (TRBV19, TRBJ1-2)
CASSVPGQDGYTF

SEQ ID NO: 116677 - protein, 11 aa, Homo sapiens
  CDR3 for alpha chain variable domain of TCR clone 58339 (TRAV3, TRAJ21)
CAVGNFDKFYF

SEQ ID NO: 116678 - protein, 16 aa, Homo sapiens
  CDR3 for beta chain variable domain of TCR clone 58339 (TRBV19, TRBJ2-1)
CASSKAGPGSYNEQFF

SEQ ID NO: 116679 - protein, 14 aa, Homo sapiens
  CDR3 for alpha chain variable domain of TCR clone 58340 (TRAV12-3, TRAJ10)
SHLPLPGGGNKLTF

SEQ ID NO: 116680 - protein, 11 aa, Homo sapiens
  CDR3 for beta chain variable domain of TCR clone 58340 (TRBV20-1, TRBJ2-5)
CSADRAETQYF

SEQ ID NO: 116681 - protein, 13 aa, Homo sapiens
  CDR3 for alpha chain variable domain of TCR clone 58341 (TRAV2, TRAJ40)
CAVVTSGTYKYIF

SEQ ID NO: 116682 - protein, 17 aa, Homo sapiens
  CDR3 for beta chain variable domain of TCR clone 58341 (TRBV7-6, TRBJ2-1)
CIAVPAAWGGGADEQFF

SEQ ID NO: 116683 - protein, 15 aa, Homo sapiens
  CDR3 for alpha chain variable domain of TCR clone 58342 (TRAV17, TRAJ35)
CATAFVIGFGNVLHC

SEQ ID NO: 116684 - protein, 15 aa, Homo sapiens
  CDR3 for beta chain variable domain of TCR clone 58342 (TRBV7-9, TRBJ2-7)
CAGSLALAEAYEQYF

SEQ ID NO: 116685 - protein, 12 aa, Homo sapiens
  CDR3 for alpha chain variable domain of TCR clone 58343 (TRAV36/DV7, TRAJ54)
CAVVRGAQKLVF

SEQ ID NO: 116686 - protein, 14 aa, Homo sapiens
  CDR3 for beta chain variable domain of TCR clone 58343 (TRBV7-3, TRBJ1-1)
CASSLKGGNTEDFF

SEQ ID NO: 116687 - protein, 15 aa, Homo sapiens
  CDR3 for alpha chain variable domain of TCR clone 58344 (TRAV12-2, TRAJ20)
CAVKGGFGARTTVTV

SEQ ID NO: 116688 - protein, 13 aa, Homo sapiens
  CDR3 for beta chain variable domain of TCR clone 58344 (TRBV12-4, TRBJ2-7)
CASSPGQLYEQYF

SEQ ID NO: 116689 - protein, 22 aa, Homo sapiens
  CDR3 for alpha chain variable domain of TCR clone 58345 (TRAV27, TRAJ41)
CAVRTQIPDIQNPDPAVYQLRN

SEQ ID NO: 116690 - protein, 16 aa, Homo sapiens
  CDR3 for beta chain variable domain of TCR clone 58345 (TRBV5-1, TRBJ2-3)
CASSLGLAVYTDTQYF

SEQ ID NO: 116691 - protein, 14 aa, Homo sapiens
  CDR3 for alpha chain variable domain of TCR clone 58346 (TRAV13-2, TRAJ43)
CAEIPMYNNNDMRF

SEQ ID NO: 116692 - protein, 15 aa, Homo sapiens
  CDR3 for beta chain variable domain of TCR clone 58346 (TRBV7-9, TRBJ2-2)
CASGPLDTFPGELFF

SEQ ID NO: 116693 - protein, 15 aa, Homo sapiens
  CDR3 for alpha chain variable domain of TCR clone 58347 (TRAV12-3, TRAJ6)
SAMSAATGGSYIPTF

SEQ ID NO: 116694 - protein, 16 aa, Homo sapiens
  CDR3 for beta chain variable domain of TCR clone 58347 (TRBV20-1, TRBJ1-2)
CSASMGQGVANYGYTF

SEQ ID NO: 116695 - protein, 13 aa, Homo sapiens
  CDR3 for alpha chain variable domain of TCR clone 58348 (TRAV17, TRAJ9)
CATGSTGGLKTIF

SEQ ID NO: 116696 - protein, 14 aa, Homo sapiens
  CDR3 for beta chain variable domain of TCR clone 58348 (TRBV7-8, TRBJ2-7)
CASTFRGGPNEQYF

SEQ ID NO: 116697 - protein, 11 aa, Homo sapiens
  CDR3 for alpha chain variable domain of TCR clone 58349 (TRAV13-1, TRAJ39)
CASHAGNMLPF

SEQ ID NO: 116698 - protein, 14 aa, Homo sapiens
  CDR3 for beta chain variable domain of TCR clone 58349 (TRBV11-2, TRBJ1-5)
CASSLDRGRQPQHF

SEQ ID NO: 116699 - protein, 11 aa, Homo sapiens
  CDR3 for alpha chain variable domain of TCR clone 58350 (TRAV17, TRAJ9)
CGFTGGFKTIF

SEQ ID NO: 116700 - protein, 11 aa, Homo sapiens
  CDR3 for beta chain variable domain of TCR clone 58350 (TRBV12-4, TRBJ2-3)
CASTATDTQYF

SEQ ID NO: 116701 - protein, 11 aa, Homo sapiens
  CDR3 for alpha chain variable domain of TCR clone 58351 (TRAV12-1, TRAJ43)
CVEYDSNDMRF

SEQ ID NO: 116702 - protein, 15 aa, Homo sapiens
  CDR3 for beta chain variable domain of TCR clone 58351 (TRBV18, TRBJ2-5)
CASSPRASEAETQYF

SEQ ID NO: 116703 - protein, 15 aa, Homo sapiens
  CDR3 for alpha chain variable domain of TCR clone 58352 (TRAV17, TRAJ23)
CATDAEDNQGGKLIF

SEQ ID NO: 116704 - protein, 11 aa, Homo sapiens
  CDR3 for beta chain variable domain of TCR clone 58352 (TRBV2, TRBJ2-1)
CQAGGYNEQFF

SEQ ID NO: 116705 - protein, 11 aa, Homo sapiens
  CDR3 for alpha chain variable domain of TCR clone 58353 (TRAV17, TRAJ36)
CAPTGANNLFF

SEQ ID NO: 116706 - protein, 14 aa, Homo sapiens
  CDR3 for beta chain variable domain of TCR clone 58353 (TRBV5-1, TRBJ2-1)
CASSLVTEYNEQLF

SEQ ID NO: 116707 - protein, 11 aa, Homo sapiens
  CDR3 for alpha chain variable domain of TCR clone 58354 (TRAV13-1, TRAJ30)
CAASRDDKIIF

SEQ ID NO: 116708 - protein, 15 aa, Homo sapiens
  CDR3 for beta chain variable domain of TCR clone 58354 (TRBV18, TRBJ1-1)
CASSLSSWVNTEAFF

SEQ ID NO: 116709 - protein, 13 aa, Homo sapiens
  CDR3 for alpha chain variable domain of TCR clone 58355 (TRAV8-6, TRAJ13)
CAVRDGGYQKVTF

SEQ ID NO: 116710 - protein, 14 aa, Homo sapiens
  CDR3 for beta chain variable domain of TCR clone 58355 (TRBV4-1, TRBJ2-2)
CASSQAVNTGELFF

SEQ ID NO: 116711 - protein, 11 aa, Homo sapiens
  CDR3 for alpha chain variable domain of TCR clone 58356 (TRAV3, TRAJ21)
CAVGNFNKFYF

SEQ ID NO: 116712 - protein, 18 aa, Homo sapiens
  CDR3 for beta chain variable domain of TCR clone 58356 (TRBV4-1, TRBJ1-5)
CASSQDPRGQGLNQPQHF

SEQ ID NO: 116713 - protein, 13 aa, Homo sapiens
  CDR3 for alpha chain variable domain of TCR clone 58357 (TRAV2, TRAJ29)
CAAQYSGNTPLVF

SEQ ID NO: 116714 - protein, 14 aa, Homo sapiens
  CDR3 for beta chain variable domain of TCR clone 58357 (TRBV7-9, TRBJ2-4)
CASSLAMGGNIQYF

SEQ ID NO: 116715 - protein, 11 aa, Homo sapiens
  CDR3 for alpha chain variable domain of TCR clone 58358 (TRAV3, TRAJ21)
CAVGNFNKFYF

SEQ ID NO: 116716 - protein, 14 aa, Homo sapiens
  CDR3 for beta chain variable domain of TCR clone 58358 (TRBV2, TRBJ2-1)
CASRTGSSYNEQFF

SEQ ID NO: 116717 - protein, 14 aa, Homo sapiens
  CDR3 for alpha chain variable domain of TCR clone 58359 (TRAV1-2, TRAJ16)
CAVNRFSDGQKLLF

SEQ ID NO: 116718 - protein, 13 aa, Homo sapiens
  CDR3 for beta chain variable domain of TCR clone 58359 (TRBV20-1, TRBJ1-1)
CSAPPGGHTEALF

SEQ ID NO: 116719 - protein, 14 aa, Homo sapiens
  CDR3 for alpha chain variable domain of TCR clone 58360 (TRAV12-1, TRAJ12)
CVVTRMDGSYKLIF

SEQ ID NO: 116720 - protein, 13 aa, Homo sapiens
  CDR3 for beta chain variable domain of TCR clone 58360 (TRBV20-1, TRBJ1-1)
CSARGGGNTEAFF

SEQ ID NO: 116721 - protein, 17 aa, Homo sapiens
  CDR3 for alpha chain variable domain of TCR clone 58361 (TRAV25, TRAJ52)
CAGPLDAGGTSYGKLTF

SEQ ID NO: 116722 - protein, 13 aa, Homo sapiens
  CDR3 for beta chain variable domain of TCR clone 58361 (TRBV10-3, TRBJ2-7)
CASKLAVNYEQYF

SEQ ID NO: 116723 - protein, 15 aa, Homo sapiens
  CDR3 for alpha chain variable domain of TCR clone 58362 (TRAV34, TRAJ38)
YGADFTPGNNRKLIW

SEQ ID NO: 116724 - protein, 16 aa, Homo sapiens
  CDR3 for beta chain variable domain of TCR clone 58362 (TRBV12-5, TRBJ2-5)
CASGPRTSGNQETQYF

SEQ ID NO: 116725 - protein, 14 aa, Homo sapiens
  CDR3 for alpha chain variable domain of TCR clone 58363 (TRAV26-1, TRAJ38)
SIADNAGNNRKLIW

SEQ ID NO: 116726 - protein, 13 aa, Homo sapiens
  CDR3 for beta chain variable domain of TCR clone 58363 (TRBV20-1, TRBJ1-1)
CSARGGGNTEAFF

SEQ ID NO: 116727 - protein, 17 aa, Homo sapiens
  CDR3 for alpha chain variable domain of TCR clone 58364 (TRAV3, TRAJ6)
CAVRDGPRAGGRYIPTF

SEQ ID NO: 116728 - protein, 18 aa, Homo sapiens
  CDR3 for beta chain variable domain of TCR clone 58364 (TRBV7-9, TRBJ2-7)
CASSLTTSGSRTWYEQYF

SEQ ID NO: 116729 - protein, 14 aa, Homo sapiens
  CDR3 for alpha chain variable domain of TCR clone 58365 (TRAV1-2, TRAJ16)
CAVNRFSDGQKLLF

SEQ ID NO: 116730 - protein, 16 aa, Homo sapiens
  CDR3 for beta chain variable domain of TCR clone 58365 (TRBV12-4, TRBJ2-5)
CASSFLVRGRQETQYF

SEQ ID NO: 116731 - protein, 16 aa, Homo sapiens
  CDR3 for alpha chain variable domain of TCR clone 58366 (TRAV12-3, TRAJ53)
CAMRPGSGGSNYKLTF

SEQ ID NO: 116732 - protein, 11 aa, Homo sapiens
  CDR3 for beta chain variable domain of TCR clone 58366 (TRBV7-2, TRBJ2-7)
CASSLGLAMHF

SEQ ID NO: 116733 - protein, 14 aa, Homo sapiens
  CDR3 for alpha chain variable domain of TCR clone 58367 (TRAV8-4, TRAJ4)
CAVSPSGGYNKLIF

SEQ ID NO: 116734 - protein, 15 aa, Homo sapiens
  CDR3 for beta chain variable domain of TCR clone 58367 (TRBV7-8, TRBJ2-3)
CASSLSADSWGAQYF

SEQ ID NO: 116735 - protein, 15 aa, Homo sapiens
  CDR3 for alpha chain variable domain of TCR clone 58368 (TRAV12-1, TRAJ45)
CVVLSGGGGADGLTF

SEQ ID NO: 116736 - protein, 16 aa, Homo sapiens
  CDR3 for beta chain variable domain of TCR clone 58368 (TRBV6-5, TRBJ2-1)
CASSETLAGRYNEQFF

SEQ ID NO: 116737 - protein, 15 aa, Homo sapiens
  CDR3 for alpha chain variable domain of TCR clone 58369 (TRAV8-4, TRAJ9)
CAVSDLEGGGFKTIF

SEQ ID NO: 116738 - protein, 14 aa, Homo sapiens
  CDR3 for beta chain variable domain of TCR clone 58369 (TRBV7-2, TRBJ2-7)
CARSGLAGRGEQYF

SEQ ID NO: 116739 - protein, 14 aa, Homo sapiens
  CDR3 for alpha chain variable domain of TCR clone 58370 (TRAV2, TRAJ9)
CAVEDRSGGFKTIF

SEQ ID NO: 116740 - protein, 15 aa, Homo sapiens
  CDR3 for beta chain variable domain of TCR clone 58370 (TRBV2, TRBJ2-1)
CASSELAGSYNEQFF

SEQ ID NO: 116741 - protein, 13 aa, Homo sapiens
  CDR3 for alpha chain variable domain of TCR clone 58371 (TRAV27, TRAJ41)
CAGEGNSVYALNF

SEQ ID NO: 116742 - protein, 14 aa, Homo sapiens
  CDR3 for beta chain variable domain of TCR clone 58371 (TRBV7-2, TRBJ1-1)
CASSFLTGTTEAFF

SEQ ID NO: 116743 - protein, 11 aa, Homo sapiens
  CDR3 for alpha chain variable domain of TCR clone 58372 (TRAV41, TRAJ49)
CAVRSRNQFYF

SEQ ID NO: 116744 - protein, 14 aa, Homo sapiens
  CDR3 for beta chain variable domain of TCR clone 58372 (TRBV12-4, TRBJ2-5)
CQQFQFRGGETQYF

SEQ ID NO: 116745 - protein, 13 aa, Homo sapiens
  CDR3 for alpha chain variable domain of TCR clone 58373 (TRAV13-2, TRAJ13)
CAERLGGYQKVTF

SEQ ID NO: 116746 - protein, 15 aa, Homo sapiens
  CDR3 for beta chain variable domain of TCR clone 58373 (TRBV4-1, TRBJ1-4)
CASSDTGGTNEKLFF

SEQ ID NO: 116747 - protein, 14 aa, Homo sapiens
  CDR3 for alpha chain variable domain of TCR clone 58374 (TRAV12-1, TRAJ9)
CVVTGYTGGFKTIF

SEQ ID NO: 116748 - protein, 12 aa, Homo sapiens
  CDR3 for beta chain variable domain of TCR clone 58374 (TRBV7-8, TRBJ2-7)
CASSLGDREQYF

SEQ ID NO: 116749 - protein, 14 aa, Homo sapiens
  CDR3 for alpha chain variable domain of TCR clone 58375 (TRAV13-1, TRAJ44)
CAAKATGTASKLTF

SEQ ID NO: 116750 - protein, 11 aa, Homo sapiens
  CDR3 for beta chain variable domain of TCR clone 58375 (TRBV19, TRBJ1-1)
CASSIGSEAFF

SEQ ID NO: 116751 - protein, 14 aa, Homo sapiens
  CDR3 for alpha chain variable domain of TCR clone 58376 (TRAV30, TRAJ26)
CVTEIVSYGQNFVF

SEQ ID NO: 116752 - protein, 13 aa, Homo sapiens
  CDR3 for beta chain variable domain of TCR clone 58376 (TRBV19, TRBJ1-3)
CASRLSLGNTIYF

SEQ ID NO: 116753 - protein, 15 aa, Homo sapiens
  CDR3 for alpha chain variable domain of TCR clone 58377 (TRAV12-2, TRAJ53)
CAVNGGGGSNYKLTF

SEQ ID NO: 116754 - protein, 14 aa, Homo sapiens
  CDR3 for beta chain variable domain of TCR clone 58377 (TRBV7-2, TRBJ2-7)
CASRSQGAAYEQYF

SEQ ID NO: 116755 - protein, 12 aa, Homo sapiens
  CDR3 for alpha chain variable domain of TCR clone 58378 (TRAV1-1, TRAJ8)
CAGGPGFQKLVF

SEQ ID NO: 116756 - protein, 15 aa, Homo sapiens
  CDR3 for beta chain variable domain of TCR clone 58378 (TRBV7-9, TRBJ1-4)
CASSRTGGFNEKLFF

SEQ ID NO: 116757 - protein, 13 aa, Homo sapiens
  CDR3 for alpha chain variable domain of TCR clone 58379 (TRAV8-3, TRAJ28)
CAVGAVGSYQHTF

SEQ ID NO: 116758 - protein, 15 aa, Homo sapiens
  CDR3 for beta chain variable domain of TCR clone 58379 (TRBV7-9, TRBJ1-5)
CASSQGHQPNQPQHF

SEQ ID NO: 116759 - protein, 14 aa, Homo sapiens
  CDR3 for alpha chain variable domain of TCR clone 58380 (TRAV12-3, TRAJ42)
CAMNYGGSQGNLIF

SEQ ID NO: 116760 - protein, 17 aa, Homo sapiens
  CDR3 for beta chain variable domain of TCR clone 58380 (TRBV7-8, TRBJ2-6)
CASSAGTGGAGANVLTF

SEQ ID NO: 116761 - protein, 16 aa, Homo sapiens
  CDR3 for alpha chain variable domain of TCR clone 58381 (TRAV21, TRAJ37)
CAVRTEGSSNTGKLIF

SEQ ID NO: 116762 - protein, 13 aa, Homo sapiens
  CDR3 for beta chain variable domain of TCR clone 58381 (TRBV7-9, TRBJ2-5)
CASLPSGRETQYF

SEQ ID NO: 116763 - protein, 14 aa, Homo sapiens
  CDR3 for alpha chain variable domain of TCR clone 58382 (TRAV12-2, TRAJ11)
CAVEGGSGYSTLTF

SEQ ID NO: 116764 - protein, 15 aa, Homo sapiens
  CDR3 for beta chain variable domain of TCR clone 58382 (TRBV7-3, TRBJ2-2)
CASSETGQGTGELFF

SEQ ID NO: 116765 - protein, 15 aa, Homo sapiens
  CDR3 for alpha chain variable domain of TCR clone 58383 (TRAV8-6, TRAJ37)
CAVIFSSGNTGKLIF

SEQ ID NO: 116766 - protein, 15 aa, Homo sapiens
  CDR3 for beta chain variable domain of TCR clone 58383 (TRBV25-1, TRBJ2-4)
CASSETESAKNSQYF

SEQ ID NO: 116767 - protein, 16 aa, Homo sapiens
  CDR3 for alpha chain variable domain of TCR clone 58384 (TRAV3, TRAJ10)
RAVRDMRAGGGNKLTF

SEQ ID NO: 116768 - protein, 14 aa, Homo sapiens
  CDR3 for beta chain variable domain of TCR clone 58384 (TRBV19, TRBJ2-1)
CASPTFVLSGEQFF

SEQ ID NO: 116769 - protein, 10 aa, Homo sapiens
  CDR3 for alpha chain variable domain of TCR clone 58385 (TRAV20, TRAJ22)
CAAPARQLTF

SEQ ID NO: 116770 - protein, 14 aa, Homo sapiens
  CDR3 for beta chain variable domain of TCR clone 58385 (TRBV19, TRBJ2-1)
CASSMGSGAAEQFF

SEQ ID NO: 116771 - protein, 14 aa, Homo sapiens
  CDR3 for alpha chain variable domain of TCR clone 58386 (TRAV12-3, TRAJ42)
CAMNYGGSQGNLIF

SEQ ID NO: 116772 - protein, 13 aa, Homo sapiens
  CDR3 for beta chain variable domain of TCR clone 58386 (TRBV28, TRBJ2-2)
CASIRESTGELFF

SEQ ID NO: 116773 - protein, 12 aa, Homo sapiens
  CDR3 for alpha chain variable domain of TCR clone 58387 (TRAV8-3, TRAJ26)
CAGDNYGQNFVF

SEQ ID NO: 116774 - protein, 12 aa, Homo sapiens
  CDR3 for beta chain variable domain of TCR clone 58387 (TRBV11-2, TRBJ2-2)
CASSLGGGEPFF

SEQ ID NO: 116775 - protein, 14 aa, Homo sapiens
  CDR3 for alpha chain variable domain of TCR clone 58388 (TRAV26-1, TRAJ38)
CIADSAGNNRKLIW

SEQ ID NO: 116776 - protein, 20 aa, Homo sapiens
  CDR3 for beta chain variable domain of TCR clone 58388 (TRBV7-8, TRBJ2-2)
CASSHLFPGPTIHITGELFF

SEQ ID NO: 116777 - protein, 16 aa, Homo sapiens
  CDR3 for alpha chain variable domain of TCR clone 58389 (TRAV30, TRAJ24)
CGTEIVGADSWGKFQF

SEQ ID NO: 116778 - protein, 13 aa, Homo sapiens
  CDR3 for beta chain variable domain of TCR clone 58389 (TRBV7-9, TRBJ1-2)
CASSLKQNYGYTF

SEQ ID NO: 116779 - protein, 16 aa, Homo sapiens
  CDR3 for alpha chain variable domain of TCR clone 58390 (TRAV26-1, TRAJ33)
CIVPFWGEDSNYQLIW

SEQ ID NO: 116780 - protein, 16 aa, Homo sapiens
  CDR3 for beta chain variable domain of TCR clone 58390 (TRBV19, TRBJ2-1)
CASSKAGPSSYNEQFF

SEQ ID NO: 116781 - protein, 11 aa, Homo sapiens
  CDR3 for alpha chain variable domain of TCR clone 58391 (TRAV2, TRAJ23)
CAVDTRGKLIF

SEQ ID NO: 116782 - protein, 14 aa, Homo sapiens
  CDR3 for beta chain variable domain of TCR clone 58391 (TRBV7-2, TRBJ2-7)
CASSPKTSFYEQYF

SEQ ID NO: 116783 - protein, 14 aa, Homo sapiens
  CDR3 for alpha chain variable domain of TCR clone 58392 (TRAV12-3, TRAJ39)
SATYLSNAGNILTF

SEQ ID NO: 116784 - protein, 13 aa, Homo sapiens
  CDR3 for beta chain variable domain of TCR clone 58392 (TRBV28, TRBJ1-2)
CASSPGSRNGYTF

SEQ ID NO: 116785 - protein, 13 aa, Homo sapiens
  CDR3 for alpha chain variable domain of TCR clone 58393 (TRAV12-1, TRAJ43)
CVVSHHNNNDMRF

SEQ ID NO: 116786 - protein, 15 aa, Homo sapiens
  CDR3 for beta chain variable domain of TCR clone 58393 (TRBV3-1, TRBJ2-5)
CASSPPSSSREAQYF

SEQ ID NO: 116787 - protein, 12 aa, Homo sapiens
  CDR3 for alpha chain variable domain of TCR clone 58394 (TRAV21, TRAJ29)
YAVTSGNTPLVF

SEQ ID NO: 116788 - protein, 15 aa, Homo sapiens
  CDR3 for beta chain variable domain of TCR clone 58394 (TRBV12-4, TRBJ1-2)
CASRLGVAGNYGYTF

SEQ ID NO: 116789 - protein, 11 aa, Homo sapiens
  CDR3 for alpha chain variable domain of TCR clone 58395 (TRAV21, TRAJ11)
CAVNGYSTLTF

SEQ ID NO: 116790 - protein, 11 aa, Homo sapiens
  CDR3 for beta chain variable domain of TCR clone 58395 (TRBV7-8, TRBJ2-7)
CASSLSLEQYF

SEQ ID NO: 116791 - protein, 13 aa, Homo sapiens
  CDR3 for alpha chain variable domain of TCR clone 58396 (TRAV8-3, TRAJ28)
CAVGAVGSYQLTF

SEQ ID NO: 116792 - protein, 15 aa, Homo sapiens
  CDR3 for beta chain variable domain of TCR clone 58396 (TRBV7-2, TRBJ2-1)
CASTHGTGIYNEQFF

SEQ ID NO: 116793 - protein, 11 aa, Homo sapiens
  CDR3 for alpha chain variable domain of TCR clone 58397 (TRAV21, TRAJ34)
CAHYKTDKLIF

SEQ ID NO: 116794 - protein, 13 aa, Homo sapiens
  CDR3 for beta chain variable domain of TCR clone 58397 (TRBV7-6, TRBJ1-2)
CASSLVADYGYTF

SEQ ID NO: 116795 - protein, 17 aa, Homo sapiens
  CDR3 for alpha chain variable domain of TCR clone 58398 (TRAV3, TRAJ42)
CAVRDRDYGGSQGNLIF

SEQ ID NO: 116796 - protein, 14 aa, Homo sapiens
  CDR3 for beta chain variable domain of TCR clone 58398 (TRBV19, TRBJ2-5)
CASSMTGQRETQYF

SEQ ID NO: 116797 - protein, 13 aa, Homo sapiens
  CDR3 for alpha chain variable domain of TCR clone 58399 (TRAV12-2, TRAJ20)
CAVYPSNDYKLSF

SEQ ID NO: 116798 - protein, 15 aa, Homo sapiens
  CDR3 for beta chain variable domain of TCR clone 58399 (TRBV18, TRBJ1-2)
CACSPGNGLGYGYTF

SEQ ID NO: 116799 - protein, 11 aa, Homo sapiens
  CDR3 for alpha chain variable domain of TCR clone 58400 (TRAV21, TRAJ11)
CAVNGYSTLTF

SEQ ID NO: 116800 - protein, 17 aa, Homo sapiens
  CDR3 for beta chain variable domain of TCR clone 58400 (TRBV7-9, TRBJ2-1)
CASSLESPGLAGGEQFF

SEQ ID NO: 116801 - protein, 12 aa, Homo sapiens
  CDR3 for alpha chain variable domain of TCR clone 58401 (TRAV26-2, TRAJ48)
CILRKGNEKLTF

SEQ ID NO: 116802 - protein, 14 aa, Homo sapiens
  CDR3 for beta chain variable domain of TCR clone 58401 (TRBV28, TRBJ2-7)
CASSTLRGRFEQYS

SEQ ID NO: 116803 - protein, 13 aa, Homo sapiens
  CDR3 for alpha chain variable domain of TCR clone 58402 (TRAV8-4, TRAJ10)
CAAFTGGGNKLTF

SEQ ID NO: 116804 - protein, 15 aa, Homo sapiens
  CDR3 for beta chain variable domain of TCR clone 58402 (TRBV2, TRBJ2-3)
CSSSDFEKATDTQYF

SEQ ID NO: 116805 - protein, 15 aa, Homo sapiens
  CDR3 for alpha chain variable domain of TCR clone 58403 (TRAV3, TRAJ22)
CAVRDRGGSARQLTF

SEQ ID NO: 116806 - protein, 13 aa, Homo sapiens
  CDR3 for beta chain variable domain of TCR clone 58403 (TRBV12-4, TRBJ1-2)
CASSVRQGKGYTF

SEQ ID NO: 116807 - protein, 11 aa, Homo sapiens
  CDR3 for alpha chain variable domain of TCR clone 58404 (TRAV12-3, TRAJ16)
LTGGDGQKLLF

SEQ ID NO: 116808 - protein, 13 aa, Homo sapiens
  CDR3 for beta chain variable domain of TCR clone 58404 (TRBV12-4, TRBJ1-4)
CASAMGHNEKLFF

SEQ ID NO: 116809 - protein, 16 aa, Homo sapiens
  CDR3 for alpha chain variable domain of TCR clone 58405 (TRAV16, TRAJ4)
CITVPPFSGGYNKLIF

SEQ ID NO: 116810 - protein, 14 aa, Homo sapiens
  CDR3 for beta chain variable domain of TCR clone 58405 (TRBV19, TRBJ2-7)
CASSMGQGAIEQYF

SEQ ID NO: 116811 - protein, 13 aa, Homo sapiens
  CDR3 for alpha chain variable domain of TCR clone 58406 (TRAV17, TRAJ40)
CAGALGGTYKYIF

SEQ ID NO: 116812 - protein, 16 aa, Homo sapiens
  CDR3 for beta chain variable domain of TCR clone 58406 (TRBV11-2, TRBJ1-2)
CASSLDTGGADYGDTF

SEQ ID NO: 116813 - protein, 19 aa, Homo sapiens
  CDR3 for alpha chain variable domain of TCR clone 58407 (TRAV2, TRAJ20)
ILQVREADAAVYRDCKLSF

SEQ ID NO: 116814 - protein, 15 aa, Homo sapiens
  CDR3 for beta chain variable domain of TCR clone 58407 (TRBV15, TRBJ1-6)
CATSGALIHPSTLGT

SEQ ID NO: 116815 - protein, 20 aa, Homo sapiens
  CDR3 for alpha chain variable domain of TCR clone 58408 (TRAV12-3, TRAJ41)
SLFIRDSQPSDSATPEALNF

SEQ ID NO: 116816 - protein, 15 aa, Homo sapiens
  CDR3 for beta chain variable domain of TCR clone 58408 (TRBV5-1, TRBJ2-7)
CTSSLDLTSSYEQYF

SEQ ID NO: 116817 - protein, 13 aa, Homo sapiens
  CDR3 for alpha chain variable domain of TCR clone 58409 (TRAV8-6, TRAJ49)
CAVITNTGNQFYF

SEQ ID NO: 116818 - protein, 15 aa, Homo sapiens
  CDR3 for beta chain variable domain of TCR clone 58409 (TRBV11-2, TRBJ2-2)
CASSSDRVNAGELFF

SEQ ID NO: 116819 - protein, 15 aa, Homo sapiens
  CDR3 for alpha chain variable domain of TCR clone 58410 (TRAV16, TRAJ57)
CALSGGQGGSEKLVF

SEQ ID NO: 116820 - protein, 17 aa, Homo sapiens
  CDR3 for beta chain variable domain of TCR clone 58410 (TRBV9, TRBJ2-3)
CASNLAPGGASTDTQYF

SEQ ID NO: 116821 - protein, 14 aa, Homo sapiens
  CDR3 for alpha chain variable domain of TCR clone 58411 (TRAV21, TRAJ35)
CAVMPIGFGNVLHC

SEQ ID NO: 116822 - protein, 14 aa, Homo sapiens
  CDR3 for beta chain variable domain of TCR clone 58411 (TRBV20-1, TRBJ2-1)
CSAQIGGSANEQFF

SEQ ID NO: 116823 - protein, 15 aa, Homo sapiens
  CDR3 for alpha chain variable domain of TCR clone 58412 (TRAV12-2, TRAJ43)
CAFDMRFGAGTRLTV

SEQ ID NO: 116824 - protein, 18 aa, Homo sapiens
  CDR3 for beta chain variable domain of TCR clone 58412 (TRBV20-1, TRBJ2-3)
CSASGLAWGPGTTDTQYF

SEQ ID NO: 116825 - protein, 13 aa, Homo sapiens
  CDR3 for alpha chain variable domain of TCR clone 58413 (TRAV21, TRAJ57)
CAVTQCGSEKLVF

SEQ ID NO: 116826 - protein, 15 aa, Homo sapiens
  CDR3 for beta chain variable domain of TCR clone 58413 (TRBV5-1, TRBJ1-1)
CASSSTTGTNTEAFF

SEQ ID NO: 116827 - protein, 14 aa, Homo sapiens
  CDR3 for alpha chain variable domain of TCR clone 58414 (TRAV12-2, TRAJ53)
CRERGGGSNYKLTF

SEQ ID NO: 116828 - protein, 17 aa, Homo sapiens
  CDR3 for beta chain variable domain of TCR clone 58414 (TRBV7-3, TRBJ2-3)
CASSLMKRMRGADMQYF

SEQ ID NO: 116829 - protein, 14 aa, Homo sapiens
  CDR3 for alpha chain variable domain of TCR clone 58415 (TRAV8-4, TRAJ9)
CAVRINTGGFKTIF

SEQ ID NO: 116830 - protein, 13 aa, Homo sapiens
  CDR3 for beta chain variable domain of TCR clone 58415 (TRBV2, TRBJ1-4)
CASSERAGEKLFF

SEQ ID NO: 116831 - protein, 14 aa, Homo sapiens
  CDR3 for alpha chain variable domain of TCR clone 58416 (TRAV12-2, TRAJ29)
CAVRRNSGNTPLVF

SEQ ID NO: 116832 - protein, 13 aa, Homo sapiens
  CDR3 for beta chain variable domain of TCR clone 58416 (TRBV12-4, TRBJ2-1)
CASSHYADNEQFF

SEQ ID NO: 116833 - protein, 16 aa, Homo sapiens
  CDR3 for alpha chain variable domain of TCR clone 58417 (TRAV8-2, TRAJ26)
CVVTLLLGSEFCLLSR

SEQ ID NO: 116834 - protein, 15 aa, Homo sapiens
  CDR3 for beta chain variable domain of TCR clone 58417 (TRBV11-2, TRBJ2-2)
CASSSDRVNAGELFF

SEQ ID NO: 116835 - protein, 14 aa, Homo sapiens
  CDR3 for alpha chain variable domain of TCR clone 58418 (TRAV17, TRAJ6)
CATDASGGSYIPTF

SEQ ID NO: 116836 - protein, 15 aa, Homo sapiens
  CDR3 for beta chain variable domain of TCR clone 58418 (TRBV4-1, TRBJ1-4)
CASSDTGGTDEKLFF

SEQ ID NO: 116837 - protein, 12 aa, Homo sapiens
  CDR3 for alpha chain variable domain of TCR clone 58419 (TRAV23/DV6, TRAJ30)
CAASKGDDKSIF

SEQ ID NO: 116838 - protein, 18 aa, Homo sapiens
  CDR3 for beta chain variable domain of TCR clone 58419 (TRBV10-3, TRBJ2-3)
CAISESRVGPMRGDTQYF

SEQ ID NO: 116839 - protein, 15 aa, Homo sapiens
  CDR3 for alpha chain variable domain of TCR clone 58420 (TRAV3, TRAJ4)
CAVRDGTGGYNKLIF

SEQ ID NO: 116840 - protein, 13 aa, Homo sapiens
  CDR3 for beta chain variable domain of TCR clone 58420 (TRBV12-4, TRBJ1-2)
CASSLRQGKGYTF

SEQ ID NO: 116841 - protein, 11 aa, Homo sapiens
  CDR3 for alpha chain variable domain of TCR clone 58421 (TRAV35, TRAJ34)
CWARSTDKLIF

SEQ ID NO: 116842 - protein, 13 aa, Homo sapiens
  CDR3 for beta chain variable domain of TCR clone 58421 (TRBV19, TRBJ2-7)
CASSFDRTYEQYF

SEQ ID NO: 116843 - protein, 13 aa, Homo sapiens
  CDR3 for alpha chain variable domain of TCR clone 58422 (TRAV36/DV7, TRAJ49)
CAVEANTGNKFYF

SEQ ID NO: 116844 - protein, 13 aa, Homo sapiens
  CDR3 for beta chain variable domain of TCR clone 58422 (TRBV10-3, TRBJ2-7)
CASKLAVNYEQYF

SEQ ID NO: 116845 - protein, 11 aa, Homo sapiens
  CDR3 for alpha chain variable domain of TCR clone 58423 (TRAV2, TRAJ33)
CAVESNYQLIW

SEQ ID NO: 116846 - protein, 15 aa, Homo sapiens
  CDR3 for beta chain variable domain of TCR clone 58423 (TRBV10-3, TRBJ2-3)
CAISLTSGGTDTQYF

SEQ ID NO: 116847 - protein, 11 aa, Homo sapiens
  CDR3 for alpha chain variable domain of TCR clone 58424 (TRAV21, TRAJ34)
CAHYNTDKLIF

SEQ ID NO: 116848 - protein, 13 aa, Homo sapiens
  CDR3 for beta chain variable domain of TCR clone 58424 (TRBV7-6, TRBJ1-2)
CASSLVADYGYTC

SEQ ID NO: 116849 - protein, 12 aa, Homo sapiens
  CDR3 for alpha chain variable domain of TCR clone 58425 (TRAV13-1, TRAJ21)
CAAKEGFNKFYF

SEQ ID NO: 116850 - protein, 15 aa, Homo sapiens
  CDR3 for beta chain variable domain of TCR clone 58425 (TRBV15, TRBJ1-5)
CATGRDPVSNQPQHF

SEQ ID NO: 116851 - protein, 17 aa, Homo sapiens
  CDR3 for alpha chain variable domain of TCR clone 58426 (TRAV3, TRAJ6)
CAVRDGPRAGGSYIPTF

SEQ ID NO: 116852 - protein, 15 aa, Homo sapiens
  CDR3 for beta chain variable domain of TCR clone 58426 (TRBV7-2, TRBJ2-1)
CASSLVGSSYNEQFF

SEQ ID NO: 116853 - protein, 12 aa, Homo sapiens
  CDR3 for alpha chain variable domain of TCR clone 58427 (TRAV13-1, TRAJ15)
CAESQAGTALIF

SEQ ID NO: 116854 - protein, 18 aa, Homo sapiens
  CDR3 for beta chain variable domain of TCR clone 58427 (TRBV7-9, TRBJ2-3)
CASSLPINGQISTDTQYF

SEQ ID NO: 116855 - protein, 13 aa, Homo sapiens
  CDR3 for alpha chain variable domain of TCR clone 58428 (TRAV21, TRAJ57)
CAVTQGGSEKLVL

SEQ ID NO: 116856 - protein, 11 aa, Homo sapiens
  CDR3 for beta chain variable domain of TCR clone 58428 (TRBV11-2, TRBJ2-2)
CASSLPGELFF

SEQ ID NO: 116857 - protein, 14 aa, Homo sapiens
  CDR3 for alpha chain variable domain of TCR clone 58429 (TRAV12-2, TRAJ44)
CAVNPAGTASKLTF

SEQ ID NO: 116858 - protein, 16 aa, Homo sapiens
  CDR3 for beta chain variable domain of TCR clone 58429 (TRBV2, TRBJ2-6)
CASSEVGGARANVLTF

SEQ ID NO: 116859 - protein, 11 aa, Homo sapiens
  CDR3 for alpha chain variable domain of TCR clone 58430 (TRAV2, TRAJ13)
CASGGYQKVTF

SEQ ID NO: 116860 - protein, 14 aa, Homo sapiens
  CDR3 for beta chain variable domain of TCR clone 58430 (TRBV11-3, TRBJ1-6)
CASSFSGGDSPLHF

SEQ ID NO: 116861 - protein, 13 aa, Homo sapiens
  CDR3 for alpha chain variable domain of TCR clone 58431 (TRAV8-3, TRAJ43)
CAVGIYNNNDMRF

SEQ ID NO: 116862 - protein, 16 aa, Homo sapiens
  CDR3 for beta chain variable domain of TCR clone 58431 (TRBV7-2, TRBJ2-5)
CASSLVLWTKQETQYL

SEQ ID NO: 116863 - protein, 11 aa, Homo sapiens
  CDR3 for alpha chain variable domain of TCR clone 58432 (TRAV2, TRAJ13)
CASGGYQKVTF

SEQ ID NO: 116864 - protein, 11 aa, Homo sapiens
  CDR3 for beta chain variable domain of TCR clone 58432 (TRBV11-2, TRBJ1-1)
CASSINTEAFF

SEQ ID NO: 116865 - protein, 15 aa, Homo sapiens
  CDR3 for alpha chain variable domain of TCR clone 58433 (TRAV3, TRAJ17)
CAVRDTGAAGNKRTF

SEQ ID NO: 116866 - protein, 14 aa, Homo sapiens
  CDR3 for beta chain variable domain of TCR clone 58433 (TRBV6-3, TRBJ1-1)
CASSNLLPGAEAFF

SEQ ID NO: 116867 - protein, 15 aa, Homo sapiens
  CDR3 for alpha chain variable domain of TCR clone 58434 (TRAV8-3, TRAJ45)
CASSYSGGGADGLTF

SEQ ID NO: 116868 - protein, 14 aa, Homo sapiens
  CDR3 for beta chain variable domain of TCR clone 58434 (TRBV2, TRBJ2-5)
CASKRDGTTETQYF

SEQ ID NO: 116869 - protein, 18 aa, Homo sapiens
  CDR3 for alpha chain variable domain of TCR clone 58435 (TRAV3, TRAJ17)
CAVRARRGGRSCRPQANF

SEQ ID NO: 116870 - protein, 14 aa, Homo sapiens
  CDR3 for beta chain variable domain of TCR clone 58435 (TRBV4-1, TRBJ2-2)
CASSQAVNTGELFF

SEQ ID NO: 116871 - protein, 18 aa, Homo sapiens
  CDR3 for alpha chain variable domain of TCR clone 58436 (TRAV12-3, TRAJ52)
CAMSRTNAGCTSYGKLTF

SEQ ID NO: 116872 - protein, 17 aa, Homo sapiens
  CDR3 for beta chain variable domain of TCR clone 58436 (TRBV7-3, TRBJ2-3)
CASSLMKRMRGADTQYF

SEQ ID NO: 116873 - protein, 14 aa, Homo sapiens
  CDR3 for alpha chain variable domain of TCR clone 58437 (TRAV1-2, TRAJ8)
CAVREDTGFQKLVF

SEQ ID NO: 116874 - protein, 15 aa, Homo sapiens
  CDR3 for beta chain variable domain of TCR clone 58437 (TRBV7-2, TRBJ2-2)
CASSPTGANTGELFF

SEQ ID NO: 116875 - protein, 14 aa, Homo sapiens
  CDR3 for alpha chain variable domain of TCR clone 58438 (TRAV26-1, TRAJ38)
CIADNAGNNRKLIW

SEQ ID NO: 116876 - protein, 13 aa, Homo sapiens
  CDR3 for beta chain variable domain of TCR clone 58438 (TRBV20-1, TRBJ1-1)
CSAMGGGNTEAFF

SEQ ID NO: 116877 - protein, 17 aa, Homo sapiens
  CDR3 for alpha chain variable domain of TCR clone 58439 (TRAV13-2, TRAJ42)
CAEKGKNYGGSQGNLIF

SEQ ID NO: 116878 - protein, 16 aa, Homo sapiens
  CDR3 for beta chain variable domain of TCR clone 58439 (TRBV7-9, TRBJ2-1)
CASSVGTGWDYNEQFF

SEQ ID NO: 116879 - protein, 10 aa, Homo sapiens
  CDR3 for alpha chain variable domain of TCR clone 58440 (TRAV23/DV6, TRAJ57)
CAASSTLSQG

SEQ ID NO: 116880 - protein, 14 aa, Homo sapiens
  CDR3 for beta chain variable domain of TCR clone 58440 (TRBV25-1, TRBJ1-1)
CASTHLVGNTEAFF

SEQ ID NO: 116881 - protein, 11 aa, Homo sapiens
  CDR3 for alpha chain variable domain of TCR clone 58441 (TRAV12-2, TRAJ29)
CAVTLRSPLAF

SEQ ID NO: 116882 - protein, 16 aa, Homo sapiens
  CDR3 for beta chain variable domain of TCR clone 58441 (TRBV19, TRBJ1-5)
CASSIDRGGPRQPQHF

SEQ ID NO: 116883 - protein, 15 aa, Homo sapiens
  CDR3 for alpha chain variable domain of TCR clone 58442 (TRAV2, TRAJ9)
CAVEDRGTGGFKTIF

SEQ ID NO: 116884 - protein, 16 aa, Homo sapiens
  CDR3 for beta chain variable domain of TCR clone 58442 (TRBV24-1, TRBJ2-3)
CATSDPVTGATDTQYF

SEQ ID NO: 116885 - protein, 18 aa, Homo sapiens
  CDR3 for alpha chain variable domain of TCR clone 58443 (TRAV26-2, TRAJ45)
CILRVDKYSGGGADGLTF

SEQ ID NO: 116886 - protein, 15 aa, Homo sapiens
  CDR3 for beta chain variable domain of TCR clone 58443 (TRBV7-9, TRBJ2-7)
CASSLPMGQANEQYF

SEQ ID NO: 116887 - protein, 13 aa, Homo sapiens
  CDR3 for alpha chain variable domain of TCR clone 58444 (TRAV20, TRAJ48)
CAVHLFGNEKLTF

SEQ ID NO: 116888 - protein, 15 aa, Homo sapiens
  CDR3 for beta chain variable domain of TCR clone 58444 (TRBV6-5, TRBJ2-6)
CASSQWEAGANDLTF

SEQ ID NO: 116889 - protein, 12 aa, Homo sapiens
  CDR3 for alpha chain variable domain of TCR clone 58445 (TRAV13-1, TRAJ20)
CAARQNDYKLSF

SEQ ID NO: 116890 - protein, 14 aa, Homo sapiens
  CDR3 for beta chain variable domain of TCR clone 58445 (TRBV5-1, TRBJ2-7)
CASSVASGVNEQYF

SEQ ID NO: 116891 - protein, 15 aa, Homo sapiens
  CDR3 for alpha chain variable domain of TCR clone 58446 (TRAV26-1, TRAJ15)
CIVRAANQAGTALSF

SEQ ID NO: 116892 - protein, 15 aa, Homo sapiens
  CDR3 for beta chain variable domain of TCR clone 58446 (TRBV20-1, TRBJ1-1)
CSARSAATSNTEAFF

SEQ ID NO: 116893 - protein, 11 aa, Homo sapiens
  CDR3 for alpha chain variable domain of TCR clone 58447 (TRAV17, TRAJ43)
CATPRSNDMRF

SEQ ID NO: 116894 - protein, 17 aa, Homo sapiens
  CDR3 for beta chain variable domain of TCR clone 58447 (TRBV13, TRBJ2-3)
CASSLSRVAGGRNTQYF

SEQ ID NO: 116895 - protein, 15 aa, Homo sapiens
  CDR3 for alpha chain variable domain of TCR clone 58448 (TRAV17, TRAJ4)
CATGTWPGGYNKLIF

SEQ ID NO: 116896 - protein, 15 aa, Homo sapiens
  CDR3 for beta chain variable domain of TCR clone 58448 (TRBV20-1, TRBJ2-7)
CSARDRVSGMDEQYF

SEQ ID NO: 116897 - protein, 13 aa, Homo sapiens
  CDR3 for alpha chain variable domain of TCR clone 58449 (TRAV39, TRAJ58)
CAGEETSGPRLTF

SEQ ID NO: 116898 - protein, 13 aa, Homo sapiens
  CDR3 for beta chain variable domain of TCR clone 58449 (TRBV12-4, TRBJ1-2)
CASSLRQGKGYTF

SEQ ID NO: 116899 - protein, 15 aa, Homo sapiens
  CDR3 for alpha chain variable domain of TCR clone 58450 (TRAV17, TRAJ4)
CATGTWSGGYNKLIF

SEQ ID NO: 116900 - protein, 15 aa, Homo sapiens
  CDR3 for beta chain variable domain of TCR clone 58450 (TRBV6-3, TRBJ2-7)
CASSSPGTVFYEQYF

SEQ ID NO: 116901 - protein, 17 aa, Homo sapiens
  CDR3 for alpha chain variable domain of TCR clone 58451 (TRAV36/DV7, TRAJ52)
WAVAQRAGGTSYGKLTF

SEQ ID NO: 116902 - protein, 14 aa, Homo sapiens
  CDR3 for beta chain variable domain of TCR clone 58451 (TRBV20-1, TRBJ2-3)
CSARGGTSTDTQYF

SEQ ID NO: 116903 - protein, 17 aa, Homo sapiens
  CDR3 for alpha chain variable domain of TCR clone 58452 (TRAV26-1, TRAJ11)
CIVRVGQSNSGYSTFTF

SEQ ID NO: 116904 - protein, 15 aa, Homo sapiens
  CDR3 for beta chain variable domain of TCR clone 58452 (TRBV27, TRBJ2-5)
CASSLIPSGGETQYF

SEQ ID NO: 116905 - protein, 23 aa, Homo sapiens
  CDR3 for alpha chain variable domain of TCR clone 58453 (TRAV26-1, TRAJ38)
CIAYNAGNNHIQNPDPAVYQLRD

SEQ ID NO: 116906 - protein, 12 aa, Homo sapiens
  CDR3 for beta chain variable domain of TCR clone 58453 (TRBV11-2, TRBJ2-2)
CASSLGGGELFF

SEQ ID NO: 116907 - protein, 13 aa, Homo sapiens
  CDR3 for alpha chain variable domain of TCR clone 58454 (TRAV26-2, TRAJ43)
CILRAVNNNDMRF

SEQ ID NO: 116908 - protein, 14 aa, Homo sapiens
  CDR3 for beta chain variable domain of TCR clone 58454 (TRBV7-2, TRBJ2-7)
CASSPKTSFYEQYF

SEQ ID NO: 116909 - protein, 14 aa, Homo sapiens
  CDR3 for alpha chain variable domain of TCR clone 58455 (TRAV17, TRAJ16)
CATADFSDCQKLLF

SEQ ID NO: 116910 - protein, 12 aa, Homo sapiens
  CDR3 for beta chain variable domain of TCR clone 58455 (TRBV24-1, TRBJ1-1)
CATLYPDTEAFF

SEQ ID NO: 116911 - protein, 16 aa, Homo sapiens
  CDR3 for alpha chain variable domain of TCR clone 58456 (TRAV30, TRAJ24)
CGTEIVDADSWGKFQF

SEQ ID NO: 116912 - protein, 14 aa, Homo sapiens
  CDR3 for beta chain variable domain of TCR clone 58456 (TRBV7-8, TRBJ2-7)
CASSPRDRVYEQYF

SEQ ID NO: 116913 - protein, 13 aa, Homo sapiens
  CDR3 for alpha chain variable domain of TCR clone 58457 (TRAV12-2, TRAJ10)
CAVPTGGGKKLTF

SEQ ID NO: 116914 - protein, 11 aa, Homo sapiens
  CDR3 for beta chain variable domain of TCR clone 58457 (TRBV6-1, TRBJ2-1)
CASISSNEQFF

SEQ ID NO: 116915 - protein, 14 aa, Homo sapiens
  CDR3 for alpha chain variable domain of TCR clone 58458 (TRAV20, TRAJ29)
CAVQAWVGNTPPVF

SEQ ID NO: 116916 - protein, 15 aa, Homo sapiens
  CDR3 for beta chain variable domain of TCR clone 58458 (TRBV29-1, TRBJ2-7)
CSVEFFDRGSYEQYF

SEQ ID NO: 116917 - protein, 15 aa, Homo sapiens
  CDR3 for alpha chain variable domain of TCR clone 58459 (TRAV26-1, TRAJ22)
CIVRVSFWFCKATDL

SEQ ID NO: 116918 - protein, 12 aa, Homo sapiens
  CDR3 for beta chain variable domain of TCR clone 58459 (TRBV7-9, TRBJ2-7)
CASSLEGYEQYF

SEQ ID NO: 116919 - protein, 15 aa, Homo sapiens
  CDR3 for alpha chain variable domain of TCR clone 58460 (TRAV8-3, TRAJ11)
CAVGLLNSGYSTLTF

SEQ ID NO: 116920 - protein, 23 aa, Homo sapiens
  CDR3 for beta chain variable domain of TCR clone 58460 (TRBV7-9, TRBJ1-2)
EAQLEKSRLLSDRFSAGEDGYTF

SEQ ID NO: 116921 - protein, 16 aa, Homo sapiens
  CDR3 for alpha chain variable domain of TCR clone 58461 (TRAV3, TRAJ18)
CAVRDGRGSTLGRLYF

SEQ ID NO: 116922 - protein, 15 aa, Homo sapiens
  CDR3 for beta chain variable domain of TCR clone 58461 (TRBV7-9, TRBJ1-6)
CASSSPGSGNSPLHF

SEQ ID NO: 116923 - protein, 14 aa, Homo sapiens
  CDR3 for alpha chain variable domain of TCR clone 58462 (TRAV12-3, TRAJ10)
SHLPLTGGGNKLTF

SEQ ID NO: 116924 - protein, 13 aa, Homo sapiens
  CDR3 for beta chain variable domain of TCR clone 58462 (TRBV20-1, TRBJ2-7)
CSATHTSGYEQYF

SEQ ID NO: 116925 - protein, 15 aa, Homo sapiens
  CDR3 for alpha chain variable domain of TCR clone 58463 (TRAV12-2, TRAJ43)
CAFDMRFGAGTGLTV

SEQ ID NO: 116926 - protein, 15 aa, Homo sapiens
  CDR3 for beta chain variable domain of TCR clone 58463 (TRBV5-1, TRBJ2-3)
CASSVTSGSTDTQYF

SEQ ID NO: 116927 - protein, 14 aa, Homo sapiens
  CDR3 for alpha chain variable domain of TCR clone 58464 (TRAV12-2, TRAJ24)
CAVTPADSWGKLQF

SEQ ID NO: 116928 - protein, 18 aa, Homo sapiens
  CDR3 for beta chain variable domain of TCR clone 58464 (TRBV11-2, TRBJ2-3)
CASSLGGASRGAPNTQYF

SEQ ID NO: 116929 - protein, 14 aa, Homo sapiens
  CDR3 for alpha chain variable domain of TCR clone 58465 (TRAV26-1, TRAJ39)
SIVRGSRAGNMLTF

SEQ ID NO: 116930 - protein, 15 aa, Homo sapiens
  CDR3 for beta chain variable domain of TCR clone 58465 (TRBV7-9, TRBJ1-5)
CASSQGHQPNQPQHF

SEQ ID NO: 116931 - protein, 12 aa, Homo sapiens
  CDR3 for alpha chain variable domain of TCR clone 58466 (TRAV3, TRAJ31)
CAVRDGNARLVF

SEQ ID NO: 116932 - protein, 18 aa, Homo sapiens
  CDR3 for beta chain variable domain of TCR clone 58466 (TRBV7-2, TRBJ2-3)
CASSLKREGSGITDTQYF

SEQ ID NO: 116933 - protein, 14 aa, Homo sapiens
  CDR3 for alpha chain variable domain of TCR clone 58467 (TRAV12-2, TRAJ17)
CAVLPKAAGNKLTF

SEQ ID NO: 116934 - protein, 17 aa, Homo sapiens
  CDR3 for beta chain variable domain of TCR clone 58467 (TRBV20-1, TRBJ2-2)
CSASGSGQGGLTGELFF

SEQ ID NO: 116935 - protein, 11 aa, Homo sapiens
  CDR3 for alpha chain variable domain of TCR clone 58468 (TRAV17, TRAJ9)
CATSGGFKTIF

SEQ ID NO: 116936 - protein, 14 aa, Homo sapiens
  CDR3 for beta chain variable domain of TCR clone 58468 (TRBV7-9, TRBJ2-2)
CASSGLADTGELFF

SEQ ID NO: 116937 - protein, 17 aa, Homo sapiens
  CDR3 for alpha chain variable domain of TCR clone 58469 (TRAV3, TRAJ42)
CAVRDRDYGGSQGNIIF

SEQ ID NO: 116938 - protein, 15 aa, Homo sapiens
  CDR3 for beta chain variable domain of TCR clone 58469 (TRBV2, TRBJ2-7)
CASSEGLARSYEQYF

SEQ ID NO: 116939 - protein, 11 aa, Homo sapiens
  CDR3 for alpha chain variable domain of TCR clone 58470 (TRAV2, TRAJ13)
CSSGGYQKVTF

SEQ ID NO: 116940 - protein, 14 aa, Homo sapiens
  CDR3 for beta chain variable domain of TCR clone 58470 (TRBV19, TRBJ2-1)
CASPTFVLSGEQFF

SEQ ID NO: 116941 - protein, 20 aa, Homo sapiens
  CDR3 for alpha chain variable domain of TCR clone 58471 (TRAV1-1, TRAJ4)
CLLFLRCEGFLSGGYNKLIF

SEQ ID NO: 116942 - protein, 16 aa, Homo sapiens
  CDR3 for beta chain variable domain of TCR clone 58471 (TRBV28, TRBJ1-4)
CASSPPYRGRSEKLFF

SEQ ID NO: 116943 - protein, 13 aa, Homo sapiens
  CDR3 for alpha chain variable domain of TCR clone 58472 (TRAV9-2, TRAJ53)
CALSGGSNYKLTF

SEQ ID NO: 116944 - protein, 17 aa, Homo sapiens
  CDR3 for beta chain variable domain of TCR clone 58472 (TRBV11-2, TRBJ2-1)
CTSSLYPPGVEYNEQFF

SEQ ID NO: 116945 - protein, 17 aa, Homo sapiens
  CDR3 for alpha chain variable domain of TCR clone 58473 (TRAV26-2, TRAJ42)
CILRDVGYGRSQGNLIF

SEQ ID NO: 116946 - protein, 16 aa, Homo sapiens
  CDR3 for beta chain variable domain of TCR clone 58473 (TRBV12-4, TRBJ2-7)
CASSLIGGTGTYEQYF

SEQ ID NO: 116947 - protein, 11 aa, Homo sapiens
  CDR3 for alpha chain variable domain of TCR clone 58474 (TRAV1-2, TRAJ40)
CAVPGTYKYIF

SEQ ID NO: 116948 - protein, 12 aa, Homo sapiens
  CDR3 for beta chain variable domain of TCR clone 58474 (TRBV7-8, TRBJ2-7)
CASSLGDREQYF

SEQ ID NO: 116949 - protein, 14 aa, Homo sapiens
  CDR3 for alpha chain variable domain of TCR clone 58475 (TRAV8-4, TRAJ9)
CAVRINTGGFKTIF

SEQ ID NO: 116950 - protein, 15 aa, Homo sapiens
  CDR3 for beta chain variable domain of TCR clone 58475 (TRBV10-2, TRBJ2-6)
CASSEQVTGANVLTF

SEQ ID NO: 116951 - protein, 13 aa, Homo sapiens
  CDR3 for alpha chain variable domain of TCR clone 58476 (TRAV21, TRAJ20)
CAVGLRVDYKLSF

SEQ ID NO: 116952 - protein, 13 aa, Homo sapiens
  CDR3 for beta chain variable domain of TCR clone 58476 (TRBV12-4, TRBJ2-7)
CASSPTETYEQYF

SEQ ID NO: 116953 - protein, 17 aa, Homo sapiens
  CDR3 for alpha chain variable domain of TCR clone 58477 (TRAV27, TRAJ18)
CAGLHRGRGSTLGRLYF

SEQ ID NO: 116954 - protein, 14 aa, Homo sapiens
  CDR3 for beta chain variable domain of TCR clone 58477 (TRBV20-1, TRBJ1-5)
CSARGRGSNQPQHF

SEQ ID NO: 116955 - protein, 14 aa, Homo sapiens
  CDR3 for alpha chain variable domain of TCR clone 58478 (TRAV8-1, TRAJ5)
CAVRTDTGRRALTF

SEQ ID NO: 116956 - protein, 15 aa, Homo sapiens
  CDR3 for beta chain variable domain of TCR clone 58478 (TRBV7-9, TRBJ1-6)
CASSSPGRGNSPLHF

SEQ ID NO: 116957 - protein, 12 aa, Homo sapiens
  CDR3 for alpha chain variable domain of TCR clone 58479 (TRAV2, TRAJ31)
CAVEDNNARLMF

SEQ ID NO: 116958 - protein, 14 aa, Homo sapiens
  CDR3 for beta chain variable domain of TCR clone 58479 (TRBV19, TRBJ2-5)
CASSMTGEQETQYF

SEQ ID NO: 116959 - protein, 11 aa, Homo sapiens
  CDR3 for alpha chain variable domain of TCR clone 58480 (TRAV1-1, TRAJ20)
CAVFNDYKLSF

SEQ ID NO: 116960 - protein, 16 aa, Homo sapiens
  CDR3 for beta chain variable domain of TCR clone 58480 (TRBV29-1, TRBJ2-2)
CSVEETSEGNTGELFF

SEQ ID NO: 116961 - protein, 16 aa, Homo sapiens
  CDR3 for alpha chain variable domain of TCR clone 58481 (TRAV12-1, TRAJ13)
CVVNLEVSGGYQKVTF

SEQ ID NO: 116962 - protein, 16 aa, Homo sapiens
  CDR3 for beta chain variable domain of TCR clone 58481 (TRBV24-1, TRBJ2-6)
CATSDRRASGASVLTF

SEQ ID NO: 116963 - protein, 14 aa, Homo sapiens
  CDR3 for alpha chain variable domain of TCR clone 58482 (TRAV13-2, TRAJ43)
CAEVHTYNNNDMRF

SEQ ID NO: 116964 - protein, 15 aa, Homo sapiens
  CDR3 for beta chain variable domain of TCR clone 58482 (TRBV7-9, TRBJ2-2)
CASGPLDTFPGELFF

SEQ ID NO: 116965 - protein, 13 aa, Homo sapiens
  CDR3 for alpha chain variable domain of TCR clone 58483 (TRAV29/DV5, TRAJ47)
CAASAEYGNKLVF

SEQ ID NO: 116966 - protein, 14 aa, Homo sapiens
  CDR3 for beta chain variable domain of TCR clone 58483 (TRBV4-1, TRBJ1-4)
CASSQERKNEKLFF

SEQ ID NO: 116967 - protein, 16 aa, Homo sapiens
  CDR3 for alpha chain variable domain of TCR clone 58484 (TRAV3, TRAJ21)
CAVRDIERGNFNKFYF

SEQ ID NO: 116968 - protein, 13 aa, Homo sapiens
  CDR3 for beta chain variable domain of TCR clone 58484 (TRBV27, TRBJ2-7)
CASSLTTGYERYF

SEQ ID NO: 116969 - protein, 14 aa, Homo sapiens
  CDR3 for alpha chain variable domain of TCR clone 58485 (TRAV20, TRAJ56)
CAVQGAGANSKLTF

SEQ ID NO: 116970 - protein, 14 aa, Homo sapiens
  CDR3 for beta chain variable domain of TCR clone 58485 (TRBV25-1, TRBJ1-1)
CASTHLGGNTEAFF

SEQ ID NO: 116971 - protein, 13 aa, Homo sapiens
  CDR3 for alpha chain variable domain of TCR clone 58486 (TRAV8-3, TRAJ48)
RAVVPFGNEKLTF

SEQ ID NO: 116972 - protein, 14 aa, Homo sapiens
  CDR3 for beta chain variable domain of TCR clone 58486 (TRBV18, TRBJ2-7)
CASSPRGGAYEQYF

SEQ ID NO: 116973 - protein, 15 aa, Homo sapiens
  CDR3 for alpha chain variable domain of TCR clone 58487 (TRAV35, TRAJ40)
CAGQLGTSGTYKYIF

SEQ ID NO: 116974 - protein, 14 aa, Homo sapiens
  CDR3 for beta chain variable domain of TCR clone 58487 (TRBV7-3, TRBJ2-1)
CASSLAGGMNEQFF

SEQ ID NO: 116975 - protein, 14 aa, Homo sapiens
  CDR3 for alpha chain variable domain of TCR clone 58488 (TRAV12-1, TRAJ17)
CLVNPKAAGNKLTF

SEQ ID NO: 116976 - protein, 16 aa, Homo sapiens
  CDR3 for beta chain variable domain of TCR clone 58488 (TRBV20-1, TRBJ2-1)
CSASASGYSSYNEQFF

SEQ ID NO: 116977 - protein, 16 aa, Homo sapiens
  CDR3 for alpha chain variable domain of TCR clone 58489 (TRAV3, TRAJ37)
CAVRPHGSGNTGKLIF

SEQ ID NO: 116978 - protein, 15 aa, Homo sapiens
  CDR3 for beta chain variable domain of TCR clone 58489 (TRBV7-9, TRBJ1-6)
CASSSPGRGNSPLHF

SEQ ID NO: 116979 - protein, 12 aa, Homo sapiens
  CDR3 for alpha chain variable domain of TCR clone 58490 (TRAV13-2, TRAJ23)
CAERHRGGKLIF

SEQ ID NO: 116980 - protein, 14 aa, Homo sapiens
  CDR3 for beta chain variable domain of TCR clone 58490 (TRBV18, TRBJ2-5)
CASSPPGHQETQYF

SEQ ID NO: 116981 - protein, 13 aa, Homo sapiens
  CDR3 for alpha chain variable domain of TCR clone 58491 (TRAV21, TRAJ27)
CAARPVNAGKSTF

SEQ ID NO: 116982 - protein, 14 aa, Homo sapiens
  CDR3 for beta chain variable domain of TCR clone 58491 (TRBV7-6, TRBJ2-3)
CASSLGTVTDTRYF

SEQ ID NO: 116983 - protein, 13 aa, Homo sapiens
  CDR3 for alpha chain variable domain of TCR clone 58492 (TRAV8-3, TRAJ6)
CAVEKGGSYIPTF

SEQ ID NO: 116984 - protein, 15 aa, Homo sapiens
  CDR3 for beta chain variable domain of TCR clone 58492 (TRBV28, TRBJ2-5)
SASSADRGRGETQYF

SEQ ID NO: 116985 - protein, 15 aa, Homo sapiens
  CDR3 for alpha chain variable domain of TCR clone 58493 (TRAV23/DV6, TRAJ18)
CAARYRGSTLGRLYF

SEQ ID NO: 116986 - protein, 17 aa, Homo sapiens
  CDR3 for beta chain variable domain of TCR clone 58493 (TRBV11-2, TRBJ2-1)
CASSLYPPGVEYNEQFF

SEQ ID NO: 116987 - protein, 14 aa, Homo sapiens
  CDR3 for alpha chain variable domain of TCR clone 58494 (TRAV1-1, TRAJ33)
CAVRPEDSNYQLIW

SEQ ID NO: 116988 - protein, 13 aa, Homo sapiens
  CDR3 for beta chain variable domain of TCR clone 58494 (TRBV10-3, TRBJ2-7)
CASKLAVNYEQYF

SEQ ID NO: 116989 - protein, 12 aa, Homo sapiens
  CDR3 for alpha chain variable domain of TCR clone 58495 (TRAV13-1, TRAJ21)
CAAKEGFNKFYF

SEQ ID NO: 116990 - protein, 17 aa, Homo sapiens
  CDR3 for beta chain variable domain of TCR clone 58495 (TRBV12-4, TRBJ2-1)
CASSPGLAGGRINEQFF

SEQ ID NO: 116991 - protein, 14 aa, Homo sapiens
  CDR3 for alpha chain variable domain of TCR clone 58496 (TRAV1-1, TRAJ27)
CAVIYNTNAGKSTF

SEQ ID NO: 116992 - protein, 15 aa, Homo sapiens
  CDR3 for beta chain variable domain of TCR clone 58496 (TRBV19, TRBJ1-1)
CASTSGQIQNTEAFF

SEQ ID NO: 116993 - protein, 14 aa, Homo sapiens
  CDR3 for alpha chain variable domain of TCR clone 58497 (TRAV8-1, TRAJ6)
CAVNASGGSYIPTF

SEQ ID NO: 116994 - protein, 14 aa, Homo sapiens
  CDR3 for beta chain variable domain of TCR clone 58497 (TRBV7-8, TRBJ2-3)
CASSLEAGTDTQYF

SEQ ID NO: 116995 - protein, 14 aa, Homo sapiens
  CDR3 for alpha chain variable domain of TCR clone 58498 (TRAV17, TRAJ57)
CATDPQGGSEKLVF

SEQ ID NO: 116996 - protein, 12 aa, Homo sapiens
  CDR3 for beta chain variable domain of TCR clone 58498 (TRBV28, TRBJ2-3)
CASSLYRDTQYF

SEQ ID NO: 116997 - protein, 12 aa, Homo sapiens
  CDR3 for alpha chain variable domain of TCR clone 58499 (TRAV2, TRAJ31)
CAVEDNNARLMF

SEQ ID NO: 116998 - protein, 16 aa, Homo sapiens
  CDR3 for beta chain variable domain of TCR clone 58499 (TRBV10-3, TRBJ2-1)
CAISGVGDGGGGKQFF

SEQ ID NO: 116999 - protein, 14 aa, Homo sapiens
  CDR3 for alpha chain variable domain of TCR clone 58500 (TRAV3, TRAJ7)
CAVREEEREQQTRF

SEQ ID NO: 117000 - protein, 12 aa, Homo sapiens
  CDR3 for beta chain variable domain of TCR clone 58500 (TRBV7-8, TRBJ2-7)
CASSLGYREQYF

SEQ ID NO: 117001 - protein, 12 aa, Homo sapiens
  CDR3 for alpha chain variable domain of TCR clone 58501 (TRAV21, TRAJ3)
CCFYSSASKIIF

SEQ ID NO: 117002 - protein, 13 aa, Homo sapiens
  CDR3 for beta chain variable domain of TCR clone 58501 (TRBV7-9, TRBJ2-5)
CASLPSGRETQYF

SEQ ID NO: 117003 - protein, 14 aa, Homo sapiens
  CDR3 for alpha chain variable domain of TCR clone 58502 (TRAV2, TRAJ9)
CAVEDRSGGFKTIF

SEQ ID NO: 117004 - protein, 15 aa, Homo sapiens
  CDR3 for beta chain variable domain of TCR clone 58502 (TRBV10-2, TRBJ2-6)
CASSEQGTGANVLTF

SEQ ID NO: 117005 - protein, 12 aa, Homo sapiens
  CDR3 for alpha chain variable domain of TCR clone 58503 (TRAV21, TRAJ33)
CAEMDSNYQLIW

SEQ ID NO: 117006 - protein, 14 aa, Homo sapiens
  CDR3 for beta chain variable domain of TCR clone 58503 (TRBV2, TRBJ2-7)
CASSLTSGGYERYF

SEQ ID NO: 117007 - protein, 14 aa, Homo sapiens
  CDR3 for alpha chain variable domain of TCR clone 58504 (TRAV16, TRAJ40)
CALHEPYYLRNLQI

SEQ ID NO: 117008 - protein, 12 aa, Homo sapiens
  CDR3 for beta chain variable domain of TCR clone 58504 (TRBV7-3, TRBJ2-3)
CASSSLTDTQYF

SEQ ID NO: 117009 - protein, 15 aa, Homo sapiens
  CDR3 for alpha chain variable domain of TCR clone 58505 (TRAV26-2, TRAJ50)
CILRDEETSCDKVIF

SEQ ID NO: 117010 - protein, 12 aa, Homo sapiens
  CDR3 for beta chain variable domain of TCR clone 58505 (TRBV5-7, TRBJ1-2)
CASSDGPYGYTF

SEQ ID NO: 117011 - protein, 14 aa, Homo sapiens
  CDR3 for alpha chain variable domain of TCR clone 58506 (TRAV3, TRAJ36)
CAVRDGTGANNLFF

SEQ ID NO: 117012 - protein, 16 aa, Homo sapiens
  CDR3 for beta chain variable domain of TCR clone 58506 (TRBV20-1, TRBJ2-6)
CNAREGPGVGANVLTF

SEQ ID NO: 117013 - protein, 11 aa, Homo sapiens
  CDR3 for alpha chain variable domain of TCR clone 58507 (TRAV3, TRAJ21)
CAVGNFNKFYF

SEQ ID NO: 117014 - protein, 16 aa, Homo sapiens
  CDR3 for beta chain variable domain of TCR clone 58507 (TRBV13, TRBJ2-2)
CASSPRTGEHTGELFF

SEQ ID NO: 117015 - protein, 14 aa, Homo sapiens
  CDR3 for alpha chain variable domain of TCR clone 58508 (TRAV17, TRAJ31)
CATVLRNNNARLMF

SEQ ID NO: 117016 - protein, 14 aa, Homo sapiens
  CDR3 for beta chain variable domain of TCR clone 58508 (TRBV12-4, TRBJ2-5)
CASSLWQEQETQYF

SEQ ID NO: 117017 - protein, 11 aa, Homo sapiens
  CDR3 for alpha chain variable domain of TCR clone 58509 (TRAV4, TRAJ23)
CLVAPGGKLIF

SEQ ID NO: 117018 - protein, 15 aa, Homo sapiens
  CDR3 for beta chain variable domain of TCR clone 58509 (TRBV7-2, TRBJ2-1)
CASSFQADEYNEQLF

SEQ ID NO: 117019 - protein, 15 aa, Homo sapiens
  CDR3 for alpha chain variable domain of TCR clone 58510 (TRAV8-3, TRAJ40)
CAVGSYTSGTYKYIF

SEQ ID NO: 117020 - protein, 16 aa, Homo sapiens
  CDR3 for beta chain variable domain of TCR clone 58510 (TRBV7-2, TRBJ2-7)
CASSLDPGGGSGEQYF

SEQ ID NO: 117021 - protein, 15 aa, Homo sapiens
  CDR3 for alpha chain variable domain of TCR clone 58511 (TRAV25, TRAJ52)
CAGRSGGTSYGKPTF

SEQ ID NO: 117022 - protein, 17 aa, Homo sapiens
  CDR3 for beta chain variable domain of TCR clone 58511 (TRBV7-8, TRBJ2-6)
CASSAGTGGAGANVLTF

SEQ ID NO: 117023 - protein, 14 aa, Homo sapiens
  CDR3 for alpha chain variable domain of TCR clone 58512 (TRAV12-2, TRAJ17)
CAALFKAAGNKLTF

SEQ ID NO: 117024 - protein, 16 aa, Homo sapiens
  CDR3 for beta chain variable domain of TCR clone 58512 (TRBV20-1, TRBJ2-2)
CSASASGVPGAGELFF

SEQ ID NO: 117025 - protein, 18 aa, Homo sapiens
  CDR3 for alpha chain variable domain of TCR clone 58513 (TRAV26-1, TRAJ5)
CIVRVVPPRDMGRRALTF

SEQ ID NO: 117026 - protein, 15 aa, Homo sapiens
  CDR3 for beta chain variable domain of TCR clone 58513 (TRBV7-9, TRBJ2-7)
CASSLPMGQANEQYF

SEQ ID NO: 117027 - protein, 12 aa, Homo sapiens
  CDR3 for alpha chain variable domain of TCR clone 58514 (TRAV13-1, TRAJ49)
CAASIWGNQFYF

SEQ ID NO: 117028 - protein, 14 aa, Homo sapiens
  CDR3 for beta chain variable domain of TCR clone 58514 (TRBV12-4, TRBJ1-1)
CASSLDGLNTGAFF

SEQ ID NO: 117029 - protein, 14 aa, Homo sapiens
  CDR3 for alpha chain variable domain of TCR clone 58515 (TRAV12-2, TRAJ27)
CAVLVGPMQANQPL

SEQ ID NO: 117030 - protein, 14 aa, Homo sapiens
  CDR3 for beta chain variable domain of TCR clone 58515 (TRBV7-9, TRBJ2-7)
CASSLQDRVYEQYF

SEQ ID NO: 117031 - protein, 12 aa, Homo sapiens
  CDR3 for alpha chain variable domain of TCR clone 58516 (TRAV8-3, TRAJ26)
CAGDNYGQNFVF

SEQ ID NO: 117032 - protein, 15 aa, Homo sapiens
  CDR3 for beta chain variable domain of TCR clone 58516 (TRBV7-2, TRBJ2-3)
CASSSGLAGGNEQFF

SEQ ID NO: 117033 - protein, 15 aa, Homo sapiens
  CDR3 for alpha chain variable domain of TCR clone 58517 (TRAV3, TRAJ20)
CAVREIKLSDYKLSF

SEQ ID NO: 117034 - protein, 15 aa, Homo sapiens
  CDR3 for beta chain variable domain of TCR clone 58517 (TRBV7-9, TRBJ1-6)
CASSSPGCGNSPLHF

SEQ ID NO: 117035 - protein, 15 aa, Homo sapiens
  CDR3 for alpha chain variable domain of TCR clone 58518 (TRAV17, TRAJ13)
CATDAGSGGYQKVTF

SEQ ID NO: 117036 - protein, 17 aa, Homo sapiens
  CDR3 for beta chain variable domain of TCR clone 58518 (TRBV11-2, TRBJ2-1)
CASSLYPPGVEYNVQFF

SEQ ID NO: 117037 - protein, 11 aa, Homo sapiens
  CDR3 for alpha chain variable domain of TCR clone 58519 (TRAV2, TRAJ13)
CASGGYQKDTF

SEQ ID NO: 117038 - protein, 16 aa, Homo sapiens
  CDR3 for beta chain variable domain of TCR clone 58519 (TRBV2, TRBJ2-1)
CASSVGGSLSYSEQFF

SEQ ID NO: 117039 - protein, 16 aa, Homo sapiens
  CDR3 for alpha chain variable domain of TCR clone 58520 (TRAV26-1, )
CIDIQDPDPAVYQLRD

SEQ ID NO: 117040 - protein, 19 aa, Homo sapiens
  CDR3 for beta chain variable domain of TCR clone 58520 (TRBV19, TRBJ2-5)
CASSIGQVTDFFLGETQYF

SEQ ID NO: 117041 - protein, 13 aa, Homo sapiens
  CDR3 for alpha chain variable domain of TCR clone 58521 (TRAV8-3, TRAJ36)
CAVGATGANNLSF

SEQ ID NO: 117042 - protein, 14 aa, Homo sapiens
  CDR3 for beta chain variable domain of TCR clone 58521 (TRBV7-2, TRBJ2-7)
CASRSQGAAYEQYF

SEQ ID NO: 117043 - protein, 18 aa, Homo sapiens
  CDR3 for alpha chain variable domain of TCR clone 58522 (TRAV12-3, TRAJ52)
CAMSVGGAGGTSYGKLTF

SEQ ID NO: 117044 - protein, 14 aa, Homo sapiens
  CDR3 for beta chain variable domain of TCR clone 58522 (TRBV19, TRBJ2-5)
CASSMTGQQETQYF

SEQ ID NO: 117045 - protein, 14 aa, Homo sapiens
  CDR3 for alpha chain variable domain of TCR clone 58523 (TRAV29/DV5, TRAJ36)
CAARRKTGANNLFF

SEQ ID NO: 117046 - protein, 16 aa, Homo sapiens
  CDR3 for beta chain variable domain of TCR clone 58523 (TRBV4-1, TRBJ2-7)
CASSQEGTASSYEQYF

SEQ ID NO: 117047 - protein, 14 aa, Homo sapiens
  CDR3 for alpha chain variable domain of TCR clone 58524 (TRAV12-3, TRAJ10)
SHLPLTGGGNKLTF

SEQ ID NO: 117048 - protein, 14 aa, Homo sapiens
  CDR3 for beta chain variable domain of TCR clone 58524 (TRBV28, TRBJ2-1)
CASSLLQGTNEQFF

SEQ ID NO: 117049 - protein, 12 aa, Homo sapiens
  CDR3 for alpha chain variable domain of TCR clone 58525 (TRAV16, TRAJ10)
CSRTGGGNKLTF

SEQ ID NO: 117050 - protein, 17 aa, Homo sapiens
  CDR3 for beta chain variable domain of TCR clone 58525 (TRBV20-1, TRBJ2-1)
CSASSSGLAGSYNEQFF

SEQ ID NO: 117051 - protein, 15 aa, Homo sapiens
  CDR3 for alpha chain variable domain of TCR clone 58526 (TRAV8-2, TRAJ16)
CVVSDGFSDGQKLLF

SEQ ID NO: 117052 - protein, 14 aa, Homo sapiens
  CDR3 for beta chain variable domain of TCR clone 58526 (TRBV7-3, TRBJ1-1)
CASSLWTGYTEAFF

SEQ ID NO: 117053 - protein, 17 aa, Homo sapiens
  CDR3 for alpha chain variable domain of TCR clone 58527 (TRAV13-1, TRAJ28)
CAASPPYSGAGSYQLTF

SEQ ID NO: 117054 - protein, 15 aa, Homo sapiens
  CDR3 for beta chain variable domain of TCR clone 58527 (TRBV6-3, TRBJ2-2)
CASSFLATLTGGLFF

SEQ ID NO: 117055 - protein, 15 aa, Homo sapiens
  CDR3 for alpha chain variable domain of TCR clone 58528 (TRAV2, TRAJ9)
CAVEDRGTGGFKTIF

SEQ ID NO: 117056 - protein, 14 aa, Homo sapiens
  CDR3 for beta chain variable domain of TCR clone 58528 (TRBV4-1, TRBJ2-2)
CARSQAVNTGELFF

SEQ ID NO: 117057 - protein, 18 aa, Homo sapiens
  CDR3 for alpha chain variable domain of TCR clone 58529 (TRAV14/DV4, TRAJ15)
CAMREFPPTGQAGTALIF

SEQ ID NO: 117058 - protein, 13 aa, Homo sapiens
  CDR3 for beta chain variable domain of TCR clone 58529 (TRBV20-1, TRBJ2-5)
CSAREAFQETQYF

SEQ ID NO: 117059 - protein, 12 aa, Homo sapiens
  CDR3 for alpha chain variable domain of TCR clone 58530 (TRAV12-3, TRAJ17)
CAMTLTGNKLTF

SEQ ID NO: 117060 - protein, 19 aa, Homo sapiens
  CDR3 for beta chain variable domain of TCR clone 58530 (TRBV25-1, TRBJ2-2)
CAILVYRVDRGRKAGELFF

SEQ ID NO: 117061 - protein, 15 aa, Homo sapiens
  CDR3 for alpha chain variable domain of TCR clone 58531 (TRAV38-1, TRAJ57)
CAFMDSQGGSEKLVF

SEQ ID NO: 117062 - protein, 16 aa, Homo sapiens
  CDR3 for beta chain variable domain of TCR clone 58531 (TRBV10-3, TRBJ2-1)
CAIRGGGRGDYDEQFF

SEQ ID NO: 117063 - protein, 15 aa, Homo sapiens
  CDR3 for alpha chain variable domain of TCR clone 58532 (TRAV4, TRAJ26)
CLVGDMNNYGQNFVF

SEQ ID NO: 117064 - protein, 18 aa, Homo sapiens
  CDR3 for beta chain variable domain of TCR clone 58532 (TRBV28, TRBJ1-4)
CASSSRTGRLMKNCFLAV

SEQ ID NO: 117065 - protein, 17 aa, Homo sapiens
  CDR3 for alpha chain variable domain of TCR clone 58533 (TRAV3, TRAJ6)
CAVRDGPRAGGSYIPTF

SEQ ID NO: 117066 - protein, 12 aa, Homo sapiens
  CDR3 for beta chain variable domain of TCR clone 58533 (TRBV7-8, TRBJ2-7)
CASSLAGYEQYF

SEQ ID NO: 117067 - protein, 15 aa, Homo sapiens
  CDR3 for alpha chain variable domain of TCR clone 58534 (TRAV3, TRAJ22)
CAVRDRGGSARQPTF

SEQ ID NO: 117068 - protein, 13 aa, Homo sapiens
  CDR3 for beta chain variable domain of TCR clone 58534 (TRBV2, TRBJ1-5)
CATAGPGNQPQHF

SEQ ID NO: 117069 - protein, 14 aa, Homo sapiens
  CDR3 for alpha chain variable domain of TCR clone 58535 (TRAV12-3, TRAJ58)
CAISTETSGSRLTF

SEQ ID NO: 117070 - protein, 13 aa, Homo sapiens
  CDR3 for beta chain variable domain of TCR clone 58535 (TRBV27, TRBJ2-3)
CASNWGRTDTQYF

SEQ ID NO: 117071 - protein, 13 aa, Homo sapiens
  CDR3 for alpha chain variable domain of TCR clone 58536 (TRAV12-3, TRAJ33)
CAMSVNSNYQLLW

SEQ ID NO: 117072 - protein, 13 aa, Homo sapiens
  CDR3 for beta chain variable domain of TCR clone 58536 (TRBV7-2, TRBJ2-2)
CASSLAVTGELFF

SEQ ID NO: 117073 - protein, 15 aa, Homo sapiens
  CDR3 for alpha chain variable domain of TCR clone 58537 (TRAV12-1, TRAJ44)
CVVFVNTGTAIKLTF

SEQ ID NO: 117074 - protein, 17 aa, Homo sapiens
  CDR3 for beta chain variable domain of TCR clone 58537 (TRBV7-8, TRBJ2-6)
CASSAGTGGAGANVLTF

SEQ ID NO: 117075 - protein, 14 aa, Homo sapiens
  CDR3 for alpha chain variable domain of TCR clone 58538 (TRAV17, TRAJ35)
CATDRPGFGNVLHC

SEQ ID NO: 117076 - protein, 19 aa, Homo sapiens
  CDR3 for beta chain variable domain of TCR clone 58538 (TRBV11-3, TRBJ2-2)
CASSTRPGAETTNTGELFF

SEQ ID NO: 117077 - protein, 15 aa, Homo sapiens
  CDR3 for alpha chain variable domain of TCR clone 58539 (TRAV12-1, TRAJ15)
CVVTRANQAGTALIF

SEQ ID NO: 117078 - protein, 16 aa, Homo sapiens
  CDR3 for beta chain variable domain of TCR clone 58539 (TRBV19, TRBJ2-2)
CASRSPGTGATGELFF

SEQ ID NO: 117079 - protein, 16 aa, Homo sapiens
  CDR3 for alpha chain variable domain of TCR clone 58540 (TRAV12-2, TRAJ32)
CAVSLGQGGATNKLIF

SEQ ID NO: 117080 - protein, 15 aa, Homo sapiens
  CDR3 for beta chain variable domain of TCR clone 58540 (TRBV20-1, TRBJ2-7)
CSARGPLAGGREQYF

SEQ ID NO: 117081 - protein, 13 aa, Homo sapiens
  CDR3 for alpha chain variable domain of TCR clone 58541 (TRAV13-1, TRAJ45)
CAESGGGADGLTF

SEQ ID NO: 117082 - protein, 17 aa, Homo sapiens
  CDR3 for beta chain variable domain of TCR clone 58541 (TRBV13, TRBJ2-3)
CASSLSRVAGGRNTQYF

SEQ ID NO: 117083 - protein, 14 aa, Homo sapiens
  CDR3 for alpha chain variable domain of TCR clone 58542 (TRAV1-2, TRAJ16)
CAVNRFSDCQKLLF

SEQ ID NO: 117084 - protein, 13 aa, Homo sapiens
  CDR3 for beta chain variable domain of TCR clone 58542 (TRBV4-1, TRBJ2-1)
CASSQAGGDEQFF

SEQ ID NO: 117085 - protein, 11 aa, Homo sapiens
  CDR3 for alpha chain variable domain of TCR clone 58543 (TRAV21, TRAJ30)
CCEATDDKIIF

SEQ ID NO: 117086 - protein, 15 aa, Homo sapiens
  CDR3 for beta chain variable domain of TCR clone 58543 (TRBV6-6, TRBJ2-7)
CASSYSYGGSYEQYF

SEQ ID NO: 117087 - protein, 13 aa, Homo sapiens
  CDR3 for alpha chain variable domain of TCR clone 58544 (TRAV21, TRAJ57)
CAVTQGGSEKLVF

SEQ ID NO: 117088 - protein, 15 aa, Homo sapiens
  CDR3 for beta chain variable domain of TCR clone 58544 (TRBV7-2, TRBJ2-1)
CASSLASGRVNEQFF

SEQ ID NO: 117089 - protein, 14 aa, Homo sapiens
  CDR3 for alpha chain variable domain of TCR clone 58545 (TRAV13-1, TRAJ22)
CAASYAGSARQLTF

SEQ ID NO: 117090 - protein, 17 aa, Homo sapiens
  CDR3 for beta chain variable domain of TCR clone 58545 (TRBV7-8, TRBJ2-6)
CASSAGTGGAGANVLTF

SEQ ID NO: 117091 - protein, 16 aa, Homo sapiens
  CDR3 for alpha chain variable domain of TCR clone 58546 (TRAV3, TRAJ21)
CAVRDIERGNFNKFYF

SEQ ID NO: 117092 - protein, 11 aa, Homo sapiens
  CDR3 for beta chain variable domain of TCR clone 58546 (TRBV4-1, TRBJ2-2)
CASSQASPPGL

SEQ ID NO: 117093 - protein, 17 aa, Homo sapiens
  CDR3 for alpha chain variable domain of TCR clone 58547 (TRAV16, TRAJ58)
CITVLSNGETSGSRLTF

SEQ ID NO: 117094 - protein, 14 aa, Homo sapiens
  CDR3 for beta chain variable domain of TCR clone 58547 (TRBV18, TRBJ2-5)
CASSPGVSQETQYF

SEQ ID NO: 117095 - protein, 16 aa, Homo sapiens
  CDR3 for alpha chain variable domain of TCR clone 58548 (TRAV38-1, TRAJ56)
CAFMKRQTGANSKLTF

SEQ ID NO: 117096 - protein, 15 aa, Homo sapiens
  CDR3 for beta chain variable domain of TCR clone 58548 (TRBV6-1, TRBJ1-3)
CASSEWGGSGNTIYF

SEQ ID NO: 117097 - protein, 14 aa, Homo sapiens
  CDR3 for alpha chain variable domain of TCR clone 58549 (TRAV35, TRAJ33)
CAGSSQDSNNQLIW

SEQ ID NO: 117098 - protein, 15 aa, Homo sapiens
  CDR3 for beta chain variable domain of TCR clone 58549 (TRBV20-1, TRBJ2-7)
CSAESGTSGAYEQYF

SEQ ID NO: 117099 - protein, 13 aa, Homo sapiens
  CDR3 for alpha chain variable domain of TCR clone 58550 (TRAV30, TRAJ24)
CGTVTDSWGKLQF

SEQ ID NO: 117100 - protein, 14 aa, Homo sapiens
  CDR3 for beta chain variable domain of TCR clone 58550 (TRBV6-3, TRBJ2-2)
CASTYTPYTGELFF

SEQ ID NO: 117101 - protein, 18 aa, Homo sapiens
  CDR3 for alpha chain variable domain of TCR clone 58551 (TRAV9-2, TRAJ52)
CALSRHNAGGTSYGKLTF

SEQ ID NO: 117102 - protein, 15 aa, Homo sapiens
  CDR3 for beta chain variable domain of TCR clone 58551 (TRBV9, TRBJ1-6)
CASSVAGTGDSPLHF

SEQ ID NO: 117103 - protein, 14 aa, Homo sapiens
  CDR3 for alpha chain variable domain of TCR clone 58552 (TRAV12-2, TRAJ13)
CAMKKTGGYQKVTF

SEQ ID NO: 117104 - protein, 15 aa, Homo sapiens
  CDR3 for beta chain variable domain of TCR clone 58552 (TRBV20-1, TRBJ2-1)
CSARGIGGTYNEQFF

SEQ ID NO: 117105 - protein, 14 aa, Homo sapiens
  CDR3 for alpha chain variable domain of TCR clone 58553 (TRAV12-3, TRAJ10)
SHLPLTGGGNKLTF

SEQ ID NO: 117106 - protein, 17 aa, Homo sapiens
  CDR3 for beta chain variable domain of TCR clone 58553 (TRBV28, TRBJ2-5)
CASSTPEGDALRETQYF

SEQ ID NO: 117107 - protein, 13 aa, Homo sapiens
  CDR3 for alpha chain variable domain of TCR clone 58554 (TRAV21, TRAJ57)
CAVTQGGSEKLVF

SEQ ID NO: 117108 - protein, 13 aa, Homo sapiens
  CDR3 for beta chain variable domain of TCR clone 58554 (TRBV4-2, TRBJ1-1)
CASSQAGNTEAFF

SEQ ID NO: 117109 - protein, 14 aa, Homo sapiens
  CDR3 for alpha chain variable domain of TCR clone 58555 (TRAV12-2, TRAJ11)
CAAEGGSGYSTLTF

SEQ ID NO: 117110 - protein, 16 aa, Homo sapiens
  CDR3 for beta chain variable domain of TCR clone 58555 (TRBV6-1, TRBJ1-2)
CASSGAWQGRSHGYTF

SEQ ID NO: 117111 - protein, 14 aa, Homo sapiens
  CDR3 for alpha chain variable domain of TCR clone 58556 (TRAV12-2, TRAJ13)
CAVKKTGSYQKVTF

SEQ ID NO: 117112 - protein, 13 aa, Homo sapiens
  CDR3 for beta chain variable domain of TCR clone 58556 (TRBV4-2, TRBJ1-1)
CASSQAGNTEAFF

SEQ ID NO: 117113 - protein, 14 aa, Homo sapiens
  CDR3 for alpha chain variable domain of TCR clone 58557 (TRAV17, TRAJ16)
CATADFSDGQKLLF

SEQ ID NO: 117114 - protein, 12 aa, Homo sapiens
  CDR3 for beta chain variable domain of TCR clone 58557 (TRBV24-1, TRBJ1-1)
CATLYPDTEASF

SEQ ID NO: 117115 - protein, 15 aa, Homo sapiens
  CDR3 for alpha chain variable domain of TCR clone 58558 (TRAV8-2, TRAJ16)
CVVSDGFSDGLKLLF

SEQ ID NO: 117116 - protein, 14 aa, Homo sapiens
  CDR3 for beta chain variable domain of TCR clone 58558 (TRBV7-3, TRBJ1-1)
CASSLGTGYTEAFF

SEQ ID NO: 117117 - protein, 14 aa, Homo sapiens
  CDR3 for alpha chain variable domain of TCR clone 58559 (TRAV26-1, TRAJ39)
CIVRGLRAGNMLTF

SEQ ID NO: 117118 - protein, 15 aa, Homo sapiens
  CDR3 for beta chain variable domain of TCR clone 58559 (TRBV7-9, TRBJ1-5)
CASSQGHQPNQPQHF

SEQ ID NO: 117119 - protein, 15 aa, Homo sapiens
  CDR3 for alpha chain variable domain of TCR clone 58560 (TRAV3, TRAJ32)
CAVSSYGGAINKLIF

SEQ ID NO: 117120 - protein, 13 aa, Homo sapiens
  CDR3 for beta chain variable domain of TCR clone 58560 (TRBV20-1, TRBJ2-7)
CSARPSTNYEQYF

SEQ ID NO: 117121 - protein, 15 aa, Homo sapiens
  CDR3 for alpha chain variable domain of TCR clone 58561 (TRAV12-1, TRAJ44)
CVADLPTATASKLTF

SEQ ID NO: 117122 - protein, 13 aa, Homo sapiens
  CDR3 for beta chain variable domain of TCR clone 58561 (TRBV6-5, TRBJ2-5)
CASSPQGGETQYF

SEQ ID NO: 117123 - protein, 17 aa, Homo sapiens
  CDR3 for alpha chain variable domain of TCR clone 58562 (TRAV3, TRAJ6)
CAVRDGPRAGGSYIPTF

SEQ ID NO: 117124 - protein, 16 aa, Homo sapiens
  CDR3 for beta chain variable domain of TCR clone 58562 (TRBV7-2, TRBJ2-7)
CASSLRLVSTSSTSGR

SEQ ID NO: 117125 - protein, 15 aa, Homo sapiens
  CDR3 for alpha chain variable domain of TCR clone 58563 (TRAV26-1, TRAJ23)
RIVRVLNNQGGKLIF

SEQ ID NO: 117126 - protein, 15 aa, Homo sapiens
  CDR3 for beta chain variable domain of TCR clone 58563 (TRBV7-3, TRBJ2-1)
CASSFGQSNYNEQFF

SEQ ID NO: 117127 - protein, 14 aa, Homo sapiens
  CDR3 for alpha chain variable domain of TCR clone 58564 (TRAV1-2, TRAJ15)
CAVRDRQAGTALIF

SEQ ID NO: 117128 - protein, 14 aa, Homo sapiens
  CDR3 for beta chain variable domain of TCR clone 58564 (TRBV7-2, TRBJ1-1)
CASSFLTGTTEAFF

SEQ ID NO: 117129 - protein, 12 aa, Homo sapiens
  CDR3 for alpha chain variable domain of TCR clone 58565 (TRAV4, TRAJ6)
CLAPGGSYIPTF

SEQ ID NO: 117130 - protein, 18 aa, Homo sapiens
  CDR3 for beta chain variable domain of TCR clone 58565 (TRBV20-1, TRBJ2-3)
CSASGLAGGPGTTDTQYF

SEQ ID NO: 117131 - protein, 14 aa, Homo sapiens
  CDR3 for alpha chain variable domain of TCR clone 58566 (TRAV12-2, TRAJ13)
CAVKRTGGYQKVTF

SEQ ID NO: 117132 - protein, 16 aa, Homo sapiens
  CDR3 for beta chain variable domain of TCR clone 58566 (TRBV12-5, TRBJ2-5)
CASGPRTSGNQETQYF

SEQ ID NO: 117133 - protein, 16 aa, Homo sapiens
  CDR3 for alpha chain variable domain of TCR clone 58567 (TRAV26-2, TRAJ52)
CIRGPAGGTSYGELTF

SEQ ID NO: 117134 - protein, 15 aa, Homo sapiens
  CDR3 for beta chain variable domain of TCR clone 58567 (TRBV20-1, TRBJ1-1)
CSASRGVTGNTEAFF

SEQ ID NO: 117135 - protein, 15 aa, Homo sapiens
  CDR3 for alpha chain variable domain of TCR clone 58568 (TRAV8-3, TRAJ27)
CAVGPSKTNAGKSTF

SEQ ID NO: 117136 - protein, 13 aa, Homo sapiens
  CDR3 for beta chain variable domain of TCR clone 58568 (TRBV7-2, TRBJ2-7)
CASSSPSGSEQYF

SEQ ID NO: 117137 - protein, 14 aa, Homo sapiens
  CDR3 for alpha chain variable domain of TCR clone 58569 (TRAV20, TRAJ56)
CAVQFGGANSKLTF

SEQ ID NO: 117138 - protein, 16 aa, Homo sapiens
  CDR3 for beta chain variable domain of TCR clone 58569 (TRBV19, TRBJ2-2)
CASRSPGTGATGELFF

SEQ ID NO: 117139 - protein, 12 aa, Homo sapiens
  CDR3 for alpha chain variable domain of TCR clone 58570 (TRAV13-2, TRAJ8)
CAPWLGFQKLVF

SEQ ID NO: 117140 - protein, 14 aa, Homo sapiens
  CDR3 for beta chain variable domain of TCR clone 58570 (TRBV11-2, TRBJ2-3)
CASSRLARTDTQYF

SEQ ID NO: 117141 - protein, 15 aa, Homo sapiens
  CDR3 for alpha chain variable domain of TCR clone 58571 (TRAV26-1, TRAJ47)
CIVRVGWGYGNKLVF

SEQ ID NO: 117142 - protein, 15 aa, Homo sapiens
  CDR3 for beta chain variable domain of TCR clone 58571 (TRBV5-1, TRBJ2-3)
CASSVTSGSTDTQYF

SEQ ID NO: 117143 - protein, 14 aa, Homo sapiens
  CDR3 for alpha chain variable domain of TCR clone 58572 (TRAV1-2, TRAJ16)
CAVNRFSDGQKLLF

SEQ ID NO: 117144 - protein, 11 aa, Homo sapiens
  CDR3 for beta chain variable domain of TCR clone 58572 (TRBV10-3, TRBJ2-7)
CAISEGLEQYF

SEQ ID NO: 117145 - protein, 10 aa, Homo sapiens
  CDR3 for alpha chain variable domain of TCR clone 58573 (TRAV1-2, TRAJ23)
CAGQGGKLIF

SEQ ID NO: 117146 - protein, 16 aa, Homo sapiens
  CDR3 for beta chain variable domain of TCR clone 58573 (TRBV11-2, TRBJ1-1)
CASSLRQGGEYSKAFF

SEQ ID NO: 117147 - protein, 16 aa, Homo sapiens
  CDR3 for alpha chain variable domain of TCR clone 58574 (TRAV2, TRAJ4)
CAAEDRFSGGYNKLIF

SEQ ID NO: 117148 - protein, 13 aa, Homo sapiens
  CDR3 for beta chain variable domain of TCR clone 58574 (TRBV7-7, TRBJ2-5)
CASSRSGQETQYF

SEQ ID NO: 117149 - protein, 13 aa, Homo sapiens
  CDR3 for alpha chain variable domain of TCR clone 58575 (TRAV12-3, TRAJ31)
CAMSANNNARLMF

SEQ ID NO: 117150 - protein, 16 aa, Homo sapiens
  CDR3 for beta chain variable domain of TCR clone 58575 (TRBV7-9, TRBJ1-2)
CASSLGFSSGEDGDTF

SEQ ID NO: 117151 - protein, 13 aa, Homo sapiens
  CDR3 for alpha chain variable domain of TCR clone 58576 (TRAV3, TRAJ26)
CAVSRGYGQNSVF

SEQ ID NO: 117152 - protein, 15 aa, Homo sapiens
  CDR3 for beta chain variable domain of TCR clone 58576 (TRBV27, TRBJ2-1)
CASSLARGAYNEQFF

SEQ ID NO: 117153 - protein, 14 aa, Homo sapiens
  CDR3 for alpha chain variable domain of TCR clone 58577 (TRAV1-2, TRAJ16)
CAVNRFSDGQKLLF

SEQ ID NO: 117154 - protein, 16 aa, Homo sapiens
  CDR3 for beta chain variable domain of TCR clone 58577 (TRBV3-1, TRBJ2-5)
CASSQDWASGQETQYF

SEQ ID NO: 117155 - protein, 11 aa, Homo sapiens
  CDR3 for alpha chain variable domain of TCR clone 58578 (TRAV35, TRAJ34)
CWARNTDKLIF

SEQ ID NO: 117156 - protein, 17 aa, Homo sapiens
  CDR3 for beta chain variable domain of TCR clone 58578 (TRBV7-3, TRBJ2-3)
RASSLMKRMRGADTQYF

SEQ ID NO: 117157 - protein, 17 aa, Homo sapiens
  CDR3 for alpha chain variable domain of TCR clone 58579 (TRAV26-1, TRAJ58)
RIVRVGAEETSGSRLTF

SEQ ID NO: 117158 - protein, 13 aa, Homo sapiens
  CDR3 for beta chain variable domain of TCR clone 58579 (TRBV12-5, TRBJ1-2)
CASGVRTGNGYTF

SEQ ID NO: 117159 - protein, 10 aa, Homo sapiens
  CDR3 for alpha chain variable domain of TCR clone 58580 (TRAV23/DV6, TRAJ57)
CAASSTLSQG

SEQ ID NO: 117160 - protein, 14 aa, Homo sapiens
  CDR3 for beta chain variable domain of TCR clone 58580 (TRBV25-1, TRBJ1-1)
CSSTHLGGNTEAFF

SEQ ID NO: 117161 - protein, 15 aa, Homo sapiens
  CDR3 for alpha chain variable domain of TCR clone 58581 (TRAV21, TRAJ24)
CAARSSTDSWGKLQF

SEQ ID NO: 117162 - protein, 15 aa, Homo sapiens
  CDR3 for beta chain variable domain of TCR clone 58581 (TRBV27, TRBJ2-1)
CASSNGGGSSNEQFF

SEQ ID NO: 117163 - protein, 13 aa, Homo sapiens
  CDR3 for alpha chain variable domain of TCR clone 58582 (TRAV3, TRAJ29)
CAVRDIIDTPLAF

SEQ ID NO: 117164 - protein, 14 aa, Homo sapiens
  CDR3 for beta chain variable domain of TCR clone 58582 (TRBV27, TRBJ2-1)
CASSATGGYNEQFF

SEQ ID NO: 117165 - protein, 12 aa, Homo sapiens
  CDR3 for alpha chain variable domain of TCR clone 58583 (TRAV13-1, TRAJ21)
CAAKEGFNKFYF

SEQ ID NO: 117166 - protein, 13 aa, Homo sapiens
  CDR3 for beta chain variable domain of TCR clone 58583 (TRBV4-1, TRBJ2-2)
CASSQENTGELFF

SEQ ID NO: 117167 - protein, 15 aa, Homo sapiens
  CDR3 for alpha chain variable domain of TCR clone 58584 (TRAV3, TRAJ22)
CAVRDRGGSARQLTF

SEQ ID NO: 117168 - protein, 16 aa, Homo sapiens
  CDR3 for beta chain variable domain of TCR clone 58584 (TRBV5-4, TRBJ2-3)
CVSQQPGAGGADTQYF

SEQ ID NO: 117169 - protein, 13 aa, Homo sapiens
  CDR3 for alpha chain variable domain of TCR clone 58585 (TRAV12-3, TRAJ33)
CAMSVNSNYQLIW

SEQ ID NO: 117170 - protein, 13 aa, Homo sapiens
  CDR3 for beta chain variable domain of TCR clone 58585 (TRBV7-2, TRBJ2-2)
CASSLAVTGELSF

SEQ ID NO: 117171 - protein, 12 aa, Homo sapiens
  CDR3 for alpha chain variable domain of TCR clone 58586 (TRAV21, TRAJ27)
CAANTNAGKSTF

SEQ ID NO: 117172 - protein, 15 aa, Homo sapiens
  CDR3 for beta chain variable domain of TCR clone 58586 (TRBV29-1, TRBJ1-4)
CSVVGIGDINEKLLF

SEQ ID NO: 117173 - protein, 14 aa, Homo sapiens
  CDR3 for alpha chain variable domain of TCR clone 58587 (TRAV12-3, TRAJ10)
SHLPLTGGGNKLTF

SEQ ID NO: 117174 - protein, 14 aa, Homo sapiens
  CDR3 for beta chain variable domain of TCR clone 58587 (TRBV7-2, TRBJ2-2)
CASSLNSNAGELFF

SEQ ID NO: 117175 - protein, 14 aa, Homo sapiens
  CDR3 for alpha chain variable domain of TCR clone 58588 (TRAV13-1, TRAJ28)
CAASKGAGSYQLTF

SEQ ID NO: 117176 - protein, 15 aa, Homo sapiens
  CDR3 for beta chain variable domain of TCR clone 58588 (TRBV4-2, TRBJ2-3)
CQQPRRGEGGVKQYF

SEQ ID NO: 117177 - protein, 13 aa, Homo sapiens
  CDR3 for alpha chain variable domain of TCR clone 58589 (TRAV12-1, TRAJ39)
CVVNYNAGNMLTF

SEQ ID NO: 117178 - protein, 15 aa, Homo sapiens
  CDR3 for beta chain variable domain of TCR clone 58589 (TRBV7-9, TRBJ1-6)
CASSSPGRGNSPLHF

SEQ ID NO: 117179 - protein, 13 aa, Homo sapiens
  CDR3 for alpha chain variable domain of TCR clone 58590 (TRAV27, TRAJ45)
CRSSGGGADGLTF

SEQ ID NO: 117180 - protein, 18 aa, Homo sapiens
  CDR3 for beta chain variable domain of TCR clone 58590 (TRBV7-9, TRBJ2-7)
CASSLTTSGSRTWYEQYF

SEQ ID NO: 117181 - protein, 15 aa, Homo sapiens
  CDR3 for alpha chain variable domain of TCR clone 58591 (TRAV26-1, TRAJ29)
CNVRVEGSGNTPLVF

SEQ ID NO: 117182 - protein, 15 aa, Homo sapiens
  CDR3 for beta chain variable domain of TCR clone 58591 (TRBV7-9, TRBJ1-5)
CASSQGHQPNQPQHF

SEQ ID NO: 117183 - protein, 14 aa, Homo sapiens
  CDR3 for alpha chain variable domain of TCR clone 58592 (TRAV1-2, TRAJ8)
CAVREDTGFQKLVF

SEQ ID NO: 117184 - protein, 16 aa, Homo sapiens
  CDR3 for beta chain variable domain of TCR clone 58592 (TRBV7-9, TRBJ2-1)
CASSPRASSSYNEQFF

SEQ ID NO: 117185 - protein, 12 aa, Homo sapiens
  CDR3 for alpha chain variable domain of TCR clone 58593 (TRAV12-3, TRAJ17)
CAMTLTGSKLTS

SEQ ID NO: 117186 - protein, 15 aa, Homo sapiens
  CDR3 for beta chain variable domain of TCR clone 58593 (TRBV20-1, TRBJ2-7)
CSARDRVSGMDERYF

SEQ ID NO: 117187 - protein, 12 aa, Homo sapiens
  CDR3 for alpha chain variable domain of TCR clone 58594 (TRAV17, TRAJ20)
CATYSNDYKLIF

SEQ ID NO: 117188 - protein, 11 aa, Homo sapiens
  CDR3 for beta chain variable domain of TCR clone 58594 (TRBV4-1, TRBJ2-2)
CASEHTGELFF

SEQ ID NO: 117189 - protein, 14 aa, Homo sapiens
  CDR3 for alpha chain variable domain of TCR clone 58595 (TRAV12-2, TRAJ44)
CAVNKDGTASKLTF

SEQ ID NO: 117190 - protein, 12 aa, Homo sapiens
  CDR3 for beta chain variable domain of TCR clone 58595 (TRBV19, TRBJ1-4)
CASKDWPGGLFF

SEQ ID NO: 117191 - protein, 13 aa, Homo sapiens
  CDR3 for alpha chain variable domain of TCR clone 58596 (TRAV12-2, TRAJ6)
CAVNVSRKLHTYI

SEQ ID NO: 117192 - protein, 14 aa, Homo sapiens
  CDR3 for beta chain variable domain of TCR clone 58596 (TRBV19, TRBJ2-1)
CASPTFVLSGEQFF

SEQ ID NO: 117193 - protein, 14 aa, Homo sapiens
  CDR3 for alpha chain variable domain of TCR clone 58597 (TRAV26-1, TRAJ49)
CIVRPSNTGNQSYF

SEQ ID NO: 117194 - protein, 15 aa, Homo sapiens
  CDR3 for beta chain variable domain of TCR clone 58597 (TRBV19, TRBJ1-1)
CASMGFRDVNTEAFF

SEQ ID NO: 117195 - protein, 12 aa, Homo sapiens
  CDR3 for alpha chain variable domain of TCR clone 58598 (TRAV8-3, TRAJ41)
CAVGALGCALNF

SEQ ID NO: 117196 - protein, 16 aa, Homo sapiens
  CDR3 for beta chain variable domain of TCR clone 58598 (TRBV7-6, TRBJ2-3)
CASSDSRGEGTDTQYF

SEQ ID NO: 117197 - protein, 11 aa, Homo sapiens
  CDR3 for alpha chain variable domain of TCR clone 58599 (TRAV8-1, TRAJ8)
CAMTGFQKLVF

SEQ ID NO: 117198 - protein, 14 aa, Homo sapiens
  CDR3 for beta chain variable domain of TCR clone 58599 (TRBV5-4, TRBJ1-2)
RASTRQTDNYGYTF

SEQ ID NO: 117199 - protein, 13 aa, Homo sapiens
  CDR3 for alpha chain variable domain of TCR clone 58600 (TRAV21, TRAJ27)
CAARPGNAGKSTF

SEQ ID NO: 117200 - protein, 15 aa, Homo sapiens
  CDR3 for beta chain variable domain of TCR clone 58600 (TRBV5-1, TRBJ2-3)
CASSVTSGSTDTQYF

SEQ ID NO: 117201 - protein, 11 aa, Homo sapiens
  CDR3 for alpha chain variable domain of TCR clone 58601 (TRAV17, TRAJ9)
CATTGGFKTIF

SEQ ID NO: 117202 - protein, 14 aa, Homo sapiens
  CDR3 for beta chain variable domain of TCR clone 58601 (TRBV7-9, TRBJ2-2)
CASSGLAVTGELFF

SEQ ID NO: 117203 - protein, 13 aa, Homo sapiens
  CDR3 for alpha chain variable domain of TCR clone 58602 (TRAV12-1, TRAJ39)
CAALNNAGNMLTF

SEQ ID NO: 117204 - protein, 17 aa, Homo sapiens
  CDR3 for beta chain variable domain of TCR clone 58602 (TRBV6-1, TRBJ2-3)
CASSEFVTGGPTDTQYF

SEQ ID NO: 117205 - protein, 18 aa, Homo sapiens
  CDR3 for alpha chain variable domain of TCR clone 58603 (TRAV26-2, TRAJ33)
CCVLLHPEEPASNYQLIW

SEQ ID NO: 117206 - protein, 13 aa, Homo sapiens
  CDR3 for beta chain variable domain of TCR clone 58603 (TRBV24-1, TRBJ2-2)
CATSDWSTGEPFF

SEQ ID NO: 117207 - protein, 12 aa, Homo sapiens
  CDR3 for alpha chain variable domain of TCR clone 58604 (TRAV21, TRAJ49)
CAVTNTGNQSYF

SEQ ID NO: 117208 - protein, 16 aa, Homo sapiens
  CDR3 for beta chain variable domain of TCR clone 58604 (TRBV19, TRBJ2-1)
CASSKAGPSSYNEQFF

SEQ ID NO: 117209 - protein, 14 aa, Homo sapiens
  CDR3 for alpha chain variable domain of TCR clone 58605 (TRAV17, TRAJ57)
CAADPQGGSEKLVF

SEQ ID NO: 117210 - protein, 13 aa, Homo sapiens
  CDR3 for beta chain variable domain of TCR clone 58605 (TRBV19, TRBJ2-7)
CASSPRQSYEQYF

SEQ ID NO: 117211 - protein, 11 aa, Homo sapiens
  CDR3 for alpha chain variable domain of TCR clone 58606 (TRAV1-2, TRAJ20)
CAVANDYKLSF

SEQ ID NO: 117212 - protein, 14 aa, Homo sapiens
  CDR3 for beta chain variable domain of TCR clone 58606 (TRBV20-1, TRBJ1-1)
CSAQTRIGGTEAFF

SEQ ID NO: 117213 - protein, 14 aa, Homo sapiens
  CDR3 for alpha chain variable domain of TCR clone 58607 (TRAV13-1, TRAJ44)
CAAKATGTASKLTF

SEQ ID NO: 117214 - protein, 17 aa, Homo sapiens
  CDR3 for beta chain variable domain of TCR clone 58607 (TRBV7-3, TRBJ2-3)
CASSLMKRMREADTQYF

SEQ ID NO: 117215 - protein, 11 aa, Homo sapiens
  CDR3 for alpha chain variable domain of TCR clone 58608 (TRAV23/DV6, TRAJ23)
AIGNQGGKLIF

SEQ ID NO: 117216 - protein, 12 aa, Homo sapiens
  CDR3 for beta chain variable domain of TCR clone 58608 (TRBV11-2, TRBJ2-5)
CASSLGQETQYF

SEQ ID NO: 117217 - protein, 19 aa, Homo sapiens
  CDR3 for alpha chain variable domain of TCR clone 58609 (TRAV38-1, TRAJ53)
CAFMKHGLESRGSNYKLTF

SEQ ID NO: 117218 - protein, 13 aa, Homo sapiens
  CDR3 for beta chain variable domain of TCR clone 58609 (TRBV19, TRBJ2-7)
CASSPRQSYEQYF

SEQ ID NO: 117219 - protein, 11 aa, Homo sapiens
  CDR3 for alpha chain variable domain of TCR clone 58610 (TRAV17, TRAJ9)
CGFTGGFKTIF

SEQ ID NO: 117220 - protein, 13 aa, Homo sapiens
  CDR3 for beta chain variable domain of TCR clone 58610 (TRBV20-1, TRBJ1-1)
CSAPLGGGTEAFF

SEQ ID NO: 117221 - protein, 11 aa, Homo sapiens
  CDR3 for alpha chain variable domain of TCR clone 58611 (TRAV1-2, TRAJ31)
CAVNNNARLMF

SEQ ID NO: 117222 - protein, 15 aa, Homo sapiens
  CDR3 for beta chain variable domain of TCR clone 58611 (TRBV28, TRBJ2-1)
CAISIIAGGRSEQFF

SEQ ID NO: 117223 - protein, 12 aa, Homo sapiens
  CDR3 for alpha chain variable domain of TCR clone 58612 (TRAV16, TRAJ10)
CSRTGGGNKLTF

SEQ ID NO: 117224 - protein, 16 aa, Homo sapiens
  CDR3 for beta chain variable domain of TCR clone 58612 (TRBV19, TRBJ2-1)
CASSKAGPSSYNEQFF

SEQ ID NO: 117225 - protein, 17 aa, Homo sapiens
  CDR3 for alpha chain variable domain of TCR clone 58613 (TRAV26-2, TRAJ28)
CIVRALYSGAGSYQLTF

SEQ ID NO: 117226 - protein, 12 aa, Homo sapiens
  CDR3 for beta chain variable domain of TCR clone 58613 (TRBV12-4, TRBJ2-1)
CASRQTENEQFF

SEQ ID NO: 117227 - protein, 16 aa, Homo sapiens
  CDR3 for alpha chain variable domain of TCR clone 58614 (TRAV3, TRAJ10)
CAVRDMRAGGGNKITF

SEQ ID NO: 117228 - protein, 19 aa, Homo sapiens
  CDR3 for beta chain variable domain of TCR clone 58614 (TRBV6-3, TRBJ1-2)
CASSYSKGRTGPPNYGYTF

SEQ ID NO: 117229 - protein, 13 aa, Homo sapiens
  CDR3 for alpha chain variable domain of TCR clone 58615 (TRAV2, TRAJ40)
CAVVTSGTYKYIF

SEQ ID NO: 117230 - protein, 14 aa, Homo sapiens
  CDR3 for beta chain variable domain of TCR clone 58615 (TRBV27, TRBJ1-5)
CASSSQGSNQPQHF

SEQ ID NO: 117231 - protein, 12 aa, Homo sapiens
  CDR3 for alpha chain variable domain of TCR clone 58616 (TRAV12-1, TRAJ40)
CVVPSGTYKYIF

SEQ ID NO: 117232 - protein, 15 aa, Homo sapiens
  CDR3 for beta chain variable domain of TCR clone 58616 (TRBV12-4, TRBJ2-1)
CASSPLSGRNNEQLF

SEQ ID NO: 117233 - protein, 18 aa, Homo sapiens
  CDR3 for alpha chain variable domain of TCR clone 58617 (TRAV21, TRAJ52)
CAVRPSPAGGTSYGKLTF

SEQ ID NO: 117234 - protein, 14 aa, Homo sapiens
  CDR3 for beta chain variable domain of TCR clone 58617 (TRBV18, TRBJ2-5)
CASSPGVSQETQYF

SEQ ID NO: 117235 - protein, 14 aa, Homo sapiens
  CDR3 for alpha chain variable domain of TCR clone 58618 (TRAV17, TRAJ57)
CATDPQGGAEKLVF

SEQ ID NO: 117236 - protein, 18 aa, Homo sapiens
  CDR3 for beta chain variable domain of TCR clone 58618 (TRBV6-6, TRBJ1-3)
CASSYSKWDSISGNTIYF

SEQ ID NO: 117237 - protein, 14 aa, Homo sapiens
  CDR3 for alpha chain variable domain of TCR clone 58619 (TRAV12-1, TRAJ12)
CVVIAMDSSYKLIF

SEQ ID NO: 117238 - protein, 15 aa, Homo sapiens
  CDR3 for beta chain variable domain of TCR clone 58619 (TRBV7-9, TRBJ1-6)
CASSSPGRGNSPLHF

SEQ ID NO: 117239 - protein, 16 aa, Homo sapiens
  CDR3 for alpha chain variable domain of TCR clone 58620 (TRAV3, TRAJ28)
CAVIPRSGAGSYQLTF

SEQ ID NO: 117240 - protein, 13 aa, Homo sapiens
  CDR3 for beta chain variable domain of TCR clone 58620 (TRBV12-4, TRBJ2-5)
CASRLAVQETQYF

SEQ ID NO: 117241 - protein, 16 aa, Homo sapiens
  CDR3 for alpha chain variable domain of TCR clone 58621 (TRAV16, TRAJ26)
CALSGSEFCLWSRNQI

SEQ ID NO: 117242 - protein, 12 aa, Homo sapiens
  CDR3 for beta chain variable domain of TCR clone 58621 (TRBV11-2, TRBJ2-1)
CASSPGNNEQFF

SEQ ID NO: 117243 - protein, 14 aa, Homo sapiens
  CDR3 for alpha chain variable domain of TCR clone 58622 (TRAV1-2, TRAJ8)
CAVREDTGFQKLAF

SEQ ID NO: 117244 - protein, 16 aa, Homo sapiens
  CDR3 for beta chain variable domain of TCR clone 58622 (TRBV7-6, TRBJ2-7)
CASSGGTGALSYEQYF

SEQ ID NO: 117245 - protein, 15 aa, Homo sapiens
  CDR3 for alpha chain variable domain of TCR clone 58623 (TRAV12-2, TRAJ31)
CAVPVRFGDGTQLVV

SEQ ID NO: 117246 - protein, 17 aa, Homo sapiens
  CDR3 for beta chain variable domain of TCR clone 58623 (TRBV7-8, TRBJ2-6)
CASSAGTGGAGANVLTF

SEQ ID NO: 117247 - protein, 14 aa, Homo sapiens
  CDR3 for alpha chain variable domain of TCR clone 58624 (TRAV17, TRAJ57)
RATDPQGGSEKLVF

SEQ ID NO: 117248 - protein, 18 aa, Homo sapiens
  CDR3 for beta chain variable domain of TCR clone 58624 (TRBV6-6, TRBJ1-3)
CASSYSKWDSISGNTIYF

SEQ ID NO: 117249 - protein, 15 aa, Homo sapiens
  CDR3 for alpha chain variable domain of TCR clone 58625 (TRAV8-6, TRAJ38)
CAVSSNAGNNRKLIW

SEQ ID NO: 117250 - protein, 13 aa, Homo sapiens
  CDR3 for beta chain variable domain of TCR clone 58625 (TRBV29-1, TRBJ2-2)
CSTTGVNTGELFF

SEQ ID NO: 117251 - protein, 15 aa, Homo sapiens
  CDR3 for alpha chain variable domain of TCR clone 58626 (TRAV29/DV5, TRAJ24)
CAASGATDSWWKFQF

SEQ ID NO: 117252 - protein, 12 aa, Homo sapiens
  CDR3 for beta chain variable domain of TCR clone 58626 (TRBV11-2, TRBJ2-2)
CASSLPTGELFF

SEQ ID NO: 117253 - protein, 14 aa, Homo sapiens
  CDR3 for alpha chain variable domain of TCR clone 58627 (TRAV13-1, TRAJ9)
CAASALTGGFKAIF

SEQ ID NO: 117254 - protein, 16 aa, Homo sapiens
  CDR3 for beta chain variable domain of TCR clone 58627 (TRBV12-4, TRBJ2-3)
CASSFGTGGISDTQYF

SEQ ID NO: 117255 - protein, 18 aa, Homo sapiens
  CDR3 for alpha chain variable domain of TCR clone 58628 (TRAV26-2, TRAJ54)
CILRDVEVGIQGDQKLVF

SEQ ID NO: 117256 - protein, 16 aa, Homo sapiens
  CDR3 for beta chain variable domain of TCR clone 58628 (TRBV6-1, TRBJ2-5)
CASSETLDRGAETQYF

SEQ ID NO: 117257 - protein, 15 aa, Homo sapiens
  CDR3 for alpha chain variable domain of TCR clone 58629 (TRAV12-3, TRAJ27)
CAMRAYNTNAGKSTF

SEQ ID NO: 117258 - protein, 16 aa, Homo sapiens
  CDR3 for beta chain variable domain of TCR clone 58629 (TRBV7-3, TRBJ2-2)
CASSLKRGTLSGELFF

SEQ ID NO: 117259 - protein, 12 aa, Homo sapiens
  CDR3 for alpha chain variable domain of TCR clone 58630 (TRAV12-3, TRAJ17)
CAMTLTGNKLTF

SEQ ID NO: 117260 - protein, 13 aa, Homo sapiens
  CDR3 for beta chain variable domain of TCR clone 58630 (TRBV4-1, TRBJ1-1)
CASSRKMNTEAFF

SEQ ID NO: 117261 - protein, 15 aa, Homo sapiens
  CDR3 for alpha chain variable domain of TCR clone 58631 (TRAV12-2, TRAJ43)
CAFDMRFGAGTRLTV

SEQ ID NO: 117262 - protein, 13 aa, Homo sapiens
  CDR3 for beta chain variable domain of TCR clone 58631 (TRBV7-2, TRBJ2-2)
CASSLAVTGELFF

SEQ ID NO: 117263 - protein, 13 aa, Homo sapiens
  CDR3 for alpha chain variable domain of TCR clone 58632 (TRAV1-1, TRAJ9)
CAAKNTGGFKTIF

SEQ ID NO: 117264 - protein, 13 aa, Homo sapiens
  CDR3 for beta chain variable domain of TCR clone 58632 (TRBV19, TRBJ1-1)
CASSPSNGGEAFF

SEQ ID NO: 117265 - protein, 13 aa, Homo sapiens
  CDR3 for alpha chain variable domain of TCR clone 58633 (TRAV27, TRAJ17)
CAGAAAAGNKLTF

SEQ ID NO: 117266 - protein, 15 aa, Homo sapiens
  CDR3 for beta chain variable domain of TCR clone 58633 (TRBV5-1, TRBJ2-3)
CASRNQAGSTDTQYF

SEQ ID NO: 117267 - protein, 12 aa, Homo sapiens
  CDR3 for alpha chain variable domain of TCR clone 58634 (TRAV2, TRAJ9)
CALGAGGFKTIF

SEQ ID NO: 117268 - protein, 16 aa, Homo sapiens
  CDR3 for beta chain variable domain of TCR clone 58634 (TRBV13, TRBJ2-2)
CASSPRTGEHTGELFF

SEQ ID NO: 117269 - protein, 11 aa, Homo sapiens
  CDR3 for alpha chain variable domain of TCR clone 58635 (TRAV3, TRAJ21)
CAVGNFNKFYF

SEQ ID NO: 117270 - protein, 14 aa, Homo sapiens
  CDR3 for beta chain variable domain of TCR clone 58635 (TRBV7-2, TRBJ2-7)
CASSLYPGRYEQYF

SEQ ID NO: 117271 - protein, 12 aa, Homo sapiens
  CDR3 for alpha chain variable domain of TCR clone 58636 (TRAV3, TRAJ9)
CAVGAGGFKTIF

SEQ ID NO: 117272 - protein, 16 aa, Homo sapiens
  CDR3 for beta chain variable domain of TCR clone 58636 (TRBV13, TRBJ2-2)
CASSPRTGEHTGELFF

SEQ ID NO: 117273 - protein, 15 aa, Homo sapiens
  CDR3 for alpha chain variable domain of TCR clone 58637 (TRAV2, TRAJ22)
CAVPSRGGSARQLTF

SEQ ID NO: 117274 - protein, 14 aa, Homo sapiens
  CDR3 for beta chain variable domain of TCR clone 58637 (TRBV18, TRBJ2-7)
CASSPRGGAYEQYF

SEQ ID NO: 117275 - protein, 14 aa, Homo sapiens
  CDR3 for alpha chain variable domain of TCR clone 58638 (TRAV26-2, TRAJ32)
CCVGYGGAINKLIF

SEQ ID NO: 117276 - protein, 13 aa, Homo sapiens
  CDR3 for beta chain variable domain of TCR clone 58638 (TRBV12-5, TRBJ2-3)
CASGDRQSDTQYF

SEQ ID NO: 117277 - protein, 15 aa, Homo sapiens
  CDR3 for alpha chain variable domain of TCR clone 58639 (TRAV29/DV5, TRAJ42)
CAAKTDGGSQGNLIF

SEQ ID NO: 117278 - protein, 15 aa, Homo sapiens
  CDR3 for beta chain variable domain of TCR clone 58639 (TRBV5-1, TRBJ2-2)
CASSSQGRNTGELFF

SEQ ID NO: 117279 - protein, 14 aa, Homo sapiens
  CDR3 for alpha chain variable domain of TCR clone 58640 (TRAV9-2, TRAJ49)
CATDARDTGNQFYF

SEQ ID NO: 117280 - protein, 14 aa, Homo sapiens
  CDR3 for beta chain variable domain of TCR clone 58640 (TRBV5-5, TRBJ1-2)
CASSFGQINYGYTF

SEQ ID NO: 117281 - protein, 16 aa, Homo sapiens
  CDR3 for alpha chain variable domain of TCR clone 58641 (TRAV29/DV5, TRAJ53)
CAAPGYGGGSNYKLTF

SEQ ID NO: 117282 - protein, 14 aa, Homo sapiens
  CDR3 for beta chain variable domain of TCR clone 58641 (TRBV5-1, TRBJ1-2)
CASSPMTENYGYTF

SEQ ID NO: 117283 - protein, 15 aa, Homo sapiens
  CDR3 for alpha chain variable domain of TCR clone 58642 (TRAV12-2, TRAJ53)
CAVNGGGCSNYKLTF

SEQ ID NO: 117284 - protein, 13 aa, Homo sapiens
  CDR3 for beta chain variable domain of TCR clone 58642 (TRBV3-1, TRBJ1-1)
CASSPGVITEAFF

SEQ ID NO: 117285 - protein, 15 aa, Homo sapiens
  CDR3 for alpha chain variable domain of TCR clone 58643 (TRAV8-2, TRAJ40)
CVVSDRGSGTYKYIF

SEQ ID NO: 117286 - protein, 14 aa, Homo sapiens
  CDR3 for beta chain variable domain of TCR clone 58643 (TRBV7-2, TRBJ2-7)
CASSPKTSFYEQYF

SEQ ID NO: 117287 - protein, 14 aa, Homo sapiens
  CDR3 for alpha chain variable domain of TCR clone 58644 (TRAV26-1, TRAJ48)
CIVRVGFGDEKLTF

SEQ ID NO: 117288 - protein, 13 aa, Homo sapiens
  CDR3 for beta chain variable domain of TCR clone 58644 (TRBV11-3, TRBJ2-3)
CASSHDTKDTQYF

SEQ ID NO: 117289 - protein, 18 aa, Homo sapiens
  CDR3 for alpha chain variable domain of TCR clone 58645 (TRAV21, TRAJ52)
CAVRPSPAGGTSYVKLTF

SEQ ID NO: 117290 - protein, 13 aa, Homo sapiens
  CDR3 for beta chain variable domain of TCR clone 58645 (TRBV7-3, TRBJ1-1)
CASSQDWGAEAFF

SEQ ID NO: 117291 - protein, 13 aa, Homo sapiens
  CDR3 for alpha chain variable domain of TCR clone 58646 (TRAV21, TRAJ20)
CAVGLRVDYKPSF

SEQ ID NO: 117292 - protein, 14 aa, Homo sapiens
  CDR3 for beta chain variable domain of TCR clone 58646 (TRBV7-9, TRBJ2-5)
CASSLDTAQETQYF

SEQ ID NO: 117293 - protein, 12 aa, Homo sapiens
  CDR3 for alpha chain variable domain of TCR clone 58647 (TRAV2, TRAJ9)
CAVGAGGFKTIF

SEQ ID NO: 117294 - protein, 16 aa, Homo sapiens
  CDR3 for beta chain variable domain of TCR clone 58647 (TRBV13, TRBJ2-2)
CASSSRTGEHTGELFF

SEQ ID NO: 117295 - protein, 13 aa, Homo sapiens
  CDR3 for alpha chain variable domain of TCR clone 58648 (TRAV35, TRAJ42)
CSGFPGSQGNLIF

SEQ ID NO: 117296 - protein, 14 aa, Homo sapiens
  CDR3 for beta chain variable domain of TCR clone 58648 (TRBV4-1, TRBJ2-2)
CASSQAVNTGELFF

SEQ ID NO: 117297 - protein, 10 aa, Homo sapiens
  CDR3 for alpha chain variable domain of TCR clone 58649 (TRAV12-3, TRAJ49)
CAMNDDQFYF

SEQ ID NO: 117298 - protein, 13 aa, Homo sapiens
  CDR3 for beta chain variable domain of TCR clone 58649 (TRBV12-4, TRBJ1-1)
CASSAGTGFEAFF

SEQ ID NO: 117299 - protein, 15 aa, Homo sapiens
  CDR3 for alpha chain variable domain of TCR clone 58650 (TRAV34, TRAJ38)
CRADFTPGNNRKLIW

SEQ ID NO: 117300 - protein, 16 aa, Homo sapiens
  CDR3 for beta chain variable domain of TCR clone 58650 (TRBV12-5, TRBJ2-5)
CASGPRTSGNQETQYF

SEQ ID NO: 117301 - protein, 14 aa, Homo sapiens
  CDR3 for alpha chain variable domain of TCR clone 58651 (TRAV1-2, TRAJ16)
CAVNRFSYGQKLLF

SEQ ID NO: 117302 - protein, 14 aa, Homo sapiens
  CDR3 for beta chain variable domain of TCR clone 58651 (TRBV18, TRBJ2-7)
CASSPRGGAYEQYF

SEQ ID NO: 117303 - protein, 18 aa, Homo sapiens
  CDR3 for alpha chain variable domain of TCR clone 58652 (TRAV21, TRAJ52)
CAVRPSPAGGTSYGKLTF

SEQ ID NO: 117304 - protein, 14 aa, Homo sapiens
  CDR3 for beta chain variable domain of TCR clone 58652 (TRBV5-7, TRBJ2-3)
CASSYFGQVHTQYF

SEQ ID NO: 117305 - protein, 11 aa, Homo sapiens
  CDR3 for alpha chain variable domain of TCR clone 58653 (TRAV21, TRAJ39)
PLVNAGNMLTF

SEQ ID NO: 117306 - protein, 17 aa, Homo sapiens
  CDR3 for beta chain variable domain of TCR clone 58653 (TRBV7-8, TRBJ2-6)
CASSAGTGGAGANVLTF

SEQ ID NO: 117307 - protein, 16 aa, Homo sapiens
  CDR3 for alpha chain variable domain of TCR clone 58654 (TRAV8-2, TRAJ13)
CVVSDRSSGGYQKFTF

SEQ ID NO: 117308 - protein, 14 aa, Homo sapiens
  CDR3 for beta chain variable domain of TCR clone 58654 (TRBV7-3, TRBJ2-7)
CASTILSRGDEQYF

SEQ ID NO: 117309 - protein, 11 aa, Homo sapiens
  CDR3 for alpha chain variable domain of TCR clone 58655 (TRAV2, TRAJ33)
RAVDSNYQLIW

SEQ ID NO: 117310 - protein, 14 aa, Homo sapiens
  CDR3 for beta chain variable domain of TCR clone 58655 (TRBV11-2, TRBJ2-3)
CASSRLARTDTQYF

SEQ ID NO: 117311 - protein, 11 aa, Homo sapiens
  CDR3 for alpha chain variable domain of TCR clone 58656 (TRAV21, TRAJ11)
CAVNGYSTLTF

SEQ ID NO: 117312 - protein, 11 aa, Homo sapiens
  CDR3 for beta chain variable domain of TCR clone 58656 (TRBV19, TRBJ1-1)
CDSSIGSEAFF

SEQ ID NO: 117313 - protein, 14 aa, Homo sapiens
  CDR3 for alpha chain variable domain of TCR clone 58657 (TRAV12-2, TRAJ13)
CAVKKTGGYQKVTF

SEQ ID NO: 117314 - protein, 15 aa, Homo sapiens
  CDR3 for beta chain variable domain of TCR clone 58657 (TRBV11-2, TRBJ2-1)
CASSPAGQSLNEQFF

SEQ ID NO: 117315 - protein, 14 aa, Homo sapiens
  CDR3 for alpha chain variable domain of TCR clone 58658 (TRAV12-2, TRAJ13)
CAVKKTGGYQKVTF

SEQ ID NO: 117316 - protein, 15 aa, Homo sapiens
  CDR3 for beta chain variable domain of TCR clone 58658 (TRBV6-5, TRBJ2-1)
CASSNGGGSSNEQFF

SEQ ID NO: 117317 - protein, 12 aa, Homo sapiens
  CDR3 for alpha chain variable domain of TCR clone 58659 (TRAV12-3, TRAJ3)
CAIDSSASEIIF

SEQ ID NO: 117318 - protein, 14 aa, Homo sapiens
  CDR3 for beta chain variable domain of TCR clone 58659 (TRBV15, TRBJ2-4)
CATEGGQGANIQYF

SEQ ID NO: 117319 - protein, 19 aa, Homo sapiens
  CDR3 for alpha chain variable domain of TCR clone 58660 (TRAV8-4, TRAJ3)
CAVTGENLVQQCFPDNLWI

SEQ ID NO: 117320 - protein, 16 aa, Homo sapiens
  CDR3 for beta chain variable domain of TCR clone 58660 (TRBV4-2, TRBJ1-1)
CASSQAGFGMNTEAFF

SEQ ID NO: 117321 - protein, 12 aa, Homo sapiens
  CDR3 for alpha chain variable domain of TCR clone 58661 (TRAV12-3, TRAJ17)
CAMTLTGNKLTF

SEQ ID NO: 117322 - protein, 14 aa, Homo sapiens
  CDR3 for beta chain variable domain of TCR clone 58661 (TRBV4-2, TRBJ1-5)
CASSRDRGNQPQHF

SEQ ID NO: 117323 - protein, 13 aa, Homo sapiens
  CDR3 for alpha chain variable domain of TCR clone 58662 (TRAV13-2, TRAJ13)
CAERPGGYQKVTF

SEQ ID NO: 117324 - protein, 17 aa, Homo sapiens
  CDR3 for beta chain variable domain of TCR clone 58662 (TRBV28, TRBJ2-1)
CASSSARQALTYNEQFF

SEQ ID NO: 117325 - protein, 13 aa, Homo sapiens
  CDR3 for alpha chain variable domain of TCR clone 58663 (TRAV17, TRAJ5)
CALRGTGRRALTF

SEQ ID NO: 117326 - protein, 13 aa, Homo sapiens
  CDR3 for beta chain variable domain of TCR clone 58663 (TRBV4-2, TRBJ1-1)
CASSQAGNTEALF

SEQ ID NO: 117327 - protein, 14 aa, Homo sapiens
  CDR3 for alpha chain variable domain of TCR clone 58664 (TRAV23/DV6, TRAJ4)
CAAPSSGGYNKLIF

SEQ ID NO: 117328 - protein, 16 aa, Homo sapiens
  CDR3 for beta chain variable domain of TCR clone 58664 (TRBV19, TRBJ1-1)
CASGFGGPVTGTEAFF

SEQ ID NO: 117329 - protein, 12 aa, Homo sapiens
  CDR3 for alpha chain variable domain of TCR clone 58665 (TRAV22, TRAJ22)
CAPGGSARQLTF

SEQ ID NO: 117330 - protein, 13 aa, Homo sapiens
  CDR3 for beta chain variable domain of TCR clone 58665 (TRBV15, TRBJ1-6)
CATSGGLNSPLLF

SEQ ID NO: 117331 - protein, 15 aa, Homo sapiens
  CDR3 for alpha chain variable domain of TCR clone 58666 (TRAV8-3, TRAJ45)
CASSYSGGGADGLTF

SEQ ID NO: 117332 - protein, 16 aa, Homo sapiens
  CDR3 for beta chain variable domain of TCR clone 58666 (TRBV7-9, TRBJ2-2)
CASSGFGGANTGELLF

SEQ ID NO: 117333 - protein, 13 aa, Homo sapiens
  CDR3 for alpha chain variable domain of TCR clone 58667 (TRAV1-1, TRAJ23)
CAVVANQGGKLIF

SEQ ID NO: 117334 - protein, 16 aa, Homo sapiens
  CDR3 for beta chain variable domain of TCR clone 58667 (TRBV5-5, TRBJ1-2)
CASSPTWGRGLYGDTF

SEQ ID NO: 117335 - protein, 11 aa, Homo sapiens
  CDR3 for alpha chain variable domain of TCR clone 58668 (TRAV20, TRAJ23)
CACNQGGKLIF

SEQ ID NO: 117336 - protein, 17 aa, Homo sapiens
  CDR3 for beta chain variable domain of TCR clone 58668 (TRBV15, TRBJ1-2)
CATSGREIDVVNYGYTF

SEQ ID NO: 117337 - protein, 14 aa, Homo sapiens
  CDR3 for alpha chain variable domain of TCR clone 58669 (TRAV12-3, TRAJ10)
SHLPLTGGGNKLTF

SEQ ID NO: 117338 - protein, 14 aa, Homo sapiens
  CDR3 for beta chain variable domain of TCR clone 58669 (TRBV7-2, TRBJ2-7)
CASSLYPGRYEQYF

SEQ ID NO: 117339 - protein, 14 aa, Homo sapiens
  CDR3 for alpha chain variable domain of TCR clone 58670 (TRAV38-1, TRAJ45)
CASHSGGGADGLTF

SEQ ID NO: 117340 - protein, 15 aa, Homo sapiens
  CDR3 for beta chain variable domain of TCR clone 58670 (TRBV19, TRBJ1-6)
CASSTQGAVGSPLHF

SEQ ID NO: 117341 - protein, 13 aa, Homo sapiens
  CDR3 for alpha chain variable domain of TCR clone 58671 (TRAV2, TRAJ40)
CAVVTSGTYKYIF

SEQ ID NO: 117342 - protein, 14 aa, Homo sapiens
  CDR3 for beta chain variable domain of TCR clone 58671 (TRBV6-6, TRBJ2-7)
CASSDSGAGYEQYF

SEQ ID NO: 117343 - protein, 14 aa, Homo sapiens
  CDR3 for alpha chain variable domain of TCR clone 58672 (TRAV14/DV4, TRAJ54)
CAMREAPGAQKLVF

SEQ ID NO: 117344 - protein, 15 aa, Homo sapiens
  CDR3 for beta chain variable domain of TCR clone 58672 (TRBV5-1, TRBJ2-7)
WASSLNEGPAREQYF

SEQ ID NO: 117345 - protein, 12 aa, Homo sapiens
  CDR3 for alpha chain variable domain of TCR clone 58673 (TRAV8-3, TRAJ41)
CAVALSGYALTF

SEQ ID NO: 117346 - protein, 16 aa, Homo sapiens
  CDR3 for beta chain variable domain of TCR clone 58673 (TRBV27, TRBJ2-7)
CASSSERRDSAYEQYF

SEQ ID NO: 117347 - protein, 16 aa, Homo sapiens
  CDR3 for alpha chain variable domain of TCR clone 58674 (TRAV30, TRAJ24)
CGTEIVDADSWGKFQF

SEQ ID NO: 117348 - protein, 13 aa, Homo sapiens
  CDR3 for beta chain variable domain of TCR clone 58674 (TRBV11-2, TRBJ2-5)
CANSSTGEETQYF

SEQ ID NO: 117349 - protein, 14 aa, Homo sapiens
  CDR3 for alpha chain variable domain of TCR clone 58675 (TRAV1-2, TRAJ16)
CAVNRFSDGQKLLF

SEQ ID NO: 117350 - protein, 16 aa, Homo sapiens
  CDR3 for beta chain variable domain of TCR clone 58675 (TRBV7-3, TRBJ2-5)
CASSLMGGASQETQYF

SEQ ID NO: 117351 - protein, 13 aa, Homo sapiens
  CDR3 for alpha chain variable domain of TCR clone 58676 (TRAV13-2, TRAJ13)
CAERPGGYQKVTF

SEQ ID NO: 117352 - protein, 18 aa, Homo sapiens
  CDR3 for beta chain variable domain of TCR clone 58676 (TRBV25-1, TRBJ1-2)
CASSGLQNGQGLIFGYTF

SEQ ID NO: 117353 - protein, 13 aa, Homo sapiens
  CDR3 for alpha chain variable domain of TCR clone 58677 (TRAV8-4, TRAJ48)
CAVNLFGNEKLTF

SEQ ID NO: 117354 - protein, 15 aa, Homo sapiens
  CDR3 for beta chain variable domain of TCR clone 58677 (TRBV20-1, TRBJ2-7)
CSARKGLAESYEQYF

SEQ ID NO: 117355 - protein, 14 aa, Homo sapiens
  CDR3 for alpha chain variable domain of TCR clone 58678 (TRAV3, TRAJ5)
CAVRSDTGRRALTF

SEQ ID NO: 117356 - protein, 12 aa, Homo sapiens
  CDR3 for beta chain variable domain of TCR clone 58678 (TRBV11-2, TRBJ2-2)
CASSLGGGELFF

SEQ ID NO: 117357 - protein, 15 aa, Homo sapiens
  CDR3 for alpha chain variable domain of TCR clone 58679 (TRAV17, TRAJ57)
CATGPSQGGSEKLVF

SEQ ID NO: 117358 - protein, 14 aa, Homo sapiens
  CDR3 for beta chain variable domain of TCR clone 58679 (TRBV12-5, TRBJ2-5)
CASGSRTHQEAQYF

SEQ ID NO: 117359 - protein, 14 aa, Homo sapiens
  CDR3 for alpha chain variable domain of TCR clone 58680 (TRAV8-6, TRAJ40)
CAVSATSGNYKYIF

SEQ ID NO: 117360 - protein, 16 aa, Homo sapiens
  CDR3 for beta chain variable domain of TCR clone 58680 (TRBV4-2, TRBJ2-7)
CASSQDGGSLRGEQYF

SEQ ID NO: 117361 - protein, 15 aa, Homo sapiens
  CDR3 for alpha chain variable domain of TCR clone 58681 (TRAV3, TRAJ13)
CAVRVYSGGYQKVTF

SEQ ID NO: 117362 - protein, 15 aa, Homo sapiens
  CDR3 for beta chain variable domain of TCR clone 58681 (TRBV5-7, TRBJ1-2)
CASSLGVAANYGYSF

SEQ ID NO: 117363 - protein, 16 aa, Homo sapiens
  CDR3 for alpha chain variable domain of TCR clone 58682 (TRAV30, TRAJ24)
CGTEIVDADSWGKFQV

SEQ ID NO: 117364 - protein, 15 aa, Homo sapiens
  CDR3 for beta chain variable domain of TCR clone 58682 (TRBV27, TRBJ2-1)
CASSNGGGSSNEQFF

SEQ ID NO: 117365 - protein, 15 aa, Homo sapiens
  CDR3 for alpha chain variable domain of TCR clone 58683 (TRAV13-1, TRAJ15)
CAASIERQAGTALIF

SEQ ID NO: 117366 - protein, 11 aa, Homo sapiens
  CDR3 for beta chain variable domain of TCR clone 58683 (TRBV12-4, TRBJ2-7)
CASALKYEQYF

SEQ ID NO: 117367 - protein, 13 aa, Homo sapiens
  CDR3 for alpha chain variable domain of TCR clone 58684 (TRAV12-3, TRAJ33)
CAMSVNSNYQLIW

SEQ ID NO: 117368 - protein, 15 aa, Homo sapiens
  CDR3 for beta chain variable domain of TCR clone 58684 (TRBV7-8, TRBJ2-3)
CASSLSADSGGAQYF

SEQ ID NO: 117369 - protein, 14 aa, Homo sapiens
  CDR3 for alpha chain variable domain of TCR clone 58685 (TRAV17, TRAJ54)
CATDANQGAQKLVF

SEQ ID NO: 117370 - protein, 14 aa, Homo sapiens
  CDR3 for beta chain variable domain of TCR clone 58685 (TRBV12-4, TRBJ1-1)
CASSLGTGGTEAFF

SEQ ID NO: 117371 - protein, 15 aa, Homo sapiens
  CDR3 for alpha chain variable domain of TCR clone 58686 (TRAV12-2, TRAJ20)
CAVKGGFGAGTTGTV

SEQ ID NO: 117372 - protein, 13 aa, Homo sapiens
  CDR3 for beta chain variable domain of TCR clone 58686 (TRBV12-4, TRBJ2-7)
CASSPGQLYEQYF

SEQ ID NO: 117373 - protein, 14 aa, Homo sapiens
  CDR3 for alpha chain variable domain of TCR clone 58687 (TRAV20, TRAJ29)
CAVQAWVGNTPLVF

SEQ ID NO: 117374 - protein, 15 aa, Homo sapiens
  CDR3 for beta chain variable domain of TCR clone 58687 (TRBV29-1, TRBJ2-7)
CSVEFFDRGSYEKYF

SEQ ID NO: 117375 - protein, 13 aa, Homo sapiens
  CDR3 for alpha chain variable domain of TCR clone 58688 (TRAV25, TRAJ48)
CAGPKGGNEKLTF

SEQ ID NO: 117376 - protein, 15 aa, Homo sapiens
  CDR3 for beta chain variable domain of TCR clone 58688 (TRBV9, TRBJ2-6)
CASSVLWNGANVPTF

SEQ ID NO: 117377 - protein, 13 aa, Homo sapiens
  CDR3 for alpha chain variable domain of TCR clone 58689 (TRAV21, TRAJ27)
CAARPGNAGKSPF

SEQ ID NO: 117378 - protein, 14 aa, Homo sapiens
  CDR3 for beta chain variable domain of TCR clone 58689 (TRBV11-2, TRBJ2-7)
CASSLGAGAYEQYF

SEQ ID NO: 117379 - protein, 13 aa, Homo sapiens
  CDR3 for alpha chain variable domain of TCR clone 58690 (TRAV8-6, TRAJ49)
CAVITNTGNQFYF

SEQ ID NO: 117380 - protein, 15 aa, Homo sapiens
  CDR3 for beta chain variable domain of TCR clone 58690 (TRBV12-4, TRBJ2-5)
CASSPPTGLQETQYF

SEQ ID NO: 117381 - protein, 12 aa, Homo sapiens
  CDR3 for alpha chain variable domain of TCR clone 58691 (TRAV2, TRAJ9)
CAVGAGGFKTIF

SEQ ID NO: 117382 - protein, 15 aa, Homo sapiens
  CDR3 for beta chain variable domain of TCR clone 58691 (TRBV15, TRBJ1-2)
CATSRVRASGSGYTF

SEQ ID NO: 117383 - protein, 14 aa, Homo sapiens
  CDR3 for alpha chain variable domain of TCR clone 58692 (TRAV17, TRAJ53)
CATDAGGSDYKLTF

SEQ ID NO: 117384 - protein, 16 aa, Homo sapiens
  CDR3 for beta chain variable domain of TCR clone 58692 (TRBV4-1, TRBJ1-1)
CASSQDAGMGNTEAFF

SEQ ID NO: 117385 - protein, 14 aa, Homo sapiens
  CDR3 for alpha chain variable domain of TCR clone 58693 (TRAV8-2, TRAJ4)
CVVSPSGGYNKLMF

SEQ ID NO: 117386 - protein, 15 aa, Homo sapiens
  CDR3 for beta chain variable domain of TCR clone 58693 (TRBV4-1, TRBJ1-4)
CASSDTGGTNEKLFF

SEQ ID NO: 117387 - protein, 14 aa, Homo sapiens
  CDR3 for alpha chain variable domain of TCR clone 58694 (TRAV20, TRAJ56)
CAVQFGGANSKLTF

SEQ ID NO: 117388 - protein, 13 aa, Homo sapiens
  CDR3 for beta chain variable domain of TCR clone 58694 (TRBV12-4, TRBJ1-1)
CASSPGTGFEAFF

SEQ ID NO: 117389 - protein, 14 aa, Homo sapiens
  CDR3 for alpha chain variable domain of TCR clone 58695 (TRAV12-2, TRAJ44)
CAVNPAGTASKLTF

SEQ ID NO: 117390 - protein, 13 aa, Homo sapiens
  CDR3 for beta chain variable domain of TCR clone 58695 (TRBV20-1, TRBJ1-6)
CSAPLRVGSPLHF

SEQ ID NO: 117391 - protein, 12 aa, Homo sapiens
  CDR3 for alpha chain variable domain of TCR clone 58696 (TRAV12-1, TRAJ31)
CVVNLNNARLMF

SEQ ID NO: 117392 - protein, 12 aa, Homo sapiens
  CDR3 for beta chain variable domain of TCR clone 58696 (TRBV7-3, TRBJ2-1)
CASSFQSGPQFF

SEQ ID NO: 117393 - protein, 11 aa, Homo sapiens
  CDR3 for alpha chain variable domain of TCR clone 58697 (TRAV1-1, TRAJ23)
CAVRQGGKLIF

SEQ ID NO: 117394 - protein, 20 aa, Homo sapiens
  CDR3 for beta chain variable domain of TCR clone 58697 (TRBV7-8, TRBJ2-2)
CASSHLFPGPTIHFTGELFF

SEQ ID NO: 117395 - protein, 13 aa, Homo sapiens
  CDR3 for alpha chain variable domain of TCR clone 58698 (TRAV2, TRAJ40)
CAVATSGTYKYIF

SEQ ID NO: 117396 - protein, 12 aa, Homo sapiens
  CDR3 for beta chain variable domain of TCR clone 58698 (TRBV19, TRBJ2-7)
CASTDRGYEQYF

SEQ ID NO: 117397 - protein, 15 aa, Homo sapiens
  CDR3 for alpha chain variable domain of TCR clone 58699 (TRAV21, TRAJ38)
CAVRQDAGNNRKLIW

SEQ ID NO: 117398 - protein, 16 aa, Homo sapiens
  CDR3 for beta chain variable domain of TCR clone 58699 (TRBV4-2, TRBJ1-1)
CASRPLDVGGDTEAFF

SEQ ID NO: 117399 - protein, 11 aa, Homo sapiens
  CDR3 for alpha chain variable domain of TCR clone 58700 (TRAV3, TRAJ21)
CAVGNFNKFYF

SEQ ID NO: 117400 - protein, 15 aa, Homo sapiens
  CDR3 for beta chain variable domain of TCR clone 58700 (TRBV20-1, TRBJ1-1)
CSASRGVTGNTEAFF

SEQ ID NO: 117401 - protein, 13 aa, Homo sapiens
  CDR3 for alpha chain variable domain of TCR clone 58701 (TRAV27, TRAJ41)
CAGEGNSGYALNF

SEQ ID NO: 117402 - protein, 19 aa, Homo sapiens
  CDR3 for beta chain variable domain of TCR clone 58701 (TRBV7-2, TRBJ2-3)
CASSFLSRNWGGGTDTQYF

SEQ ID NO: 117403 - protein, 11 aa, Homo sapiens
  CDR3 for alpha chain variable domain of TCR clone 58702 (TRAV4, TRAJ23)
CLVAPGGKLIF

SEQ ID NO: 117404 - protein, 15 aa, Homo sapiens
  CDR3 for beta chain variable domain of TCR clone 58702 (TRBV7-2, TRBJ2-1)
CASSCQADEYNEQFF

SEQ ID NO: 117405 - protein, 15 aa, Homo sapiens
  CDR3 for alpha chain variable domain of TCR clone 58703 (TRAV14/DV4, TRAJ33)
CAMREGRDSNHQLIW

SEQ ID NO: 117406 - protein, 15 aa, Homo sapiens
  CDR3 for beta chain variable domain of TCR clone 58703 (TRBV5-5, TRBJ1-5)
CASSSTPGSNQPQHF

SEQ ID NO: 117407 - protein, 12 aa, Homo sapiens
  CDR3 for alpha chain variable domain of TCR clone 58704 (TRAV8-6, TRAJ8)
CAVTPGFQELVF

SEQ ID NO: 117408 - protein, 16 aa, Homo sapiens
  CDR3 for beta chain variable domain of TCR clone 58704 (TRBV7-3, TRBJ2-2)
CASSLKRGTLSGELFF

SEQ ID NO: 117409 - protein, 13 aa, Homo sapiens
  CDR3 for alpha chain variable domain of TCR clone 58705 (TRAV13-1, TRAJ49)
CAAMLYTGNQFYF

SEQ ID NO: 117410 - protein, 13 aa, Homo sapiens
  CDR3 for beta chain variable domain of TCR clone 58705 (TRBV12-4, TRBJ2-7)
CASSPTETYEQYF

SEQ ID NO: 117411 - protein, 13 aa, Homo sapiens
  CDR3 for alpha chain variable domain of TCR clone 58706 (TRAV13-1, TRAJ4)
CAASIGGYNKLIL

SEQ ID NO: 117412 - protein, 16 aa, Homo sapiens
  CDR3 for beta chain variable domain of TCR clone 58706 (TRBV20-1, TRBJ2-1)
CSAPGLAGSYSDEQFF

SEQ ID NO: 117413 - protein, 13 aa, Homo sapiens
  CDR3 for alpha chain variable domain of TCR clone 58707 (TRAV38-2/DV8, TRAJ34)
CAYRNYNTDKLIF

SEQ ID NO: 117414 - protein, 15 aa, Homo sapiens
  CDR3 for beta chain variable domain of TCR clone 58707 (TRBV20-1, TRBJ2-5)
CSAEGTGGLQETQCF

SEQ ID NO: 117415 - protein, 14 aa, Homo sapiens
  CDR3 for alpha chain variable domain of TCR clone 58708 (TRAV1-2, TRAJ16)
CAVNRFSDGQKLLF

SEQ ID NO: 117416 - protein, 12 aa, Homo sapiens
  CDR3 for beta chain variable domain of TCR clone 58708 (TRBV7-3, TRBJ1-1)
CQQPGLGAEAFF

SEQ ID NO: 117417 - protein, 17 aa, Homo sapiens
  CDR3 for alpha chain variable domain of TCR clone 58709 (TRAV36/DV7, TRAJ52)
CAVAQRAGGTSYGKLTF

SEQ ID NO: 117418 - protein, 16 aa, Homo sapiens
  CDR3 for beta chain variable domain of TCR clone 58709 (TRBV6-1, TRBJ1-3)
CASVQGGVETPYILER

SEQ ID NO: 117419 - protein, 12 aa, Homo sapiens
  CDR3 for alpha chain variable domain of TCR clone 58710 (TRAV21, TRAJ33)
CAKMDSNYQLIW

SEQ ID NO: 117420 - protein, 15 aa, Homo sapiens
  CDR3 for beta chain variable domain of TCR clone 58710 (TRBV5-1, TRBJ1-4)
FAPAAWKDGNEKLFF

SEQ ID NO: 117421 - protein, 15 aa, Homo sapiens
  CDR3 for alpha chain variable domain of TCR clone 58711 (TRAV16, TRAJ12)
FSKWPLRDSSYKLIF

SEQ ID NO: 117422 - protein, 13 aa, Homo sapiens
  CDR3 for beta chain variable domain of TCR clone 58711 (TRBV4-2, TRBJ1-1)
CASSQAGNTEAFF

SEQ ID NO: 117423 - protein, 13 aa, Homo sapiens
  CDR3 for alpha chain variable domain of TCR clone 58712 (TRAV27, TRAJ29)
CAGAHSGNTPLVF

SEQ ID NO: 117424 - protein, 14 aa, Homo sapiens
  CDR3 for beta chain variable domain of TCR clone 58712 (TRBV18, TRBJ2-5)
CASSPGVSQETQYF

SEQ ID NO: 117425 - protein, 13 aa, Homo sapiens
  CDR3 for alpha chain variable domain of TCR clone 58713 (TRAV17, TRAJ9)
CATDYTGGFKTIF

SEQ ID NO: 117426 - protein, 17 aa, Homo sapiens
  CDR3 for beta chain variable domain of TCR clone 58713 (TRBV7-8, TRBJ2-6)
CASSAGTGGAGANVLTF

SEQ ID NO: 117427 - protein, 13 aa, Homo sapiens
  CDR3 for alpha chain variable domain of TCR clone 58714 (TRAV35, TRAJ36)
CARPRIGASNLFF

SEQ ID NO: 117428 - protein, 15 aa, Homo sapiens
  CDR3 for beta chain variable domain of TCR clone 58714 (TRBV28, TRBJ2-5)
CASSPPWSYQETQYF

SEQ ID NO: 117429 - protein, 14 aa, Homo sapiens
  CDR3 for alpha chain variable domain of TCR clone 58715 (TRAV12-3, TRAJ10)
SHLPLTGGGNKITF

SEQ ID NO: 117430 - protein, 14 aa, Homo sapiens
  CDR3 for beta chain variable domain of TCR clone 58715 (TRBV6-1, TRBJ1-3)
CASVQGGGGNTIYF

SEQ ID NO: 117431 - protein, 13 aa, Homo sapiens
  CDR3 for alpha chain variable domain of TCR clone 58716 (TRAV8-3, TRAJ28)
CAVGAVGSYQLTF

SEQ ID NO: 117432 - protein, 15 aa, Homo sapiens
  CDR3 for beta chain variable domain of TCR clone 58716 (TRBV12-4, TRBJ2-5)
CASSPPTGLQETQYF

SEQ ID NO: 117433 - protein, 11 aa, Homo sapiens
  CDR3 for alpha chain variable domain of TCR clone 58717 (TRAV12-3, TRAJ41)
CAMNAREPLNF

SEQ ID NO: 117434 - protein, 16 aa, Homo sapiens
  CDR3 for beta chain variable domain of TCR clone 58717 (TRBV7-8, TRBJ2-3)
CAISTEGQRETDTQYF

SEQ ID NO: 117435 - protein, 14 aa, Homo sapiens
  CDR3 for alpha chain variable domain of TCR clone 58718 (TRAV3, TRAJ9)
CAVRLNTGGLKTIF

SEQ ID NO: 117436 - protein, 15 aa, Homo sapiens
  CDR3 for beta chain variable domain of TCR clone 58718 (TRBV7-2, TRBJ2-1)
CASSLASGRGNEQFF

SEQ ID NO: 117437 - protein, 18 aa, Homo sapiens
  CDR3 for alpha chain variable domain of TCR clone 58719 (TRAV21, TRAJ52)
CAVRPSPAGGTSYGKLTF

SEQ ID NO: 117438 - protein, 13 aa, Homo sapiens
  CDR3 for beta chain variable domain of TCR clone 58719 (TRBV4-1, TRBJ2-7)
CASSQGQAYEQYF

SEQ ID NO: 117439 - protein, 14 aa, Homo sapiens
  CDR3 for alpha chain variable domain of TCR clone 58720 (TRAV12-2, TRAJ45)
CALPERGGAEGLTF

SEQ ID NO: 117440 - protein, 14 aa, Homo sapiens
  CDR3 for beta chain variable domain of TCR clone 58720 (TRBV18, TRBJ1-5)
CASSPGNSNQPQHF

SEQ ID NO: 117441 - protein, 17 aa, Homo sapiens
  CDR3 for alpha chain variable domain of TCR clone 58721 (TRAV13-1, TRAJ5)
CSNPSLSRDTGRRALTF

SEQ ID NO: 117442 - protein, 17 aa, Homo sapiens
  CDR3 for beta chain variable domain of TCR clone 58721 (TRBV24-1, TRBJ2-1)
CANSDVSTSGTYNEQFF

SEQ ID NO: 117443 - protein, 13 aa, Homo sapiens
  CDR3 for alpha chain variable domain of TCR clone 58722 (TRAV2, TRAJ29)
CAAGNSGNTPLVF

SEQ ID NO: 117444 - protein, 16 aa, Homo sapiens
  CDR3 for beta chain variable domain of TCR clone 58722 (TRBV7-9, TRBJ1-2)
CASSPGGGAMNYGYTF

SEQ ID NO: 117445 - protein, 16 aa, Homo sapiens
  CDR3 for alpha chain variable domain of TCR clone 58723 (TRAV30, TRAJ24)
CGTEIVDADSWGKFKV

SEQ ID NO: 117446 - protein, 14 aa, Homo sapiens
  CDR3 for beta chain variable domain of TCR clone 58723 (TRBV12-5, TRBJ2-5)
CASGSRTHQETQYF

SEQ ID NO: 117447 - protein, 20 aa, Homo sapiens
  CDR3 for alpha chain variable domain of TCR clone 58724 (TRAV17, TRAJ29)
CATDAFRKHTSCLWKGHKTF

SEQ ID NO: 117448 - protein, 13 aa, Homo sapiens
  CDR3 for beta chain variable domain of TCR clone 58724 (TRBV5-7, TRBJ2-6)
CASTSSGANVLTF

SEQ ID NO: 117449 - protein, 13 aa, Homo sapiens
  CDR3 for alpha chain variable domain of TCR clone 58725 (TRAV8-6, TRAJ16)
CAVSQWVGQKLLF

SEQ ID NO: 117450 - protein, 15 aa, Homo sapiens
  CDR3 for beta chain variable domain of TCR clone 58725 (TRBV12-4, TRBJ2-1)
CASSLSTGVSNEQFF

SEQ ID NO: 117451 - protein, 10 aa, Homo sapiens
  CDR3 for alpha chain variable domain of TCR clone 58726 (TRAV1-2, TRAJ20)
CAVTDYKLSF

SEQ ID NO: 117452 - protein, 15 aa, Homo sapiens
  CDR3 for beta chain variable domain of TCR clone 58726 (TRBV7-2, TRBJ2-7)
CASSLVSSGPYEQYF

SEQ ID NO: 117453 - protein, 12 aa, Homo sapiens
  CDR3 for alpha chain variable domain of TCR clone 58727 (TRAV8-3, TRAJ41)
CAVALSGYALSF

SEQ ID NO: 117454 - protein, 16 aa, Homo sapiens
  CDR3 for beta chain variable domain of TCR clone 58727 (TRBV27, TRBJ2-7)
CASSSERKDSAYEQYF

SEQ ID NO: 117455 - protein, 16 aa, Homo sapiens
  CDR3 for alpha chain variable domain of TCR clone 58728 (TRAV3, TRAJ6)
CAVRDGMGRRKLHTYI

SEQ ID NO: 117456 - protein, 15 aa, Homo sapiens
  CDR3 for beta chain variable domain of TCR clone 58728 (TRBV9, TRBJ2-1)
CASSLAGSSYNERFF

SEQ ID NO: 117457 - protein, 16 aa, Homo sapiens
  CDR3 for alpha chain variable domain of TCR clone 58729 (TRAV8-3, TRAJ42)
CAVGEGNGGSQGSLIF

SEQ ID NO: 117458 - protein, 14 aa, Homo sapiens
  CDR3 for beta chain variable domain of TCR clone 58729 (TRBV7-2, TRBJ2-1)
CASSRGGARNEQFF

SEQ ID NO: 117459 - protein, 13 aa, Homo sapiens
  CDR3 for alpha chain variable domain of TCR clone 58730 (TRAV8-3, TRAJ28)
CAVGAVGSYQLTF

SEQ ID NO: 117460 - protein, 15 aa, Homo sapiens
  CDR3 for beta chain variable domain of TCR clone 58730 (TRBV7-9, TRBJ2-7)
CASSLDLQGPYEQYF

SEQ ID NO: 117461 - protein, 14 aa, Homo sapiens
  CDR3 for alpha chain variable domain of TCR clone 58731 (TRAV9-2, TRAJ38)
CTLSNAGNNLKLIW

SEQ ID NO: 117462 - protein, 15 aa, Homo sapiens
  CDR3 for beta chain variable domain of TCR clone 58731 (TRBV9, TRBJ2-1)
CASSLAGSSYNEQFF

SEQ ID NO: 117463 - protein, 12 aa, Homo sapiens
  CDR3 for alpha chain variable domain of TCR clone 58732 (TRAV12-3, TRAJ17)
CAMTLTGNKLTF

SEQ ID NO: 117464 - protein, 13 aa, Homo sapiens
  CDR3 for beta chain variable domain of TCR clone 58732 (TRBV2, TRBJ1-1)
CASSVSGYTEAFF

SEQ ID NO: 117465 - protein, 15 aa, Homo sapiens
  CDR3 for alpha chain variable domain of TCR clone 58733 (TRAV2, TRAJ22)
CAVPSRGGSARHLTF

SEQ ID NO: 117466 - protein, 11 aa, Homo sapiens
  CDR3 for beta chain variable domain of TCR clone 58733 (TRBV27, TRBJ2-3)
CASSLGDTQYF

SEQ ID NO: 117467 - protein, 12 aa, Homo sapiens
  CDR3 for alpha chain variable domain of TCR clone 58734 (TRAV2, TRAJ40)
CCVTSGTYKYIF

SEQ ID NO: 117468 - protein, 15 aa, Homo sapiens
  CDR3 for beta chain variable domain of TCR clone 58734 (TRBV11-3, TRBJ2-3)
CASLKDGREGDTQYF

SEQ ID NO: 117469 - protein, 13 aa, Homo sapiens
  CDR3 for alpha chain variable domain of TCR clone 58735 (TRAV12-1, TRAJ39)
CVVNYNAGNMLTF

SEQ ID NO: 117470 - protein, 14 aa, Homo sapiens
  CDR3 for beta chain variable domain of TCR clone 58735 (TRBV27, TRBJ2-3)
CASSPLGTTDTQYF

SEQ ID NO: 117471 - protein, 13 aa, Homo sapiens
  CDR3 for alpha chain variable domain of TCR clone 58736 (TRAV2, TRAJ40)
LAVVTSGTYKYIF

SEQ ID NO: 117472 - protein, 14 aa, Homo sapiens
  CDR3 for beta chain variable domain of TCR clone 58736 (TRBV19, TRBJ2-1)
CASPTFVLSGEQFF

SEQ ID NO: 117473 - protein, 13 aa, Homo sapiens
  CDR3 for alpha chain variable domain of TCR clone 58737 (TRAV8-6, TRAJ49)
CAVITNTGNQFYF

SEQ ID NO: 117474 - protein, 13 aa, Homo sapiens
  CDR3 for beta chain variable domain of TCR clone 58737 (TRBV7-9, TRBJ1-2)
CASSLKQNYGYTL

SEQ ID NO: 117475 - protein, 15 aa, Homo sapiens
  CDR3 for alpha chain variable domain of TCR clone 58738 (TRAV26-1, TRAJ40)
CIVRAVPSGTYKYIF

SEQ ID NO: 117476 - protein, 14 aa, Homo sapiens
  CDR3 for beta chain variable domain of TCR clone 58738 (TRBV19, TRBJ2-1)
CASKDPGLANERFF

SEQ ID NO: 117477 - protein, 16 aa, Homo sapiens
  CDR3 for alpha chain variable domain of TCR clone 58739 (TRAV4, TRAJ22)
CLVGDLYSGSARQLTF

SEQ ID NO: 117478 - protein, 14 aa, Homo sapiens
  CDR3 for beta chain variable domain of TCR clone 58739 (TRBV7-2, TRBJ2-7)
CASSPKTSFYEQYF

SEQ ID NO: 117479 - protein, 16 aa, Homo sapiens
  CDR3 for alpha chain variable domain of TCR clone 58740 (TRAV8-3, TRAJ13)
CAVGAYPSGGYQKVTF

SEQ ID NO: 117480 - protein, 13 aa, Homo sapiens
  CDR3 for beta chain variable domain of TCR clone 58740 (TRBV4-1, TRBJ1-1)
CASSRKMNTEAFF

SEQ ID NO: 117481 - protein, 11 aa, Homo sapiens
  CDR3 for alpha chain variable domain of TCR clone 58741 (TRAV17, TRAJ9)
CDTTGGFKTIF

SEQ ID NO: 117482 - protein, 14 aa, Homo sapiens
  CDR3 for beta chain variable domain of TCR clone 58741 (TRBV7-9, TRBJ2-2)
CASSGLADTGELFF

SEQ ID NO: 117483 - protein, 14 aa, Homo sapiens
  CDR3 for alpha chain variable domain of TCR clone 58742 (TRAV26-1, TRAJ49)
CIVRLTNTGNQFYL

SEQ ID NO: 117484 - protein, 11 aa, Homo sapiens
  CDR3 for beta chain variable domain of TCR clone 58742 (TRBV29-1, TRBJ2-5)
CSEDRTGTQYF

SEQ ID NO: 117485 - protein, 15 aa, Homo sapiens
  CDR3 for alpha chain variable domain of TCR clone 58743 (TRAV8-3, TRAJ27)
CAVGPSKTNAGKSTF

SEQ ID NO: 117486 - protein, 12 aa, Homo sapiens
  CDR3 for beta chain variable domain of TCR clone 58743 (TRBV20-1, TRBJ1-1)
QCSTWGGTEAFF

SEQ ID NO: 117487 - protein, 16 aa, Homo sapiens
  CDR3 for alpha chain variable domain of TCR clone 58744 (TRAV14/DV4, TRAJ53)
CAMREGGGGSNYKLTF

SEQ ID NO: 117488 - protein, 15 aa, Homo sapiens
  CDR3 for beta chain variable domain of TCR clone 58744 (TRBV6-1, TRBJ2-1)
CASSELRGQYNEQFF

SEQ ID NO: 117489 - protein, 16 aa, Homo sapiens
  CDR3 for alpha chain variable domain of TCR clone 58745 (TRAV2, TRAJ20)
TTVLWSFRSNDYKLSF

SEQ ID NO: 117490 - protein, 15 aa, Homo sapiens
  CDR3 for beta chain variable domain of TCR clone 58745 (TRBV11-1, TRBJ2-7)
CASSLNYGASYEQYF

SEQ ID NO: 117491 - protein, 15 aa, Homo sapiens
  CDR3 for alpha chain variable domain of TCR clone 58746 (TRAV3, TRAJ42)
CAVRGGTGSQGNLVF

SEQ ID NO: 117492 - protein, 14 aa, Homo sapiens
  CDR3 for beta chain variable domain of TCR clone 58746 (TRBV19, TRBJ1-2)
CASSSLFARDVYTF

SEQ ID NO: 117493 - protein, 16 aa, Homo sapiens
  CDR3 for alpha chain variable domain of TCR clone 58747 (TRAV3, TRAJ37)
RAVRVRGSGNTGKLIF

SEQ ID NO: 117494 - protein, 15 aa, Homo sapiens
  CDR3 for beta chain variable domain of TCR clone 58747 (TRBV3-1, TRBJ2-1)
CASSPRDSGFNEQFF

SEQ ID NO: 117495 - protein, 16 aa, Homo sapiens
  CDR3 for alpha chain variable domain of TCR clone 58748 (TRAV30, TRAJ24)
CGTEIVDADSWGKFQF

SEQ ID NO: 117496 - protein, 16 aa, Homo sapiens
  CDR3 for beta chain variable domain of TCR clone 58748 (TRBV11-2, TRBJ2-7)
CASSPLAGGPRYEQYF

SEQ ID NO: 117497 - protein, 14 aa, Homo sapiens
  CDR3 for alpha chain variable domain of TCR clone 58749 (TRAV12-1, TRAJ17)
CVMNYKAAGNKLTF

SEQ ID NO: 117498 - protein, 17 aa, Homo sapiens
  CDR3 for beta chain variable domain of TCR clone 58749 (TRBV20-1, TRBJ2-1)
CSASSSGLAGSYNEQFF

SEQ ID NO: 117499 - protein, 14 aa, Homo sapiens
  CDR3 for alpha chain variable domain of TCR clone 58750 (TRAV12-3, TRAJ56)
CAMSVTGSNSKLTF

SEQ ID NO: 117500 - protein, 17 aa, Homo sapiens
  CDR3 for beta chain variable domain of TCR clone 58750 (TRBV20-1, TRBJ2-3)
CSASLLGRGGSADTQYF

SEQ ID NO: 117501 - protein, 15 aa, Homo sapiens
  CDR3 for alpha chain variable domain of TCR clone 58751 (TRAV26-1, TRAJ44)
CIVRANTDTASKLTF

SEQ ID NO: 117502 - protein, 16 aa, Homo sapiens
  CDR3 for beta chain variable domain of TCR clone 58751 (TRBV7-7, TRBJ2-1)
CASSLASGTSYNEQFF

SEQ ID NO: 117503 - protein, 11 aa, Homo sapiens
  CDR3 for alpha chain variable domain of TCR clone 58752 (TRAV27, TRAJ45)
CAGAHEEVLTD

SEQ ID NO: 117504 - protein, 17 aa, Homo sapiens
  CDR3 for beta chain variable domain of TCR clone 58752 (TRBV11-2, TRBJ2-1)
CASSLYPPGVEYNEQFF

SEQ ID NO: 117505 - protein, 14 aa, Homo sapiens
  CDR3 for alpha chain variable domain of TCR clone 58753 (TRAV13-1, TRAJ44)
CAAKATGTASKLTF

SEQ ID NO: 117506 - protein, 11 aa, Homo sapiens
  CDR3 for beta chain variable domain of TCR clone 58753 (TRBV2, TRBJ1-1)
CASREGTEAFF

SEQ ID NO: 117507 - protein, 14 aa, Homo sapiens
  CDR3 for alpha chain variable domain of TCR clone 58754 (TRAV8-3, TRAJ28)
CAVVPGAGSYQLTF

SEQ ID NO: 117508 - protein, 15 aa, Homo sapiens
  CDR3 for beta chain variable domain of TCR clone 58754 (TRBV20-1, TRBJ2-1)
CSANVAGGPWDEQFF

SEQ ID NO: 117509 - protein, 17 aa, Homo sapiens
  CDR3 for alpha chain variable domain of TCR clone 58755 (TRAV3, TRAJ4)
CAVRDGTGGYNKLILEQ

SEQ ID NO: 117510 - protein, 16 aa, Homo sapiens
  CDR3 for beta chain variable domain of TCR clone 58755 (TRBV27, TRBJ2-2)
CASSSSGVSNTGELFF

SEQ ID NO: 117511 - protein, 13 aa, Homo sapiens
  CDR3 for alpha chain variable domain of TCR clone 58756 (TRAV38-1, TRAJ52)
CAFRGTSYGKLTF

SEQ ID NO: 117512 - protein, 15 aa, Homo sapiens
  CDR3 for beta chain variable domain of TCR clone 58756 (TRBV7-8, TRBJ2-5)
CASSDAAGYQETQYF

SEQ ID NO: 117513 - protein, 13 aa, Homo sapiens
  CDR3 for alpha chain variable domain of TCR clone 58757 (TRAV27, TRAJ41)
CAGEGNSGYALNF

SEQ ID NO: 117514 - protein, 20 aa, Homo sapiens
  CDR3 for beta chain variable domain of TCR clone 58757 (TRBV7-8, TRBJ2-2)
CASSHLFPGPTIHITGELFF

SEQ ID NO: 117515 - protein, 18 aa, Homo sapiens
  CDR3 for alpha chain variable domain of TCR clone 58758 (TRAV12-3, TRAJ52)
CAMSRTNAGGTSYGKLTF

SEQ ID NO: 117516 - protein, 14 aa, Homo sapiens
  CDR3 for beta chain variable domain of TCR clone 58758 (TRBV6-1, TRBJ1-3)
CASVQGGGGNTIYF

SEQ ID NO: 117517 - protein, 12 aa, Homo sapiens
  CDR3 for alpha chain variable domain of TCR clone 58759 (TRAV1-1, TRAJ8)
CAGGTGFQKLVF

SEQ ID NO: 117518 - protein, 14 aa, Homo sapiens
  CDR3 for beta chain variable domain of TCR clone 58759 (TRBV18, TRBJ2-7)
CASSPRGGAYEQYF

SEQ ID NO: 117519 - protein, 12 aa, Homo sapiens
  CDR3 for alpha chain variable domain of TCR clone 58760 (TRAV3, TRAJ20)
CAVGDGDYKLSF

SEQ ID NO: 117520 - protein, 13 aa, Homo sapiens
  CDR3 for beta chain variable domain of TCR clone 58760 (TRBV9, TRBJ2-1)
CASSVGQGGEQFF

SEQ ID NO: 117521 - protein, 18 aa, Homo sapiens
  CDR3 for alpha chain variable domain of TCR clone 58761 (TRAV21, TRAJ52)
CAVRPSPAGGTSYGNLTF

SEQ ID NO: 117522 - protein, 15 aa, Homo sapiens
  CDR3 for beta chain variable domain of TCR clone 58761 (TRBV7-9, TRBJ2-7)
CASSSSGLAVYEQYF

SEQ ID NO: 117523 - protein, 12 aa, Homo sapiens
  CDR3 for alpha chain variable domain of TCR clone 58762 (TRAV13-1, TRAJ53)
CAAGDINYKLTF

SEQ ID NO: 117524 - protein, 16 aa, Homo sapiens
  CDR3 for beta chain variable domain of TCR clone 58762 (TRBV4-1, TRBJ2-3)
CASSQSTSGAEDTQYF

SEQ ID NO: 117525 - protein, 16 aa, Homo sapiens
  CDR3 for alpha chain variable domain of TCR clone 58763 (TRAV12-2, TRAJ40)
CAVIRGGTSGTYKYIF

SEQ ID NO: 117526 - protein, 14 aa, Homo sapiens
  CDR3 for beta chain variable domain of TCR clone 58763 (TRBV7-8, TRBJ1-2)
CASSPDSLSYGYTF

SEQ ID NO: 117527 - protein, 12 aa, Homo sapiens
  CDR3 for alpha chain variable domain of TCR clone 58764 (TRAV12-1, TRAJ40)
CVFYSGTYKYIF

SEQ ID NO: 117528 - protein, 12 aa, Homo sapiens
  CDR3 for beta chain variable domain of TCR clone 58764 (TRBV7-3, TRBJ2-1)
CASSFINNEQLF

SEQ ID NO: 117529 - protein, 17 aa, Homo sapiens
  CDR3 for alpha chain variable domain of TCR clone 58765 (TRAV26-2, TRAJ42)
CILRDVGYGGSQGNLIF

SEQ ID NO: 117530 - protein, 16 aa, Homo sapiens
  CDR3 for beta chain variable domain of TCR clone 58765 (TRBV12-4, TRBJ2-7)
CASSLIGGTETYEQYF

SEQ ID NO: 117531 - protein, 15 aa, Homo sapiens
  CDR3 for alpha chain variable domain of TCR clone 58766 (TRAV8-3, TRAJ45)
CASSYSGGGADGLTF

SEQ ID NO: 117532 - protein, 17 aa, Homo sapiens
  CDR3 for beta chain variable domain of TCR clone 58766 (TRBV7-8, TRBJ1-2)
CSSSLRPLQGHLYGYTF

SEQ ID NO: 117533 - protein, 15 aa, Homo sapiens
  CDR3 for alpha chain variable domain of TCR clone 58767 (TRAV2, TRAJ9)
CAVEDRGTGGFKTIF

SEQ ID NO: 117534 - protein, 16 aa, Homo sapiens
  CDR3 for beta chain variable domain of TCR clone 58767 (TRBV24-1, TRBJ2-3)
CATSDPGTGATVTQYF

SEQ ID NO: 117535 - protein, 15 aa, Homo sapiens
  CDR3 for alpha chain variable domain of TCR clone 58768 (TRAV8-3, TRAJ27)
CAVGPSKTNAGKSTF

SEQ ID NO: 117536 - protein, 14 aa, Homo sapiens
  CDR3 for beta chain variable domain of TCR clone 58768 (TRBV19, TRBJ2-1)
CASKDPSSYNEQFF

SEQ ID NO: 117537 - protein, 16 aa, Homo sapiens
  CDR3 for alpha chain variable domain of TCR clone 58769 (TRAV4, TRAJ9)
CLVGDPNRPGGFKTIF

SEQ ID NO: 117538 - protein, 13 aa, Homo sapiens
  CDR3 for beta chain variable domain of TCR clone 58769 (TRBV5-5, TRBJ1-2)
CASSFRRGEDYTF

SEQ ID NO: 117539 - protein, 16 aa, Homo sapiens
  CDR3 for alpha chain variable domain of TCR clone 58770 (TRAV30, TRAJ24)
CGTEIVDADSWGKFQF

SEQ ID NO: 117540 - protein, 15 aa, Homo sapiens
  CDR3 for beta chain variable domain of TCR clone 58770 (TRBV28, TRBJ2-3)
CASSPDRQGANTQYF

SEQ ID NO: 117541 - protein, 15 aa, Homo sapiens
  CDR3 for alpha chain variable domain of TCR clone 58771 (TRAV2, TRAJ11)
CAVGGRNSGYSTLTF

SEQ ID NO: 117542 - protein, 12 aa, Homo sapiens
  CDR3 for beta chain variable domain of TCR clone 58771 (TRBV28, TRBJ2-7)
CASSFSGYEQYF

SEQ ID NO: 117543 - protein, 18 aa, Homo sapiens
  CDR3 for alpha chain variable domain of TCR clone 58772 (TRAV21, TRAJ52)
CAVRPSPAGGTSYGKLTF

SEQ ID NO: 117544 - protein, 15 aa, Homo sapiens
  CDR3 for beta chain variable domain of TCR clone 58772 (TRBV7-2, TRBJ1-2)
CASSLVSGGDYGYTF

SEQ ID NO: 117545 - protein, 21 aa, Homo sapiens
  CDR3 for alpha chain variable domain of TCR clone 58773 (TRAV1-2, TRAJ37)
CILPLCCERFHGSGNTGKLIF

SEQ ID NO: 117546 - protein, 14 aa, Homo sapiens
  CDR3 for beta chain variable domain of TCR clone 58773 (TRBV2, TRBJ2-5)
CASSEVLAQETQYF

SEQ ID NO: 117547 - protein, 17 aa, Homo sapiens
  CDR3 for alpha chain variable domain of TCR clone 58774 (TRAV8-6, TRAJ8)
CAVKEGIENTGFQKLVF

SEQ ID NO: 117548 - protein, 15 aa, Homo sapiens
  CDR3 for beta chain variable domain of TCR clone 58774 (TRBV18, TRBJ2-6)
CASSPSYAGANVLTF

SEQ ID NO: 117549 - protein, 15 aa, Homo sapiens
  CDR3 for alpha chain variable domain of TCR clone 58775 (TRAV35, TRAJ50)
CAGQLRKTSYDTVIF

SEQ ID NO: 117550 - protein, 12 aa, Homo sapiens
  CDR3 for beta chain variable domain of TCR clone 58775 (TRBV5-1, TRBJ2-5)
CASSLGLETQYF

SEQ ID NO: 117551 - protein, 16 aa, Homo sapiens
  CDR3 for alpha chain variable domain of TCR clone 58776 (TRAV16, TRAJ4)
CALSRMFSGGYNKLIF

SEQ ID NO: 117552 - protein, 14 aa, Homo sapiens
  CDR3 for beta chain variable domain of TCR clone 58776 (TRBV4-1, TRBJ2-2)
CASSHAVNTGELFF

SEQ ID NO: 117553 - protein, 15 aa, Homo sapiens
  CDR3 for alpha chain variable domain of TCR clone 58777 (TRAV3, TRAJ22)
CAVRDRGGSARQLTF

SEQ ID NO: 117554 - protein, 14 aa, Homo sapiens
  CDR3 for beta chain variable domain of TCR clone 58777 (TRBV9, TRBJ1-2)
CASSVSTRSYGYTF

SEQ ID NO: 117555 - protein, 16 aa, Homo sapiens
  CDR3 for alpha chain variable domain of TCR clone 58778 (TRAV16, TRAJ52)
CSLSGVGGTSYGKLTF

SEQ ID NO: 117556 - protein, 14 aa, Homo sapiens
  CDR3 for beta chain variable domain of TCR clone 58778 (TRBV19, TRBJ1-2)
CASSLQGQAYGYTF

SEQ ID NO: 117557 - protein, 12 aa, Homo sapiens
  CDR3 for alpha chain variable domain of TCR clone 58779 (TRAV21, TRAJ37)
CAVRGNTGKLIF

SEQ ID NO: 117558 - protein, 14 aa, Homo sapiens
  CDR3 for beta chain variable domain of TCR clone 58779 (TRBV19, TRBJ2-1)
CAREVTGARNEQFF

SEQ ID NO: 117559 - protein, 14 aa, Homo sapiens
  CDR3 for alpha chain variable domain of TCR clone 58780 (TRAV12-1, TRAJ17)
CVVNYKAAGNKLTF

SEQ ID NO: 117560 - protein, 16 aa, Homo sapiens
  CDR3 for beta chain variable domain of TCR clone 58780 (TRBV12-4, TRBJ1-5)
CAGSRPVGGSNQPQHF

SEQ ID NO: 117561 - protein, 15 aa, Homo sapiens
  CDR3 for alpha chain variable domain of TCR clone 58781 (TRAV21, TRAJ32)
CAAAPYGGATNKPIF

SEQ ID NO: 117562 - protein, 17 aa, Homo sapiens
  CDR3 for beta chain variable domain of TCR clone 58781 (TRBV18, TRBJ2-3)
CASSPFGDGGFTDTQYF

SEQ ID NO: 117563 - protein, 15 aa, Homo sapiens
  CDR3 for alpha chain variable domain of TCR clone 58782 (TRAV25, TRAJ53)
CPTSNSGGSNYTLTF

SEQ ID NO: 117564 - protein, 14 aa, Homo sapiens
  CDR3 for beta chain variable domain of TCR clone 58782 (TRBV11-2, TRBJ2-3)
CASSRLARTDTQYF

SEQ ID NO: 117565 - protein, 16 aa, Homo sapiens
  CDR3 for alpha chain variable domain of TCR clone 58783 (TRAV3, TRAJ21)
CAVRDIERGNFNKFYF

SEQ ID NO: 117566 - protein, 15 aa, Homo sapiens
  CDR3 for beta chain variable domain of TCR clone 58783 (TRBV9, TRBJ1-6)
CASSVAGTGDSPLHF

SEQ ID NO: 117567 - protein, 14 aa, Homo sapiens
  CDR3 for alpha chain variable domain of TCR clone 58784 (TRAV12-2, TRAJ13)
CAVKKTGGYQKVTF

SEQ ID NO: 117568 - protein, 15 aa, Homo sapiens
  CDR3 for beta chain variable domain of TCR clone 58784 (TRBV29-1, TRBJ2-7)
CSVEFFDRGSYEQYF

SEQ ID NO: 117569 - protein, 11 aa, Homo sapiens
  CDR3 for alpha chain variable domain of TCR clone 58785 (TRAV2, TRAJ13)
CASGGYQKVTF

SEQ ID NO: 117570 - protein, 14 aa, Homo sapiens
  CDR3 for beta chain variable domain of TCR clone 58785 (TRBV19, TRBJ2-1)
CVSSKDRGQDEQFF

SEQ ID NO: 117571 - protein, 15 aa, Homo sapiens
  CDR3 for alpha chain variable domain of TCR clone 58786 (TRAV12-3, TRAJ10)
CASYILTGGGNKLTF

SEQ ID NO: 117572 - protein, 15 aa, Homo sapiens
  CDR3 for beta chain variable domain of TCR clone 58786 (TRBV7-2, TRBJ1-6)
CASNLGPDRGMPLHF

SEQ ID NO: 117573 - protein, 15 aa, Homo sapiens
  CDR3 for alpha chain variable domain of TCR clone 58787 (TRAV21, TRAJ53)
CATLNSGGSNYKLTF

SEQ ID NO: 117574 - protein, 17 aa, Homo sapiens
  CDR3 for beta chain variable domain of TCR clone 58787 (TRBV20-1, TRBJ2-7)
CSARDRVSGWTSSTSGR

SEQ ID NO: 117575 - protein, 17 aa, Homo sapiens
  CDR3 for alpha chain variable domain of TCR clone 58788 (TRAV3, TRAJ38)
CAVRDCLNAGNNRKLIW

SEQ ID NO: 117576 - protein, 12 aa, Homo sapiens
  CDR3 for beta chain variable domain of TCR clone 58788 (TRBV7-8, TRBJ2-7)
CASSLGDREQYF

SEQ ID NO: 117577 - protein, 14 aa, Homo sapiens
  CDR3 for alpha chain variable domain of TCR clone 58789 (TRAV9-2, TRAJ39)
CALYIYNAGNMLTF

SEQ ID NO: 117578 - protein, 15 aa, Homo sapiens
  CDR3 for beta chain variable domain of TCR clone 58789 (TRBV7-9, TRBJ1-4)
CASSARTGCNEKLFF

SEQ ID NO: 117579 - protein, 15 aa, Homo sapiens
  CDR3 for alpha chain variable domain of TCR clone 58790 (TRAV21, TRAJ42)
CAVTFYGGSQGNLIF

SEQ ID NO: 117580 - protein, 15 aa, Homo sapiens
  CDR3 for beta chain variable domain of TCR clone 58790 (TRBV3-1, TRBJ2-5)
CASSANLGGPETQYF

SEQ ID NO: 117581 - protein, 11 aa, Homo sapiens
  CDR3 for alpha chain variable domain of TCR clone 58791 (TRAV13-1, TRAJ6)
CATLGSYISTF

SEQ ID NO: 117582 - protein, 12 aa, Homo sapiens
  CDR3 for beta chain variable domain of TCR clone 58791 (TRBV11-2, TRBJ2-1)
CASSPENNEQFF

SEQ ID NO: 117583 - protein, 15 aa, Homo sapiens
  CDR3 for alpha chain variable domain of TCR clone 58792 (TRAV21, TRAJ53)
CATLNSGGSNYKLTF

SEQ ID NO: 117584 - protein, 16 aa, Homo sapiens
  CDR3 for beta chain variable domain of TCR clone 58792 (TRBV4-3, TRBJ2-2)
CASSHLQGSGTGELFF

SEQ ID NO: 117585 - protein, 11 aa, Homo sapiens
  CDR3 for alpha chain variable domain of TCR clone 58793 (TRAV2, TRAJ13)
CASGGYQEVTF

SEQ ID NO: 117586 - protein, 20 aa, Homo sapiens
  CDR3 for beta chain variable domain of TCR clone 58793 (TRBV28, TRBJ2-1)
CASTPIGRSPGLAGGNEQFF

SEQ ID NO: 117587 - protein, 15 aa, Homo sapiens
  CDR3 for alpha chain variable domain of TCR clone 58794 (TRAV12-3, TRAJ49)
CAMAVTPNTGNQFYF

SEQ ID NO: 117588 - protein, 13 aa, Homo sapiens
  CDR3 for beta chain variable domain of TCR clone 58794 (TRBV19, TRBJ1-2)
CASSVPGQDGYTF

SEQ ID NO: 117589 - protein, 18 aa, Homo sapiens
  CDR3 for alpha chain variable domain of TCR clone 58795 (TRAV26-1, TRAJ22)
CIVRVALISSGSARQLTF

SEQ ID NO: 117590 - protein, 14 aa, Homo sapiens
  CDR3 for beta chain variable domain of TCR clone 58795 (TRBV19, TRBJ2-1)
CASPTFVLSGEQFF

SEQ ID NO: 117591 - protein, 14 aa, Homo sapiens
  CDR3 for alpha chain variable domain of TCR clone 58796 (TRAV21, TRAJ45)
CAVSSGGGADGLTS

SEQ ID NO: 117592 - protein, 15 aa, Homo sapiens
  CDR3 for beta chain variable domain of TCR clone 58796 (TRBV6-1, TRBJ2-4)
CASSEAVWTINIQYF

SEQ ID NO: 117593 - protein, 13 aa, Homo sapiens
  CDR3 for alpha chain variable domain of TCR clone 58797 (TRAV12-2, TRAJ18)
CAVRGSTLGRLYF

SEQ ID NO: 117594 - protein, 13 aa, Homo sapiens
  CDR3 for beta chain variable domain of TCR clone 58797 (TRBV19, TRBJ1-2)
CASSVPGQDGYTF

SEQ ID NO: 117595 - protein, 16 aa, Homo sapiens
  CDR3 for alpha chain variable domain of TCR clone 58798 (TRAV26-1, TRAJ37)
CIVRGDGSGNTGKLIF

SEQ ID NO: 117596 - protein, 17 aa, Homo sapiens
  CDR3 for beta chain variable domain of TCR clone 58798 (TRBV4-1, TRBJ2-7)
RASSRDPLGVRGGEQYF

SEQ ID NO: 117597 - protein, 14 aa, Homo sapiens
  CDR3 for alpha chain variable domain of TCR clone 58799 (TRAV38-1, TRAJ45)
CASHSGGGADGLTF

SEQ ID NO: 117598 - protein, 16 aa, Homo sapiens
  CDR3 for beta chain variable domain of TCR clone 58799 (TRBV12-4, TRBJ1-5)
CASSRPVGGSNQPQHF

SEQ ID NO: 117599 - protein, 14 aa, Homo sapiens
  CDR3 for alpha chain variable domain of TCR clone 58800 (TRAV6, TRAJ6)
CALPTSGGSYIPTF

SEQ ID NO: 117600 - protein, 14 aa, Homo sapiens
  CDR3 for beta chain variable domain of TCR clone 58800 (TRBV12-5, TRBJ2-5)
CASGSWTHQETQYF

SEQ ID NO: 117601 - protein, 15 aa, Homo sapiens
  CDR3 for alpha chain variable domain of TCR clone 58801 (TRAV17, TRAJ28)
CATVDSGAGSYQLTF

SEQ ID NO: 117602 - protein, 13 aa, Homo sapiens
  CDR3 for beta chain variable domain of TCR clone 58801 (TRBV5-4, TRBJ2-5)
CASSRQEGETQYV

SEQ ID NO: 117603 - protein, 14 aa, Homo sapiens
  CDR3 for alpha chain variable domain of TCR clone 58802 (TRAV17, TRAJ57)
CATDPQGGSEKLVF

SEQ ID NO: 117604 - protein, 13 aa, Homo sapiens
  CDR3 for beta chain variable domain of TCR clone 58802 (TRBV7-9, TRBJ2-3)
CASSPGSTDTQYF

SEQ ID NO: 117605 - protein, 13 aa, Homo sapiens
  CDR3 for alpha chain variable domain of TCR clone 58803 (TRAV21, TRAJ27)
CAALNANAGKSTF

SEQ ID NO: 117606 - protein, 14 aa, Homo sapiens
  CDR3 for beta chain variable domain of TCR clone 58803 (TRBV27, TRBJ1-1)
CASSLLSGLSEAFF

SEQ ID NO: 117607 - protein, 17 aa, Homo sapiens
  CDR3 for alpha chain variable domain of TCR clone 58804 (TRAV26-1, TRAJ37)
CIVRVITVSSNPGKLIF

SEQ ID NO: 117608 - protein, 14 aa, Homo sapiens
  CDR3 for beta chain variable domain of TCR clone 58804 (TRBV19, TRBJ2-1)
CASPTFVLSGEQFF

SEQ ID NO: 117609 - protein, 13 aa, Homo sapiens
  CDR3 for alpha chain variable domain of TCR clone 58805 (TRAV21, TRAJ20)
CAVGLRVDYKLSF

SEQ ID NO: 117610 - protein, 14 aa, Homo sapiens
  CDR3 for beta chain variable domain of TCR clone 58805 (TRBV18, TRBJ2-3)
CASSGLADTDTQYF

SEQ ID NO: 117611 - protein, 14 aa, Homo sapiens
  CDR3 for alpha chain variable domain of TCR clone 58806 (TRAV13-2, TRAJ17)
CAENSKAAGNKLTF

SEQ ID NO: 117612 - protein, 16 aa, Homo sapiens
  CDR3 for beta chain variable domain of TCR clone 58806 (TRBV2, TRBJ1-5)
CASSEGGFYSNQPQHF

SEQ ID NO: 117613 - protein, 13 aa, Homo sapiens
  CDR3 for alpha chain variable domain of TCR clone 58807 (TRAV38-1, TRAJ42)
CARWGGIQGNLIL

SEQ ID NO: 117614 - protein, 10 aa, Homo sapiens
  CDR3 for beta chain variable domain of TCR clone 58807 (TRBV2, TRBJ2-5)
CASSAATQYF

SEQ ID NO: 117615 - protein, 13 aa, Homo sapiens
  CDR3 for alpha chain variable domain of TCR clone 58808 (TRAV3, TRAJ29)
CAVRDWGNTPLVF

SEQ ID NO: 117616 - protein, 15 aa, Homo sapiens
  CDR3 for beta chain variable domain of TCR clone 58808 (TRBV12-4, TRBJ2-5)
CASSGRTGEGETQYF

SEQ ID NO: 117617 - protein, 14 aa, Homo sapiens
  CDR3 for alpha chain variable domain of TCR clone 58809 (TRAV4, TRAJ30)
CLVGDMNRDDKIIF

SEQ ID NO: 117618 - protein, 16 aa, Homo sapiens
  CDR3 for beta chain variable domain of TCR clone 58809 (TRBV20-1, TRBJ1-4)
CNAPGQGLLTNEKLFF

SEQ ID NO: 117619 - protein, 14 aa, Homo sapiens
  CDR3 for alpha chain variable domain of TCR clone 58810 (TRAV1-1, TRAJ27)
CAVIYNTNAGKSTF

SEQ ID NO: 117620 - protein, 15 aa, Homo sapiens
  CDR3 for beta chain variable domain of TCR clone 58810 (TRBV7-2, TRBJ2-1)
CDSSSGLAGGNEQFF

SEQ ID NO: 117621 - protein, 13 aa, Homo sapiens
  CDR3 for alpha chain variable domain of TCR clone 58811 (TRAV17, TRAJ31)
CATDEDNNARLMF

SEQ ID NO: 117622 - protein, 14 aa, Homo sapiens
  CDR3 for beta chain variable domain of TCR clone 58811 (TRBV11-2, TRBJ2-1)
CASSPSRQGGGQFF

SEQ ID NO: 117623 - protein, 15 aa, Homo sapiens
  CDR3 for alpha chain variable domain of TCR clone 58812 (TRAV8-3, TRAJ11)
CAVGLLNSGYSTLTF

SEQ ID NO: 117624 - protein, 13 aa, Homo sapiens
  CDR3 for beta chain variable domain of TCR clone 58812 (TRBV7-3, TRBJ1-1)
CASSQDWGAEAFF

SEQ ID NO: 117625 - protein, 13 aa, Homo sapiens
  CDR3 for alpha chain variable domain of TCR clone 58813 (TRAV12-1, TRAJ33)
CGDALDSNYQLIW

SEQ ID NO: 117626 - protein, 15 aa, Homo sapiens
  CDR3 for beta chain variable domain of TCR clone 58813 (TRBV27, TRBJ2-1)
CASSNGGGSSNEQFF

SEQ ID NO: 117627 - protein, 18 aa, Homo sapiens
  CDR3 for alpha chain variable domain of TCR clone 58814 (TRAV26-2, TRAJ54)
CILRDVEVGIQGAQKLVF

SEQ ID NO: 117628 - protein, 12 aa, Homo sapiens
  CDR3 for beta chain variable domain of TCR clone 58814 (TRBV11-2, TRBJ2-2)
CASSLGGGELFF

SEQ ID NO: 117629 - protein, 15 aa, Homo sapiens
  CDR3 for alpha chain variable domain of TCR clone 58815 (TRAV20, TRAJ43)
CAVRAGKSSNNDMRF

SEQ ID NO: 117630 - protein, 14 aa, Homo sapiens
  CDR3 for beta chain variable domain of TCR clone 58815 (TRBV27, TRBJ2-1)
CASRHLGGGKEQFF

SEQ ID NO: 117631 - protein, 13 aa, Homo sapiens
  CDR3 for alpha chain variable domain of TCR clone 58816 (TRAV8-6, TRAJ49)
CAVITNTGNQFYF

SEQ ID NO: 117632 - protein, 13 aa, Homo sapiens
  CDR3 for beta chain variable domain of TCR clone 58816 (TRBV27, TRBJ1-1)
CASSLSIGTEAFF

SEQ ID NO: 117633 - protein, 16 aa, Homo sapiens
  CDR3 for alpha chain variable domain of TCR clone 58817 (TRAV14/DV4, TRAJ53)
CAMREGGGGSNYKLTF

SEQ ID NO: 117634 - protein, 18 aa, Homo sapiens
  CDR3 for beta chain variable domain of TCR clone 58817 (TRBV18, TRBJ1-3)
CASSPRGGAGPSGNTMYF

SEQ ID NO: 117635 - protein, 14 aa, Homo sapiens
  CDR3 for alpha chain variable domain of TCR clone 58818 (TRAV1-2, TRAJ29)
CAVREITSATPLVF

SEQ ID NO: 117636 - protein, 14 aa, Homo sapiens
  CDR3 for beta chain variable domain of TCR clone 58818 (TRBV3-1, TRBJ2-5)
CASSQGPDQETQYF

SEQ ID NO: 117637 - protein, 12 aa, Homo sapiens
  CDR3 for alpha chain variable domain of TCR clone 58819 (TRAV13-1, TRAJ15)
CAASQAGTALIF

SEQ ID NO: 117638 - protein, 18 aa, Homo sapiens
  CDR3 for beta chain variable domain of TCR clone 58819 (TRBV7-9, TRBJ2-3)
CASSLTINGQISTDTQYF

SEQ ID NO: 117639 - protein, 14 aa, Homo sapiens
  CDR3 for alpha chain variable domain of TCR clone 58820 (TRAV2, TRAJ6)
CAVSSSGGSYIPTF

SEQ ID NO: 117640 - protein, 14 aa, Homo sapiens
  CDR3 for beta chain variable domain of TCR clone 58820 (TRBV12-5, TRBJ2-5)
CASGSRTHQETQYF

SEQ ID NO: 117641 - protein, 14 aa, Homo sapiens
  CDR3 for alpha chain variable domain of TCR clone 58821 (TRAV12-3, TRAJ42)
CAMNYGGSQGNLIF

SEQ ID NO: 117642 - protein, 14 aa, Homo sapiens
  CDR3 for beta chain variable domain of TCR clone 58821 (TRBV12-5, TRBJ2-5)
CASGSRTHQETQYF

SEQ ID NO: 117643 - protein, 18 aa, Homo sapiens
  CDR3 for alpha chain variable domain of TCR clone 58822 (TRAV13-1, TRAJ52)
CAAKTPNAGGTSYGKLTF

SEQ ID NO: 117644 - protein, 15 aa, Homo sapiens
  CDR3 for beta chain variable domain of TCR clone 58822 (TRBV6-1, TRBJ2-3)
CASSERGGITDTQYF

SEQ ID NO: 117645 - protein, 14 aa, Homo sapiens
  CDR3 for alpha chain variable domain of TCR clone 58823 (TRAV12-2, TRAJ40)
CAVKIPSGTYKYIF

SEQ ID NO: 117646 - protein, 12 aa, Homo sapiens
  CDR3 for beta chain variable domain of TCR clone 58823 (TRBV11-2, TRBJ2-2)
CASSLPTGELFF

SEQ ID NO: 117647 - protein, 15 aa, Homo sapiens
  CDR3 for alpha chain variable domain of TCR clone 58824 (TRAV21, TRAJ32)
CAVNSYGGAINKLIF

SEQ ID NO: 117648 - protein, 18 aa, Homo sapiens
  CDR3 for beta chain variable domain of TCR clone 58824 (TRBV7-9, TRBJ2-1)
CASSTGLAEGSSYNEQFF

SEQ ID NO: 117649 - protein, 16 aa, Homo sapiens
  CDR3 for alpha chain variable domain of TCR clone 58825 (TRAV35, TRAJ28)
CAGQRYSGAGSYQLTF

SEQ ID NO: 117650 - protein, 13 aa, Homo sapiens
  CDR3 for beta chain variable domain of TCR clone 58825 (TRBV19, TRBJ1-2)
CASSQGQVYGYSF

SEQ ID NO: 117651 - protein, 16 aa, Homo sapiens
  CDR3 for alpha chain variable domain of TCR clone 58826 (TRAV3, TRAJ23)
CAVKIGICNQGGKLIF

SEQ ID NO: 117652 - protein, 17 aa, Homo sapiens
  CDR3 for beta chain variable domain of TCR clone 58826 (TRBV10-3, TRBJ2-6)
CAISESTAPSGANVLTF

SEQ ID NO: 117653 - protein, 11 aa, Homo sapiens
  CDR3 for alpha chain variable domain of TCR clone 58827 (TRAV2, TRAJ13)
CASGGYQKVTF

SEQ ID NO: 117654 - protein, 13 aa, Homo sapiens
  CDR3 for beta chain variable domain of TCR clone 58827 (TRBV5-5, TRBJ1-2)
CASSFWRGEDYTF

SEQ ID NO: 117655 - protein, 16 aa, Homo sapiens
  CDR3 for alpha chain variable domain of TCR clone 58828 (TRAV3, TRAJ10)
CAVRDMRAGGGNKLTF

SEQ ID NO: 117656 - protein, 13 aa, Homo sapiens
  CDR3 for beta chain variable domain of TCR clone 58828 (TRBV12-4, TRBJ1-1)
CASSPGTGFEAFF

SEQ ID NO: 117657 - protein, 13 aa, Homo sapiens
  CDR3 for alpha chain variable domain of TCR clone 58829 (TRAV8-3, TRAJ21)
CAVGAYNFNKFYF

SEQ ID NO: 117658 - protein, 16 aa, Homo sapiens
  CDR3 for beta chain variable domain of TCR clone 58829 (TRBV19, TRBJ2-1)
CASSRGGGSSYNEQFF

SEQ ID NO: 117659 - protein, 14 aa, Homo sapiens
  CDR3 for alpha chain variable domain of TCR clone 58830 (TRAV17, TRAJ34)
CATDSLEGTDKLIF

SEQ ID NO: 117660 - protein, 16 aa, Homo sapiens
  CDR3 for beta chain variable domain of TCR clone 58830 (TRBV6-1, TRBJ2-1)
CASISRQGSSYNEQFF

SEQ ID NO: 117661 - protein, 15 aa, Homo sapiens
  CDR3 for alpha chain variable domain of TCR clone 58831 (TRAV27, TRAJ38)
CAARRNAGNNRKLIW

SEQ ID NO: 117662 - protein, 13 aa, Homo sapiens
  CDR3 for beta chain variable domain of TCR clone 58831 (TRBV12-5, TRBJ2-3)
CASGDRLSDTQYF

SEQ ID NO: 117663 - protein, 14 aa, Homo sapiens
  CDR3 for alpha chain variable domain of TCR clone 58832 (TRAV1-2, TRAJ16)
CAVNRFSDGRKLLF

SEQ ID NO: 117664 - protein, 14 aa, Homo sapiens
  CDR3 for beta chain variable domain of TCR clone 58832 (TRBV7-2, TRBJ1-1)
CASSFLTGTTEAFF

SEQ ID NO: 117665 - protein, 13 aa, Homo sapiens
  CDR3 for alpha chain variable domain of TCR clone 58833 (TRAV12-2, TRAJ42)
CAVKRGSRGNLIF

SEQ ID NO: 117666 - protein, 12 aa, Homo sapiens
  CDR3 for beta chain variable domain of TCR clone 58833 (TRBV5-7, TRBJ1-2)
CASSLVQNGYTF

SEQ ID NO: 117667 - protein, 14 aa, Homo sapiens
  CDR3 for alpha chain variable domain of TCR clone 58834 (TRAV17, TRAJ37)
CATDGSSNTGKLIF

SEQ ID NO: 117668 - protein, 13 aa, Homo sapiens
  CDR3 for beta chain variable domain of TCR clone 58834 (TRBV11-2, TRBJ2-1)
CASSLDLVNEQFL

SEQ ID NO: 117669 - protein, 13 aa, Homo sapiens
  CDR3 for alpha chain variable domain of TCR clone 58835 (TRAV8-3, TRAJ48)
CAVVPFGNEKLTF

SEQ ID NO: 117670 - protein, 14 aa, Homo sapiens
  CDR3 for beta chain variable domain of TCR clone 58835 (TRBV28, TRBJ1-5)
CASSRTGLNQPQHF

SEQ ID NO: 117671 - protein, 16 aa, Homo sapiens
  CDR3 for alpha chain variable domain of TCR clone 58836 (TRAV22, TRAJ45)
CAVERGKRGGADGFTF

SEQ ID NO: 117672 - protein, 13 aa, Homo sapiens
  CDR3 for beta chain variable domain of TCR clone 58836 (TRBV27, TRBJ1-1)
CASSLSIGAEAFF

SEQ ID NO: 117673 - protein, 16 aa, Homo sapiens
  CDR3 for alpha chain variable domain of TCR clone 58837 (TRAV3, TRAJ37)
CAVRVRGSGNTGKLIF

SEQ ID NO: 117674 - protein, 16 aa, Homo sapiens
  CDR3 for beta chain variable domain of TCR clone 58837 (TRBV19, TRBJ2-1)
CASSKAGPSSYNEQSF

SEQ ID NO: 117675 - protein, 11 aa, Homo sapiens
  CDR3 for alpha chain variable domain of TCR clone 58838 (TRAV2, TRAJ13)
CASGGYQKVTF

SEQ ID NO: 117676 - protein, 15 aa, Homo sapiens
  CDR3 for beta chain variable domain of TCR clone 58838 (TRBV10-3, TRBJ2-3)
CAISLTSGGTDTQYF

SEQ ID NO: 117677 - protein, 13 aa, Homo sapiens
  CDR3 for alpha chain variable domain of TCR clone 58839 (TRAV12-2, TRAJ39)
CSVNNNAGNMLTF

SEQ ID NO: 117678 - protein, 13 aa, Homo sapiens
  CDR3 for beta chain variable domain of TCR clone 58839 (TRBV2, TRBJ1-5)
CATAGPGNQPQHF

SEQ ID NO: 117679 - protein, 11 aa, Homo sapiens
  CDR3 for alpha chain variable domain of TCR clone 58840 (TRAV12-3, TRAJ43)
CAMSVFNDMRF

SEQ ID NO: 117680 - protein, 13 aa, Homo sapiens
  CDR3 for beta chain variable domain of TCR clone 58840 (TRBV20-1, TRBJ1-1)
CSAPLGGGTEAFF

SEQ ID NO: 117681 - protein, 13 aa, Homo sapiens
  CDR3 for alpha chain variable domain of TCR clone 58841 (TRAV21, TRAJ20)
CAVGLRVDYKLSL

SEQ ID NO: 117682 - protein, 21 aa, Homo sapiens
  CDR3 for beta chain variable domain of TCR clone 58841 (TRBV15, TRBJ2-1)
AWGTQPCTCVPPAEVDTARFF

SEQ ID NO: 117683 - protein, 23 aa, Homo sapiens
  CDR3 for alpha chain variable domain of TCR clone 58842 (TRAV26-1, TRAJ38)
CIADNAGNNHIQNPDPAVYQLRD

SEQ ID NO: 117684 - protein, 13 aa, Homo sapiens
  CDR3 for beta chain variable domain of TCR clone 58842 (TRBV20-1, TRBJ1-1)
CSPRGGGNTEAFF

SEQ ID NO: 117685 - protein, 11 aa, Homo sapiens
  CDR3 for alpha chain variable domain of TCR clone 58843 (TRAV3, TRAJ17)
PRGAAGSKLTF

SEQ ID NO: 117686 - protein, 16 aa, Homo sapiens
  CDR3 for beta chain variable domain of TCR clone 58843 (TRBV7-6, TRBJ2-1)
CASSAPGPSSYNEQFF

SEQ ID NO: 117687 - protein, 12 aa, Homo sapiens
  CDR3 for alpha chain variable domain of TCR clone 58844 (TRAV17, TRAJ20)
CATDSNDYKLSF

SEQ ID NO: 117688 - protein, 16 aa, Homo sapiens
  CDR3 for beta chain variable domain of TCR clone 58844 (TRBV12-5, TRBJ2-5)
CASGPRTSGNQETQYF

SEQ ID NO: 117689 - protein, 12 aa, Homo sapiens
  CDR3 for alpha chain variable domain of TCR clone 58845 (TRAV8-3, TRAJ26)
CAGDNYGQNFVF

SEQ ID NO: 117690 - protein, 16 aa, Homo sapiens
  CDR3 for beta chain variable domain of TCR clone 58845 (TRBV12-5, TRBJ2-5)
CASGPRTSGNQETQYF

SEQ ID NO: 117691 - protein, 16 aa, Homo sapiens
  CDR3 for alpha chain variable domain of TCR clone 58846 (TRAV23/DV6, TRAJ9)
CAASIGGNTGGFKTIF

SEQ ID NO: 117692 - protein, 14 aa, Homo sapiens
  CDR3 for beta chain variable domain of TCR clone 58846 (TRBV4-2, TRBJ2-1)
CASGLDRAYNEQFF

SEQ ID NO: 117693 - protein, 15 aa, Homo sapiens
  CDR3 for alpha chain variable domain of TCR clone 58847 (TRAV10, TRAJ6)
CVVTPRTGGSYIPTF

SEQ ID NO: 117694 - protein, 15 aa, Homo sapiens
  CDR3 for beta chain variable domain of TCR clone 58847 (TRBV20-1, TRBJ2-7)
CSARDRVSGMDEQYF

SEQ ID NO: 117695 - protein, 15 aa, Homo sapiens
  CDR3 for alpha chain variable domain of TCR clone 58848 (TRAV21, TRAJ13)
CAVPRSFWGLLESYL

SEQ ID NO: 117696 - protein, 15 aa, Homo sapiens
  CDR3 for beta chain variable domain of TCR clone 58848 (TRBV7-9, TRBJ1-6)
CASSSPGRGNSPLHF

SEQ ID NO: 117697 - protein, 13 aa, Homo sapiens
  CDR3 for alpha chain variable domain of TCR clone 58849 (TRAV35, TRAJ48)
GRSRVFGNEKLTF

SEQ ID NO: 117698 - protein, 15 aa, Homo sapiens
  CDR3 for beta chain variable domain of TCR clone 58849 (TRBV7-9, TRBJ1-6)
CASSSPGRGNSPLHF

SEQ ID NO: 117699 - protein, 14 aa, Homo sapiens
  CDR3 for alpha chain variable domain of TCR clone 58850 (TRAV38-2/DV8, TRAJ23)
CAYRKPNQGGKLIF

SEQ ID NO: 117700 - protein, 19 aa, Homo sapiens
  CDR3 for beta chain variable domain of TCR clone 58850 (TRBV19, TRBJ2-5)
CASSIGQVTDFFLGETQYF

SEQ ID NO: 117701 - protein, 13 aa, Homo sapiens
  CDR3 for alpha chain variable domain of TCR clone 58851 (TRAV3, TRAJ41)
CAVSSNSGYALNF

SEQ ID NO: 117702 - protein, 14 aa, Homo sapiens
  CDR3 for beta chain variable domain of TCR clone 58851 (TRBV7-2, TRBJ2-7)
CASSPNTSFYEQYF

SEQ ID NO: 117703 - protein, 12 aa, Homo sapiens
  CDR3 for alpha chain variable domain of TCR clone 58852 (TRAV12-1, TRAJ9)
CVVPWAGFKTIF

SEQ ID NO: 117704 - protein, 13 aa, Homo sapiens
  CDR3 for beta chain variable domain of TCR clone 58852 (TRBV6-6, TRBJ2-7)
CQQLWGSSYEQYF

SEQ ID NO: 117705 - protein, 13 aa, Homo sapiens
  CDR3 for alpha chain variable domain of TCR clone 58853 (TRAV12-1, TRAJ49)
CVVTPFTGNQFYL

SEQ ID NO: 117706 - protein, 13 aa, Homo sapiens
  CDR3 for beta chain variable domain of TCR clone 58853 (TRBV20-1, TRBJ1-1)
CSARGGANTEAFF

SEQ ID NO: 117707 - protein, 14 aa, Homo sapiens
  CDR3 for alpha chain variable domain of TCR clone 58854 (TRAV3, TRAJ7)
CAVREEEREQQTRF

SEQ ID NO: 117708 - protein, 12 aa, Homo sapiens
  CDR3 for beta chain variable domain of TCR clone 58854 (TRBV7-8, TRBJ2-7)
CASSLGDREKYF

SEQ ID NO: 117709 - protein, 11 aa, Homo sapiens
  CDR3 for alpha chain variable domain of TCR clone 58855 (TRAV2, TRAJ33)
CAVDSNYQLIW

SEQ ID NO: 117710 - protein, 14 aa, Homo sapiens
  CDR3 for beta chain variable domain of TCR clone 58855 (TRBV19, TRBJ2-3)
CASSVGRGSDTQYF

SEQ ID NO: 117711 - protein, 16 aa, Homo sapiens
  CDR3 for alpha chain variable domain of TCR clone 58856 (TRAV38-1, TRAJ37)
CAFKGDGSSNTGKIIF

SEQ ID NO: 117712 - protein, 13 aa, Homo sapiens
  CDR3 for beta chain variable domain of TCR clone 58856 (TRBV12-4, TRBJ2-5)
CASSLFRRETQYF

SEQ ID NO: 117713 - protein, 15 aa, Homo sapiens
  CDR3 for alpha chain variable domain of TCR clone 58857 (TRAV3, TRAJ22)
CAVRDRGGSARQLTF

SEQ ID NO: 117714 - protein, 13 aa, Homo sapiens
  CDR3 for beta chain variable domain of TCR clone 58857 (TRBV13, TRBJ2-5)
CASSPEVGETQYF

SEQ ID NO: 117715 - protein, 18 aa, Homo sapiens
  CDR3 for alpha chain variable domain of TCR clone 58858 (TRAV12-3, TRAJ52)
CAMSRTNAGGTSYGKLTF

SEQ ID NO: 117716 - protein, 14 aa, Homo sapiens
  CDR3 for beta chain variable domain of TCR clone 58858 (TRBV7-2, TRBJ2-7)
CASSPKTSFYEQYF

SEQ ID NO: 117717 - protein, 15 aa, Homo sapiens
  CDR3 for alpha chain variable domain of TCR clone 58859 (TRAV17, TRAJ28)
CATVDSGAGGYQLTF

SEQ ID NO: 117718 - protein, 13 aa, Homo sapiens
  CDR3 for beta chain variable domain of TCR clone 58859 (TRBV5-4, TRBJ2-5)
CASSRQEGETQYF

SEQ ID NO: 117719 - protein, 13 aa, Homo sapiens
  CDR3 for alpha chain variable domain of TCR clone 58860 (TRAV3, TRAJ21)
CAVREPDFNKFYF

SEQ ID NO: 117720 - protein, 15 aa, Homo sapiens
  CDR3 for beta chain variable domain of TCR clone 58860 (TRBV2, TRBJ2-1)
CASSEQAGGYNEQFF

SEQ ID NO: 117721 - protein, 13 aa, Homo sapiens
  CDR3 for alpha chain variable domain of TCR clone 58861 (TRAV21, TRAJ37)
CAVSSGNTGKLIF

SEQ ID NO: 117722 - protein, 17 aa, Homo sapiens
  CDR3 for beta chain variable domain of TCR clone 58861 (TRBV5-1, TRBJ2-5)
CSSSLLGLAANQETQYF

SEQ ID NO: 117723 - protein, 15 aa, Homo sapiens
  CDR3 for alpha chain variable domain of TCR clone 58862 (TRAV26-1, TRAJ29)
CIVRVEGSGNTPLVF

SEQ ID NO: 117724 - protein, 12 aa, Homo sapiens
  CDR3 for beta chain variable domain of TCR clone 58862 (TRBV28, TRBJ2-3)
CASSLYRDTQYF

SEQ ID NO: 117725 - protein, 19 aa, Homo sapiens
  CDR3 for alpha chain variable domain of TCR clone 58863 (TRAV13-1, TRAJ52)
CAASPYQNAVGTSYGKLTF

SEQ ID NO: 117726 - protein, 14 aa, Homo sapiens
  CDR3 for beta chain variable domain of TCR clone 58863 (TRBV19, TRBJ2-7)
CASTVQGRPYEQYF

SEQ ID NO: 117727 - protein, 15 aa, Homo sapiens
  CDR3 for alpha chain variable domain of TCR clone 58864 (TRAV3, TRAJ9)
CAVRDSNTGGFKTIF

SEQ ID NO: 117728 - protein, 16 aa, Homo sapiens
  CDR3 for beta chain variable domain of TCR clone 58864 (TRBV15, TRBJ2-5)
CATSPTTGRGMETQYF

SEQ ID NO: 117729 - protein, 12 aa, Homo sapiens
  CDR3 for alpha chain variable domain of TCR clone 58865 (TRAV13-2, TRAJ23)
CAERYRGGKLIF

SEQ ID NO: 117730 - protein, 16 aa, Homo sapiens
  CDR3 for beta chain variable domain of TCR clone 58865 (TRBV20-1, TRBJ1-4)
CSAPGQGLLTNEKLFF

SEQ ID NO: 117731 - protein, 11 aa, Homo sapiens
  CDR3 for alpha chain variable domain of TCR clone 58866 (TRAV2, TRAJ21)
CAVFNFNKFYF

SEQ ID NO: 117732 - protein, 14 aa, Homo sapiens
  CDR3 for beta chain variable domain of TCR clone 58866 (TRBV15, TRBJ2-3)
CATRIGTSTDTQYF

SEQ ID NO: 117733 - protein, 13 aa, Homo sapiens
  CDR3 for alpha chain variable domain of TCR clone 58867 (TRAV12-1, TRAJ22)
CVASGGSARQLTF

SEQ ID NO: 117734 - protein, 17 aa, Homo sapiens
  CDR3 for beta chain variable domain of TCR clone 58867 (TRBV7-8, TRBJ2-6)
CASSAGTGGAGANVLTF

SEQ ID NO: 117735 - protein, 12 aa, Homo sapiens
  CDR3 for alpha chain variable domain of TCR clone 58868 (TRAV29/DV5, TRAJ15)
CASNQAGTALIF

SEQ ID NO: 117736 - protein, 13 aa, Homo sapiens
  CDR3 for beta chain variable domain of TCR clone 58868 (TRBV7-3, TRBJ1-1)
CASSQDWGAEAFF

SEQ ID NO: 117737 - protein, 14 aa, Homo sapiens
  CDR3 for alpha chain variable domain of TCR clone 58869 (TRAV1-2, TRAJ8)
CAVREDTGFQKLVF

SEQ ID NO: 117738 - protein, 16 aa, Homo sapiens
  CDR3 for beta chain variable domain of TCR clone 58869 (TRBV2, TRBJ2-1)
CASSVGGSLSYNEQFF

SEQ ID NO: 117739 - protein, 12 aa, Homo sapiens
  CDR3 for alpha chain variable domain of TCR clone 58870 (TRAV1-2, TRAJ29)
CAVPSGNTPLVL

SEQ ID NO: 117740 - protein, 12 aa, Homo sapiens
  CDR3 for beta chain variable domain of TCR clone 58870 (TRBV7-9, TRBJ2-7)
CASSFGSYEQYF

SEQ ID NO: 117741 - protein, 12 aa, Homo sapiens
  CDR3 for alpha chain variable domain of TCR clone 58871 (TRAV13-1, TRAJ21)
CAAKEGFNKFYF

SEQ ID NO: 117742 - protein, 13 aa, Homo sapiens
  CDR3 for beta chain variable domain of TCR clone 58871 (TRBV7-3, TRBJ1-1)
CASSQDWGAEVFF

SEQ ID NO: 117743 - protein, 14 aa, Homo sapiens
  CDR3 for alpha chain variable domain of TCR clone 58872 (TRAV16, TRAJ32)
CALKSGGATNKLIF

SEQ ID NO: 117744 - protein, 17 aa, Homo sapiens
  CDR3 for beta chain variable domain of TCR clone 58872 (TRBV11-2, TRBJ2-1)
CASSLYPPGVEYNEQFF

SEQ ID NO: 117745 - protein, 18 aa, Homo sapiens
  CDR3 for alpha chain variable domain of TCR clone 58873 (TRAV12-3, TRAJ52)
CAMSVGGAGGTSDGKLTF

SEQ ID NO: 117746 - protein, 14 aa, Homo sapiens
  CDR3 for beta chain variable domain of TCR clone 58873 (TRBV7-2, TRBJ2-7)
CASRSQGAAYEQYF

SEQ ID NO: 117747 - protein, 10 aa, Homo sapiens
  CDR3 for alpha chain variable domain of TCR clone 58874 (TRAV27, TRAJ30)
CAGAQDKIIF

SEQ ID NO: 117748 - protein, 17 aa, Homo sapiens
  CDR3 for beta chain variable domain of TCR clone 58874 (TRBV19, TRBJ2-6)
CASSTGQVFSGANVLTF

SEQ ID NO: 117749 - protein, 13 aa, Homo sapiens
  CDR3 for alpha chain variable domain of TCR clone 58875 (TRAV8-3, TRAJ36)
CAVGATGANNLFF

SEQ ID NO: 117750 - protein, 15 aa, Homo sapiens
  CDR3 for beta chain variable domain of TCR clone 58875 (TRBV7-2, TRBJ1-2)
CASSPRVGWNYGYTF

SEQ ID NO: 117751 - protein, 12 aa, Homo sapiens
  CDR3 for alpha chain variable domain of TCR clone 58876 (TRAV1-2, TRAJ33)
CAALDSDYQLIW

SEQ ID NO: 117752 - protein, 17 aa, Homo sapiens
  CDR3 for beta chain variable domain of TCR clone 58876 (TRBV4-1, TRBJ2-2)
CASSHPHDGSKVGELFF

SEQ ID NO: 117753 - protein, 15 aa, Homo sapiens
  CDR3 for alpha chain variable domain of TCR clone 58877 (TRAV17, TRAJ23)
CATDAEDNQGGKLIC

SEQ ID NO: 117754 - protein, 12 aa, Homo sapiens
  CDR3 for beta chain variable domain of TCR clone 58877 (TRBV2, TRBJ2-1)
CAKREGYNEQFF

SEQ ID NO: 117755 - protein, 12 aa, Homo sapiens
  CDR3 for alpha chain variable domain of TCR clone 58878 (TRAV13-1, TRAJ21)
CAAKEGFNNFYF

SEQ ID NO: 117756 - protein, 17 aa, Homo sapiens
  CDR3 for beta chain variable domain of TCR clone 58878 (TRBV20-1, TRBJ2-1)
CSASSSGLAGSYNEQFF

SEQ ID NO: 117757 - protein, 16 aa, Homo sapiens
  CDR3 for alpha chain variable domain of TCR clone 58879 (TRAV30, TRAJ24)
CGTEIVDADSWGKFQF

SEQ ID NO: 117758 - protein, 16 aa, Homo sapiens
  CDR3 for beta chain variable domain of TCR clone 58879 (TRBV28, TRBJ2-3)
CASSLFTGVSTDTQYF

SEQ ID NO: 117759 - protein, 15 aa, Homo sapiens
  CDR3 for alpha chain variable domain of TCR clone 58880 (TRAV21, TRAJ53)
CATLNSGGSNYKLTF

SEQ ID NO: 117760 - protein, 16 aa, Homo sapiens
  CDR3 for beta chain variable domain of TCR clone 58880 (TRBV10-3, TRBJ2-1)
CAISGVGDGGGGEQFF

SEQ ID NO: 117761 - protein, 12 aa, Homo sapiens
  CDR3 for alpha chain variable domain of TCR clone 58881 (TRAV1-2, TRAJ24)
CAVGGSWGKLQF

SEQ ID NO: 117762 - protein, 15 aa, Homo sapiens
  CDR3 for beta chain variable domain of TCR clone 58881 (TRBV6-1, TRBJ2-7)
CASSEGVGNPYEQYF

SEQ ID NO: 117763 - protein, 11 aa, Homo sapiens
  CDR3 for alpha chain variable domain of TCR clone 58882 (TRAV12-3, TRAJ13)
CAMSVSNDMRF

SEQ ID NO: 117764 - protein, 14 aa, Homo sapiens
  CDR3 for beta chain variable domain of TCR clone 58882 (TRBV4-1, TRBJ1-6)
CASSPGSDSSPLHF

SEQ ID NO: 117765 - protein, 15 aa, Homo sapiens
  CDR3 for alpha chain variable domain of TCR clone 58883 (TRAV27, TRAJ53)
CRAINSGGSNYKLTF

SEQ ID NO: 117766 - protein, 14 aa, Homo sapiens
  CDR3 for beta chain variable domain of TCR clone 58883 (TRBV7-3, TRBJ2-1)
CASSLAGGTNEQLF

SEQ ID NO: 117767 - protein, 19 aa, Homo sapiens
  CDR3 for alpha chain variable domain of TCR clone 58884 (TRAV1-2, TRAJ26)
CLLPLCCERPDNYGKNFVF

SEQ ID NO: 117768 - protein, 15 aa, Homo sapiens
  CDR3 for beta chain variable domain of TCR clone 58884 (TRBV9, TRBJ1-6)
CASSVAGTGDSPLHF

SEQ ID NO: 117769 - protein, 16 aa, Homo sapiens
  CDR3 for alpha chain variable domain of TCR clone 58885 (TRAV8-3, TRAJ13)
CAVGAYPSGGYQKVTF

SEQ ID NO: 117770 - protein, 15 aa, Homo sapiens
  CDR3 for beta chain variable domain of TCR clone 58885 (TRBV19, TRBJ1-5)
CGSSIVWADNQPQHF

SEQ ID NO: 117771 - protein, 11 aa, Homo sapiens
  CDR3 for alpha chain variable domain of TCR clone 58886 (TRAV13-1, TRAJ39)
CASHAGDMLTF

SEQ ID NO: 117772 - protein, 14 aa, Homo sapiens
  CDR3 for beta chain variable domain of TCR clone 58886 (TRBV11-2, TRBJ1-5)
CASSLDRGRQPQHF

SEQ ID NO: 117773 - protein, 18 aa, Homo sapiens
  CDR3 for alpha chain variable domain of TCR clone 58887 (TRAV1-2, TRAJ18)
CAVRDMGDRGSTLGRLYF

SEQ ID NO: 117774 - protein, 16 aa, Homo sapiens
  CDR3 for beta chain variable domain of TCR clone 58887 (TRBV29-1, TRBJ1-2)
CSVGANRDIANYGYTF

SEQ ID NO: 117775 - protein, 14 aa, Homo sapiens
  CDR3 for alpha chain variable domain of TCR clone 58888 (TRAV3, TRAJ33)
CAVRDMGSNYQLIW

SEQ ID NO: 117776 - protein, 17 aa, Homo sapiens
  CDR3 for beta chain variable domain of TCR clone 58888 (TRBV19, TRBJ2-1)
CASSIWSAQPTTMSSSS

SEQ ID NO: 117777 - protein, 11 aa, Homo sapiens
  CDR3 for alpha chain variable domain of TCR clone 58889 (TRAV2, TRAJ33)
CAVDSNYQLIW

SEQ ID NO: 117778 - protein, 13 aa, Homo sapiens
  CDR3 for beta chain variable domain of TCR clone 58889 (TRBV19, TRBJ2-1)
CASMEFRSNEQFF

SEQ ID NO: 117779 - protein, 12 aa, Homo sapiens
  CDR3 for alpha chain variable domain of TCR clone 58890 (TRAV5, TRAJ37)
CAETPHAGKLIF

SEQ ID NO: 117780 - protein, 17 aa, Homo sapiens
  CDR3 for beta chain variable domain of TCR clone 58890 (TRBV29-1, TRBJ2-3)
CSVNAFRASGGVDTQYF

SEQ ID NO: 117781 - protein, 11 aa, Homo sapiens
  CDR3 for alpha chain variable domain of TCR clone 58891 (TRAV17, TRAJ39)
CATGAGNMLTF

SEQ ID NO: 117782 - protein, 16 aa, Homo sapiens
  CDR3 for beta chain variable domain of TCR clone 58891 (TRBV5-1, TRBJ2-1)
CASSFGDSGSYNEQFF

SEQ ID NO: 117783 - protein, 15 aa, Homo sapiens
  CDR3 for alpha chain variable domain of TCR clone 58892 (TRAV25, TRAJ53)
CAATGGGGSSYKLTF

SEQ ID NO: 117784 - protein, 19 aa, Homo sapiens
  CDR3 for beta chain variable domain of TCR clone 58892 (TRBV7-2, TRBJ2-3)
CASSFLSRNWGGGTDTQYF

SEQ ID NO: 117785 - protein, 16 aa, Homo sapiens
  CDR3 for alpha chain variable domain of TCR clone 58893 (TRAV23/DV6, TRAJ9)
CAASIGGSTGGFKTIF

SEQ ID NO: 117786 - protein, 14 aa, Homo sapiens
  CDR3 for beta chain variable domain of TCR clone 58893 (TRBV9, TRBJ2-7)
CASSVGVGSYEQYF

SEQ ID NO: 117787 - protein, 12 aa, Homo sapiens
  CDR3 for alpha chain variable domain of TCR clone 58894 (TRAV12-2, TRAJ10)
WGVTGGGNKLTF

SEQ ID NO: 117788 - protein, 14 aa, Homo sapiens
  CDR3 for beta chain variable domain of TCR clone 58894 (TRBV7-7, TRBJ2-2)
CASSTRASGGELFF

SEQ ID NO: 117789 - protein, 15 aa, Homo sapiens
  CDR3 for alpha chain variable domain of TCR clone 58895 (TRAV3, TRAJ22)
CAVRDRGGSARQLTF

SEQ ID NO: 117790 - protein, 17 aa, Homo sapiens
  CDR3 for beta chain variable domain of TCR clone 58895 (TRBV20-1, TRBJ2-2)
CSASGSGQGGLTGELFF

SEQ ID NO: 117791 - protein, 14 aa, Homo sapiens
  CDR3 for alpha chain variable domain of TCR clone 58896 (TRAV13-1, TRAJ44)
CAAKATGTASKLTF

SEQ ID NO: 117792 - protein, 13 aa, Homo sapiens
  CDR3 for beta chain variable domain of TCR clone 58896 (TRBV12-4, TRBJ1-2)
CASSSGLTVISTF

SEQ ID NO: 117793 - protein, 15 aa, Homo sapiens
  CDR3 for alpha chain variable domain of TCR clone 58897 (TRAV17, TRAJ6)
CATDLPSGGRYIPTF

SEQ ID NO: 117794 - protein, 16 aa, Homo sapiens
  CDR3 for beta chain variable domain of TCR clone 58897 (TRBV4-1, TRBJ2-7)
CASSQDPTGYSYEQYF

SEQ ID NO: 117795 - protein, 13 aa, Homo sapiens
  CDR3 for alpha chain variable domain of TCR clone 58898 (TRAV2, TRAJ15)
CAVASQAGTALIF

SEQ ID NO: 117796 - protein, 15 aa, Homo sapiens
  CDR3 for beta chain variable domain of TCR clone 58898 (TRBV7-9, TRBJ1-6)
CASSSPGRGNSPLHF

SEQ ID NO: 117797 - protein, 13 aa, Homo sapiens
  CDR3 for alpha chain variable domain of TCR clone 58899 (TRAV1-2, TRAJ9)
CAALNTGGFKTIF

SEQ ID NO: 117798 - protein, 13 aa, Homo sapiens
  CDR3 for beta chain variable domain of TCR clone 58899 (TRBV12-4, TRBJ1-1)
CASSPGTGFEAFF

SEQ ID NO: 117799 - protein, 13 aa, Homo sapiens
  CDR3 for alpha chain variable domain of TCR clone 58900 (TRAV16, TRAJ22)
SAMLAGSARQLTF

SEQ ID NO: 117800 - protein, 18 aa, Homo sapiens
  CDR3 for beta chain variable domain of TCR clone 58900 (TRBV7-2, TRBJ2-3)
CAWSLETSRGRKADTQYF

SEQ ID NO: 117801 - protein, 14 aa, Homo sapiens
  CDR3 for alpha chain variable domain of TCR clone 58901 (TRAV8-4, TRAJ9)
CAVVGNTGGFKTIF

SEQ ID NO: 117802 - protein, 15 aa, Homo sapiens
  CDR3 for beta chain variable domain of TCR clone 58901 (TRBV10-2, TRBJ2-3)
CASTSTSGGTDTQYF

SEQ ID NO: 117803 - protein, 13 aa, Homo sapiens
  CDR3 for alpha chain variable domain of TCR clone 58902 (TRAV17, TRAJ26)
CATVDNYGQNFVF

SEQ ID NO: 117804 - protein, 14 aa, Homo sapiens
  CDR3 for beta chain variable domain of TCR clone 58902 (TRBV6-1, TRBJ1-3)
CASVQGGGGNTVYF

SEQ ID NO: 117805 - protein, 13 aa, Homo sapiens
  CDR3 for alpha chain variable domain of TCR clone 58903 (TRAV36/DV7, TRAJ37)
CAVFSSNTGKLIF

SEQ ID NO: 117806 - protein, 15 aa, Homo sapiens
  CDR3 for beta chain variable domain of TCR clone 58903 (TRBV4-1, TRBJ1-4)
CASSDTGGTNEKLFF

SEQ ID NO: 117807 - protein, 15 aa, Homo sapiens
  CDR3 for alpha chain variable domain of TCR clone 58904 (TRAV4, TRAJ39)
CLVGPNNNAGNMLTF

SEQ ID NO: 117808 - protein, 13 aa, Homo sapiens
  CDR3 for beta chain variable domain of TCR clone 58904 (TRBV11-2, TRBJ2-5)
CASSSTGEETQFF

SEQ ID NO: 117809 - protein, 13 aa, Homo sapiens
  CDR3 for alpha chain variable domain of TCR clone 58905 (TRAV27, TRAJ29)
CAGAHSGNTPLVF

SEQ ID NO: 117810 - protein, 14 aa, Homo sapiens
  CDR3 for beta chain variable domain of TCR clone 58905 (TRBV7-9, TRBJ2-7)
CASSIGQGAGEQYL

SEQ ID NO: 117811 - protein, 15 aa, Homo sapiens
  CDR3 for alpha chain variable domain of TCR clone 58906 (TRAV30, TRAJ57)
CGTAIPQGGSEKLVF

SEQ ID NO: 117812 - protein, 17 aa, Homo sapiens
  CDR3 for beta chain variable domain of TCR clone 58906 (TRBV11-2, TRBJ2-1)
CASSLHPPGVEYNEQFF

SEQ ID NO: 117813 - protein, 14 aa, Homo sapiens
  CDR3 for alpha chain variable domain of TCR clone 58907 (TRAV39, TRAJ17)
CAVDPLMAGNKLTF

SEQ ID NO: 117814 - protein, 12 aa, Homo sapiens
  CDR3 for beta chain variable domain of TCR clone 58907 (TRBV11-2, TRBJ2-2)
CASSLGGGELFF

SEQ ID NO: 117815 - protein, 13 aa, Homo sapiens
  CDR3 for alpha chain variable domain of TCR clone 58908 (TRAV17, TRAJ9)
CATDYTGGFKTLF

SEQ ID NO: 117816 - protein, 16 aa, Homo sapiens
  CDR3 for beta chain variable domain of TCR clone 58908 (TRBV7-7, TRBJ2-1)
CASSLASGTSYNEQFF

SEQ ID NO: 117817 - protein, 16 aa, Homo sapiens
  CDR3 for alpha chain variable domain of TCR clone 58909 (TRAV23/DV6, TRAJ9)
CAASIGGNTGGFKTIF

SEQ ID NO: 117818 - protein, 14 aa, Homo sapiens
  CDR3 for beta chain variable domain of TCR clone 58909 (TRBV9, TRBJ2-7)
CASSVGVASYEQYF

SEQ ID NO: 117819 - protein, 13 aa, Homo sapiens
  CDR3 for alpha chain variable domain of TCR clone 58910 (TRAV12-2, TRAJ20)
CAVYPSNDYKLSF

SEQ ID NO: 117820 - protein, 15 aa, Homo sapiens
  CDR3 for beta chain variable domain of TCR clone 58910 (TRBV27, TRBJ2-5)
CASSLYPRGGETQFF

SEQ ID NO: 117821 - protein, 14 aa, Homo sapiens
  CDR3 for alpha chain variable domain of TCR clone 58911 (TRAV21, TRAJ47)
CAVRPLEYGNKLVF

SEQ ID NO: 117822 - protein, 14 aa, Homo sapiens
  CDR3 for beta chain variable domain of TCR clone 58911 (TRBV7-2, TRBJ2-7)
CASRSQGAAYEQYF

SEQ ID NO: 117823 - protein, 13 aa, Homo sapiens
  CDR3 for alpha chain variable domain of TCR clone 58912 (TRAV27, TRAJ49)
CAPRPYTGNQFYF

SEQ ID NO: 117824 - protein, 16 aa, Homo sapiens
  CDR3 for beta chain variable domain of TCR clone 58912 (TRBV4-1, TRBJ1-2)
CASSQDAVQVLYGYTF

SEQ ID NO: 117825 - protein, 12 aa, Homo sapiens
  CDR3 for alpha chain variable domain of TCR clone 58913 (TRAV12-3, TRAJ17)
CAMTLTGNKLTF

SEQ ID NO: 117826 - protein, 14 aa, Homo sapiens
  CDR3 for beta chain variable domain of TCR clone 58913 (TRBV4-1, TRBJ2-7)
CASSQDREHGEQYF

SEQ ID NO: 117827 - protein, 15 aa, Homo sapiens
  CDR3 for alpha chain variable domain of TCR clone 58914 (TRAV8-3, TRAJ41)
CAVGSNSNSGHALNF

SEQ ID NO: 117828 - protein, 17 aa, Homo sapiens
  CDR3 for beta chain variable domain of TCR clone 58914 (TRBV25-1, TRBJ2-1)
CASSAYGQGRGVYEQFF

SEQ ID NO: 117829 - protein, 14 aa, Homo sapiens
  CDR3 for alpha chain variable domain of TCR clone 58915 (TRAV12-2, TRAJ45)
CAVNIGGGADGLTF

SEQ ID NO: 117830 - protein, 13 aa, Homo sapiens
  CDR3 for beta chain variable domain of TCR clone 58915 (TRBV19, TRBJ2-2)
CASSIWSTGELFV

SEQ ID NO: 117831 - protein, 17 aa, Homo sapiens
  CDR3 for alpha chain variable domain of TCR clone 58916 (TRAV3, TRAJ42)
CAVRDRDYGGSQGNLIF

SEQ ID NO: 117832 - protein, 15 aa, Homo sapiens
  CDR3 for beta chain variable domain of TCR clone 58916 (TRBV6-6, TRBJ2-7)
CANSYSYGGSYEQYF

SEQ ID NO: 117833 - protein, 14 aa, Homo sapiens
  CDR3 for alpha chain variable domain of TCR clone 58917 (TRAV1-1, TRAJ27)
CAVIYNTNAGKSTF

SEQ ID NO: 117834 - protein, 12 aa, Homo sapiens
  CDR3 for beta chain variable domain of TCR clone 58917 (TRBV11-2, TRBJ2-1)
RASSPGNNEQFF

SEQ ID NO: 117835 - protein, 11 aa, Homo sapiens
  CDR3 for alpha chain variable domain of TCR clone 58918 (TRAV2, TRAJ13)
CASVGYQKVTF

SEQ ID NO: 117836 - protein, 14 aa, Homo sapiens
  CDR3 for beta chain variable domain of TCR clone 58918 (TRBV7-3, TRBJ2-7)
CASSYDQDYYEQYF

SEQ ID NO: 117837 - protein, 14 aa, Homo sapiens
  CDR3 for alpha chain variable domain of TCR clone 58919 (TRAV26-1, TRAJ38)
CIADNAGNNRKLIW

SEQ ID NO: 117838 - protein, 14 aa, Homo sapiens
  CDR3 for beta chain variable domain of TCR clone 58919 (TRBV7-8, TRBJ2-5)
CASSATGGQETQYF

SEQ ID NO: 117839 - protein, 12 aa, Homo sapiens
  CDR3 for alpha chain variable domain of TCR clone 58920 (TRAV13-1, TRAJ49)
CAAPNTGNQFYF

SEQ ID NO: 117840 - protein, 19 aa, Homo sapiens
  CDR3 for beta chain variable domain of TCR clone 58920 (TRBV25-1, TRBJ2-7)
CASSDARVVFHPTSSTSGR

SEQ ID NO: 117841 - protein, 17 aa, Homo sapiens
  CDR3 for alpha chain variable domain of TCR clone 58921 (TRAV8-6, TRAJ58)
CAVSSWVGETSGSRLTF

SEQ ID NO: 117842 - protein, 13 aa, Homo sapiens
  CDR3 for beta chain variable domain of TCR clone 58921 (TRBV7-3, TRBJ1-1)
CASSQDWGAEAFF

SEQ ID NO: 117843 - protein, 17 aa, Homo sapiens
  CDR3 for alpha chain variable domain of TCR clone 58922 (TRAV8-6, TRAJ58)
CAVSSWVGETSGSRLTF

SEQ ID NO: 117844 - protein, 14 aa, Homo sapiens
  CDR3 for beta chain variable domain of TCR clone 58922 (TRBV19, TRBJ2-1)
CASPTFVLSGEQFI

SEQ ID NO: 117845 - protein, 11 aa, Homo sapiens
  CDR3 for alpha chain variable domain of TCR clone 58923 (TRAV16, TRAJ33)
CALHSKYQLIW

SEQ ID NO: 117846 - protein, 15 aa, Homo sapiens
  CDR3 for beta chain variable domain of TCR clone 58923 (TRBV4-1, TRBJ2-7)
CASSQQGQGFDEQYF

SEQ ID NO: 117847 - protein, 11 aa, Homo sapiens
  CDR3 for alpha chain variable domain of TCR clone 58924 (TRAV2, TRAJ13)
CASGGYQKVTL

SEQ ID NO: 117848 - protein, 14 aa, Homo sapiens
  CDR3 for beta chain variable domain of TCR clone 58924 (TRBV7-3, TRBJ2-1)
CASSLAGGTNEQFF

SEQ ID NO: 117849 - protein, 19 aa, Homo sapiens
  CDR3 for alpha chain variable domain of TCR clone 58925 (TRAV3, TRAJ6)
CAVRDRNPSRSGGSYIPTF

SEQ ID NO: 117850 - protein, 15 aa, Homo sapiens
  CDR3 for beta chain variable domain of TCR clone 58925 (TRBV18, TRBJ2-7)
CASSPTFMDCYEQYF

SEQ ID NO: 117851 - protein, 13 aa, Homo sapiens
  CDR3 for alpha chain variable domain of TCR clone 58926 (TRAV12-1, TRAJ22)
CVVPSGSARQLTF

SEQ ID NO: 117852 - protein, 15 aa, Homo sapiens
  CDR3 for beta chain variable domain of TCR clone 58926 (TRBV11-3, TRBJ2-7)
CASSPGPAGSYEQYF

SEQ ID NO: 117853 - protein, 12 aa, Homo sapiens
  CDR3 for alpha chain variable domain of TCR clone 58927 (TRAV12-3, TRAJ17)
CAMTLTGNKLTF

SEQ ID NO: 117854 - protein, 13 aa, Homo sapiens
  CDR3 for beta chain variable domain of TCR clone 58927 (TRBV7-9, TRBJ1-2)
CASSLKQNYGYTV

SEQ ID NO: 117855 - protein, 11 aa, Homo sapiens
  CDR3 for alpha chain variable domain of TCR clone 58928 (TRAV1-2, TRAJ20)
CAVANDYKLSF

SEQ ID NO: 117856 - protein, 17 aa, Homo sapiens
  CDR3 for beta chain variable domain of TCR clone 58928 (TRBV7-3, TRBJ2-3)
CASSLMKRMRGADTQYF

SEQ ID NO: 117857 - protein, 12 aa, Homo sapiens
  CDR3 for alpha chain variable domain of TCR clone 58929 (TRAV12-1, TRAJ20)
CAVNPDDYKLSF

SEQ ID NO: 117858 - protein, 12 aa, Homo sapiens
  CDR3 for beta chain variable domain of TCR clone 58929 (TRBV11-2, TRBJ2-2)
CASSLGGGELFF

SEQ ID NO: 117859 - protein, 14 aa, Homo sapiens
  CDR3 for alpha chain variable domain of TCR clone 58930 (TRAV17, TRAJ5)
CATIALTGRRALTF

SEQ ID NO: 117860 - protein, 14 aa, Homo sapiens
  CDR3 for beta chain variable domain of TCR clone 58930 (TRBV28, TRBJ2-7)
CASSPYGMAYEQYF

SEQ ID NO: 117861 - protein, 14 aa, Homo sapiens
  CDR3 for alpha chain variable domain of TCR clone 58931 (TRAV8-4, TRAJ9)
CAVRINTGGFKTIF

SEQ ID NO: 117862 - protein, 15 aa, Homo sapiens
  CDR3 for beta chain variable domain of TCR clone 58931 (TRBV10-2, TRBJ2-6)
CASSEQGTGANVLAF

SEQ ID NO: 117863 - protein, 14 aa, Homo sapiens
  CDR3 for alpha chain variable domain of TCR clone 58932 (TRAV29/DV5, TRAJ45)
CAASFRGGADGLTF

SEQ ID NO: 117864 - protein, 13 aa, Homo sapiens
  CDR3 for beta chain variable domain of TCR clone 58932 (TRBV7-9, TRBJ1-2)
CASSLKQNYGYTF

SEQ ID NO: 117865 - protein, 12 aa, Homo sapiens
  CDR3 for alpha chain variable domain of TCR clone 58933 (TRAV12-1, TRAJ40)
CVVYSGTYKYIF

SEQ ID NO: 117866 - protein, 11 aa, Homo sapiens
  CDR3 for beta chain variable domain of TCR clone 58933 (TRBV11-2, TRBJ1-1)
CASSINTEAFF

SEQ ID NO: 117867 - protein, 12 aa, Homo sapiens
  CDR3 for alpha chain variable domain of TCR clone 58934 (TRAV21, TRAJ49)
CAANDGGNQFYF

SEQ ID NO: 117868 - protein, 14 aa, Homo sapiens
  CDR3 for beta chain variable domain of TCR clone 58934 (TRBV18, TRBJ2-7)
CAGSPRGGSYEQYF

SEQ ID NO: 117869 - protein, 14 aa, Homo sapiens
  CDR3 for alpha chain variable domain of TCR clone 58935 (TRAV8-4, TRAJ43)
CAVSDPRNNNDMRF

SEQ ID NO: 117870 - protein, 13 aa, Homo sapiens
  CDR3 for beta chain variable domain of TCR clone 58935 (TRBV7-9, TRBJ1-2)
CASSLKQNYGYTF

SEQ ID NO: 117871 - protein, 13 aa, Homo sapiens
  CDR3 for alpha chain variable domain of TCR clone 58936 (TRAV1-2, TRAJ9)
CAVLNTGGFKTLF

SEQ ID NO: 117872 - protein, 14 aa, Homo sapiens
  CDR3 for beta chain variable domain of TCR clone 58936 (TRBV20-1, TRBJ2-3)
CSARGGTSTDTQYF

SEQ ID NO: 117873 - protein, 12 aa, Homo sapiens
  CDR3 for alpha chain variable domain of TCR clone 58937 (TRAV12-2, TRAJ10)
RGVTGGGNKLTF

SEQ ID NO: 117874 - protein, 13 aa, Homo sapiens
  CDR3 for beta chain variable domain of TCR clone 58937 (TRBV6-1, TRBJ1-1)
CASSRQGNTEAFF

SEQ ID NO: 117875 - protein, 11 aa, Homo sapiens
  CDR3 for alpha chain variable domain of TCR clone 58938 (TRAV3, TRAJ13)
CAVTSYQKVTF

SEQ ID NO: 117876 - protein, 13 aa, Homo sapiens
  CDR3 for beta chain variable domain of TCR clone 58938 (TRBV20-1, TRBJ1-1)
CSAGTVGNTEAFF

SEQ ID NO: 117877 - protein, 15 aa, Homo sapiens
  CDR3 for alpha chain variable domain of TCR clone 58939 (TRAV19, TRAJ9)
CALSEARTGGFKTIF

SEQ ID NO: 117878 - protein, 17 aa, Homo sapiens
  CDR3 for beta chain variable domain of TCR clone 58939 (TRBV28, TRBJ2-5)
CASSTPEGDALQETRYF

SEQ ID NO: 117879 - protein, 15 aa, Homo sapiens
  CDR3 for alpha chain variable domain of TCR clone 58940 (TRAV3, TRAJ22)
CAVRDRGGSAGQLTF

SEQ ID NO: 117880 - protein, 13 aa, Homo sapiens
  CDR3 for beta chain variable domain of TCR clone 58940 (TRBV20-1, TRBJ1-1)
CSARVGGNTEAFF

SEQ ID NO: 117881 - protein, 18 aa, Homo sapiens
  CDR3 for alpha chain variable domain of TCR clone 58941 (TRAV21, TRAJ52)
CAVRPSPAGGTSYGKLTF

SEQ ID NO: 117882 - protein, 17 aa, Homo sapiens
  CDR3 for beta chain variable domain of TCR clone 58941 (TRBV7-9, TRBJ1-4)
CASSSGQLGGRSEKLFF

SEQ ID NO: 117883 - protein, 15 aa, Homo sapiens
  CDR3 for alpha chain variable domain of TCR clone 58942 (TRAV2, TRAJ15)
CAVEDRGQAGTALIF

SEQ ID NO: 117884 - protein, 14 aa, Homo sapiens
  CDR3 for beta chain variable domain of TCR clone 58942 (TRBV7-7, TRBJ2-2)
CASSRDRSTGELFF

SEQ ID NO: 117885 - protein, 14 aa, Homo sapiens
  CDR3 for alpha chain variable domain of TCR clone 58943 (TRAV2, TRAJ9)
CAVEDRSGAFKTIF

SEQ ID NO: 117886 - protein, 13 aa, Homo sapiens
  CDR3 for beta chain variable domain of TCR clone 58943 (TRBV12-4, TRBJ1-5)
CASSPDRAQPQHF

SEQ ID NO: 117887 - protein, 14 aa, Homo sapiens
  CDR3 for alpha chain variable domain of TCR clone 58944 (TRAV6, TRAJ6)
CALPTSGGSYIPTF

SEQ ID NO: 117888 - protein, 17 aa, Homo sapiens
  CDR3 for beta chain variable domain of TCR clone 58944 (TRBV7-8, TRBJ2-6)
CASSAGTGGDGANVLTF

SEQ ID NO: 117889 - protein, 11 aa, Homo sapiens
  CDR3 for alpha chain variable domain of TCR clone 58945 (TRAV2, TRAJ33)
CAVDSNYQLIW

SEQ ID NO: 117890 - protein, 14 aa, Homo sapiens
  CDR3 for beta chain variable domain of TCR clone 58945 (TRBV11-2, TRBJ2-3)
CASSRLARADTQYF

SEQ ID NO: 117891 - protein, 12 aa, Homo sapiens
  CDR3 for alpha chain variable domain of TCR clone 58946 (TRAV12-1, TRAJ40)
YVFYSGTYKYIF

SEQ ID NO: 117892 - protein, 18 aa, Homo sapiens
  CDR3 for beta chain variable domain of TCR clone 58946 (TRBV12-4, TRBJ2-2)
CASSLVAGTRGRTGELFF

SEQ ID NO: 117893 - protein, 18 aa, Homo sapiens
  CDR3 for alpha chain variable domain of TCR clone 58947 (TRAV17, TRAJ28)
CATDPPRGSGAGGYQLTF

SEQ ID NO: 117894 - protein, 14 aa, Homo sapiens
  CDR3 for beta chain variable domain of TCR clone 58947 (TRBV13, TRBJ2-5)
CASSLDYPQETQYF

SEQ ID NO: 117895 - protein, 16 aa, Homo sapiens
  CDR3 for alpha chain variable domain of TCR clone 58948 (TRAV30, TRAJ24)
CGTEIVDADSWGKFQF

SEQ ID NO: 117896 - protein, 17 aa, Homo sapiens
  CDR3 for beta chain variable domain of TCR clone 58948 (TRBV18, TRBJ2-1)
CASSKGLSGGADNEQFF

SEQ ID NO: 117897 - protein, 16 aa, Homo sapiens
  CDR3 for alpha chain variable domain of TCR clone 58949 (TRAV12-2, TRAJ45)
CAVKRNPGGGADGLTF

SEQ ID NO: 117898 - protein, 12 aa, Homo sapiens
  CDR3 for beta chain variable domain of TCR clone 58949 (TRBV6-1, TRBJ2-5)
CASSEGRETQHF

SEQ ID NO: 117899 - protein, 15 aa, Homo sapiens
  CDR3 for alpha chain variable domain of TCR clone 58950 (TRAV26-1, TRAJ44)
CIVRANTGTASKLTF

SEQ ID NO: 117900 - protein, 15 aa, Homo sapiens
  CDR3 for beta chain variable domain of TCR clone 58950 (TRBV19, TRBJ2-7)
CASSPAGSGEALRYF

SEQ ID NO: 117901 - protein, 13 aa, Homo sapiens
  CDR3 for alpha chain variable domain of TCR clone 58951 (TRAV30, TRAJ24)
CGTVTESWGKLQF

SEQ ID NO: 117902 - protein, 15 aa, Homo sapiens
  CDR3 for beta chain variable domain of TCR clone 58951 (TRBV25-1, TRBJ1-4)
CASSPGDSTNEKLFF

SEQ ID NO: 117903 - protein, 14 aa, Homo sapiens
  CDR3 for alpha chain variable domain of TCR clone 58952 (TRAV12-2, TRAJ13)
CAVKKTGGYQEVTF

SEQ ID NO: 117904 - protein, 14 aa, Homo sapiens
  CDR3 for beta chain variable domain of TCR clone 58952 (TRBV5-5, TRBJ2-7)
CASSLGQGTYEQYF

SEQ ID NO: 117905 - protein, 13 aa, Homo sapiens
  CDR3 for alpha chain variable domain of TCR clone 58953 (TRAV12-1, TRAJ26)
CVVRRNYGQNFVF

SEQ ID NO: 117906 - protein, 14 aa, Homo sapiens
  CDR3 for beta chain variable domain of TCR clone 58953 (TRBV27, TRBJ2-2)
CASSSRLVPGELFF

SEQ ID NO: 117907 - protein, 13 aa, Homo sapiens
  CDR3 for alpha chain variable domain of TCR clone 58954 (TRAV26-1, TRAJ12)
CIVRPDSSYRLIF

SEQ ID NO: 117908 - protein, 15 aa, Homo sapiens
  CDR3 for beta chain variable domain of TCR clone 58954 (TRBV7-2, TRBJ2-1)
CASTHGTGIYNEQFF

SEQ ID NO: 117909 - protein, 18 aa, Homo sapiens
  CDR3 for alpha chain variable domain of TCR clone 58955 (TRAV29/DV5, TRAJ52)
CAAGFMGAGGTSYGKLTF

SEQ ID NO: 117910 - protein, 16 aa, Homo sapiens
  CDR3 for beta chain variable domain of TCR clone 58955 (TRBV7-3, TRBJ2-2)
CASSLKRGTLSGELFF

SEQ ID NO: 117911 - protein, 14 aa, Homo sapiens
  CDR3 for alpha chain variable domain of TCR clone 58956 (TRAV1-2, TRAJ16)
CAVNRFSDGQKLLF

SEQ ID NO: 117912 - protein, 16 aa, Homo sapiens
  CDR3 for beta chain variable domain of TCR clone 58956 (TRBV20-1, TRBJ1-4)
CSAPGQGLLTNEELFF

SEQ ID NO: 117913 - protein, 13 aa, Homo sapiens
  CDR3 for alpha chain variable domain of TCR clone 58957 (TRAV17, TRAJ16)
CAVPPRRWPEAAL

SEQ ID NO: 117914 - protein, 13 aa, Homo sapiens
  CDR3 for beta chain variable domain of TCR clone 58957 (TRBV7-9, TRBJ2-3)
CASSPGSTDTQYF

SEQ ID NO: 117915 - protein, 14 aa, Homo sapiens
  CDR3 for alpha chain variable domain of TCR clone 58958 (TRAV8-3, TRAJ4)
CAVGAAGGYNKLIF

SEQ ID NO: 117916 - protein, 15 aa, Homo sapiens
  CDR3 for beta chain variable domain of TCR clone 58958 (TRBV20-1, TRBJ2-5)
CSAPPRTGFGDTQYF

SEQ ID NO: 117917 - protein, 14 aa, Homo sapiens
  CDR3 for alpha chain variable domain of TCR clone 58959 (TRAV12-1, TRAJ12)
CVVTRMDSSYKLIF

SEQ ID NO: 117918 - protein, 13 aa, Homo sapiens
  CDR3 for beta chain variable domain of TCR clone 58959 (TRBV20-1, TRBJ1-1)
CSAKGGGNTEAFF

SEQ ID NO: 117919 - protein, 11 aa, Homo sapiens
  CDR3 for alpha chain variable domain of TCR clone 58960 (TRAV3, TRAJ49)
CAPITGNQFYF

SEQ ID NO: 117920 - protein, 12 aa, Homo sapiens
  CDR3 for beta chain variable domain of TCR clone 58960 (TRBV12-4, TRBJ1-3)
CASSFSGNTIYF

SEQ ID NO: 117921 - protein, 11 aa, Homo sapiens
  CDR3 for alpha chain variable domain of TCR clone 58961 (TRAV2, TRAJ13)
CASGGYQRVTF

SEQ ID NO: 117922 - protein, 16 aa, Homo sapiens
  CDR3 for beta chain variable domain of TCR clone 58961 (TRBV2, TRBJ2-1)
CASSVGGSLSYNEQFF

SEQ ID NO: 117923 - protein, 18 aa, Homo sapiens
  CDR3 for alpha chain variable domain of TCR clone 58962 (TRAV21, TRAJ52)
CAVRPSRAGGTSYGKLTF

SEQ ID NO: 117924 - protein, 17 aa, Homo sapiens
  CDR3 for beta chain variable domain of TCR clone 58962 (TRBV13, TRBJ2-3)
CASSLSRVAGGRNTQYF

SEQ ID NO: 117925 - protein, 19 aa, Homo sapiens
  CDR3 for alpha chain variable domain of TCR clone 58963 (TRAV1-2, TRAJ26)
CLLPLCCERPDNYGQNFVF

SEQ ID NO: 117926 - protein, 14 aa, Homo sapiens
  CDR3 for beta chain variable domain of TCR clone 58963 (TRBV9, TRBJ2-1)
CASSVALAVNEQFF

SEQ ID NO: 117927 - protein, 14 aa, Homo sapiens
  CDR3 for alpha chain variable domain of TCR clone 58964 (TRAV8-3, TRAJ7)
CAAIELYGNNRLAF

SEQ ID NO: 117928 - protein, 15 aa, Homo sapiens
  CDR3 for beta chain variable domain of TCR clone 58964 (TRBV3-1, TRBJ2-1)
CASSTGDTNYNEQLF

SEQ ID NO: 117929 - protein, 13 aa, Homo sapiens
  CDR3 for alpha chain variable domain of TCR clone 58965 (TRAV20, TRAJ37)
CAGCSSNTGKLIF

SEQ ID NO: 117930 - protein, 11 aa, Homo sapiens
  CDR3 for beta chain variable domain of TCR clone 58965 (TRBV12-4, TRBJ2-3)
CSSTATDTQYF

SEQ ID NO: 117931 - protein, 12 aa, Homo sapiens
  CDR3 for alpha chain variable domain of TCR clone 58966 (TRAV14/DV4, TRAJ22)
CAMREGPFSISS

SEQ ID NO: 117932 - protein, 13 aa, Homo sapiens
  CDR3 for beta chain variable domain of TCR clone 58966 (TRBV4-2, TRBJ2-3)
CASSQDWQHTQYF

SEQ ID NO: 117933 - protein, 14 aa, Homo sapiens
  CDR3 for alpha chain variable domain of TCR clone 58967 (TRAV12-3, TRAJ10)
SHLPPTGGGNKLTF

SEQ ID NO: 117934 - protein, 15 aa, Homo sapiens
  CDR3 for beta chain variable domain of TCR clone 58967 (TRBV6-6, TRBJ1-5)
CASSSIQGTNQPQHF

SEQ ID NO: 117935 - protein, 13 aa, Homo sapiens
  CDR3 for alpha chain variable domain of TCR clone 58968 (TRAV12-3, TRAJ5)
CAMTYTGRRALTF

SEQ ID NO: 117936 - protein, 12 aa, Homo sapiens
  CDR3 for beta chain variable domain of TCR clone 58968 (TRBV18, TRBJ1-4)
CASSPSREKLFF

SEQ ID NO: 117937 - protein, 16 aa, Homo sapiens
  CDR3 for alpha chain variable domain of TCR clone 58969 (TRAV12-3, TRAJ53)
CAMGPGSGGSNYKLTF

SEQ ID NO: 117938 - protein, 14 aa, Homo sapiens
  CDR3 for beta chain variable domain of TCR clone 58969 (TRBV4-2, TRBJ2-1)
CASGLDRAYNEQFF

SEQ ID NO: 117939 - protein, 15 aa, Homo sapiens
  CDR3 for alpha chain variable domain of TCR clone 58970 (TRAV8-3, TRAJ41)
CAVGSNSNSGYALTF

SEQ ID NO: 117940 - protein, 17 aa, Homo sapiens
  CDR3 for beta chain variable domain of TCR clone 58970 (TRBV25-1, TRBJ2-1)
CASSAYGQGRGVYEQFF

SEQ ID NO: 117941 - protein, 15 aa, Homo sapiens
  CDR3 for alpha chain variable domain of TCR clone 58971 (TRAV12-3, TRAJ49)
CAMAVTPNTGNQFFF

SEQ ID NO: 117942 - protein, 18 aa, Homo sapiens
  CDR3 for beta chain variable domain of TCR clone 58971 (TRBV4-1, TRBJ1-5)
CASSQDPRGQGLNQPQHF

SEQ ID NO: 117943 - protein, 14 aa, Homo sapiens
  CDR3 for alpha chain variable domain of TCR clone 58972 (TRAV1-2, TRAJ8)
CAVREDTGFQKLVF

SEQ ID NO: 117944 - protein, 12 aa, Homo sapiens
  CDR3 for beta chain variable domain of TCR clone 58972 (TRBV5-4, TRBJ2-7)
CASSLEAYEQYF

SEQ ID NO: 117945 - protein, 13 aa, Homo sapiens
  CDR3 for alpha chain variable domain of TCR clone 58973 (TRAV2, TRAJ29)
CAAQDSGNTPLVF

SEQ ID NO: 117946 - protein, 14 aa, Homo sapiens
  CDR3 for beta chain variable domain of TCR clone 58973 (TRBV7-9, TRBJ2-4)
CASSLAMGGNIQYF

SEQ ID NO: 117947 - protein, 11 aa, Homo sapiens
  CDR3 for alpha chain variable domain of TCR clone 58974 (TRAV4, TRAJ31)
CLVGLHARLMF

SEQ ID NO: 117948 - protein, 16 aa, Homo sapiens
  CDR3 for beta chain variable domain of TCR clone 58974 (TRBV15, TRBJ2-6)
CATSVNGGFLANVLTF

SEQ ID NO: 117949 - protein, 11 aa, Homo sapiens
  CDR3 for alpha chain variable domain of TCR clone 58975 (TRAV1-2, TRAJ20)
CAVSNDYKLSF

SEQ ID NO: 117950 - protein, 11 aa, Homo sapiens
  CDR3 for beta chain variable domain of TCR clone 58975 (TRBV20-1, TRBJ2-7)
CSARTSYEQYF

SEQ ID NO: 117951 - protein, 14 aa, Homo sapiens
  CDR3 for alpha chain variable domain of TCR clone 58976 (TRAV3, TRAJ7)
CAVREEEREQQTRF

SEQ ID NO: 117952 - protein, 14 aa, Homo sapiens
  CDR3 for beta chain variable domain of TCR clone 58976 (TRBV7-7, TRBJ2-2)
CASSTRASGGELFF

SEQ ID NO: 117953 - protein, 12 aa, Homo sapiens
  CDR3 for alpha chain variable domain of TCR clone 58977 (TRAV12-1, TRAJ40)
CVFYSGTYKYIF

SEQ ID NO: 117954 - protein, 17 aa, Homo sapiens
  CDR3 for beta chain variable domain of TCR clone 58977 (TRBV12-4, TRBJ2-2)
CQQFGSGHPRTDRGAVF

SEQ ID NO: 117955 - protein, 12 aa, Homo sapiens
  CDR3 for alpha chain variable domain of TCR clone 58978 (TRAV21, TRAJ39)
LPYNNAGNMLTF

SEQ ID NO: 117956 - protein, 11 aa, Homo sapiens
  CDR3 for beta chain variable domain of TCR clone 58978 (TRBV19, TRBJ1-1)
CASSIGSEAFF

SEQ ID NO: 117957 - protein, 15 aa, Homo sapiens
  CDR3 for alpha chain variable domain of TCR clone 58979 (TRAV1-2, TRAJ15)
CAVDVMGSAGTALIF

SEQ ID NO: 117958 - protein, 13 aa, Homo sapiens
  CDR3 for beta chain variable domain of TCR clone 58979 (TRBV20-1, TRBJ1-1)
CSAFDRKNTEAFF

SEQ ID NO: 117959 - protein, 13 aa, Homo sapiens
  CDR3 for alpha chain variable domain of TCR clone 58980 (TRAV27, TRAJ6)
CAGGTRGSYIPPF

SEQ ID NO: 117960 - protein, 14 aa, Homo sapiens
  CDR3 for beta chain variable domain of TCR clone 58980 (TRBV6-3, TRBJ1-1)
CASSYQRRDTEAFF

SEQ ID NO: 117961 - protein, 16 aa, Homo sapiens
  CDR3 for alpha chain variable domain of TCR clone 58981 (TRAV30, TRAJ24)
CGTEIVDADSWGKFQF

SEQ ID NO: 117962 - protein, 15 aa, Homo sapiens
  CDR3 for beta chain variable domain of TCR clone 58981 (TRBV27, TRBJ2-1)
CASSNGEGPPMSSSS

SEQ ID NO: 117963 - protein, 12 aa, Homo sapiens
  CDR3 for alpha chain variable domain of TCR clone 58982 (TRAV8-3, TRAJ26)
CAGDNYGQNFVF

SEQ ID NO: 117964 - protein, 15 aa, Homo sapiens
  CDR3 for beta chain variable domain of TCR clone 58982 (TRBV9, TRBJ2-1)
CDSSLAGSSYNEQFF

SEQ ID NO: 117965 - protein, 13 aa, Homo sapiens
  CDR3 for alpha chain variable domain of TCR clone 58983 (TRAV13-1, TRAJ5)
CAARVTGRIALTF

SEQ ID NO: 117966 - protein, 16 aa, Homo sapiens
  CDR3 for beta chain variable domain of TCR clone 58983 (TRBV25-1, TRBJ1-2)
CASSELEGARGYGYTF

SEQ ID NO: 117967 - protein, 16 aa, Homo sapiens
  CDR3 for alpha chain variable domain of TCR clone 58984 (TRAV12-1, TRAJ12)
CVVNTLLMDSSYKLIF

SEQ ID NO: 117968 - protein, 15 aa, Homo sapiens
  CDR3 for beta chain variable domain of TCR clone 58984 (TRBV6-3, TRBJ2-7)
CASSSPGTVFYEQYF

SEQ ID NO: 117969 - protein, 16 aa, Homo sapiens
  CDR3 for alpha chain variable domain of TCR clone 58985 (TRAV3, TRAJ10)
CAVRDMRAGGGNKLTF

SEQ ID NO: 117970 - protein, 13 aa, Homo sapiens
  CDR3 for beta chain variable domain of TCR clone 58985 (TRBV7-3, TRBJ2-1)
CASSLDSYNEQFF

SEQ ID NO: 117971 - protein, 13 aa, Homo sapiens
  CDR3 for alpha chain variable domain of TCR clone 58986 (TRAV3, TRAJ21)
CAVREPDFNKFYF

SEQ ID NO: 117972 - protein, 13 aa, Homo sapiens
  CDR3 for beta chain variable domain of TCR clone 58986 (TRBV9, TRBJ2-1)
CASSPSGGNEQSF

SEQ ID NO: 117973 - protein, 15 aa, Homo sapiens
  CDR3 for alpha chain variable domain of TCR clone 58987 (TRAV29/DV5, TRAJ42)
CSAKTDGGSQGNLIF

SEQ ID NO: 117974 - protein, 15 aa, Homo sapiens
  CDR3 for beta chain variable domain of TCR clone 58987 (TRBV5-1, TRBJ2-2)
CASSSQGGNTGELFF

SEQ ID NO: 117975 - protein, 19 aa, Homo sapiens
  CDR3 for alpha chain variable domain of TCR clone 58988 (TRAV38-1, TRAJ53)
CAFMKHGLESGGRNYKLTF

SEQ ID NO: 117976 - protein, 13 aa, Homo sapiens
  CDR3 for beta chain variable domain of TCR clone 58988 (TRBV19, TRBJ2-7)
CASSPRQSYEQYF

SEQ ID NO: 117977 - protein, 17 aa, Homo sapiens
  CDR3 for alpha chain variable domain of TCR clone 58989 (TRAV8-1, TRAJ43)
CAVTNGMRFGAGTRLTV

SEQ ID NO: 117978 - protein, 17 aa, Homo sapiens
  CDR3 for beta chain variable domain of TCR clone 58989 (TRBV5-4, TRBJ2-1)
CASSSAGGRGPYNEQSF

SEQ ID NO: 117979 - protein, 12 aa, Homo sapiens
  CDR3 for alpha chain variable domain of TCR clone 58990 (TRAV2, TRAJ5)
CALDTGRRALTY

SEQ ID NO: 117980 - protein, 15 aa, Homo sapiens
  CDR3 for beta chain variable domain of TCR clone 58990 (TRBV10-3, TRBJ2-1)
CAISDVQDRAYEQFF

SEQ ID NO: 117981 - protein, 13 aa, Homo sapiens
  CDR3 for alpha chain variable domain of TCR clone 58991 (TRAV13-1, TRAJ13)
CAASKGGYQKVTF

SEQ ID NO: 117982 - protein, 16 aa, Homo sapiens
  CDR3 for beta chain variable domain of TCR clone 58991 (TRBV18, TRBJ1-2)
CASSPPERVTIYGYAF

SEQ ID NO: 117983 - protein, 11 aa, Homo sapiens
  CDR3 for alpha chain variable domain of TCR clone 58992 (TRAV2, TRAJ33)
CAVDSNYQLIW

SEQ ID NO: 117984 - protein, 14 aa, Homo sapiens
  CDR3 for beta chain variable domain of TCR clone 58992 (TRBV11-2, TRBJ2-3)
CASRRLARTDTQYF

SEQ ID NO: 117985 - protein, 13 aa, Homo sapiens
  CDR3 for alpha chain variable domain of TCR clone 58993 (TRAV17, TRAJ40)
CATSFSGTYKYIF

SEQ ID NO: 117986 - protein, 18 aa, Homo sapiens
  CDR3 for beta chain variable domain of TCR clone 58993 (TRBV28, TRBJ2-1)
CASSSGLAGGGSYNEQFF

SEQ ID NO: 117987 - protein, 13 aa, Homo sapiens
  CDR3 for alpha chain variable domain of TCR clone 58994 (TRAV3, TRAJ21)
CAVREPDFNKSYF

SEQ ID NO: 117988 - protein, 13 aa, Homo sapiens
  CDR3 for beta chain variable domain of TCR clone 58994 (TRBV9, TRBJ2-1)
CASSPSGGNEQFF

SEQ ID NO: 117989 - protein, 14 aa, Homo sapiens
  CDR3 for alpha chain variable domain of TCR clone 58995 (TRAV13-1, TRAJ44)
CAAKATGTASKLTF

SEQ ID NO: 117990 - protein, 14 aa, Homo sapiens
  CDR3 for beta chain variable domain of TCR clone 58995 (TRBV7-9, TRBJ2-3)
CASSLEQGTNTQYF

SEQ ID NO: 117991 - protein, 14 aa, Homo sapiens
  CDR3 for alpha chain variable domain of TCR clone 58996 (TRAV12-1, TRAJ17)
CVVNYKAAGNKLTF

SEQ ID NO: 117992 - protein, 17 aa, Homo sapiens
  CDR3 for beta chain variable domain of TCR clone 58996 (TRBV20-1, TRBJ2-1)
CSANSSGLAGSYNEQFF

SEQ ID NO: 117993 - protein, 15 aa, Homo sapiens
  CDR3 for alpha chain variable domain of TCR clone 58997 (TRAV8-3, TRAJ11)
CAVGLLNSGYSTLTF

SEQ ID NO: 117994 - protein, 15 aa, Homo sapiens
  CDR3 for beta chain variable domain of TCR clone 58997 (TRBV18, TRBJ1-5)
CASSPSDRSNQPQHF

SEQ ID NO: 117995 - protein, 11 aa, Homo sapiens
  CDR3 for alpha chain variable domain of TCR clone 58998 (TRAV21, TRAJ11)
CAVNGYSTLTF

SEQ ID NO: 117996 - protein, 19 aa, Homo sapiens
  CDR3 for beta chain variable domain of TCR clone 58998 (TRBV25-1, TRBJ2-2)
CAILVYRVDRGRKTGELFF

SEQ ID NO: 117997 - protein, 18 aa, Homo sapiens
  CDR3 for alpha chain variable domain of TCR clone 58999 (TRAV21, TRAJ52)
CAVRPSPAGGTSYGKLTF

SEQ ID NO: 117998 - protein, 13 aa, Homo sapiens
  CDR3 for beta chain variable domain of TCR clone 58999 (TRBV7-6, TRBJ1-2)
CASSLVADYGYTF

SEQ ID NO: 117999 - protein, 12 aa, Homo sapiens
  CDR3 for alpha chain variable domain of TCR clone 59000 (TRAV13-1, TRAJ49)
CAASIRSNQLYF

SEQ ID NO: 118000 - protein, 14 aa, Homo sapiens
  CDR3 for beta chain variable domain of TCR clone 59000 (TRBV7-2, TRBJ2-1)
CASSPGLAGNEQFF

SEQ ID NO: 118001 - protein, 15 aa, Homo sapiens
  CDR3 for alpha chain variable domain of TCR clone 59001 (TRAV13-1, TRAJ17)
CAASIERAAGNKLTF

SEQ ID NO: 118002 - protein, 12 aa, Homo sapiens
  CDR3 for beta chain variable domain of TCR clone 59001 (TRBV5-7, TRBJ1-1)
CASSLGGGKAFF

SEQ ID NO: 118003 - protein, 11 aa, Homo sapiens
  CDR3 for alpha chain variable domain of TCR clone 59002 (TRAV1-1, TRAJ23)
CAVRQGGKLIF

SEQ ID NO: 118004 - protein, 20 aa, Homo sapiens
  CDR3 for beta chain variable domain of TCR clone 59002 (TRBV7-8, TRBJ2-2)
CSSSHLFPGPTIHITGELFF

SEQ ID NO: 118005 - protein, 12 aa, Homo sapiens
  CDR3 for alpha chain variable domain of TCR clone 59003 (TRAV35, TRAJ49)
CAGWNTGNQFYF

SEQ ID NO: 118006 - protein, 16 aa, Homo sapiens
  CDR3 for beta chain variable domain of TCR clone 59003 (TRBV5-1, TRBJ2-2)
CASSLWDTTNTGELFF

SEQ ID NO: 118007 - protein, 12 aa, Homo sapiens
  CDR3 for alpha chain variable domain of TCR clone 59004 (TRAV29/DV5, TRAJ49)
CAATDTGKQFYF

SEQ ID NO: 118008 - protein, 12 aa, Homo sapiens
  CDR3 for beta chain variable domain of TCR clone 59004 (TRBV12-4, TRBJ2-7)
CASSLGGYEQYF

SEQ ID NO: 118009 - protein, 13 aa, Homo sapiens
  CDR3 for alpha chain variable domain of TCR clone 59005 (TRAV38-1, TRAJ42)
CARWGGSQGNLIF

SEQ ID NO: 118010 - protein, 12 aa, Homo sapiens
  CDR3 for beta chain variable domain of TCR clone 59005 (TRBV2, TRBJ2-1)
CASRPGPREQFF

SEQ ID NO: 118011 - protein, 19 aa, Homo sapiens
  CDR3 for alpha chain variable domain of TCR clone 59006 (TRAV3, TRAJ6)
CAVRERNPSRSGGSYIPTF

SEQ ID NO: 118012 - protein, 15 aa, Homo sapiens
  CDR3 for beta chain variable domain of TCR clone 59006 (TRBV18, TRBJ2-7)
CASSPTFMDSYEQYF

SEQ ID NO: 118013 - protein, 12 aa, Homo sapiens
  CDR3 for alpha chain variable domain of TCR clone 59007 (TRAV27, TRAJ9)
CAGEFGGFKTIF

SEQ ID NO: 118014 - protein, 14 aa, Homo sapiens
  CDR3 for beta chain variable domain of TCR clone 59007 (TRBV6-1, TRBJ2-1)
CASAKDGFYNEQFF

SEQ ID NO: 118015 - protein, 15 aa, Homo sapiens
  CDR3 for alpha chain variable domain of TCR clone 59008 (TRAV3, TRAJ22)
CAVRDRGGSARQLTF

SEQ ID NO: 118016 - protein, 15 aa, Homo sapiens
  CDR3 for beta chain variable domain of TCR clone 59008 (TRBV19, TRBJ2-5)
CASSIVRASQEAQYF

SEQ ID NO: 118017 - protein, 14 aa, Homo sapiens
  CDR3 for alpha chain variable domain of TCR clone 59009 (TRAV12-3, TRAJ22)
CAMSLFGSARQLTF

SEQ ID NO: 118018 - protein, 11 aa, Homo sapiens
  CDR3 for beta chain variable domain of TCR clone 59009 (TRBV12-4, TRBJ2-2)
CASSPAGELFF

SEQ ID NO: 118019 - protein, 16 aa, Homo sapiens
  CDR3 for alpha chain variable domain of TCR clone 59010 (TRAV30, TRAJ24)
CGTEIVDADSWGKFQF

SEQ ID NO: 118020 - protein, 16 aa, Homo sapiens
  CDR3 for beta chain variable domain of TCR clone 59010 (TRBV7-3, TRBJ2-2)
CASSLKRGTSSGELFF

SEQ ID NO: 118021 - protein, 10 aa, Homo sapiens
  CDR3 for alpha chain variable domain of TCR clone 59011 (TRAV38-2/DV8, TRAJ40)
CASGTYKYIF

SEQ ID NO: 118022 - protein, 14 aa, Homo sapiens
  CDR3 for beta chain variable domain of TCR clone 59011 (TRBV7-9, TRBJ2-1)
CASSPRDALYEQFF

SEQ ID NO: 118023 - protein, 15 aa, Homo sapiens
  CDR3 for alpha chain variable domain of TCR clone 59012 (TRAV21, TRAJ53)
CATLNSGGSNYKLIF

SEQ ID NO: 118024 - protein, 16 aa, Homo sapiens
  CDR3 for beta chain variable domain of TCR clone 59012 (TRBV20-1, TRBJ1-4)
CSAPGQGLLTNEKLFF

SEQ ID NO: 118025 - protein, 13 aa, Homo sapiens
  CDR3 for alpha chain variable domain of TCR clone 59013 (TRAV1-2, TRAJ31)
CAVRPNNNARLMF

SEQ ID NO: 118026 - protein, 14 aa, Homo sapiens
  CDR3 for beta chain variable domain of TCR clone 59013 (TRBV11-2, TRBJ2-1)
CASNLSGPYNEQFF

SEQ ID NO: 118027 - protein, 13 aa, Homo sapiens
  CDR3 for alpha chain variable domain of TCR clone 59014 (TRAV2, TRAJ20)
CAVEDPSEYKLSF

SEQ ID NO: 118028 - protein, 16 aa, Homo sapiens
  CDR3 for beta chain variable domain of TCR clone 59014 (TRBV25-1, TRBJ2-7)
CASSELTGGEIYEQYF

SEQ ID NO: 118029 - protein, 14 aa, Homo sapiens
  CDR3 for alpha chain variable domain of TCR clone 59015 (TRAV13-1, TRAJ39)
CAASYNNAGNMLTS

SEQ ID NO: 118030 - protein, 13 aa, Homo sapiens
  CDR3 for beta chain variable domain of TCR clone 59015 (TRBV24-1, TRBJ1-4)
CATNNGRSEKLFF

SEQ ID NO: 118031 - protein, 14 aa, Homo sapiens
  CDR3 for alpha chain variable domain of TCR clone 59016 (TRAV8-1, TRAJ4)
CAVKFSGGYNKLIF

SEQ ID NO: 118032 - protein, 13 aa, Homo sapiens
  CDR3 for beta chain variable domain of TCR clone 59016 (TRBV7-9, TRBJ1-2)
CASSLKQNYGYTF

SEQ ID NO: 118033 - protein, 11 aa, Homo sapiens
  CDR3 for alpha chain variable domain of TCR clone 59017 (TRAV27, TRAJ47)
SIVEYGNKLVF

SEQ ID NO: 118034 - protein, 18 aa, Homo sapiens
  CDR3 for beta chain variable domain of TCR clone 59017 (TRBV2, TRBJ2-1)
CASRGLAGGPRTYNERFF

SEQ ID NO: 118035 - protein, 15 aa, Homo sapiens
  CDR3 for alpha chain variable domain of TCR clone 59018 (TRAV29/DV5, TRAJ24)
CAASGETDSWGKFQF

SEQ ID NO: 118036 - protein, 12 aa, Homo sapiens
  CDR3 for beta chain variable domain of TCR clone 59018 (TRBV11-2, TRBJ2-2)
CASSLPTGELFF

SEQ ID NO: 118037 - protein, 13 aa, Homo sapiens
  CDR3 for alpha chain variable domain of TCR clone 59019 (TRAV36/DV7, TRAJ37)
CAVFSSNTGKLIF

SEQ ID NO: 118038 - protein, 15 aa, Homo sapiens
  CDR3 for beta chain variable domain of TCR clone 59019 (TRBV20-1, TRBJ1-1)
CSARDPRGEHTEAFF

SEQ ID NO: 118039 - protein, 12 aa, Homo sapiens
  CDR3 for alpha chain variable domain of TCR clone 59020 (TRAV17, TRAJ12)
CATLRSSYKLIF

SEQ ID NO: 118040 - protein, 16 aa, Homo sapiens
  CDR3 for beta chain variable domain of TCR clone 59020 (TRBV28, TRBJ2-7)
CAGSLFFETGGPEQYF

SEQ ID NO: 118041 - protein, 11 aa, Homo sapiens
  CDR3 for alpha chain variable domain of TCR clone 59021 (TRAV2, TRAJ33)
CAVESNYQLIW

SEQ ID NO: 118042 - protein, 13 aa, Homo sapiens
  CDR3 for beta chain variable domain of TCR clone 59021 (TRBV7-3, TRBJ2-1)
CASSPVAYNEQFF

SEQ ID NO: 118043 - protein, 10 aa, Homo sapiens
  CDR3 for alpha chain variable domain of TCR clone 59022 (TRAV1-2, TRAJ23)
CAGQGGKLIF

SEQ ID NO: 118044 - protein, 16 aa, Homo sapiens
  CDR3 for beta chain variable domain of TCR clone 59022 (TRBV11-2, TRBJ1-1)
CASSLRQGGEHSKAFF

SEQ ID NO: 118045 - protein, 13 aa, Homo sapiens
  CDR3 for alpha chain variable domain of TCR clone 59023 (TRAV38-1, TRAJ42)
CARWGGSQGNIIF

SEQ ID NO: 118046 - protein, 17 aa, Homo sapiens
  CDR3 for beta chain variable domain of TCR clone 59023 (TRBV20-1, TRBJ2-1)
CSARDPLAGVWDNEQFF

SEQ ID NO: 118047 - protein, 12 aa, Homo sapiens
  CDR3 for alpha chain variable domain of TCR clone 59024 (TRAV8-3, TRAJ26)
CAGGNYGQNFVF

SEQ ID NO: 118048 - protein, 12 aa, Homo sapiens
  CDR3 for beta chain variable domain of TCR clone 59024 (TRBV11-2, TRBJ2-1)
CASSPGNNEQFF

SEQ ID NO: 118049 - protein, 18 aa, Homo sapiens
  CDR3 for alpha chain variable domain of TCR clone 59025 (TRAV29/DV5, TRAJ52)
CAAGFRGAGGTSYGKLTF

SEQ ID NO: 118050 - protein, 16 aa, Homo sapiens
  CDR3 for beta chain variable domain of TCR clone 59025 (TRBV4-1, TRBJ2-3)
CASSQSTSGAEDTQYF

SEQ ID NO: 118051 - protein, 14 aa, Homo sapiens
  CDR3 for alpha chain variable domain of TCR clone 59026 (TRAV12-1, TRAJ12)
CVVTRMDSSYKLIF

SEQ ID NO: 118052 - protein, 16 aa, Homo sapiens
  CDR3 for beta chain variable domain of TCR clone 59026 (TRBV12-4, TRBJ2-1)
CASSAVGQGNGDEQFF

SEQ ID NO: 118053 - protein, 15 aa, Homo sapiens
  CDR3 for alpha chain variable domain of TCR clone 59027 (TRAV12-3, TRAJ6)
CAMSATTAGSYIPTF

SEQ ID NO: 118054 - protein, 16 aa, Homo sapiens
  CDR3 for beta chain variable domain of TCR clone 59027 (TRBV20-1, TRBJ1-2)
CSASMGQGVANYGYTF

SEQ ID NO: 118055 - protein, 13 aa, Homo sapiens
  CDR3 for alpha chain variable domain of TCR clone 59028 (TRAV13-1, TRAJ27)
CAASTHQCRQTNL

SEQ ID NO: 118056 - protein, 16 aa, Homo sapiens
  CDR3 for beta chain variable domain of TCR clone 59028 (TRBV27, TRBJ2-2)
CANSFRGLVRTGELFF

SEQ ID NO: 118057 - protein, 13 aa, Homo sapiens
  CDR3 for alpha chain variable domain of TCR clone 59029 (TRAV3, TRAJ20)
CCEAFCNDYKLSF

SEQ ID NO: 118058 - protein, 17 aa, Homo sapiens
  CDR3 for beta chain variable domain of TCR clone 59029 (TRBV11-2, TRBJ2-1)
CASSLYPPGVEYNEQFF

SEQ ID NO: 118059 - protein, 16 aa, Homo sapiens
  CDR3 for alpha chain variable domain of TCR clone 59030 (TRAV35, TRAJ28)
CAGQRYSGAGSYQLTF

SEQ ID NO: 118060 - protein, 13 aa, Homo sapiens
  CDR3 for beta chain variable domain of TCR clone 59030 (TRBV19, TRBJ1-2)
CASSQGQIYGYTF

SEQ ID NO: 118061 - protein, 14 aa, Homo sapiens
  CDR3 for alpha chain variable domain of TCR clone 59031 (TRAV35, TRAJ33)
CWPRGRDSNYQLIW

SEQ ID NO: 118062 - protein, 15 aa, Homo sapiens
  CDR3 for beta chain variable domain of TCR clone 59031 (TRBV4-1, TRBJ2-5)
CASSQWDLYQETQYF

SEQ ID NO: 118063 - protein, 18 aa, Homo sapiens
  CDR3 for alpha chain variable domain of TCR clone 59032 (TRAV21, TRAJ52)
CAVRPSPAGGTSYGKLQF

SEQ ID NO: 118064 - protein, 17 aa, Homo sapiens
  CDR3 for beta chain variable domain of TCR clone 59032 (TRBV13, TRBJ2-3)
CASSLSRVAGGRNTQYF

SEQ ID NO: 118065 - protein, 15 aa, Homo sapiens
  CDR3 for alpha chain variable domain of TCR clone 59033 (TRAV3, TRAJ32)
CAVGSYGGATNKLIF

SEQ ID NO: 118066 - protein, 13 aa, Homo sapiens
  CDR3 for beta chain variable domain of TCR clone 59033 (TRBV20-1, TRBJ2-7)
CSARPSTNYEQYF

SEQ ID NO: 118067 - protein, 12 aa, Homo sapiens
  CDR3 for alpha chain variable domain of TCR clone 59034 (TRAV12-3, TRAJ34)
CAVGYNTDKLIF

SEQ ID NO: 118068 - protein, 15 aa, Homo sapiens
  CDR3 for beta chain variable domain of TCR clone 59034 (TRBV28, TRBJ2-1)
CASSIIAGGRSEQFF

SEQ ID NO: 118069 - protein, 10 aa, Homo sapiens
  CDR3 for alpha chain variable domain of TCR clone 59035 (TRAV12-3, TRAJ49)
CAMNDDQFYF

SEQ ID NO: 118070 - protein, 13 aa, Homo sapiens
  CDR3 for beta chain variable domain of TCR clone 59035 (TRBV12-4, TRBJ1-1)
CASSTGTGFEAFF

SEQ ID NO: 118071 - protein, 14 aa, Homo sapiens
  CDR3 for alpha chain variable domain of TCR clone 59036 (TRAV20, TRAJ4)
CAVRLGGGYNKLIL

SEQ ID NO: 118072 - protein, 21 aa, Homo sapiens
  CDR3 for beta chain variable domain of TCR clone 59036 (TRBV15, TRBJ2-1)
AWGTQPCTCVPPAEVDTARFF

SEQ ID NO: 118073 - protein, 14 aa, Homo sapiens
  CDR3 for alpha chain variable domain of TCR clone 59037 (TRAV12-3, TRAJ43)
YAMSLGGAGTRLTV

SEQ ID NO: 118074 - protein, 13 aa, Homo sapiens
  CDR3 for beta chain variable domain of TCR clone 59037 (TRBV7-9, TRBJ1-2)
CASSLKQNYGYTF

SEQ ID NO: 118075 - protein, 12 aa, Homo sapiens
  CDR3 for alpha chain variable domain of TCR clone 59038 (TRAV1-1, TRAJ29)
CAVEFRKHTYCL

SEQ ID NO: 118076 - protein, 17 aa, Homo sapiens
  CDR3 for beta chain variable domain of TCR clone 59038 (TRBV28, TRBJ2-5)
CASSRQGGLAGAETQYF

SEQ ID NO: 118077 - protein, 14 aa, Homo sapiens
  CDR3 for alpha chain variable domain of TCR clone 59039 (TRAV13-1, TRAJ24)
SAASRTDSWGKLQF

SEQ ID NO: 118078 - protein, 15 aa, Homo sapiens
  CDR3 for beta chain variable domain of TCR clone 59039 (TRBV7-9, TRBJ1-5)
CASSQGHQPNQPQHF

SEQ ID NO: 118079 - protein, 13 aa, Homo sapiens
  CDR3 for alpha chain variable domain of TCR clone 59040 (TRAV13-2, TRAJ13)
CAERPGGYQKVTF

SEQ ID NO: 118080 - protein, 15 aa, Homo sapiens
  CDR3 for beta chain variable domain of TCR clone 59040 (TRBV11-3, TRBJ1-3)
CASSLSGTSGNTIYF

SEQ ID NO: 118081 - protein, 15 aa, Homo sapiens
  CDR3 for alpha chain variable domain of TCR clone 59041 (TRAV3, TRAJ5)
CAVRDLDTGRRALTF

SEQ ID NO: 118082 - protein, 14 aa, Homo sapiens
  CDR3 for beta chain variable domain of TCR clone 59041 (TRBV11-1, TRBJ2-7)
CASSFRQGSYEQYF

SEQ ID NO: 118083 - protein, 18 aa, Homo sapiens
  CDR3 for alpha chain variable domain of TCR clone 59042 (TRAV12-3, TRAJ52)
CAMSVGGAGGTSYGKLTF

SEQ ID NO: 118084 - protein, 14 aa, Homo sapiens
  CDR3 for beta chain variable domain of TCR clone 59042 (TRBV7-2, TRBJ2-7)
CASRSQGAAYGQYF

SEQ ID NO: 118085 - protein, 12 aa, Homo sapiens
  CDR3 for alpha chain variable domain of TCR clone 59043 (TRAV1-2, TRAJ33)
CAALGSNYQLIW

SEQ ID NO: 118086 - protein, 16 aa, Homo sapiens
  CDR3 for beta chain variable domain of TCR clone 59043 (TRBV6-4, TRBJ1-2)
CASSEAVGDPNYGYTF

SEQ ID NO: 118087 - protein, 16 aa, Homo sapiens
  CDR3 for alpha chain variable domain of TCR clone 59044 (TRAV12-3, TRAJ8)
CAMSLGPDTGFQKLVF

SEQ ID NO: 118088 - protein, 13 aa, Homo sapiens
  CDR3 for beta chain variable domain of TCR clone 59044 (TRBV7-9, TRBJ1-2)
CASSLKQNYGYTF

SEQ ID NO: 118089 - protein, 13 aa, Homo sapiens
  CDR3 for alpha chain variable domain of TCR clone 59045 (TRAV16, TRAJ58)
CALRWASGSRLTF

SEQ ID NO: 118090 - protein, 13 aa, Homo sapiens
  CDR3 for beta chain variable domain of TCR clone 59045 (TRBV12-5, TRBJ2-3)
CASGNRQSDTQYF

SEQ ID NO: 118091 - protein, 13 aa, Homo sapiens
  CDR3 for alpha chain variable domain of TCR clone 59046 (TRAV8-6, TRAJ49)
CAVITNTGNQSYF

SEQ ID NO: 118092 - protein, 14 aa, Homo sapiens
  CDR3 for beta chain variable domain of TCR clone 59046 (TRBV5-1, TRBJ2-7)
CTSSRGESLYEQYF

SEQ ID NO: 118093 - protein, 15 aa, Homo sapiens
  CDR3 for alpha chain variable domain of TCR clone 59047 (TRAV8-2, TRAJ40)
CVVLGTTSGTYKYIF

SEQ ID NO: 118094 - protein, 16 aa, Homo sapiens
  CDR3 for beta chain variable domain of TCR clone 59047 (TRBV7-3, TRBJ2-1)
CASSLEGYRSYSEQFF

SEQ ID NO: 118095 - protein, 12 aa, Homo sapiens
  CDR3 for alpha chain variable domain of TCR clone 59048 (TRAV13-2, TRAJ23)
CAERHREGKLIF

SEQ ID NO: 118096 - protein, 13 aa, Homo sapiens
  CDR3 for beta chain variable domain of TCR clone 59048 (TRBV19, TRBJ1-2)
CASSVPGQDGYTF

SEQ ID NO: 118097 - protein, 16 aa, Homo sapiens
  CDR3 for alpha chain variable domain of TCR clone 59049 (TRAV3, TRAJ18)
CAVRDGRGSTLGRLYF

SEQ ID NO: 118098 - protein, 13 aa, Homo sapiens
  CDR3 for beta chain variable domain of TCR clone 59049 (TRBV4-2, TRBJ1-1)
CASSQAGNTEAFF

SEQ ID NO: 118099 - protein, 14 aa, Homo sapiens
  CDR3 for alpha chain variable domain of TCR clone 59050 (TRAV1-2, TRAJ8)
CAVREDTGFQKLVF

SEQ ID NO: 118100 - protein, 15 aa, Homo sapiens
  CDR3 for beta chain variable domain of TCR clone 59050 (TRBV6-1, TRBJ2-1)
CASSEAAYSYNEQFF

SEQ ID NO: 118101 - protein, 14 aa, Homo sapiens
  CDR3 for alpha chain variable domain of TCR clone 59051 (TRAV26-1, TRAJ38)
CIADNAGNNRKLIW

SEQ ID NO: 118102 - protein, 14 aa, Homo sapiens
  CDR3 for beta chain variable domain of TCR clone 59051 (TRBV6-3, TRBJ1-1)
CASSNLLPGAEAFF

SEQ ID NO: 118103 - protein, 12 aa, Homo sapiens
  CDR3 for alpha chain variable domain of TCR clone 59052 (TRAV2, TRAJ31)
CAVEEGNAILMF

SEQ ID NO: 118104 - protein, 18 aa, Homo sapiens
  CDR3 for beta chain variable domain of TCR clone 59052 (TRBV7-9, TRBJ2-3)
CASSLDLAGLATPDTQYF

SEQ ID NO: 118105 - protein, 19 aa, Homo sapiens
  CDR3 for alpha chain variable domain of TCR clone 59053 (TRAV3, TRAJ6)
CAVRDRNPSRSGGSYIPTF

SEQ ID NO: 118106 - protein, 15 aa, Homo sapiens
  CDR3 for beta chain variable domain of TCR clone 59053 (TRBV18, TRBJ2-7)
CASSPTFMDSHEQYF

SEQ ID NO: 118107 - protein, 13 aa, Homo sapiens
  CDR3 for alpha chain variable domain of TCR clone 59054 (TRAV20, TRAJ35)
CAVQEGFGNVLHC

SEQ ID NO: 118108 - protein, 14 aa, Homo sapiens
  CDR3 for beta chain variable domain of TCR clone 59054 (TRBV5-1, TRBJ1-1)
CASSSATGGTGAFF

SEQ ID NO: 118109 - protein, 16 aa, Homo sapiens
  CDR3 for alpha chain variable domain of TCR clone 59055 (TRAV30, TRAJ24)
CGTEIVDADSWGKFQF

SEQ ID NO: 118110 - protein, 14 aa, Homo sapiens
  CDR3 for beta chain variable domain of TCR clone 59055 (TRBV12-5, TRBJ2-5)
CASGSRIHQKTQYF

SEQ ID NO: 118111 - protein, 14 aa, Homo sapiens
  CDR3 for alpha chain variable domain of TCR clone 59056 (TRAV21, TRAJ32)
CCGDYGGAINKLIF

SEQ ID NO: 118112 - protein, 13 aa, Homo sapiens
  CDR3 for beta chain variable domain of TCR clone 59056 (TRBV2, TRBJ1-6)
CASGRGGISPLHF

SEQ ID NO: 118113 - protein, 11 aa, Homo sapiens
  CDR3 for alpha chain variable domain of TCR clone 59057 (TRAV17, TRAJ9)
CGFTGGFKTIF

SEQ ID NO: 118114 - protein, 17 aa, Homo sapiens
  CDR3 for beta chain variable domain of TCR clone 59057 (TRBV13, TRBJ2-3)
CASSLSRVAGGRNTQYF

SEQ ID NO: 118115 - protein, 11 aa, Homo sapiens
  CDR3 for alpha chain variable domain of TCR clone 59058 (TRAV21, TRAJ48)
CAVDGNEKLTF

SEQ ID NO: 118116 - protein, 16 aa, Homo sapiens
  CDR3 for beta chain variable domain of TCR clone 59058 (TRBV12-4, TRBJ1-5)
CASSSGPRGSNQHQHF

SEQ ID NO: 118117 - protein, 15 aa, Homo sapiens
  CDR3 for alpha chain variable domain of TCR clone 59059 (TRAV12-2, TRAJ53)
CAVNGGGGSNYKLTF

SEQ ID NO: 118118 - protein, 15 aa, Homo sapiens
  CDR3 for beta chain variable domain of TCR clone 59059 (TRBV29-1, TRBJ2-7)
CSVEFFDRGSYEQYF

SEQ ID NO: 118119 - protein, 17 aa, Homo sapiens
  CDR3 for alpha chain variable domain of TCR clone 59060 (TRAV13-1, TRAJ28)
CAASPPYSGAGSYQLTF

SEQ ID NO: 118120 - protein, 15 aa, Homo sapiens
  CDR3 for beta chain variable domain of TCR clone 59060 (TRBV6-3, TRBJ2-2)
CARSFLATLTGELFF

SEQ ID NO: 118121 - protein, 12 aa, Homo sapiens
  CDR3 for alpha chain variable domain of TCR clone 59061 (TRAV21, TRAJ11)
CAANSGYSTLTF

SEQ ID NO: 118122 - protein, 14 aa, Homo sapiens
  CDR3 for beta chain variable domain of TCR clone 59061 (TRBV20-1, TRBJ2-7)
CSAPELAGVGEQYF

SEQ ID NO: 118123 - protein, 14 aa, Homo sapiens
  CDR3 for alpha chain variable domain of TCR clone 59062 (TRAV1-2, TRAJ16)
CSVNRFSDGQKLLF

SEQ ID NO: 118124 - protein, 15 aa, Homo sapiens
  CDR3 for beta chain variable domain of TCR clone 59062 (TRBV20-1, TRBJ2-7)
CSARDRVSGMDEQYF

SEQ ID NO: 118125 - protein, 14 aa, Homo sapiens
  CDR3 for alpha chain variable domain of TCR clone 59063 (TRAV2, TRAJ37)
CAVDFTSNTGKLIF

SEQ ID NO: 118126 - protein, 15 aa, Homo sapiens
  CDR3 for beta chain variable domain of TCR clone 59063 (TRBV20-1, TRBJ1-1)
CRASRGVTGNTEAFF

SEQ ID NO: 118127 - protein, 14 aa, Homo sapiens
  CDR3 for alpha chain variable domain of TCR clone 59064 (TRAV1-2, TRAJ16)
CAVNRFSDGQKLLF

SEQ ID NO: 118128 - protein, 13 aa, Homo sapiens
  CDR3 for beta chain variable domain of TCR clone 59064 (TRBV19, TRBJ1-2)
CASSVPGQDGYTS

SEQ ID NO: 118129 - protein, 14 aa, Homo sapiens
  CDR3 for alpha chain variable domain of TCR clone 59065 (TRAV12-2, TRAJ13)
CAVKKTGGYQKVTF

SEQ ID NO: 118130 - protein, 12 aa, Homo sapiens
  CDR3 for beta chain variable domain of TCR clone 59065 (TRBV7-9, TRBJ2-7)
CASSIKREEQYF

SEQ ID NO: 118131 - protein, 14 aa, Homo sapiens
  CDR3 for alpha chain variable domain of TCR clone 59066 (TRAV26-2, TRAJ32)
CCVGYGGATNKLIF

SEQ ID NO: 118132 - protein, 14 aa, Homo sapiens
  CDR3 for beta chain variable domain of TCR clone 59066 (TRBV7-6, TRBJ2-3)
CASSLGTVTGTQYF

SEQ ID NO: 118133 - protein, 11 aa, Homo sapiens
  CDR3 for alpha chain variable domain of TCR clone 59067 (TRAV17, TRAJ31)
CATSNNAGLMF

SEQ ID NO: 118134 - protein, 14 aa, Homo sapiens
  CDR3 for beta chain variable domain of TCR clone 59067 (TRBV18, TRBJ2-7)
CASSPRGGAYEQYF

SEQ ID NO: 118135 - protein, 11 aa, Homo sapiens
  CDR3 for alpha chain variable domain of TCR clone 59068 (TRAV2, TRAJ13)
CASGGYQKVTF

SEQ ID NO: 118136 - protein, 14 aa, Homo sapiens
  CDR3 for beta chain variable domain of TCR clone 59068 (TRBV7-3, TRBJ1-1)
CASSLKGGNTEAFF

SEQ ID NO: 118137 - protein, 12 aa, Homo sapiens
  CDR3 for alpha chain variable domain of TCR clone 59069 (TRAV12-2, TRAJ21)
CAVRYNFNKFYF

SEQ ID NO: 118138 - protein, 14 aa, Homo sapiens
  CDR3 for beta chain variable domain of TCR clone 59069 (TRBV28, TRBJ2-1)
CASSYCTAYNEQFF

SEQ ID NO: 118139 - protein, 15 aa, Homo sapiens
  CDR3 for alpha chain variable domain of TCR clone 59070 (TRAV12-3, TRAJ6)
CAMSATTGGSYIPTF

SEQ ID NO: 118140 - protein, 16 aa, Homo sapiens
  CDR3 for beta chain variable domain of TCR clone 59070 (TRBV7-3, TRBJ2-5)
CASSLMGGASQETQYF

SEQ ID NO: 118141 - protein, 11 aa, Homo sapiens
  CDR3 for alpha chain variable domain of TCR clone 59071 (TRAV12-2, TRAJ31)
CAVTRWARLMF

SEQ ID NO: 118142 - protein, 15 aa, Homo sapiens
  CDR3 for beta chain variable domain of TCR clone 59071 (TRBV6-1, TRBJ2-3)
CASSERGGITDTQYF

SEQ ID NO: 118143 - protein, 14 aa, Homo sapiens
  CDR3 for alpha chain variable domain of TCR clone 59072 (TRAV13-1, TRAJ44)
CAAKATGTASKLTF

SEQ ID NO: 118144 - protein, 13 aa, Homo sapiens
  CDR3 for beta chain variable domain of TCR clone 59072 (TRBV4-2, TRBJ1-1)
CASSQAGNTEAFF

SEQ ID NO: 118145 - protein, 15 aa, Homo sapiens
  CDR3 for alpha chain variable domain of TCR clone 59073 (TRAV12-2, TRAJ43)
CAFDMRFGAGPRLTV

SEQ ID NO: 118146 - protein, 17 aa, Homo sapiens
  CDR3 for beta chain variable domain of TCR clone 59073 (TRBV13, TRBJ2-3)
CASSLSRVAGGRNTQYF

SEQ ID NO: 118147 - protein, 14 aa, Homo sapiens
  CDR3 for alpha chain variable domain of TCR clone 59074 (TRAV17, TRAJ12)
CAILPMDSSYKLIF

SEQ ID NO: 118148 - protein, 14 aa, Homo sapiens
  CDR3 for beta chain variable domain of TCR clone 59074 (TRBV5-5, TRBJ1-2)
CASSLDPYNYGYTF

SEQ ID NO: 118149 - protein, 19 aa, Homo sapiens
  CDR3 for alpha chain variable domain of TCR clone 59075 (TRAV27, TRAJ49)
TAAQPGDTGLYPTSNQLYF

SEQ ID NO: 118150 - protein, 14 aa, Homo sapiens
  CDR3 for beta chain variable domain of TCR clone 59075 (TRBV9, TRBJ2-3)
CASSNDWGRDTQYF

SEQ ID NO: 118151 - protein, 14 aa, Homo sapiens
  CDR3 for alpha chain variable domain of TCR clone 59076 (TRAV12-2, TRAJ53)
CAVKGGGSNYKLTF

SEQ ID NO: 118152 - protein, 14 aa, Homo sapiens
  CDR3 for beta chain variable domain of TCR clone 59076 (TRBV7-7, TRBJ2-2)
CDTRQDSDTGELFF

SEQ ID NO: 118153 - protein, 15 aa, Homo sapiens
  CDR3 for alpha chain variable domain of TCR clone 59077 (TRAV25, TRAJ52)
CAGRPGGTSYGKLTF

SEQ ID NO: 118154 - protein, 15 aa, Homo sapiens
  CDR3 for beta chain variable domain of TCR clone 59077 (TRBV10-3, TRBJ2-3)
CAISLTSGGTDTQYF

SEQ ID NO: 118155 - protein, 16 aa, Homo sapiens
  CDR3 for alpha chain variable domain of TCR clone 59078 (TRAV3, TRAJ37)
CALRPHGSGNTGKLIF

SEQ ID NO: 118156 - protein, 11 aa, Homo sapiens
  CDR3 for beta chain variable domain of TCR clone 59078 (TRBV10-3, TRBJ2-7)
CAISEGLEQYF

SEQ ID NO: 118157 - protein, 15 aa, Homo sapiens
  CDR3 for alpha chain variable domain of TCR clone 59079 (TRAV12-3, TRAJ48)
CAMNAKNFGNEKLTF

SEQ ID NO: 118158 - protein, 14 aa, Homo sapiens
  CDR3 for beta chain variable domain of TCR clone 59079 (TRBV2, TRBJ1-6)
CASSEARNNSPLHF

SEQ ID NO: 118159 - protein, 15 aa, Homo sapiens
  CDR3 for alpha chain variable domain of TCR clone 59080 (TRAV12-3, TRAJ6)
CAMSATTGVSYIPTF

SEQ ID NO: 118160 - protein, 16 aa, Homo sapiens
  CDR3 for beta chain variable domain of TCR clone 59080 (TRBV20-1, TRBJ1-2)
CSASMGQGVANYGYTF

SEQ ID NO: 118161 - protein, 13 aa, Homo sapiens
  CDR3 for alpha chain variable domain of TCR clone 59081 (TRAV21, TRAJ57)
CAVTQGGSEKLVF

SEQ ID NO: 118162 - protein, 16 aa, Homo sapiens
  CDR3 for beta chain variable domain of TCR clone 59081 (TRBV29-1, TRBJ2-7)
CIVEDAEDGTAYEQYF

SEQ ID NO: 118163 - protein, 13 aa, Homo sapiens
  CDR3 for alpha chain variable domain of TCR clone 59082 (TRAV8-3, TRAJ44)
CAVVPGTASKLTF

SEQ ID NO: 118164 - protein, 16 aa, Homo sapiens
  CDR3 for beta chain variable domain of TCR clone 59082 (TRBV4-3, TRBJ2-3)
CASSQGGLAGTDTQYF

SEQ ID NO: 118165 - protein, 14 aa, Homo sapiens
  CDR3 for alpha chain variable domain of TCR clone 59083 (TRAV1-2, TRAJ16)
CAVNRFSDGQKLLF

SEQ ID NO: 118166 - protein, 12 aa, Homo sapiens
  CDR3 for beta chain variable domain of TCR clone 59083 (TRBV7-3, TRBJ2-5)
CASSSPGGTQYF

SEQ ID NO: 118167 - protein, 14 aa, Homo sapiens
  CDR3 for alpha chain variable domain of TCR clone 59084 (TRAV12-2, TRAJ40)
CAVKIPSGNYKYIF

SEQ ID NO: 118168 - protein, 11 aa, Homo sapiens
  CDR3 for beta chain variable domain of TCR clone 59084 (TRBV29-1, TRBJ2-5)
CSEDRTGTQYF

SEQ ID NO: 118169 - protein, 13 aa, Homo sapiens
  CDR3 for alpha chain variable domain of TCR clone 59085 (TRAV12-3, TRAJ13)
CAMSSGGYQKVTF

SEQ ID NO: 118170 - protein, 18 aa, Homo sapiens
  CDR3 for beta chain variable domain of TCR clone 59085 (TRBV20-1, TRBJ2-6)
CSAETTPTHGSGANVLTF

SEQ ID NO: 118171 - protein, 15 aa, Homo sapiens
  CDR3 for alpha chain variable domain of TCR clone 59086 (TRAV1-2, TRAJ31)
CLLPLCCEYNARLMF

SEQ ID NO: 118172 - protein, 15 aa, Homo sapiens
  CDR3 for beta chain variable domain of TCR clone 59086 (TRBV28, TRBJ2-1)
CASSIIAGGRSEQFF

SEQ ID NO: 118173 - protein, 14 aa, Homo sapiens
  CDR3 for alpha chain variable domain of TCR clone 59087 (TRAV12-2, TRAJ17)
CAVLFKAAGNKLTF

SEQ ID NO: 118174 - protein, 16 aa, Homo sapiens
  CDR3 for beta chain variable domain of TCR clone 59087 (TRBV12-4, TRBJ1-4)
CASSSNRETTNEKLFF

SEQ ID NO: 118175 - protein, 15 aa, Homo sapiens
  CDR3 for alpha chain variable domain of TCR clone 59088 (TRAV26-1, TRAJ44)
CIVRGGTGTASKLTF

SEQ ID NO: 118176 - protein, 15 aa, Homo sapiens
  CDR3 for beta chain variable domain of TCR clone 59088 (TRBV7-6, TRBJ2-1)
CASSSLAGEGNEQFF

SEQ ID NO: 118177 - protein, 14 aa, Homo sapiens
  CDR3 for alpha chain variable domain of TCR clone 59089 (TRAV12-2, TRAJ15)
CAPHTGQAGTALIF

SEQ ID NO: 118178 - protein, 17 aa, Homo sapiens
  CDR3 for beta chain variable domain of TCR clone 59089 (TRBV5-5, TRBJ1-2)
CAGSLGSLDGQSEGYTF

SEQ ID NO: 118179 - protein, 12 aa, Homo sapiens
  CDR3 for alpha chain variable domain of TCR clone 59090 (TRAV21, TRAJ31)
CAVSPARGRLMF

SEQ ID NO: 118180 - protein, 17 aa, Homo sapiens
  CDR3 for beta chain variable domain of TCR clone 59090 (TRBV28, TRBJ2-1)
CASSSARQALTYNEQFF

SEQ ID NO: 118181 - protein, 14 aa, Homo sapiens
  CDR3 for alpha chain variable domain of TCR clone 59091 (TRAV12-2, TRAJ17)
CAVLFKAAGNKLTF

SEQ ID NO: 118182 - protein, 14 aa, Homo sapiens
  CDR3 for beta chain variable domain of TCR clone 59091 (TRBV7-3, TRBJ2-1)
CASSLAGGTNEQFF

SEQ ID NO: 118183 - protein, 16 aa, Homo sapiens
  CDR3 for alpha chain variable domain of TCR clone 59092 (TRAV20, TRAJ26)
CAVQHRRDNYGQNFFF

SEQ ID NO: 118184 - protein, 15 aa, Homo sapiens
  CDR3 for beta chain variable domain of TCR clone 59092 (TRBV7-2, TRBJ2-7)
CASSWGQGAIYEQYF

SEQ ID NO: 118185 - protein, 18 aa, Homo sapiens
  CDR3 for alpha chain variable domain of TCR clone 59093 (TRAV26-2, TRAJ45)
CILRLWGYSGGGADGLPF

SEQ ID NO: 118186 - protein, 17 aa, Homo sapiens
  CDR3 for beta chain variable domain of TCR clone 59093 (TRBV28, TRBJ2-3)
CASSPTPAGGRVDTQYF

SEQ ID NO: 118187 - protein, 13 aa, Homo sapiens
  CDR3 for alpha chain variable domain of TCR clone 59094 (TRAV8-3, TRAJ47)
CAVGALGGNKLVF

SEQ ID NO: 118188 - protein, 17 aa, Homo sapiens
  CDR3 for beta chain variable domain of TCR clone 59094 (TRBV13, TRBJ2-3)
CASSLSRVAGGRNTQYF

SEQ ID NO: 118189 - protein, 14 aa, Homo sapiens
  CDR3 for alpha chain variable domain of TCR clone 59095 (TRAV12-3, TRAJ10)
SHLPLTGGGNKLTF

SEQ ID NO: 118190 - protein, 14 aa, Homo sapiens
  CDR3 for beta chain variable domain of TCR clone 59095 (TRBV27, TRBJ2-1)
CASSATGGYNEQFF

SEQ ID NO: 118191 - protein, 12 aa, Homo sapiens
  CDR3 for alpha chain variable domain of TCR clone 59096 (TRAV3, TRAJ20)
CAVRDGNYKLSF

SEQ ID NO: 118192 - protein, 13 aa, Homo sapiens
  CDR3 for beta chain variable domain of TCR clone 59096 (TRBV9, TRBJ2-1)
CASSVGQGGEQFF

SEQ ID NO: 118193 - protein, 14 aa, Homo sapiens
  CDR3 for alpha chain variable domain of TCR clone 59097 (TRAV26-1, TRAJ26)
CIVRATFLGQNFVF

SEQ ID NO: 118194 - protein, 16 aa, Homo sapiens
  CDR3 for beta chain variable domain of TCR clone 59097 (TRBV12-4, TRBJ2-7)
CGSRSTGTGPSYEQYF

SEQ ID NO: 118195 - protein, 13 aa, Homo sapiens
  CDR3 for alpha chain variable domain of TCR clone 59098 (TRAV3, TRAJ27)
CAVWPLGAGKSTF

SEQ ID NO: 118196 - protein, 13 aa, Homo sapiens
  CDR3 for beta chain variable domain of TCR clone 59098 (TRBV7-9, TRBJ2-3)
CASSPGSTDTQYF

SEQ ID NO: 118197 - protein, 13 aa, Homo sapiens
  CDR3 for alpha chain variable domain of TCR clone 59099 (TRAV1-1, TRAJ7)
CAVRDHGNDRLAF

SEQ ID NO: 118198 - protein, 20 aa, Homo sapiens
  CDR3 for beta chain variable domain of TCR clone 59099 (TRBV28, TRBJ2-3)
CASSLGVRSTSGRSTDTQYF

SEQ ID NO: 118199 - protein, 14 aa, Homo sapiens
  CDR3 for alpha chain variable domain of TCR clone 59100 (TRAV21, TRAJ35)
CAVMPIGFGNVQHC

SEQ ID NO: 118200 - protein, 12 aa, Homo sapiens
  CDR3 for beta chain variable domain of TCR clone 59100 (TRBV7-9, TRBJ2-7)
CASSIKREEQYF

SEQ ID NO: 118201 - protein, 11 aa, Homo sapiens
  CDR3 for alpha chain variable domain of TCR clone 59101 (TRAV12-1, TRAJ34)
CVVNKGSELIF

SEQ ID NO: 118202 - protein, 12 aa, Homo sapiens
  CDR3 for beta chain variable domain of TCR clone 59101 (TRBV2, TRBJ2-1)
CAYGPPGNEQFF

SEQ ID NO: 118203 - protein, 13 aa, Homo sapiens
  CDR3 for alpha chain variable domain of TCR clone 59102 (TRAV26-2, TRAJ37)
CIRGSSNTGKLIF

SEQ ID NO: 118204 - protein, 16 aa, Homo sapiens
  CDR3 for beta chain variable domain of TCR clone 59102 (TRBV7-2, TRBJ2-5)
CASSPGGARRRETQYF

SEQ ID NO: 118205 - protein, 14 aa, Homo sapiens
  CDR3 for alpha chain variable domain of TCR clone 59103 (TRAV26-1, TRAJ39)
CIVRRSRAGNMLTF

SEQ ID NO: 118206 - protein, 15 aa, Homo sapiens
  CDR3 for beta chain variable domain of TCR clone 59103 (TRBV7-9, TRBJ1-5)
CASSQGHQPNQPQHF

SEQ ID NO: 118207 - protein, 14 aa, Homo sapiens
  CDR3 for alpha chain variable domain of TCR clone 59104 (TRAV12-2, TRAJ44)
CAVNRAGTASKLTF

SEQ ID NO: 118208 - protein, 12 aa, Homo sapiens
  CDR3 for beta chain variable domain of TCR clone 59104 (TRBV19, TRBJ1-4)
CASKDWPGGLFF

SEQ ID NO: 118209 - protein, 13 aa, Homo sapiens
  CDR3 for alpha chain variable domain of TCR clone 59105 (TRAV8-3, TRAJ43)
CAVGPDNNNDMRF

SEQ ID NO: 118210 - protein, 14 aa, Homo sapiens
  CDR3 for beta chain variable domain of TCR clone 59105 (TRBV19, TRBJ2-1)
CASPTVVLSGEQFF

SEQ ID NO: 118211 - protein, 14 aa, Homo sapiens
  CDR3 for alpha chain variable domain of TCR clone 59106 (TRAV12-2, TRAJ53)
CRERGGGSNYKLTF

SEQ ID NO: 118212 - protein, 15 aa, Homo sapiens
  CDR3 for beta chain variable domain of TCR clone 59106 (TRBV12-4, TRBJ2-5)
CASSPPTGLQETQYF

SEQ ID NO: 118213 - protein, 13 aa, Homo sapiens
  CDR3 for alpha chain variable domain of TCR clone 59107 (TRAV3, TRAJ21)
YAVREPDFNKFYF

SEQ ID NO: 118214 - protein, 15 aa, Homo sapiens
  CDR3 for beta chain variable domain of TCR clone 59107 (TRBV5-7, TRBJ1-5)
CASSYGKLWDQPQHF

SEQ ID NO: 118215 - protein, 17 aa, Homo sapiens
  CDR3 for alpha chain variable domain of TCR clone 59108 (TRAV8-3, TRAJ50)
CAVGAVDTETSYDKVIS

SEQ ID NO: 118216 - protein, 13 aa, Homo sapiens
  CDR3 for beta chain variable domain of TCR clone 59108 (TRBV7-9, TRBJ2-2)
CASSSAGTGELFF

SEQ ID NO: 118217 - protein, 14 aa, Homo sapiens
  CDR3 for alpha chain variable domain of TCR clone 59109 (TRAV13-1, TRAJ48)
CAASRSFGNEKLTF

SEQ ID NO: 118218 - protein, 14 aa, Homo sapiens
  CDR3 for beta chain variable domain of TCR clone 59109 (TRBV7-9, TRBJ2-2)
CASSLVQDTGELFF

SEQ ID NO: 118219 - protein, 13 aa, Homo sapiens
  CDR3 for alpha chain variable domain of TCR clone 59110 (TRAV21, TRAJ27)
CAARPGNASKSTF

SEQ ID NO: 118220 - protein, 14 aa, Homo sapiens
  CDR3 for beta chain variable domain of TCR clone 59110 (TRBV7-6, TRBJ2-3)
CASSLGTVTGTQYF

SEQ ID NO: 118221 - protein, 16 aa, Homo sapiens
  CDR3 for alpha chain variable domain of TCR clone 59111 (TRAV30, TRAJ24)
CGTEIVDADSWGKFQF

SEQ ID NO: 118222 - protein, 13 aa, Homo sapiens
  CDR3 for beta chain variable domain of TCR clone 59111 (TRBV11-2, TRBJ2-5)
CASSSTGEENQYF

SEQ ID NO: 118223 - protein, 17 aa, Homo sapiens
  CDR3 for alpha chain variable domain of TCR clone 59112 (TRAV3, TRAJ38)
CAVGDCLNAGNNRKLIW

SEQ ID NO: 118224 - protein, 16 aa, Homo sapiens
  CDR3 for beta chain variable domain of TCR clone 59112 (TRBV20-1, TRBJ1-4)
CSAPGQGLLTNEKLFF

SEQ ID NO: 118225 - protein, 22 aa, Homo sapiens
  CDR3 for alpha chain variable domain of TCR clone 59113 (TRAV8-2, TRAJ45)
HLTKPSAHMSDAAEYSADGLTL

SEQ ID NO: 118226 - protein, 13 aa, Homo sapiens
  CDR3 for beta chain variable domain of TCR clone 59113 (TRBV7-3, TRBJ2-1)
CASSPVAYNEQFF

SEQ ID NO: 118227 - protein, 14 aa, Homo sapiens
  CDR3 for alpha chain variable domain of TCR clone 59114 (TRAV23/DV6, TRAJ37)
CAASTSSNTGKLIF

SEQ ID NO: 118228 - protein, 14 aa, Homo sapiens
  CDR3 for beta chain variable domain of TCR clone 59114 (TRBV25-1, TRBJ1-1)
CASTHLGGNTEAFF

SEQ ID NO: 118229 - protein, 13 aa, Homo sapiens
  CDR3 for alpha chain variable domain of TCR clone 59115 (TRAV26-2, TRAJ54)
CIPRVGGAQKLLF

SEQ ID NO: 118230 - protein, 16 aa, Homo sapiens
  CDR3 for beta chain variable domain of TCR clone 59115 (TRBV4-1, TRBJ1-1)
YASSSMSERPNTEAFF

SEQ ID NO: 118231 - protein, 13 aa, Homo sapiens
  CDR3 for alpha chain variable domain of TCR clone 59116 (TRAV8-6, TRAJ49)
CAVITNTGNQFYF

SEQ ID NO: 118232 - protein, 14 aa, Homo sapiens
  CDR3 for beta chain variable domain of TCR clone 59116 (TRBV5-4, TRBJ1-1)
CASSLDSRRDEAFF

SEQ ID NO: 118233 - protein, 14 aa, Homo sapiens
  CDR3 for alpha chain variable domain of TCR clone 59117 (TRAV12-2, TRAJ13)
CAVKKTGGYQKVTF

SEQ ID NO: 118234 - protein, 14 aa, Homo sapiens
  CDR3 for beta chain variable domain of TCR clone 59117 (TRBV6-1, TRBJ1-3)
CASVQGGGGNTMYF

SEQ ID NO: 118235 - protein, 12 aa, Homo sapiens
  CDR3 for alpha chain variable domain of TCR clone 59118 (TRAV12-3, TRAJ17)
CAMTLTGNKLTF

SEQ ID NO: 118236 - protein, 12 aa, Homo sapiens
  CDR3 for beta chain variable domain of TCR clone 59118 (TRBV9, TRBJ2-2)
CQQPPTCRGLFF

SEQ ID NO: 118237 - protein, 15 aa, Homo sapiens
  CDR3 for alpha chain variable domain of TCR clone 59119 (TRAV8-4, TRAJ13)
CAVSDWGGGYQEVTF

SEQ ID NO: 118238 - protein, 15 aa, Homo sapiens
  CDR3 for beta chain variable domain of TCR clone 59119 (TRBV25-1, TRBJ1-4)
CASSPGDSTNEKLFF

SEQ ID NO: 118239 - protein, 14 aa, Homo sapiens
  CDR3 for alpha chain variable domain of TCR clone 59120 (TRAV26-1, TRAJ39)
CIVRGSRAGNMLTF

SEQ ID NO: 118240 - protein, 17 aa, Homo sapiens
  CDR3 for beta chain variable domain of TCR clone 59120 (TRBV13, TRBJ2-3)
CASSLSRVAGGRNTQYF

SEQ ID NO: 118241 - protein, 14 aa, Homo sapiens
  CDR3 for alpha chain variable domain of TCR clone 59121 (TRAV30, TRAJ26)
CGTEIVSYGQNFVF

SEQ ID NO: 118242 - protein, 12 aa, Homo sapiens
  CDR3 for beta chain variable domain of TCR clone 59121 (TRBV11-2, TRBJ2-2)
CASSLGGGELFF

SEQ ID NO: 118243 - protein, 16 aa, Homo sapiens
  CDR3 for alpha chain variable domain of TCR clone 59122 (TRAV13-1, TRAJ45)
CAARGSRKGGADGLTF

SEQ ID NO: 118244 - protein, 12 aa, Homo sapiens
  CDR3 for beta chain variable domain of TCR clone 59122 (TRBV12-4, TRBJ2-5)
CQQKAGKETQYF

SEQ ID NO: 118245 - protein, 14 aa, Homo sapiens
  CDR3 for alpha chain variable domain of TCR clone 59123 (TRAV16, TRAJ17)
CALSGRAAGNKLTF

SEQ ID NO: 118246 - protein, 15 aa, Homo sapiens
  CDR3 for beta chain variable domain of TCR clone 59123 (TRBV3-1, TRBJ1-2)
CASSPIRLPEGGYTF

SEQ ID NO: 118247 - protein, 16 aa, Homo sapiens
  CDR3 for alpha chain variable domain of TCR clone 59124 (TRAV3, TRAJ37)
CAVRVRGSGNTGKLIF

SEQ ID NO: 118248 - protein, 18 aa, Homo sapiens
  CDR3 for beta chain variable domain of TCR clone 59124 (TRBV11-2, TRBJ2-3)
CASSLGGASRGAPNTQYF

SEQ ID NO: 118249 - protein, 16 aa, Homo sapiens
  CDR3 for alpha chain variable domain of TCR clone 59125 (TRAV8-3, TRAJ13)
CAVGAYPSGGYQKVTF

SEQ ID NO: 118250 - protein, 15 aa, Homo sapiens
  CDR3 for beta chain variable domain of TCR clone 59125 (TRBV19, TRBJ1-5)
CASGIVWADNQPQHF

SEQ ID NO: 118251 - protein, 16 aa, Homo sapiens
  CDR3 for alpha chain variable domain of TCR clone 59126 (TRAV23/DV6, TRAJ57)
CSKLYLSQGGSEKLVF

SEQ ID NO: 118252 - protein, 14 aa, Homo sapiens
  CDR3 for beta chain variable domain of TCR clone 59126 (TRBV25-1, TRBJ1-1)
CASTHLGGNTEAFF

SEQ ID NO: 118253 - protein, 14 aa, Homo sapiens
  CDR3 for alpha chain variable domain of TCR clone 59127 (TRAV16, TRAJ33)
CALSAMDSNYQLIW

SEQ ID NO: 118254 - protein, 15 aa, Homo sapiens
  CDR3 for beta chain variable domain of TCR clone 59127 (TRBV28, TRBJ2-7)
CAGSLEAYPIYEQYF

SEQ ID NO: 118255 - protein, 21 aa, Homo sapiens
  CDR3 for alpha chain variable domain of TCR clone 59128 (TRAV39, TRAJ49)
CMTSLPPTSVPWTNTGNQFYF

SEQ ID NO: 118256 - protein, 17 aa, Homo sapiens
  CDR3 for beta chain variable domain of TCR clone 59128 (TRBV20-1, TRBJ2-1)
CSARDRRRASSYNEQFF

SEQ ID NO: 118257 - protein, 16 aa, Homo sapiens
  CDR3 for alpha chain variable domain of TCR clone 59129 (TRAV12-2, TRAJ28)
CAVITDSGAGSYQLTF

SEQ ID NO: 118258 - protein, 16 aa, Homo sapiens
  CDR3 for beta chain variable domain of TCR clone 59129 (TRBV19, TRBJ2-1)
CASSKAGPSSYNEQFF

SEQ ID NO: 118259 - protein, 13 aa, Homo sapiens
  CDR3 for alpha chain variable domain of TCR clone 59130 (TRAV21, TRAJ37)
CAVSSGNTGKLIF

SEQ ID NO: 118260 - protein, 16 aa, Homo sapiens
  CDR3 for beta chain variable domain of TCR clone 59130 (TRBV19, TRBJ2-3)
CASSPGLLASTDTQYF

SEQ ID NO: 118261 - protein, 13 aa, Homo sapiens
  CDR3 for alpha chain variable domain of TCR clone 59131 (TRAV35, TRAJ57)
CAGSQGGSEKLVF

SEQ ID NO: 118262 - protein, 14 aa, Homo sapiens
  CDR3 for beta chain variable domain of TCR clone 59131 (TRBV25-1, TRBJ1-1)
CASTRLGGNTEAFF

SEQ ID NO: 118263 - protein, 15 aa, Homo sapiens
  CDR3 for alpha chain variable domain of TCR clone 59132 (TRAV12-1, TRAJ9)
CVVSFGDTGGFKTIF

SEQ ID NO: 118264 - protein, 15 aa, Homo sapiens
  CDR3 for beta chain variable domain of TCR clone 59132 (TRBV20-1, TRBJ2-7)
CSARDRASGMDEQYF

SEQ ID NO: 118265 - protein, 11 aa, Homo sapiens
  CDR3 for alpha chain variable domain of TCR clone 59133 (TRAV13-1, TRAJ6)
CATLGSYITTF

SEQ ID NO: 118266 - protein, 12 aa, Homo sapiens
  CDR3 for beta chain variable domain of TCR clone 59133 (TRBV11-2, TRBJ2-1)
CASSPGNNEQFF

SEQ ID NO: 118267 - protein, 16 aa, Homo sapiens
  CDR3 for alpha chain variable domain of TCR clone 59134 (TRAV30, TRAJ24)
CGTEIVDADSWGKFQF

SEQ ID NO: 118268 - protein, 15 aa, Homo sapiens
  CDR3 for beta chain variable domain of TCR clone 59134 (TRBV28, TRBJ2-7)
CASSPGGRGFYEQYF

SEQ ID NO: 118269 - protein, 11 aa, Homo sapiens
  CDR3 for alpha chain variable domain of TCR clone 59135 (TRAV2, TRAJ13)
CASGGYQKVTF

SEQ ID NO: 118270 - protein, 17 aa, Homo sapiens
  CDR3 for beta chain variable domain of TCR clone 59135 (TRBV7-9, TRBJ2-2)
CASSLGVARMNTGELFF

SEQ ID NO: 118271 - protein, 14 aa, Homo sapiens
  CDR3 for alpha chain variable domain of TCR clone 59136 (TRAV17, TRAJ33)
CATDARRSSYQLIW

SEQ ID NO: 118272 - protein, 14 aa, Homo sapiens
  CDR3 for beta chain variable domain of TCR clone 59136 (TRBV25-1, TRBJ1-4)
CASSGGGQPEKLFF

SEQ ID NO: 118273 - protein, 13 aa, Homo sapiens
  CDR3 for alpha chain variable domain of TCR clone 59137 (TRAV39, TRAJ58)
RAGEETSGSRLTF

SEQ ID NO: 118274 - protein, 13 aa, Homo sapiens
  CDR3 for beta chain variable domain of TCR clone 59137 (TRBV15, TRBJ2-7)
CATSTTGHYEQYF

SEQ ID NO: 118275 - protein, 13 aa, Homo sapiens
  CDR3 for alpha chain variable domain of TCR clone 59138 (TRAV12-2, TRAJ37)
CAGGSGNTGKLIF

SEQ ID NO: 118276 - protein, 14 aa, Homo sapiens
  CDR3 for beta chain variable domain of TCR clone 59138 (TRBV6-1, TRBJ2-6)
CASQQGAGANVLSF

SEQ ID NO: 118277 - protein, 10 aa, Homo sapiens
  CDR3 for alpha chain variable domain of TCR clone 59139 (TRAV1-2, TRAJ20)
CALDDYKLSF

SEQ ID NO: 118278 - protein, 16 aa, Homo sapiens
  CDR3 for beta chain variable domain of TCR clone 59139 (TRBV20-1, TRBJ1-1)
CSARALTQGMNTEAFF

SEQ ID NO: 118279 - protein, 12 aa, Homo sapiens
  CDR3 for alpha chain variable domain of TCR clone 59140 (TRAV25, TRAJ16)
CAGNRDGQKLLF

SEQ ID NO: 118280 - protein, 15 aa, Homo sapiens
  CDR3 for beta chain variable domain of TCR clone 59140 (TRBV20-1, TRBJ2-7)
CSARVPAAYFYEQYF

SEQ ID NO: 118281 - protein, 15 aa, Homo sapiens
  CDR3 for alpha chain variable domain of TCR clone 59141 (TRAV8-3, TRAJ45)
CASSYSGGGADGLTF

SEQ ID NO: 118282 - protein, 13 aa, Homo sapiens
  CDR3 for beta chain variable domain of TCR clone 59141 (TRBV10-3, TRBJ2-7)
CASKLGVNYEQYF

SEQ ID NO: 118283 - protein, 12 aa, Homo sapiens
  CDR3 for alpha chain variable domain of TCR clone 59142 (TRAV3, TRAJ43)
CAVRDLNNDMRF

SEQ ID NO: 118284 - protein, 15 aa, Homo sapiens
  CDR3 for beta chain variable domain of TCR clone 59142 (TRBV27, TRBJ1-5)
CASSLGTGFDQPQHF

SEQ ID NO: 118285 - protein, 13 aa, Homo sapiens
  CDR3 for alpha chain variable domain of TCR clone 59143 (TRAV12-2, TRAJ18)
CAVRGPTLGRLYF

SEQ ID NO: 118286 - protein, 20 aa, Homo sapiens
  CDR3 for beta chain variable domain of TCR clone 59143 (TRBV7-8, TRBJ2-2)
CASSHLFPGPTIHITGELFF

SEQ ID NO: 118287 - protein, 12 aa, Homo sapiens
  CDR3 for alpha chain variable domain of TCR clone 59144 (TRAV3, TRAJ43)
CAVRDPNNDMRF

SEQ ID NO: 118288 - protein, 13 aa, Homo sapiens
  CDR3 for beta chain variable domain of TCR clone 59144 (TRBV3-1, TRBJ1-1)
CASSPGVITEAFF

SEQ ID NO: 118289 - protein, 16 aa, Homo sapiens
  CDR3 for alpha chain variable domain of TCR clone 59145 (TRAV3, TRAJ23)
CAVKIGIYNQGGKLIF

SEQ ID NO: 118290 - protein, 17 aa, Homo sapiens
  CDR3 for beta chain variable domain of TCR clone 59145 (TRBV10-3, TRBJ2-6)
CAISESTAPSGANVLAF

SEQ ID NO: 118291 - protein, 16 aa, Homo sapiens
  CDR3 for alpha chain variable domain of TCR clone 59146 (TRAV16, TRAJ4)
CARSRMFSGGYNKLIF

SEQ ID NO: 118292 - protein, 16 aa, Homo sapiens
  CDR3 for beta chain variable domain of TCR clone 59146 (TRBV24-1, TRBJ2-3)
CATSDPGIGATDTQYF

SEQ ID NO: 118293 - protein, 14 aa, Homo sapiens
  CDR3 for alpha chain variable domain of TCR clone 59147 (TRAV12-2, TRAJ24)
CAVTPADSWGKLQF

SEQ ID NO: 118294 - protein, 14 aa, Homo sapiens
  CDR3 for beta chain variable domain of TCR clone 59147 (TRBV19, TRBJ2-1)
CASPTFVLSGEQFF

SEQ ID NO: 118295 - protein, 13 aa, Homo sapiens
  CDR3 for alpha chain variable domain of TCR clone 59148 (TRAV3, TRAJ20)
CAVRDWAAGKLSF

SEQ ID NO: 118296 - protein, 15 aa, Homo sapiens
  CDR3 for beta chain variable domain of TCR clone 59148 (TRBV20-1, TRBJ2-6)
CSARDRGPGANVLTF

SEQ ID NO: 118297 - protein, 15 aa, Homo sapiens
  CDR3 for alpha chain variable domain of TCR clone 59149 (TRAV12-1, TRAJ44)
CVVFVNTGTASRLTF

SEQ ID NO: 118298 - protein, 17 aa, Homo sapiens
  CDR3 for beta chain variable domain of TCR clone 59149 (TRBV7-8, TRBJ2-6)
CASSAGTGGAGANVLTF

SEQ ID NO: 118299 - protein, 17 aa, Homo sapiens
  CDR3 for alpha chain variable domain of TCR clone 59150 (TRAV2, TRAJ36)
CAVEDRGNWGKQPLLWA

SEQ ID NO: 118300 - protein, 14 aa, Homo sapiens
  CDR3 for beta chain variable domain of TCR clone 59150 (TRBV7-9, TRBJ2-5)
CASSLDTAQETQYF

SEQ ID NO: 118301 - protein, 15 aa, Homo sapiens
  CDR3 for alpha chain variable domain of TCR clone 59151 (TRAV19, TRAJ53)
CAPSSSGGSNYKLTF

SEQ ID NO: 118302 - protein, 13 aa, Homo sapiens
  CDR3 for beta chain variable domain of TCR clone 59151 (TRBV7-6, TRBJ2-7)
CASSLDHTHEQCF

SEQ ID NO: 118303 - protein, 16 aa, Homo sapiens
  CDR3 for alpha chain variable domain of TCR clone 59152 (TRAV3, TRAJ37)
CAVRGKGSGNTGKLIL

SEQ ID NO: 118304 - protein, 13 aa, Homo sapiens
  CDR3 for beta chain variable domain of TCR clone 59152 (TRBV7-3, TRBJ1-1)
CASSQDWGAEAFF

SEQ ID NO: 118305 - protein, 13 aa, Homo sapiens
  CDR3 for alpha chain variable domain of TCR clone 59153 (TRAV13-2, TRAJ13)
CAERPGGYQKVAF

SEQ ID NO: 118306 - protein, 14 aa, Homo sapiens
  CDR3 for beta chain variable domain of TCR clone 59153 (TRBV23-1, TRBJ2-5)
CASSFLRSQETQYF

SEQ ID NO: 118307 - protein, 11 aa, Homo sapiens
  CDR3 for alpha chain variable domain of TCR clone 59154 (TRAV3, TRAJ21)
CAVGNFNKFYF

SEQ ID NO: 118308 - protein, 13 aa, Homo sapiens
  CDR3 for beta chain variable domain of TCR clone 59154 (TRBV7-3, TRBJ1-1)
CASSLTQGTEAFF

SEQ ID NO: 118309 - protein, 14 aa, Homo sapiens
  CDR3 for alpha chain variable domain of TCR clone 59155 (TRAV1-1, TRAJ28)
CAAPSGAGSYQLTF

SEQ ID NO: 118310 - protein, 15 aa, Homo sapiens
  CDR3 for beta chain variable domain of TCR clone 59155 (TRBV7-2, TRBJ1-2)
CASSLVSGGDCGYTF

SEQ ID NO: 118311 - protein, 17 aa, Homo sapiens
  CDR3 for alpha chain variable domain of TCR clone 59156 (TRAV3, TRAJ6)
CAVRDGPRAGGSYIPTF

SEQ ID NO: 118312 - protein, 20 aa, Homo sapiens
  CDR3 for beta chain variable domain of TCR clone 59156 (TRBV28, TRBJ2-1)
CASTPVGRSPGLAGGNEQFF

SEQ ID NO: 118313 - protein, 11 aa, Homo sapiens
  CDR3 for alpha chain variable domain of TCR clone 59157 (TRAV2, TRAJ33)
CAVESNYQLIW

SEQ ID NO: 118314 - protein, 17 aa, Homo sapiens
  CDR3 for beta chain variable domain of TCR clone 59157 (TRBV5-5, TRBJ1-2)
CASSLGSLDGQSEGYTF

SEQ ID NO: 118315 - protein, 12 aa, Homo sapiens
  CDR3 for alpha chain variable domain of TCR clone 59158 (TRAV13-1, TRAJ53)
AASGGSNYKLTF

SEQ ID NO: 118316 - protein, 15 aa, Homo sapiens
  CDR3 for beta chain variable domain of TCR clone 59158 (TRBV5-1, TRBJ2-1)
CACSPPRAPYNEQFF

SEQ ID NO: 118317 - protein, 15 aa, Homo sapiens
  CDR3 for alpha chain variable domain of TCR clone 59159 (TRAV8-6, TRAJ10)
CAVSDQARGGNKLTF

SEQ ID NO: 118318 - protein, 15 aa, Homo sapiens
  CDR3 for beta chain variable domain of TCR clone 59159 (TRBV3-1, TRBJ2-5)
CASSANLGGPETQYF

SEQ ID NO: 118319 - protein, 13 aa, Homo sapiens
  CDR3 for alpha chain variable domain of TCR clone 59160 (TRAV12-3, TRAJ31)
CAMSANNNARPMF

SEQ ID NO: 118320 - protein, 16 aa, Homo sapiens
  CDR3 for beta chain variable domain of TCR clone 59160 (TRBV7-9, TRBJ1-2)
CASSLGFSSGEDGYTF

SEQ ID NO: 118321 - protein, 12 aa, Homo sapiens
  CDR3 for alpha chain variable domain of TCR clone 59161 (TRAV21, TRAJ31)
CAVSPARGRLTF

SEQ ID NO: 118322 - protein, 14 aa, Homo sapiens
  CDR3 for beta chain variable domain of TCR clone 59161 (TRBV28, TRBJ2-7)
CASSLLRISYEQYF

SEQ ID NO: 118323 - protein, 12 aa, Homo sapiens
  CDR3 for alpha chain variable domain of TCR clone 59162 (TRAV30, TRAJ43)
CGTEEKGNDMRF

SEQ ID NO: 118324 - protein, 13 aa, Homo sapiens
  CDR3 for beta chain variable domain of TCR clone 59162 (TRBV27, TRBJ2-7)
CASSFSQGYEQYF

SEQ ID NO: 118325 - protein, 13 aa, Homo sapiens
  CDR3 for alpha chain variable domain of TCR clone 59163 (TRAV12-1, TRAJ26)
CVVRRNYGQNFVF

SEQ ID NO: 118326 - protein, 14 aa, Homo sapiens
  CDR3 for beta chain variable domain of TCR clone 59163 (TRBV4-2, TRBJ2-1)
CASGLDRAYNEQFL

SEQ ID NO: 118327 - protein, 14 aa, Homo sapiens
  CDR3 for alpha chain variable domain of TCR clone 59164 (TRAV12-3, TRAJ10)
SHLPLTGGGNKLTF

SEQ ID NO: 118328 - protein, 12 aa, Homo sapiens
  CDR3 for beta chain variable domain of TCR clone 59164 (TRBV19, TRBJ1-5)
CASSIAQQPQHF

SEQ ID NO: 118329 - protein, 15 aa, Homo sapiens
  CDR3 for alpha chain variable domain of TCR clone 59165 (TRAV12-3, TRAJ49)
CAMAVTPITGNQFYF

SEQ ID NO: 118330 - protein, 18 aa, Homo sapiens
  CDR3 for beta chain variable domain of TCR clone 59165 (TRBV4-1, TRBJ1-5)
CASSQDPRGQGLNQPQHF

SEQ ID NO: 118331 - protein, 17 aa, Homo sapiens
  CDR3 for alpha chain variable domain of TCR clone 59166 (TRAV4, TRAJ18)
CLVGERSVGSTLGRLYF

SEQ ID NO: 118332 - protein, 15 aa, Homo sapiens
  CDR3 for beta chain variable domain of TCR clone 59166 (TRBV7-8, TRBJ2-1)
CASSLAGGLYNEQFF

SEQ ID NO: 118333 - protein, 13 aa, Homo sapiens
  CDR3 for alpha chain variable domain of TCR clone 59167 (TRAV38-1, TRAJ42)
CARWGGSQGNLIF

SEQ ID NO: 118334 - protein, 17 aa, Homo sapiens
  CDR3 for beta chain variable domain of TCR clone 59167 (TRBV20-1, TRBJ2-1)
CSARDPLAGVWDNEKFF

SEQ ID NO: 118335 - protein, 16 aa, Homo sapiens
  CDR3 for alpha chain variable domain of TCR clone 59168 (TRAV30, TRAJ24)
CGTEIVDADSWGKSQF

SEQ ID NO: 118336 - protein, 15 aa, Homo sapiens
  CDR3 for beta chain variable domain of TCR clone 59168 (TRBV20-1, TRBJ2-7)
CSARDRVSGMDEQYF

SEQ ID NO: 118337 - protein, 14 aa, Homo sapiens
  CDR3 for alpha chain variable domain of TCR clone 59169 (TRAV3, TRAJ9)
CAVRDDTGGFKTIF

SEQ ID NO: 118338 - protein, 18 aa, Homo sapiens
  CDR3 for beta chain variable domain of TCR clone 59169 (TRBV20-1, TRBJ2-6)
CSAETTPTHGSGANVLTL

SEQ ID NO: 118339 - protein, 13 aa, Homo sapiens
  CDR3 for alpha chain variable domain of TCR clone 59170 (TRAV36/DV7, TRAJ54)
CAVDIQGAQKLVF

SEQ ID NO: 118340 - protein, 13 aa, Homo sapiens
  CDR3 for beta chain variable domain of TCR clone 59170 (TRBV10-3, TRBJ2-7)
CASKLAVNYEQYF

SEQ ID NO: 118341 - protein, 17 aa, Homo sapiens
  CDR3 for alpha chain variable domain of TCR clone 59171 (TRAV26-1, TRAJ11)
CIVRVGQSNSGYSTLTF

SEQ ID NO: 118342 - protein, 12 aa, Homo sapiens
  CDR3 for beta chain variable domain of TCR clone 59171 (TRBV18, TRBJ1-4)
CASSPSREKLFF

SEQ ID NO: 118343 - protein, 15 aa, Homo sapiens
  CDR3 for alpha chain variable domain of TCR clone 59172 (TRAV26-1, TRAJ22)
CIVRVSFWFCKATDL

SEQ ID NO: 118344 - protein, 13 aa, Homo sapiens
  CDR3 for beta chain variable domain of TCR clone 59172 (TRBV7-9, TRBJ1-2)
CASSLKQYYGYTF

SEQ ID NO: 118345 - protein, 13 aa, Homo sapiens
  CDR3 for alpha chain variable domain of TCR clone 59173 (TRAV24, TRAJ42)
CAFSTGSQGNLIF

SEQ ID NO: 118346 - protein, 12 aa, Homo sapiens
  CDR3 for beta chain variable domain of TCR clone 59173 (TRBV5-5, TRBJ2-5)
CASSYFGETQYF

SEQ ID NO: 118347 - protein, 13 aa, Homo sapiens
  CDR3 for alpha chain variable domain of TCR clone 59174 (TRAV27, TRAJ41)
CAGEGNSGYALNF

SEQ ID NO: 118348 - protein, 17 aa, Homo sapiens
  CDR3 for beta chain variable domain of TCR clone 59174 (TRBV6-3, TRBJ2-7)
CASSSPGTVSTSSTSGR

SEQ ID NO: 118349 - protein, 19 aa, Homo sapiens
  CDR3 for alpha chain variable domain of TCR clone 59175 (TRAV1-2, TRAJ26)
CLLPLCCERLDNYGQNFVF

SEQ ID NO: 118350 - protein, 12 aa, Homo sapiens
  CDR3 for beta chain variable domain of TCR clone 59175 (TRBV20-1, TRBJ2-1)
CSAQYTYNEQFF

SEQ ID NO: 118351 - protein, 14 aa, Homo sapiens
  CDR3 for alpha chain variable domain of TCR clone 59176 (TRAV1-2, TRAJ16)
CAVNRFSDGQKLLF

SEQ ID NO: 118352 - protein, 14 aa, Homo sapiens
  CDR3 for beta chain variable domain of TCR clone 59176 (TRBV27, TRBJ2-2)
CASSLGAATGELFF

SEQ ID NO: 118353 - protein, 11 aa, Homo sapiens
  CDR3 for alpha chain variable domain of TCR clone 59177 (TRAV13-1, TRAJ10)
RVTGGGNKLTF

SEQ ID NO: 118354 - protein, 13 aa, Homo sapiens
  CDR3 for beta chain variable domain of TCR clone 59177 (TRBV20-1, TRBJ1-1)
CSARGGGNTEAFF

SEQ ID NO: 118355 - protein, 17 aa, Homo sapiens
  CDR3 for alpha chain variable domain of TCR clone 59178 (TRAV12-3, TRAJ6)
CAMSARGGAGGSYIPTF

SEQ ID NO: 118356 - protein, 12 aa, Homo sapiens
  CDR3 for beta chain variable domain of TCR clone 59178 (TRBV12-4, TRBJ2-3)
CASRTLPDTQYF

SEQ ID NO: 118357 - protein, 13 aa, Homo sapiens
  CDR3 for alpha chain variable domain of TCR clone 59179 (TRAV3, TRAJ20)
CREAFCNDYKLSF

SEQ ID NO: 118358 - protein, 15 aa, Homo sapiens
  CDR3 for beta chain variable domain of TCR clone 59179 (TRBV19, TRBJ2-6)
CASVRRDSGANVLTF

SEQ ID NO: 118359 - protein, 12 aa, Homo sapiens
  CDR3 for alpha chain variable domain of TCR clone 59180 (TRAV8-4, TRAJ43)
CAVSVNNNDMRF

SEQ ID NO: 118360 - protein, 13 aa, Homo sapiens
  CDR3 for beta chain variable domain of TCR clone 59180 (TRBV7-2, TRBJ2-7)
CASSSPSGSEQYF

SEQ ID NO: 118361 - protein, 13 aa, Homo sapiens
  CDR3 for alpha chain variable domain of TCR clone 59181 (TRAV12-1, TRAJ7)
CVVNMRGNNRLAF

SEQ ID NO: 118362 - protein, 14 aa, Homo sapiens
  CDR3 for beta chain variable domain of TCR clone 59181 (TRBV7-6, TRBJ2-3)
CASSLGTVTDTQYF

SEQ ID NO: 118363 - protein, 16 aa, Homo sapiens
  CDR3 for alpha chain variable domain of TCR clone 59182 (TRAV12-3, TRAJ53)
CAMSPGSGGSNYKLTF

SEQ ID NO: 118364 - protein, 15 aa, Homo sapiens
  CDR3 for beta chain variable domain of TCR clone 59182 (TRBV18, TRBJ2-3)
CASSPLAGETDTQYF

SEQ ID NO: 118365 - protein, 14 aa, Homo sapiens
  CDR3 for alpha chain variable domain of TCR clone 59183 (TRAV12-2, TRAJ13)
CAVKKTGGYQKVTF

SEQ ID NO: 118366 - protein, 15 aa, Homo sapiens
  CDR3 for beta chain variable domain of TCR clone 59183 (TRBV27, TRBJ2-1)
CASSNGGGSSNELFF

SEQ ID NO: 118367 - protein, 16 aa, Homo sapiens
  CDR3 for alpha chain variable domain of TCR clone 59184 (TRAV3, TRAJ6)
CAVRDGMGRRKLHTYI

SEQ ID NO: 118368 - protein, 13 aa, Homo sapiens
  CDR3 for beta chain variable domain of TCR clone 59184 (TRBV7-9, TRBJ1-2)
CASSLKQNYGYTF

SEQ ID NO: 118369 - protein, 14 aa, Homo sapiens
  CDR3 for alpha chain variable domain of TCR clone 59185 (TRAV8-3, TRAJ4)
CAVGASGGYNKLIF

SEQ ID NO: 118370 - protein, 16 aa, Homo sapiens
  CDR3 for beta chain variable domain of TCR clone 59185 (TRBV4-3, TRBJ2-2)
CAGSHLQGSGTGELFF

SEQ ID NO: 118371 - protein, 11 aa, Homo sapiens
  CDR3 for alpha chain variable domain of TCR clone 59186 (TRAV20, TRAJ23)
CACNQGGKLIF

SEQ ID NO: 118372 - protein, 16 aa, Homo sapiens
  CDR3 for beta chain variable domain of TCR clone 59186 (TRBV4-2, TRBJ2-3)
CASSQELAGDTDTQYF

SEQ ID NO: 118373 - protein, 18 aa, Homo sapiens
  CDR3 for alpha chain variable domain of TCR clone 59187 (TRAV13-1, TRAJ52)
CAASKRSAGGTSYGKLTF

SEQ ID NO: 118374 - protein, 16 aa, Homo sapiens
  CDR3 for beta chain variable domain of TCR clone 59187 (TRBV4-2, TRBJ2-3)
CASSQELAGDTDTQYF

SEQ ID NO: 118375 - protein, 14 aa, Homo sapiens
  CDR3 for alpha chain variable domain of TCR clone 59188 (TRAV20, TRAJ56)
CAVQFGGANSKLTF

SEQ ID NO: 118376 - protein, 13 aa, Homo sapiens
  CDR3 for beta chain variable domain of TCR clone 59188 (TRBV6-4, TRBJ1-5)
CASSADLNQPQHF

SEQ ID NO: 118377 - protein, 16 aa, Homo sapiens
  CDR3 for alpha chain variable domain of TCR clone 59189 (TRAV3, TRAJ10)
CAVRDMKAGGGNKLTF

SEQ ID NO: 118378 - protein, 15 aa, Homo sapiens
  CDR3 for beta chain variable domain of TCR clone 59189 (TRBV11-2, TRBJ1-6)
CASTGFGTAVSPLHF

SEQ ID NO: 118379 - protein, 11 aa, Homo sapiens
  CDR3 for alpha chain variable domain of TCR clone 59190 (TRAV13-1, TRAJ39)
CASHAGNMLTF

SEQ ID NO: 118380 - protein, 12 aa, Homo sapiens
  CDR3 for beta chain variable domain of TCR clone 59190 (TRBV7-8, TRBJ2-7)
CASSLGDREQYF

SEQ ID NO: 118381 - protein, 12 aa, Homo sapiens
  CDR3 for alpha chain variable domain of TCR clone 59191 (TRAV12-3, TRAJ17)
CAMTLTGNKLTF

SEQ ID NO: 118382 - protein, 18 aa, Homo sapiens
  CDR3 for beta chain variable domain of TCR clone 59191 (TRBV4-3, TRBJ1-6)
CASSQETPASSYNPPLHF

SEQ ID NO: 118383 - protein, 18 aa, Homo sapiens
  CDR3 for alpha chain variable domain of TCR clone 59192 (TRAV17, TRAJ28)
CATDPPRGSGAGSCQLTF

SEQ ID NO: 118384 - protein, 14 aa, Homo sapiens
  CDR3 for beta chain variable domain of TCR clone 59192 (TRBV13, TRBJ2-5)
CASSLDYPQETQYF

SEQ ID NO: 118385 - protein, 11 aa, Homo sapiens
  CDR3 for alpha chain variable domain of TCR clone 59193 (TRAV25, TRAJ21)
CASRSFNKFYF

SEQ ID NO: 118386 - protein, 17 aa, Homo sapiens
  CDR3 for beta chain variable domain of TCR clone 59193 (TRBV7-9, TRBJ2-4)
CASSHGTLQYPKNIQYF

SEQ ID NO: 118387 - protein, 10 aa, Homo sapiens
  CDR3 for alpha chain variable domain of TCR clone 59194 (TRAV30, TRAJ48)
CGIGNEKLNF

SEQ ID NO: 118388 - protein, 14 aa, Homo sapiens
  CDR3 for beta chain variable domain of TCR clone 59194 (TRBV7-6, TRBJ2-3)
CASSVAGGTDTQYF

SEQ ID NO: 118389 - protein, 15 aa, Homo sapiens
  CDR3 for alpha chain variable domain of TCR clone 59195 (TRAV4, TRAJ39)
CLVGPNNNAGNMLTF

SEQ ID NO: 118390 - protein, 15 aa, Homo sapiens
  CDR3 for beta chain variable domain of TCR clone 59195 (TRBV28, TRBJ2-1)
CASSIIAGGRSEQFF

SEQ ID NO: 118391 - protein, 13 aa, Homo sapiens
  CDR3 for alpha chain variable domain of TCR clone 59196 (TRAV2, TRAJ40)
CAVVTSGTYKYIF

SEQ ID NO: 118392 - protein, 14 aa, Homo sapiens
  CDR3 for beta chain variable domain of TCR clone 59196 (TRBV2, TRBJ2-1)
CASSEALIYNEQFF

SEQ ID NO: 118393 - protein, 13 aa, Homo sapiens
  CDR3 for alpha chain variable domain of TCR clone 59197 (TRAV17, TRAJ5)
CAPMDTGRRALTF

SEQ ID NO: 118394 - protein, 15 aa, Homo sapiens
  CDR3 for beta chain variable domain of TCR clone 59197 (TRBV6-6, TRBJ2-5)
CASSPGGGLEETQCF

SEQ ID NO: 118395 - protein, 17 aa, Homo sapiens
  CDR3 for alpha chain variable domain of TCR clone 59198 (TRAV3, TRAJ42)
CAVRDREYGGSQGNLIF

SEQ ID NO: 118396 - protein, 13 aa, Homo sapiens
  CDR3 for beta chain variable domain of TCR clone 59198 (TRBV10-3, TRBJ2-7)
CASKLAVNYEQYF

SEQ ID NO: 118397 - protein, 14 aa, Homo sapiens
  CDR3 for alpha chain variable domain of TCR clone 59199 (TRAV9-2, TRAJ39)
CALYIYNAGNMLTF

SEQ ID NO: 118398 - protein, 15 aa, Homo sapiens
  CDR3 for beta chain variable domain of TCR clone 59199 (TRBV19, TRBJ1-1)
CASTSGQIQNAEAFF

SEQ ID NO: 118399 - protein, 14 aa, Homo sapiens
  CDR3 for alpha chain variable domain of TCR clone 59200 (TRAV8-4, TRAJ9)
CAVRINTGGFKTVF

SEQ ID NO: 118400 - protein, 15 aa, Homo sapiens
  CDR3 for beta chain variable domain of TCR clone 59200 (TRBV10-2, TRBJ2-6)
CASSEQGTGANVLTF

SEQ ID NO: 118401 - protein, 11 aa, Homo sapiens
  CDR3 for alpha chain variable domain of TCR clone 59201 (TRAV13-2, TRAJ54)
RAVQGAQKLVF

SEQ ID NO: 118402 - protein, 17 aa, Homo sapiens
  CDR3 for beta chain variable domain of TCR clone 59201 (TRBV13, TRBJ2-3)
CASSLSRVAGGRNTQYF

SEQ ID NO: 118403 - protein, 17 aa, Homo sapiens
  CDR3 for alpha chain variable domain of TCR clone 59202 (TRAV26-2, TRAJ42)
CILRDVGYGGSQGNLIF

SEQ ID NO: 118404 - protein, 16 aa, Homo sapiens
  CDR3 for beta chain variable domain of TCR clone 59202 (TRBV19, TRBJ2-1)
CASSKAGPSSYNEQFF

SEQ ID NO: 118405 - protein, 15 aa, Homo sapiens
  CDR3 for alpha chain variable domain of TCR clone 59203 (TRAV21, TRAJ37)
CAVRPTLSNTGKLIF

SEQ ID NO: 118406 - protein, 16 aa, Homo sapiens
  CDR3 for beta chain variable domain of TCR clone 59203 (TRBV24-1, TRBJ2-3)
CATSDRRQDLTGTQYF

SEQ ID NO: 118407 - protein, 11 aa, Homo sapiens
  CDR3 for alpha chain variable domain of TCR clone 59204 (TRAV21, TRAJ48)
CAVDGNEKLTF

SEQ ID NO: 118408 - protein, 15 aa, Homo sapiens
  CDR3 for beta chain variable domain of TCR clone 59204 (TRBV7-2, TRBJ2-1)
CASSSGLAGGNEQFF

SEQ ID NO: 118409 - protein, 13 aa, Homo sapiens
  CDR3 for alpha chain variable domain of TCR clone 59205 (TRAV8-3, TRAJ44)
CAVVPGTASKLTF

SEQ ID NO: 118410 - protein, 13 aa, Homo sapiens
  CDR3 for beta chain variable domain of TCR clone 59205 (TRBV10-3, TRBJ2-7)
CASKLAANYEQYF

SEQ ID NO: 118411 - protein, 13 aa, Homo sapiens
  CDR3 for alpha chain variable domain of TCR clone 59206 (TRAV26-1, TRAJ29)
CIVRRSGNTPPVF

SEQ ID NO: 118412 - protein, 16 aa, Homo sapiens
  CDR3 for beta chain variable domain of TCR clone 59206 (TRBV11-2, TRBJ2-7)
CASSLAPTGVNYEQYF

SEQ ID NO: 118413 - protein, 14 aa, Homo sapiens
  CDR3 for alpha chain variable domain of TCR clone 59207 (TRAV2, TRAJ29)
CAVEDRVGNKPLVC

SEQ ID NO: 118414 - protein, 15 aa, Homo sapiens
  CDR3 for beta chain variable domain of TCR clone 59207 (TRBV10-3, TRBJ2-1)
CAISDVQDRAYEQFF

SEQ ID NO: 118415 - protein, 11 aa, Homo sapiens
  CDR3 for alpha chain variable domain of TCR clone 59208 (TRAV17, TRAJ9)
CGFTGGFKTIF

SEQ ID NO: 118416 - protein, 16 aa, Homo sapiens
  CDR3 for beta chain variable domain of TCR clone 59208 (TRBV27, TRBJ2-2)
CASSFRGLVRTGELFF

SEQ ID NO: 118417 - protein, 12 aa, Homo sapiens
  CDR3 for alpha chain variable domain of TCR clone 59209 (TRAV21, TRAJ33)
CAKMDSNYQLIW

SEQ ID NO: 118418 - protein, 17 aa, Homo sapiens
  CDR3 for beta chain variable domain of TCR clone 59209 (TRBV11-2, TRBJ2-1)
CASSLYPPGVEYNEQFF

SEQ ID NO: 118419 - protein, 12 aa, Homo sapiens
  CDR3 for alpha chain variable domain of TCR clone 59210 (TRAV21, TRAJ11)
CAATSGYSTLTF

SEQ ID NO: 118420 - protein, 16 aa, Homo sapiens
  CDR3 for beta chain variable domain of TCR clone 59210 (TRBV28, TRBJ2-2)
CASSLEGGSNTGELLF

SEQ ID NO: 118421 - protein, 15 aa, Homo sapiens
  CDR3 for alpha chain variable domain of TCR clone 59211 (TRAV21, TRAJ45)
CAVSYPGGGADGLTF

SEQ ID NO: 118422 - protein, 13 aa, Homo sapiens
  CDR3 for beta chain variable domain of TCR clone 59211 (TRBV20-1, TRBJ2-5)
CSAATELQETQYF

SEQ ID NO: 118423 - protein, 11 aa, Homo sapiens
  CDR3 for alpha chain variable domain of TCR clone 59212 (TRAV21, TRAJ41)
CAVRSGYALNF

SEQ ID NO: 118424 - protein, 13 aa, Homo sapiens
  CDR3 for beta chain variable domain of TCR clone 59212 (TRBV7-9, TRBJ1-2)
CASSVKQNYGYTF

SEQ ID NO: 118425 - protein, 13 aa, Homo sapiens
  CDR3 for alpha chain variable domain of TCR clone 59213 (TRAV3, TRAJ41)
CAVGSNSGYALNF

SEQ ID NO: 118426 - protein, 14 aa, Homo sapiens
  CDR3 for beta chain variable domain of TCR clone 59213 (TRBV7-2, TRBJ2-7)
CASSPKTSFYEQYF

SEQ ID NO: 118427 - protein, 13 aa, Homo sapiens
  CDR3 for alpha chain variable domain of TCR clone 59214 (TRAV23/DV6, TRAJ15)
CAALPAGRNCSVL

SEQ ID NO: 118428 - protein, 14 aa, Homo sapiens
  CDR3 for beta chain variable domain of TCR clone 59214 (TRBV7-9, TRBJ1-2)
CASSRQGANYGYTF

SEQ ID NO: 118429 - protein, 12 aa, Homo sapiens
  CDR3 for alpha chain variable domain of TCR clone 59215 (TRAV12-1, TRAJ34)
CVVAGATDKLIF

SEQ ID NO: 118430 - protein, 16 aa, Homo sapiens
  CDR3 for beta chain variable domain of TCR clone 59215 (TRBV7-2, TRBJ1-2)
CASSSNQDRRGHGYTL

SEQ ID NO: 118431 - protein, 12 aa, Homo sapiens
  CDR3 for alpha chain variable domain of TCR clone 59216 (TRAV6, TRAJ27)
CSRIRGAGKSTF

SEQ ID NO: 118432 - protein, 13 aa, Homo sapiens
  CDR3 for beta chain variable domain of TCR clone 59216 (TRBV7-9, TRBJ1-2)
CASSLKQNYGYTF

SEQ ID NO: 118433 - protein, 13 aa, Homo sapiens
  CDR3 for alpha chain variable domain of TCR clone 59217 (TRAV26-2, TRAJ54)
CIPRVGGAQKLVF

SEQ ID NO: 118434 - protein, 16 aa, Homo sapiens
  CDR3 for beta chain variable domain of TCR clone 59217 (TRBV4-1, TRBJ1-1)
CASSSMSERPNTEAVF

SEQ ID NO: 118435 - protein, 14 aa, Homo sapiens
  CDR3 for alpha chain variable domain of TCR clone 59218 (TRAV12-2, TRAJ33)
CAVKRARSNYQLIC

SEQ ID NO: 118436 - protein, 12 aa, Homo sapiens
  CDR3 for beta chain variable domain of TCR clone 59218 (TRBV24-1, TRBJ2-3)
CATSDSTDTQYF

SEQ ID NO: 118437 - protein, 18 aa, Homo sapiens
  CDR3 for alpha chain variable domain of TCR clone 59219 (TRAV13-1, TRAJ52)
CAAKNPNAGGTSYGKLTF

SEQ ID NO: 118438 - protein, 14 aa, Homo sapiens
  CDR3 for beta chain variable domain of TCR clone 59219 (TRBV7-9, TRBJ2-5)
CASSLDTAQETQYF

SEQ ID NO: 118439 - protein, 16 aa, Homo sapiens
  CDR3 for alpha chain variable domain of TCR clone 59220 (TRAV17, TRAJ35)
CATAEGGIGFGNVLHC

SEQ ID NO: 118440 - protein, 16 aa, Homo sapiens
  CDR3 for beta chain variable domain of TCR clone 59220 (TRBV6-5, TRBJ2-7)
CASSSDQTSGFYEQYF

SEQ ID NO: 118441 - protein, 16 aa, Homo sapiens
  CDR3 for alpha chain variable domain of TCR clone 59221 (TRAV20, TRAJ10)
CAALRGLTGGGNKLTF

SEQ ID NO: 118442 - protein, 14 aa, Homo sapiens
  CDR3 for beta chain variable domain of TCR clone 59221 (TRBV19, TRBJ1-5)
CASRAPDSFLSQHF

SEQ ID NO: 118443 - protein, 11 aa, Homo sapiens
  CDR3 for alpha chain variable domain of TCR clone 59222 (TRAV12-1, TRAJ30)
CVVNGQDKIIF

SEQ ID NO: 118444 - protein, 16 aa, Homo sapiens
  CDR3 for beta chain variable domain of TCR clone 59222 (TRBV24-1, TRBJ2-3)
CATSDAISVITDTQYF

SEQ ID NO: 118445 - protein, 15 aa, Homo sapiens
  CDR3 for alpha chain variable domain of TCR clone 59223 (TRAV2, TRAJ15)
CAVEDREQAGTAPIF

SEQ ID NO: 118446 - protein, 13 aa, Homo sapiens
  CDR3 for beta chain variable domain of TCR clone 59223 (TRBV10-2, TRBJ2-3)
CASSESGDHTQYF

SEQ ID NO: 118447 - protein, 14 aa, Homo sapiens
  CDR3 for alpha chain variable domain of TCR clone 59224 (TRAV16, TRAJ15)
CALSSPQAGTALIF

SEQ ID NO: 118448 - protein, 12 aa, Homo sapiens
  CDR3 for beta chain variable domain of TCR clone 59224 (TRBV18, TRBJ2-5)
CASSPSKETQYF

SEQ ID NO: 118449 - protein, 14 aa, Homo sapiens
  CDR3 for alpha chain variable domain of TCR clone 59225 (TRAV12-1, TRAJ17)
CVVNYKAAGNKLTF

SEQ ID NO: 118450 - protein, 14 aa, Homo sapiens
  CDR3 for beta chain variable domain of TCR clone 59225 (TRBV7-9, TRBJ2-3)
CASSLEDGTDTQYF

SEQ ID NO: 118451 - protein, 12 aa, Homo sapiens
  CDR3 for alpha chain variable domain of TCR clone 59226 (TRAV21, TRAJ34)
CAVRFNTDKLIF

SEQ ID NO: 118452 - protein, 14 aa, Homo sapiens
  CDR3 for beta chain variable domain of TCR clone 59226 (TRBV7-6, TRBJ2-3)
CASSLGTVTDTQYF

SEQ ID NO: 118453 - protein, 11 aa, Homo sapiens
  CDR3 for alpha chain variable domain of TCR clone 59227 (TRAV3, TRAJ13)
CAVTSYQKGTF

SEQ ID NO: 118454 - protein, 15 aa, Homo sapiens
  CDR3 for beta chain variable domain of TCR clone 59227 (TRBV7-9, TRBJ2-7)
CASSSSGLAVYEQYF

SEQ ID NO: 118455 - protein, 14 aa, Homo sapiens
  CDR3 for alpha chain variable domain of TCR clone 59228 (TRAV20, TRAJ22)
CAVQVSGSARQLTF

SEQ ID NO: 118456 - protein, 12 aa, Homo sapiens
  CDR3 for beta chain variable domain of TCR clone 59228 (TRBV11-2, TRBJ2-1)
CASSPGNNEQFF

SEQ ID NO: 118457 - protein, 14 aa, Homo sapiens
  CDR3 for alpha chain variable domain of TCR clone 59229 (TRAV35, TRAJ38)
CAGSNAGNNRMLIW

SEQ ID NO: 118458 - protein, 12 aa, Homo sapiens
  CDR3 for beta chain variable domain of TCR clone 59229 (TRBV19, TRBJ2-7)
CASTDRGYEQYF

SEQ ID NO: 118459 - protein, 12 aa, Homo sapiens
  CDR3 for alpha chain variable domain of TCR clone 59230 (TRAV12-2, TRAJ10)
WGVTGGGNKLTF

SEQ ID NO: 118460 - protein, 14 aa, Homo sapiens
  CDR3 for beta chain variable domain of TCR clone 59230 (TRBV12-4, TRBJ1-1)
CASSLGTGGTEAFF

SEQ ID NO: 118461 - protein, 13 aa, Homo sapiens
  CDR3 for alpha chain variable domain of TCR clone 59231 (TRAV2, TRAJ15)
CAVASQAGTALIF

SEQ ID NO: 118462 - protein, 16 aa, Homo sapiens
  CDR3 for beta chain variable domain of TCR clone 59231 (TRBV5-1, TRBJ1-1)
CASSSGGNSLNTEAFC

SEQ ID NO: 118463 - protein, 14 aa, Homo sapiens
  CDR3 for alpha chain variable domain of TCR clone 59232 (TRAV12-1, TRAJ17)
CVVNYKAAGNKLTF

SEQ ID NO: 118464 - protein, 14 aa, Homo sapiens
  CDR3 for beta chain variable domain of TCR clone 59232 (TRBV4-2, TRBJ2-1)
CASGLDRAYNEQFF

SEQ ID NO: 118465 - protein, 17 aa, Homo sapiens
  CDR3 for alpha chain variable domain of TCR clone 59233 (TRAV26-1, TRAJ28)
CTVRALYSGAGSYQLTF

SEQ ID NO: 118466 - protein, 12 aa, Homo sapiens
  CDR3 for beta chain variable domain of TCR clone 59233 (TRBV12-4, TRBJ2-1)
CASRQTENEQFF

SEQ ID NO: 118467 - protein, 13 aa, Homo sapiens
  CDR3 for alpha chain variable domain of TCR clone 59234 (TRAV13-2, TRAJ13)
CAERPGGYQKVTF

SEQ ID NO: 118468 - protein, 21 aa, Homo sapiens
  CDR3 for beta chain variable domain of TCR clone 59234 (TRBV18, TRBJ2-5)
CASSPPSSGGGEDPVLRARHA

SEQ ID NO: 118469 - protein, 18 aa, Homo sapiens
  CDR3 for alpha chain variable domain of TCR clone 59235 (TRAV13-1, TRAJ52)
CAASKRSAGGTSYGKLTF

SEQ ID NO: 118470 - protein, 12 aa, Homo sapiens
  CDR3 for beta chain variable domain of TCR clone 59235 (TRBV11-2, TRBJ2-7)
CASSPPADEQYF

SEQ ID NO: 118471 - protein, 15 aa, Homo sapiens
  CDR3 for alpha chain variable domain of TCR clone 59236 (TRAV35, TRAJ40)
CAGQLCTSGTYKYIF

SEQ ID NO: 118472 - protein, 14 aa, Homo sapiens
  CDR3 for beta chain variable domain of TCR clone 59236 (TRBV7-3, TRBJ2-1)
CASSLAGGTNEQFF

SEQ ID NO: 118473 - protein, 11 aa, Homo sapiens
  CDR3 for alpha chain variable domain of TCR clone 59237 (TRAV27, TRAJ47)
CRSNQGNKLVF

SEQ ID NO: 118474 - protein, 15 aa, Homo sapiens
  CDR3 for beta chain variable domain of TCR clone 59237 (TRBV7-9, TRBJ2-1)
CQQRCSGGSYNEQFF

SEQ ID NO: 118475 - protein, 13 aa, Homo sapiens
  CDR3 for alpha chain variable domain of TCR clone 59238 (TRAV2, TRAJ40)
CAVVTSGTYKYIF

SEQ ID NO: 118476 - protein, 13 aa, Homo sapiens
  CDR3 for beta chain variable domain of TCR clone 59238 (TRBV12-4, TRBJ1-1)
CASITGLNTEALF

SEQ ID NO: 118477 - protein, 15 aa, Homo sapiens
  CDR3 for alpha chain variable domain of TCR clone 59239 (TRAV23/DV6, TRAJ13)
CAAWPGGGGYKKVTF

SEQ ID NO: 118478 - protein, 17 aa, Homo sapiens
  CDR3 for beta chain variable domain of TCR clone 59239 (TRBV19, TRBJ2-7)
CASSISFYDSYPYEQYF

SEQ ID NO: 118479 - protein, 12 aa, Homo sapiens
  CDR3 for alpha chain variable domain of TCR clone 59240 (TRAV17, TRAJ12)
CATLRSSCKLIF

SEQ ID NO: 118480 - protein, 16 aa, Homo sapiens
  CDR3 for beta chain variable domain of TCR clone 59240 (TRBV28, TRBJ2-7)
CASSLFFETGGPEQYF

SEQ ID NO: 118481 - protein, 12 aa, Homo sapiens
  CDR3 for alpha chain variable domain of TCR clone 59241 (TRAV12-3, TRAJ17)
CAMTLTGNKLTF

SEQ ID NO: 118482 - protein, 14 aa, Homo sapiens
  CDR3 for beta chain variable domain of TCR clone 59241 (TRBV18, TRBJ2-7)
CASPPRGGAYEQYF

SEQ ID NO: 118483 - protein, 13 aa, Homo sapiens
  CDR3 for alpha chain variable domain of TCR clone 59242 (TRAV30, TRAJ24)
CGTVTDSWGKLQF

SEQ ID NO: 118484 - protein, 16 aa, Homo sapiens
  CDR3 for beta chain variable domain of TCR clone 59242 (TRBV12-5, TRBJ2-5)
CASGPRTSGNQETQYF

SEQ ID NO: 118485 - protein, 14 aa, Homo sapiens
  CDR3 for alpha chain variable domain of TCR clone 59243 (TRAV17, TRAJ31)
CATVLRNNNARLMF

SEQ ID NO: 118486 - protein, 14 aa, Homo sapiens
  CDR3 for beta chain variable domain of TCR clone 59243 (TRBV12-4, TRBJ2-5)
CASSLWQKQETPYF

SEQ ID NO: 118487 - protein, 14 aa, Homo sapiens
  CDR3 for alpha chain variable domain of TCR clone 59244 (TRAV1-2, TRAJ16)
CAVNRFSDGQKLLF

SEQ ID NO: 118488 - protein, 17 aa, Homo sapiens
  CDR3 for beta chain variable domain of TCR clone 59244 (TRBV28, TRBJ2-3)
CASSPTPAGGRVDTQYF

SEQ ID NO: 118489 - protein, 12 aa, Homo sapiens
  CDR3 for alpha chain variable domain of TCR clone 59245 (TRAV30, TRAJ52)
CGTETSYGKLTF

SEQ ID NO: 118490 - protein, 18 aa, Homo sapiens
  CDR3 for beta chain variable domain of TCR clone 59245 (TRBV5-5, TRBJ1-5)
CASSLRQVKGSSNQPQHF

SEQ ID NO: 118491 - protein, 11 aa, Homo sapiens
  CDR3 for alpha chain variable domain of TCR clone 59246 (TRAV16, TRAJ33)
CALHSNYQLIR

SEQ ID NO: 118492 - protein, 15 aa, Homo sapiens
  CDR3 for beta chain variable domain of TCR clone 59246 (TRBV4-1, TRBJ2-7)
CASSQQGQGFDEQYF

SEQ ID NO: 118493 - protein, 14 aa, Homo sapiens
  CDR3 for alpha chain variable domain of TCR clone 59247 (TRAV12-2, TRAJ44)
CAVNPAGTASKLTF

SEQ ID NO: 118494 - protein, 13 aa, Homo sapiens
  CDR3 for beta chain variable domain of TCR clone 59247 (TRBV20-1, TRBJ1-6)
CSAPSGVGSPLHF

SEQ ID NO: 118495 - protein, 18 aa, Homo sapiens
  CDR3 for alpha chain variable domain of TCR clone 59248 (TRAV13-1, TRAJ52)
CAASKRSAGGTSYGKLTF

SEQ ID NO: 118496 - protein, 12 aa, Homo sapiens
  CDR3 for beta chain variable domain of TCR clone 59248 (TRBV12-4, TRBJ1-2)
CQQLRQGKGYTF

SEQ ID NO: 118497 - protein, 11 aa, Homo sapiens
  CDR3 for alpha chain variable domain of TCR clone 59249 (TRAV2, TRAJ33)
CAVDSNYQLIW

SEQ ID NO: 118498 - protein, 11 aa, Homo sapiens
  CDR3 for beta chain variable domain of TCR clone 59249 (TRBV29-1, TRBJ2-5)
CSEDRTGTQYF

SEQ ID NO: 118499 - protein, 13 aa, Homo sapiens
  CDR3 for alpha chain variable domain of TCR clone 59250 (TRAV17, TRAJ9)
CATDYTGGFKTIF

SEQ ID NO: 118500 - protein, 12 aa, Homo sapiens
  CDR3 for beta chain variable domain of TCR clone 59250 (TRBV11-2, TRBJ2-2)
CASSLPTGELFF

SEQ ID NO: 118501 - protein, 13 aa, Homo sapiens
  CDR3 for alpha chain variable domain of TCR clone 59251 (TRAV3, TRAJ15)
CAVRDQAGTALFF

SEQ ID NO: 118502 - protein, 15 aa, Homo sapiens
  CDR3 for beta chain variable domain of TCR clone 59251 (TRBV11-1, TRBJ2-7)
CASSLNYGASYEQYF

SEQ ID NO: 118503 - protein, 12 aa, Homo sapiens
  CDR3 for alpha chain variable domain of TCR clone 59252 (TRAV8-3, TRAJ26)
CAGDNYGQNFVF

SEQ ID NO: 118504 - protein, 15 aa, Homo sapiens
  CDR3 for beta chain variable domain of TCR clone 59252 (TRBV19, TRBJ1-1)
CASTSGQIQNTEAFF

SEQ ID NO: 118505 - protein, 15 aa, Homo sapiens
  CDR3 for alpha chain variable domain of TCR clone 59253 (TRAV2, TRAJ9)
CAVAALNTGGFKTIF

SEQ ID NO: 118506 - protein, 13 aa, Homo sapiens
  CDR3 for beta chain variable domain of TCR clone 59253 (TRBV11-3, TRBJ2-7)
CASSFEVGYEQYF

SEQ ID NO: 118507 - protein, 14 aa, Homo sapiens
  CDR3 for alpha chain variable domain of TCR clone 59254 (TRAV17, TRAJ54)
CATDANQGAQKLVF

SEQ ID NO: 118508 - protein, 15 aa, Homo sapiens
  CDR3 for beta chain variable domain of TCR clone 59254 (TRBV7-9, TRBJ1-1)
CASSLLEQGGTEAFF

SEQ ID NO: 118509 - protein, 18 aa, Homo sapiens
  CDR3 for alpha chain variable domain of TCR clone 59255 (TRAV13-2, TRAJ52)
CAETPLNAGGTSYGKLTF

SEQ ID NO: 118510 - protein, 17 aa, Homo sapiens
  CDR3 for beta chain variable domain of TCR clone 59255 (TRBV4-2, TRBJ1-1)
CASTQFGGGSGNTEAFF

SEQ ID NO: 118511 - protein, 13 aa, Homo sapiens
  CDR3 for alpha chain variable domain of TCR clone 59256 (TRAV12-2, TRAJ47)
CAVFMEYGNKLVF

SEQ ID NO: 118512 - protein, 15 aa, Homo sapiens
  CDR3 for beta chain variable domain of TCR clone 59256 (TRBV19, TRBJ1-1)
CASTSGQIQNTEAFF

SEQ ID NO: 118513 - protein, 15 aa, Homo sapiens
  CDR3 for alpha chain variable domain of TCR clone 59257 (TRAV2, TRAJ9)
CAVEDRGTGGFKTIF

SEQ ID NO: 118514 - protein, 16 aa, Homo sapiens
  CDR3 for beta chain variable domain of TCR clone 59257 (TRBV12-5, TRBJ2-5)
CASGPRTSGNQETQYF

SEQ ID NO: 118515 - protein, 11 aa, Homo sapiens
  CDR3 for alpha chain variable domain of TCR clone 59258 (TRAV13-1, TRAJ52)
PGGTSYGKLTF

SEQ ID NO: 118516 - protein, 16 aa, Homo sapiens
  CDR3 for beta chain variable domain of TCR clone 59258 (TRBV28, TRBJ2-7)
CASSPWVATGDPSQYF

SEQ ID NO: 118517 - protein, 17 aa, Homo sapiens
  CDR3 for alpha chain variable domain of TCR clone 59259 (TRAV17, TRAJ7)
CATLGRLAFGKGNHVVV

SEQ ID NO: 118518 - protein, 13 aa, Homo sapiens
  CDR3 for beta chain variable domain of TCR clone 59259 (TRBV12-4, TRBJ2-7)
CASSLERVREQYF

SEQ ID NO: 118519 - protein, 14 aa, Homo sapiens
  CDR3 for alpha chain variable domain of TCR clone 59260 (TRAV9-2, TRAJ39)
CALYIYNAGNMLTF

SEQ ID NO: 118520 - protein, 15 aa, Homo sapiens
  CDR3 for beta chain variable domain of TCR clone 59260 (TRBV20-1, TRBJ2-7)
CSARDRVSRMDEQYF

SEQ ID NO: 118521 - protein, 13 aa, Homo sapiens
  CDR3 for alpha chain variable domain of TCR clone 59261 (TRAV13-1, TRAJ39)
CSKYSNAGNMLTF

SEQ ID NO: 118522 - protein, 14 aa, Homo sapiens
  CDR3 for beta chain variable domain of TCR clone 59261 (TRBV3-1, TRBJ1-1)
CASSQGGRGSEAFF

SEQ ID NO: 118523 - protein, 14 aa, Homo sapiens
  CDR3 for alpha chain variable domain of TCR clone 59262 (TRAV12-2, TRAJ40)
CAVKIPSGTYKYIF

SEQ ID NO: 118524 - protein, 17 aa, Homo sapiens
  CDR3 for beta chain variable domain of TCR clone 59262 (TRBV11-2, TRBJ2-1)
CASSLSPPGVEYNEQFF

SEQ ID NO: 118525 - protein, 12 aa, Homo sapiens
  CDR3 for alpha chain variable domain of TCR clone 59263 (TRAV12-2, TRAJ44)
CADTGTAIKLTF

SEQ ID NO: 118526 - protein, 17 aa, Homo sapiens
  CDR3 for beta chain variable domain of TCR clone 59263 (TRBV20-1, TRBJ1-1)
CSARGTGGSYGNTGAFF

SEQ ID NO: 118527 - protein, 13 aa, Homo sapiens
  CDR3 for alpha chain variable domain of TCR clone 59264 (TRAV21, TRAJ20)
CAVGLRVDYKLSF

SEQ ID NO: 118528 - protein, 14 aa, Homo sapiens
  CDR3 for beta chain variable domain of TCR clone 59264 (TRBV18, TRBJ2-5)
CASSPGVSQETQYF

SEQ ID NO: 118529 - protein, 12 aa, Homo sapiens
  CDR3 for alpha chain variable domain of TCR clone 59265 (TRAV26-2, TRAJ21)
CILKGNFNKFYF

SEQ ID NO: 118530 - protein, 14 aa, Homo sapiens
  CDR3 for beta chain variable domain of TCR clone 59265 (TRBV7-9, TRBJ1-1)
CASTPLQPYTEAFF

SEQ ID NO: 118531 - protein, 18 aa, Homo sapiens
  CDR3 for alpha chain variable domain of TCR clone 59266 (TRAV21, TRAJ52)
CAVRPSPAGGTSYGKLTF

SEQ ID NO: 118532 - protein, 13 aa, Homo sapiens
  CDR3 for beta chain variable domain of TCR clone 59266 (TRBV28, TRBJ1-1)
CASSKQGWTEAFF

SEQ ID NO: 118533 - protein, 14 aa, Homo sapiens
  CDR3 for alpha chain variable domain of TCR clone 59267 (TRAV1-2, TRAJ16)
CAVNRFSDGQKLLF

SEQ ID NO: 118534 - protein, 14 aa, Homo sapiens
  CDR3 for beta chain variable domain of TCR clone 59267 (TRBV7-2, TRBJ2-2)
CASSLNSNTGELFF

SEQ ID NO: 118535 - protein, 10 aa, Homo sapiens
  CDR3 for alpha chain variable domain of TCR clone 59268 (TRAV19, TRAJ45)
PGGGADGLTF

SEQ ID NO: 118536 - protein, 12 aa, Homo sapiens
  CDR3 for beta chain variable domain of TCR clone 59268 (TRBV24-1, TRBJ1-4)
CATSDPNEKLFF

SEQ ID NO: 118537 - protein, 15 aa, Homo sapiens
  CDR3 for alpha chain variable domain of TCR clone 59269 (TRAV27, TRAJ38)
CAGRFNAGNNRKLIW

SEQ ID NO: 118538 - protein, 13 aa, Homo sapiens
  CDR3 for beta chain variable domain of TCR clone 59269 (TRBV12-5, TRBJ2-3)
CASQNWGTDTQYF

SEQ ID NO: 118539 - protein, 11 aa, Homo sapiens
  CDR3 for alpha chain variable domain of TCR clone 59270 (TRAV2, TRAJ33)
CAVDSNYQLIW

SEQ ID NO: 118540 - protein, 15 aa, Homo sapiens
  CDR3 for beta chain variable domain of TCR clone 59270 (TRBV19, TRBJ1-2)
CASSVGQVLKYGYTF

SEQ ID NO: 118541 - protein, 16 aa, Homo sapiens
  CDR3 for alpha chain variable domain of TCR clone 59271 (TRAV13-2, TRAJ53)
CAENANSGGSNYKLTF

SEQ ID NO: 118542 - protein, 19 aa, Homo sapiens
  CDR3 for beta chain variable domain of TCR clone 59271 (TRBV28, TRBJ2-7)
CASSYSVTSRLGWVYEQYF

SEQ ID NO: 118543 - protein, 14 aa, Homo sapiens
  CDR3 for alpha chain variable domain of TCR clone 59272 (TRAV1-2, TRAJ16)
CAVNRSSDGQKLLF

SEQ ID NO: 118544 - protein, 14 aa, Homo sapiens
  CDR3 for beta chain variable domain of TCR clone 59272 (TRBV7-2, TRBJ2-7)
CASSPKTSFYEQYF

SEQ ID NO: 118545 - protein, 13 aa, Homo sapiens
  CDR3 for alpha chain variable domain of TCR clone 59273 (TRAV3, TRAJ20)
CAVRDTGDYKPSF

SEQ ID NO: 118546 - protein, 15 aa, Homo sapiens
  CDR3 for beta chain variable domain of TCR clone 59273 (TRBV6-1, TRBJ2-7)
CASSEGGGVSYEQYF

SEQ ID NO: 118547 - protein, 14 aa, Homo sapiens
  CDR3 for alpha chain variable domain of TCR clone 59274 (TRAV12-2, TRAJ40)
CAVKIPSGTYKYIF

SEQ ID NO: 118548 - protein, 15 aa, Homo sapiens
  CDR3 for beta chain variable domain of TCR clone 59274 (TRBV7-3, TRBJ2-1)
CASSPTGGGEVEQFF

SEQ ID NO: 118549 - protein, 16 aa, Homo sapiens
  CDR3 for alpha chain variable domain of TCR clone 59275 (TRAV3, TRAJ5)
CAVRNLMDTGRRAHTF

SEQ ID NO: 118550 - protein, 16 aa, Homo sapiens
  CDR3 for beta chain variable domain of TCR clone 59275 (TRBV4-2, TRBJ2-7)
CTSSQEGLANSYEQYF

SEQ ID NO: 118551 - protein, 13 aa, Homo sapiens
  CDR3 for alpha chain variable domain of TCR clone 59276 (TRAV1-2, TRAJ9)
CAVLNTGGFKTIF

SEQ ID NO: 118552 - protein, 13 aa, Homo sapiens
  CDR3 for beta chain variable domain of TCR clone 59276 (TRBV7-3, TRBJ1-1)
CASSQDWGAEAFF

SEQ ID NO: 118553 - protein, 11 aa, Homo sapiens
  CDR3 for alpha chain variable domain of TCR clone 59277 (TRAV12-2, TRAJ10)
GVTGGGNKLTF

SEQ ID NO: 118554 - protein, 15 aa, Homo sapiens
  CDR3 for beta chain variable domain of TCR clone 59277 (TRBV20-1, TRBJ2-7)
CSARDRVSGMDEQYF

SEQ ID NO: 118555 - protein, 10 aa, Homo sapiens
  CDR3 for alpha chain variable domain of TCR clone 59278 (TRAV30, TRAJ48)
CGIGNEKLTF

SEQ ID NO: 118556 - protein, 14 aa, Homo sapiens
  CDR3 for beta chain variable domain of TCR clone 59278 (TRBV7-6, TRBJ2-3)
CASSVAEGTDTQYF

SEQ ID NO: 118557 - protein, 13 aa, Homo sapiens
  CDR3 for alpha chain variable domain of TCR clone 59279 (TRAV2, TRAJ40)
CAVVTSGTYKYIF

SEQ ID NO: 118558 - protein, 16 aa, Homo sapiens
  CDR3 for beta chain variable domain of TCR clone 59279 (TRBV19, TRBJ2-2)
CTSRSPGTGATGELFF

SEQ ID NO: 118559 - protein, 14 aa, Homo sapiens
  CDR3 for alpha chain variable domain of TCR clone 59280 (TRAV38-1, TRAJ45)
CAYYSGGGADGLTF

SEQ ID NO: 118560 - protein, 20 aa, Homo sapiens
  CDR3 for beta chain variable domain of TCR clone 59280 (TRBV28, TRBJ2-1)
CASTPIGRSPGLAGRNEQFF

SEQ ID NO: 118561 - protein, 12 aa, Homo sapiens
  CDR3 for alpha chain variable domain of TCR clone 59281 (TRAV13-2, TRAJ23)
CAERHRGGKLIF

SEQ ID NO: 118562 - protein, 19 aa, Homo sapiens
  CDR3 for beta chain variable domain of TCR clone 59281 (TRBV19, TRBJ2-5)
CASSIGQVTDSFLGETQYF

SEQ ID NO: 118563 - protein, 10 aa, Homo sapiens
  CDR3 for alpha chain variable domain of TCR clone 59282 (TRAV12-2, TRAJ22)
CAVNETQLTF

SEQ ID NO: 118564 - protein, 14 aa, Homo sapiens
  CDR3 for beta chain variable domain of TCR clone 59282 (TRBV7-6, TRBJ2-3)
CASSLGTVTDTQYF

SEQ ID NO: 118565 - protein, 16 aa, Homo sapiens
  CDR3 for alpha chain variable domain of TCR clone 59283 (TRAV22, TRAJ45)
CAVERGKRGGDDGLTF

SEQ ID NO: 118566 - protein, 13 aa, Homo sapiens
  CDR3 for beta chain variable domain of TCR clone 59283 (TRBV27, TRBJ1-1)
CASSLSIGAEAFF

SEQ ID NO: 118567 - protein, 11 aa, Homo sapiens
  CDR3 for alpha chain variable domain of TCR clone 59284 (TRAV12-2, TRAJ39)
CAVNNMLTFGG

SEQ ID NO: 118568 - protein, 16 aa, Homo sapiens
  CDR3 for beta chain variable domain of TCR clone 59284 (TRBV9, TRBJ2-7)
CANSAGPDRSPYEQYF

SEQ ID NO: 118569 - protein, 14 aa, Homo sapiens
  CDR3 for alpha chain variable domain of TCR clone 59285 (TRAV14/DV4, TRAJ20)
CAMREGQSDYKLSF

SEQ ID NO: 118570 - protein, 17 aa, Homo sapiens
  CDR3 for beta chain variable domain of TCR clone 59285 (TRBV27, TRBJ2-3)
CASSLRSLAGSTDTQYF

SEQ ID NO: 118571 - protein, 14 aa, Homo sapiens
  CDR3 for alpha chain variable domain of TCR clone 59286 (TRAV12-2, TRAJ45)
CAVNIGGGADGLTF

SEQ ID NO: 118572 - protein, 17 aa, Homo sapiens
  CDR3 for beta chain variable domain of TCR clone 59286 (TRBV20-1, TRBJ2-2)
CSASGSGQGGLTGKLFF

SEQ ID NO: 118573 - protein, 16 aa, Homo sapiens
  CDR3 for alpha chain variable domain of TCR clone 59287 (TRAV26-1, TRAJ32)
CIVRTNYGGATSKLIF

SEQ ID NO: 118574 - protein, 14 aa, Homo sapiens
  CDR3 for beta chain variable domain of TCR clone 59287 (TRBV27, TRBJ1-1)
CASSLLSGLSEAFF

SEQ ID NO: 118575 - protein, 18 aa, Homo sapiens
  CDR3 for alpha chain variable domain of TCR clone 59288 (TRAV13-1, TRAJ52)
CAAKNPNAGGTSYGKLTF

SEQ ID NO: 118576 - protein, 15 aa, Homo sapiens
  CDR3 for beta chain variable domain of TCR clone 59288 (TRBV20-1, TRBJ2-7)
CSARVPAAYFYEQYF

SEQ ID NO: 118577 - protein, 13 aa, Homo sapiens
  CDR3 for alpha chain variable domain of TCR clone 59289 (TRAV35, TRAJ21)
CAGQLSNFNKFYF

SEQ ID NO: 118578 - protein, 13 aa, Homo sapiens
  CDR3 for beta chain variable domain of TCR clone 59289 (TRBV7-3, TRBJ1-1)
CASSQDWGAEAFF

SEQ ID NO: 118579 - protein, 16 aa, Homo sapiens
  CDR3 for alpha chain variable domain of TCR clone 59290 (TRAV3, TRAJ18)
CAVRDGRGSTLGRLYF

SEQ ID NO: 118580 - protein, 20 aa, Homo sapiens
  CDR3 for beta chain variable domain of TCR clone 59290 (TRBV7-8, TRBJ2-2)
CASSHLFPGPTIHITGELFF

SEQ ID NO: 118581 - protein, 16 aa, Homo sapiens
  CDR3 for alpha chain variable domain of TCR clone 59291 (TRAV16, TRAJ52)
CALSGVGVTSYGKLTF

SEQ ID NO: 118582 - protein, 14 aa, Homo sapiens
  CDR3 for beta chain variable domain of TCR clone 59291 (TRBV19, TRBJ1-2)
CASSLQGQAYGYTF

SEQ ID NO: 118583 - protein, 15 aa, Homo sapiens
  CDR3 for alpha chain variable domain of TCR clone 59292 (TRAV17, TRAJ57)
CATGTSQGGSEKLVF

SEQ ID NO: 118584 - protein, 14 aa, Homo sapiens
  CDR3 for beta chain variable domain of TCR clone 59292 (TRBV12-5, TRBJ2-5)
CASGSRTHQETQYF

SEQ ID NO: 118585 - protein, 14 aa, Homo sapiens
  CDR3 for alpha chain variable domain of TCR clone 59293 (TRAV16, TRAJ26)
CALSSANYGQNVVF

SEQ ID NO: 118586 - protein, 16 aa, Homo sapiens
  CDR3 for beta chain variable domain of TCR clone 59293 (TRBV20-1, TRBJ1-4)
CSAPGQGLLTNEKLFF

SEQ ID NO: 118587 - protein, 12 aa, Homo sapiens
  CDR3 for alpha chain variable domain of TCR clone 59294 (TRAV16, TRAJ27)
CALNHQCRQINL

SEQ ID NO: 118588 - protein, 13 aa, Homo sapiens
  CDR3 for beta chain variable domain of TCR clone 59294 (TRBV24-1, TRBJ2-2)
CATSDWSTGELFF

SEQ ID NO: 118589 - protein, 15 aa, Homo sapiens
  CDR3 for alpha chain variable domain of TCR clone 59295 (TRAV21, TRAJ53)
CATLNSGGSNYKLTF

SEQ ID NO: 118590 - protein, 16 aa, Homo sapiens
  CDR3 for beta chain variable domain of TCR clone 59295 (TRBV19, TRBJ2-2)
CASRSPGTGATGELFF

SEQ ID NO: 118591 - protein, 15 aa, Homo sapiens
  CDR3 for alpha chain variable domain of TCR clone 59296 (TRAV26-2, TRAJ50)
CILRDEETSYDKVVF

SEQ ID NO: 118592 - protein, 12 aa, Homo sapiens
  CDR3 for beta chain variable domain of TCR clone 59296 (TRBV5-7, TRBJ1-2)
CASSDGPYGYTF

SEQ ID NO: 118593 - protein, 17 aa, Homo sapiens
  CDR3 for alpha chain variable domain of TCR clone 59297 (TRAV26-1, TRAJ37)
CIVRVITVSSNTGKLIF

SEQ ID NO: 118594 - protein, 12 aa, Homo sapiens
  CDR3 for beta chain variable domain of TCR clone 59297 (TRBV11-2, TRBJ2-2)
CASSLGGGELFF

SEQ ID NO: 118595 - protein, 12 aa, Homo sapiens
  CDR3 for alpha chain variable domain of TCR clone 59298 (TRAV27, TRAJ13)
CAGVRGYQNVTF

SEQ ID NO: 118596 - protein, 16 aa, Homo sapiens
  CDR3 for beta chain variable domain of TCR clone 59298 (TRBV28, TRBJ2-1)
CASSSSYSGSLNEQFF

SEQ ID NO: 118597 - protein, 14 aa, Homo sapiens
  CDR3 for alpha chain variable domain of TCR clone 59299 (TRAV8-3, TRAJ6)
CAVGSSGGSYIPTF

SEQ ID NO: 118598 - protein, 17 aa, Homo sapiens
  CDR3 for beta chain variable domain of TCR clone 59299 (TRBV18, TRBJ2-2)
CASSPSDPWQNTGELFF

SEQ ID NO: 118599 - protein, 14 aa, Homo sapiens
  CDR3 for alpha chain variable domain of TCR clone 59300 (TRAV4, TRAJ17)
CLVGDMAAGNKLTF

SEQ ID NO: 118600 - protein, 14 aa, Homo sapiens
  CDR3 for beta chain variable domain of TCR clone 59300 (TRBV4-1, TRBJ2-7)
CASSPVAGGDEQCF

SEQ ID NO: 118601 - protein, 14 aa, Homo sapiens
  CDR3 for alpha chain variable domain of TCR clone 59301 (TRAV16, TRAJ33)
CALSAMDSNYPLIW

SEQ ID NO: 118602 - protein, 12 aa, Homo sapiens
  CDR3 for beta chain variable domain of TCR clone 59301 (TRBV5-1, TRBJ1-2)
CASSQDTYGYTF

SEQ ID NO: 118603 - protein, 16 aa, Homo sapiens
  CDR3 for alpha chain variable domain of TCR clone 59302 (TRAV23/DV6, TRAJ9)
CAASIGGNTGGFKTIF

SEQ ID NO: 118604 - protein, 14 aa, Homo sapiens
  CDR3 for beta chain variable domain of TCR clone 59302 (TRBV12-5, TRBJ2-5)
CASGSRTHQETQYF

SEQ ID NO: 118605 - protein, 14 aa, Homo sapiens
  CDR3 for alpha chain variable domain of TCR clone 59303 (TRAV1-2, TRAJ8)
CAVREDTGFQKLVF

SEQ ID NO: 118606 - protein, 12 aa, Homo sapiens
  CDR3 for beta chain variable domain of TCR clone 59303 (TRBV14, TRBJ1-1)
CASSQLKGLAFF

SEQ ID NO: 118607 - protein, 14 aa, Homo sapiens
  CDR3 for alpha chain variable domain of TCR clone 59304 (TRAV8-3, TRAJ39)
FAVGANNAGNMLTF

SEQ ID NO: 118608 - protein, 15 aa, Homo sapiens
  CDR3 for beta chain variable domain of TCR clone 59304 (TRBV4-3, TRBJ1-1)
CASSQELGRGTEAFF

SEQ ID NO: 118609 - protein, 15 aa, Homo sapiens
  CDR3 for alpha chain variable domain of TCR clone 59305 (TRAV8-2, TRAJ40)
CVVLGTTSGTYKYIF

SEQ ID NO: 118610 - protein, 14 aa, Homo sapiens
  CDR3 for beta chain variable domain of TCR clone 59305 (TRBV25-1, TRBJ1-1)
CASTHLGGNTEAFF

SEQ ID NO: 118611 - protein, 13 aa, Homo sapiens
  CDR3 for alpha chain variable domain of TCR clone 59306 (TRAV8-4, TRAJ30)
CAVSVNRDDKIIF

SEQ ID NO: 118612 - protein, 15 aa, Homo sapiens
  CDR3 for beta chain variable domain of TCR clone 59306 (TRBV25-1, TRBJ2-5)
CASSDTGTHQETQYF

SEQ ID NO: 118613 - protein, 15 aa, Homo sapiens
  CDR3 for alpha chain variable domain of TCR clone 59307 (TRAV21, TRAJ53)
CATLNSGGSNYKLTF

SEQ ID NO: 118614 - protein, 17 aa, Homo sapiens
  CDR3 for beta chain variable domain of TCR clone 59307 (TRBV20-1, TRBJ2-2)
CSASGSGQGGLTGEPFF

SEQ ID NO: 118615 - protein, 13 aa, Homo sapiens
  CDR3 for alpha chain variable domain of TCR clone 59308 (TRAV2, TRAJ36)
CAVDQTGANNLFF

SEQ ID NO: 118616 - protein, 12 aa, Homo sapiens
  CDR3 for beta chain variable domain of TCR clone 59308 (TRBV19, TRBJ1-1)
CAGMNRYTEAFF

SEQ ID NO: 118617 - protein, 15 aa, Homo sapiens
  CDR3 for alpha chain variable domain of TCR clone 59309 (TRAV8-3, TRAJ11)
CAVGLLNSGYSTLTF

SEQ ID NO: 118618 - protein, 16 aa, Homo sapiens
  CDR3 for beta chain variable domain of TCR clone 59309 (TRBV7-9, TRBJ1-2)
CASSLGFSSGEDVYTF

SEQ ID NO: 118619 - protein, 16 aa, Homo sapiens
  CDR3 for alpha chain variable domain of TCR clone 59310 (TRAV3, TRAJ6)
CCERRPRAGGSYIPTF

SEQ ID NO: 118620 - protein, 14 aa, Homo sapiens
  CDR3 for beta chain variable domain of TCR clone 59310 (TRBV7-2, TRBJ2-7)
CASSPKTSFYEQYF

SEQ ID NO: 118621 - protein, 22 aa, Homo sapiens
  CDR3 for alpha chain variable domain of TCR clone 59311 (TRAV12-2, TRAJ52)
SAHQRLPAQRFSHLPLYGKLTF

SEQ ID NO: 118622 - protein, 18 aa, Homo sapiens
  CDR3 for beta chain variable domain of TCR clone 59311 (TRBV11-3, TRBJ2-1)
CASSSYPGGRDSYNEQFF

SEQ ID NO: 118623 - protein, 12 aa, Homo sapiens
  CDR3 for alpha chain variable domain of TCR clone 59312 (TRAV13-2, TRAJ23)
CAERHRGGKLIF

SEQ ID NO: 118624 - protein, 16 aa, Homo sapiens
  CDR3 for beta chain variable domain of TCR clone 59312 (TRBV7-2, TRBJ2-6)
CAILSGVSSGANDLTF

SEQ ID NO: 118625 - protein, 15 aa, Homo sapiens
  CDR3 for alpha chain variable domain of TCR clone 59313 (TRAV3, TRAJ13)
CAVRVYSGGYQKVTF

SEQ ID NO: 118626 - protein, 13 aa, Homo sapiens
  CDR3 for beta chain variable domain of TCR clone 59313 (TRBV7-8, TRBJ2-7)
RRVRLTEMGEQYF

SEQ ID NO: 118627 - protein, 13 aa, Homo sapiens
  CDR3 for alpha chain variable domain of TCR clone 59314 (TRAV17, TRAJ4)
CAKKSGGYNKLIF

SEQ ID NO: 118628 - protein, 14 aa, Homo sapiens
  CDR3 for beta chain variable domain of TCR clone 59314 (TRBV20-1, TRBJ1-5)
CSARDDRGNQPQHF

SEQ ID NO: 118629 - protein, 14 aa, Homo sapiens
  CDR3 for alpha chain variable domain of TCR clone 59315 (TRAV17, TRAJ34)
CATDSLEGTDKLIF

SEQ ID NO: 118630 - protein, 13 aa, Homo sapiens
  CDR3 for beta chain variable domain of TCR clone 59315 (TRBV11-2, TRBJ2-7)
CACSGTRPYEQYF

SEQ ID NO: 118631 - protein, 12 aa, Homo sapiens
  CDR3 for alpha chain variable domain of TCR clone 59316 (TRAV29/DV5, TRAJ49)
CAATDTGNQFYF

SEQ ID NO: 118632 - protein, 14 aa, Homo sapiens
  CDR3 for beta chain variable domain of TCR clone 59316 (TRBV6-1, TRBJ1-3)
CASVQGGGGNTIYF

SEQ ID NO: 118633 - protein, 14 aa, Homo sapiens
  CDR3 for alpha chain variable domain of TCR clone 59317 (TRAV23/DV6, TRAJ22)
CAASVSGSARQLTF

SEQ ID NO: 118634 - protein, 15 aa, Homo sapiens
  CDR3 for beta chain variable domain of TCR clone 59317 (TRBV18, TRBJ2-7)
CASSPSSTGNYEQYF

SEQ ID NO: 118635 - protein, 18 aa, Homo sapiens
  CDR3 for alpha chain variable domain of TCR clone 59318 (TRAV12-3, TRAJ52)
CAMSVGGAGGTSYGKLTF

SEQ ID NO: 118636 - protein, 14 aa, Homo sapiens
  CDR3 for beta chain variable domain of TCR clone 59318 (TRBV7-3, TRBJ2-2)
CASSSGGYTGELFF

SEQ ID NO: 118637 - protein, 14 aa, Homo sapiens
  CDR3 for alpha chain variable domain of TCR clone 59319 (TRAV1-2, TRAJ8)
CAVREDTGFQKLVF

SEQ ID NO: 118638 - protein, 16 aa, Homo sapiens
  CDR3 for beta chain variable domain of TCR clone 59319 (TRBV5-7, TRBJ2-5)
CVSTLAPAGGRETQYF

SEQ ID NO: 118639 - protein, 17 aa, Homo sapiens
  CDR3 for alpha chain variable domain of TCR clone 59320 (TRAV27, TRAJ42)
CAERVIYYGGSQGNLIF

SEQ ID NO: 118640 - protein, 14 aa, Homo sapiens
  CDR3 for beta chain variable domain of TCR clone 59320 (TRBV6-6, TRBJ2-3)
CASRMQREADTQYF

SEQ ID NO: 118641 - protein, 11 aa, Homo sapiens
  CDR3 for alpha chain variable domain of TCR clone 59321 (TRAV12-1, TRAJ30)
CVVNGQDKIIF

SEQ ID NO: 118642 - protein, 15 aa, Homo sapiens
  CDR3 for beta chain variable domain of TCR clone 59321 (TRBV27, TRBJ2-2)
CTSVPASSSPGSCFF

SEQ ID NO: 118643 - protein, 14 aa, Homo sapiens
  CDR3 for alpha chain variable domain of TCR clone 59322 (TRAV8-3, TRAJ9)
CAVVYNTGGCKTIF

SEQ ID NO: 118644 - protein, 14 aa, Homo sapiens
  CDR3 for beta chain variable domain of TCR clone 59322 (TRBV7-3, TRBJ2-2)
CASSSGGYTGELFF

SEQ ID NO: 118645 - protein, 14 aa, Homo sapiens
  CDR3 for alpha chain variable domain of TCR clone 59323 (TRAV1-2, TRAJ16)
CAVNRFSDGQKLLF

SEQ ID NO: 118646 - protein, 16 aa, Homo sapiens
  CDR3 for beta chain variable domain of TCR clone 59323 (TRBV20-1, TRBJ1-4)
CSALGQGLLTNEKLFF

SEQ ID NO: 118647 - protein, 14 aa, Homo sapiens
  CDR3 for alpha chain variable domain of TCR clone 59324 (TRAV10, TRAJ48)
CVGVFHFGNEKLTF

SEQ ID NO: 118648 - protein, 16 aa, Homo sapiens
  CDR3 for beta chain variable domain of TCR clone 59324 (TRBV7-9, TRBJ1-2)
CASSLAPLRAAYGYTF

SEQ ID NO: 118649 - protein, 14 aa, Homo sapiens
  CDR3 for alpha chain variable domain of TCR clone 59325 (TRAV35, TRAJ22)
CAVLRPGSARQLTF

SEQ ID NO: 118650 - protein, 13 aa, Homo sapiens
  CDR3 for beta chain variable domain of TCR clone 59325 (TRBV20-1, TRBJ1-1)
CSARGGGNTEAFF

SEQ ID NO: 118651 - protein, 16 aa, Homo sapiens
  CDR3 for alpha chain variable domain of TCR clone 59326 (TRAV30, TRAJ24)
CGTEIVDADSWGNFPF

SEQ ID NO: 118652 - protein, 14 aa, Homo sapiens
  CDR3 for beta chain variable domain of TCR clone 59326 (TRBV12-5, TRBJ2-5)
CASGSRTHQETQYF

SEQ ID NO: 118653 - protein, 14 aa, Homo sapiens
  CDR3 for alpha chain variable domain of TCR clone 59327 (TRAV23/DV6, TRAJ8)
CAASKNTGFQKLVF

SEQ ID NO: 118654 - protein, 16 aa, Homo sapiens
  CDR3 for beta chain variable domain of TCR clone 59327 (TRBV4-1, TRBJ2-6)
CASSQVGEPGANVLTS

SEQ ID NO: 118655 - protein, 16 aa, Homo sapiens
  CDR3 for alpha chain variable domain of TCR clone 59328 (TRAV3, TRAJ37)
CAVRPRGSGNTGKLIF

SEQ ID NO: 118656 - protein, 14 aa, Homo sapiens
  CDR3 for beta chain variable domain of TCR clone 59328 (TRBV25-1, TRBJ1-1)
CASTHLGGNTEAFF

SEQ ID NO: 118657 - protein, 10 aa, Homo sapiens
  CDR3 for alpha chain variable domain of TCR clone 59329 (TRAV16, TRAJ22)
SAMYLRQLTF

SEQ ID NO: 118658 - protein, 18 aa, Homo sapiens
  CDR3 for beta chain variable domain of TCR clone 59329 (TRBV12-4, TRBJ2-4)
CASSRTGAVDVAKNIQYF

SEQ ID NO: 118659 - protein, 18 aa, Homo sapiens
  CDR3 for alpha chain variable domain of TCR clone 59330 (TRAV21, TRAJ52)
CAVRPSPAGGTSYGKLTF

SEQ ID NO: 118660 - protein, 13 aa, Homo sapiens
  CDR3 for beta chain variable domain of TCR clone 59330 (TRBV20-1, TRBJ1-1)
CSARGGGNTEAFF

SEQ ID NO: 118661 - protein, 16 aa, Homo sapiens
  CDR3 for alpha chain variable domain of TCR clone 59331 (TRAV16, TRAJ4)
CSLSRMFSGGYNKLIF

SEQ ID NO: 118662 - protein, 16 aa, Homo sapiens
  CDR3 for beta chain variable domain of TCR clone 59331 (TRBV12-4, TRBJ1-5)
CASSRPVGGSNQPQHF

SEQ ID NO: 118663 - protein, 21 aa, Homo sapiens
  CDR3 for alpha chain variable domain of TCR clone 59332 (TRAV1-1, TRAJ6)
CLLLLRCERLERTGGSYMPTF

SEQ ID NO: 118664 - protein, 13 aa, Homo sapiens
  CDR3 for beta chain variable domain of TCR clone 59332 (TRBV10-2, TRBJ2-7)
CASGASGGYEQYF

SEQ ID NO: 118665 - protein, 16 aa, Homo sapiens
  CDR3 for alpha chain variable domain of TCR clone 59333 (TRAV21, TRAJ17)
CAVRPGEEAAGNKLTF

SEQ ID NO: 118666 - protein, 16 aa, Homo sapiens
  CDR3 for beta chain variable domain of TCR clone 59333 (TRBV2, TRBJ2-7)
CASSEPWTGPSYERYF

SEQ ID NO: 118667 - protein, 15 aa, Homo sapiens
  CDR3 for alpha chain variable domain of TCR clone 59334 (TRAV21, TRAJ24)
SAARSSTDSWGKLQF

SEQ ID NO: 118668 - protein, 14 aa, Homo sapiens
  CDR3 for beta chain variable domain of TCR clone 59334 (TRBV11-2, TRBJ2-5)
CASSRTGGIETQYF

SEQ ID NO: 118669 - protein, 14 aa, Homo sapiens
  CDR3 for alpha chain variable domain of TCR clone 59335 (TRAV12-2, TRAJ36)
CAVKISTGANNPFF

SEQ ID NO: 118670 - protein, 14 aa, Homo sapiens
  CDR3 for beta chain variable domain of TCR clone 59335 (TRBV25-1, TRBJ1-2)
CASSDTTGVVGYTF

SEQ ID NO: 118671 - protein, 15 aa, Homo sapiens
  CDR3 for alpha chain variable domain of TCR clone 59336 (TRAV8-4, TRAJ3)
CSVTGENLVQQCFQD

SEQ ID NO: 118672 - protein, 16 aa, Homo sapiens
  CDR3 for beta chain variable domain of TCR clone 59336 (TRBV4-2, TRBJ1-1)
CASSQAGFGMNTEAFF

SEQ ID NO: 118673 - protein, 13 aa, Homo sapiens
  CDR3 for alpha chain variable domain of TCR clone 59337 (TRAV21, TRAJ15)
CAVANQAGTALIF

SEQ ID NO: 118674 - protein, 14 aa, Homo sapiens
  CDR3 for beta chain variable domain of TCR clone 59337 (TRBV12-4, TRBJ2-2)
CASSLGAATGELFF

SEQ ID NO: 118675 - protein, 14 aa, Homo sapiens
  CDR3 for alpha chain variable domain of TCR clone 59338 (TRAV20, TRAJ18)
CAVGRGSTLGRLYF

SEQ ID NO: 118676 - protein, 14 aa, Homo sapiens
  CDR3 for beta chain variable domain of TCR clone 59338 (TRBV28, TRBJ2-4)
CASTQVTGVNMQYF

SEQ ID NO: 118677 - protein, 14 aa, Homo sapiens
  CDR3 for alpha chain variable domain of TCR clone 59339 (TRAV12-2, TRAJ17)
CAVLFKAAGNKLTF

SEQ ID NO: 118678 - protein, 14 aa, Homo sapiens
  CDR3 for beta chain variable domain of TCR clone 59339 (TRBV11-2, TRBJ2-5)
CASSRTGGIETQYF

SEQ ID NO: 118679 - protein, 14 aa, Homo sapiens
  CDR3 for alpha chain variable domain of TCR clone 59340 (TRAV13-2, TRAJ43)
CAEIPTYNNNDMRF

SEQ ID NO: 118680 - protein, 15 aa, Homo sapiens
  CDR3 for beta chain variable domain of TCR clone 59340 (TRBV7-9, TRBJ2-2)
CAGGPLDTFPGELFF

SEQ ID NO: 118681 - protein, 13 aa, Homo sapiens
  CDR3 for alpha chain variable domain of TCR clone 59341 (TRAV17, TRAJ5)
CAPMDTGRRALTF

SEQ ID NO: 118682 - protein, 14 aa, Homo sapiens
  CDR3 for beta chain variable domain of TCR clone 59341 (TRBV29-1, TRBJ2-7)
RSVDQRQASYEQYF

SEQ ID NO: 118683 - protein, 13 aa, Homo sapiens
  CDR3 for alpha chain variable domain of TCR clone 59342 (TRAV29/DV5, TRAJ31)
CAASRNNNARLRF

SEQ ID NO: 118684 - protein, 12 aa, Homo sapiens
  CDR3 for beta chain variable domain of TCR clone 59342 (TRBV14, TRBJ2-5)
CASSQLKETQYF

SEQ ID NO: 118685 - protein, 11 aa, Homo sapiens
  CDR3 for alpha chain variable domain of TCR clone 59343 (TRAV12-2, TRAJ3)
CAVKRASKIIF

SEQ ID NO: 118686 - protein, 15 aa, Homo sapiens
  CDR3 for beta chain variable domain of TCR clone 59343 (TRBV20-1, TRBJ2-7)
CSARDRVSGMDEQYF

SEQ ID NO: 118687 - protein, 11 aa, Homo sapiens
  CDR3 for alpha chain variable domain of TCR clone 59344 (TRAV21, TRAJ34)
CAVTNTDKLIF

SEQ ID NO: 118688 - protein, 16 aa, Homo sapiens
  CDR3 for beta chain variable domain of TCR clone 59344 (TRBV18, TRBJ1-1)
CASSPGVGGRGGEALF

SEQ ID NO: 118689 - protein, 16 aa, Homo sapiens
  CDR3 for alpha chain variable domain of TCR clone 59345 (TRAV27, TRAJ48)
TAAQPGDTGLYLPLTF

SEQ ID NO: 118690 - protein, 14 aa, Homo sapiens
  CDR3 for beta chain variable domain of TCR clone 59345 (TRBV6-1, TRBJ1-3)
CASVQGGGGNTIYF

SEQ ID NO: 118691 - protein, 14 aa, Homo sapiens
  CDR3 for alpha chain variable domain of TCR clone 59346 (TRAV1-2, TRAJ16)
RAVNRFSDGQKLLF

SEQ ID NO: 118692 - protein, 13 aa, Homo sapiens
  CDR3 for beta chain variable domain of TCR clone 59346 (TRBV12-4, TRBJ1-5)
CASSPDRAQPQHF

SEQ ID NO: 118693 - protein, 10 aa, Homo sapiens
  CDR3 for alpha chain variable domain of TCR clone 59347 (TRAV24, TRAJ23)
CASLGGKLIF

SEQ ID NO: 118694 - protein, 15 aa, Homo sapiens
  CDR3 for beta chain variable domain of TCR clone 59347 (TRBV7-2, TRBJ2-1)
CASSLVAGRYNEQFF

SEQ ID NO: 118695 - protein, 14 aa, Homo sapiens
  CDR3 for alpha chain variable domain of TCR clone 59348 (TRAV2, TRAJ37)
CAVDFTSNTGKLIF

SEQ ID NO: 118696 - protein, 14 aa, Homo sapiens
  CDR3 for beta chain variable domain of TCR clone 59348 (TRBV7-2, TRBJ1-1)
CASSFLTGTTEAFF

SEQ ID NO: 118697 - protein, 14 aa, Homo sapiens
  CDR3 for alpha chain variable domain of TCR clone 59349 (TRAV12-2, TRAJ17)
CAVLFKAAGNKLTF

SEQ ID NO: 118698 - protein, 17 aa, Homo sapiens
  CDR3 for beta chain variable domain of TCR clone 59349 (TRBV20-1, TRBJ2-2)
CSASGSGQGGLTGELIF

SEQ ID NO: 118699 - protein, 23 aa, Homo sapiens
  CDR3 for alpha chain variable domain of TCR clone 59350 (TRAV26-1, TRAJ38)
CIADNAGNNHIQNPDPVVYQLRD

SEQ ID NO: 118700 - protein, 13 aa, Homo sapiens
  CDR3 for beta chain variable domain of TCR clone 59350 (TRBV20-1, TRBJ1-1)
CSARGGGNTEAFF

SEQ ID NO: 118701 - protein, 16 aa, Homo sapiens
  CDR3 for alpha chain variable domain of TCR clone 59351 (TRAV3, TRAJ3)
CVVRDRAKSSASKIIF

SEQ ID NO: 118702 - protein, 13 aa, Homo sapiens
  CDR3 for beta chain variable domain of TCR clone 59351 (TRBV10-3, TRBJ2-7)
CASKLAVNYEQYF

SEQ ID NO: 118703 - protein, 16 aa, Homo sapiens
  CDR3 for alpha chain variable domain of TCR clone 59352 (TRAV8-4, TRAJ18)
CAVTANGGSTLGRLYF

SEQ ID NO: 118704 - protein, 14 aa, Homo sapiens
  CDR3 for beta chain variable domain of TCR clone 59352 (TRBV12-4, TRBJ1-2)
CASSSTGHIYGYTF

SEQ ID NO: 118705 - protein, 10 aa, Homo sapiens
  CDR3 for alpha chain variable domain of TCR clone 59353 (TRAV12-1, TRAJ20)
CVVNPRKLSF

SEQ ID NO: 118706 - protein, 14 aa, Homo sapiens
  CDR3 for beta chain variable domain of TCR clone 59353 (TRBV6-1, TRBJ1-3)
CASVQGGGGNTIYF

SEQ ID NO: 118707 - protein, 15 aa, Homo sapiens
  CDR3 for alpha chain variable domain of TCR clone 59354 (TRAV26-1, TRAJ22)
CIGRVSFWFCKATDL

SEQ ID NO: 118708 - protein, 13 aa, Homo sapiens
  CDR3 for beta chain variable domain of TCR clone 59354 (TRBV7-9, TRBJ1-2)
CASSLKQNYGYTF

SEQ ID NO: 118709 - protein, 11 aa, Homo sapiens
  CDR3 for alpha chain variable domain of TCR clone 59355 (TRAV13-1, TRAJ39)
CASHAGNMLTF

SEQ ID NO: 118710 - protein, 13 aa, Homo sapiens
  CDR3 for beta chain variable domain of TCR clone 59355 (TRBV7-3, TRBJ2-1)
CASSPVAYNEQFF

SEQ ID NO: 118711 - protein, 12 aa, Homo sapiens
  CDR3 for alpha chain variable domain of TCR clone 59356 (TRAV36/DV7, TRAJ54)
CAVVRGAQKLVF

SEQ ID NO: 118712 - protein, 11 aa, Homo sapiens
  CDR3 for beta chain variable domain of TCR clone 59356 (TRBV12-4, TRBJ2-2)
CASSSAGELFF

SEQ ID NO: 118713 - protein, 19 aa, Homo sapiens
  CDR3 for alpha chain variable domain of TCR clone 59357 (TRAV25, TRAJ43)
TATQTTDVGTYFCAVSMRF

SEQ ID NO: 118714 - protein, 13 aa, Homo sapiens
  CDR3 for beta chain variable domain of TCR clone 59357 (TRBV7-9, TRBJ1-2)
CASSLKQNYGYTF

SEQ ID NO: 118715 - protein, 13 aa, Homo sapiens
  CDR3 for alpha chain variable domain of TCR clone 59358 (TRAV9-2, TRAJ49)
CALIQIGGNQFYF

SEQ ID NO: 118716 - protein, 16 aa, Homo sapiens
  CDR3 for beta chain variable domain of TCR clone 59358 (TRBV12-4, TRBJ1-4)
CASSLKGIGHGEKLFF

SEQ ID NO: 118717 - protein, 15 aa, Homo sapiens
  CDR3 for alpha chain variable domain of TCR clone 59359 (TRAV12-1, TRAJ9)
CVVSFGDTGGFKTIL

SEQ ID NO: 118718 - protein, 13 aa, Homo sapiens
  CDR3 for beta chain variable domain of TCR clone 59359 (TRBV2, TRBJ1-4)
CASSERAGEKLFF

SEQ ID NO: 118719 - protein, 17 aa, Homo sapiens
  CDR3 for alpha chain variable domain of TCR clone 59360 (TRAV27, TRAJ42)
CAERVIYYGGSQGNLIF

SEQ ID NO: 118720 - protein, 16 aa, Homo sapiens
  CDR3 for beta chain variable domain of TCR clone 59360 (TRBV11-2, TRBJ2-2)
CASSLRTGNLIGELFF

SEQ ID NO: 118721 - protein, 12 aa, Homo sapiens
  CDR3 for alpha chain variable domain of TCR clone 59361 (TRAV30, TRAJ39)
CGRGNAGDMLTF

SEQ ID NO: 118722 - protein, 12 aa, Homo sapiens
  CDR3 for beta chain variable domain of TCR clone 59361 (TRBV10-3, TRBJ1-1)
CATMDRPPEAFF

SEQ ID NO: 118723 - protein, 12 aa, Homo sapiens
  CDR3 for alpha chain variable domain of TCR clone 59362 (TRAV20, TRAJ56)
CAVTGANSKLTF

SEQ ID NO: 118724 - protein, 14 aa, Homo sapiens
  CDR3 for beta chain variable domain of TCR clone 59362 (TRBV20-1, TRBJ2-5)
CGALVPGYQETQYF

SEQ ID NO: 118725 - protein, 15 aa, Homo sapiens
  CDR3 for alpha chain variable domain of TCR clone 59363 (TRAV20, TRAJ53)
CAVQASGGSNYKLTL

SEQ ID NO: 118726 - protein, 12 aa, Homo sapiens
  CDR3 for beta chain variable domain of TCR clone 59363 (TRBV7-8, TRBJ2-7)
CASSLGDREQYF

SEQ ID NO: 118727 - protein, 16 aa, Homo sapiens
  CDR3 for alpha chain variable domain of TCR clone 59364 (TRAV21, TRAJ37)
CAVRTAGSSNTGKLIF

SEQ ID NO: 118728 - protein, 13 aa, Homo sapiens
  CDR3 for beta chain variable domain of TCR clone 59364 (TRBV7-9, TRBJ2-5)
CASLPSGRDTQYF

SEQ ID NO: 118729 - protein, 17 aa, Homo sapiens
  CDR3 for alpha chain variable domain of TCR clone 59365 (TRAV3, TRAJ6)
CAVRDGPRAGGSYIPTF

SEQ ID NO: 118730 - protein, 16 aa, Homo sapiens
  CDR3 for beta chain variable domain of TCR clone 59365 (TRBV7-8, TRBJ2-3)
CASSTEEQRETDTQYF

SEQ ID NO: 118731 - protein, 13 aa, Homo sapiens
  CDR3 for alpha chain variable domain of TCR clone 59366 (TRAV8-3, TRAJ36)
CAVGATGANNLFF

SEQ ID NO: 118732 - protein, 13 aa, Homo sapiens
  CDR3 for beta chain variable domain of TCR clone 59366 (TRBV10-3, TRBJ2-5)
CAISGSGKETQYF

SEQ ID NO: 118733 - protein, 14 aa, Homo sapiens
  CDR3 for alpha chain variable domain of TCR clone 59367 (TRAV1-2, TRAJ16)
CAVNRFSDGQKLLF

SEQ ID NO: 118734 - protein, 16 aa, Homo sapiens
  CDR3 for beta chain variable domain of TCR clone 59367 (TRBV12-5, TRBJ2-5)
CANGPRTSGNQETQYF

SEQ ID NO: 118735 - protein, 15 aa, Homo sapiens
  CDR3 for alpha chain variable domain of TCR clone 59368 (TRAV26-1, TRAJ44)
CIVRIGTGAASKLTF

SEQ ID NO: 118736 - protein, 15 aa, Homo sapiens
  CDR3 for beta chain variable domain of TCR clone 59368 (TRBV7-6, TRBJ2-1)
CASSSLAGEGNEQFF

SEQ ID NO: 118737 - protein, 17 aa, Homo sapiens
  CDR3 for alpha chain variable domain of TCR clone 59369 (TRAV26-1, TRAJ53)
CIVRVDDSGGSNYKLTF

SEQ ID NO: 118738 - protein, 15 aa, Homo sapiens
  CDR3 for beta chain variable domain of TCR clone 59369 (TRBV5-1, TRBJ2-1)
CASSPPRAPYNEQFF

SEQ ID NO: 118739 - protein, 13 aa, Homo sapiens
  CDR3 for alpha chain variable domain of TCR clone 59370 (TRAV8-3, TRAJ36)
CAVGATGANNLFF

SEQ ID NO: 118740 - protein, 15 aa, Homo sapiens
  CDR3 for beta chain variable domain of TCR clone 59370 (TRBV7-2, TRBJ1-2)
FASSPRAGWNYGYTF

SEQ ID NO: 118741 - protein, 13 aa, Homo sapiens
  CDR3 for alpha chain variable domain of TCR clone 59371 (TRAV21, TRAJ47)
CAVSVLYGNKLVF

SEQ ID NO: 118742 - protein, 17 aa, Homo sapiens
  CDR3 for beta chain variable domain of TCR clone 59371 (TRBV15, TRBJ2-3)
CATSGTTSEEGTDTQYF

SEQ ID NO: 118743 - protein, 12 aa, Homo sapiens
  CDR3 for alpha chain variable domain of TCR clone 59372 (TRAV6, TRAJ27)
CALDPVQANQPL

SEQ ID NO: 118744 - protein, 14 aa, Homo sapiens
  CDR3 for beta chain variable domain of TCR clone 59372 (TRBV12-4, TRBJ2-1)
CASSLGSSPLEQFF

SEQ ID NO: 118745 - protein, 13 aa, Homo sapiens
  CDR3 for alpha chain variable domain of TCR clone 59373 (TRAV17, TRAJ26)
CATVDNYGQNFVF

SEQ ID NO: 118746 - protein, 11 aa, Homo sapiens
  CDR3 for beta chain variable domain of TCR clone 59373 (TRBV12-4, TRBJ2-2)
CASSSAGELFF

SEQ ID NO: 118747 - protein, 12 aa, Homo sapiens
  CDR3 for alpha chain variable domain of TCR clone 59374 (TRAV12-3, TRAJ17)
CAMTLTGSKLTF

SEQ ID NO: 118748 - protein, 16 aa, Homo sapiens
  CDR3 for beta chain variable domain of TCR clone 59374 (TRBV7-3, TRBJ2-1)
CASSLEGYRSYNEQFF

SEQ ID NO: 118749 - protein, 18 aa, Homo sapiens
  CDR3 for alpha chain variable domain of TCR clone 59375 (TRAV21, TRAJ52)
CAARPSPAGGTSYGKLTF

SEQ ID NO: 118750 - protein, 17 aa, Homo sapiens
  CDR3 for beta chain variable domain of TCR clone 59375 (TRBV13, TRBJ2-3)
CASSLSRVAGGGNTQYF

SEQ ID NO: 118751 - protein, 14 aa, Homo sapiens
  CDR3 for alpha chain variable domain of TCR clone 59376 (TRAV1-2, TRAJ16)
CAVNRFSDGQKLLF

SEQ ID NO: 118752 - protein, 17 aa, Homo sapiens
  CDR3 for beta chain variable domain of TCR clone 59376 (TRBV28, TRBJ2-5)
CASSTPEGDALQETQYL

SEQ ID NO: 118753 - protein, 10 aa, Homo sapiens
  CDR3 for alpha chain variable domain of TCR clone 59377 (TRAV30, TRAJ48)
CGIGNEKLTF

SEQ ID NO: 118754 - protein, 14 aa, Homo sapiens
  CDR3 for beta chain variable domain of TCR clone 59377 (TRBV7-6, TRBJ2-3)
CASSVAGDTDTQYF

SEQ ID NO: 118755 - protein, 15 aa, Homo sapiens
  CDR3 for alpha chain variable domain of TCR clone 59378 (TRAV30, TRAJ13)
CGTQGVTGGYQRVTF

SEQ ID NO: 118756 - protein, 17 aa, Homo sapiens
  CDR3 for beta chain variable domain of TCR clone 59378 (TRBV20-1, TRBJ2-2)
CSARVKRTHVRSGELFF

SEQ ID NO: 118757 - protein, 12 aa, Homo sapiens
  CDR3 for alpha chain variable domain of TCR clone 59379 (TRAV12-3, TRAJ20)
CAMVRGDYKLSF

SEQ ID NO: 118758 - protein, 16 aa, Homo sapiens
  CDR3 for beta chain variable domain of TCR clone 59379 (TRBV5-1, TRBJ2-3)
CDSSLGLAVYTDTQYF

SEQ ID NO: 118759 - protein, 11 aa, Homo sapiens
  CDR3 for alpha chain variable domain of TCR clone 59380 (TRAV14/DV4, TRAJ29)
CAMTTTSCLWK

SEQ ID NO: 118760 - protein, 16 aa, Homo sapiens
  CDR3 for beta chain variable domain of TCR clone 59380 (TRBV7-2, TRBJ1-4)
CASSLAPGRRDEKLFF

SEQ ID NO: 118761 - protein, 12 aa, Homo sapiens
  CDR3 for alpha chain variable domain of TCR clone 59381 (TRAV17, TRAJ30)
CVPERRDDKIIF

SEQ ID NO: 118762 - protein, 14 aa, Homo sapiens
  CDR3 for beta chain variable domain of TCR clone 59381 (TRBV7-7, TRBJ2-2)
CASSRDRSTGGLFF

SEQ ID NO: 118763 - protein, 18 aa, Homo sapiens
  CDR3 for alpha chain variable domain of TCR clone 59382 (TRAV13-1, TRAJ52)
CAAKNPNAGGTSYGKLTF

SEQ ID NO: 118764 - protein, 15 aa, Homo sapiens
  CDR3 for beta chain variable domain of TCR clone 59382 (TRBV6-1, TRBJ2-3)
GASSERGGITDTQYF

SEQ ID NO: 118765 - protein, 14 aa, Homo sapiens
  CDR3 for alpha chain variable domain of TCR clone 59383 (TRAV12-2, TRAJ40)
CAVKSPSGTYKYIF

SEQ ID NO: 118766 - protein, 14 aa, Homo sapiens
  CDR3 for beta chain variable domain of TCR clone 59383 (TRBV20-1, TRBJ1-1)
CSAQTRIGGTEAFF

SEQ ID NO: 118767 - protein, 19 aa, Homo sapiens
  CDR3 for alpha chain variable domain of TCR clone 59384 (TRAV38-1, TRAJ53)
CAFMKHGLESGGSNYKPTF

SEQ ID NO: 118768 - protein, 13 aa, Homo sapiens
  CDR3 for beta chain variable domain of TCR clone 59384 (TRBV19, TRBJ2-7)
CASSPRQSYEQYF

SEQ ID NO: 118769 - protein, 16 aa, Homo sapiens
  CDR3 for alpha chain variable domain of TCR clone 59385 (TRAV30, TRAJ24)
CGTEIVDADSWGKFQF

SEQ ID NO: 118770 - protein, 14 aa, Homo sapiens
  CDR3 for beta chain variable domain of TCR clone 59385 (TRBV7-2, TRBJ2-7)
CASSLYPGRYEQYF

SEQ ID NO: 118771 - protein, 15 aa, Homo sapiens
  CDR3 for alpha chain variable domain of TCR clone 59386 (TRAV27, TRAJ50)
CAGVGRGTSHDKVIF

SEQ ID NO: 118772 - protein, 14 aa, Homo sapiens
  CDR3 for beta chain variable domain of TCR clone 59386 (TRBV7-2, TRBJ1-1)
CASSFYDLNTEAFF

SEQ ID NO: 118773 - protein, 14 aa, Homo sapiens
  CDR3 for alpha chain variable domain of TCR clone 59387 (TRAV13-1, TRAJ40)
CAASMTSGTYKYIF

SEQ ID NO: 118774 - protein, 15 aa, Homo sapiens
  CDR3 for beta chain variable domain of TCR clone 59387 (TRBV7-3, TRBJ2-1)
CASSPTGGGEAEQFF

SEQ ID NO: 118775 - protein, 16 aa, Homo sapiens
  CDR3 for alpha chain variable domain of TCR clone 59388 (TRAV3, TRAJ10)
CAVRDMRAGGGNKLTF

SEQ ID NO: 118776 - protein, 11 aa, Homo sapiens
  CDR3 for beta chain variable domain of TCR clone 59388 (TRBV29-1, TRBJ2-5)
CSEDRTETQYF

SEQ ID NO: 118777 - protein, 13 aa, Homo sapiens
  CDR3 for alpha chain variable domain of TCR clone 59389 (TRAV27, TRAJ56)
CAGKPGANSKLTF

SEQ ID NO: 118778 - protein, 18 aa, Homo sapiens
  CDR3 for beta chain variable domain of TCR clone 59389 (TRBV11-3, TRBJ2-3)
CASSLGGASRGAPNTQYF

SEQ ID NO: 118779 - protein, 12 aa, Homo sapiens
  CDR3 for alpha chain variable domain of TCR clone 59390 (TRAV30, TRAJ43)
CGTEERGNDMRF

SEQ ID NO: 118780 - protein, 12 aa, Homo sapiens
  CDR3 for beta chain variable domain of TCR clone 59390 (TRBV11-2, TRBJ2-1)
CASSPGNNEQFF

SEQ ID NO: 118781 - protein, 16 aa, Homo sapiens
  CDR3 for alpha chain variable domain of TCR clone 59391 (TRAV16, TRAJ52)
CALSAAGGTSHGKLTF

SEQ ID NO: 118782 - protein, 12 aa, Homo sapiens
  CDR3 for beta chain variable domain of TCR clone 59391 (TRBV12-4, TRBJ1-3)
CASSFSGNTIYF

SEQ ID NO: 118783 - protein, 17 aa, Homo sapiens
  CDR3 for alpha chain variable domain of TCR clone 59392 (TRAV8-2, TRAJ40)
CVVLGTTSGTYKYILEQ

SEQ ID NO: 118784 - protein, 16 aa, Homo sapiens
  CDR3 for beta chain variable domain of TCR clone 59392 (TRBV7-3, TRBJ2-1)
CASSLEGYRSYNEQFF

SEQ ID NO: 118785 - protein, 21 aa, Homo sapiens
  CDR3 for alpha chain variable domain of TCR clone 59393 (TRAV4, TRAJ3)
CCVLLPRGCPPGYSSASKIIF

SEQ ID NO: 118786 - protein, 14 aa, Homo sapiens
  CDR3 for beta chain variable domain of TCR clone 59393 (TRBV2, TRBJ1-6)
CALSPSEPRSPLHF

SEQ ID NO: 118787 - protein, 12 aa, Homo sapiens
  CDR3 for alpha chain variable domain of TCR clone 59394 (TRAV8-3, TRAJ26)
CAGDNYGQNFVF

SEQ ID NO: 118788 - protein, 12 aa, Homo sapiens
  CDR3 for beta chain variable domain of TCR clone 59394 (TRBV7-8, TRBJ2-7)
CASSLGDREQYF

SEQ ID NO: 118789 - protein, 13 aa, Homo sapiens
  CDR3 for alpha chain variable domain of TCR clone 59395 (TRAV2, TRAJ15)
CAVASQAGNALIF

SEQ ID NO: 118790 - protein, 16 aa, Homo sapiens
  CDR3 for beta chain variable domain of TCR clone 59395 (TRBV5-1, TRBJ1-1)
CASSSGGNSLNTEAFF

SEQ ID NO: 118791 - protein, 11 aa, Homo sapiens
  CDR3 for alpha chain variable domain of TCR clone 59396 (TRAV17, TRAJ23)
CAYNQGGKLIF

SEQ ID NO: 118792 - protein, 20 aa, Homo sapiens
  CDR3 for beta chain variable domain of TCR clone 59396 (TRBV7-8, TRBJ2-2)
CASSHLFPGPTIHITGELFF

SEQ ID NO: 118793 - protein, 13 aa, Homo sapiens
  CDR3 for alpha chain variable domain of TCR clone 59397 (TRAV35, TRAJ42)
CAGFPGSQGNLIF

SEQ ID NO: 118794 - protein, 14 aa, Homo sapiens
  CDR3 for beta chain variable domain of TCR clone 59397 (TRBV7-2, TRBJ1-3)
CASSRLRSGNTIYF

SEQ ID NO: 118795 - protein, 14 aa, Homo sapiens
  CDR3 for alpha chain variable domain of TCR clone 59398 (TRAV8-4, TRAJ13)
CVVTLSGGYQKVTF

SEQ ID NO: 118796 - protein, 14 aa, Homo sapiens
  CDR3 for beta chain variable domain of TCR clone 59398 (TRBV7-2, TRBJ1-2)
CASSQTGSTYGYTF

SEQ ID NO: 118797 - protein, 14 aa, Homo sapiens
  CDR3 for alpha chain variable domain of TCR clone 59399 (TRAV21, TRAJ35)
CAVMPIGFGNVLHC

SEQ ID NO: 118798 - protein, 12 aa, Homo sapiens
  CDR3 for beta chain variable domain of TCR clone 59399 (TRBV7-9, TRBJ2-7)
YASSIKREEQYF

SEQ ID NO: 118799 - protein, 11 aa, Homo sapiens
  CDR3 for alpha chain variable domain of TCR clone 59400 (TRAV12-1, TRAJ34)
CVVNKGRELVF

SEQ ID NO: 118800 - protein, 12 aa, Homo sapiens
  CDR3 for beta chain variable domain of TCR clone 59400 (TRBV2, TRBJ2-1)
CAYGPPGNEQFF

SEQ ID NO: 118801 - protein, 12 aa, Homo sapiens
  CDR3 for alpha chain variable domain of TCR clone 59401 (TRAV26-1, TRAJ54)
CIGGGGAQKLVF

SEQ ID NO: 118802 - protein, 14 aa, Homo sapiens
  CDR3 for beta chain variable domain of TCR clone 59401 (TRBV11-2, TRBJ1-2)
CASSSGQAGDGYTF

SEQ ID NO: 118803 - protein, 18 aa, Homo sapiens
  CDR3 for alpha chain variable domain of TCR clone 59402 (TRAV26-1, TRAJ23)
CIVRVGLEVWNQGGKLIF

SEQ ID NO: 118804 - protein, 16 aa, Homo sapiens
  CDR3 for beta chain variable domain of TCR clone 59402 (TRBV12-4, TRBJ2-5)
CASSCFVGGRQETQYF

SEQ ID NO: 118805 - protein, 14 aa, Homo sapiens
  CDR3 for alpha chain variable domain of TCR clone 59403 (TRAV17, TRAJ45)
CATASGGGAAGLTF

SEQ ID NO: 118806 - protein, 15 aa, Homo sapiens
  CDR3 for beta chain variable domain of TCR clone 59403 (TRBV11-2, TRBJ2-1)
CASSRNRGLMYEQFF

SEQ ID NO: 118807 - protein, 14 aa, Homo sapiens
  CDR3 for alpha chain variable domain of TCR clone 59404 (TRAV12-2, TRAJ29)
CAVRRNSGNTPLVF

SEQ ID NO: 118808 - protein, 13 aa, Homo sapiens
  CDR3 for beta chain variable domain of TCR clone 59404 (TRBV12-4, TRBJ2-1)
CASSNYTDNEQFF

SEQ ID NO: 118809 - protein, 14 aa, Homo sapiens
  CDR3 for alpha chain variable domain of TCR clone 59405 (TRAV23/DV6, TRAJ11)
CAASLESGYSTLTF

SEQ ID NO: 118810 - protein, 13 aa, Homo sapiens
  CDR3 for beta chain variable domain of TCR clone 59405 (TRBV4-1, TRBJ2-5)
CSSSLTRGETQYF

SEQ ID NO: 118811 - protein, 13 aa, Homo sapiens
  CDR3 for alpha chain variable domain of TCR clone 59406 (TRAV13-1, TRAJ20)
CAARVPNDYKLSF

SEQ ID NO: 118812 - protein, 12 aa, Homo sapiens
  CDR3 for beta chain variable domain of TCR clone 59406 (TRBV20-1, TRBJ2-1)
CSARLGTDEQFF

SEQ ID NO: 118813 - protein, 13 aa, Homo sapiens
  CDR3 for alpha chain variable domain of TCR clone 59407 (TRAV21, TRAJ24)
GLMTTDSWGKLQF

SEQ ID NO: 118814 - protein, 15 aa, Homo sapiens
  CDR3 for beta chain variable domain of TCR clone 59407 (TRBV2, TRBJ2-1)
CASSGLAGSYNEQFF

SEQ ID NO: 118815 - protein, 11 aa, Homo sapiens
  CDR3 for alpha chain variable domain of TCR clone 59408 (TRAV3, TRAJ21)
CAVGNFNKFYF

SEQ ID NO: 118816 - protein, 14 aa, Homo sapiens
  CDR3 for beta chain variable domain of TCR clone 59408 (TRBV6-3, TRBJ2-3)
CATFSGLSTDTQYF

SEQ ID NO: 118817 - protein, 19 aa, Homo sapiens
  CDR3 for alpha chain variable domain of TCR clone 59409 (TRAV2, TRAJ20)
ILQVREADAAVYRDCKLSF

SEQ ID NO: 118818 - protein, 16 aa, Homo sapiens
  CDR3 for beta chain variable domain of TCR clone 59409 (TRBV24-1, TRBJ2-3)
CATSDPGTGATDTRYF

SEQ ID NO: 118819 - protein, 14 aa, Homo sapiens
  CDR3 for alpha chain variable domain of TCR clone 59410 (TRAV20, TRAJ29)
FAVQAWVGNTPLVF

SEQ ID NO: 118820 - protein, 15 aa, Homo sapiens
  CDR3 for beta chain variable domain of TCR clone 59410 (TRBV29-1, TRBJ2-7)
CSVEFFDRGSYEQYF

SEQ ID NO: 118821 - protein, 15 aa, Homo sapiens
  CDR3 for alpha chain variable domain of TCR clone 59411 (TRAV8-4, TRAJ3)
CAVTGENLVQPCFQD

SEQ ID NO: 118822 - protein, 16 aa, Homo sapiens
  CDR3 for beta chain variable domain of TCR clone 59411 (TRBV4-2, TRBJ1-1)
CASSQAGFGMNTEAFF

SEQ ID NO: 118823 - protein, 14 aa, Homo sapiens
  CDR3 for alpha chain variable domain of TCR clone 59412 (TRAV8-2, TRAJ11)
GVVSEKSGYSTLTF

SEQ ID NO: 118824 - protein, 16 aa, Homo sapiens
  CDR3 for beta chain variable domain of TCR clone 59412 (TRBV28, TRBJ2-1)
CASSSPEYPRDNEQFF

SEQ ID NO: 118825 - protein, 14 aa, Homo sapiens
  CDR3 for alpha chain variable domain of TCR clone 59413 (TRAV25, TRAJ35)
CTRRMEGFGNVLHC

SEQ ID NO: 118826 - protein, 13 aa, Homo sapiens
  CDR3 for beta chain variable domain of TCR clone 59413 (TRBV7-2, TRBJ1-4)
CASSLAGLEKLFF

SEQ ID NO: 118827 - protein, 11 aa, Homo sapiens
  CDR3 for alpha chain variable domain of TCR clone 59414 (TRAV12-2, TRAJ54)
CAVEGAQELVF

SEQ ID NO: 118828 - protein, 17 aa, Homo sapiens
  CDR3 for beta chain variable domain of TCR clone 59414 (TRBV18, TRBJ1-3)
CASSPYPTGPSGNTIYF

SEQ ID NO: 118829 - protein, 16 aa, Homo sapiens
  CDR3 for alpha chain variable domain of TCR clone 59415 (TRAV8-3, TRAJ44)
CAVGASNTGTASKLTF

SEQ ID NO: 118830 - protein, 17 aa, Homo sapiens
  CDR3 for beta chain variable domain of TCR clone 59415 (TRBV27, TRBJ1-5)
CASTFNRGSNQPSILVM

SEQ ID NO: 118831 - protein, 13 aa, Homo sapiens
  CDR3 for alpha chain variable domain of TCR clone 59416 (TRAV8-4, TRAJ30)
CAVSVNRDDKIIL

SEQ ID NO: 118832 - protein, 13 aa, Homo sapiens
  CDR3 for beta chain variable domain of TCR clone 59416 (TRBV3-1, TRBJ2-2)
CASLARGSGELFF

SEQ ID NO: 118833 - protein, 14 aa, Homo sapiens
  CDR3 for alpha chain variable domain of TCR clone 59417 (TRAV12-2, TRAJ40)
CAVKIPSGTYKYIF

SEQ ID NO: 118834 - protein, 12 aa, Homo sapiens
  CDR3 for beta chain variable domain of TCR clone 59417 (TRBV11-2, TRBJ2-1)
CAGSPGNNEQFF

SEQ ID NO: 118835 - protein, 12 aa, Homo sapiens
  CDR3 for alpha chain variable domain of TCR clone 59418 (TRAV12-2, TRAJ31)
CAVNTPDARLMF

SEQ ID NO: 118836 - protein, 15 aa, Homo sapiens
  CDR3 for beta chain variable domain of TCR clone 59418 (TRBV4-2, TRBJ1-1)
CASSQDRGLNTEASF

SEQ ID NO: 118837 - protein, 14 aa, Homo sapiens
  CDR3 for alpha chain variable domain of TCR clone 59419 (TRAV12-3, TRAJ58)
CAISTETSGSRLTF

SEQ ID NO: 118838 - protein, 13 aa, Homo sapiens
  CDR3 for beta chain variable domain of TCR clone 59419 (TRBV27, TRBJ2-3)
CASSWGRTDTQYF

SEQ ID NO: 118839 - protein, 14 aa, Homo sapiens
  CDR3 for alpha chain variable domain of TCR clone 59420 (TRAV12-2, TRAJ17)
CAVLFKAAGNKLTF

SEQ ID NO: 118840 - protein, 17 aa, Homo sapiens
  CDR3 for beta chain variable domain of TCR clone 59420 (TRBV20-1, TRBJ2-2)
CSASGSGQGGLTGQLFF

SEQ ID NO: 118841 - protein, 11 aa, Homo sapiens
  CDR3 for alpha chain variable domain of TCR clone 59421 (TRAV12-1, TRAJ40)
CVVPGTYKYIF

SEQ ID NO: 118842 - protein, 13 aa, Homo sapiens
  CDR3 for beta chain variable domain of TCR clone 59421 (TRBV6-3, TRBJ2-7)
CASSTDLAGEQYF

SEQ ID NO: 118843 - protein, 15 aa, Homo sapiens
  CDR3 for alpha chain variable domain of TCR clone 59422 (TRAV20, TRAJ41)
CAVQANSNSGYALNF

SEQ ID NO: 118844 - protein, 18 aa, Homo sapiens
  CDR3 for beta chain variable domain of TCR clone 59422 (TRBV7-9, TRBJ2-7)
CASSLTTSGSRTWYEQYS

SEQ ID NO: 118845 - protein, 15 aa, Homo sapiens
  CDR3 for alpha chain variable domain of TCR clone 59423 (TRAV8-3, TRAJ21)
CAVGALPPRGYKFYF

SEQ ID NO: 118846 - protein, 12 aa, Homo sapiens
  CDR3 for beta chain variable domain of TCR clone 59423 (TRBV6-3, TRBJ2-7)
CASSLGRRGLYF

SEQ ID NO: 118847 - protein, 12 aa, Homo sapiens
  CDR3 for alpha chain variable domain of TCR clone 59424 (TRAV29/DV5, TRAJ34)
CAASGNTDKLIF

SEQ ID NO: 118848 - protein, 16 aa, Homo sapiens
  CDR3 for beta chain variable domain of TCR clone 59424 (TRBV12-4, TRBJ1-5)
CASRQPVEGSNQPRHF

SEQ ID NO: 118849 - protein, 13 aa, Homo sapiens
  CDR3 for alpha chain variable domain of TCR clone 59425 (TRAV2, TRAJ40)
CAVVTSGTYKYIF

SEQ ID NO: 118850 - protein, 15 aa, Homo sapiens
  CDR3 for beta chain variable domain of TCR clone 59425 (TRBV19, TRBJ2-7)
CASRPTPGLSIEQYF

SEQ ID NO: 118851 - protein, 14 aa, Homo sapiens
  CDR3 for alpha chain variable domain of TCR clone 59426 (TRAV13-1, TRAJ44)
CAATATGTASKLTF

SEQ ID NO: 118852 - protein, 17 aa, Homo sapiens
  CDR3 for beta chain variable domain of TCR clone 59426 (TRBV7-3, TRBJ2-3)
CASSLMKRMRGADTQYF

SEQ ID NO: 118853 - protein, 13 aa, Homo sapiens
  CDR3 for alpha chain variable domain of TCR clone 59427 (TRAV3, TRAJ3)
CVVADSSASKIIF

SEQ ID NO: 118854 - protein, 12 aa, Homo sapiens
  CDR3 for beta chain variable domain of TCR clone 59427 (TRBV7-8, TRBJ2-7)
CASEGGPHGQYF

SEQ ID NO: 118855 - protein, 12 aa, Homo sapiens
  CDR3 for alpha chain variable domain of TCR clone 59428 (TRAV1-1, TRAJ8)
CAGGTCFQKLVF

SEQ ID NO: 118856 - protein, 15 aa, Homo sapiens
  CDR3 for beta chain variable domain of TCR clone 59428 (TRBV7-9, TRBJ1-4)
CASSRTGGFNEKLFF

SEQ ID NO: 118857 - protein, 14 aa, Homo sapiens
  CDR3 for alpha chain variable domain of TCR clone 59429 (TRAV12-2, TRAJ53)
CAVKGGGSNYKLTF

SEQ ID NO: 118858 - protein, 14 aa, Homo sapiens
  CDR3 for beta chain variable domain of TCR clone 59429 (TRBV7-7, TRBJ2-2)
RATRQDSDTGELFF

SEQ ID NO: 118859 - protein, 13 aa, Homo sapiens
  CDR3 for alpha chain variable domain of TCR clone 59430 (TRAV16, TRAJ48)
CSPLNFGNEKLTF

SEQ ID NO: 118860 - protein, 13 aa, Homo sapiens
  CDR3 for beta chain variable domain of TCR clone 59430 (TRBV7-9, TRBJ1-2)
CASSLKQNYGYTF

SEQ ID NO: 118861 - protein, 15 aa, Homo sapiens
  CDR3 for alpha chain variable domain of TCR clone 59431 (TRAV3, TRAJ20)
CAVRDIKLSDYKLSF

SEQ ID NO: 118862 - protein, 17 aa, Homo sapiens
  CDR3 for beta chain variable domain of TCR clone 59431 (TRBV7-9, TRBJ1-6)
CASSSRDVEIHPSTLGT

SEQ ID NO: 118863 - protein, 18 aa, Homo sapiens
  CDR3 for alpha chain variable domain of TCR clone 59432 (TRAV26-1, TRAJ22)
CIVRVAWISSGSARQLTF

SEQ ID NO: 118864 - protein, 13 aa, Homo sapiens
  CDR3 for beta chain variable domain of TCR clone 59432 (TRBV13, TRBJ2-5)
CASSPEVGETQYF

SEQ ID NO: 118865 - protein, 10 aa, Homo sapiens
  CDR3 for alpha chain variable domain of TCR clone 59433 (TRAV8-3, TRAJ33)
CAVGAIATIS

SEQ ID NO: 118866 - protein, 14 aa, Homo sapiens
  CDR3 for beta chain variable domain of TCR clone 59433 (TRBV5-5, TRBJ2-7)
CASSAGYSSYEQYF

SEQ ID NO: 118867 - protein, 14 aa, Homo sapiens
  CDR3 for alpha chain variable domain of TCR clone 59434 (TRAV38-1, TRAJ40)
CALRPTSGTYKNIF

SEQ ID NO: 118868 - protein, 14 aa, Homo sapiens
  CDR3 for beta chain variable domain of TCR clone 59434 (TRBV25-1, TRBJ1-1)
CASTHLGGNTEAFF

SEQ ID NO: 118869 - protein, 15 aa, Homo sapiens
  CDR3 for alpha chain variable domain of TCR clone 59435 (TRAV1-1, TRAJ13)
CAVNSGGYQKVTLEL

SEQ ID NO: 118870 - protein, 12 aa, Homo sapiens
  CDR3 for beta chain variable domain of TCR clone 59435 (TRBV28, TRBJ2-1)
CASSVQINEQFF

SEQ ID NO: 118871 - protein, 14 aa, Homo sapiens
  CDR3 for alpha chain variable domain of TCR clone 59436 (TRAV12-1, TRAJ9)
CVVTGYTGGFKAIF

SEQ ID NO: 118872 - protein, 13 aa, Homo sapiens
  CDR3 for beta chain variable domain of TCR clone 59436 (TRBV20-1, TRBJ1-1)
CSARAGGNTEAFF

SEQ ID NO: 118873 - protein, 15 aa, Homo sapiens
  CDR3 for alpha chain variable domain of TCR clone 59437 (TRAV20, TRAJ23)
CAVQAVRNQGGKLIL

SEQ ID NO: 118874 - protein, 13 aa, Homo sapiens
  CDR3 for beta chain variable domain of TCR clone 59437 (TRBV9, TRBJ2-7)
CASSASDSYEQYF

SEQ ID NO: 118875 - protein, 14 aa, Homo sapiens
  CDR3 for alpha chain variable domain of TCR clone 59438 (TRAV29/DV5, TRAJ36)
CAARRKTGTNNLFF

SEQ ID NO: 118876 - protein, 14 aa, Homo sapiens
  CDR3 for beta chain variable domain of TCR clone 59438 (TRBV12-5, TRBJ2-5)
CASGSRTHQETQYF

SEQ ID NO: 118877 - protein, 22 aa, Homo sapiens
  CDR3 for alpha chain variable domain of TCR clone 59439 (TRAV8-2, TRAJ45)
HLTKPSAHMSDAAEYSADGLNF

SEQ ID NO: 118878 - protein, 13 aa, Homo sapiens
  CDR3 for beta chain variable domain of TCR clone 59439 (TRBV7-3, TRBJ2-1)
CASSPVAYNEQFF

SEQ ID NO: 118879 - protein, 14 aa, Homo sapiens
  CDR3 for alpha chain variable domain of TCR clone 59440 (TRAV2, TRAJ29)
CAVTPPSGNTPLVF

SEQ ID NO: 118880 - protein, 13 aa, Homo sapiens
  CDR3 for beta chain variable domain of TCR clone 59440 (TRBV11-2, TRBJ2-1)
CASSLGLAEGRFF

SEQ ID NO: 118881 - protein, 13 aa, Homo sapiens
  CDR3 for alpha chain variable domain of TCR clone 59441 (TRAV1-2, TRAJ9)
CAALNTGGFKTIF

SEQ ID NO: 118882 - protein, 11 aa, Homo sapiens
  CDR3 for beta chain variable domain of TCR clone 59441 (TRBV7-8, TRBJ2-7)
CASSLSLEQYF

SEQ ID NO: 118883 - protein, 16 aa, Homo sapiens
  CDR3 for alpha chain variable domain of TCR clone 59442 (TRAV30, TRAJ24)
CGTEIVDADSWGKFQF

SEQ ID NO: 118884 - protein, 16 aa, Homo sapiens
  CDR3 for beta chain variable domain of TCR clone 59442 (TRBV15, TRBJ1-2)
CATSRGPRTGGGGYTF

SEQ ID NO: 118885 - protein, 13 aa, Homo sapiens
  CDR3 for alpha chain variable domain of TCR clone 59443 (TRAV12-3, TRAJ49)
CAMSRKTGNQFYF

SEQ ID NO: 118886 - protein, 16 aa, Homo sapiens
  CDR3 for beta chain variable domain of TCR clone 59443 (TRBV5-8, TRBJ2-2)
CASSLINPGGAGELFF

SEQ ID NO: 118887 - protein, 17 aa, Homo sapiens
  CDR3 for alpha chain variable domain of TCR clone 59444 (TRAV3, TRAJ6)
CAVRDGPRAGGSYIPTF

SEQ ID NO: 118888 - protein, 12 aa, Homo sapiens
  CDR3 for beta chain variable domain of TCR clone 59444 (TRBV3-1, TRBJ2-1)
CASSQGSSGQFF

SEQ ID NO: 118889 - protein, 15 aa, Homo sapiens
  CDR3 for alpha chain variable domain of TCR clone 59445 (TRAV12-3, TRAJ49)
CAMAVTPNTGNQFYF

SEQ ID NO: 118890 - protein, 13 aa, Homo sapiens
  CDR3 for beta chain variable domain of TCR clone 59445 (TRBV7-9, TRBJ1-2)
CASSLKQNYGYTF

SEQ ID NO: 118891 - protein, 11 aa, Homo sapiens
  CDR3 for alpha chain variable domain of TCR clone 59446 (TRAV36/DV7, TRAJ45)
SGGGGADGLTF

SEQ ID NO: 118892 - protein, 13 aa, Homo sapiens
  CDR3 for beta chain variable domain of TCR clone 59446 (TRBV28, TRBJ2-7)
CASSPSGTYEQYF

SEQ ID NO: 118893 - protein, 13 aa, Homo sapiens
  CDR3 for alpha chain variable domain of TCR clone 59447 (TRAV13-1, TRAJ39)
CATSIWAGNMLTF

SEQ ID NO: 118894 - protein, 15 aa, Homo sapiens
  CDR3 for beta chain variable domain of TCR clone 59447 (TRBV7-9, TRBJ1-1)
CASSLLEQGGTEAFF

SEQ ID NO: 118895 - protein, 11 aa, Homo sapiens
  CDR3 for alpha chain variable domain of TCR clone 59448 (TRAV16, TRAJ20)
CALSEGLKAAL

SEQ ID NO: 118896 - protein, 13 aa, Homo sapiens
  CDR3 for beta chain variable domain of TCR clone 59448 (TRBV7-3, TRBJ2-1)
CASSLDSYNEQFF

SEQ ID NO: 118897 - protein, 12 aa, Homo sapiens
  CDR3 for alpha chain variable domain of TCR clone 59449 (TRAV21, TRAJ41)
CAVREFRVCTQL

SEQ ID NO: 118898 - protein, 15 aa, Homo sapiens
  CDR3 for beta chain variable domain of TCR clone 59449 (TRBV18, TRBJ1-5)
CASSPQARSNQTQHF

SEQ ID NO: 118899 - protein, 14 aa, Homo sapiens
  CDR3 for alpha chain variable domain of TCR clone 59450 (TRAV1-2, TRAJ16)
CAVNRFSDGQKLLF

SEQ ID NO: 118900 - protein, 15 aa, Homo sapiens
  CDR3 for beta chain variable domain of TCR clone 59450 (TRBV7-9, TRBJ1-6)
CASSSPGRGNSPRHF

SEQ ID NO: 118901 - protein, 15 aa, Homo sapiens
  CDR3 for alpha chain variable domain of TCR clone 59451 (TRAV17, TRAJ48)
CATDETNFGNEKLTF

SEQ ID NO: 118902 - protein, 14 aa, Homo sapiens
  CDR3 for beta chain variable domain of TCR clone 59451 (TRBV7-9, TRBJ1-2)
CASSLVQINYGYTF

SEQ ID NO: 118903 - protein, 13 aa, Homo sapiens
  CDR3 for alpha chain variable domain of TCR clone 59452 (TRAV3, TRAJ27)
CAVRPLGAGKSTL

SEQ ID NO: 118904 - protein, 13 aa, Homo sapiens
  CDR3 for beta chain variable domain of TCR clone 59452 (TRBV7-9, TRBJ2-3)
CASSPGSTDTQYF

SEQ ID NO: 118905 - protein, 13 aa, Homo sapiens
  CDR3 for alpha chain variable domain of TCR clone 59453 (TRAV1-2, TRAJ9)
CAALNTGGFKTIF

SEQ ID NO: 118906 - protein, 16 aa, Homo sapiens
  CDR3 for beta chain variable domain of TCR clone 59453 (TRBV20-1, TRBJ1-4)
RSAPGQGLLTNEKLFF

SEQ ID NO: 118907 - protein, 16 aa, Homo sapiens
  CDR3 for alpha chain variable domain of TCR clone 59454 (TRAV2, TRAJ4)
CAVEDRFSGGYNKLIF

SEQ ID NO: 118908 - protein, 20 aa, Homo sapiens
  CDR3 for beta chain variable domain of TCR clone 59454 (TRBV28, TRBJ2-1)
CASTPIGRSPGLAGGNEQFF

SEQ ID NO: 118909 - protein, 14 aa, Homo sapiens
  CDR3 for alpha chain variable domain of TCR clone 59455 (TRAV12-2, TRAJ11)
CAVNRESGYSTLSF

SEQ ID NO: 118910 - protein, 10 aa, Homo sapiens
  CDR3 for beta chain variable domain of TCR clone 59455 (TRBV20-1, TRBJ2-5)
CSARFETQYF

SEQ ID NO: 118911 - protein, 13 aa, Homo sapiens
  CDR3 for alpha chain variable domain of TCR clone 59456 (TRAV23/DV6, TRAJ16)
CAASVSDGQKLLF

SEQ ID NO: 118912 - protein, 15 aa, Homo sapiens
  CDR3 for beta chain variable domain of TCR clone 59456 (TRBV2, TRBJ2-2)
CASSRETVGTGELFF

SEQ ID NO: 118913 - protein, 15 aa, Homo sapiens
  CDR3 for alpha chain variable domain of TCR clone 59457 (TRAV12-2, TRAJ53)
CAVNGGGGSNYKLTF

SEQ ID NO: 118914 - protein, 11 aa, Homo sapiens
  CDR3 for beta chain variable domain of TCR clone 59457 (TRBV7-8, TRBJ2-7)
CASSLSLEQYF

SEQ ID NO: 118915 - protein, 11 aa, Homo sapiens
  CDR3 for alpha chain variable domain of TCR clone 59458 (TRAV4, TRAJ23)
CIVAPGGKLIF

SEQ ID NO: 118916 - protein, 15 aa, Homo sapiens
  CDR3 for beta chain variable domain of TCR clone 59458 (TRBV7-2, TRBJ2-1)
CASSFQADEYNEQFF

SEQ ID NO: 118917 - protein, 15 aa, Homo sapiens
  CDR3 for alpha chain variable domain of TCR clone 59459 (TRAV12-3, TRAJ6)
CAMSAPTGGSYIPTF

SEQ ID NO: 118918 - protein, 16 aa, Homo sapiens
  CDR3 for beta chain variable domain of TCR clone 59459 (TRBV20-1, TRBJ1-2)
CSASMGQGVANYGYTF

SEQ ID NO: 118919 - protein, 13 aa, Homo sapiens
  CDR3 for alpha chain variable domain of TCR clone 59460 (TRAV21, TRAJ27)
CAARPGTAGKSTF

SEQ ID NO: 118920 - protein, 15 aa, Homo sapiens
  CDR3 for beta chain variable domain of TCR clone 59460 (TRBV11-3, TRBJ2-7)
CASSPGPASSYEQYF

SEQ ID NO: 118921 - protein, 15 aa, Homo sapiens
  CDR3 for alpha chain variable domain of TCR clone 59461 (TRAV25, TRAJ53)
CAATGGGCSNYKLTF

SEQ ID NO: 118922 - protein, 19 aa, Homo sapiens
  CDR3 for beta chain variable domain of TCR clone 59461 (TRBV7-2, TRBJ2-3)
CASSFLSRNWGGGTDTQYF

SEQ ID NO: 118923 - protein, 16 aa, Homo sapiens
  CDR3 for alpha chain variable domain of TCR clone 59462 (TRAV12-3, TRAJ53)
CAMSPGGGGSNYKLTF

SEQ ID NO: 118924 - protein, 18 aa, Homo sapiens
  CDR3 for beta chain variable domain of TCR clone 59462 (TRBV10-2, TRBJ2-2)
CISAPAVHRQADAGELFF

SEQ ID NO: 118925 - protein, 14 aa, Homo sapiens
  CDR3 for alpha chain variable domain of TCR clone 59463 (TRAV12-2, TRAJ13)
CAVNPSGGYQKVAF

SEQ ID NO: 118926 - protein, 14 aa, Homo sapiens
  CDR3 for beta chain variable domain of TCR clone 59463 (TRBV12-4, TRBJ1-1)
CASSLGTGGTEAFF

SEQ ID NO: 118927 - protein, 14 aa, Homo sapiens
  CDR3 for alpha chain variable domain of TCR clone 59464 (TRAV16, TRAJ29)
CALTRNSGNTPLVF

SEQ ID NO: 118928 - protein, 13 aa, Homo sapiens
  CDR3 for beta chain variable domain of TCR clone 59464 (TRBV7-3, TRBJ2-3)
CASSISAQGTQYF

SEQ ID NO: 118929 - protein, 11 aa, Homo sapiens
  CDR3 for alpha chain variable domain of TCR clone 59465 (TRAV2, TRAJ13)
CASGGYQKVTF

SEQ ID NO: 118930 - protein, 14 aa, Homo sapiens
  CDR3 for beta chain variable domain of TCR clone 59465 (TRBV7-9, TRBJ2-2)
CASSLVQDTGELFF

SEQ ID NO: 118931 - protein, 15 aa, Homo sapiens
  CDR3 for alpha chain variable domain of TCR clone 59466 (TRAV17, TRAJ57)
FATGPSQGGSEKLVF

SEQ ID NO: 118932 - protein, 18 aa, Homo sapiens
  CDR3 for beta chain variable domain of TCR clone 59466 (TRBV7-9, TRBJ2-7)
CASSLTTSGSRTWYEQYF

SEQ ID NO: 118933 - protein, 13 aa, Homo sapiens
  CDR3 for alpha chain variable domain of TCR clone 59467 (TRAV2, TRAJ15)
CAVASQAGTALIF

SEQ ID NO: 118934 - protein, 13 aa, Homo sapiens
  CDR3 for beta chain variable domain of TCR clone 59467 (TRBV12-5, TRBJ2-3)
CASGDRQSDTQYF

SEQ ID NO: 118935 - protein, 14 aa, Homo sapiens
  CDR3 for alpha chain variable domain of TCR clone 59468 (TRAV1-2, TRAJ8)
CAVREDTGFQKLVF

SEQ ID NO: 118936 - protein, 14 aa, Homo sapiens
  CDR3 for beta chain variable domain of TCR clone 59468 (TRBV29-1, TRBJ1-4)
YSVTGTGGNEKLFF

SEQ ID NO: 118937 - protein, 12 aa, Homo sapiens
  CDR3 for alpha chain variable domain of TCR clone 59469 (TRAV12-3, TRAJ17)
CAMTLTGNKLTF

SEQ ID NO: 118938 - protein, 15 aa, Homo sapiens
  CDR3 for beta chain variable domain of TCR clone 59469 (TRBV11-3, TRBJ2-3)
CASLKDGRGGDTQYF

SEQ ID NO: 118939 - protein, 14 aa, Homo sapiens
  CDR3 for alpha chain variable domain of TCR clone 59470 (TRAV12-1, TRAJ4)
CVGDFSGGYNKLIF

SEQ ID NO: 118940 - protein, 14 aa, Homo sapiens
  CDR3 for beta chain variable domain of TCR clone 59470 (TRBV6-1, TRBJ1-3)
CASVQGGGGNTIYF

SEQ ID NO: 118941 - protein, 14 aa, Homo sapiens
  CDR3 for alpha chain variable domain of TCR clone 59471 (TRAV1-2, TRAJ8)
CAVREDTGFQKLVF

SEQ ID NO: 118942 - protein, 15 aa, Homo sapiens
  CDR3 for beta chain variable domain of TCR clone 59471 (TRBV2, TRBJ1-4)
CASSERRGTNEKLFF

SEQ ID NO: 118943 - protein, 15 aa, Homo sapiens
  CDR3 for alpha chain variable domain of TCR clone 59472 (TRAV29/DV5, TRAJ40)
CAASAQGSGTYKYIF

SEQ ID NO: 118944 - protein, 15 aa, Homo sapiens
  CDR3 for beta chain variable domain of TCR clone 59472 (TRBV7-2, TRBJ2-3)
CASSLAGASIDTQYF

SEQ ID NO: 118945 - protein, 12 aa, Homo sapiens
  CDR3 for alpha chain variable domain of TCR clone 59473 (TRAV12-2, TRAJ52)
CAGGTSHGKLTF

SEQ ID NO: 118946 - protein, 13 aa, Homo sapiens
  CDR3 for beta chain variable domain of TCR clone 59473 (TRBV11-2, TRBJ2-1)
CASSLRLTHEQFF

SEQ ID NO: 118947 - protein, 13 aa, Homo sapiens
  CDR3 for alpha chain variable domain of TCR clone 59474 (TRAV1-2, TRAJ12)
CAVSMDSSYKFIF

SEQ ID NO: 118948 - protein, 15 aa, Homo sapiens
  CDR3 for beta chain variable domain of TCR clone 59474 (TRBV27, TRBJ2-5)
CASSLIPSGGETQYF

SEQ ID NO: 118949 - protein, 17 aa, Homo sapiens
  CDR3 for alpha chain variable domain of TCR clone 59475 (TRAV3, TRAJ42)
CAVRDRDYGGSQGNLIF

SEQ ID NO: 118950 - protein, 14 aa, Homo sapiens
  CDR3 for beta chain variable domain of TCR clone 59475 (TRBV19, TRBJ2-7)
CASSDRAGPYEQYF

SEQ ID NO: 118951 - protein, 14 aa, Homo sapiens
  CDR3 for alpha chain variable domain of TCR clone 59476 (TRAV20, TRAJ56)
CAVQFGGANSKLTF

SEQ ID NO: 118952 - protein, 14 aa, Homo sapiens
  CDR3 for beta chain variable domain of TCR clone 59476 (TRBV20-1, TRBJ2-7)
CSAKRDRSSYEQYF

SEQ ID NO: 118953 - protein, 17 aa, Homo sapiens
  CDR3 for alpha chain variable domain of TCR clone 59477 (TRAV27, TRAJ18)
CAGLHRGRGSTLGRLYF

SEQ ID NO: 118954 - protein, 15 aa, Homo sapiens
  CDR3 for beta chain variable domain of TCR clone 59477 (TRBV7-9, TRBJ2-7)
CASSLPMGQANEQYF

SEQ ID NO: 118955 - protein, 14 aa, Homo sapiens
  CDR3 for alpha chain variable domain of TCR clone 59478 (TRAV1-2, TRAJ12)
CAVSGTDSSYKLIF

SEQ ID NO: 118956 - protein, 15 aa, Homo sapiens
  CDR3 for beta chain variable domain of TCR clone 59478 (TRBV2, TRBJ2-4)
CASSGTDLAKNIQYF

SEQ ID NO: 118957 - protein, 13 aa, Homo sapiens
  CDR3 for alpha chain variable domain of TCR clone 59479 (TRAV8-1, TRAJ33)
CAVKLGSNYRLIW

SEQ ID NO: 118958 - protein, 17 aa, Homo sapiens
  CDR3 for beta chain variable domain of TCR clone 59479 (TRBV27, TRBJ2-5)
CASSFSLLGNYQETQYF

SEQ ID NO: 118959 - protein, 11 aa, Homo sapiens
  CDR3 for alpha chain variable domain of TCR clone 59480 (TRAV17, TRAJ9)
CATTGGFKTIF

SEQ ID NO: 118960 - protein, 15 aa, Homo sapiens
  CDR3 for beta chain variable domain of TCR clone 59480 (TRBV10-3, TRBJ2-1)
CAIRNGTSGHNEQFF

SEQ ID NO: 118961 - protein, 15 aa, Homo sapiens
  CDR3 for alpha chain variable domain of TCR clone 59481 (TRAV17, TRAJ57)
CAAGPSQGGSEKLVF

SEQ ID NO: 118962 - protein, 13 aa, Homo sapiens
  CDR3 for beta chain variable domain of TCR clone 59481 (TRBV11-2, TRBJ2-5)
CASSSTGEETQYF

SEQ ID NO: 118963 - protein, 13 aa, Homo sapiens
  CDR3 for alpha chain variable domain of TCR clone 59482 (TRAV1-2, TRAJ9)
CAALNTGCFKTIF

SEQ ID NO: 118964 - protein, 14 aa, Homo sapiens
  CDR3 for beta chain variable domain of TCR clone 59482 (TRBV13, TRBJ2-3)
CASSSGSPTDTQYF

SEQ ID NO: 118965 - protein, 13 aa, Homo sapiens
  CDR3 for alpha chain variable domain of TCR clone 59483 (TRAV26-1, TRAJ40)
CIVATSGTYKHIF

SEQ ID NO: 118966 - protein, 16 aa, Homo sapiens
  CDR3 for beta chain variable domain of TCR clone 59483 (TRBV7-2, TRBJ2-2)
CASSLYRGPNTGELFF

SEQ ID NO: 118967 - protein, 11 aa, Homo sapiens
  CDR3 for alpha chain variable domain of TCR clone 59484 (TRAV23/DV6, TRAJ48)
CAPRWGEKLPF

SEQ ID NO: 118968 - protein, 13 aa, Homo sapiens
  CDR3 for beta chain variable domain of TCR clone 59484 (TRBV12-4, TRBJ2-5)
CASSPGTEETQYF

SEQ ID NO: 118969 - protein, 14 aa, Homo sapiens
  CDR3 for alpha chain variable domain of TCR clone 59485 (TRAV1-2, TRAJ8)
CAVREDTGFQKLVF

SEQ ID NO: 118970 - protein, 15 aa, Homo sapiens
  CDR3 for beta chain variable domain of TCR clone 59485 (TRBV6-3, TRBJ2-7)
CASSSTGTVFHEQYF

SEQ ID NO: 118971 - protein, 15 aa, Homo sapiens
  CDR3 for alpha chain variable domain of TCR clone 59486 (TRAV25, TRAJ52)
CAATGGGTSYGKLTF

SEQ ID NO: 118972 - protein, 17 aa, Homo sapiens
  CDR3 for beta chain variable domain of TCR clone 59486 (TRBV13, TRBJ2-3)
CASSLSRVAGGRNTQYF

SEQ ID NO: 118973 - protein, 13 aa, Homo sapiens
  CDR3 for alpha chain variable domain of TCR clone 59487 (TRAV21, TRAJ20)
CAVSRLGDYKLSF

SEQ ID NO: 118974 - protein, 12 aa, Homo sapiens
  CDR3 for beta chain variable domain of TCR clone 59487 (TRBV7-3, TRBJ1-1)
CQQPAGGLEAFF

SEQ ID NO: 118975 - protein, 15 aa, Homo sapiens
  CDR3 for alpha chain variable domain of TCR clone 59488 (TRAV12-3, TRAJ6)
CAMSATTGGSYIPTF

SEQ ID NO: 118976 - protein, 15 aa, Homo sapiens
  CDR3 for beta chain variable domain of TCR clone 59488 (TRBV11-2, TRBJ2-2)
CASRGLAANTGELFF

SEQ ID NO: 118977 - protein, 11 aa, Homo sapiens
  CDR3 for alpha chain variable domain of TCR clone 59489 (TRAV12-3, TRAJ27)
CAMANAGKSTF

SEQ ID NO: 118978 - protein, 12 aa, Homo sapiens
  CDR3 for beta chain variable domain of TCR clone 59489 (TRBV6-1, TRBJ2-1)
CATQKGGGHLFF

SEQ ID NO: 118979 - protein, 16 aa, Homo sapiens
  CDR3 for alpha chain variable domain of TCR clone 59490 (TRAV38-1, TRAJ32)
CTFMPFLGGATNKLIF

SEQ ID NO: 118980 - protein, 13 aa, Homo sapiens
  CDR3 for beta chain variable domain of TCR clone 59490 (TRBV7-9, TRBJ2-7)
CASSFAGAYEQYF

SEQ ID NO: 118981 - protein, 14 aa, Homo sapiens
  CDR3 for alpha chain variable domain of TCR clone 59491 (TRAV12-2, TRAJ13)
CAVKKTGGYQKVTF

SEQ ID NO: 118982 - protein, 11 aa, Homo sapiens
  CDR3 for beta chain variable domain of TCR clone 59491 (TRBV11-2, TRBJ2-2)
WASSLPGELFF

SEQ ID NO: 118983 - protein, 14 aa, Homo sapiens
  CDR3 for alpha chain variable domain of TCR clone 59492 (TRAV13-2, TRAJ22)
CADGTLGSARQLTF

SEQ ID NO: 118984 - protein, 16 aa, Homo sapiens
  CDR3 for beta chain variable domain of TCR clone 59492 (TRBV19, TRBJ2-1)
CASSSKGTRSYNEQLF

SEQ ID NO: 118985 - protein, 12 aa, Homo sapiens
  CDR3 for alpha chain variable domain of TCR clone 59493 (TRAV1-1, TRAJ8)
CAGGTGFQKLVF

SEQ ID NO: 118986 - protein, 15 aa, Homo sapiens
  CDR3 for beta chain variable domain of TCR clone 59493 (TRBV5-7, TRBJ1-2)
CASSLGVAANYGYTF

SEQ ID NO: 118987 - protein, 13 aa, Homo sapiens
  CDR3 for alpha chain variable domain of TCR clone 59494 (TRAV12-3, TRAJ16)
CAVQLPDGQKLLF

SEQ ID NO: 118988 - protein, 14 aa, Homo sapiens
  CDR3 for beta chain variable domain of TCR clone 59494 (TRBV5-1, TRBJ2-1)
CASSLDGDWNEQFF

SEQ ID NO: 118989 - protein, 14 aa, Homo sapiens
  CDR3 for alpha chain variable domain of TCR clone 59495 (TRAV23/DV6, TRAJ37)
CAASTSSNTGNLIF

SEQ ID NO: 118990 - protein, 13 aa, Homo sapiens
  CDR3 for beta chain variable domain of TCR clone 59495 (TRBV7-7, TRBJ1-1)
CASSLGANTEAFF

SEQ ID NO: 118991 - protein, 15 aa, Homo sapiens
  CDR3 for alpha chain variable domain of TCR clone 59496 (TRAV8-3, TRAJ45)
CASSYSGGGAGGLTF

SEQ ID NO: 118992 - protein, 16 aa, Homo sapiens
  CDR3 for beta chain variable domain of TCR clone 59496 (TRBV20-1, TRBJ2-2)
CSASASGIPGAGELFF

SEQ ID NO: 118993 - protein, 17 aa, Homo sapiens
  CDR3 for alpha chain variable domain of TCR clone 59497 (TRAV23/DV6, TRAJ57)
CAASSTLSQGGSEKLVF

SEQ ID NO: 118994 - protein, 14 aa, Homo sapiens
  CDR3 for beta chain variable domain of TCR clone 59497 (TRBV25-1, TRBJ1-1)
CASTHLEGNTEAFF

SEQ ID NO: 118995 - protein, 14 aa, Homo sapiens
  CDR3 for alpha chain variable domain of TCR clone 59498 (TRAV20, TRAJ42)
CAVQAGGSQGNLIF

SEQ ID NO: 118996 - protein, 16 aa, Homo sapiens
  CDR3 for beta chain variable domain of TCR clone 59498 (TRBV20-1, TRBJ1-4)
CSAPGQGLLTNEKLFF

SEQ ID NO: 118997 - protein, 15 aa, Homo sapiens
  CDR3 for alpha chain variable domain of TCR clone 59499 (TRAV17, TRAJ16)
CATALRFSDGQKLLF

SEQ ID NO: 118998 - protein, 15 aa, Homo sapiens
  CDR3 for beta chain variable domain of TCR clone 59499 (TRBV20-1, TRBJ1-1)
CSASRGVTGNAEAFF

SEQ ID NO: 118999 - protein, 15 aa, Homo sapiens
  CDR3 for alpha chain variable domain of TCR clone 59500 (TRAV12-3, TRAJ52)
CAMSRTNAGGTSYSH

SEQ ID NO: 119000 - protein, 12 aa, Homo sapiens
  CDR3 for beta chain variable domain of TCR clone 59500 (TRBV11-2, TRBJ2-2)
CASSLGGGELFF

SEQ ID NO: 119001 - protein, 12 aa, Homo sapiens
  CDR3 for alpha chain variable domain of TCR clone 59501 (TRAV8-3, TRAJ26)
CAGDNYGQNFVF

SEQ ID NO: 119002 - protein, 15 aa, Homo sapiens
  CDR3 for beta chain variable domain of TCR clone 59501 (TRBV9, TRBJ2-1)
CVSSLAGSSYNEQFF

SEQ ID NO: 119003 - protein, 15 aa, Homo sapiens
  CDR3 for alpha chain variable domain of TCR clone 59502 (TRAV26-1, TRAJ44)
CIVRVANGTASKLTF

SEQ ID NO: 119004 - protein, 18 aa, Homo sapiens
  CDR3 for beta chain variable domain of TCR clone 59502 (TRBV20-1, TRBJ2-3)
CSAKPLVRVARRTDTQYF

SEQ ID NO: 119005 - protein, 15 aa, Homo sapiens
  CDR3 for alpha chain variable domain of TCR clone 59503 (TRAV2, TRAJ9)
CAVAALNTGGFKTIL

SEQ ID NO: 119006 - protein, 14 aa, Homo sapiens
  CDR3 for beta chain variable domain of TCR clone 59503 (TRBV7-8, TRBJ2-5)
CASSATGGQETQYF

SEQ ID NO: 119007 - protein, 13 aa, Homo sapiens
  CDR3 for alpha chain variable domain of TCR clone 59504 (TRAV21, TRAJ27)
CAARPGNAGKLTF

SEQ ID NO: 119008 - protein, 15 aa, Homo sapiens
  CDR3 for beta chain variable domain of TCR clone 59504 (TRBV20-1, TRBJ2-7)
CSARDRVSGMDEQYF

SEQ ID NO: 119009 - protein, 13 aa, Homo sapiens
  CDR3 for alpha chain variable domain of TCR clone 59505 (TRAV21, TRAJ27)
CAARPGNAGKSTF

SEQ ID NO: 119010 - protein, 15 aa, Homo sapiens
  CDR3 for beta chain variable domain of TCR clone 59505 (TRBV2, TRBJ2-3)
CASSDAGGPPDTQYI

SEQ ID NO: 119011 - protein, 14 aa, Homo sapiens
  CDR3 for alpha chain variable domain of TCR clone 59506 (TRAV26-1, TRAJ39)
CIVFTNNAGNMLAF

SEQ ID NO: 119012 - protein, 15 aa, Homo sapiens
  CDR3 for beta chain variable domain of TCR clone 59506 (TRBV19, TRBJ2-4)
CASSLTGLTKNIQYF

SEQ ID NO: 119013 - protein, 13 aa, Homo sapiens
  CDR3 for alpha chain variable domain of TCR clone 59507 (TRAV38-1, TRAJ42)
CARWGGSQGNLIV

SEQ ID NO: 119014 - protein, 10 aa, Homo sapiens
  CDR3 for beta chain variable domain of TCR clone 59507 (TRBV2, TRBJ2-5)
CASSAATQYF

SEQ ID NO: 119015 - protein, 11 aa, Homo sapiens
  CDR3 for alpha chain variable domain of TCR clone 59508 (TRAV3, TRAJ21)
CAVGNFNKFYF

SEQ ID NO: 119016 - protein, 16 aa, Homo sapiens
  CDR3 for beta chain variable domain of TCR clone 59508 (TRBV7-6, TRBJ2-1)
CASSAPGPSSYNEQLF

SEQ ID NO: 119017 - protein, 17 aa, Homo sapiens
  CDR3 for alpha chain variable domain of TCR clone 59509 (TRAV8-6, TRAJ58)
CAVSSWVGETSGPRLTF

SEQ ID NO: 119018 - protein, 14 aa, Homo sapiens
  CDR3 for beta chain variable domain of TCR clone 59509 (TRBV4-2, TRBJ2-1)
CASGLDRAHNEQFF

SEQ ID NO: 119019 - protein, 14 aa, Homo sapiens
  CDR3 for alpha chain variable domain of TCR clone 59510 (TRAV1-2, TRAJ16)
CAVNRFSDGQKLLF

SEQ ID NO: 119020 - protein, 12 aa, Homo sapiens
  CDR3 for beta chain variable domain of TCR clone 59510 (TRBV7-9, TRBJ2-7)
CASSLGGYEQYF

SEQ ID NO: 119021 - protein, 11 aa, Homo sapiens
  CDR3 for alpha chain variable domain of TCR clone 59511 (TRAV3, TRAJ21)
CAVGNFNKFYF

SEQ ID NO: 119022 - protein, 16 aa, Homo sapiens
  CDR3 for beta chain variable domain of TCR clone 59511 (TRBV19, TRBJ2-1)
CASSRRDRAPTMSSSS

SEQ ID NO: 119023 - protein, 18 aa, Homo sapiens
  CDR3 for alpha chain variable domain of TCR clone 59512 (TRAV21, TRAJ52)
CAVRPSPAGGTSYGKLTF

SEQ ID NO: 119024 - protein, 14 aa, Homo sapiens
  CDR3 for beta chain variable domain of TCR clone 59512 (TRBV12-4, TRBJ1-3)
CASSLRGTGNTIYF

SEQ ID NO: 119025 - protein, 14 aa, Homo sapiens
  CDR3 for alpha chain variable domain of TCR clone 59513 (TRAV2, TRAJ9)
CAVEDRRGGFKTIF

SEQ ID NO: 119026 - protein, 15 aa, Homo sapiens
  CDR3 for beta chain variable domain of TCR clone 59513 (TRBV20-1, TRBJ2-7)
CSARDRVSGMDEQYF

SEQ ID NO: 119027 - protein, 11 aa, Homo sapiens
  CDR3 for alpha chain variable domain of TCR clone 59514 (TRAV12-1, TRAJ30)
CVVNGQDKIVF

SEQ ID NO: 119028 - protein, 12 aa, Homo sapiens
  CDR3 for beta chain variable domain of TCR clone 59514 (TRBV27, TRBJ2-2)
CASKLFTGELFF

SEQ ID NO: 119029 - protein, 13 aa, Homo sapiens
  CDR3 for alpha chain variable domain of TCR clone 59515 (TRAV13-2, TRAJ5)
CAVMDTGRRALTF

SEQ ID NO: 119030 - protein, 12 aa, Homo sapiens
  CDR3 for beta chain variable domain of TCR clone 59515 (TRBV28, TRBJ2-7)
CASSFSSCEQYF

SEQ ID NO: 119031 - protein, 13 aa, Homo sapiens
  CDR3 for alpha chain variable domain of TCR clone 59516 (TRAV38-1, TRAJ42)
CARWGGSQGNLIF

SEQ ID NO: 119032 - protein, 16 aa, Homo sapiens
  CDR3 for beta chain variable domain of TCR clone 59516 (TRBV7-2, TRBJ2-6)
CAILSGVSSGANVLTF

SEQ ID NO: 119033 - protein, 15 aa, Homo sapiens
  CDR3 for alpha chain variable domain of TCR clone 59517 (TRAV25, TRAJ52)
CAGRPGGTSYGKLTF

SEQ ID NO: 119034 - protein, 14 aa, Homo sapiens
  CDR3 for beta chain variable domain of TCR clone 59517 (TRBV19, TRBJ1-5)
CASRAPDSFLSQHF

SEQ ID NO: 119035 - protein, 15 aa, Homo sapiens
  CDR3 for alpha chain variable domain of TCR clone 59518 (TRAV2, TRAJ32)
CAVANYGGAKNKLIF

SEQ ID NO: 119036 - protein, 15 aa, Homo sapiens
  CDR3 for beta chain variable domain of TCR clone 59518 (TRBV7-7, TRBJ2-5)
CASSQLERAEETQYF

SEQ ID NO: 119037 - protein, 14 aa, Homo sapiens
  CDR3 for alpha chain variable domain of TCR clone 59519 (TRAV25, TRAJ22)
CAVISSGSARQLTF

SEQ ID NO: 119038 - protein, 17 aa, Homo sapiens
  CDR3 for beta chain variable domain of TCR clone 59519 (TRBV7-8, TRBJ2-6)
CASSAGTGGAGANVLTF

SEQ ID NO: 119039 - protein, 14 aa, Homo sapiens
  CDR3 for alpha chain variable domain of TCR clone 59520 (TRAV12-2, TRAJ13)
CAVKKTGGYQKVTF

SEQ ID NO: 119040 - protein, 15 aa, Homo sapiens
  CDR3 for beta chain variable domain of TCR clone 59520 (TRBV28, TRBJ2-7)
CASKAGGYTSSTSGR

SEQ ID NO: 119041 - protein, 15 aa, Homo sapiens
  CDR3 for alpha chain variable domain of TCR clone 59521 (TRAV13-2, TRAJ45)
CAEHHSGGGADGLTF

SEQ ID NO: 119042 - protein, 15 aa, Homo sapiens
  CDR3 for beta chain variable domain of TCR clone 59521 (TRBV7-2, TRBJ2-7)
CASSLALGSAYVQYF

SEQ ID NO: 119043 - protein, 14 aa, Homo sapiens
  CDR3 for alpha chain variable domain of TCR clone 59522 (TRAV9-2, TRAJ39)
CALYIYNAGNMLTL

SEQ ID NO: 119044 - protein, 13 aa, Homo sapiens
  CDR3 for beta chain variable domain of TCR clone 59522 (TRBV7-9, TRBJ1-2)
CASSLKQNYGYTF

SEQ ID NO: 119045 - protein, 16 aa, Homo sapiens
  CDR3 for alpha chain variable domain of TCR clone 59523 (TRAV8-1, TRAJ42)
CAVTSRYGGSQGNLIF

SEQ ID NO: 119046 - protein, 12 aa, Homo sapiens
  CDR3 for beta chain variable domain of TCR clone 59523 (TRBV6-3, TRBJ2-7)
CASSLGGRGLYF

SEQ ID NO: 119047 - protein, 13 aa, Homo sapiens
  CDR3 for alpha chain variable domain of TCR clone 59524 (TRAV8-3, TRAJ48)
CAVVRFGNEKLTF

SEQ ID NO: 119048 - protein, 16 aa, Homo sapiens
  CDR3 for beta chain variable domain of TCR clone 59524 (TRBV20-1, TRBJ2-5)
CSARDFASGIQEAQYF

SEQ ID NO: 119049 - protein, 15 aa, Homo sapiens
  CDR3 for alpha chain variable domain of TCR clone 59525 (TRAV26-1, TRAJ29)
CIVRVEGSGNTPLVF

SEQ ID NO: 119050 - protein, 13 aa, Homo sapiens
  CDR3 for beta chain variable domain of TCR clone 59525 (TRBV15, TRBJ1-6)
CATSGGLNSPLHF

SEQ ID NO: 119051 - protein, 12 aa, Homo sapiens
  CDR3 for alpha chain variable domain of TCR clone 59526 (TRAV3, TRAJ20)
CAVRDHDYKLSF

SEQ ID NO: 119052 - protein, 15 aa, Homo sapiens
  CDR3 for beta chain variable domain of TCR clone 59526 (TRBV9, TRBJ1-6)
CASSVAGTGDSTLHF

SEQ ID NO: 119053 - protein, 11 aa, Homo sapiens
  CDR3 for alpha chain variable domain of TCR clone 59527 (TRAV4, TRAJ23)
CLVAPGGKLIF

SEQ ID NO: 119054 - protein, 15 aa, Homo sapiens
  CDR3 for beta chain variable domain of TCR clone 59527 (TRBV7-2, TRBJ2-1)
CASSFQADEYNEQFC

SEQ ID NO: 119055 - protein, 13 aa, Homo sapiens
  CDR3 for alpha chain variable domain of TCR clone 59528 (TRAV8-3, TRAJ48)
CAVVPFGNEKLTF

SEQ ID NO: 119056 - protein, 12 aa, Homo sapiens
  CDR3 for beta chain variable domain of TCR clone 59528 (TRBV11-2, TRBJ2-2)
CASSLGGGELFL

SEQ ID NO: 119057 - protein, 13 aa, Homo sapiens
  CDR3 for alpha chain variable domain of TCR clone 59529 (TRAV8-3, TRAJ28)
CAVGAVGSYQLTF

SEQ ID NO: 119058 - protein, 15 aa, Homo sapiens
  CDR3 for beta chain variable domain of TCR clone 59529 (TRBV7-9, TRBJ1-5)
CASIQGHQPNQPQHF

SEQ ID NO: 119059 - protein, 15 aa, Homo sapiens
  CDR3 for alpha chain variable domain of TCR clone 59530 (TRAV8-4, TRAJ6)
CAVSAPSGGSYIPTF

SEQ ID NO: 119060 - protein, 12 aa, Homo sapiens
  CDR3 for beta chain variable domain of TCR clone 59530 (TRBV12-4, TRBJ2-1)
CASSKDRRWQFF

SEQ ID NO: 119061 - protein, 16 aa, Homo sapiens
  CDR3 for alpha chain variable domain of TCR clone 59531 (TRAV17, TRAJ22)
CATGPISSGSARQLTF

SEQ ID NO: 119062 - protein, 10 aa, Homo sapiens
  CDR3 for beta chain variable domain of TCR clone 59531 (TRBV23-1, TRBJ2-1)
RWSSYNEQFF

SEQ ID NO: 119063 - protein, 13 aa, Homo sapiens
  CDR3 for alpha chain variable domain of TCR clone 59532 (TRAV16, TRAJ5)
CALTNTGRRALTF

SEQ ID NO: 119064 - protein, 15 aa, Homo sapiens
  CDR3 for beta chain variable domain of TCR clone 59532 (TRBV11-2, TRBJ2-4)
CASSRPGTGINTQYF

SEQ ID NO: 119065 - protein, 15 aa, Homo sapiens
  CDR3 for alpha chain variable domain of TCR clone 59533 (TRAV2, TRAJ9)
CAVEDRGTGGFKTIF

SEQ ID NO: 119066 - protein, 16 aa, Homo sapiens
  CDR3 for beta chain variable domain of TCR clone 59533 (TRBV24-1, TRBJ2-3)
CATSDPGTGATYTQYF

SEQ ID NO: 119067 - protein, 14 aa, Homo sapiens
  CDR3 for alpha chain variable domain of TCR clone 59534 (TRAV1-2, TRAJ8)
CAVREDTGFQKLVF

SEQ ID NO: 119068 - protein, 15 aa, Homo sapiens
  CDR3 for beta chain variable domain of TCR clone 59534 (TRBV7-2, TRBJ2-7)
CASSLKGALTYEQYF

SEQ ID NO: 119069 - protein, 11 aa, Homo sapiens
  CDR3 for alpha chain variable domain of TCR clone 59535 (TRAV3, TRAJ17)
PRGAAGNKLTF

SEQ ID NO: 119070 - protein, 15 aa, Homo sapiens
  CDR3 for beta chain variable domain of TCR clone 59535 (TRBV11-3, TRBJ2-3)
CASLKDGREGDTQYF

SEQ ID NO: 119071 - protein, 16 aa, Homo sapiens
  CDR3 for alpha chain variable domain of TCR clone 59536 (TRAV29/DV5, TRAJ36)
CAASAHYQSGANNLFF

SEQ ID NO: 119072 - protein, 14 aa, Homo sapiens
  CDR3 for beta chain variable domain of TCR clone 59536 (TRBV10-2, TRBJ1-5)
CASSSTGRNQPQHF

SEQ ID NO: 119073 - protein, 17 aa, Homo sapiens
  CDR3 for alpha chain variable domain of TCR clone 59537 (TRAV27, TRAJ26)
RAGARAPLDNYGQNFVF

SEQ ID NO: 119074 - protein, 15 aa, Homo sapiens
  CDR3 for beta chain variable domain of TCR clone 59537 (TRBV11-2, TRBJ2-5)
CASSPRSGGLETQYF

SEQ ID NO: 119075 - protein, 10 aa, Homo sapiens
  CDR3 for alpha chain variable domain of TCR clone 59538 (TRAV30, TRAJ48)
CGIGNEKLTF

SEQ ID NO: 119076 - protein, 16 aa, Homo sapiens
  CDR3 for beta chain variable domain of TCR clone 59538 (TRBV19, TRBJ1-5)
CASSTWTGGGSQPQHF

SEQ ID NO: 119077 - protein, 12 aa, Homo sapiens
  CDR3 for alpha chain variable domain of TCR clone 59539 (TRAV13-1, TRAJ27)
CAAHTNAGKSTF

SEQ ID NO: 119078 - protein, 14 aa, Homo sapiens
  CDR3 for beta chain variable domain of TCR clone 59539 (TRBV19, TRBJ2-2)
CASSGQGIAGKLFF

SEQ ID NO: 119079 - protein, 11 aa, Homo sapiens
  CDR3 for alpha chain variable domain of TCR clone 59540 (TRAV1-1, TRAJ23)
CAVRQGGKPIF

SEQ ID NO: 119080 - protein, 20 aa, Homo sapiens
  CDR3 for beta chain variable domain of TCR clone 59540 (TRBV7-8, TRBJ2-2)
CASSHLLPGTTIHITGELFF

SEQ ID NO: 119081 - protein, 14 aa, Homo sapiens
  CDR3 for alpha chain variable domain of TCR clone 59541 (TRAV1-2, TRAJ16)
CAVNRFSDGQKLLF

SEQ ID NO: 119082 - protein, 13 aa, Homo sapiens
  CDR3 for beta chain variable domain of TCR clone 59541 (TRBV28, TRBJ2-2)
CASIRESTGELFF

SEQ ID NO: 119083 - protein, 14 aa, Homo sapiens
  CDR3 for alpha chain variable domain of TCR clone 59542 (TRAV20, TRAJ10)
CAVRVEGGRNKLTF

SEQ ID NO: 119084 - protein, 18 aa, Homo sapiens
  CDR3 for beta chain variable domain of TCR clone 59542 (TRBV24-1, TRBJ2-1)
CATSDLMFLGRGVHEQFF

SEQ ID NO: 119085 - protein, 22 aa, Homo sapiens
  CDR3 for alpha chain variable domain of TCR clone 59543 (TRAV1-1, TRAJ30)
CAVRDQTEMTRSSLEKGHDFIF

SEQ ID NO: 119086 - protein, 12 aa, Homo sapiens
  CDR3 for beta chain variable domain of TCR clone 59543 (TRBV28, TRBJ2-6)
CAIQAGANVLTF

SEQ ID NO: 119087 - protein, 16 aa, Homo sapiens
  CDR3 for alpha chain variable domain of TCR clone 59544 (TRAV12-1, TRAJ12)
CVVNTLLMDSSYKLIF

SEQ ID NO: 119088 - protein, 12 aa, Homo sapiens
  CDR3 for beta chain variable domain of TCR clone 59544 (TRBV19, TRBJ2-1)
CASSRQGAEQFF

SEQ ID NO: 119089 - protein, 14 aa, Homo sapiens
  CDR3 for alpha chain variable domain of TCR clone 59545 (TRAV38-2/DV8, TRAJ54)
AAMYQIRGAQKLVF

SEQ ID NO: 119090 - protein, 17 aa, Homo sapiens
  CDR3 for beta chain variable domain of TCR clone 59545 (TRBV6-1, TRBJ2-3)
CASSEALRLISTDTQYF

SEQ ID NO: 119091 - protein, 13 aa, Homo sapiens
  CDR3 for alpha chain variable domain of TCR clone 59546 (TRAV1-1, TRAJ9)
SAAKNTGGFKTIF

SEQ ID NO: 119092 - protein, 13 aa, Homo sapiens
  CDR3 for beta chain variable domain of TCR clone 59546 (TRBV7-3, TRBJ1-1)
CASSQDWGAEAFF

SEQ ID NO: 119093 - protein, 13 aa, Homo sapiens
  CDR3 for alpha chain variable domain of TCR clone 59547 (TRAV3, TRAJ21)
CAVREPDFNKFYF

SEQ ID NO: 119094 - protein, 12 aa, Homo sapiens
  CDR3 for beta chain variable domain of TCR clone 59547 (TRBV5-1, TRBJ1-2)
CASSQDTYGYTF

SEQ ID NO: 119095 - protein, 13 aa, Homo sapiens
  CDR3 for alpha chain variable domain of TCR clone 59548 (TRAV26-1, TRAJ30)
CIVRAESNDKIIF

SEQ ID NO: 119096 - protein, 17 aa, Homo sapiens
  CDR3 for beta chain variable domain of TCR clone 59548 (TRBV13, TRBJ2-3)
CASSLSRVAGGRNTQYF

SEQ ID NO: 119097 - protein, 13 aa, Homo sapiens
  CDR3 for alpha chain variable domain of TCR clone 59549 (TRAV13-2, TRAJ53)
CAENMGSNDKLTF

SEQ ID NO: 119098 - protein, 13 aa, Homo sapiens
  CDR3 for beta chain variable domain of TCR clone 59549 (TRBV4-1, TRBJ2-2)
CASSQENTGELFF

SEQ ID NO: 119099 - protein, 15 aa, Homo sapiens
  CDR3 for alpha chain variable domain of TCR clone 59550 (TRAV12-1, TRAJ44)
CVADLPTGTASKLTF

SEQ ID NO: 119100 - protein, 13 aa, Homo sapiens
  CDR3 for beta chain variable domain of TCR clone 59550 (TRBV6-5, TRBJ2-5)
CASSPQGGETKYF

SEQ ID NO: 119101 - protein, 14 aa, Homo sapiens
  CDR3 for alpha chain variable domain of TCR clone 59551 (TRAV12-2, TRAJ17)
CAVNIKAAGNTLTF

SEQ ID NO: 119102 - protein, 16 aa, Homo sapiens
  CDR3 for beta chain variable domain of TCR clone 59551 (TRBV20-1, TRBJ2-6)
CSASSQGYDGANVLTF

SEQ ID NO: 119103 - protein, 14 aa, Homo sapiens
  CDR3 for alpha chain variable domain of TCR clone 59552 (TRAV3, TRAJ21)
CAVESQANFNKFYF

SEQ ID NO: 119104 - protein, 13 aa, Homo sapiens
  CDR3 for beta chain variable domain of TCR clone 59552 (TRBV10-3, TRBJ2-7)
CASKLAVNYEQYF

SEQ ID NO: 119105 - protein, 13 aa, Homo sapiens
  CDR3 for alpha chain variable domain of TCR clone 59553 (TRAV3, TRAJ20)
CAVRDTGDYKLSF

SEQ ID NO: 119106 - protein, 15 aa, Homo sapiens
  CDR3 for beta chain variable domain of TCR clone 59553 (TRBV6-1, TRBJ2-7)
CASSEGGGVSHEQYF

SEQ ID NO: 119107 - protein, 14 aa, Homo sapiens
  CDR3 for alpha chain variable domain of TCR clone 59554 (TRAV1-2, TRAJ8)
CAVREDTGFQKLVF

SEQ ID NO: 119108 - protein, 15 aa, Homo sapiens
  CDR3 for beta chain variable domain of TCR clone 59554 (TRBV20-1, TRBJ2-7)
CSARDRVSGMDEQHF

SEQ ID NO: 119109 - protein, 12 aa, Homo sapiens
  CDR3 for alpha chain variable domain of TCR clone 59555 (TRAV27, TRAJ35)
CAGADFGNVLHC

SEQ ID NO: 119110 - protein, 12 aa, Homo sapiens
  CDR3 for beta chain variable domain of TCR clone 59555 (TRBV7-8, TRBJ2-7)
CASSLGDREQYF

SEQ ID NO: 119111 - protein, 12 aa, Homo sapiens
  CDR3 for alpha chain variable domain of TCR clone 59556 (TRAV8-3, TRAJ40)
CSVTSGTYKYIF

SEQ ID NO: 119112 - protein, 14 aa, Homo sapiens
  CDR3 for beta chain variable domain of TCR clone 59556 (TRBV12-4, TRBJ2-3)
CASSGQGSTDTQYF

SEQ ID NO: 119113 - protein, 14 aa, Homo sapiens
  CDR3 for alpha chain variable domain of TCR clone 59557 (TRAV38-1, TRAJ45)
CASHSGGGADGLTF

SEQ ID NO: 119114 - protein, 15 aa, Homo sapiens
  CDR3 for beta chain variable domain of TCR clone 59557 (TRBV7-9, TRBJ1-6)
CASSSPGRGNSPLHF

SEQ ID NO: 119115 - protein, 13 aa, Homo sapiens
  CDR3 for alpha chain variable domain of TCR clone 59558 (TRAV39, TRAJ48)
CAAVNFGNEKLTF

SEQ ID NO: 119116 - protein, 15 aa, Homo sapiens
  CDR3 for beta chain variable domain of TCR clone 59558 (TRBV27, TRBJ2-1)
CASSNGGGSSNEQFF

SEQ ID NO: 119117 - protein, 11 aa, Homo sapiens
  CDR3 for alpha chain variable domain of TCR clone 59559 (TRAV3, TRAJ21)
CAVGNFNKFYF

SEQ ID NO: 119118 - protein, 12 aa, Homo sapiens
  CDR3 for beta chain variable domain of TCR clone 59559 (TRBV14, TRBJ2-5)
CASSHLKETQCF

SEQ ID NO: 119119 - protein, 16 aa, Homo sapiens
  CDR3 for alpha chain variable domain of TCR clone 59560 (TRAV16, TRAJ57)
CAPYLITQGGSEKLGF

SEQ ID NO: 119120 - protein, 17 aa, Homo sapiens
  CDR3 for beta chain variable domain of TCR clone 59560 (TRBV24-1, TRBJ2-4)
CATSDAEARGVRNIQYF

SEQ ID NO: 119121 - protein, 18 aa, Homo sapiens
  CDR3 for alpha chain variable domain of TCR clone 59561 (TRAV26-1, TRAJ52)
CIVRVEGAGGTSYGKLTF

SEQ ID NO: 119122 - protein, 14 aa, Homo sapiens
  CDR3 for beta chain variable domain of TCR clone 59561 (TRBV11-2, TRBJ2-7)
CASSSTGEGYEQYF

SEQ ID NO: 119123 - protein, 16 aa, Homo sapiens
  CDR3 for alpha chain variable domain of TCR clone 59562 (TRAV20, TRAJ22)
CAVQASSSGSARQLNF

SEQ ID NO: 119124 - protein, 13 aa, Homo sapiens
  CDR3 for beta chain variable domain of TCR clone 59562 (TRBV7-2, TRBJ2-5)
CASSQTSVETQYF

SEQ ID NO: 119125 - protein, 14 aa, Homo sapiens
  CDR3 for alpha chain variable domain of TCR clone 59563 (TRAV12-2, TRAJ24)
CAVTPADSWGKLQF

SEQ ID NO: 119126 - protein, 12 aa, Homo sapiens
  CDR3 for beta chain variable domain of TCR clone 59563 (TRBV3-1, TRBJ2-1)
CASSQGSSGQFV

SEQ ID NO: 119127 - protein, 15 aa, Homo sapiens
  CDR3 for alpha chain variable domain of TCR clone 59564 (TRAV12-3, TRAJ27)
CAMMAYNTNAGKSTF

SEQ ID NO: 119128 - protein, 13 aa, Homo sapiens
  CDR3 for beta chain variable domain of TCR clone 59564 (TRBV11-2, TRBJ2-5)
CASSRGPSETQYF

SEQ ID NO: 119129 - protein, 13 aa, Homo sapiens
  CDR3 for alpha chain variable domain of TCR clone 59565 (TRAV8-6, TRAJ49)
CAVITNTGNQFYF

SEQ ID NO: 119130 - protein, 14 aa, Homo sapiens
  CDR3 for beta chain variable domain of TCR clone 59565 (TRBV5-1, TRBJ2-7)
GASSRGESLYEQYF

SEQ ID NO: 119131 - protein, 12 aa, Homo sapiens
  CDR3 for alpha chain variable domain of TCR clone 59566 (TRAV1-1, TRAJ8)
CAGGTSFQKLVF

SEQ ID NO: 119132 - protein, 15 aa, Homo sapiens
  CDR3 for beta chain variable domain of TCR clone 59566 (TRBV7-9, TRBJ1-4)
CASSRTGGFNEKLFF

SEQ ID NO: 119133 - protein, 14 aa, Homo sapiens
  CDR3 for alpha chain variable domain of TCR clone 59567 (TRAV3, TRAJ40)
CAVRDMTGTYKYIF

SEQ ID NO: 119134 - protein, 16 aa, Homo sapiens
  CDR3 for beta chain variable domain of TCR clone 59567 (TRBV11-2, TRBJ2-7)
CASSLAPTGVNYEQYF

SEQ ID NO: 119135 - protein, 12 aa, Homo sapiens
  CDR3 for alpha chain variable domain of TCR clone 59568 (TRAV12-3, TRAJ17)
CAMTLTGNKLTF

SEQ ID NO: 119136 - protein, 12 aa, Homo sapiens
  CDR3 for beta chain variable domain of TCR clone 59568 (TRBV5-5, TRBJ2-5)
CASSYFGETQYF

SEQ ID NO: 119137 - protein, 15 aa, Homo sapiens
  CDR3 for alpha chain variable domain of TCR clone 59569 (TRAV3, TRAJ45)
CAVRTPWGGADGLTF

SEQ ID NO: 119138 - protein, 16 aa, Homo sapiens
  CDR3 for beta chain variable domain of TCR clone 59569 (TRBV6-1, TRBJ2-2)
CASSVGQGANTGELFF

SEQ ID NO: 119139 - protein, 12 aa, Homo sapiens
  CDR3 for alpha chain variable domain of TCR clone 59570 (TRAV2, TRAJ9)
CAVGAGGFKTIF

SEQ ID NO: 119140 - protein, 16 aa, Homo sapiens
  CDR3 for beta chain variable domain of TCR clone 59570 (TRBV13, TRBJ2-2)
CANSPRTGEHTGELFF

SEQ ID NO: 119141 - protein, 13 aa, Homo sapiens
  CDR3 for alpha chain variable domain of TCR clone 59571 (TRAV8-3, TRAJ28)
CAVGAVGSYQLSF

SEQ ID NO: 119142 - protein, 15 aa, Homo sapiens
  CDR3 for beta chain variable domain of TCR clone 59571 (TRBV7-9, TRBJ1-5)
CASSQGHQPNQPQHF

SEQ ID NO: 119143 - protein, 15 aa, Homo sapiens
  CDR3 for alpha chain variable domain of TCR clone 59572 (TRAV38-1, TRAJ37)
CAFIFGFGNTGKLIF

SEQ ID NO: 119144 - protein, 12 aa, Homo sapiens
  CDR3 for beta chain variable domain of TCR clone 59572 (TRBV7-9, TRBJ2-7)
CASSLEGYEQYF

SEQ ID NO: 119145 - protein, 15 aa, Homo sapiens
  CDR3 for alpha chain variable domain of TCR clone 59573 (TRAV17, TRAJ57)
CATGPSQGGSEKLVF

SEQ ID NO: 119146 - protein, 17 aa, Homo sapiens
  CDR3 for beta chain variable domain of TCR clone 59573 (TRBV7-8, TRBJ2-6)
CASSAGTGGAGANVLTF

SEQ ID NO: 119147 - protein, 14 aa, Homo sapiens
  CDR3 for alpha chain variable domain of TCR clone 59574 (TRAV35, TRAJ13)
CAGSPSGGYQKVTF

SEQ ID NO: 119148 - protein, 16 aa, Homo sapiens
  CDR3 for beta chain variable domain of TCR clone 59574 (TRBV7-3, TRBJ2-2)
CASSLKRGTLSGELFF

SEQ ID NO: 119149 - protein, 15 aa, Homo sapiens
  CDR3 for alpha chain variable domain of TCR clone 59575 (TRAV21, TRAJ53)
CATLNSGGSHYKLTF

SEQ ID NO: 119150 - protein, 16 aa, Homo sapiens
  CDR3 for beta chain variable domain of TCR clone 59575 (TRBV12-4, TRBJ1-5)
CASSRPVGGSNQPQHF

SEQ ID NO: 119151 - protein, 13 aa, Homo sapiens
  CDR3 for alpha chain variable domain of TCR clone 59576 (TRAV2, TRAJ40)
CAVVTSGTYKHIF

SEQ ID NO: 119152 - protein, 14 aa, Homo sapiens
  CDR3 for beta chain variable domain of TCR clone 59576 (TRBV19, TRBJ2-1)
CAGPTFVLSGEQFF

SEQ ID NO: 119153 - protein, 11 aa, Homo sapiens
  CDR3 for alpha chain variable domain of TCR clone 59577 (TRAV2, TRAJ13)
CASGGYQRVTF

SEQ ID NO: 119154 - protein, 13 aa, Homo sapiens
  CDR3 for beta chain variable domain of TCR clone 59577 (TRBV20-1, TRBJ2-2)
CSASAAGTGELFF

SEQ ID NO: 119155 - protein, 16 aa, Homo sapiens
  CDR3 for alpha chain variable domain of TCR clone 59578 (TRAV12-2, TRAJ43)
CAGDDMRFGAGARLTV

SEQ ID NO: 119156 - protein, 16 aa, Homo sapiens
  CDR3 for beta chain variable domain of TCR clone 59578 (TRBV2, TRBJ2-4)
CASSEAPGGEQNIQYF

SEQ ID NO: 119157 - protein, 13 aa, Homo sapiens
  CDR3 for alpha chain variable domain of TCR clone 59579 (TRAV25, TRAJ26)
CAGMDNYGQNFFF

SEQ ID NO: 119158 - protein, 15 aa, Homo sapiens
  CDR3 for beta chain variable domain of TCR clone 59579 (TRBV10-3, TRBJ2-1)
CAIRNGTSGHNEQFF

SEQ ID NO: 119159 - protein, 10 aa, Homo sapiens
  CDR3 for alpha chain variable domain of TCR clone 59580 (TRAV12-1, TRAJ37)
ARGNTGKLIF

SEQ ID NO: 119160 - protein, 15 aa, Homo sapiens
  CDR3 for beta chain variable domain of TCR clone 59580 (TRBV7-2, TRBJ2-3)
CASSLEQGGTETQYF

SEQ ID NO: 119161 - protein, 14 aa, Homo sapiens
  CDR3 for alpha chain variable domain of TCR clone 59581 (TRAV12-2, TRAJ17)
CAVLFKAAGNKLTF

SEQ ID NO: 119162 - protein, 16 aa, Homo sapiens
  CDR3 for beta chain variable domain of TCR clone 59581 (TRBV5-1, TRBJ2-2)
CASSLWDTTNTGELFF

SEQ ID NO: 119163 - protein, 16 aa, Homo sapiens
  CDR3 for alpha chain variable domain of TCR clone 59582 (TRAV8-1, TRAJ42)
CAVTSGYGGSQGNLIF

SEQ ID NO: 119164 - protein, 12 aa, Homo sapiens
  CDR3 for beta chain variable domain of TCR clone 59582 (TRBV6-3, TRBJ2-7)
CASSLGRRGLYF

SEQ ID NO: 119165 - protein, 16 aa, Homo sapiens
  CDR3 for alpha chain variable domain of TCR clone 59583 (TRAV26-1, TRAJ53)
CIVRVAMGGSNYKLTF

SEQ ID NO: 119166 - protein, 15 aa, Homo sapiens
  CDR3 for beta chain variable domain of TCR clone 59583 (TRBV13, TRBJ2-1)
CQQPPQRGENNEQFF

SEQ ID NO: 119167 - protein, 14 aa, Homo sapiens
  CDR3 for alpha chain variable domain of TCR clone 59584 (TRAV21, TRAJ35)
CAVMPIGFGNVLHC

SEQ ID NO: 119168 - protein, 12 aa, Homo sapiens
  CDR3 for beta chain variable domain of TCR clone 59584 (TRBV7-9, TRBJ2-7)
CASSIKREEQSF

SEQ ID NO: 119169 - protein, 12 aa, Homo sapiens
  CDR3 for alpha chain variable domain of TCR clone 59585 (TRAV3, TRAJ43)
CAVRDPNNDMRF

SEQ ID NO: 119170 - protein, 11 aa, Homo sapiens
  CDR3 for beta chain variable domain of TCR clone 59585 (TRBV29-1, TRBJ2-5)
CSEDRTGTQYF

SEQ ID NO: 119171 - protein, 17 aa, Homo sapiens
  CDR3 for alpha chain variable domain of TCR clone 59586 (TRAV3, TRAJ38)
CAVRNCLNAGNNRKLIW

SEQ ID NO: 119172 - protein, 14 aa, Homo sapiens
  CDR3 for beta chain variable domain of TCR clone 59586 (TRBV5-5, TRBJ1-5)
CASSGQGVDQPQHF

SEQ ID NO: 119173 - protein, 11 aa, Homo sapiens
  CDR3 for alpha chain variable domain of TCR clone 59587 (TRAV3, TRAJ13)
CAVTSNQKVTF

SEQ ID NO: 119174 - protein, 15 aa, Homo sapiens
  CDR3 for beta chain variable domain of TCR clone 59587 (TRBV7-9, TRBJ2-7)
CASSSSGLAVYEQYF

SEQ ID NO: 119175 - protein, 14 aa, Homo sapiens
  CDR3 for alpha chain variable domain of TCR clone 59588 (TRAV8-4, TRAJ11)
CVVSEKSGYSTLTF

SEQ ID NO: 119176 - protein, 16 aa, Homo sapiens
  CDR3 for beta chain variable domain of TCR clone 59588 (TRBV28, TRBJ2-1)
CASSSPEYPRDNEQFF

SEQ ID NO: 119177 - protein, 14 aa, Homo sapiens
  CDR3 for alpha chain variable domain of TCR clone 59589 (TRAV1-2, TRAJ16)
CAVNRFSDGQKLLF

SEQ ID NO: 119178 - protein, 15 aa, Homo sapiens
  CDR3 for beta chain variable domain of TCR clone 59589 (TRBV7-9, TRBJ2-1)
CASSFVGAGKNEQFF

SEQ ID NO: 119179 - protein, 14 aa, Homo sapiens
  CDR3 for alpha chain variable domain of TCR clone 59590 (TRAV12-3, TRAJ6)
CAMSATGGSYIHTF

SEQ ID NO: 119180 - protein, 16 aa, Homo sapiens
  CDR3 for beta chain variable domain of TCR clone 59590 (TRBV4-2, TRBJ2-1)
CASSPRAGQGANEQFF

SEQ ID NO: 119181 - protein, 19 aa, Homo sapiens
  CDR3 for alpha chain variable domain of TCR clone 59591 (TRAV27, TRAJ53)
ASTSVHSRNSGGSNYKLTF

SEQ ID NO: 119182 - protein, 14 aa, Homo sapiens
  CDR3 for beta chain variable domain of TCR clone 59591 (TRBV11-1, TRBJ2-7)
CASTFAVPSYEQYF

SEQ ID NO: 119183 - protein, 17 aa, Homo sapiens
  CDR3 for alpha chain variable domain of TCR clone 59592 (TRAV8-6, TRAJ58)
CAVSSWVGETSGSRLTF

SEQ ID NO: 119184 - protein, 14 aa, Homo sapiens
  CDR3 for beta chain variable domain of TCR clone 59592 (TRBV18, TRBJ2-5)
CASSPGVSQETQYF

SEQ ID NO: 119185 - protein, 11 aa, Homo sapiens
  CDR3 for alpha chain variable domain of TCR clone 59593 (TRAV3, TRAJ17)
PRGAAGNKLTF

SEQ ID NO: 119186 - protein, 16 aa, Homo sapiens
  CDR3 for beta chain variable domain of TCR clone 59593 (TRBV7-6, TRBJ2-1)
CASSAPGTSSYNEQFF

SEQ ID NO: 119187 - protein, 18 aa, Homo sapiens
  CDR3 for alpha chain variable domain of TCR clone 59594 (TRAV26-2, TRAJ45)
CILRADKYSGGGADGLTF

SEQ ID NO: 119188 - protein, 17 aa, Homo sapiens
  CDR3 for beta chain variable domain of TCR clone 59594 (TRBV13, TRBJ2-3)
CASSLSRVAGGRNTQYF

SEQ ID NO: 119189 - protein, 14 aa, Homo sapiens
  CDR3 for alpha chain variable domain of TCR clone 59595 (TRAV13-1, TRAJ40)
CAARSTSGTYKYIF

SEQ ID NO: 119190 - protein, 14 aa, Homo sapiens
  CDR3 for beta chain variable domain of TCR clone 59595 (TRBV18, TRBJ1-5)
CQLRNRGQQSAQHF

SEQ ID NO: 119191 - protein, 14 aa, Homo sapiens
  CDR3 for alpha chain variable domain of TCR clone 59596 (TRAV13-1, TRAJ26)
CAASSAHYGQNFVF

SEQ ID NO: 119192 - protein, 16 aa, Homo sapiens
  CDR3 for beta chain variable domain of TCR clone 59596 (TRBV4-2, TRBJ2-3)
CASSQELAGDTDTQYF

SEQ ID NO: 119193 - protein, 15 aa, Homo sapiens
  CDR3 for alpha chain variable domain of TCR clone 59597 (TRAV27, TRAJ38)
CAARRNAGNNRKLIG

SEQ ID NO: 119194 - protein, 13 aa, Homo sapiens
  CDR3 for beta chain variable domain of TCR clone 59597 (TRBV7-3, TRBJ2-1)
CASSLDSYNEQFF

SEQ ID NO: 119195 - protein, 16 aa, Homo sapiens
  CDR3 for alpha chain variable domain of TCR clone 59598 (TRAV14/DV4, TRAJ54)
CAMREGRIQGAQKLVF

SEQ ID NO: 119196 - protein, 11 aa, Homo sapiens
  CDR3 for beta chain variable domain of TCR clone 59598 (TRBV7-8, TRBJ2-7)
CASSLSLEQYF

SEQ ID NO: 119197 - protein, 13 aa, Homo sapiens
  CDR3 for alpha chain variable domain of TCR clone 59599 (TRAV29/DV5, TRAJ31)
CAASRNNNARLMF

SEQ ID NO: 119198 - protein, 13 aa, Homo sapiens
  CDR3 for beta chain variable domain of TCR clone 59599 (TRBV9, TRBJ2-1)
CASSVGQGGEQFF

SEQ ID NO: 119199 - protein, 16 aa, Homo sapiens
  CDR3 for alpha chain variable domain of TCR clone 59600 (TRAV26-1, TRAJ52)
CIVSNAGGASYGKLTF

SEQ ID NO: 119200 - protein, 16 aa, Homo sapiens
  CDR3 for beta chain variable domain of TCR clone 59600 (TRBV5-1, TRBJ2-1)
CASSLEGRGLYNEQFF

SEQ ID NO: 119201 - protein, 16 aa, Homo sapiens
  CDR3 for alpha chain variable domain of TCR clone 59601 (TRAV21, TRAJ17)
CAVRPGEEAAGTKLTF

SEQ ID NO: 119202 - protein, 16 aa, Homo sapiens
  CDR3 for beta chain variable domain of TCR clone 59601 (TRBV2, TRBJ2-7)
CASSEPWTGPSYEQYF

SEQ ID NO: 119203 - protein, 13 aa, Homo sapiens
  CDR3 for alpha chain variable domain of TCR clone 59602 (TRAV12-2, TRAJ18)
CAVRGSTLGRLYF

SEQ ID NO: 119204 - protein, 14 aa, Homo sapiens
  CDR3 for beta chain variable domain of TCR clone 59602 (TRBV4-2, TRBJ2-1)
CASGLDRAYNEQFF

SEQ ID NO: 119205 - protein, 14 aa, Homo sapiens
  CDR3 for alpha chain variable domain of TCR clone 59603 (TRAV4, TRAJ9)
CLVGSWTGGFKTIF

SEQ ID NO: 119206 - protein, 15 aa, Homo sapiens
  CDR3 for beta chain variable domain of TCR clone 59603 (TRBV7-2, TRBJ2-1)
CASSLASGRVNEQFF

SEQ ID NO: 119207 - protein, 15 aa, Homo sapiens
  CDR3 for alpha chain variable domain of TCR clone 59604 (TRAV21, TRAJ53)
CATLNSGGSNYKLTF

SEQ ID NO: 119208 - protein, 16 aa, Homo sapiens
  CDR3 for beta chain variable domain of TCR clone 59604 (TRBV19, TRBJ2-3)
CASSPGAASRTDTQYF

SEQ ID NO: 119209 - protein, 12 aa, Homo sapiens
  CDR3 for alpha chain variable domain of TCR clone 59605 (TRAV26-1, TRAJ36)
CIVRVRADNLFF

SEQ ID NO: 119210 - protein, 13 aa, Homo sapiens
  CDR3 for beta chain variable domain of TCR clone 59605 (TRBV11-2, TRBJ2-5)
CASSRGPSETQYL

SEQ ID NO: 119211 - protein, 12 aa, Homo sapiens
  CDR3 for alpha chain variable domain of TCR clone 59606 (TRAV8-2, TRAJ6)
CVVSKGSYIPTF

SEQ ID NO: 119212 - protein, 18 aa, Homo sapiens
  CDR3 for beta chain variable domain of TCR clone 59606 (TRBV4-1, TRBJ2-3)
CASSQGGAGGGATDTQYF

SEQ ID NO: 119213 - protein, 14 aa, Homo sapiens
  CDR3 for alpha chain variable domain of TCR clone 59607 (TRAV12-1, TRAJ27)
CGEHIRTNAGKSTF

SEQ ID NO: 119214 - protein, 15 aa, Homo sapiens
  CDR3 for beta chain variable domain of TCR clone 59607 (TRBV19, TRBJ1-1)
CASTSGQFQNTEAFF

SEQ ID NO: 119215 - protein, 10 aa, Homo sapiens
  CDR3 for alpha chain variable domain of TCR clone 59608 (TRAV2, TRAJ33)
CCESNYQLIW

SEQ ID NO: 119216 - protein, 15 aa, Homo sapiens
  CDR3 for beta chain variable domain of TCR clone 59608 (TRBV19, TRBJ1-1)
CASTSGQIQNTEAFF

SEQ ID NO: 119217 - protein, 15 aa, Homo sapiens
  CDR3 for alpha chain variable domain of TCR clone 59609 (TRAV12-3, TRAJ6)
CAMGATTGGSYIPTF

SEQ ID NO: 119218 - protein, 12 aa, Homo sapiens
  CDR3 for beta chain variable domain of TCR clone 59609 (TRBV7-9, TRBJ2-7)
CASSLEGYEQYF

SEQ ID NO: 119219 - protein, 13 aa, Homo sapiens
  CDR3 for alpha chain variable domain of TCR clone 59610 (TRAV17, TRAJ5)
CAPMDTGRRALTF

SEQ ID NO: 119220 - protein, 16 aa, Homo sapiens
  CDR3 for beta chain variable domain of TCR clone 59610 (TRBV5-1, TRBJ1-5)
FAPAACLDRDNQPQHF

SEQ ID NO: 119221 - protein, 16 aa, Homo sapiens
  CDR3 for alpha chain variable domain of TCR clone 59611 (TRAV16, TRAJ52)
CALSVAGGTSYGKLTF

SEQ ID NO: 119222 - protein, 12 aa, Homo sapiens
  CDR3 for beta chain variable domain of TCR clone 59611 (TRBV12-4, TRBJ1-3)
CASSFSGNTIYF

SEQ ID NO: 119223 - protein, 14 aa, Homo sapiens
  CDR3 for alpha chain variable domain of TCR clone 59612 (TRAV12-1, TRAJ17)
CVVDERAAGNKLTF

SEQ ID NO: 119224 - protein, 13 aa, Homo sapiens
  CDR3 for beta chain variable domain of TCR clone 59612 (TRBV19, TRBJ2-1)
CASSRGVYNEQFF

SEQ ID NO: 119225 - protein, 15 aa, Homo sapiens
  CDR3 for alpha chain variable domain of TCR clone 59613 (TRAV8-3, TRAJ6)
CAVGPLGEGSYIPTF

SEQ ID NO: 119226 - protein, 14 aa, Homo sapiens
  CDR3 for beta chain variable domain of TCR clone 59613 (TRBV19, TRBJ2-2)
CASSTGQGAGELFF

SEQ ID NO: 119227 - protein, 15 aa, Homo sapiens
  CDR3 for alpha chain variable domain of TCR clone 59614 (TRAV41, TRAJ45)
CAASYSGGGADGLTF

SEQ ID NO: 119228 - protein, 14 aa, Homo sapiens
  CDR3 for beta chain variable domain of TCR clone 59614 (TRBV12-5, TRBJ2-5)
CASGSRTNQETQYF

SEQ ID NO: 119229 - protein, 10 aa, Homo sapiens
  CDR3 for alpha chain variable domain of TCR clone 59615 (TRAV8-4, TRAJ43)
CAVSADDMHF

SEQ ID NO: 119230 - protein, 15 aa, Homo sapiens
  CDR3 for beta chain variable domain of TCR clone 59615 (TRBV5-1, TRBJ2-3)
CASSVTSGSTDTQYF

SEQ ID NO: 119231 - protein, 15 aa, Homo sapiens
  CDR3 for alpha chain variable domain of TCR clone 59616 (TRAV12-1, TRAJ9)
CVVSFGDTGGFKTSF

SEQ ID NO: 119232 - protein, 13 aa, Homo sapiens
  CDR3 for beta chain variable domain of TCR clone 59616 (TRBV2, TRBJ1-4)
CASSERAGEKLFF

SEQ ID NO: 119233 - protein, 13 aa, Homo sapiens
  CDR3 for alpha chain variable domain of TCR clone 59617 (TRAV13-1, TRAJ6)
CAASKGGSYIPTF

SEQ ID NO: 119234 - protein, 15 aa, Homo sapiens
  CDR3 for beta chain variable domain of TCR clone 59617 (TRBV6-3, TRBJ2-7)
CASSSPGTVFYEQYF

SEQ ID NO: 119235 - protein, 17 aa, Homo sapiens
  CDR3 for alpha chain variable domain of TCR clone 59618 (TRAV2, TRAJ22)
ILLVREADAAEQRQLTF

SEQ ID NO: 119236 - protein, 16 aa, Homo sapiens
  CDR3 for beta chain variable domain of TCR clone 59618 (TRBV2, TRBJ2-5)
CASSETQGVGEETQYF

SEQ ID NO: 119237 - protein, 15 aa, Homo sapiens
  CDR3 for alpha chain variable domain of TCR clone 59619 (TRAV3, TRAJ5)
GAVRDRKTGRRALTF

SEQ ID NO: 119238 - protein, 15 aa, Homo sapiens
  CDR3 for beta chain variable domain of TCR clone 59619 (TRBV7-8, TRBJ2-1)
CASSLADSLYNEQFF

SEQ ID NO: 119239 - protein, 18 aa, Homo sapiens
  CDR3 for alpha chain variable domain of TCR clone 59620 (TRAV26-1, TRAJ5)
CIVRVVPPRDTGRRALTF

SEQ ID NO: 119240 - protein, 15 aa, Homo sapiens
  CDR3 for beta chain variable domain of TCR clone 59620 (TRBV7-9, TRBJ2-7)
CASSLSMGQANEQYF

SEQ ID NO: 119241 - protein, 14 aa, Homo sapiens
  CDR3 for alpha chain variable domain of TCR clone 59621 (TRAV1-1, TRAJ34)
CAVCPSYNTDKLIF

SEQ ID NO: 119242 - protein, 16 aa, Homo sapiens
  CDR3 for beta chain variable domain of TCR clone 59621 (TRBV19, TRBJ2-1)
CASSSKGTRSYNEQFF

SEQ ID NO: 119243 - protein, 13 aa, Homo sapiens
  CDR3 for alpha chain variable domain of TCR clone 59622 (TRAV12-3, TRAJ9)
CAMRNTGGFKTIF

SEQ ID NO: 119244 - protein, 17 aa, Homo sapiens
  CDR3 for beta chain variable domain of TCR clone 59622 (TRBV24-1, TRBJ2-4)
CATSDAEARGVRNIQYF

SEQ ID NO: 119245 - protein, 13 aa, Homo sapiens
  CDR3 for alpha chain variable domain of TCR clone 59623 (TRAV23/DV6, TRAJ22)
CAPYSVSARQLTF

SEQ ID NO: 119246 - protein, 15 aa, Homo sapiens
  CDR3 for beta chain variable domain of TCR clone 59623 (TRBV11-2, TRBJ1-6)
CASSLDPWAVSPLHF

SEQ ID NO: 119247 - protein, 14 aa, Homo sapiens
  CDR3 for alpha chain variable domain of TCR clone 59624 (TRAV12-2, TRAJ24)
CAVTPADSRGKLQF

SEQ ID NO: 119248 - protein, 12 aa, Homo sapiens
  CDR3 for beta chain variable domain of TCR clone 59624 (TRBV3-1, TRBJ2-1)
CASSQGSSGQFF

SEQ ID NO: 119249 - protein, 12 aa, Homo sapiens
  CDR3 for alpha chain variable domain of TCR clone 59625 (TRAV16, TRAJ10)
CSRTGGGNKLTF

SEQ ID NO: 119250 - protein, 11 aa, Homo sapiens
  CDR3 for beta chain variable domain of TCR clone 59625 (TRBV12-4, TRBJ2-3)
CASTATDTQYF

SEQ ID NO: 119251 - protein, 14 aa, Homo sapiens
  CDR3 for alpha chain variable domain of TCR clone 59626 (TRAV38-1, TRAJ40)
CALRPTSGTYKYIF

SEQ ID NO: 119252 - protein, 14 aa, Homo sapiens
  CDR3 for beta chain variable domain of TCR clone 59626 (TRBV25-1, TRBJ1-1)
FASTHLGGNTEAFF

SEQ ID NO: 119253 - protein, 16 aa, Homo sapiens
  CDR3 for alpha chain variable domain of TCR clone 59627 (TRAV14/DV4, TRAJ21)
CAMREGPENNFNKFYF

SEQ ID NO: 119254 - protein, 12 aa, Homo sapiens
  CDR3 for beta chain variable domain of TCR clone 59627 (TRBV29-1, TRBJ2-2)
CSADKYTGELFF

SEQ ID NO: 119255 - protein, 15 aa, Homo sapiens
  CDR3 for alpha chain variable domain of TCR clone 59628 (TRAV27, TRAJ38)
CAARRNAGNNRKLIW

SEQ ID NO: 119256 - protein, 14 aa, Homo sapiens
  CDR3 for beta chain variable domain of TCR clone 59628 (TRBV4-2, TRBJ2-1)
CASGLDRAYNEQFF

SEQ ID NO: 119257 - protein, 14 aa, Homo sapiens
  CDR3 for alpha chain variable domain of TCR clone 59629 (TRAV29/DV5, TRAJ36)
CAARRKTGANNLFF

SEQ ID NO: 119258 - protein, 11 aa, Homo sapiens
  CDR3 for beta chain variable domain of TCR clone 59629 (TRBV29-1, TRBJ2-5)
CSEDRTGTQYF

SEQ ID NO: 119259 - protein, 11 aa, Homo sapiens
  CDR3 for alpha chain variable domain of TCR clone 59630 (TRAV24, TRAJ34)
CAPREHRQAHL

SEQ ID NO: 119260 - protein, 18 aa, Homo sapiens
  CDR3 for beta chain variable domain of TCR clone 59630 (TRBV3-1, TRBJ2-1)
CASSSVLTSGGSTVEQFF

SEQ ID NO: 119261 - protein, 14 aa, Homo sapiens
  CDR3 for alpha chain variable domain of TCR clone 59631 (TRAV26-1, TRAJ26)
CIVRATFLGQNFVF

SEQ ID NO: 119262 - protein, 16 aa, Homo sapiens
  CDR3 for beta chain variable domain of TCR clone 59631 (TRBV12-4, TRBJ2-7)
CASRSTGTGPSYGQYF

SEQ ID NO: 119263 - protein, 16 aa, Homo sapiens
  CDR3 for alpha chain variable domain of TCR clone 59632 (TRAV38-1, TRAJ32)
CAFMKGGGGATTKLIF

SEQ ID NO: 119264 - protein, 13 aa, Homo sapiens
  CDR3 for beta chain variable domain of TCR clone 59632 (TRBV20-1, TRBJ2-5)
CSAREAFQETQYF

SEQ ID NO: 119265 - protein, 13 aa, Homo sapiens
  CDR3 for alpha chain variable domain of TCR clone 59633 (TRAV30, TRAJ24)
CGTVTDSWAKLQF

SEQ ID NO: 119266 - protein, 15 aa, Homo sapiens
  CDR3 for beta chain variable domain of TCR clone 59633 (TRBV25-1, TRBJ1-4)
CASSPGDSTNEKLFF

SEQ ID NO: 119267 - protein, 12 aa, Homo sapiens
  CDR3 for alpha chain variable domain of TCR clone 59634 (TRAV12-3, TRAJ17)
CAMTLTGNKLTF

SEQ ID NO: 119268 - protein, 17 aa, Homo sapiens
  CDR3 for beta chain variable domain of TCR clone 59634 (TRBV10-3, TRBJ2-6)
CAISESTAPSGANVLTF

SEQ ID NO: 119269 - protein, 12 aa, Homo sapiens
  CDR3 for alpha chain variable domain of TCR clone 59635 (TRAV12-3, TRAJ17)
CAMTLTGNKLTF

SEQ ID NO: 119270 - protein, 13 aa, Homo sapiens
  CDR3 for beta chain variable domain of TCR clone 59635 (TRBV7-9, TRBJ1-1)
CASSLSGETEAFF

SEQ ID NO: 119271 - protein, 13 aa, Homo sapiens
  CDR3 for alpha chain variable domain of TCR clone 59636 (TRAV1-2, TRAJ9)
CAALNTGGFKTIF

SEQ ID NO: 119272 - protein, 16 aa, Homo sapiens
  CDR3 for beta chain variable domain of TCR clone 59636 (TRBV9, TRBJ2-2)
CASSAMGKGNTGELFF

SEQ ID NO: 119273 - protein, 10 aa, Homo sapiens
  CDR3 for alpha chain variable domain of TCR clone 59637 (TRAV12-1, TRAJ37)
ARGNTGKLIF

SEQ ID NO: 119274 - protein, 17 aa, Homo sapiens
  CDR3 for beta chain variable domain of TCR clone 59637 (TRBV13, TRBJ2-3)
CASSLSRVAGGRNTQYF

SEQ ID NO: 119275 - protein, 13 aa, Homo sapiens
  CDR3 for alpha chain variable domain of TCR clone 59638 (TRAV21, TRAJ15)
YAVANQAGTALIF

SEQ ID NO: 119276 - protein, 14 aa, Homo sapiens
  CDR3 for beta chain variable domain of TCR clone 59638 (TRBV27, TRBJ2-2)
CASSLGAATGELFF

SEQ ID NO: 119277 - protein, 11 aa, Homo sapiens
  CDR3 for alpha chain variable domain of TCR clone 59639 (TRAV1-1, TRAJ23)
CAVRQGGKLIF

SEQ ID NO: 119278 - protein, 13 aa, Homo sapiens
  CDR3 for beta chain variable domain of TCR clone 59639 (TRBV19, TRBJ1-3)
CASRLSLGNTIYF

SEQ ID NO: 119279 - protein, 13 aa, Homo sapiens
  CDR3 for alpha chain variable domain of TCR clone 59640 (TRAV20, TRAJ37)
CAGCSSNTGKLIF

SEQ ID NO: 119280 - protein, 17 aa, Homo sapiens
  CDR3 for beta chain variable domain of TCR clone 59640 (TRBV20-1, TRBJ2-2)
CSASGSGQGGLTGELFF

SEQ ID NO: 119281 - protein, 17 aa, Homo sapiens
  CDR3 for alpha chain variable domain of TCR clone 59641 (TRAV13-1, TRAJ52)
CVAGRNAGGTSYGKLTF

SEQ ID NO: 119282 - protein, 13 aa, Homo sapiens
  CDR3 for beta chain variable domain of TCR clone 59641 (TRBV7-2, TRBJ1-1)
CASNLKGAKVAFF

SEQ ID NO: 119283 - protein, 11 aa, Homo sapiens
  CDR3 for alpha chain variable domain of TCR clone 59642 (TRAV21, TRAJ48)
CAVDGNEKLTF

SEQ ID NO: 119284 - protein, 16 aa, Homo sapiens
  CDR3 for beta chain variable domain of TCR clone 59642 (TRBV12-4, TRBJ1-5)
CASSSGPRGSNQPQHV

SEQ ID NO: 119285 - protein, 11 aa, Homo sapiens
  CDR3 for alpha chain variable domain of TCR clone 59643 (TRAV13-2, TRAJ20)
CADSNDYKLSF

SEQ ID NO: 119286 - protein, 12 aa, Homo sapiens
  CDR3 for beta chain variable domain of TCR clone 59643 (TRBV5-1, TRBJ2-3)
CASSLAADMQYF

SEQ ID NO: 119287 - protein, 14 aa, Homo sapiens
  CDR3 for alpha chain variable domain of TCR clone 59644 (TRAV13-1, TRAJ35)
CAASKGGFGNVLHC

SEQ ID NO: 119288 - protein, 16 aa, Homo sapiens
  CDR3 for beta chain variable domain of TCR clone 59644 (TRBV7-3, TRBJ2-1)
CASSLEGYRSYNEQFF

SEQ ID NO: 119289 - protein, 15 aa, Homo sapiens
  CDR3 for alpha chain variable domain of TCR clone 59645 (TRAV26-1, TRAJ29)
CIVRVEGSGNTPLVF

SEQ ID NO: 119290 - protein, 13 aa, Homo sapiens
  CDR3 for beta chain variable domain of TCR clone 59645 (TRBV25-1, TRBJ1-1)
CQHPPGGNTEAFF

SEQ ID NO: 119291 - protein, 14 aa, Homo sapiens
  CDR3 for alpha chain variable domain of TCR clone 59646 (TRAV1-2, TRAJ8)
RAVREDTGFQKLVF

SEQ ID NO: 119292 - protein, 16 aa, Homo sapiens
  CDR3 for beta chain variable domain of TCR clone 59646 (TRBV4-1, TRBJ1-4)
CASSQDLRRGGEKLFF

SEQ ID NO: 119293 - protein, 16 aa, Homo sapiens
  CDR3 for alpha chain variable domain of TCR clone 59647 (TRAV26-1, TRAJ46)
CIVRVGKEKQRRQAVF

SEQ ID NO: 119294 - protein, 16 aa, Homo sapiens
  CDR3 for beta chain variable domain of TCR clone 59647 (TRBV27, TRBJ2-2)
CASSFRGLVRTGELFF

SEQ ID NO: 119295 - protein, 11 aa, Homo sapiens
  CDR3 for alpha chain variable domain of TCR clone 59648 (TRAV12-3, TRAJ48)
CAVDGNEKLTF

SEQ ID NO: 119296 - protein, 16 aa, Homo sapiens
  CDR3 for beta chain variable domain of TCR clone 59648 (TRBV12-4, TRBJ1-5)
CASSSGPRGSNQPQHF

SEQ ID NO: 119297 - protein, 14 aa, Homo sapiens
  CDR3 for alpha chain variable domain of TCR clone 59649 (TRAV12-3, TRAJ10)
SHLPLTGGGNKLTF

SEQ ID NO: 119298 - protein, 16 aa, Homo sapiens
  CDR3 for beta chain variable domain of TCR clone 59649 (TRBV15, TRBJ1-4)
CATSRDSPPGREKLFF

SEQ ID NO: 119299 - protein, 12 aa, Homo sapiens
  CDR3 for alpha chain variable domain of TCR clone 59650 (TRAV13-1, TRAJ48)
CAANFGNEKLTF

SEQ ID NO: 119300 - protein, 16 aa, Homo sapiens
  CDR3 for beta chain variable domain of TCR clone 59650 (TRBV18, TRBJ1-1)
CASSPGVGGRGGEAFF

SEQ ID NO: 119301 - protein, 12 aa, Homo sapiens
  CDR3 for alpha chain variable domain of TCR clone 59651 (TRAV21, TRAJ49)
CAVANTGNQFYF

SEQ ID NO: 119302 - protein, 17 aa, Homo sapiens
  CDR3 for beta chain variable domain of TCR clone 59651 (TRBV13, TRBJ2-3)
CASSLSRVAGGRNTQYF

SEQ ID NO: 119303 - protein, 14 aa, Homo sapiens
  CDR3 for alpha chain variable domain of TCR clone 59652 (TRAV8-2, TRAJ37)
CVVSISGNTGKLIF

SEQ ID NO: 119304 - protein, 17 aa, Homo sapiens
  CDR3 for beta chain variable domain of TCR clone 59652 (TRBV7-9, TRBJ2-3)
CACSPTVAGDLTDTQYF

SEQ ID NO: 119305 - protein, 13 aa, Homo sapiens
  CDR3 for alpha chain variable domain of TCR clone 59653 (TRAV17, TRAJ9)
CATDYTGGFKTFF

SEQ ID NO: 119306 - protein, 16 aa, Homo sapiens
  CDR3 for beta chain variable domain of TCR clone 59653 (TRBV7-7, TRBJ2-1)
CASSLASGTSYNEQFF

SEQ ID NO: 119307 - protein, 12 aa, Homo sapiens
  CDR3 for alpha chain variable domain of TCR clone 59654 (TRAV16, TRAJ10)
CSRTGGGNKLTL

SEQ ID NO: 119308 - protein, 12 aa, Homo sapiens
  CDR3 for beta chain variable domain of TCR clone 59654 (TRBV11-3, TRBJ1-1)
CASSHRQGEAFF

SEQ ID NO: 119309 - protein, 10 aa, Homo sapiens
  CDR3 for alpha chain variable domain of TCR clone 59655 (TRAV16, TRAJ22)
SAMYLRQLTF

SEQ ID NO: 119310 - protein, 14 aa, Homo sapiens
  CDR3 for beta chain variable domain of TCR clone 59655 (TRBV7-6, TRBJ2-3)
CASSLGTVTDTQYF

SEQ ID NO: 119311 - protein, 12 aa, Homo sapiens
  CDR3 for alpha chain variable domain of TCR clone 59656 (TRAV12-3, TRAJ42)
CAPGGSQGNLIF

SEQ ID NO: 119312 - protein, 12 aa, Homo sapiens
  CDR3 for beta chain variable domain of TCR clone 59656 (TRBV2, TRBJ2-1)
CAYGPPGNEQFF

SEQ ID NO: 119313 - protein, 13 aa, Homo sapiens
  CDR3 for alpha chain variable domain of TCR clone 59657 (TRAV17, TRAJ5)
CAPMDTGRRALTF

SEQ ID NO: 119314 - protein, 12 aa, Homo sapiens
  CDR3 for beta chain variable domain of TCR clone 59657 (TRBV11-2, TRBJ2-2)
CASSLGGGELFF

SEQ ID NO: 119315 - protein, 13 aa, Homo sapiens
  CDR3 for alpha chain variable domain of TCR clone 59658 (TRAV23/DV6, TRAJ34)
CAAIENNTDKLIF

SEQ ID NO: 119316 - protein, 14 aa, Homo sapiens
  CDR3 for beta chain variable domain of TCR clone 59658 (TRBV4-1, TRBJ1-1)
CASSQQGNGNEAFF

SEQ ID NO: 119317 - protein, 14 aa, Homo sapiens
  CDR3 for alpha chain variable domain of TCR clone 59659 (TRAV1-2, TRAJ16)
CAVDRFSDGQKLLF

SEQ ID NO: 119318 - protein, 13 aa, Homo sapiens
  CDR3 for beta chain variable domain of TCR clone 59659 (TRBV10-3, TRBJ2-1)
YATGLADNNEQFF

SEQ ID NO: 119319 - protein, 13 aa, Homo sapiens
  CDR3 for alpha chain variable domain of TCR clone 59660 (TRAV17, TRAJ9)
CATDYTGGFKTIF

SEQ ID NO: 119320 - protein, 14 aa, Homo sapiens
  CDR3 for beta chain variable domain of TCR clone 59660 (TRBV19, TRBJ2-5)
CASSMTGQQETLYF

SEQ ID NO: 119321 - protein, 14 aa, Homo sapiens
  CDR3 for alpha chain variable domain of TCR clone 59661 (TRAV1-2, TRAJ8)
CAVREDTGFQKLLF

SEQ ID NO: 119322 - protein, 17 aa, Homo sapiens
  CDR3 for beta chain variable domain of TCR clone 59661 (TRBV11-2, TRBJ2-1)
CASSLYPPGVEYNEQFF

SEQ ID NO: 119323 - protein, 13 aa, Homo sapiens
  CDR3 for alpha chain variable domain of TCR clone 59662 (TRAV27, TRAJ49)
CASRPYTGNQFYF

SEQ ID NO: 119324 - protein, 16 aa, Homo sapiens
  CDR3 for beta chain variable domain of TCR clone 59662 (TRBV4-1, TRBJ1-2)
CASSQDAGQVLYGYTF

SEQ ID NO: 119325 - protein, 15 aa, Homo sapiens
  CDR3 for alpha chain variable domain of TCR clone 59663 (TRAV2, TRAJ9)
CAVEDRGTGGFKTIF

SEQ ID NO: 119326 - protein, 14 aa, Homo sapiens
  CDR3 for beta chain variable domain of TCR clone 59663 (TRBV2, TRBJ2-3)
CASSEGQNTGTQYF

SEQ ID NO: 119327 - protein, 13 aa, Homo sapiens
  CDR3 for alpha chain variable domain of TCR clone 59664 (TRAV8-3, TRAJ31)
CAVGARNNARLMF

SEQ ID NO: 119328 - protein, 16 aa, Homo sapiens
  CDR3 for beta chain variable domain of TCR clone 59664 (TRBV18, TRBJ1-3)
CASSLGILNGENTMYF

SEQ ID NO: 119329 - protein, 14 aa, Homo sapiens
  CDR3 for alpha chain variable domain of TCR clone 59665 (TRAV17, TRAJ57)
CATDLQGGSEKLVF

SEQ ID NO: 119330 - protein, 18 aa, Homo sapiens
  CDR3 for beta chain variable domain of TCR clone 59665 (TRBV6-6, TRBJ1-3)
CASSYSKWDSISGNTIYF

SEQ ID NO: 119331 - protein, 11 aa, Homo sapiens
  CDR3 for alpha chain variable domain of TCR clone 59666 (TRAV21, TRAJ48)
CAVDGNEKLTF

SEQ ID NO: 119332 - protein, 16 aa, Homo sapiens
  CDR3 for beta chain variable domain of TCR clone 59666 (TRBV12-4, TRBJ1-5)
CASSSDPRGSNQPQHF

SEQ ID NO: 119333 - protein, 14 aa, Homo sapiens
  CDR3 for alpha chain variable domain of TCR clone 59667 (TRAV8-6, TRAJ53)
CAALVLGSNYKLTF

SEQ ID NO: 119334 - protein, 13 aa, Homo sapiens
  CDR3 for beta chain variable domain of TCR clone 59667 (TRBV28, TRBJ1-1)
CASSKQGWTEAFF

SEQ ID NO: 119335 - protein, 16 aa, Homo sapiens
  CDR3 for alpha chain variable domain of TCR clone 59668 (TRAV30, TRAJ24)
CDTEIVDADSWGKFQF

SEQ ID NO: 119336 - protein, 15 aa, Homo sapiens
  CDR3 for beta chain variable domain of TCR clone 59668 (TRBV12-4, TRBJ2-2)
CASSPNDSGTGELFF

SEQ ID NO: 119337 - protein, 15 aa, Homo sapiens
  CDR3 for alpha chain variable domain of TCR clone 59669 (TRAV1-2, TRAJ38)
CAVSESAGNNRKLIW

SEQ ID NO: 119338 - protein, 16 aa, Homo sapiens
  CDR3 for beta chain variable domain of TCR clone 59669 (TRBV4-1, TRBJ2-7)
CASSLTAGQATYEQYF

SEQ ID NO: 119339 - protein, 14 aa, Homo sapiens
  CDR3 for alpha chain variable domain of TCR clone 59670 (TRAV9-2, TRAJ39)
CALYIYNAGNMLTF

SEQ ID NO: 119340 - protein, 14 aa, Homo sapiens
  CDR3 for beta chain variable domain of TCR clone 59670 (TRBV15, TRBJ2-3)
CATRSGTSTDTQYF

SEQ ID NO: 119341 - protein, 13 aa, Homo sapiens
  CDR3 for alpha chain variable domain of TCR clone 59671 (TRAV21, TRAJ27)
CAARPGNAGKSTF

SEQ ID NO: 119342 - protein, 11 aa, Homo sapiens
  CDR3 for beta chain variable domain of TCR clone 59671 (TRBV12-4, TRBJ2-3)
CASTATDTQYF

SEQ ID NO: 119343 - protein, 11 aa, Homo sapiens
  CDR3 for alpha chain variable domain of TCR clone 59672 (TRAV26-1, TRAJ37)
CIVRVGRKLVF

SEQ ID NO: 119344 - protein, 14 aa, Homo sapiens
  CDR3 for beta chain variable domain of TCR clone 59672 (TRBV9, TRBJ2-4)
CASSPSGTSGFQYF

SEQ ID NO: 119345 - protein, 15 aa, Homo sapiens
  CDR3 for alpha chain variable domain of TCR clone 59673 (TRAV12-2, TRAJ9)
CAANGGYTGGFKTIF

SEQ ID NO: 119346 - protein, 15 aa, Homo sapiens
  CDR3 for beta chain variable domain of TCR clone 59673 (TRBV28, TRBJ2-5)
CASSPPWSYQETQYF

SEQ ID NO: 119347 - protein, 13 aa, Homo sapiens
  CDR3 for alpha chain variable domain of TCR clone 59674 (TRAV21, TRAJ20)
CAAGLRVDYKLSF

SEQ ID NO: 119348 - protein, 21 aa, Homo sapiens
  CDR3 for beta chain variable domain of TCR clone 59674 (TRBV15, TRBJ2-1)
AWGTQPCTCVPPAEVDTARFF

SEQ ID NO: 119349 - protein, 12 aa, Homo sapiens
  CDR3 for alpha chain variable domain of TCR clone 59675 (TRAV13-1, TRAJ21)
CAAKEGSNKFYF

SEQ ID NO: 119350 - protein, 13 aa, Homo sapiens
  CDR3 for beta chain variable domain of TCR clone 59675 (TRBV7-9, TRBJ2-1)
CASSLGTVNEQFF

SEQ ID NO: 119351 - protein, 13 aa, Homo sapiens
  CDR3 for alpha chain variable domain of TCR clone 59676 (TRAV8-2, TRAJ13)
CVVSDLRYQKVTF

SEQ ID NO: 119352 - protein, 14 aa, Homo sapiens
  CDR3 for beta chain variable domain of TCR clone 59676 (TRBV25-1, TRBJ1-1)
CASAHLGGNTEAFF

SEQ ID NO: 119353 - protein, 13 aa, Homo sapiens
  CDR3 for alpha chain variable domain of TCR clone 59677 (TRAV8-6, TRAJ49)
CAVITNTGSQFYF

SEQ ID NO: 119354 - protein, 14 aa, Homo sapiens
  CDR3 for beta chain variable domain of TCR clone 59677 (TRBV5-1, TRBJ2-7)
CASSRGESLYEQYF

SEQ ID NO: 119355 - protein, 11 aa, Homo sapiens
  CDR3 for alpha chain variable domain of TCR clone 59678 (TRAV3, TRAJ21)
CAVGNFDKFYF

SEQ ID NO: 119356 - protein, 13 aa, Homo sapiens
  CDR3 for beta chain variable domain of TCR clone 59678 (TRBV7-9, TRBJ1-2)
CASSLKQNYGYTF

SEQ ID NO: 119357 - protein, 14 aa, Homo sapiens
  CDR3 for alpha chain variable domain of TCR clone 59679 (TRAV2, TRAJ9)
CAVDPNTGGFKTIF

SEQ ID NO: 119358 - protein, 13 aa, Homo sapiens
  CDR3 for beta chain variable domain of TCR clone 59679 (TRBV20-1, TRBJ2-1)
CSASTGTANEQFF

SEQ ID NO: 119359 - protein, 13 aa, Homo sapiens
  CDR3 for alpha chain variable domain of TCR clone 59680 (TRAV12-1, TRAJ31)
CVVNMNNNARLMF

SEQ ID NO: 119360 - protein, 15 aa, Homo sapiens
  CDR3 for beta chain variable domain of TCR clone 59680 (TRBV4-1, TRBJ1-2)
CAGSQGQGAAYGYTF

SEQ ID NO: 119361 - protein, 17 aa, Homo sapiens
  CDR3 for alpha chain variable domain of TCR clone 59681 (TRAV26-1, TRAJ28)
CIVRARYSGAGSYQITF

SEQ ID NO: 119362 - protein, 10 aa, Homo sapiens
  CDR3 for beta chain variable domain of TCR clone 59681 (TRBV12-4, TRBJ2-7)
CASLTFEQYF

SEQ ID NO: 119363 - protein, 18 aa, Homo sapiens
  CDR3 for alpha chain variable domain of TCR clone 59682 (TRAV12-3, TRAJ52)
CAMSVGGAGGTSYGKLTF

SEQ ID NO: 119364 - protein, 16 aa, Homo sapiens
  CDR3 for beta chain variable domain of TCR clone 59682 (TRBV2, TRBJ2-1)
CASSVGGSLSYNEQFF

SEQ ID NO: 119365 - protein, 12 aa, Homo sapiens
  CDR3 for alpha chain variable domain of TCR clone 59683 (TRAV12-3, TRAJ40)
CAMSSGTYKYIF

SEQ ID NO: 119366 - protein, 15 aa, Homo sapiens
  CDR3 for beta chain variable domain of TCR clone 59683 (TRBV7-8, TRBJ2-3)
CASSLSADSGGAQYF

SEQ ID NO: 119367 - protein, 16 aa, Homo sapiens
  CDR3 for alpha chain variable domain of TCR clone 59684 (TRAV30, TRAJ24)
CGTEIVDADSWGKFQF

SEQ ID NO: 119368 - protein, 16 aa, Homo sapiens
  CDR3 for beta chain variable domain of TCR clone 59684 (TRBV27, TRBJ2-7)
CASSSERRDSAYEQYF

SEQ ID NO: 119369 - protein, 16 aa, Homo sapiens
  CDR3 for alpha chain variable domain of TCR clone 59685 (TRAV3, TRAJ10)
CAVRDMRAGGGNKLTF

SEQ ID NO: 119370 - protein, 15 aa, Homo sapiens
  CDR3 for beta chain variable domain of TCR clone 59685 (TRBV7-9, TRBJ1-5)
CASSQGHQPNQPQHF

SEQ ID NO: 119371 - protein, 14 aa, Homo sapiens
  CDR3 for alpha chain variable domain of TCR clone 59686 (TRAV12-2, TRAJ13)
CAVKKTGGYQKVTF

SEQ ID NO: 119372 - protein, 14 aa, Homo sapiens
  CDR3 for beta chain variable domain of TCR clone 59686 (TRBV7-9, TRBJ2-3)
CASSLEDGTDTQYF

SEQ ID NO: 119373 - protein, 13 aa, Homo sapiens
  CDR3 for alpha chain variable domain of TCR clone 59687 (TRAV23/DV6, TRAJ6)
CAAKTGGGYIPTF

SEQ ID NO: 119374 - protein, 15 aa, Homo sapiens
  CDR3 for beta chain variable domain of TCR clone 59687 (TRBV5-1, TRBJ1-2)
CASSSYGEFDYGYTF

SEQ ID NO: 119375 - protein, 14 aa, Homo sapiens
  CDR3 for alpha chain variable domain of TCR clone 59688 (TRAV1-2, TRAJ27)
CAPAGYTNAGKSTF

SEQ ID NO: 119376 - protein, 18 aa, Homo sapiens
  CDR3 for beta chain variable domain of TCR clone 59688 (TRBV28, TRBJ1-2)
CASRQQQGKRGSNYGYTF

SEQ ID NO: 119377 - protein, 17 aa, Homo sapiens
  CDR3 for alpha chain variable domain of TCR clone 59689 (TRAV3, TRAJ42)
CAVRDRDYGGSQGNLIF

SEQ ID NO: 119378 - protein, 16 aa, Homo sapiens
  CDR3 for beta chain variable domain of TCR clone 59689 (TRBV27, TRBJ2-2)
CASSFRGLVRTGELFF

SEQ ID NO: 119379 - protein, 16 aa, Homo sapiens
  CDR3 for alpha chain variable domain of TCR clone 59690 (TRAV3, TRAJ37)
CAVRPHGSGNTGKLIF

SEQ ID NO: 119380 - protein, 16 aa, Homo sapiens
  CDR3 for beta chain variable domain of TCR clone 59690 (TRBV5-1, TRBJ2-2)
CASSSRTGGRTGELFF

SEQ ID NO: 119381 - protein, 11 aa, Homo sapiens
  CDR3 for alpha chain variable domain of TCR clone 59691 (TRAV2, TRAJ33)
CAVDSNYQLIW

SEQ ID NO: 119382 - protein, 14 aa, Homo sapiens
  CDR3 for beta chain variable domain of TCR clone 59691 (TRBV4-2, TRBJ2-1)
CASGLDRAYNEQFF

SEQ ID NO: 119383 - protein, 13 aa, Homo sapiens
  CDR3 for alpha chain variable domain of TCR clone 59692 (TRAV36/DV7, TRAJ53)
CALSGGSNYKLTF

SEQ ID NO: 119384 - protein, 13 aa, Homo sapiens
  CDR3 for beta chain variable domain of TCR clone 59692 (TRBV28, TRBJ2-7)
CASSLSSRYEQYF

SEQ ID NO: 119385 - protein, 14 aa, Homo sapiens
  CDR3 for alpha chain variable domain of TCR clone 59693 (TRAV13-2, TRAJ17)
CAENSKAAGNKITF

SEQ ID NO: 119386 - protein, 11 aa, Homo sapiens
  CDR3 for beta chain variable domain of TCR clone 59693 (TRBV6-3, TRBJ2-3)
CATGQADTQYF

SEQ ID NO: 119387 - protein, 14 aa, Homo sapiens
  CDR3 for alpha chain variable domain of TCR clone 59694 (TRAV13-1, TRAJ39)
CAASYNDAGNMLTF

SEQ ID NO: 119388 - protein, 13 aa, Homo sapiens
  CDR3 for beta chain variable domain of TCR clone 59694 (TRBV24-1, TRBJ1-4)
CATNNGRSEKLFF

SEQ ID NO: 119389 - protein, 11 aa, Homo sapiens
  CDR3 for alpha chain variable domain of TCR clone 59695 (TRAV17, TRAJ9)
CATTGGFKTIF

SEQ ID NO: 119390 - protein, 14 aa, Homo sapiens
  CDR3 for beta chain variable domain of TCR clone 59695 (TRBV7-9, TRBJ2-2)
CASSGLANTGELFF

SEQ ID NO: 119391 - protein, 14 aa, Homo sapiens
  CDR3 for alpha chain variable domain of TCR clone 59696 (TRAV38-2/DV8, TRAJ54)
AAMYQIQGAQKLVF

SEQ ID NO: 119392 - protein, 19 aa, Homo sapiens
  CDR3 for beta chain variable domain of TCR clone 59696 (TRBV6-1, TRBJ2-3)
CASSEALRLIAQIRSILAQ

SEQ ID NO: 119393 - protein, 14 aa, Homo sapiens
  CDR3 for alpha chain variable domain of TCR clone 59697 (TRAV12-2, TRAJ11)
CAVNRESGYSTLTF

SEQ ID NO: 119394 - protein, 10 aa, Homo sapiens
  CDR3 for beta chain variable domain of TCR clone 59697 (TRBV20-1, TRBJ2-5)
CSARLETQYF

SEQ ID NO: 119395 - protein, 14 aa, Homo sapiens
  CDR3 for alpha chain variable domain of TCR clone 59698 (TRAV2, TRAJ37)
CAVDFTSNTGKLIF

SEQ ID NO: 119396 - protein, 17 aa, Homo sapiens
  CDR3 for beta chain variable domain of TCR clone 59698 (TRBV19, TRBJ2-7)
CDSSISFYDSYPYEQYF

SEQ ID NO: 119397 - protein, 13 aa, Homo sapiens
  CDR3 for alpha chain variable domain of TCR clone 59699 (TRAV8-6, TRAJ50)
CAVIKTSYDKVIF

SEQ ID NO: 119398 - protein, 13 aa, Homo sapiens
  CDR3 for beta chain variable domain of TCR clone 59699 (TRBV7-9, TRBJ1-2)
CASSLKQNYGYTF

SEQ ID NO: 119399 - protein, 14 aa, Homo sapiens
  CDR3 for alpha chain variable domain of TCR clone 59700 (TRAV13-1, TRAJ44)
CAAKATGTASKLTF

SEQ ID NO: 119400 - protein, 17 aa, Homo sapiens
  CDR3 for beta chain variable domain of TCR clone 59700 (TRBV7-3, TRBJ2-3)
CASSLMKRMRGADTHYF

SEQ ID NO: 119401 - protein, 15 aa, Homo sapiens
  CDR3 for alpha chain variable domain of TCR clone 59701 (TRAV17, TRAJ13)
CATDAGSGSYQKVTF

SEQ ID NO: 119402 - protein, 17 aa, Homo sapiens
  CDR3 for beta chain variable domain of TCR clone 59701 (TRBV11-2, TRBJ2-1)
CASSLYPPGVEYNEQFF

SEQ ID NO: 119403 - protein, 12 aa, Homo sapiens
  CDR3 for alpha chain variable domain of TCR clone 59702 (TRAV13-2, TRAJ23)
CAERHRGGKPIF

SEQ ID NO: 119404 - protein, 15 aa, Homo sapiens
  CDR3 for beta chain variable domain of TCR clone 59702 (TRBV7-9, TRBJ1-6)
CASSSPGRGNSPLHF

SEQ ID NO: 119405 - protein, 11 aa, Homo sapiens
  CDR3 for alpha chain variable domain of TCR clone 59703 (TRAV4, TRAJ31)
CLVGDNARLMF

SEQ ID NO: 119406 - protein, 16 aa, Homo sapiens
  CDR3 for beta chain variable domain of TCR clone 59703 (TRBV7-2, TRBJ2-5)
CASSSKWLSGQETQYV

SEQ ID NO: 119407 - protein, 15 aa, Homo sapiens
  CDR3 for alpha chain variable domain of TCR clone 59704 (TRAV27, TRAJ50)
CAGVGRGTSYDKVLF

SEQ ID NO: 119408 - protein, 14 aa, Homo sapiens
  CDR3 for beta chain variable domain of TCR clone 59704 (TRBV7-2, TRBJ1-1)
CASSFYDLNTEAFF

SEQ ID NO: 119409 - protein, 13 aa, Homo sapiens
  CDR3 for alpha chain variable domain of TCR clone 59705 (TRAV27, TRAJ6)
CAGGTRGSYIPTF

SEQ ID NO: 119410 - protein, 15 aa, Homo sapiens
  CDR3 for beta chain variable domain of TCR clone 59705 (TRBV5-5, TRBJ2-7)
CASSLAAPLSYEQYL

SEQ ID NO: 119411 - protein, 14 aa, Homo sapiens
  CDR3 for alpha chain variable domain of TCR clone 59706 (TRAV2, TRAJ41)
CAVGTSNSGYALNF

SEQ ID NO: 119412 - protein, 13 aa, Homo sapiens
  CDR3 for beta chain variable domain of TCR clone 59706 (TRBV4-1, TRBJ2-1)
CASSQEVQYGQFF

SEQ ID NO: 119413 - protein, 19 aa, Homo sapiens
  CDR3 for alpha chain variable domain of TCR clone 59707 (TRAV26-1, TRAJ52)
CIVRAHRNAGGTSYGKLTF

SEQ ID NO: 119414 - protein, 15 aa, Homo sapiens
  CDR3 for beta chain variable domain of TCR clone 59707 (TRBV29-1, TRBJ2-1)
CSGRDRKSSDNEQFF

SEQ ID NO: 119415 - protein, 14 aa, Homo sapiens
  CDR3 for alpha chain variable domain of TCR clone 59708 (TRAV1-2, TRAJ16)
CAVNRFSDGQKLLF

SEQ ID NO: 119416 - protein, 15 aa, Homo sapiens
  CDR3 for beta chain variable domain of TCR clone 59708 (TRBV7-9, TRBJ2-5)
CASSFKAGREETQYF

SEQ ID NO: 119417 - protein, 14 aa, Homo sapiens
  CDR3 for alpha chain variable domain of TCR clone 59709 (TRAV8-4, TRAJ15)
CAVILNQAGTALIF

SEQ ID NO: 119418 - protein, 12 aa, Homo sapiens
  CDR3 for beta chain variable domain of TCR clone 59709 (TRBV7-9, TRBJ1-6)
CASSASKSPLHF

SEQ ID NO: 119419 - protein, 16 aa, Homo sapiens
  CDR3 for alpha chain variable domain of TCR clone 59710 (TRAV21, TRAJ37)
CAVRPRGSSNTGKLIF

SEQ ID NO: 119420 - protein, 16 aa, Homo sapiens
  CDR3 for beta chain variable domain of TCR clone 59710 (TRBV27, TRBJ2-7)
CASSWLGGRGSYEQYF

SEQ ID NO: 119421 - protein, 18 aa, Homo sapiens
  CDR3 for alpha chain variable domain of TCR clone 59711 (TRAV29/DV5, TRAJ52)
CAAGFRGAGGTSYGKRTF

SEQ ID NO: 119422 - protein, 16 aa, Homo sapiens
  CDR3 for beta chain variable domain of TCR clone 59711 (TRBV7-3, TRBJ2-2)
CASSLKRGTLSGELFF

SEQ ID NO: 119423 - protein, 13 aa, Homo sapiens
  CDR3 for alpha chain variable domain of TCR clone 59712 (TRAV35, TRAJ42)
CAGFTGSQGNLIF

SEQ ID NO: 119424 - protein, 14 aa, Homo sapiens
  CDR3 for beta chain variable domain of TCR clone 59712 (TRBV4-1, TRBJ2-2)
CASSQAVNTGELFF

SEQ ID NO: 119425 - protein, 23 aa, Homo sapiens
  CDR3 for alpha chain variable domain of TCR clone 59713 (TRAV12-2, TRAJ36)
SLLIRDSQPSDSATLERVNNLFF

SEQ ID NO: 119426 - protein, 17 aa, Homo sapiens
  CDR3 for beta chain variable domain of TCR clone 59713 (TRBV3-1, TRBJ2-3)
CASSQLLDRGHTDTQYF

SEQ ID NO: 119427 - protein, 14 aa, Homo sapiens
  CDR3 for alpha chain variable domain of TCR clone 59714 (TRAV12-2, TRAJ45)
CAVYSGGGADGLTF

SEQ ID NO: 119428 - protein, 15 aa, Homo sapiens
  CDR3 for beta chain variable domain of TCR clone 59714 (TRBV20-1, TRBJ2-7)
CSARDRVSGMDEQYF

SEQ ID NO: 119429 - protein, 18 aa, Homo sapiens
  CDR3 for alpha chain variable domain of TCR clone 59715 (TRAV26-1, TRAJ22)
CIVRVALISPGSARQLTF

SEQ ID NO: 119430 - protein, 13 aa, Homo sapiens
  CDR3 for beta chain variable domain of TCR clone 59715 (TRBV13, TRBJ2-5)
CASSPEVGETQYF

SEQ ID NO: 119431 - protein, 14 aa, Homo sapiens
  CDR3 for alpha chain variable domain of TCR clone 59716 (TRAV38-1, TRAJ39)
CAFAYNNAGNMFTF

SEQ ID NO: 119432 - protein, 15 aa, Homo sapiens
  CDR3 for beta chain variable domain of TCR clone 59716 (TRBV19, TRBJ2-6)
CASSIGPSGANVLTF

SEQ ID NO: 119433 - protein, 12 aa, Homo sapiens
  CDR3 for alpha chain variable domain of TCR clone 59717 (TRAV29/DV5, TRAJ49)
CAATDTGNQLYF

SEQ ID NO: 119434 - protein, 19 aa, Homo sapiens
  CDR3 for beta chain variable domain of TCR clone 59717 (TRBV25-1, TRBJ2-2)
CAILVYRVDRGRKTGELFF

SEQ ID NO: 119435 - protein, 16 aa, Homo sapiens
  CDR3 for alpha chain variable domain of TCR clone 59718 (TRAV30, TRAJ24)
CGTEIVDADSWGKFQF

SEQ ID NO: 119436 - protein, 13 aa, Homo sapiens
  CDR3 for beta chain variable domain of TCR clone 59718 (TRBV7-9, TRBJ2-7)
CASSFAGAYEQYF

SEQ ID NO: 119437 - protein, 15 aa, Homo sapiens
  CDR3 for alpha chain variable domain of TCR clone 59719 (TRAV2, TRAJ9)
CAVEARGTGGFKTIF

SEQ ID NO: 119438 - protein, 16 aa, Homo sapiens
  CDR3 for beta chain variable domain of TCR clone 59719 (TRBV24-1, TRBJ2-3)
CATSDPGTGATDTQYF

SEQ ID NO: 119439 - protein, 15 aa, Homo sapiens
  CDR3 for alpha chain variable domain of TCR clone 59720 (TRAV21, TRAJ53)
CATLNSGGSNYKLTF

SEQ ID NO: 119440 - protein, 17 aa, Homo sapiens
  CDR3 for beta chain variable domain of TCR clone 59720 (TRBV7-3, TRBJ2-3)
RASSLMKRMRGADTQYF

SEQ ID NO: 119441 - protein, 15 aa, Homo sapiens
  CDR3 for alpha chain variable domain of TCR clone 59721 (TRAV3, TRAJ13)
CAVRDTAGGYQKVTF

SEQ ID NO: 119442 - protein, 13 aa, Homo sapiens
  CDR3 for beta chain variable domain of TCR clone 59721 (TRBV2, TRBJ2-2)
CASSKKNTGELFF

SEQ ID NO: 119443 - protein, 14 aa, Homo sapiens
  CDR3 for alpha chain variable domain of TCR clone 59722 (TRAV21, TRAJ15)
CAVSLNQAGTALIF

SEQ ID NO: 119444 - protein, 11 aa, Homo sapiens
  CDR3 for beta chain variable domain of TCR clone 59722 (TRBV20-1, TRBJ2-7)
CSAGTSYEQYF

SEQ ID NO: 119445 - protein, 14 aa, Homo sapiens
  CDR3 for alpha chain variable domain of TCR clone 59723 (TRAV8-2, TRAJ4)
CVVSPSGGYNKLIC

SEQ ID NO: 119446 - protein, 15 aa, Homo sapiens
  CDR3 for beta chain variable domain of TCR clone 59723 (TRBV4-1, TRBJ1-4)
CASSDTGGTNEKLFF

SEQ ID NO: 119447 - protein, 13 aa, Homo sapiens
  CDR3 for alpha chain variable domain of TCR clone 59724 (TRAV12-1, TRAJ3)
CVVNPRGASKIIF

SEQ ID NO: 119448 - protein, 13 aa, Homo sapiens
  CDR3 for beta chain variable domain of TCR clone 59724 (TRBV28, TRBJ1-5)
CASSDRGNQPHHF

SEQ ID NO: 119449 - protein, 17 aa, Homo sapiens
  CDR3 for alpha chain variable domain of TCR clone 59725 (TRAV23/DV6, TRAJ57)
CAASSTLSQGGSEKLVF

SEQ ID NO: 119450 - protein, 16 aa, Homo sapiens
  CDR3 for beta chain variable domain of TCR clone 59725 (TRBV19, TRBJ2-1)
CASSKAGPSSYNEQFF

SEQ ID NO: 119451 - protein, 17 aa, Homo sapiens
  CDR3 for alpha chain variable domain of TCR clone 59726 (TRAV12-3, TRAJ6)
CAMSARGGAGVSYIPTF

SEQ ID NO: 119452 - protein, 12 aa, Homo sapiens
  CDR3 for beta chain variable domain of TCR clone 59726 (TRBV12-4, TRBJ2-3)
CASSTLPDTQYF

SEQ ID NO: 119453 - protein, 14 aa, Homo sapiens
  CDR3 for alpha chain variable domain of TCR clone 59727 (TRAV1-2, TRAJ16)
CAVNRFSDGQKLLF

SEQ ID NO: 119454 - protein, 13 aa, Homo sapiens
  CDR3 for beta chain variable domain of TCR clone 59727 (TRBV18, TRBJ2-5)
CASSPAGKETQHF

SEQ ID NO: 119455 - protein, 16 aa, Homo sapiens
  CDR3 for alpha chain variable domain of TCR clone 59728 (TRAV12-3, TRAJ53)
CAMSAGSGGGNYKLTF

SEQ ID NO: 119456 - protein, 13 aa, Homo sapiens
  CDR3 for beta chain variable domain of TCR clone 59728 (TRBV29-1, TRBJ2-3)
CSVGPRGTDTQYF

SEQ ID NO: 119457 - protein, 13 aa, Homo sapiens
  CDR3 for alpha chain variable domain of TCR clone 59729 (TRAV1-2, TRAJ20)
CAVRDGNDYKLSF

SEQ ID NO: 119458 - protein, 15 aa, Homo sapiens
  CDR3 for beta chain variable domain of TCR clone 59729 (TRBV7-2, TRBJ2-3)
CASSLGGGGRDTQYF

SEQ ID NO: 119459 - protein, 23 aa, Homo sapiens
  CDR3 for alpha chain variable domain of TCR clone 59730 (TRAV26-1, TRAJ38)
CIADNAGNNHIQNPDHAVYQLRD

SEQ ID NO: 119460 - protein, 13 aa, Homo sapiens
  CDR3 for beta chain variable domain of TCR clone 59730 (TRBV20-1, TRBJ1-1)
CSARGGGNTEAFF

SEQ ID NO: 119461 - protein, 16 aa, Homo sapiens
  CDR3 for alpha chain variable domain of TCR clone 59731 (TRAV12-2, TRAJ10)
CAVNRGLTGGGNKLTF

SEQ ID NO: 119462 - protein, 14 aa, Homo sapiens
  CDR3 for beta chain variable domain of TCR clone 59731 (TRBV9, TRBJ2-1)
CASSVALAVNEQFF

SEQ ID NO: 119463 - protein, 14 aa, Homo sapiens
  CDR3 for alpha chain variable domain of TCR clone 59732 (TRAV12-2, TRAJ44)
CAVNPAGTASKLTF

SEQ ID NO: 119464 - protein, 13 aa, Homo sapiens
  CDR3 for beta chain variable domain of TCR clone 59732 (TRBV20-1, TRBJ1-6)
CSAPLEVGSPLHF

SEQ ID NO: 119465 - protein, 14 aa, Homo sapiens
  CDR3 for alpha chain variable domain of TCR clone 59733 (TRAV23/DV6, TRAJ22)
CAASVPGSARQLTF

SEQ ID NO: 119466 - protein, 13 aa, Homo sapiens
  CDR3 for beta chain variable domain of TCR clone 59733 (TRBV29-1, TRBJ2-1)
CSVEGGRVNEQFF

SEQ ID NO: 119467 - protein, 12 aa, Homo sapiens
  CDR3 for alpha chain variable domain of TCR clone 59734 (TRAV13-1, TRAJ21)
CAAKEGFNKFYF

SEQ ID NO: 119468 - protein, 16 aa, Homo sapiens
  CDR3 for beta chain variable domain of TCR clone 59734 (TRBV4-1, TRBJ2-3)
CASSQSTSGAEDTQYF

SEQ ID NO: 119469 - protein, 15 aa, Homo sapiens
  CDR3 for alpha chain variable domain of TCR clone 59735 (TRAV23/DV6, TRAJ30)
CSASSQESRDDKIIF

SEQ ID NO: 119470 - protein, 17 aa, Homo sapiens
  CDR3 for beta chain variable domain of TCR clone 59735 (TRBV4-3, TRBJ2-1)
CASSQFSSGRASGEQFF

SEQ ID NO: 119471 - protein, 16 aa, Homo sapiens
  CDR3 for alpha chain variable domain of TCR clone 59736 (TRAV23/DV6, TRAJ9)
CAASIGGNTGGFKTIF

SEQ ID NO: 119472 - protein, 13 aa, Homo sapiens
  CDR3 for beta chain variable domain of TCR clone 59736 (TRBV24-1, TRBJ2-2)
CATSDWSTGELFF

SEQ ID NO: 119473 - protein, 14 aa, Homo sapiens
  CDR3 for alpha chain variable domain of TCR clone 59737 (TRAV8-4, TRAJ9)
CAVRINTGGFKTIF

SEQ ID NO: 119474 - protein, 13 aa, Homo sapiens
  CDR3 for beta chain variable domain of TCR clone 59737 (TRBV7-9, TRBJ1-2)
CASSLKQNYGYTF

SEQ ID NO: 119475 - protein, 15 aa, Homo sapiens
  CDR3 for alpha chain variable domain of TCR clone 59738 (TRAV3, TRAJ5)
CAVRDLYTGRRALTF

SEQ ID NO: 119476 - protein, 16 aa, Homo sapiens
  CDR3 for beta chain variable domain of TCR clone 59738 (TRBV20-1, TRBJ1-4)
CSAPGQCLLTNEKLFF

SEQ ID NO: 119477 - protein, 10 aa, Homo sapiens
  CDR3 for alpha chain variable domain of TCR clone 59739 (TRAV1-2, TRAJ31)
CAFFDARLMF

SEQ ID NO: 119478 - protein, 15 aa, Homo sapiens
  CDR3 for beta chain variable domain of TCR clone 59739 (TRBV4-1, TRBJ1-4)
CAGSDTGGTNEKLFF

SEQ ID NO: 119479 - protein, 12 aa, Homo sapiens
  CDR3 for alpha chain variable domain of TCR clone 59740 (TRAV12-2, TRAJ21)
CAPSDNFNKFYF

SEQ ID NO: 119480 - protein, 14 aa, Homo sapiens
  CDR3 for beta chain variable domain of TCR clone 59740 (TRBV19, TRBJ2-1)
CASPTFVLSGEQFF

SEQ ID NO: 119481 - protein, 16 aa, Homo sapiens
  CDR3 for alpha chain variable domain of TCR clone 59741 (TRAV16, TRAJ4)
CALSRMFSGGYNMLIF

SEQ ID NO: 119482 - protein, 16 aa, Homo sapiens
  CDR3 for beta chain variable domain of TCR clone 59741 (TRBV24-1, TRBJ2-3)
CATSDPGTGATDTQYF

SEQ ID NO: 119483 - protein, 14 aa, Homo sapiens
  CDR3 for alpha chain variable domain of TCR clone 59742 (TRAV2, TRAJ9)
CAVEDRSGGFKTIF

SEQ ID NO: 119484 - protein, 14 aa, Homo sapiens
  CDR3 for beta chain variable domain of TCR clone 59742 (TRBV7-3, TRBJ2-1)
CASSLAGGANEQFF

SEQ ID NO: 119485 - protein, 16 aa, Homo sapiens
  CDR3 for alpha chain variable domain of TCR clone 59743 (TRAV3, TRAJ10)
CAVRDMRAGGGNKLTF

SEQ ID NO: 119486 - protein, 13 aa, Homo sapiens
  CDR3 for beta chain variable domain of TCR clone 59743 (TRBV12-5, TRBJ2-3)
CASGDRQSDTQYF

SEQ ID NO: 119487 - protein, 12 aa, Homo sapiens
  CDR3 for alpha chain variable domain of TCR clone 59744 (TRAV12-1, TRAJ40)
CVVYSGTYKYIF

SEQ ID NO: 119488 - protein, 15 aa, Homo sapiens
  CDR3 for beta chain variable domain of TCR clone 59744 (TRBV7-9, TRBJ1-6)
CASSAPGRGNSPLHF

SEQ ID NO: 119489 - protein, 14 aa, Homo sapiens
  CDR3 for alpha chain variable domain of TCR clone 59745 (TRAV9-2, TRAJ39)
CALYIYNAGNMLPF

SEQ ID NO: 119490 - protein, 14 aa, Homo sapiens
  CDR3 for beta chain variable domain of TCR clone 59745 (TRBV6-1, TRBJ1-3)
CASVQGGGGNTIYF

SEQ ID NO: 119491 - protein, 11 aa, Homo sapiens
  CDR3 for alpha chain variable domain of TCR clone 59746 (TRAV26-1, TRAJ43)
CIVRPYNDMRF

SEQ ID NO: 119492 - protein, 17 aa, Homo sapiens
  CDR3 for beta chain variable domain of TCR clone 59746 (TRBV3-1, TRBJ1-1)
CASSLFRTGSMNTEAFF

SEQ ID NO: 119493 - protein, 17 aa, Homo sapiens
  CDR3 for alpha chain variable domain of TCR clone 59747 (TRAV4, TRAJ18)
CLVVAAGRGSTLGRRYF

SEQ ID NO: 119494 - protein, 17 aa, Homo sapiens
  CDR3 for beta chain variable domain of TCR clone 59747 (TRBV28, TRBJ2-2)
CASSLATGMGDAGELFF

SEQ ID NO: 119495 - protein, 14 aa, Homo sapiens
  CDR3 for alpha chain variable domain of TCR clone 59748 (TRAV1-2, TRAJ16)
CAVNRLSDGQKLLF

SEQ ID NO: 119496 - protein, 12 aa, Homo sapiens
  CDR3 for beta chain variable domain of TCR clone 59748 (TRBV24-1, TRBJ1-1)
CATLYPDTEAFF

SEQ ID NO: 119497 - protein, 14 aa, Homo sapiens
  CDR3 for alpha chain variable domain of TCR clone 59749 (TRAV12-2, TRAJ29)
CAVNWETGNTPLVF

SEQ ID NO: 119498 - protein, 14 aa, Homo sapiens
  CDR3 for beta chain variable domain of TCR clone 59749 (TRBV12-5, TRBJ2-5)
CASGSRTHQETQYF

SEQ ID NO: 119499 - protein, 14 aa, Homo sapiens
  CDR3 for alpha chain variable domain of TCR clone 59750 (TRAV1-2, TRAJ16)
CAVNRFSDGQKLLF

SEQ ID NO: 119500 - protein, 15 aa, Homo sapiens
  CDR3 for beta chain variable domain of TCR clone 59750 (TRBV13, TRBJ1-5)
CASSFGQGGVQPQHF

SEQ ID NO: 119501 - protein, 13 aa, Homo sapiens
  CDR3 for alpha chain variable domain of TCR clone 59751 (TRAV2, TRAJ39)
TTVHNNAGNMLTF

SEQ ID NO: 119502 - protein, 16 aa, Homo sapiens
  CDR3 for beta chain variable domain of TCR clone 59751 (TRBV24-1, TRBJ2-3)
CATSGHRDRDTDTQYF

SEQ ID NO: 119503 - protein, 13 aa, Homo sapiens
  CDR3 for alpha chain variable domain of TCR clone 59752 (TRAV9-2, TRAJ49)
CALRHFTGNQFYF

SEQ ID NO: 119504 - protein, 13 aa, Homo sapiens
  CDR3 for beta chain variable domain of TCR clone 59752 (TRBV3-1, TRBJ1-1)
CASSQLQGAEAFF

SEQ ID NO: 119505 - protein, 19 aa, Homo sapiens
  CDR3 for alpha chain variable domain of TCR clone 59753 (TRAV38-1, TRAJ53)
CAFMKHGLESGGSNNKLTF

SEQ ID NO: 119506 - protein, 13 aa, Homo sapiens
  CDR3 for beta chain variable domain of TCR clone 59753 (TRBV19, TRBJ2-7)
CASSPRQSYEQYF

SEQ ID NO: 119507 - protein, 14 aa, Homo sapiens
  CDR3 for alpha chain variable domain of TCR clone 59754 (TRAV35, TRAJ13)
CAGSPSGGYQKVTF

SEQ ID NO: 119508 - protein, 13 aa, Homo sapiens
  CDR3 for beta chain variable domain of TCR clone 59754 (TRBV29-1, TRBJ1-1)
CSVGESRNTEAFF

SEQ ID NO: 119509 - protein, 13 aa, Homo sapiens
  CDR3 for alpha chain variable domain of TCR clone 59755 (TRAV1-1, TRAJ9)
CAAKNTGGFKTIF

SEQ ID NO: 119510 - protein, 16 aa, Homo sapiens
  CDR3 for beta chain variable domain of TCR clone 59755 (TRBV19, TRBJ2-2)
CASRSPGTGATGELFF

SEQ ID NO: 119511 - protein, 12 aa, Homo sapiens
  CDR3 for alpha chain variable domain of TCR clone 59756 (TRAV13-1, TRAJ49)
CAASPMGNQFYF

SEQ ID NO: 119512 - protein, 14 aa, Homo sapiens
  CDR3 for beta chain variable domain of TCR clone 59756 (TRBV15, TRBJ2-7)
CVTPAETGGYEQYF

SEQ ID NO: 119513 - protein, 13 aa, Homo sapiens
  CDR3 for alpha chain variable domain of TCR clone 59757 (TRAV26-1, TRAJ48)
CIVRVVGDEELTF

SEQ ID NO: 119514 - protein, 18 aa, Homo sapiens
  CDR3 for beta chain variable domain of TCR clone 59757 (TRBV4-3, TRBJ1-6)
CASSQETPASSYNSPLHF

SEQ ID NO: 119515 - protein, 16 aa, Homo sapiens
  CDR3 for alpha chain variable domain of TCR clone 59758 (TRAV12-2, TRAJ45)
CAVKRNPGGGADGLPF

SEQ ID NO: 119516 - protein, 12 aa, Homo sapiens
  CDR3 for beta chain variable domain of TCR clone 59758 (TRBV6-1, TRBJ2-5)
CASSEGRETQYF

SEQ ID NO: 119517 - protein, 14 aa, Homo sapiens
  CDR3 for alpha chain variable domain of TCR clone 59759 (TRAV8-6, TRAJ53)
CAALVLGSNYKLTF

SEQ ID NO: 119518 - protein, 15 aa, Homo sapiens
  CDR3 for beta chain variable domain of TCR clone 59759 (TRBV20-1, TRBJ2-3)
CSAEPLAGRGDTQYF

SEQ ID NO: 119519 - protein, 16 aa, Homo sapiens
  CDR3 for alpha chain variable domain of TCR clone 59760 (TRAV16, TRAJ52)
CDLSGVGGTSYGKLTF

SEQ ID NO: 119520 - protein, 14 aa, Homo sapiens
  CDR3 for beta chain variable domain of TCR clone 59760 (TRBV19, TRBJ1-2)
CASSLQGQAYGYTF

SEQ ID NO: 119521 - protein, 14 aa, Homo sapiens
  CDR3 for alpha chain variable domain of TCR clone 59761 (TRAV1-2, TRAJ6)
CAVSLSVGSYIPTF

SEQ ID NO: 119522 - protein, 15 aa, Homo sapiens
  CDR3 for beta chain variable domain of TCR clone 59761 (TRBV28, TRBJ2-7)
CASSPGGRGFYEQYF

SEQ ID NO: 119523 - protein, 14 aa, Homo sapiens
  CDR3 for alpha chain variable domain of TCR clone 59762 (TRAV1-2, TRAJ8)
CAVREDTGSQKLVF

SEQ ID NO: 119524 - protein, 20 aa, Homo sapiens
  CDR3 for beta chain variable domain of TCR clone 59762 (TRBV28, TRBJ2-1)
CASTPIGRSPGLAGGNEQFF

SEQ ID NO: 119525 - protein, 13 aa, Homo sapiens
  CDR3 for alpha chain variable domain of TCR clone 59763 (TRAV8-6, TRAJ8)
CAVSNTGSQKLVF

SEQ ID NO: 119526 - protein, 13 aa, Homo sapiens
  CDR3 for beta chain variable domain of TCR clone 59763 (TRBV7-9, TRBJ1-2)
CASSLKQNYGYTF

SEQ ID NO: 119527 - protein, 10 aa, Homo sapiens
  CDR3 for alpha chain variable domain of TCR clone 59764 (TRAV8-4, TRAJ43)
CAVSADDMRF

SEQ ID NO: 119528 - protein, 15 aa, Homo sapiens
  CDR3 for beta chain variable domain of TCR clone 59764 (TRBV5-1, TRBJ2-3)
CASSVTSGYTDTQYF

SEQ ID NO: 119529 - protein, 14 aa, Homo sapiens
  CDR3 for alpha chain variable domain of TCR clone 59765 (TRAV12-3, TRAJ10)
SHLPLTGGGNKLTF

SEQ ID NO: 119530 - protein, 12 aa, Homo sapiens
  CDR3 for beta chain variable domain of TCR clone 59765 (TRBV19, TRBJ2-3)
CATTSSTDTQYF

SEQ ID NO: 119531 - protein, 13 aa, Homo sapiens
  CDR3 for alpha chain variable domain of TCR clone 59766 (TRAV1-1, TRAJ33)
CASHMDSNYQLIW

SEQ ID NO: 119532 - protein, 16 aa, Homo sapiens
  CDR3 for beta chain variable domain of TCR clone 59766 (TRBV27, TRBJ2-7)
CASSSERRDSAYEQYF

SEQ ID NO: 119533 - protein, 17 aa, Homo sapiens
  CDR3 for alpha chain variable domain of TCR clone 59767 (TRAV8-6, TRAJ8)
CAVKAGIENTGFQKLVF

SEQ ID NO: 119534 - protein, 12 aa, Homo sapiens
  CDR3 for beta chain variable domain of TCR clone 59767 (TRBV19, TRBJ1-4)
CASKDWPGGLFF

SEQ ID NO: 119535 - protein, 12 aa, Homo sapiens
  CDR3 for alpha chain variable domain of TCR clone 59768 (TRAV16, TRAJ22)
CALEVSARQLTF

SEQ ID NO: 119536 - protein, 14 aa, Homo sapiens
  CDR3 for beta chain variable domain of TCR clone 59768 (TRBV11-2, TRBJ2-3)
CASSSIASTDTQYL

SEQ ID NO: 119537 - protein, 12 aa, Homo sapiens
  CDR3 for alpha chain variable domain of TCR clone 59769 (TRAV12-3, TRAJ17)
CAMTLTGNKLTS

SEQ ID NO: 119538 - protein, 12 aa, Homo sapiens
  CDR3 for beta chain variable domain of TCR clone 59769 (TRBV2, TRBJ2-1)
CAYGPPGNEQFF

SEQ ID NO: 119539 - protein, 11 aa, Homo sapiens
  CDR3 for alpha chain variable domain of TCR clone 59770 (TRAV27, TRAJ47)
SIVEYGNKLVF

SEQ ID NO: 119540 - protein, 20 aa, Homo sapiens
  CDR3 for beta chain variable domain of TCR clone 59770 (TRBV7-2, TRBJ2-5)
CASSFLRGGGRDPVLRARHA

SEQ ID NO: 119541 - protein, 12 aa, Homo sapiens
  CDR3 for alpha chain variable domain of TCR clone 59771 (TRAV1-1, TRAJ8)
CAGGTGFQKLVF

SEQ ID NO: 119542 - protein, 14 aa, Homo sapiens
  CDR3 for beta chain variable domain of TCR clone 59771 (TRBV7-6, TRBJ2-3)
CASSVARGTDTQYF

SEQ ID NO: 119543 - protein, 16 aa, Homo sapiens
  CDR3 for alpha chain variable domain of TCR clone 59772 (TRAV17, TRAJ35)
CATAEGGIGFGNVLHC

SEQ ID NO: 119544 - protein, 15 aa, Homo sapiens
  CDR3 for beta chain variable domain of TCR clone 59772 (TRBV19, TRBJ2-4)
CASRGPRRGENIQYF

SEQ ID NO: 119545 - protein, 12 aa, Homo sapiens
  CDR3 for alpha chain variable domain of TCR clone 59773 (TRAV13-1, TRAJ21)
CAAFFNFNKFYF

SEQ ID NO: 119546 - protein, 14 aa, Homo sapiens
  CDR3 for beta chain variable domain of TCR clone 59773 (TRBV4-1, TRBJ2-7)
CANRLTSGSYEQYF

SEQ ID NO: 119547 - protein, 15 aa, Homo sapiens
  CDR3 for alpha chain variable domain of TCR clone 59774 (TRAV8-2, TRAJ16)
CVGSDGFSDGQKLLF

SEQ ID NO: 119548 - protein, 14 aa, Homo sapiens
  CDR3 for beta chain variable domain of TCR clone 59774 (TRBV7-3, TRBJ1-1)
CASSLGTGYTEAFF

SEQ ID NO: 119549 - protein, 12 aa, Homo sapiens
  CDR3 for alpha chain variable domain of TCR clone 59775 (TRAV8-3, TRAJ20)
CAVGGGDYKLSF

SEQ ID NO: 119550 - protein, 14 aa, Homo sapiens
  CDR3 for beta chain variable domain of TCR clone 59775 (TRBV5-1, TRBJ2-7)
CASSRGEPLYEQYF

SEQ ID NO: 119551 - protein, 10 aa, Homo sapiens
  CDR3 for alpha chain variable domain of TCR clone 59776 (TRAV14/DV4, TRAJ48)
CAPRSEKLTF

SEQ ID NO: 119552 - protein, 17 aa, Homo sapiens
  CDR3 for beta chain variable domain of TCR clone 59776 (TRBV13, TRBJ2-3)
CASSLSRVAGGRNTQYF

SEQ ID NO: 119553 - protein, 14 aa, Homo sapiens
  CDR3 for alpha chain variable domain of TCR clone 59777 (TRAV12-3, TRAJ10)
SHLPLTGGGNKLTF

SEQ ID NO: 119554 - protein, 16 aa, Homo sapiens
  CDR3 for beta chain variable domain of TCR clone 59777 (TRBV29-1, TRBJ2-7)
CSAEVVGTSGSYEQYF

SEQ ID NO: 119555 - protein, 14 aa, Homo sapiens
  CDR3 for alpha chain variable domain of TCR clone 59778 (TRAV1-2, TRAJ8)
RAVREDTGFQKPVF

SEQ ID NO: 119556 - protein, 15 aa, Homo sapiens
  CDR3 for beta chain variable domain of TCR clone 59778 (TRBV6-3, TRBJ2-7)
CASSSPGTVFYEQYF

SEQ ID NO: 119557 - protein, 13 aa, Homo sapiens
  CDR3 for alpha chain variable domain of TCR clone 59779 (TRAV8-1, TRAJ30)
CAVIMNIDDKIIF

SEQ ID NO: 119558 - protein, 14 aa, Homo sapiens
  CDR3 for beta chain variable domain of TCR clone 59779 (TRBV7-2, TRBJ1-6)
CASSLQGANSPLHF

SEQ ID NO: 119559 - protein, 12 aa, Homo sapiens
  CDR3 for alpha chain variable domain of TCR clone 59780 (TRAV13-1, TRAJ49)
CAASPMGNQFYF

SEQ ID NO: 119560 - protein, 17 aa, Homo sapiens
  CDR3 for beta chain variable domain of TCR clone 59780 (TRBV11-2, TRBJ2-1)
CARSLYPPGVEYNEQFF

SEQ ID NO: 119561 - protein, 14 aa, Homo sapiens
  CDR3 for alpha chain variable domain of TCR clone 59781 (TRAV1-1, TRAJ30)
CAVRSLNRDDKIIF

SEQ ID NO: 119562 - protein, 15 aa, Homo sapiens
  CDR3 for beta chain variable domain of TCR clone 59781 (TRBV27, TRBJ1-4)
CASSAQRDLNEKLFF

SEQ ID NO: 119563 - protein, 20 aa, Homo sapiens
  CDR3 for alpha chain variable domain of TCR clone 59782 (TRAV12-1, TRAJ42)
SSVIQPPTSVKGGGQGNLIF

SEQ ID NO: 119564 - protein, 18 aa, Homo sapiens
  CDR3 for beta chain variable domain of TCR clone 59782 (TRBV11-2, TRBJ2-3)
CASSLGGASRGAPNTQYF

SEQ ID NO: 119565 - protein, 12 aa, Homo sapiens
  CDR3 for alpha chain variable domain of TCR clone 59783 (TRAV16, TRAJ9)
CALRAGGFKTIL

SEQ ID NO: 119566 - protein, 13 aa, Homo sapiens
  CDR3 for beta chain variable domain of TCR clone 59783 (TRBV4-3, TRBJ1-1)
CASSQVEGSMAFF

SEQ ID NO: 119567 - protein, 16 aa, Homo sapiens
  CDR3 for alpha chain variable domain of TCR clone 59784 (TRAV12-3, TRAJ45)
CAMGWGSGGGADGLTF

SEQ ID NO: 119568 - protein, 15 aa, Homo sapiens
  CDR3 for beta chain variable domain of TCR clone 59784 (TRBV3-1, TRBJ1-2)
YASSHPGTPGYGYTF

SEQ ID NO: 119569 - protein, 12 aa, Homo sapiens
  CDR3 for alpha chain variable domain of TCR clone 59785 (TRAV3, TRAJ20)
CAVRDGDYKLSF

SEQ ID NO: 119570 - protein, 19 aa, Homo sapiens
  CDR3 for beta chain variable domain of TCR clone 59785 (TRBV25-1, TRBJ2-2)
CAILVYRVDRGRKTGELFF

SEQ ID NO: 119571 - protein, 16 aa, Homo sapiens
  CDR3 for alpha chain variable domain of TCR clone 59786 (TRAV12-2, TRAJ28)
CAVITDSGAGSYQLTF

SEQ ID NO: 119572 - protein, 19 aa, Homo sapiens
  CDR3 for beta chain variable domain of TCR clone 59786 (TRBV25-1, TRBJ2-2)
CAILVYRVDRGRKTGELFF

SEQ ID NO: 119573 - protein, 15 aa, Homo sapiens
  CDR3 for alpha chain variable domain of TCR clone 59787 (TRAV16, TRAJ57)
CALSGGQGGSEKLVF

SEQ ID NO: 119574 - protein, 13 aa, Homo sapiens
  CDR3 for beta chain variable domain of TCR clone 59787 (TRBV11-2, TRBJ2-5)
CASSFSSQETQYF

SEQ ID NO: 119575 - protein, 13 aa, Homo sapiens
  CDR3 for alpha chain variable domain of TCR clone 59788 (TRAV26-1, TRAJ48)
CIVRVAGDEKLTF

SEQ ID NO: 119576 - protein, 19 aa, Homo sapiens
  CDR3 for beta chain variable domain of TCR clone 59788 (TRBV11-3, TRBJ2-2)
CASSTRPGAKTTNTGELFF

SEQ ID NO: 119577 - protein, 15 aa, Homo sapiens
  CDR3 for alpha chain variable domain of TCR clone 59789 (TRAV34, TRAJ38)
CGADFTPGNNRKLIW

SEQ ID NO: 119578 - protein, 16 aa, Homo sapiens
  CDR3 for beta chain variable domain of TCR clone 59789 (TRBV12-5, TRBJ2-5)
CASGPRTSGNQETQYV

SEQ ID NO: 119579 - protein, 16 aa, Homo sapiens
  CDR3 for alpha chain variable domain of TCR clone 59790 (TRAV30, TRAJ24)
CGTEIVDADSWGKFQF

SEQ ID NO: 119580 - protein, 13 aa, Homo sapiens
  CDR3 for beta chain variable domain of TCR clone 59790 (TRBV5-4, TRBJ2-5)
CASSRQEGETQYF

SEQ ID NO: 119581 - protein, 14 aa, Homo sapiens
  CDR3 for alpha chain variable domain of TCR clone 59791 (TRAV26-1, TRAJ38)
CIADNAGNNRKLIW

SEQ ID NO: 119582 - protein, 13 aa, Homo sapiens
  CDR3 for beta chain variable domain of TCR clone 59791 (TRBV20-1, TRBJ1-1)
CSARGGGNTEAFY

SEQ ID NO: 119583 - protein, 13 aa, Homo sapiens
  CDR3 for alpha chain variable domain of TCR clone 59792 (TRAV12-2, TRAJ34)
CAVRGYNTDKLIF

SEQ ID NO: 119584 - protein, 15 aa, Homo sapiens
  CDR3 for beta chain variable domain of TCR clone 59792 (TRBV28, TRBJ2-1)
CAGRTGAGVIARQFF

SEQ ID NO: 119585 - protein, 13 aa, Homo sapiens
  CDR3 for alpha chain variable domain of TCR clone 59793 (TRAV13-1, TRAJ11)
CAAVLAGYSTLTF

SEQ ID NO: 119586 - protein, 17 aa, Homo sapiens
  CDR3 for beta chain variable domain of TCR clone 59793 (TRBV25-1, TRBJ2-7)
CASSAARVVFSSYEQYF

SEQ ID NO: 119587 - protein, 15 aa, Homo sapiens
  CDR3 for alpha chain variable domain of TCR clone 59794 (TRAV22, TRAJ24)
CAVPLSTYSWGKLQF

SEQ ID NO: 119588 - protein, 16 aa, Homo sapiens
  CDR3 for beta chain variable domain of TCR clone 59794 (TRBV28, TRBJ2-7)
CASSFPDRRLTYEQYF

SEQ ID NO: 119589 - protein, 15 aa, Homo sapiens
  CDR3 for alpha chain variable domain of TCR clone 59795 (TRAV21, TRAJ24)
CAARSSTDSWGKLQF

SEQ ID NO: 119590 - protein, 15 aa, Homo sapiens
  CDR3 for beta chain variable domain of TCR clone 59795 (TRBV9, TRBJ1-6)
CASSVAGTGDSPLHF

SEQ ID NO: 119591 - protein, 14 aa, Homo sapiens
  CDR3 for alpha chain variable domain of TCR clone 59796 (TRAV12-2, TRAJ41)
CAVTLGLSGYALNF

SEQ ID NO: 119592 - protein, 13 aa, Homo sapiens
  CDR3 for beta chain variable domain of TCR clone 59796 (TRBV27, TRBJ2-3)
CASSVSQGDTQYF

SEQ ID NO: 119593 - protein, 14 aa, Homo sapiens
  CDR3 for alpha chain variable domain of TCR clone 59797 (TRAV17, TRAJ15)
CATTTNQAGTALIF

SEQ ID NO: 119594 - protein, 16 aa, Homo sapiens
  CDR3 for beta chain variable domain of TCR clone 59797 (TRBV4-1, TRBJ2-7)
CASSRGDILNSCEQYF

SEQ ID NO: 119595 - protein, 11 aa, Homo sapiens
  CDR3 for alpha chain variable domain of TCR clone 59798 (TRAV17, TRAJ9)
CATTRGFKTIF

SEQ ID NO: 119596 - protein, 14 aa, Homo sapiens
  CDR3 for beta chain variable domain of TCR clone 59798 (TRBV7-9, TRBJ2-2)
CASSGLADTGELFF

SEQ ID NO: 119597 - protein, 16 aa, Homo sapiens
  CDR3 for alpha chain variable domain of TCR clone 59799 (TRAV30, TRAJ57)
CGTGWAPQGGSEKLVF

SEQ ID NO: 119598 - protein, 14 aa, Homo sapiens
  CDR3 for beta chain variable domain of TCR clone 59799 (TRBV18, TRBJ1-1)
CASSPGFQGVEALF

SEQ ID NO: 119599 - protein, 12 aa, Homo sapiens
  CDR3 for alpha chain variable domain of TCR clone 59800 (TRAV12-3, TRAJ17)
CAMTLTGNKLAF

SEQ ID NO: 119600 - protein, 13 aa, Homo sapiens
  CDR3 for beta chain variable domain of TCR clone 59800 (TRBV27, TRBJ2-1)
CASRTLGVGEQFF

SEQ ID NO: 119601 - protein, 15 aa, Homo sapiens
  CDR3 for alpha chain variable domain of TCR clone 59801 (TRAV29/DV5, TRAJ40)
CAASAQGSGTYKYIF

SEQ ID NO: 119602 - protein, 15 aa, Homo sapiens
  CDR3 for beta chain variable domain of TCR clone 59801 (TRBV7-2, TRBJ2-3)
CASSLAGAFIGTQYF

SEQ ID NO: 119603 - protein, 10 aa, Homo sapiens
  CDR3 for alpha chain variable domain of TCR clone 59802 (TRAV2, TRAJ34)
CAVVNDKLIF

SEQ ID NO: 119604 - protein, 15 aa, Homo sapiens
  CDR3 for beta chain variable domain of TCR clone 59802 (TRBV9, TRBJ1-6)
CASSVAGTGDSPLHF

SEQ ID NO: 119605 - protein, 12 aa, Homo sapiens
  CDR3 for alpha chain variable domain of TCR clone 59803 (TRAV17, TRAJ49)
CATVTTGNQFYF

SEQ ID NO: 119606 - protein, 16 aa, Homo sapiens
  CDR3 for beta chain variable domain of TCR clone 59803 (TRBV19, TRBJ2-2)
CASRSPGTGANGELFF

SEQ ID NO: 119607 - protein, 16 aa, Homo sapiens
  CDR3 for alpha chain variable domain of TCR clone 59804 (TRAV21, TRAJ37)
CAVRTAGSSSTGKLIF

SEQ ID NO: 119608 - protein, 13 aa, Homo sapiens
  CDR3 for beta chain variable domain of TCR clone 59804 (TRBV7-9, TRBJ2-5)
CVSLPSGRETQYF

SEQ ID NO: 119609 - protein, 14 aa, Homo sapiens
  CDR3 for alpha chain variable domain of TCR clone 59805 (TRAV1-2, TRAJ8)
CAVREDTGFQKLVF

SEQ ID NO: 119610 - protein, 16 aa, Homo sapiens
  CDR3 for beta chain variable domain of TCR clone 59805 (TRBV7-6, TRBJ2-6)
CASSLPGLSRANVLTF

SEQ ID NO: 119611 - protein, 12 aa, Homo sapiens
  CDR3 for alpha chain variable domain of TCR clone 59806 (TRAV10, TRAJ43)
CVVVRVGNDMCF

SEQ ID NO: 119612 - protein, 15 aa, Homo sapiens
  CDR3 for beta chain variable domain of TCR clone 59806 (TRBV2, TRBJ2-7)
CASSEGLARSYEQYF

SEQ ID NO: 119613 - protein, 12 aa, Homo sapiens
  CDR3 for alpha chain variable domain of TCR clone 59807 (TRAV12-3, TRAJ22)
CAFSGSARQLTF

SEQ ID NO: 119614 - protein, 16 aa, Homo sapiens
  CDR3 for beta chain variable domain of TCR clone 59807 (TRBV20-1, TRBJ2-1)
CSATPGYLGIGYEQFF

SEQ ID NO: 119615 - protein, 15 aa, Homo sapiens
  CDR3 for alpha chain variable domain of TCR clone 59808 (TRAV34, TRAJ38)
CGADFTPGNNRKLIW

SEQ ID NO: 119616 - protein, 16 aa, Homo sapiens
  CDR3 for beta chain variable domain of TCR clone 59808 (TRBV12-5, TRBJ2-5)
CASGPRTSGNQENQYF

SEQ ID NO: 119617 - protein, 13 aa, Homo sapiens
  CDR3 for alpha chain variable domain of TCR clone 59809 (TRAV21, TRAJ57)
CAVTQGGSEELVF

SEQ ID NO: 119618 - protein, 17 aa, Homo sapiens
  CDR3 for beta chain variable domain of TCR clone 59809 (TRBV10-3, TRBJ2-6)
CAISELAESSGANVLTF

SEQ ID NO: 119619 - protein, 16 aa, Homo sapiens
  CDR3 for alpha chain variable domain of TCR clone 59810 (TRAV26-1, TRAJ53)
CIVRVAMGGSNYELTF

SEQ ID NO: 119620 - protein, 12 aa, Homo sapiens
  CDR3 for beta chain variable domain of TCR clone 59810 (TRBV7-9, TRBJ1-5)
CASSPQGQPQHF

SEQ ID NO: 119621 - protein, 16 aa, Homo sapiens
  CDR3 for alpha chain variable domain of TCR clone 59811 (TRAV26-1, TRAJ5)
CIVPLSYPHGRRALTF

SEQ ID NO: 119622 - protein, 14 aa, Homo sapiens
  CDR3 for beta chain variable domain of TCR clone 59811 (TRBV19, TRBJ2-7)
CASTVQGRPYEQYF

SEQ ID NO: 119623 - protein, 17 aa, Homo sapiens
  CDR3 for alpha chain variable domain of TCR clone 59812 (TRAV4, TRAJ42)
CLVGVLNYGGSQVNLIF

SEQ ID NO: 119624 - protein, 12 aa, Homo sapiens
  CDR3 for beta chain variable domain of TCR clone 59812 (TRBV20-1, TRBJ2-1)
CSAQYTYNEQFF

SEQ ID NO: 119625 - protein, 17 aa, Homo sapiens
  CDR3 for alpha chain variable domain of TCR clone 59813 (TRAV13-1, TRAJ53)
CAASWKSSGGSNYKLTF

SEQ ID NO: 119626 - protein, 19 aa, Homo sapiens
  CDR3 for beta chain variable domain of TCR clone 59813 (TRBV7-9, TRBJ2-1)
CASSHNRGALLRAYNEQFF

SEQ ID NO: 119627 - protein, 20 aa, Homo sapiens
  CDR3 for alpha chain variable domain of TCR clone 59814 (TRAV12-3, TRAJ41)
SLFIRDSQPSDSATPEALNF

SEQ ID NO: 119628 - protein, 15 aa, Homo sapiens
  CDR3 for beta chain variable domain of TCR clone 59814 (TRBV5-1, TRBJ2-7)
CASSLDLTSPYEQYF

SEQ ID NO: 119629 - protein, 16 aa, Homo sapiens
  CDR3 for alpha chain variable domain of TCR clone 59815 (TRAV30, TRAJ49)
SAAQGVGPNTGNQFYF

SEQ ID NO: 119630 - protein, 15 aa, Homo sapiens
  CDR3 for beta chain variable domain of TCR clone 59815 (TRBV2, TRBJ2-1)
CASSELAGSYNEQFF

SEQ ID NO: 119631 - protein, 16 aa, Homo sapiens
  CDR3 for alpha chain variable domain of TCR clone 59816 (TRAV17, TRAJ52)
CATSNAGSTSYGKLTF

SEQ ID NO: 119632 - protein, 13 aa, Homo sapiens
  CDR3 for beta chain variable domain of TCR clone 59816 (TRBV27, TRBJ1-6)
CASSLVLVSPLHF

SEQ ID NO: 119633 - protein, 15 aa, Homo sapiens
  CDR3 for alpha chain variable domain of TCR clone 59817 (TRAV17, TRAJ16)
CATALRFSDGQKLLF

SEQ ID NO: 119634 - protein, 15 aa, Homo sapiens
  CDR3 for beta chain variable domain of TCR clone 59817 (TRBV13, TRBJ1-5)
CASSFGQGGVQPRHF

SEQ ID NO: 119635 - protein, 14 aa, Homo sapiens
  CDR3 for alpha chain variable domain of TCR clone 59818 (TRAV2, TRAJ9)
CAVEDRRGGFKTIF

SEQ ID NO: 119636 - protein, 13 aa, Homo sapiens
  CDR3 for beta chain variable domain of TCR clone 59818 (TRBV12-4, TRBJ1-5)
CASSPDRAQPQHF

SEQ ID NO: 119637 - protein, 16 aa, Homo sapiens
  CDR3 for alpha chain variable domain of TCR clone 59819 (TRAV8-1, TRAJ39)
CAVNVPSYNAGNMLTF

SEQ ID NO: 119638 - protein, 15 aa, Homo sapiens
  CDR3 for beta chain variable domain of TCR clone 59819 (TRBV4-1, TRBJ2-3)
CASRPTRAGTDTQYF

SEQ ID NO: 119639 - protein, 14 aa, Homo sapiens
  CDR3 for alpha chain variable domain of TCR clone 59820 (TRAV8-1, TRAJ13)
CAVKRSGGYQKVTF

SEQ ID NO: 119640 - protein, 13 aa, Homo sapiens
  CDR3 for beta chain variable domain of TCR clone 59820 (TRBV19, TRBJ1-2)
CASSVPGQDGYTF

SEQ ID NO: 119641 - protein, 12 aa, Homo sapiens
  CDR3 for alpha chain variable domain of TCR clone 59821 (TRAV3, TRAJ34)
CAVLGSTDKLIF

SEQ ID NO: 119642 - protein, 13 aa, Homo sapiens
  CDR3 for beta chain variable domain of TCR clone 59821 (TRBV19, TRBJ2-1)
CASSIGTGNEQFF

SEQ ID NO: 119643 - protein, 12 aa, Homo sapiens
  CDR3 for alpha chain variable domain of TCR clone 59822 (TRAV12-2, TRAJ43)
CAVNVNNDDMRF

SEQ ID NO: 119644 - protein, 14 aa, Homo sapiens
  CDR3 for beta chain variable domain of TCR clone 59822 (TRBV12-5, TRBJ2-5)
CASGSRTHQETQYF

SEQ ID NO: 119645 - protein, 12 aa, Homo sapiens
  CDR3 for alpha chain variable domain of TCR clone 59823 (TRAV3, TRAJ20)
CAVRDPDYKLRF

SEQ ID NO: 119646 - protein, 13 aa, Homo sapiens
  CDR3 for beta chain variable domain of TCR clone 59823 (TRBV9, TRBJ2-1)
CASSVGQGGEQFF

SEQ ID NO: 119647 - protein, 13 aa, Homo sapiens
  CDR3 for alpha chain variable domain of TCR clone 59824 (TRAV35, TRAJ42)
CAGLPGSQGNLIF

SEQ ID NO: 119648 - protein, 16 aa, Homo sapiens
  CDR3 for beta chain variable domain of TCR clone 59824 (TRBV19, TRBJ2-2)
CASSFPGQGLAGELFF

SEQ ID NO: 119649 - protein, 16 aa, Homo sapiens
  CDR3 for alpha chain variable domain of TCR clone 59825 (TRAV3, TRAJ32)
CAVRENYGGATNKLIF

SEQ ID NO: 119650 - protein, 12 aa, Homo sapiens
  CDR3 for beta chain variable domain of TCR clone 59825 (TRBV20-1, TRBJ1-2)
CSVTPEGYGDTF

SEQ ID NO: 119651 - protein, 15 aa, Homo sapiens
  CDR3 for alpha chain variable domain of TCR clone 59826 (TRAV8-4, TRAJ37)
CAVTYGSSNTGKLIF

SEQ ID NO: 119652 - protein, 13 aa, Homo sapiens
  CDR3 for beta chain variable domain of TCR clone 59826 (TRBV12-4, TRBJ2-5)
CASSLGGSRTQCF

SEQ ID NO: 119653 - protein, 17 aa, Homo sapiens
  CDR3 for alpha chain variable domain of TCR clone 59827 (TRAV27, TRAJ42)
CAARVIYYGGSQGNLIF

SEQ ID NO: 119654 - protein, 14 aa, Homo sapiens
  CDR3 for beta chain variable domain of TCR clone 59827 (TRBV6-6, TRBJ2-3)
CASRLQREADTQYF

SEQ ID NO: 119655 - protein, 14 aa, Homo sapiens
  CDR3 for alpha chain variable domain of TCR clone 59828 (TRAV35, TRAJ13)
CAGSPSGGYQKVTF

SEQ ID NO: 119656 - protein, 15 aa, Homo sapiens
  CDR3 for beta chain variable domain of TCR clone 59828 (TRBV19, TRBJ2-2)
CASSIGGGVTGELFF

SEQ ID NO: 119657 - protein, 15 aa, Homo sapiens
  CDR3 for alpha chain variable domain of TCR clone 59829 (TRAV26-1, TRAJ29)
CIVRVEGSGNTPLVF

SEQ ID NO: 119658 - protein, 15 aa, Homo sapiens
  CDR3 for beta chain variable domain of TCR clone 59829 (TRBV10-2, TRBJ2-6)
CASSEQGTGANVLTF

SEQ ID NO: 119659 - protein, 13 aa, Homo sapiens
  CDR3 for alpha chain variable domain of TCR clone 59830 (TRAV8-3, TRAJ36)
CAVGATGANNLFF

SEQ ID NO: 119660 - protein, 13 aa, Homo sapiens
  CDR3 for beta chain variable domain of TCR clone 59830 (TRBV18, TRBJ1-1)
CASSGGRNTEAFF

SEQ ID NO: 119661 - protein, 13 aa, Homo sapiens
  CDR3 for alpha chain variable domain of TCR clone 59831 (TRAV20, TRAJ17)
CAVLRDAGNKLTF

SEQ ID NO: 119662 - protein, 12 aa, Homo sapiens
  CDR3 for beta chain variable domain of TCR clone 59831 (TRBV5-6, TRBJ2-7)
CASSLGRYEQYF

SEQ ID NO: 119663 - protein, 14 aa, Homo sapiens
  CDR3 for alpha chain variable domain of TCR clone 59832 (TRAV27, TRAJ49)
CAGRPEGTGNQFYF

SEQ ID NO: 119664 - protein, 16 aa, Homo sapiens
  CDR3 for beta chain variable domain of TCR clone 59832 (TRBV12-5, TRBJ2-5)
CASSPRTSGNQETQYF

SEQ ID NO: 119665 - protein, 14 aa, Homo sapiens
  CDR3 for alpha chain variable domain of TCR clone 59833 (TRAV12-1, TRAJ17)
CVVNYKAAGNKLTY

SEQ ID NO: 119666 - protein, 17 aa, Homo sapiens
  CDR3 for beta chain variable domain of TCR clone 59833 (TRBV20-1, TRBJ2-1)
CSASSSGLAGSYNEQFF

SEQ ID NO: 119667 - protein, 16 aa, Homo sapiens
  CDR3 for alpha chain variable domain of TCR clone 59834 (TRAV4, TRAJ22)
CLVGDLYSGYARQLTF

SEQ ID NO: 119668 - protein, 16 aa, Homo sapiens
  CDR3 for beta chain variable domain of TCR clone 59834 (TRBV7-9, TRBJ2-1)
CASSDVAGGSYNEQFF

SEQ ID NO: 119669 - protein, 16 aa, Homo sapiens
  CDR3 for alpha chain variable domain of TCR clone 59835 (TRAV12-3, TRAJ53)
CAMSPGSGGSNYKLTF

SEQ ID NO: 119670 - protein, 16 aa, Homo sapiens
  CDR3 for beta chain variable domain of TCR clone 59835 (TRBV5-4, TRBJ2-3)
CASQQPGAGGADTQYF

SEQ ID NO: 119671 - protein, 16 aa, Homo sapiens
  CDR3 for alpha chain variable domain of TCR clone 59836 (TRAV3, TRAJ37)
CAVRGKGSGNTGTLIF

SEQ ID NO: 119672 - protein, 13 aa, Homo sapiens
  CDR3 for beta chain variable domain of TCR clone 59836 (TRBV7-3, TRBJ1-1)
CASSQDWGAEAFF

SEQ ID NO: 119673 - protein, 12 aa, Homo sapiens
  CDR3 for alpha chain variable domain of TCR clone 59837 (TRAV16, TRAJ49)
CALNEGGNQFYF

SEQ ID NO: 119674 - protein, 14 aa, Homo sapiens
  CDR3 for beta chain variable domain of TCR clone 59837 (TRBV7-9, TRBJ2-1)
CASRPTGLRNEQSF

SEQ ID NO: 119675 - protein, 14 aa, Homo sapiens
  CDR3 for alpha chain variable domain of TCR clone 59838 (TRAV3, TRAJ21)
CAVESQANFNKFYF

SEQ ID NO: 119676 - protein, 12 aa, Homo sapiens
  CDR3 for beta chain variable domain of TCR clone 59838 (TRBV6-3, TRBJ2-7)
CASSLTPYEQCF

SEQ ID NO: 119677 - protein, 10 aa, Homo sapiens
  CDR3 for alpha chain variable domain of TCR clone 59839 (TRAV13-2, TRAJ20)
CAENICRLQA

SEQ ID NO: 119678 - protein, 14 aa, Homo sapiens
  CDR3 for beta chain variable domain of TCR clone 59839 (TRBV11-2, TRBJ2-3)
CASSRLARTDTQYF

SEQ ID NO: 119679 - protein, 12 aa, Homo sapiens
  CDR3 for alpha chain variable domain of TCR clone 59840 (TRAV12-3, TRAJ20)
CAMVRGDYKLSF

SEQ ID NO: 119680 - protein, 13 aa, Homo sapiens
  CDR3 for beta chain variable domain of TCR clone 59840 (TRBV7-3, TRBJ2-3)
CASSDQIGETQYF

SEQ ID NO: 119681 - protein, 12 aa, Homo sapiens
  CDR3 for alpha chain variable domain of TCR clone 59841 (TRAV12-2, TRAJ10)
WGVTGGGNKLTF

SEQ ID NO: 119682 - protein, 15 aa, Homo sapiens
  CDR3 for beta chain variable domain of TCR clone 59841 (TRBV7-3, TRBJ2-1)
CASSPTGGGEVEQFF

SEQ ID NO: 119683 - protein, 11 aa, Homo sapiens
  CDR3 for alpha chain variable domain of TCR clone 59842 (TRAV1-2, TRAJ20)
CAVANDYKLSF

SEQ ID NO: 119684 - protein, 20 aa, Homo sapiens
  CDR3 for beta chain variable domain of TCR clone 59842 (TRBV7-8, TRBJ2-2)
CASSHLFPGPTIHITGELFF

SEQ ID NO: 119685 - protein, 14 aa, Homo sapiens
  CDR3 for alpha chain variable domain of TCR clone 59843 (TRAV38-1, TRAJ45)
CAYYSGGGADGLTF

SEQ ID NO: 119686 - protein, 11 aa, Homo sapiens
  CDR3 for beta chain variable domain of TCR clone 59843 (TRBV6-3, TRBJ2-3)
CATGQADTQYF

SEQ ID NO: 119687 - protein, 14 aa, Homo sapiens
  CDR3 for alpha chain variable domain of TCR clone 59844 (TRAV20, TRAJ56)
CAVQFGGDNSKLTF

SEQ ID NO: 119688 - protein, 14 aa, Homo sapiens
  CDR3 for beta chain variable domain of TCR clone 59844 (TRBV20-1, TRBJ2-7)
CSAKRGRSSYEQYF

SEQ ID NO: 119689 - protein, 13 aa, Homo sapiens
  CDR3 for alpha chain variable domain of TCR clone 59845 (TRAV12-3, TRAJ13)
CAMGTGGYQKVTF

SEQ ID NO: 119690 - protein, 16 aa, Homo sapiens
  CDR3 for beta chain variable domain of TCR clone 59845 (TRBV7-3, TRBJ2-2)
CASSLKRGTLSGELFF

SEQ ID NO: 119691 - protein, 11 aa, Homo sapiens
  CDR3 for alpha chain variable domain of TCR clone 59846 (TRAV17, TRAJ9)
CAMTGGFKTIF

SEQ ID NO: 119692 - protein, 14 aa, Homo sapiens
  CDR3 for beta chain variable domain of TCR clone 59846 (TRBV7-9, TRBJ2-2)
CASSGLADTGELFF

SEQ ID NO: 119693 - protein, 15 aa, Homo sapiens
  CDR3 for alpha chain variable domain of TCR clone 59847 (TRAV3, TRAJ4)
CAQSMFSGGYNKLIF

SEQ ID NO: 119694 - protein, 16 aa, Homo sapiens
  CDR3 for beta chain variable domain of TCR clone 59847 (TRBV3-1, TRBJ1-6)
CASSQEFQGSYSPLHF

SEQ ID NO: 119695 - protein, 12 aa, Homo sapiens
  CDR3 for alpha chain variable domain of TCR clone 59848 (TRAV16, TRAJ10)
CSRTGGGNKLTF

SEQ ID NO: 119696 - protein, 15 aa, Homo sapiens
  CDR3 for beta chain variable domain of TCR clone 59848 (TRBV6-3, TRBJ2-7)
CASSSPGAVFYEQYF

SEQ ID NO: 119697 - protein, 13 aa, Homo sapiens
  CDR3 for alpha chain variable domain of TCR clone 59849 (TRAV12-2, TRAJ13)
CAVKKTGLPESYL

SEQ ID NO: 119698 - protein, 15 aa, Homo sapiens
  CDR3 for beta chain variable domain of TCR clone 59849 (TRBV27, TRBJ2-1)
CASSNGGGSSNEQFF

SEQ ID NO: 119699 - protein, 12 aa, Homo sapiens
  CDR3 for alpha chain variable domain of TCR clone 59850 (TRAV21, TRAJ11)
FAATSGYSTLTF

SEQ ID NO: 119700 - protein, 14 aa, Homo sapiens
  CDR3 for beta chain variable domain of TCR clone 59850 (TRBV20-1, TRBJ2-7)
CSAPGLAGVGEQYF

SEQ ID NO: 119701 - protein, 14 aa, Homo sapiens
  CDR3 for alpha chain variable domain of TCR clone 59851 (TRAV35, TRAJ24)
CAGPRRDSWGKLQF

SEQ ID NO: 119702 - protein, 12 aa, Homo sapiens
  CDR3 for beta chain variable domain of TCR clone 59851 (TRBV12-4, TRBJ2-3)
CASSLGQDTQHF

SEQ ID NO: 119703 - protein, 12 aa, Homo sapiens
  CDR3 for alpha chain variable domain of TCR clone 59852 (TRAV12-3, TRAJ17)
CAMTLTGNKLTF

SEQ ID NO: 119704 - protein, 13 aa, Homo sapiens
  CDR3 for beta chain variable domain of TCR clone 59852 (TRBV7-9, TRBJ1-2)
CASSLKQNYGYIF

SEQ ID NO: 119705 - protein, 15 aa, Homo sapiens
  CDR3 for alpha chain variable domain of TCR clone 59853 (TRAV12-1, TRAJ42)
CVVTRDGGSQGNLIF

SEQ ID NO: 119706 - protein, 14 aa, Homo sapiens
  CDR3 for beta chain variable domain of TCR clone 59853 (TRBV11-2, TRBJ2-3)
CASRLGGGANTQYF

SEQ ID NO: 119707 - protein, 13 aa, Homo sapiens
  CDR3 for alpha chain variable domain of TCR clone 59854 (TRAV13-1, TRAJ11)
CAAVLAGYSTPTF

SEQ ID NO: 119708 - protein, 17 aa, Homo sapiens
  CDR3 for beta chain variable domain of TCR clone 59854 (TRBV25-1, TRBJ2-7)
CASSDARVVFSSYEQYF

SEQ ID NO: 119709 - protein, 13 aa, Homo sapiens
  CDR3 for alpha chain variable domain of TCR clone 59855 (TRAV12-2, TRAJ18)
CAVRGSTLGRLYF

SEQ ID NO: 119710 - protein, 18 aa, Homo sapiens
  CDR3 for beta chain variable domain of TCR clone 59855 (TRBV27, TRBJ2-3)
CASSLSGTSVRGTDTQYF

SEQ ID NO: 119711 - protein, 13 aa, Homo sapiens
  CDR3 for alpha chain variable domain of TCR clone 59856 (TRAV8-3, TRAJ36)
CAVGATGANNLFF

SEQ ID NO: 119712 - protein, 15 aa, Homo sapiens
  CDR3 for beta chain variable domain of TCR clone 59856 (TRBV7-2, TRBJ1-2)
CASSPREGWNYGYTF

SEQ ID NO: 119713 - protein, 15 aa, Homo sapiens
  CDR3 for alpha chain variable domain of TCR clone 59857 (TRAV38-1, TRAJ37)
CAFISGSGNTGKLIF

SEQ ID NO: 119714 - protein, 12 aa, Homo sapiens
  CDR3 for beta chain variable domain of TCR clone 59857 (TRBV7-9, TRBJ2-7)
CASSLEGYEQYF

SEQ ID NO: 119715 - protein, 16 aa, Homo sapiens
  CDR3 for alpha chain variable domain of TCR clone 59858 (TRAV38-1, TRAJ37)
CAFKGYGSSNTGKLIF

SEQ ID NO: 119716 - protein, 13 aa, Homo sapiens
  CDR3 for beta chain variable domain of TCR clone 59858 (TRBV12-4, TRBJ2-5)
CASSLFRRETQYF

SEQ ID NO: 119717 - protein, 13 aa, Homo sapiens
  CDR3 for alpha chain variable domain of TCR clone 59859 (TRAV35, TRAJ42)
CAGFPGSRGNLIF

SEQ ID NO: 119718 - protein, 14 aa, Homo sapiens
  CDR3 for beta chain variable domain of TCR clone 59859 (TRBV29-1, TRBJ2-2)
CSVLAETNTGELFF

SEQ ID NO: 119719 - protein, 12 aa, Homo sapiens
  CDR3 for alpha chain variable domain of TCR clone 59860 (TRAV1-1, TRAJ9)
CAVDTGGFKTIF

SEQ ID NO: 119720 - protein, 15 aa, Homo sapiens
  CDR3 for beta chain variable domain of TCR clone 59860 (TRBV10-1, TRBJ2-3)
CASSATSGGFDTQYF

SEQ ID NO: 119721 - protein, 17 aa, Homo sapiens
  CDR3 for alpha chain variable domain of TCR clone 59861 (TRAV3, TRAJ6)
CAVRDGPRAGGSYIPTF

SEQ ID NO: 119722 - protein, 13 aa, Homo sapiens
  CDR3 for beta chain variable domain of TCR clone 59861 (TRBV11-2, TRBJ2-5)
CASSFSSQETQYF

SEQ ID NO: 119723 - protein, 11 aa, Homo sapiens
  CDR3 for alpha chain variable domain of TCR clone 59862 (TRAV2, TRAJ33)
CALESNYQLIW

SEQ ID NO: 119724 - protein, 15 aa, Homo sapiens
  CDR3 for beta chain variable domain of TCR clone 59862 (TRBV19, TRBJ1-1)
CASTSGQIQNTEAFF

SEQ ID NO: 119725 - protein, 14 aa, Homo sapiens
  CDR3 for alpha chain variable domain of TCR clone 59863 (TRAV35, TRAJ33)
CWPRGRDNNYQLIW

SEQ ID NO: 119726 - protein, 11 aa, Homo sapiens
  CDR3 for beta chain variable domain of TCR clone 59863 (TRBV10-3, TRBJ2-7)
CAISEGLEQYF

SEQ ID NO: 119727 - protein, 13 aa, Homo sapiens
  CDR3 for alpha chain variable domain of TCR clone 59864 (TRAV3, TRAJ15)
CAVRDQAGTAPIF

SEQ ID NO: 119728 - protein, 15 aa, Homo sapiens
  CDR3 for beta chain variable domain of TCR clone 59864 (TRBV11-1, TRBJ2-7)
CASSLNYGASYEQYF

SEQ ID NO: 119729 - protein, 11 aa, Homo sapiens
  CDR3 for alpha chain variable domain of TCR clone 59865 (TRAV12-1, TRAJ33)
CVVNMNYQLIW

SEQ ID NO: 119730 - protein, 13 aa, Homo sapiens
  CDR3 for beta chain variable domain of TCR clone 59865 (TRBV12-4, TRBJ1-2)
CASSLRQGKGYTF

SEQ ID NO: 119731 - protein, 11 aa, Homo sapiens
  CDR3 for alpha chain variable domain of TCR clone 59866 (TRAV2, TRAJ31)
CAAGPPARLMF

SEQ ID NO: 119732 - protein, 13 aa, Homo sapiens
  CDR3 for beta chain variable domain of TCR clone 59866 (TRBV4-1, TRBJ2-3)
CARSQPPTDTQYF

SEQ ID NO: 119733 - protein, 13 aa, Homo sapiens
  CDR3 for alpha chain variable domain of TCR clone 59867 (TRAV3, TRAJ27)
CAVRPLGAGKSTF

SEQ ID NO: 119734 - protein, 16 aa, Homo sapiens
  CDR3 for beta chain variable domain of TCR clone 59867 (TRBV19, TRBJ2-1)
CASSKAGPSSYNEQFF

SEQ ID NO: 119735 - protein, 12 aa, Homo sapiens
  CDR3 for alpha chain variable domain of TCR clone 59868 (TRAV16, TRAJ22)
CSLEVSARQLTF

SEQ ID NO: 119736 - protein, 14 aa, Homo sapiens
  CDR3 for beta chain variable domain of TCR clone 59868 (TRBV11-2, TRBJ2-3)
CASSSIASTDTQYF

SEQ ID NO: 119737 - protein, 15 aa, Homo sapiens
  CDR3 for alpha chain variable domain of TCR clone 59869 (TRAV35, TRAJ40)
CAGQLGTSGTNKYIF

SEQ ID NO: 119738 - protein, 14 aa, Homo sapiens
  CDR3 for beta chain variable domain of TCR clone 59869 (TRBV7-3, TRBJ2-1)
CASSLAGGTNEQFF

SEQ ID NO: 119739 - protein, 14 aa, Homo sapiens
  CDR3 for alpha chain variable domain of TCR clone 59870 (TRAV4, TRAJ26)
CLVCPHNYGQNFVF

SEQ ID NO: 119740 - protein, 17 aa, Homo sapiens
  CDR3 for beta chain variable domain of TCR clone 59870 (TRBV24-1, TRBJ2-1)
CATSDVSTSGTYNEQFF

SEQ ID NO: 119741 - protein, 16 aa, Homo sapiens
  CDR3 for alpha chain variable domain of TCR clone 59871 (TRAV30, TRAJ24)
CGTEIVDADSWGKFQF

SEQ ID NO: 119742 - protein, 15 aa, Homo sapiens
  CDR3 for beta chain variable domain of TCR clone 59871 (TRBV7-8, TRBJ1-2)
CASSLVRDGGLGYTF

SEQ ID NO: 119743 - protein, 14 aa, Homo sapiens
  CDR3 for alpha chain variable domain of TCR clone 59872 (TRAV4, TRAJ30)
CLVGDMNRDDKIIF

SEQ ID NO: 119744 - protein, 14 aa, Homo sapiens
  CDR3 for beta chain variable domain of TCR clone 59872 (TRBV19, TRBJ2-1)
CASPTFVLSGEQFF

SEQ ID NO: 119745 - protein, 13 aa, Homo sapiens
  CDR3 for alpha chain variable domain of TCR clone 59873 (TRAV13-1, TRAJ27)
CAASTHQCRQINL

SEQ ID NO: 119746 - protein, 16 aa, Homo sapiens
  CDR3 for beta chain variable domain of TCR clone 59873 (TRBV27, TRBJ2-2)
CASSFRGLVRTGEMFF

SEQ ID NO: 119747 - protein, 13 aa, Homo sapiens
  CDR3 for alpha chain variable domain of TCR clone 59874 (TRAV27, TRAJ29)
CAGAHSGNTPLGF

SEQ ID NO: 119748 - protein, 14 aa, Homo sapiens
  CDR3 for beta chain variable domain of TCR clone 59874 (TRBV7-9, TRBJ2-7)
CASSIGQGAGEQYF

SEQ ID NO: 119749 - protein, 18 aa, Homo sapiens
  CDR3 for alpha chain variable domain of TCR clone 59875 (TRAV13-1, TRAJ52)
CAASKRSAGGTSYGKLTF

SEQ ID NO: 119750 - protein, 14 aa, Homo sapiens
  CDR3 for beta chain variable domain of TCR clone 59875 (TRBV20-1, TRBJ1-1)
CSAQTRIGGTEAFF

SEQ ID NO: 119751 - protein, 15 aa, Homo sapiens
  CDR3 for alpha chain variable domain of TCR clone 59876 (TRAV13-1, TRAJ8)
CAASIPNTGFQKLVF

SEQ ID NO: 119752 - protein, 13 aa, Homo sapiens
  CDR3 for beta chain variable domain of TCR clone 59876 (TRBV27, TRBJ1-1)
CASSLSIGAEAFF

SEQ ID NO: 119753 - protein, 14 aa, Homo sapiens
  CDR3 for alpha chain variable domain of TCR clone 59877 (TRAV8-6, TRAJ52)
CDVIGGTSYGKLTF

SEQ ID NO: 119754 - protein, 15 aa, Homo sapiens
  CDR3 for beta chain variable domain of TCR clone 59877 (TRBV11-2, TRBJ2-5)
CASSLGAGGVETQYF

SEQ ID NO: 119755 - protein, 13 aa, Homo sapiens
  CDR3 for alpha chain variable domain of TCR clone 59878 (TRAV10, TRAJ15)
CVVRGQAGTALIF

SEQ ID NO: 119756 - protein, 14 aa, Homo sapiens
  CDR3 for beta chain variable domain of TCR clone 59878 (TRBV7-2, TRBJ2-7)
CASRSQGAAYEQYF

SEQ ID NO: 119757 - protein, 18 aa, Homo sapiens
  CDR3 for alpha chain variable domain of TCR clone 59879 (TRAV3, TRAJ32)
CAVRDIRGYGGATNKLIF

SEQ ID NO: 119758 - protein, 15 aa, Homo sapiens
  CDR3 for beta chain variable domain of TCR clone 59879 (TRBV12-4, TRBJ2-2)
CASSLGVRHTGELFL

SEQ ID NO: 119759 - protein, 15 aa, Homo sapiens
  CDR3 for alpha chain variable domain of TCR clone 59880 (TRAV25, TRAJ53)
CPTSNSGGSNHKLTF

SEQ ID NO: 119760 - protein, 14 aa, Homo sapiens
  CDR3 for beta chain variable domain of TCR clone 59880 (TRBV11-2, TRBJ2-3)
CASSRLARTDTQYF

SEQ ID NO: 119761 - protein, 17 aa, Homo sapiens
  CDR3 for alpha chain variable domain of TCR clone 59881 (TRAV3, TRAJ6)
CAVRDGPRAGGSYIPTF

SEQ ID NO: 119762 - protein, 14 aa, Homo sapiens
  CDR3 for beta chain variable domain of TCR clone 59881 (TRBV7-7, TRBJ2-2)
CATRQDSDTGELFF

SEQ ID NO: 119763 - protein, 15 aa, Homo sapiens
  CDR3 for alpha chain variable domain of TCR clone 59882 (TRAV1-2, TRAJ30)
CAVRPHGNRDDKIIF

SEQ ID NO: 119764 - protein, 15 aa, Homo sapiens
  CDR3 for beta chain variable domain of TCR clone 59882 (TRBV18, TRBJ2-7)
CASSPTFMDSHEQYF

SEQ ID NO: 119765 - protein, 15 aa, Homo sapiens
  CDR3 for alpha chain variable domain of TCR clone 59883 (TRAV12-1, TRAJ44)
CVADVPTGTASKLTF

SEQ ID NO: 119766 - protein, 13 aa, Homo sapiens
  CDR3 for beta chain variable domain of TCR clone 59883 (TRBV6-5, TRBJ2-5)
CASSPQGGETQYF

SEQ ID NO: 119767 - protein, 16 aa, Homo sapiens
  CDR3 for alpha chain variable domain of TCR clone 59884 (TRAV26-1, TRAJ32)
CIVGTNYGGATNKLIF

SEQ ID NO: 119768 - protein, 14 aa, Homo sapiens
  CDR3 for beta chain variable domain of TCR clone 59884 (TRBV6-1, TRBJ1-3)
CASVQGGGGNTIYF

SEQ ID NO: 119769 - protein, 15 aa, Homo sapiens
  CDR3 for alpha chain variable domain of TCR clone 59885 (TRAV26-1, TRAJ29)
CIVRVEGSGNTPLVF

SEQ ID NO: 119770 - protein, 14 aa, Homo sapiens
  CDR3 for beta chain variable domain of TCR clone 59885 (TRBV7-3, TRBJ2-1)
CASSLSGSYNEQFF

SEQ ID NO: 119771 - protein, 11 aa, Homo sapiens
  CDR3 for alpha chain variable domain of TCR clone 59886 (TRAV17, TRAJ9)
CGFTGGFKTIF

SEQ ID NO: 119772 - protein, 14 aa, Homo sapiens
  CDR3 for beta chain variable domain of TCR clone 59886 (TRBV7-9, TRBJ2-2)
CANSLVQDTGELFF

SEQ ID NO: 119773 - protein, 13 aa, Homo sapiens
  CDR3 for alpha chain variable domain of TCR clone 59887 (TRAV13-2, TRAJ53)
CAENMGSNYKLTF

SEQ ID NO: 119774 - protein, 13 aa, Homo sapiens
  CDR3 for beta chain variable domain of TCR clone 59887 (TRBV4-1, TRBJ2-2)
CAGSQENTGELFF

SEQ ID NO: 119775 - protein, 11 aa, Homo sapiens
  CDR3 for alpha chain variable domain of TCR clone 59888 (TRAV12-3, TRAJ11)
CAMKGYSTLTF

SEQ ID NO: 119776 - protein, 16 aa, Homo sapiens
  CDR3 for beta chain variable domain of TCR clone 59888 (TRBV11-2, TRBJ2-3)
CASSLGVSGGQDTRYF

SEQ ID NO: 119777 - protein, 12 aa, Homo sapiens
  CDR3 for alpha chain variable domain of TCR clone 59889 (TRAV21, TRAJ23)
CAVVLQGGKLIF

SEQ ID NO: 119778 - protein, 14 aa, Homo sapiens
  CDR3 for beta chain variable domain of TCR clone 59889 (TRBV7-9, TRBJ1-4)
CAITEGEANEKLFF

SEQ ID NO: 119779 - protein, 12 aa, Homo sapiens
  CDR3 for alpha chain variable domain of TCR clone 59890 (TRAV12-1, TRAJ31)
CVSWNNDARLMF

SEQ ID NO: 119780 - protein, 15 aa, Homo sapiens
  CDR3 for beta chain variable domain of TCR clone 59890 (TRBV7-2, TRBJ1-5)
CASSLDRGQDQPQHF

SEQ ID NO: 119781 - protein, 16 aa, Homo sapiens
  CDR3 for alpha chain variable domain of TCR clone 59891 (TRAV14/DV4, TRAJ54)
CAMREGRVQGAQKLVF

SEQ ID NO: 119782 - protein, 15 aa, Homo sapiens
  CDR3 for beta chain variable domain of TCR clone 59891 (TRBV20-1, TRBJ2-7)
CSARDRVSGMDEQYF

SEQ ID NO: 119783 - protein, 14 aa, Homo sapiens
  CDR3 for alpha chain variable domain of TCR clone 59892 (TRAV8-3, TRAJ4)
CAVGAAGGYNELIF

SEQ ID NO: 119784 - protein, 15 aa, Homo sapiens
  CDR3 for beta chain variable domain of TCR clone 59892 (TRBV6-3, TRBJ2-7)
CASSSPGTVFYEQYF

SEQ ID NO: 119785 - protein, 14 aa, Homo sapiens
  CDR3 for alpha chain variable domain of TCR clone 59893 (TRAV1-2, TRAJ16)
CAVNRFSDGQKLLS

SEQ ID NO: 119786 - protein, 15 aa, Homo sapiens
  CDR3 for beta chain variable domain of TCR clone 59893 (TRBV7-9, TRBJ1-6)
CASSSPGRGNSPLHF

SEQ ID NO: 119787 - protein, 16 aa, Homo sapiens
  CDR3 for alpha chain variable domain of TCR clone 59894 (TRAV3, TRAJ10)
CAVRDMRAGGGNKLTF

SEQ ID NO: 119788 - protein, 19 aa, Homo sapiens
  CDR3 for beta chain variable domain of TCR clone 59894 (TRBV6-3, TRBJ1-2)
CAGSYSKGRTGPPNYGYTF

SEQ ID NO: 119789 - protein, 16 aa, Homo sapiens
  CDR3 for alpha chain variable domain of TCR clone 59895 (TRAV12-2, TRAJ43)
CAGDDMRFGAGTRLTV

SEQ ID NO: 119790 - protein, 20 aa, Homo sapiens
  CDR3 for beta chain variable domain of TCR clone 59895 (TRBV7-8, TRBJ2-2)
CASSHLFPGPTIHITGELFF

SEQ ID NO: 119791 - protein, 17 aa, Homo sapiens
  CDR3 for alpha chain variable domain of TCR clone 59896 (TRAV3, TRAJ42)
CAVRNRDYGGSQGNLIF

SEQ ID NO: 119792 - protein, 18 aa, Homo sapiens
  CDR3 for beta chain variable domain of TCR clone 59896 (TRBV20-1, TRBJ2-3)
CSASGLAGGPGTTDTQYF

SEQ ID NO: 119793 - protein, 13 aa, Homo sapiens
  CDR3 for alpha chain variable domain of TCR clone 59897 (TRAV20, TRAJ34)
CAVRSYNTDELIF

SEQ ID NO: 119794 - protein, 15 aa, Homo sapiens
  CDR3 for beta chain variable domain of TCR clone 59897 (TRBV27, TRBJ1-3)
CASSPSPGSGNTIYF

SEQ ID NO: 119795 - protein, 12 aa, Homo sapiens
  CDR3 for alpha chain variable domain of TCR clone 59898 (TRAV17, TRAJ49)
CATATTGNQFYF

SEQ ID NO: 119796 - protein, 18 aa, Homo sapiens
  CDR3 for beta chain variable domain of TCR clone 59898 (TRBV11-2, TRBJ2-6)
CASSLNPFLGTGANVLTF

SEQ ID NO: 119797 - protein, 14 aa, Homo sapiens
  CDR3 for alpha chain variable domain of TCR clone 59899 (TRAV1-2, TRAJ29)
CAVRELTSATPLVF

SEQ ID NO: 119798 - protein, 13 aa, Homo sapiens
  CDR3 for beta chain variable domain of TCR clone 59899 (TRBV19, TRBJ2-2)
CASSIWSTGELFF

SEQ ID NO: 119799 - protein, 18 aa, Homo sapiens
  CDR3 for alpha chain variable domain of TCR clone 59900 (TRAV26-1, TRAJ56)
CIVGVASRVTGANSKLTF

SEQ ID NO: 119800 - protein, 15 aa, Homo sapiens
  CDR3 for beta chain variable domain of TCR clone 59900 (TRBV7-9, TRBJ2-5)
CASSDTGRGRETQYF

SEQ ID NO: 119801 - protein, 16 aa, Homo sapiens
  CDR3 for alpha chain variable domain of TCR clone 59901 (TRAV26-1, TRAJ37)
CIVRGDGSGNTGKLIF

SEQ ID NO: 119802 - protein, 17 aa, Homo sapiens
  CDR3 for beta chain variable domain of TCR clone 59901 (TRBV4-1, TRBJ2-7)
CASSRDPLGVGGGEQYF

SEQ ID NO: 119803 - protein, 14 aa, Homo sapiens
  CDR3 for alpha chain variable domain of TCR clone 59902 (TRAV4, TRAJ17)
CLVGDMAAGNKLTS

SEQ ID NO: 119804 - protein, 14 aa, Homo sapiens
  CDR3 for beta chain variable domain of TCR clone 59902 (TRBV4-1, TRBJ2-7)
CASSPVAGGDEQYF

SEQ ID NO: 119805 - protein, 12 aa, Homo sapiens
  CDR3 for alpha chain variable domain of TCR clone 59903 (TRAV16, TRAJ10)
CSRTGGGNKLPF

SEQ ID NO: 119806 - protein, 15 aa, Homo sapiens
  CDR3 for beta chain variable domain of TCR clone 59903 (TRBV6-3, TRBJ2-7)
CASSSPGTVFYEQYF

SEQ ID NO: 119807 - protein, 17 aa, Homo sapiens
  CDR3 for alpha chain variable domain of TCR clone 59904 (TRAV12-3, TRAJ6)
CVMSARGGAGGSYIPTF

SEQ ID NO: 119808 - protein, 12 aa, Homo sapiens
  CDR3 for beta chain variable domain of TCR clone 59904 (TRBV12-4, TRBJ2-3)
CASSTLPDTQYF

SEQ ID NO: 119809 - protein, 13 aa, Homo sapiens
  CDR3 for alpha chain variable domain of TCR clone 59905 (TRAV12-1, TRAJ26)
CVVRRNYGQNFVF

SEQ ID NO: 119810 - protein, 14 aa, Homo sapiens
  CDR3 for beta chain variable domain of TCR clone 59905 (TRBV4-3, TRBJ2-1)
CASGLDRAYNEQFF

SEQ ID NO: 119811 - protein, 14 aa, Homo sapiens
  CDR3 for alpha chain variable domain of TCR clone 59906 (TRAV21, TRAJ35)
CAVMPIGFGNVLHC

SEQ ID NO: 119812 - protein, 12 aa, Homo sapiens
  CDR3 for beta chain variable domain of TCR clone 59906 (TRBV7-9, TRBJ2-7)
CAISIKREEQYF

SEQ ID NO: 119813 - protein, 12 aa, Homo sapiens
  CDR3 for alpha chain variable domain of TCR clone 59907 (TRAV3, TRAJ20)
CAVRDGDYKLSF

SEQ ID NO: 119814 - protein, 17 aa, Homo sapiens
  CDR3 for beta chain variable domain of TCR clone 59907 (TRBV20-1, TRBJ2-2)
CSASGSGQGGLTGELFF

SEQ ID NO: 119815 - protein, 14 aa, Homo sapiens
  CDR3 for alpha chain variable domain of TCR clone 59908 (TRAV26-1, TRAJ38)
CIADNAGNNRKLIW

SEQ ID NO: 119816 - protein, 16 aa, Homo sapiens
  CDR3 for beta chain variable domain of TCR clone 59908 (TRBV7-3, TRBJ2-1)
CASSLEGYRSYNEQFF

SEQ ID NO: 119817 - protein, 14 aa, Homo sapiens
  CDR3 for alpha chain variable domain of TCR clone 59909 (TRAV14/DV4, TRAJ15)
CAMRRDQAGTDLIF

SEQ ID NO: 119818 - protein, 11 aa, Homo sapiens
  CDR3 for beta chain variable domain of TCR clone 59909 (TRBV7-2, TRBJ2-7)
CASSSGLWQYF

SEQ ID NO: 119819 - protein, 14 aa, Homo sapiens
  CDR3 for alpha chain variable domain of TCR clone 59910 (TRAV22, TRAJ40)
CAVESTSGTYEYIF

SEQ ID NO: 119820 - protein, 17 aa, Homo sapiens
  CDR3 for beta chain variable domain of TCR clone 59910 (TRBV7-9, TRBJ2-2)
RASSLGVAGMNTGELFF

SEQ ID NO: 119821 - protein, 14 aa, Homo sapiens
  CDR3 for alpha chain variable domain of TCR clone 59911 (TRAV17, TRAJ35)
CATDRPGFGNVLHC

SEQ ID NO: 119822 - protein, 15 aa, Homo sapiens
  CDR3 for beta chain variable domain of TCR clone 59911 (TRBV28, TRBJ2-5)
CASSSGRVTQETQYF

SEQ ID NO: 119823 - protein, 13 aa, Homo sapiens
  CDR3 for alpha chain variable domain of TCR clone 59912 (TRAV8-3, TRAJ28)
CAVGAVGRYQLTF

SEQ ID NO: 119824 - protein, 17 aa, Homo sapiens
  CDR3 for beta chain variable domain of TCR clone 59912 (TRBV11-2, TRBJ2-1)
CASSLYPPGVEYNEQFF

SEQ ID NO: 119825 - protein, 14 aa, Homo sapiens
  CDR3 for alpha chain variable domain of TCR clone 59913 (TRAV23/DV6, TRAJ22)
CADISSGSSRQLTF

SEQ ID NO: 119826 - protein, 16 aa, Homo sapiens
  CDR3 for beta chain variable domain of TCR clone 59913 (TRBV5-7, TRBJ2-5)
CASIRGQTGYQETQYF

SEQ ID NO: 119827 - protein, 14 aa, Homo sapiens
  CDR3 for alpha chain variable domain of TCR clone 59914 (TRAV12-2, TRAJ13)
CAVKKTGGYQKATF

SEQ ID NO: 119828 - protein, 12 aa, Homo sapiens
  CDR3 for beta chain variable domain of TCR clone 59914 (TRBV29-1, TRBJ1-1)
CSESDGNTEAFF

SEQ ID NO: 119829 - protein, 12 aa, Homo sapiens
  CDR3 for alpha chain variable domain of TCR clone 59915 (TRAV17, TRAJ20)
CATALNEYKLSF

SEQ ID NO: 119830 - protein, 12 aa, Homo sapiens
  CDR3 for beta chain variable domain of TCR clone 59915 (TRBV10-3, TRBJ2-7)
CAHGADSGEQYF

SEQ ID NO: 119831 - protein, 14 aa, Homo sapiens
  CDR3 for alpha chain variable domain of TCR clone 59916 (TRAV35, TRAJ33)
CAGSSQDSNYPLIW

SEQ ID NO: 119832 - protein, 15 aa, Homo sapiens
  CDR3 for beta chain variable domain of TCR clone 59916 (TRBV5-1, TRBJ1-4)
FAPAAWKDGNEKLFF

SEQ ID NO: 119833 - protein, 14 aa, Homo sapiens
  CDR3 for alpha chain variable domain of TCR clone 59917 (TRAV8-1, TRAJ5)
CAVSMETGRRALTF

SEQ ID NO: 119834 - protein, 15 aa, Homo sapiens
  CDR3 for beta chain variable domain of TCR clone 59917 (TRBV19, TRBJ2-4)
CASRGPRRGENIQYF

SEQ ID NO: 119835 - protein, 17 aa, Homo sapiens
  CDR3 for alpha chain variable domain of TCR clone 59918 (TRAV26-1, TRAJ53)
CIVRVDDSGGSNYKLTF

SEQ ID NO: 119836 - protein, 17 aa, Homo sapiens
  CDR3 for beta chain variable domain of TCR clone 59918 (TRBV7-9, TRBJ2-3)
CASSLEEAGAYPDTQYF

SEQ ID NO: 119837 - protein, 14 aa, Homo sapiens
  CDR3 for alpha chain variable domain of TCR clone 59919 (TRAV12-1, TRAJ17)
CVVNFKAAGDKLTF

SEQ ID NO: 119838 - protein, 17 aa, Homo sapiens
  CDR3 for beta chain variable domain of TCR clone 59919 (TRBV20-1, TRBJ2-1)
CSASASGLAGSYNEQFF

SEQ ID NO: 119839 - protein, 14 aa, Homo sapiens
  CDR3 for alpha chain variable domain of TCR clone 59920 (TRAV1-2, TRAJ16)
CAVNRFSDGQKLLF

SEQ ID NO: 119840 - protein, 16 aa, Homo sapiens
  CDR3 for beta chain variable domain of TCR clone 59920 (TRBV6-1, TRBJ1-3)
CASVQGGGWKHHIFWR

SEQ ID NO: 119841 - protein, 12 aa, Homo sapiens
  CDR3 for alpha chain variable domain of TCR clone 59921 (TRAV17, TRAJ30)
CVPEGRDDKIIF

SEQ ID NO: 119842 - protein, 14 aa, Homo sapiens
  CDR3 for beta chain variable domain of TCR clone 59921 (TRBV7-7, TRBJ2-2)
CASSRDRSTGELFF

SEQ ID NO: 119843 - protein, 13 aa, Homo sapiens
  CDR3 for alpha chain variable domain of TCR clone 59922 (TRAV1-2, TRAJ9)
CAVLNTGGFKTIF

SEQ ID NO: 119844 - protein, 14 aa, Homo sapiens
  CDR3 for beta chain variable domain of TCR clone 59922 (TRBV20-1, TRBJ2-3)
CSARGGTRTDTQYF

SEQ ID NO: 119845 - protein, 11 aa, Homo sapiens
  CDR3 for alpha chain variable domain of TCR clone 59923 (TRAV3, TRAJ21)
CAVGNFNKFYF

SEQ ID NO: 119846 - protein, 15 aa, Homo sapiens
  CDR3 for beta chain variable domain of TCR clone 59923 (TRBV20-1, TRBJ2-7)
CSARDRVSGMDERYF

SEQ ID NO: 119847 - protein, 12 aa, Homo sapiens
  CDR3 for alpha chain variable domain of TCR clone 59924 (TRAV3, TRAJ20)
CAVRDGDYKLSF

SEQ ID NO: 119848 - protein, 14 aa, Homo sapiens
  CDR3 for beta chain variable domain of TCR clone 59924 (TRBV7-3, TRBJ1-1)
CASSLKGGNTEAFF

SEQ ID NO: 119849 - protein, 13 aa, Homo sapiens
  CDR3 for alpha chain variable domain of TCR clone 59925 (TRAV3, TRAJ21)
CAVREPDFNKFYF

SEQ ID NO: 119850 - protein, 16 aa, Homo sapiens
  CDR3 for beta chain variable domain of TCR clone 59925 (TRBV27, TRBJ2-2)
CASSFRGLVRTGELFS

SEQ ID NO: 119851 - protein, 16 aa, Homo sapiens
  CDR3 for alpha chain variable domain of TCR clone 59926 (TRAV30, TRAJ24)
CGTEIVDADSWGKFQF

SEQ ID NO: 119852 - protein, 14 aa, Homo sapiens
  CDR3 for beta chain variable domain of TCR clone 59926 (TRBV24-1, TRBJ1-1)
CATSIPRGDTEAFF

SEQ ID NO: 119853 - protein, 13 aa, Homo sapiens
  CDR3 for alpha chain variable domain of TCR clone 59927 (TRAV12-1, TRAJ13)
CVVTSGGYQKVTF

SEQ ID NO: 119854 - protein, 13 aa, Homo sapiens
  CDR3 for beta chain variable domain of TCR clone 59927 (TRBV7-3, TRBJ1-1)
CASSQDWGAEAFF

SEQ ID NO: 119855 - protein, 18 aa, Homo sapiens
  CDR3 for alpha chain variable domain of TCR clone 59928 (TRAV12-3, TRAJ52)
CVMSRTNAGGTSYGKLTF

SEQ ID NO: 119856 - protein, 17 aa, Homo sapiens
  CDR3 for beta chain variable domain of TCR clone 59928 (TRBV7-3, TRBJ2-3)
CASSLMKRMRGADTQYF

SEQ ID NO: 119857 - protein, 15 aa, Homo sapiens
  CDR3 for alpha chain variable domain of TCR clone 59929 (TRAV26-1, TRAJ22)
CIVRVSFWFCKATDL

SEQ ID NO: 119858 - protein, 16 aa, Homo sapiens
  CDR3 for beta chain variable domain of TCR clone 59929 (TRBV11-2, TRBJ2-7)
CASSPTTGGVSYEQYF

SEQ ID NO: 119859 - protein, 17 aa, Homo sapiens
  CDR3 for alpha chain variable domain of TCR clone 59930 (TRAV3, TRAJ6)
CAVRDGPRAGGSYIPTF

SEQ ID NO: 119860 - protein, 15 aa, Homo sapiens
  CDR3 for beta chain variable domain of TCR clone 59930 (TRBV7-9, TRBJ1-6)
CASSSPGRGNSSLHF

SEQ ID NO: 119861 - protein, 14 aa, Homo sapiens
  CDR3 for alpha chain variable domain of TCR clone 59931 (TRAV29/DV5, TRAJ36)
CAARRKTGANNLFF

SEQ ID NO: 119862 - protein, 11 aa, Homo sapiens
  CDR3 for beta chain variable domain of TCR clone 59931 (TRBV11-2, TRBJ2-2)
CASSLPGELFF

SEQ ID NO: 119863 - protein, 14 aa, Homo sapiens
  CDR3 for alpha chain variable domain of TCR clone 59932 (TRAV12-2, TRAJ44)
CAVNKAGTASKLTF

SEQ ID NO: 119864 - protein, 13 aa, Homo sapiens
  CDR3 for beta chain variable domain of TCR clone 59932 (TRBV7-9, TRBJ1-2)
CASSLKQNYGYTF

SEQ ID NO: 119865 - protein, 22 aa, Homo sapiens
  CDR3 for alpha chain variable domain of TCR clone 59933 (TRAV26-1, TRAJ30)
CIVRVRTEMTRSSLEKGHDFIF

SEQ ID NO: 119866 - protein, 13 aa, Homo sapiens
  CDR3 for beta chain variable domain of TCR clone 59933 (TRBV7-9, TRBJ1-2)
CASSLKQNYGYTF

SEQ ID NO: 119867 - protein, 12 aa, Homo sapiens
  CDR3 for alpha chain variable domain of TCR clone 59934 (TRAV2, TRAJ33)
CAFMDSNYQVIW

SEQ ID NO: 119868 - protein, 16 aa, Homo sapiens
  CDR3 for beta chain variable domain of TCR clone 59934 (TRBV2, TRBJ2-7)
CASSEPWTGPSYEQYF

SEQ ID NO: 119869 - protein, 13 aa, Homo sapiens
  CDR3 for alpha chain variable domain of TCR clone 59935 (TRAV8-3, TRAJ28)
CAVGAVGSYQLNF

SEQ ID NO: 119870 - protein, 13 aa, Homo sapiens
  CDR3 for beta chain variable domain of TCR clone 59935 (TRBV19, TRBJ1-2)
CASSVPGQDGYTF

SEQ ID NO: 119871 - protein, 14 aa, Homo sapiens
  CDR3 for alpha chain variable domain of TCR clone 59936 (TRAV16, TRAJ48)
CALTPGFGDEKLTF

SEQ ID NO: 119872 - protein, 14 aa, Homo sapiens
  CDR3 for beta chain variable domain of TCR clone 59936 (TRBV7-2, TRBJ2-7)
CASSSISGFSEQYF

SEQ ID NO: 119873 - protein, 14 aa, Homo sapiens
  CDR3 for alpha chain variable domain of TCR clone 59937 (TRAV17, TRAJ16)
CATADFSDGQQLLF

SEQ ID NO: 119874 - protein, 15 aa, Homo sapiens
  CDR3 for beta chain variable domain of TCR clone 59937 (TRBV18, TRBJ2-1)
CASSPPSASYNEQFF

SEQ ID NO: 119875 - protein, 19 aa, Homo sapiens
  CDR3 for alpha chain variable domain of TCR clone 59938 (TRAV2, TRAJ20)
ILQVREADAAVYRDCKLSF

SEQ ID NO: 119876 - protein, 15 aa, Homo sapiens
  CDR3 for beta chain variable domain of TCR clone 59938 (TRBV20-1, TRBJ2-5)
CSAGGTGGLQETQYF

SEQ ID NO: 119877 - protein, 12 aa, Homo sapiens
  CDR3 for alpha chain variable domain of TCR clone 59939 (TRAV13-1, TRAJ21)
FAAKEGFNKFYF

SEQ ID NO: 119878 - protein, 14 aa, Homo sapiens
  CDR3 for beta chain variable domain of TCR clone 59939 (TRBV5-4, TRBJ1-1)
CASSLDSRRDEAFF

SEQ ID NO: 119879 - protein, 12 aa, Homo sapiens
  CDR3 for alpha chain variable domain of TCR clone 59940 (TRAV35, TRAJ39)
LAPNNAGNMLTF

SEQ ID NO: 119880 - protein, 16 aa, Homo sapiens
  CDR3 for beta chain variable domain of TCR clone 59940 (TRBV2, TRBJ2-3)
CASSTSVEGVKDTQYF

SEQ ID NO: 119881 - protein, 13 aa, Homo sapiens
  CDR3 for alpha chain variable domain of TCR clone 59941 (TRAV21, TRAJ49)
CAVRQSTGNQFYF

SEQ ID NO: 119882 - protein, 14 aa, Homo sapiens
  CDR3 for beta chain variable domain of TCR clone 59941 (TRBV12-5, TRBJ2-5)
CASGSRTHQETQYF

SEQ ID NO: 119883 - protein, 12 aa, Homo sapiens
  CDR3 for alpha chain variable domain of TCR clone 59942 (TRAV29/DV5, TRAJ15)
CASNQAGTALIF

SEQ ID NO: 119884 - protein, 15 aa, Homo sapiens
  CDR3 for beta chain variable domain of TCR clone 59942 (TRBV11-2, TRBJ2-2)
CASSSDRVDAGELFF

SEQ ID NO: 119885 - protein, 13 aa, Homo sapiens
  CDR3 for alpha chain variable domain of TCR clone 59943 (TRAV26-1, TRAJ34)
CIVRPWITDKLIS

SEQ ID NO: 119886 - protein, 13 aa, Homo sapiens
  CDR3 for beta chain variable domain of TCR clone 59943 (TRBV5-1, TRBJ2-1)
CASSLGSYNEQFF

SEQ ID NO: 119887 - protein, 14 aa, Homo sapiens
  CDR3 for alpha chain variable domain of TCR clone 59944 (TRAV34, TRAJ44)
CGADGTGTASKLTF

SEQ ID NO: 119888 - protein, 14 aa, Homo sapiens
  CDR3 for beta chain variable domain of TCR clone 59944 (TRBV19, TRBJ2-1)
CASPTFVLSGEQFF

SEQ ID NO: 119889 - protein, 15 aa, Homo sapiens
  CDR3 for alpha chain variable domain of TCR clone 59945 (TRAV13-1, TRAJ17)
CAASIERAAGNKLTF

SEQ ID NO: 119890 - protein, 16 aa, Homo sapiens
  CDR3 for beta chain variable domain of TCR clone 59945 (TRBV12-4, TRBJ2-7)
CASSLIGGTGTYEQYF

SEQ ID NO: 119891 - protein, 10 aa, Homo sapiens
  CDR3 for alpha chain variable domain of TCR clone 59946 (TRAV1-2, TRAJ20)
CACNDYKLSF

SEQ ID NO: 119892 - protein, 16 aa, Homo sapiens
  CDR3 for beta chain variable domain of TCR clone 59946 (TRBV20-1, TRBJ2-1)
CSARDLRQGMNNEQFF

SEQ ID NO: 119893 - protein, 12 aa, Homo sapiens
  CDR3 for alpha chain variable domain of TCR clone 59947 (TRAV13-2, TRAJ42)
CAEGGSQGNLIF

SEQ ID NO: 119894 - protein, 12 aa, Homo sapiens
  CDR3 for beta chain variable domain of TCR clone 59947 (TRBV11-2, TRBJ2-1)
CASSPGNNEQFF

SEQ ID NO: 119895 - protein, 16 aa, Homo sapiens
  CDR3 for alpha chain variable domain of TCR clone 59948 (TRAV12-2, TRAJ32)
CAVNLGQGGATNKIIF

SEQ ID NO: 119896 - protein, 15 aa, Homo sapiens
  CDR3 for beta chain variable domain of TCR clone 59948 (TRBV20-1, TRBJ2-7)
CSARGPLAGGREQYF

SEQ ID NO: 119897 - protein, 12 aa, Homo sapiens
  CDR3 for alpha chain variable domain of TCR clone 59949 (TRAV12-2, TRAJ10)
WGVTGVGNKLTF

SEQ ID NO: 119898 - protein, 16 aa, Homo sapiens
  CDR3 for beta chain variable domain of TCR clone 59949 (TRBV6-4, TRBJ1-2)
CASSEAVGDPNYGYTF

SEQ ID NO: 119899 - protein, 15 aa, Homo sapiens
  CDR3 for alpha chain variable domain of TCR clone 59950 (TRAV8-3, TRAJ42)
CAGTNYGGSQGNLIF

SEQ ID NO: 119900 - protein, 14 aa, Homo sapiens
  CDR3 for beta chain variable domain of TCR clone 59950 (TRBV20-1, TRBJ1-1)
CSAQTRIGGTEAFF

SEQ ID NO: 119901 - protein, 19 aa, Homo sapiens
  CDR3 for alpha chain variable domain of TCR clone 59951 (TRAV1-2, TRAJ16)
LSYNVLDGLEEKDGQKLLF

SEQ ID NO: 119902 - protein, 16 aa, Homo sapiens
  CDR3 for beta chain variable domain of TCR clone 59951 (TRBV7-9, TRBJ2-1)
CASSDVAGGSYNEQFF

SEQ ID NO: 119903 - protein, 14 aa, Homo sapiens
  CDR3 for alpha chain variable domain of TCR clone 59952 (TRAV26-1, TRAJ34)
CIVRVAYNTDKLIF

SEQ ID NO: 119904 - protein, 13 aa, Homo sapiens
  CDR3 for beta chain variable domain of TCR clone 59952 (TRBV4-2, TRBJ1-1)
CANSQAGNTEAFF

SEQ ID NO: 119905 - protein, 14 aa, Homo sapiens
  CDR3 for alpha chain variable domain of TCR clone 59953 (TRAV8-4, TRAJ48)
CAASETFGNEKLTF

SEQ ID NO: 119906 - protein, 14 aa, Homo sapiens
  CDR3 for beta chain variable domain of TCR clone 59953 (TRBV13, TRBJ2-7)
CASSLKGASYEQYF

SEQ ID NO: 119907 - protein, 15 aa, Homo sapiens
  CDR3 for alpha chain variable domain of TCR clone 59954 (TRAV1-2, TRAJ30)
CAVSPHGNRDDKIIF

SEQ ID NO: 119908 - protein, 13 aa, Homo sapiens
  CDR3 for beta chain variable domain of TCR clone 59954 (TRBV4-1, TRBJ2-7)
CASSQGQAYEQYF

SEQ ID NO: 119909 - protein, 12 aa, Homo sapiens
  CDR3 for alpha chain variable domain of TCR clone 59955 (TRAV21, TRAJ3)
CCFYSSASKIIF

SEQ ID NO: 119910 - protein, 16 aa, Homo sapiens
  CDR3 for beta chain variable domain of TCR clone 59955 (TRBV19, TRBJ2-1)
CASSKAGPSSYNEQSF

SEQ ID NO: 119911 - protein, 13 aa, Homo sapiens
  CDR3 for alpha chain variable domain of TCR clone 59956 (TRAV12-1, TRAJ23)
CGEHSGRKAYLRT

SEQ ID NO: 119912 - protein, 15 aa, Homo sapiens
  CDR3 for beta chain variable domain of TCR clone 59956 (TRBV7-2, TRBJ2-7)
CASSSVSSGSYEQYF

SEQ ID NO: 119913 - protein, 13 aa, Homo sapiens
  CDR3 for alpha chain variable domain of TCR clone 59957 (TRAV30, TRAJ39)
CGTEKNTGNMLTF

SEQ ID NO: 119914 - protein, 12 aa, Homo sapiens
  CDR3 for beta chain variable domain of TCR clone 59957 (TRBV12-4, TRBJ2-5)
CASGSAQETQYF

SEQ ID NO: 119915 - protein, 14 aa, Homo sapiens
  CDR3 for alpha chain variable domain of TCR clone 59958 (TRAV12-3, TRAJ10)
SHLPLTGGGNKLTF

SEQ ID NO: 119916 - protein, 16 aa, Homo sapiens
  CDR3 for beta chain variable domain of TCR clone 59958 (TRBV12-4, TRBJ2-5)
CASSWRPSGDLETQCF

SEQ ID NO: 119917 - protein, 15 aa, Homo sapiens
  CDR3 for alpha chain variable domain of TCR clone 59959 (TRAV17, TRAJ22)
CATVAPSGSARQLTF

SEQ ID NO: 119918 - protein, 14 aa, Homo sapiens
  CDR3 for beta chain variable domain of TCR clone 59959 (TRBV20-1, TRBJ1-5)
CSARDGGSGRPQHF

SEQ ID NO: 119919 - protein, 15 aa, Homo sapiens
  CDR3 for alpha chain variable domain of TCR clone 59960 (TRAV23/DV6, TRAJ37)
CAAGEGSSNTGKLIF

SEQ ID NO: 119920 - protein, 17 aa, Homo sapiens
  CDR3 for beta chain variable domain of TCR clone 59960 (TRBV20-1, TRBJ2-7)
CSTTRAGGVAGVEEQYF

SEQ ID NO: 119921 - protein, 15 aa, Homo sapiens
  CDR3 for alpha chain variable domain of TCR clone 59961 (TRAV8-3, TRAJ45)
CASSYSGGGADGLTF

SEQ ID NO: 119922 - protein, 15 aa, Homo sapiens
  CDR3 for beta chain variable domain of TCR clone 59961 (TRBV27, TRBJ1-4)
CASSPRHATNEKMFF

SEQ ID NO: 119923 - protein, 14 aa, Homo sapiens
  CDR3 for alpha chain variable domain of TCR clone 59962 (TRAV1-2, TRAJ16)
CAVNRFSDGQKLLF

SEQ ID NO: 119924 - protein, 15 aa, Homo sapiens
  CDR3 for beta chain variable domain of TCR clone 59962 (TRBV7-6, TRBJ1-2)
CASSSGGRGGYGYTF

SEQ ID NO: 119925 - protein, 15 aa, Homo sapiens
  CDR3 for alpha chain variable domain of TCR clone 59963 (TRAV35, TRAJ40)
CAGQLGTSGTYKYIF

SEQ ID NO: 119926 - protein, 13 aa, Homo sapiens
  CDR3 for beta chain variable domain of TCR clone 59963 (TRBV20-1, TRBJ1-6)
CSAPLGVGSPLHF

SEQ ID NO: 119927 - protein, 12 aa, Homo sapiens
  CDR3 for alpha chain variable domain of TCR clone 59964 (TRAV3, TRAJ39)
CAVIEWSNILTF

SEQ ID NO: 119928 - protein, 14 aa, Homo sapiens
  CDR3 for beta chain variable domain of TCR clone 59964 (TRBV7-8, TRBJ2-3)
CASSFPDGQDTQYF

SEQ ID NO: 119929 - protein, 14 aa, Homo sapiens
  CDR3 for alpha chain variable domain of TCR clone 59965 (TRAV17, TRAJ4)
CATAPLGGYNKLIF

SEQ ID NO: 119930 - protein, 13 aa, Homo sapiens
  CDR3 for beta chain variable domain of TCR clone 59965 (TRBV12-4, TRBJ1-3)
CASSLANGNTIYF

SEQ ID NO: 119931 - protein, 12 aa, Homo sapiens
  CDR3 for alpha chain variable domain of TCR clone 59966 (TRAV3, TRAJ10)
CASTGGGNKLTF

SEQ ID NO: 119932 - protein, 14 aa, Homo sapiens
  CDR3 for beta chain variable domain of TCR clone 59966 (TRBV7-2, TRBJ2-2)
CASRGQGAAGELFF

SEQ ID NO: 119933 - protein, 14 aa, Homo sapiens
  CDR3 for alpha chain variable domain of TCR clone 59967 (TRAV38-1, TRAJ45)
CASHSGRGADGLTF

SEQ ID NO: 119934 - protein, 13 aa, Homo sapiens
  CDR3 for beta chain variable domain of TCR clone 59967 (TRBV10-3, TRBJ1-2)
CAISERDSYGYTF

SEQ ID NO: 119935 - protein, 11 aa, Homo sapiens
  CDR3 for alpha chain variable domain of TCR clone 59968 (TRAV2, TRAJ13)
CASGGYQKVTL

SEQ ID NO: 119936 - protein, 15 aa, Homo sapiens
  CDR3 for beta chain variable domain of TCR clone 59968 (TRBV11-2, TRBJ2-2)
CASSSDRVNAGELFF

SEQ ID NO: 119937 - protein, 14 aa, Homo sapiens
  CDR3 for alpha chain variable domain of TCR clone 59969 (TRAV38-1, TRAJ40)
CALRPTSGTYKYIF

SEQ ID NO: 119938 - protein, 14 aa, Homo sapiens
  CDR3 for beta chain variable domain of TCR clone 59969 (TRBV25-1, TRBJ1-1)
CASTHMGGNTEAFF

SEQ ID NO: 119939 - protein, 15 aa, Homo sapiens
  CDR3 for alpha chain variable domain of TCR clone 59970 (TRAV17, TRAJ57)
CATGPSQGGSEKLVF

SEQ ID NO: 119940 - protein, 14 aa, Homo sapiens
  CDR3 for beta chain variable domain of TCR clone 59970 (TRBV12-5, TRBJ2-5)
CASGSRTHRETQYF

SEQ ID NO: 119941 - protein, 13 aa, Homo sapiens
  CDR3 for alpha chain variable domain of TCR clone 59971 (TRAV36/DV7, TRAJ49)
CAGIRTPVTSSIL

SEQ ID NO: 119942 - protein, 16 aa, Homo sapiens
  CDR3 for beta chain variable domain of TCR clone 59971 (TRBV5-1, TRBJ1-1)
CASSKTGTEVGTEAFF

SEQ ID NO: 119943 - protein, 17 aa, Homo sapiens
  CDR3 for alpha chain variable domain of TCR clone 59972 (TRAV4, TRAJ18)
CPVGERSVGSTLGRLYF

SEQ ID NO: 119944 - protein, 14 aa, Homo sapiens
  CDR3 for beta chain variable domain of TCR clone 59972 (TRBV6-5, TRBJ1-2)
CASSYDGTGGGYTF

SEQ ID NO: 119945 - protein, 12 aa, Homo sapiens
  CDR3 for alpha chain variable domain of TCR clone 59973 (TRAV12-2, TRAJ31)
CAVNTPDARLMF

SEQ ID NO: 119946 - protein, 15 aa, Homo sapiens
  CDR3 for beta chain variable domain of TCR clone 59973 (TRBV4-2, TRBJ1-1)
CASSQDQGLNTGAFF

SEQ ID NO: 119947 - protein, 15 aa, Homo sapiens
  CDR3 for alpha chain variable domain of TCR clone 59974 (TRAV21, TRAJ53)
CATLNSGGSNYKLTL

SEQ ID NO: 119948 - protein, 15 aa, Homo sapiens
  CDR3 for beta chain variable domain of TCR clone 59974 (TRBV20-1, TRBJ2-7)
CSARDRVSGMDEQYF

SEQ ID NO: 119949 - protein, 15 aa, Homo sapiens
  CDR3 for alpha chain variable domain of TCR clone 59975 (TRAV12-1, TRAJ44)
CVADLPTSTASKLTF

SEQ ID NO: 119950 - protein, 13 aa, Homo sapiens
  CDR3 for beta chain variable domain of TCR clone 59975 (TRBV20-1, TRBJ2-5)
CSARGDYQETQYF

SEQ ID NO: 119951 - protein, 16 aa, Homo sapiens
  CDR3 for alpha chain variable domain of TCR clone 59976 (TRAV26-1, TRAJ23)
CIVRVERYNQGGKLIF

SEQ ID NO: 119952 - protein, 15 aa, Homo sapiens
  CDR3 for beta chain variable domain of TCR clone 59976 (TRBV18, TRBJ2-7)
CASSPRGGRGYEQYF

SEQ ID NO: 119953 - protein, 16 aa, Homo sapiens
  CDR3 for alpha chain variable domain of TCR clone 59977 (TRAV14/DV4, TRAJ12)
CAMREVLMDSGYKLIF

SEQ ID NO: 119954 - protein, 14 aa, Homo sapiens
  CDR3 for beta chain variable domain of TCR clone 59977 (TRBV7-2, TRBJ2-5)
CASSFTQGQETQYF

SEQ ID NO: 119955 - protein, 14 aa, Homo sapiens
  CDR3 for alpha chain variable domain of TCR clone 59978 (TRAV12-1, TRAJ17)
CVVNYKAAGNKLTF

SEQ ID NO: 119956 - protein, 13 aa, Homo sapiens
  CDR3 for beta chain variable domain of TCR clone 59978 (TRBV12-5, TRBJ2-3)
CASGDRQSDTQYF

SEQ ID NO: 119957 - protein, 11 aa, Homo sapiens
  CDR3 for alpha chain variable domain of TCR clone 59979 (TRAV21, TRAJ11)
CAVNGYSTLTI

SEQ ID NO: 119958 - protein, 16 aa, Homo sapiens
  CDR3 for beta chain variable domain of TCR clone 59979 (TRBV4-3, TRBJ2-2)
CASSHLQGSGTGELFF

SEQ ID NO: 119959 - protein, 14 aa, Homo sapiens
  CDR3 for alpha chain variable domain of TCR clone 59980 (TRAV12-2, TRAJ40)
CAVKIPSGAYKYIF

SEQ ID NO: 119960 - protein, 12 aa, Homo sapiens
  CDR3 for beta chain variable domain of TCR clone 59980 (TRBV11-2, TRBJ2-2)
CASSLGGGELFF

SEQ ID NO: 119961 - protein, 16 aa, Homo sapiens
  CDR3 for alpha chain variable domain of TCR clone 59981 (TRAV27, TRAJ13)
CAGAKSDSGGYQKVTF

SEQ ID NO: 119962 - protein, 15 aa, Homo sapiens
  CDR3 for beta chain variable domain of TCR clone 59981 (TRBV29-1, TRBJ2-1)
YSVGRHALFYNEQFF

SEQ ID NO: 119963 - protein, 14 aa, Homo sapiens
  CDR3 for alpha chain variable domain of TCR clone 59982 (TRAV12-3, TRAJ41)
CAVSAGNSGYALNF

SEQ ID NO: 119964 - protein, 11 aa, Homo sapiens
  CDR3 for beta chain variable domain of TCR clone 59982 (TRBV7-2, TRBJ2-3)
CASSSSDTQYF

SEQ ID NO: 119965 - protein, 15 aa, Homo sapiens
  CDR3 for alpha chain variable domain of TCR clone 59983 (TRAV26-1, TRAJ44)
CIARVPFGTASKLTF

SEQ ID NO: 119966 - protein, 18 aa, Homo sapiens
  CDR3 for beta chain variable domain of TCR clone 59983 (TRBV4-1, TRBJ1-5)
CASSQDPRGQGLNQPQHF

SEQ ID NO: 119967 - protein, 13 aa, Homo sapiens
  CDR3 for alpha chain variable domain of TCR clone 59984 (TRAV3, TRAJ30)
CAVRDRGDDKIIF

SEQ ID NO: 119968 - protein, 16 aa, Homo sapiens
  CDR3 for beta chain variable domain of TCR clone 59984 (TRBV7-3, TRBJ2-2)
CASGLKRGTLSGELFF

SEQ ID NO: 119969 - protein, 15 aa, Homo sapiens
  CDR3 for alpha chain variable domain of TCR clone 59985 (TRAV8-3, TRAJ44)
LWVRLYTGTASKLTF

SEQ ID NO: 119970 - protein, 15 aa, Homo sapiens
  CDR3 for beta chain variable domain of TCR clone 59985 (TRBV6-5, TRBJ1-2)
CASSYSQAFNYGYTF

SEQ ID NO: 119971 - protein, 14 aa, Homo sapiens
  CDR3 for alpha chain variable domain of TCR clone 59986 (TRAV1-2, TRAJ8)
CAVREDTGFQKLVF

SEQ ID NO: 119972 - protein, 12 aa, Homo sapiens
  CDR3 for beta chain variable domain of TCR clone 59986 (TRBV11-2, TRBJ2-2)
CASSLGGGELLF

SEQ ID NO: 119973 - protein, 11 aa, Homo sapiens
  CDR3 for alpha chain variable domain of TCR clone 59987 (TRAV2, TRAJ33)
CAVESNYQLIW

SEQ ID NO: 119974 - protein, 15 aa, Homo sapiens
  CDR3 for beta chain variable domain of TCR clone 59987 (TRBV19, TRBJ1-1)
CASTSGQIQNTEDFF

SEQ ID NO: 119975 - protein, 12 aa, Homo sapiens
  CDR3 for alpha chain variable domain of TCR clone 59988 (TRAV12-3, TRAJ17)
CAMTLTGNKLTF

SEQ ID NO: 119976 - protein, 14 aa, Homo sapiens
  CDR3 for beta chain variable domain of TCR clone 59988 (TRBV7-9, TRBJ2-2)
CASSLVQDTGELFF

SEQ ID NO: 119977 - protein, 12 aa, Homo sapiens
  CDR3 for alpha chain variable domain of TCR clone 59989 (TRAV12-1, TRAJ23)
CVVNDQGGKLIF

SEQ ID NO: 119978 - protein, 16 aa, Homo sapiens
  CDR3 for beta chain variable domain of TCR clone 59989 (TRBV11-1, TRBJ2-7)
CASSAQTGTLSYEQYF

SEQ ID NO: 119979 - protein, 16 aa, Homo sapiens
  CDR3 for alpha chain variable domain of TCR clone 59990 (TRAV12-3, TRAJ53)
CAMSPGSGGSNYKLTF

SEQ ID NO: 119980 - protein, 16 aa, Homo sapiens
  CDR3 for beta chain variable domain of TCR clone 59990 (TRBV4-2, TRBJ1-1)
CASSQAGFGMDTEAFF

SEQ ID NO: 119981 - protein, 14 aa, Homo sapiens
  CDR3 for alpha chain variable domain of TCR clone 59991 (TRAV1-2, TRAJ16)
CAVNRFSDGQKLPF

SEQ ID NO: 119982 - protein, 16 aa, Homo sapiens
  CDR3 for beta chain variable domain of TCR clone 59991 (TRBV20-1, TRBJ1-4)
CSAPGQGLLTNEKLFF

SEQ ID NO: 119983 - protein, 19 aa, Homo sapiens
  CDR3 for alpha chain variable domain of TCR clone 59992 (TRAV29/DV5, TRAJ49)
CSVLLCSKLTVDTGNQFYF

SEQ ID NO: 119984 - protein, 16 aa, Homo sapiens
  CDR3 for beta chain variable domain of TCR clone 59992 (TRBV7-3, TRBJ2-2)
CASSLKRGTLPGELFF

SEQ ID NO: 119985 - protein, 14 aa, Homo sapiens
  CDR3 for alpha chain variable domain of TCR clone 59993 (TRAV1-2, TRAJ16)
CAVNRFSDGQKLLF

SEQ ID NO: 119986 - protein, 15 aa, Homo sapiens
  CDR3 for beta chain variable domain of TCR clone 59993 (TRBV12-4, TRBJ1-2)
CASSPITGGGYGYTF

SEQ ID NO: 119987 - protein, 13 aa, Homo sapiens
  CDR3 for alpha chain variable domain of TCR clone 59994 (TRAV21, TRAJ27)
CAARPGNAGKSTF

SEQ ID NO: 119988 - protein, 13 aa, Homo sapiens
  CDR3 for beta chain variable domain of TCR clone 59994 (TRBV13, TRBJ2-5)
CASSPEVGETQYF

SEQ ID NO: 119989 - protein, 14 aa, Homo sapiens
  CDR3 for alpha chain variable domain of TCR clone 59995 (TRAV2, TRAJ41)
CAVGSSNSGYALNF

SEQ ID NO: 119990 - protein, 13 aa, Homo sapiens
  CDR3 for beta chain variable domain of TCR clone 59995 (TRBV4-1, TRBJ2-1)
CASSQEVQYEQFF

SEQ ID NO: 119991 - protein, 13 aa, Homo sapiens
  CDR3 for alpha chain variable domain of TCR clone 59996 (TRAV17, TRAJ7)
CATDNYGNNRLAF

SEQ ID NO: 119992 - protein, 16 aa, Homo sapiens
  CDR3 for beta chain variable domain of TCR clone 59996 (TRBV4-1, TRBJ2-5)
CASSQAIAASSATQYF

SEQ ID NO: 119993 - protein, 16 aa, Homo sapiens
  CDR3 for alpha chain variable domain of TCR clone 59997 (TRAV17, TRAJ36)
CATVSLNWGKQPLLWD

SEQ ID NO: 119994 - protein, 13 aa, Homo sapiens
  CDR3 for beta chain variable domain of TCR clone 59997 (TRBV4-1, TRBJ1-1)
CASSQLGTGGAFF

SEQ ID NO: 119995 - protein, 16 aa, Homo sapiens
  CDR3 for alpha chain variable domain of TCR clone 59998 (TRAV13-1, TRAJ48)
CAASIFGNFGNEKLTL

SEQ ID NO: 119996 - protein, 14 aa, Homo sapiens
  CDR3 for beta chain variable domain of TCR clone 59998 (TRBV24-1, TRBJ1-1)
CATSIPRGDTEAFF

SEQ ID NO: 119997 - protein, 12 aa, Homo sapiens
  CDR3 for alpha chain variable domain of TCR clone 59999 (TRAV16, TRAJ26)
CALRSYGQNFVF

SEQ ID NO: 119998 - protein, 14 aa, Homo sapiens
  CDR3 for beta chain variable domain of TCR clone 59999 (TRBV10-3, TRBJ2-1)
CASSSDLAYNEQFF

SEQ ID NO: 119999 - protein, 16 aa, Homo sapiens
  CDR3 for alpha chain variable domain of TCR clone 60000 (TRAV3, TRAJ37)
CAVRVRGSGNTGKLIF

SEQ ID NO: 120000 - protein, 13 aa, Homo sapiens
  CDR3 for beta chain variable domain of TCR clone 60000 (TRBV11-2, TRBJ1-1)
CASRWTVNTEAFF

SEQ ID NO: 120001 - protein, 12 aa, Homo sapiens
  CDR3 for alpha chain variable domain of TCR clone 60001 (TRAV2, TRAJ10)
RASTGGGNKLTF

SEQ ID NO: 120002 - protein, 13 aa, Homo sapiens
  CDR3 for beta chain variable domain of TCR clone 60001 (TRBV19, TRBJ1-5)
CASSMRGYQPQHF

SEQ ID NO: 120003 - protein, 12 aa, Homo sapiens
  CDR3 for alpha chain variable domain of TCR clone 60002 (TRAV2, TRAJ33)
CAVEDSNYQLTW

SEQ ID NO: 120004 - protein, 14 aa, Homo sapiens
  CDR3 for beta chain variable domain of TCR clone 60002 (TRBV19, TRBJ1-4)
CASSINRGGEKLFF

SEQ ID NO: 120005 - protein, 14 aa, Homo sapiens
  CDR3 for alpha chain variable domain of TCR clone 60003 (TRAV17, TRAJ22)
CATSPSGSARQLTF

SEQ ID NO: 120006 - protein, 13 aa, Homo sapiens
  CDR3 for beta chain variable domain of TCR clone 60003 (TRBV7-3, TRBJ1-1)
CASSQDWGAEAFF

SEQ ID NO: 120007 - protein, 11 aa, Homo sapiens
  CDR3 for alpha chain variable domain of TCR clone 60004 (TRAV1-2, TRAJ20)
CAVANDYKLSF

SEQ ID NO: 120008 - protein, 17 aa, Homo sapiens
  CDR3 for beta chain variable domain of TCR clone 60004 (TRBV20-1, TRBJ2-2)
CSASGSGQGGLTGELFF

SEQ ID NO: 120009 - protein, 14 aa, Homo sapiens
  CDR3 for alpha chain variable domain of TCR clone 60005 (TRAV38-1, TRAJ45)
YAYYSGGGADGLTF

SEQ ID NO: 120010 - protein, 20 aa, Homo sapiens
  CDR3 for beta chain variable domain of TCR clone 60005 (TRBV28, TRBJ2-1)
CASTPIGRSPGLAGGNEQFF

SEQ ID NO: 120011 - protein, 12 aa, Homo sapiens
  CDR3 for alpha chain variable domain of TCR clone 60006 (TRAV29/DV5, TRAJ49)
CAATDTGNQFYF

SEQ ID NO: 120012 - protein, 19 aa, Homo sapiens
  CDR3 for beta chain variable domain of TCR clone 60006 (TRBV25-1, TRBJ2-2)
CAILVYRVDRGRKTGEMFF

SEQ ID NO: 120013 - protein, 14 aa, Homo sapiens
  CDR3 for alpha chain variable domain of TCR clone 60007 (TRAV8-2, TRAJ4)
CVVSPSGGYKKLIF

SEQ ID NO: 120014 - protein, 15 aa, Homo sapiens
  CDR3 for beta chain variable domain of TCR clone 60007 (TRBV4-1, TRBJ1-4)
CASSDTGGTNEKLFF

SEQ ID NO: 120015 - protein, 14 aa, Homo sapiens
  CDR3 for alpha chain variable domain of TCR clone 60008 (TRAV13-1, TRAJ44)
CAAKATGTASKLTF

SEQ ID NO: 120016 - protein, 14 aa, Homo sapiens
  CDR3 for beta chain variable domain of TCR clone 60008 (TRBV19, TRBJ2-2)
CASGTLHRSGELFF

SEQ ID NO: 120017 - protein, 12 aa, Homo sapiens
  CDR3 for alpha chain variable domain of TCR clone 60009 (TRAV27, TRAJ35)
CAGADCGNVLHC

SEQ ID NO: 120018 - protein, 15 aa, Homo sapiens
  CDR3 for beta chain variable domain of TCR clone 60009 (TRBV20-1, TRBJ2-7)
CSARDRVSGMDEQYF

SEQ ID NO: 120019 - protein, 16 aa, Homo sapiens
  CDR3 for alpha chain variable domain of TCR clone 60010 (TRAV30, TRAJ24)
CGTEIVDADSWGKFQF

SEQ ID NO: 120020 - protein, 13 aa, Homo sapiens
  CDR3 for beta chain variable domain of TCR clone 60010 (TRBV9, TRBJ2-7)
CASSVAEYYEQYF

SEQ ID NO: 120021 - protein, 11 aa, Homo sapiens
  CDR3 for alpha chain variable domain of TCR clone 60011 (TRAV23/DV6, TRAJ17)
CKWATGNKLTF

SEQ ID NO: 120022 - protein, 14 aa, Homo sapiens
  CDR3 for beta chain variable domain of TCR clone 60011 (TRBV6-1, TRBJ2-7)
CASSGGSYLYEQYF

SEQ ID NO: 120023 - protein, 15 aa, Homo sapiens
  CDR3 for alpha chain variable domain of TCR clone 60012 (TRAV12-1, TRAJ45)
CVVLSGGGGADGLTF

SEQ ID NO: 120024 - protein, 14 aa, Homo sapiens
  CDR3 for beta chain variable domain of TCR clone 60012 (TRBV11-2, TRBJ2-5)
CASSRTVGIETQYF

SEQ ID NO: 120025 - protein, 14 aa, Homo sapiens
  CDR3 for alpha chain variable domain of TCR clone 60013 (TRAV17, TRAJ12)
CATDEKDSSYKLIF

SEQ ID NO: 120026 - protein, 16 aa, Homo sapiens
  CDR3 for beta chain variable domain of TCR clone 60013 (TRBV11-2, TRBJ2-1)
CASSPRLAGVCNEQFF

SEQ ID NO: 120027 - protein, 14 aa, Homo sapiens
  CDR3 for alpha chain variable domain of TCR clone 60014 (TRAV13-1, TRAJ44)
CAAKATGTASKLTF

SEQ ID NO: 120028 - protein, 17 aa, Homo sapiens
  CDR3 for beta chain variable domain of TCR clone 60014 (TRBV7-3, TRBJ2-3)
CASSLMKRMRGSDTQYF

SEQ ID NO: 120029 - protein, 15 aa, Homo sapiens
  CDR3 for alpha chain variable domain of TCR clone 60015 (TRAV3, TRAJ45)
CAVRTPWGGADGLTF

SEQ ID NO: 120030 - protein, 16 aa, Homo sapiens
  CDR3 for beta chain variable domain of TCR clone 60015 (TRBV6-1, TRBJ2-2)
CASSFGQGANTGELFL

SEQ ID NO: 120031 - protein, 16 aa, Homo sapiens
  CDR3 for alpha chain variable domain of TCR clone 60016 (TRAV16, TRAJ52)
CALSAAGGTSYGKLTF

SEQ ID NO: 120032 - protein, 12 aa, Homo sapiens
  CDR3 for beta chain variable domain of TCR clone 60016 (TRBV12-4, TRBJ1-3)
CASSFSGNTIDF

SEQ ID NO: 120033 - protein, 14 aa, Homo sapiens
  CDR3 for alpha chain variable domain of TCR clone 60017 (TRAV17, TRAJ35)
CATWTIGLGMCCIA

SEQ ID NO: 120034 - protein, 15 aa, Homo sapiens
  CDR3 for beta chain variable domain of TCR clone 60017 (TRBV7-2, TRBJ2-5)
CASSPLGLDKETQYF

SEQ ID NO: 120035 - protein, 14 aa, Homo sapiens
  CDR3 for alpha chain variable domain of TCR clone 60018 (TRAV30, TRAJ26)
CGTEIVSYGQNFVF

SEQ ID NO: 120036 - protein, 14 aa, Homo sapiens
  CDR3 for beta chain variable domain of TCR clone 60018 (TRBV19, TRBJ2-1)
CASPTFVLGGEQFF

SEQ ID NO: 120037 - protein, 11 aa, Homo sapiens
  CDR3 for alpha chain variable domain of TCR clone 60019 (TRAV12-3, TRAJ43)
CAMSVSNDMRI

SEQ ID NO: 120038 - protein, 13 aa, Homo sapiens
  CDR3 for beta chain variable domain of TCR clone 60019 (TRBV27, TRBJ1-4)
CASSLMGDEKLFF

SEQ ID NO: 120039 - protein, 14 aa, Homo sapiens
  CDR3 for alpha chain variable domain of TCR clone 60020 (TRAV12-2, TRAJ11)
CAVEGGSGYSTLTF

SEQ ID NO: 120040 - protein, 14 aa, Homo sapiens
  CDR3 for beta chain variable domain of TCR clone 60020 (TRBV7-3, TRBJ1-1)
CASSLKGGNTEAFF

SEQ ID NO: 120041 - protein, 14 aa, Homo sapiens
  CDR3 for alpha chain variable domain of TCR clone 60021 (TRAV13-1, TRAJ35)
CAASKGGFGNVLHC

SEQ ID NO: 120042 - protein, 15 aa, Homo sapiens
  CDR3 for beta chain variable domain of TCR clone 60021 (TRBV28, TRBJ2-1)
CACSGLAEVDNEQFF

SEQ ID NO: 120043 - protein, 13 aa, Homo sapiens
  CDR3 for alpha chain variable domain of TCR clone 60022 (TRAV8-3, TRAJ4)
WVFHSGGYNKLIF

SEQ ID NO: 120044 - protein, 14 aa, Homo sapiens
  CDR3 for beta chain variable domain of TCR clone 60022 (TRBV7-9, TRBJ2-3)
CASSLEDGTDTQYF

SEQ ID NO: 120045 - protein, 11 aa, Homo sapiens
  CDR3 for alpha chain variable domain of TCR clone 60023 (TRAV1-2, TRAJ20)
CAVANDYKLSF

SEQ ID NO: 120046 - protein, 16 aa, Homo sapiens
  CDR3 for beta chain variable domain of TCR clone 60023 (TRBV12-4, TRBJ1-5)
CASSSGPRGSNQPQHF

SEQ ID NO: 120047 - protein, 15 aa, Homo sapiens
  CDR3 for alpha chain variable domain of TCR clone 60024 (TRAV12-3, TRAJ6)
CAMSATTGGSYIPTF

SEQ ID NO: 120048 - protein, 15 aa, Homo sapiens
  CDR3 for beta chain variable domain of TCR clone 60024 (TRBV4-1, TRBJ1-4)
CASSDTGGTNEKLFF

SEQ ID NO: 120049 - protein, 13 aa, Homo sapiens
  CDR3 for alpha chain variable domain of TCR clone 60025 (TRAV17, TRAJ7)
CATDNYGNNRPAF

SEQ ID NO: 120050 - protein, 13 aa, Homo sapiens
  CDR3 for beta chain variable domain of TCR clone 60025 (TRBV27, TRBJ2-1)
CASSSGSYNEQFF

SEQ ID NO: 120051 - protein, 16 aa, Homo sapiens
  CDR3 for alpha chain variable domain of TCR clone 60026 (TRAV3, TRAJ10)
CAVRDMRAGGGKKLTF

SEQ ID NO: 120052 - protein, 14 aa, Homo sapiens
  CDR3 for beta chain variable domain of TCR clone 60026 (TRBV25-1, TRBJ1-1)
CASTHLGGNTEAFF

SEQ ID NO: 120053 - protein, 14 aa, Homo sapiens
  CDR3 for alpha chain variable domain of TCR clone 60027 (TRAV12-2, TRAJ33)
RAVKRARSSYQLIW

SEQ ID NO: 120054 - protein, 12 aa, Homo sapiens
  CDR3 for beta chain variable domain of TCR clone 60027 (TRBV24-1, TRBJ2-3)
CATSDSTDTQYF

SEQ ID NO: 120055 - protein, 12 aa, Homo sapiens
  CDR3 for alpha chain variable domain of TCR clone 60028 (TRAV26-2, TRAJ47)
CILVEHGNKLVF

SEQ ID NO: 120056 - protein, 16 aa, Homo sapiens
  CDR3 for beta chain variable domain of TCR clone 60028 (TRBV18, TRBJ1-4)
CASSPLVGDRAEKLFF

SEQ ID NO: 120057 - protein, 13 aa, Homo sapiens
  CDR3 for alpha chain variable domain of TCR clone 60029 (TRAV12-3, TRAJ7)
CEMSASGNNRLAF

SEQ ID NO: 120058 - protein, 14 aa, Homo sapiens
  CDR3 for beta chain variable domain of TCR clone 60029 (TRBV13, TRBJ2-5)
CASSLGPRGETQYF

SEQ ID NO: 120059 - protein, 13 aa, Homo sapiens
  CDR3 for alpha chain variable domain of TCR clone 60030 (TRAV26-1, TRAJ52)
CIVRVEGAGGTSY

SEQ ID NO: 120060 - protein, 13 aa, Homo sapiens
  CDR3 for beta chain variable domain of TCR clone 60030 (TRBV7-3, TRBJ1-2)
CASSLKRGYGYTF

SEQ ID NO: 120061 - protein, 14 aa, Homo sapiens
  CDR3 for alpha chain variable domain of TCR clone 60031 (TRAV26-1, TRAJ38)
CIADNAGNNRKLIW

SEQ ID NO: 120062 - protein, 15 aa, Homo sapiens
  CDR3 for beta chain variable domain of TCR clone 60031 (TRBV7-9, TRBJ1-6)
CASSSPGRGNSPLHF

SEQ ID NO: 120063 - protein, 14 aa, Homo sapiens
  CDR3 for alpha chain variable domain of TCR clone 60032 (TRAV38-1, TRAJ45)
CASHSGGGAGGLTF

SEQ ID NO: 120064 - protein, 13 aa, Homo sapiens
  CDR3 for beta chain variable domain of TCR clone 60032 (TRBV10-3, TRBJ1-2)
CAISERDSYGYTF

SEQ ID NO: 120065 - protein, 13 aa, Homo sapiens
  CDR3 for alpha chain variable domain of TCR clone 60033 (TRAV13-1, TRAJ5)
CAARFTGRRALTF

SEQ ID NO: 120066 - protein, 15 aa, Homo sapiens
  CDR3 for beta chain variable domain of TCR clone 60033 (TRBV7-9, TRBJ2-7)
CASSPGGGLTYEQYF

SEQ ID NO: 120067 - protein, 14 aa, Homo sapiens
  CDR3 for alpha chain variable domain of TCR clone 60034 (TRAV8-3, TRAJ4)
CAVGAAGGYYKLIF

SEQ ID NO: 120068 - protein, 15 aa, Homo sapiens
  CDR3 for beta chain variable domain of TCR clone 60034 (TRBV6-5, TRBJ2-1)
CASSYDAGAGNEQFF

SEQ ID NO: 120069 - protein, 15 aa, Homo sapiens
  CDR3 for alpha chain variable domain of TCR clone 60035 (TRAV21, TRAJ52)
CAVRGGGTSYGKLTF

SEQ ID NO: 120070 - protein, 13 aa, Homo sapiens
  CDR3 for beta chain variable domain of TCR clone 60035 (TRBV12-4, TRBJ1-2)
CASSLRQGKGYTF

SEQ ID NO: 120071 - protein, 18 aa, Homo sapiens
  CDR3 for alpha chain variable domain of TCR clone 60036 (TRAV8-4, TRAJ52)
CAVTRANAGGTSSGKLTF

SEQ ID NO: 120072 - protein, 20 aa, Homo sapiens
  CDR3 for beta chain variable domain of TCR clone 60036 (TRBV19, TRBJ2-1)
CASSISRTVTSTRLNNEQFF

SEQ ID NO: 120073 - protein, 11 aa, Homo sapiens
  CDR3 for alpha chain variable domain of TCR clone 60037 (TRAV21, TRAJ7)
CAAYGDNRLAF

SEQ ID NO: 120074 - protein, 14 aa, Homo sapiens
  CDR3 for beta chain variable domain of TCR clone 60037 (TRBV4-1, TRBJ2-7)
CASSRTGVAFEQYF

SEQ ID NO: 120075 - protein, 14 aa, Homo sapiens
  CDR3 for alpha chain variable domain of TCR clone 60038 (TRAV1-2, TRAJ16)
CAVNRFSDGQKLLF

SEQ ID NO: 120076 - protein, 16 aa, Homo sapiens
  CDR3 for beta chain variable domain of TCR clone 60038 (TRBV19, TRBJ2-3)
CASSPGAASRTDTQYF

SEQ ID NO: 120077 - protein, 19 aa, Homo sapiens
  CDR3 for alpha chain variable domain of TCR clone 60039 (TRAV26-1, TRAJ50)
CCVLLHRQNPKTSYDKVIF

SEQ ID NO: 120078 - protein, 17 aa, Homo sapiens
  CDR3 for beta chain variable domain of TCR clone 60039 (TRBV28, TRBJ2-5)
CASSTPEGDALQETQYF

SEQ ID NO: 120079 - protein, 12 aa, Homo sapiens
  CDR3 for alpha chain variable domain of TCR clone 60040 (TRAV13-1, TRAJ48)
CAANFGNEKLTF

SEQ ID NO: 120080 - protein, 13 aa, Homo sapiens
  CDR3 for beta chain variable domain of TCR clone 60040 (TRBV7-3, TRBJ1-1)
CASSQDWGAEAVF

SEQ ID NO: 120081 - protein, 15 aa, Homo sapiens
  CDR3 for alpha chain variable domain of TCR clone 60041 (TRAV12-2, TRAJ53)
CAVNGGGGSNYKLAF

SEQ ID NO: 120082 - protein, 14 aa, Homo sapiens
  CDR3 for beta chain variable domain of TCR clone 60041 (TRBV19, TRBJ2-2)
CASSTLHRSGELFF

SEQ ID NO: 120083 - protein, 16 aa, Homo sapiens
  CDR3 for alpha chain variable domain of TCR clone 60042 (TRAV30, TRAJ24)
CGTEIVDADSWGKFQF

SEQ ID NO: 120084 - protein, 14 aa, Homo sapiens
  CDR3 for beta chain variable domain of TCR clone 60042 (TRBV12-5, TRBJ2-5)
CASGSRTHQEDQYF

SEQ ID NO: 120085 - protein, 15 aa, Homo sapiens
  CDR3 for alpha chain variable domain of TCR clone 60043 (TRAV2, TRAJ9)
CAVEDRGTGGFKTIF

SEQ ID NO: 120086 - protein, 13 aa, Homo sapiens
  CDR3 for beta chain variable domain of TCR clone 60043 (TRBV12-4, TRBJ1-2)
CASSLRQGKGYTF

SEQ ID NO: 120087 - protein, 14 aa, Homo sapiens
  CDR3 for alpha chain variable domain of TCR clone 60044 (TRAV8-2, TRAJ44)
CVVSLTGTASKLTF

SEQ ID NO: 120088 - protein, 15 aa, Homo sapiens
  CDR3 for beta chain variable domain of TCR clone 60044 (TRBV7-2, TRBJ2-1)
CASSFSGGIYNEQSF

SEQ ID NO: 120089 - protein, 14 aa, Homo sapiens
  CDR3 for alpha chain variable domain of TCR clone 60045 (TRAV12-2, TRAJ11)
CAVNMESGYSTLTF

SEQ ID NO: 120090 - protein, 10 aa, Homo sapiens
  CDR3 for beta chain variable domain of TCR clone 60045 (TRBV20-1, TRBJ2-5)
CSARFETQYF

SEQ ID NO: 120091 - protein, 10 aa, Homo sapiens
  CDR3 for alpha chain variable domain of TCR clone 60046 (TRAV1-2, TRAJ23)
CSGQGGKLIF

SEQ ID NO: 120092 - protein, 16 aa, Homo sapiens
  CDR3 for beta chain variable domain of TCR clone 60046 (TRBV11-2, TRBJ1-1)
CASSLRQGGEHSKAFF

SEQ ID NO: 120093 - protein, 14 aa, Homo sapiens
  CDR3 for alpha chain variable domain of TCR clone 60047 (TRAV3, TRAJ9)
CAVRLNTGGFKTIF

SEQ ID NO: 120094 - protein, 12 aa, Homo sapiens
  CDR3 for beta chain variable domain of TCR clone 60047 (TRBV19, TRBJ1-5)
CASSIAQQPQHF

SEQ ID NO: 120095 - protein, 12 aa, Homo sapiens
  CDR3 for alpha chain variable domain of TCR clone 60048 (TRAV25, TRAJ11)
CAGYSGYSTLTF

SEQ ID NO: 120096 - protein, 13 aa, Homo sapiens
  CDR3 for beta chain variable domain of TCR clone 60048 (TRBV7-9, TRBJ1-2)
CTSSLKQNYGYTF

SEQ ID NO: 120097 - protein, 14 aa, Homo sapiens
  CDR3 for alpha chain variable domain of TCR clone 60049 (TRAV35, TRAJ22)
CAGLRPGSARQLTF

SEQ ID NO: 120098 - protein, 15 aa, Homo sapiens
  CDR3 for beta chain variable domain of TCR clone 60049 (TRBV2, TRBJ2-5)
CASSEQGLIGETQYF

SEQ ID NO: 120099 - protein, 15 aa, Homo sapiens
  CDR3 for alpha chain variable domain of TCR clone 60050 (TRAV13-1, TRAJ43)
CAATPELGGNNDMRF

SEQ ID NO: 120100 - protein, 15 aa, Homo sapiens
  CDR3 for beta chain variable domain of TCR clone 60050 (TRBV10-2, TRBJ2-6)
CASSEQGTGANDLTF

SEQ ID NO: 120101 - protein, 13 aa, Homo sapiens
  CDR3 for alpha chain variable domain of TCR clone 60051 (TRAV12-1, TRAJ49)
CVVGANTGNQFYF

SEQ ID NO: 120102 - protein, 16 aa, Homo sapiens
  CDR3 for beta chain variable domain of TCR clone 60051 (TRBV4-1, TRBJ2-7)
CASSQEWTSGPLEQYF

SEQ ID NO: 120103 - protein, 17 aa, Homo sapiens
  CDR3 for alpha chain variable domain of TCR clone 60052 (TRAV4, TRAJ13)
CLVGVQGSSGGYQKVTF

SEQ ID NO: 120104 - protein, 18 aa, Homo sapiens
  CDR3 for beta chain variable domain of TCR clone 60052 (TRBV15, TRBJ2-3)
CATSRDGARSWDTDTQYS

SEQ ID NO: 120105 - protein, 13 aa, Homo sapiens
  CDR3 for alpha chain variable domain of TCR clone 60053 (TRAV13-2, TRAJ48)
CAEMDFGNEKLTF

SEQ ID NO: 120106 - protein, 13 aa, Homo sapiens
  CDR3 for beta chain variable domain of TCR clone 60053 (TRBV2, TRBJ1-1)
CASSVSGYAEAFF

SEQ ID NO: 120107 - protein, 16 aa, Homo sapiens
  CDR3 for alpha chain variable domain of TCR clone 60054 (TRAV20, TRAJ22)
CAVQASSSGSARQLTF

SEQ ID NO: 120108 - protein, 13 aa, Homo sapiens
  CDR3 for beta chain variable domain of TCR clone 60054 (TRBV7-2, TRBJ2-5)
CASSQTSVENQYF

SEQ ID NO: 120109 - protein, 15 aa, Homo sapiens
  CDR3 for alpha chain variable domain of TCR clone 60055 (TRAV5, TRAJ33)
RAEAPAMDSNYQLIW

SEQ ID NO: 120110 - protein, 12 aa, Homo sapiens
  CDR3 for beta chain variable domain of TCR clone 60055 (TRBV6-3, TRBJ2-7)
CASSLTPYEQYF

SEQ ID NO: 120111 - protein, 16 aa, Homo sapiens
  CDR3 for alpha chain variable domain of TCR clone 60056 (TRAV3, TRAJ37)
CAVGGKGSGNTGKLIF

SEQ ID NO: 120112 - protein, 12 aa, Homo sapiens
  CDR3 for beta chain variable domain of TCR clone 60056 (TRBV11-2, TRBJ2-2)
CASSLGGGELFF

SEQ ID NO: 120113 - protein, 14 aa, Homo sapiens
  CDR3 for alpha chain variable domain of TCR clone 60057 (TRAV20, TRAJ42)
CAVQARGSQGNLIF

SEQ ID NO: 120114 - protein, 14 aa, Homo sapiens
  CDR3 for beta chain variable domain of TCR clone 60057 (TRBV28, TRBJ1-2)
CASRIQGANYGYTF

SEQ ID NO: 120115 - protein, 15 aa, Homo sapiens
  CDR3 for alpha chain variable domain of TCR clone 60058 (TRAV12-3, TRAJ6)
CAMSATTGGSYIPTF

SEQ ID NO: 120116 - protein, 13 aa, Homo sapiens
  CDR3 for beta chain variable domain of TCR clone 60058 (TRBV7-9, TRBJ1-2)
RASSLKQNYGYTF

SEQ ID NO: 120117 - protein, 13 aa, Homo sapiens
  CDR3 for alpha chain variable domain of TCR clone 60059 (TRAV17, TRAJ5)
CATGDTGRRALTF

SEQ ID NO: 120118 - protein, 13 aa, Homo sapiens
  CDR3 for beta chain variable domain of TCR clone 60059 (TRBV19, TRBJ1-5)
CASSIEPVQTQHF

SEQ ID NO: 120119 - protein, 15 aa, Homo sapiens
  CDR3 for alpha chain variable domain of TCR clone 60060 (TRAV12-2, TRAJ53)
CAVNGGGGSNYKLTF

SEQ ID NO: 120120 - protein, 17 aa, Homo sapiens
  CDR3 for beta chain variable domain of TCR clone 60060 (TRBV7-3, TRBJ2-3)
RTSSLMKRMRGADTQYF

SEQ ID NO: 120121 - protein, 16 aa, Homo sapiens
  CDR3 for alpha chain variable domain of TCR clone 60061 (TRAV3, TRAJ18)
CAVRDGRGSTLGRLYF

SEQ ID NO: 120122 - protein, 14 aa, Homo sapiens
  CDR3 for beta chain variable domain of TCR clone 60061 (TRBV7-3, TRBJ1-1)
CASSLKGGNTEAFF

SEQ ID NO: 120123 - protein, 14 aa, Homo sapiens
  CDR3 for alpha chain variable domain of TCR clone 60062 (TRAV16, TRAJ39)
CALSKNNAGNMLTF

SEQ ID NO: 120124 - protein, 13 aa, Homo sapiens
  CDR3 for beta chain variable domain of TCR clone 60062 (TRBV10-3, TRBJ2-7)
CASKLAVNYEQYF

SEQ ID NO: 120125 - protein, 14 aa, Homo sapiens
  CDR3 for alpha chain variable domain of TCR clone 60063 (TRAV12-3, TRAJ10)
SHLPLTGGGNKLTF

SEQ ID NO: 120126 - protein, 15 aa, Homo sapiens
  CDR3 for beta chain variable domain of TCR clone 60063 (TRBV9, TRBJ1-6)
CASSAAGTGDSPLHF

SEQ ID NO: 120127 - protein, 14 aa, Homo sapiens
  CDR3 for alpha chain variable domain of TCR clone 60064 (TRAV38-1, TRAJ45)
CASHSGGGADGLTF

SEQ ID NO: 120128 - protein, 13 aa, Homo sapiens
  CDR3 for beta chain variable domain of TCR clone 60064 (TRBV10-3, TRBJ1-2)
CAISERDRYGYTF

SEQ ID NO: 120129 - protein, 12 aa, Homo sapiens
  CDR3 for alpha chain variable domain of TCR clone 60065 (TRAV29/DV5, TRAJ34)
CAASGNTNKLIF

SEQ ID NO: 120130 - protein, 16 aa, Homo sapiens
  CDR3 for beta chain variable domain of TCR clone 60065 (TRBV12-4, TRBJ1-5)
CASRQPVEGSNQPQHF

SEQ ID NO: 120131 - protein, 13 aa, Homo sapiens
  CDR3 for alpha chain variable domain of TCR clone 60066 (TRAV27, TRAJ49)
CALRPYTGNQFYF

SEQ ID NO: 120132 - protein, 16 aa, Homo sapiens
  CDR3 for beta chain variable domain of TCR clone 60066 (TRBV4-1, TRBJ1-2)
CASSQDAGQVLYGYTF

SEQ ID NO: 120133 - protein, 12 aa, Homo sapiens
  CDR3 for alpha chain variable domain of TCR clone 60067 (TRAV17, TRAJ45)
CAAGGGADGLTF

SEQ ID NO: 120134 - protein, 15 aa, Homo sapiens
  CDR3 for beta chain variable domain of TCR clone 60067 (TRBV20-1, TRBJ2-7)
CSARDRVSGTDEQYF

SEQ ID NO: 120135 - protein, 21 aa, Homo sapiens
  CDR3 for alpha chain variable domain of TCR clone 60068 (TRAV1-1, TRAJ6)
CLLLLRCERLERTGGSYIPIF

SEQ ID NO: 120136 - protein, 13 aa, Homo sapiens
  CDR3 for beta chain variable domain of TCR clone 60068 (TRBV10-2, TRBJ2-7)
CASGASGGYEQYF

SEQ ID NO: 120137 - protein, 10 aa, Homo sapiens
  CDR3 for alpha chain variable domain of TCR clone 60069 (TRAV30, TRAJ48)
CGIGNEKLTF

SEQ ID NO: 120138 - protein, 14 aa, Homo sapiens
  CDR3 for beta chain variable domain of TCR clone 60069 (TRBV2, TRBJ2-7)
CASSLTSGGYEQYF

SEQ ID NO: 120139 - protein, 14 aa, Homo sapiens
  CDR3 for alpha chain variable domain of TCR clone 60070 (TRAV27, TRAJ45)
CAGAQEEVLTDSPF

SEQ ID NO: 120140 - protein, 15 aa, Homo sapiens
  CDR3 for beta chain variable domain of TCR clone 60070 (TRBV9, TRBJ2-2)
CASSDFAGASGELFF

SEQ ID NO: 120141 - protein, 16 aa, Homo sapiens
  CDR3 for alpha chain variable domain of TCR clone 60071 (TRAV16, TRAJ4)
CITVLPFSGGYNKLIF

SEQ ID NO: 120142 - protein, 13 aa, Homo sapiens
  CDR3 for beta chain variable domain of TCR clone 60071 (TRBV10-3, TRBJ2-7)
CASKLAVNYEQYF

SEQ ID NO: 120143 - protein, 14 aa, Homo sapiens
  CDR3 for alpha chain variable domain of TCR clone 60072 (TRAV26-1, TRAJ34)
CIVRAAYNTDKLIF

SEQ ID NO: 120144 - protein, 16 aa, Homo sapiens
  CDR3 for beta chain variable domain of TCR clone 60072 (TRBV7-3, TRBJ2-2)
CASSLKRGTLSGELFF

SEQ ID NO: 120145 - protein, 11 aa, Homo sapiens
  CDR3 for alpha chain variable domain of TCR clone 60073 (TRAV21, TRAJ34)
CAVTNTDKLIF

SEQ ID NO: 120146 - protein, 16 aa, Homo sapiens
  CDR3 for beta chain variable domain of TCR clone 60073 (TRBV7-3, TRBJ2-1)
CASSLEGYRSYNEQFF

SEQ ID NO: 120147 - protein, 14 aa, Homo sapiens
  CDR3 for alpha chain variable domain of TCR clone 60074 (TRAV16, TRAJ32)
CALKSGGATNKLIF

SEQ ID NO: 120148 - protein, 15 aa, Homo sapiens
  CDR3 for beta chain variable domain of TCR clone 60074 (TRBV12-4, TRBJ1-1)
CQQQDRVVANTEAFF

SEQ ID NO: 120149 - protein, 15 aa, Homo sapiens
  CDR3 for alpha chain variable domain of TCR clone 60075 (TRAV3, TRAJ22)
CAVRDRGGSARQLTF

SEQ ID NO: 120150 - protein, 16 aa, Homo sapiens
  CDR3 for beta chain variable domain of TCR clone 60075 (TRBV4-2, TRBJ2-4)
CASSQELRRAKNMQYF

SEQ ID NO: 120151 - protein, 11 aa, Homo sapiens
  CDR3 for alpha chain variable domain of TCR clone 60076 (TRAV26-1, TRAJ37)
CTVRVGRKLIF

SEQ ID NO: 120152 - protein, 13 aa, Homo sapiens
  CDR3 for beta chain variable domain of TCR clone 60076 (TRBV14, TRBJ1-2)
CASSEDRRYGYTF

SEQ ID NO: 120153 - protein, 12 aa, Homo sapiens
  CDR3 for alpha chain variable domain of TCR clone 60077 (TRAV12-3, TRAJ17)
CAMTLTGNKLTF

SEQ ID NO: 120154 - protein, 15 aa, Homo sapiens
  CDR3 for beta chain variable domain of TCR clone 60077 (TRBV20-1, TRBJ2-7)
RSARDRVSGMDEQYF

SEQ ID NO: 120155 - protein, 15 aa, Homo sapiens
  CDR3 for alpha chain variable domain of TCR clone 60078 (TRAV21, TRAJ45)
CAVSYSGGGADGLTL

SEQ ID NO: 120156 - protein, 13 aa, Homo sapiens
  CDR3 for beta chain variable domain of TCR clone 60078 (TRBV20-1, TRBJ2-5)
CSAATELQETQYF

SEQ ID NO: 120157 - protein, 14 aa, Homo sapiens
  CDR3 for alpha chain variable domain of TCR clone 60079 (TRAV1-2, TRAJ16)
CAVNRFSDGQKLLF

SEQ ID NO: 120158 - protein, 17 aa, Homo sapiens
  CDR3 for beta chain variable domain of TCR clone 60079 (TRBV19, TRBJ1-5)
CASSRDRILSRFQPQHF

SEQ ID NO: 120159 - protein, 13 aa, Homo sapiens
  CDR3 for alpha chain variable domain of TCR clone 60080 (TRAV13-1, TRAJ39)
CSKYSNSGNMLTF

SEQ ID NO: 120160 - protein, 16 aa, Homo sapiens
  CDR3 for beta chain variable domain of TCR clone 60080 (TRBV20-1, TRBJ1-4)
CSAPGQGLLTNEKLFF

SEQ ID NO: 120161 - protein, 12 aa, Homo sapiens
  CDR3 for alpha chain variable domain of TCR clone 60081 (TRAV16, TRAJ10)
CSRTGGGNKLTF

SEQ ID NO: 120162 - protein, 10 aa, Homo sapiens
  CDR3 for beta chain variable domain of TCR clone 60081 (TRBV6-3, TRBJ2-7)
CASSSPGQFS

SEQ ID NO: 120163 - protein, 15 aa, Homo sapiens
  CDR3 for alpha chain variable domain of TCR clone 60082 (TRAV12-2, TRAJ53)
CAVNGGGGSNYKLTF

SEQ ID NO: 120164 - protein, 14 aa, Homo sapiens
  CDR3 for beta chain variable domain of TCR clone 60082 (TRBV18, TRBJ2-5)
CASSPLRVQETQYF

SEQ ID NO: 120165 - protein, 16 aa, Homo sapiens
  CDR3 for alpha chain variable domain of TCR clone 60083 (TRAV2, TRAJ4)
CAVEDRFSDGYNKLIF

SEQ ID NO: 120166 - protein, 13 aa, Homo sapiens
  CDR3 for beta chain variable domain of TCR clone 60083 (TRBV7-7, TRBJ2-5)
CASSRSGQETQYF

SEQ ID NO: 120167 - protein, 15 aa, Homo sapiens
  CDR3 for alpha chain variable domain of TCR clone 60084 (TRAV38-2/DV8, TRAJ45)
CAYWDSGGGADGLTF

SEQ ID NO: 120168 - protein, 16 aa, Homo sapiens
  CDR3 for beta chain variable domain of TCR clone 60084 (TRBV19, TRBJ1-1)
CAGSPTRFWPGTEAFF

SEQ ID NO: 120169 - protein, 19 aa, Homo sapiens
  CDR3 for alpha chain variable domain of TCR clone 60085 (TRAV2, TRAJ20)
ILQVREADAAAYRDCKLSF

SEQ ID NO: 120170 - protein, 17 aa, Homo sapiens
  CDR3 for beta chain variable domain of TCR clone 60085 (TRBV11-2, TRBJ2-1)
CASSLYPPGVEYNEQFF

SEQ ID NO: 120171 - protein, 14 aa, Homo sapiens
  CDR3 for alpha chain variable domain of TCR clone 60086 (TRAV13-2, TRAJ57)
CAESTQGGSEKLVF

SEQ ID NO: 120172 - protein, 14 aa, Homo sapiens
  CDR3 for beta chain variable domain of TCR clone 60086 (TRBV7-3, TRBJ2-3)
CASRTSGSTDTQYF

SEQ ID NO: 120173 - protein, 12 aa, Homo sapiens
  CDR3 for alpha chain variable domain of TCR clone 60087 (TRAV16, TRAJ10)
CSRTGGGNKLTF

SEQ ID NO: 120174 - protein, 15 aa, Homo sapiens
  CDR3 for beta chain variable domain of TCR clone 60087 (TRBV6-3, TRBJ2-7)
CASSSPGTVVYEQYF

SEQ ID NO: 120175 - protein, 14 aa, Homo sapiens
  CDR3 for alpha chain variable domain of TCR clone 60088 (TRAV16, TRAJ15)
CALSFNQAGTALIF

SEQ ID NO: 120176 - protein, 16 aa, Homo sapiens
  CDR3 for beta chain variable domain of TCR clone 60088 (TRBV9, TRBJ2-7)
CASSAGPERSPYEQYF

SEQ ID NO: 120177 - protein, 14 aa, Homo sapiens
  CDR3 for alpha chain variable domain of TCR clone 60089 (TRAV23/DV6, TRAJ39)
CAATREEAGNMLTF

SEQ ID NO: 120178 - protein, 14 aa, Homo sapiens
  CDR3 for beta chain variable domain of TCR clone 60089 (TRBV19, TRBJ2-2)
CASSGQGIAGELFF

SEQ ID NO: 120179 - protein, 13 aa, Homo sapiens
  CDR3 for alpha chain variable domain of TCR clone 60090 (TRAV12-1, TRAJ40)
CVVPTSGTYKYIF

SEQ ID NO: 120180 - protein, 18 aa, Homo sapiens
  CDR3 for beta chain variable domain of TCR clone 60090 (TRBV7-6, TRBJ2-1)
CASSPRTSGISSYNEQFF

SEQ ID NO: 120181 - protein, 13 aa, Homo sapiens
  CDR3 for alpha chain variable domain of TCR clone 60091 (TRAV21, TRAJ20)
CAVGLRVDYKLSF

SEQ ID NO: 120182 - protein, 14 aa, Homo sapiens
  CDR3 for beta chain variable domain of TCR clone 60091 (TRBV11-2, TRBJ2-1)
CASSLSGPYNEQFF

SEQ ID NO: 120183 - protein, 14 aa, Homo sapiens
  CDR3 for alpha chain variable domain of TCR clone 60092 (TRAV12-2, TRAJ13)
CAVKKTGGYQKVTF

SEQ ID NO: 120184 - protein, 13 aa, Homo sapiens
  CDR3 for beta chain variable domain of TCR clone 60092 (TRBV2, TRBJ2-7)
CASSVGGSGEHYF

SEQ ID NO: 120185 - protein, 14 aa, Homo sapiens
  CDR3 for alpha chain variable domain of TCR clone 60093 (TRAV1-2, TRAJ8)
CAVREDTGFQKLVF

SEQ ID NO: 120186 - protein, 13 aa, Homo sapiens
  CDR3 for beta chain variable domain of TCR clone 60093 (TRBV7-9, TRBJ1-2)
CASSVPGQDGYTF

SEQ ID NO: 120187 - protein, 16 aa, Homo sapiens
  CDR3 for alpha chain variable domain of TCR clone 60094 (TRAV20, TRAJ22)
CAVHASSSGSARQLTF

SEQ ID NO: 120188 - protein, 13 aa, Homo sapiens
  CDR3 for beta chain variable domain of TCR clone 60094 (TRBV7-2, TRBJ2-5)
CASSQTSVETQYF

SEQ ID NO: 120189 - protein, 15 aa, Homo sapiens
  CDR3 for alpha chain variable domain of TCR clone 60095 (TRAV12-2, TRAJ43)
CAFDMRFGAGTRLTG

SEQ ID NO: 120190 - protein, 13 aa, Homo sapiens
  CDR3 for beta chain variable domain of TCR clone 60095 (TRBV4-2, TRBJ1-1)
CASSQAGNTEAFF

SEQ ID NO: 120191 - protein, 11 aa, Homo sapiens
  CDR3 for alpha chain variable domain of TCR clone 60096 (TRAV21, TRAJ4)
HVSGGHNKLIF

SEQ ID NO: 120192 - protein, 13 aa, Homo sapiens
  CDR3 for beta chain variable domain of TCR clone 60096 (TRBV7-3, TRBJ2-5)
CASSLTAGETQYF

SEQ ID NO: 120193 - protein, 14 aa, Homo sapiens
  CDR3 for alpha chain variable domain of TCR clone 60097 (TRAV1-2, TRAJ16)
CAVNRFSDGQKLLF

SEQ ID NO: 120194 - protein, 15 aa, Homo sapiens
  CDR3 for beta chain variable domain of TCR clone 60097 (TRBV3-1, TRBJ1-2)
CASSPTRLPEGGYTF

SEQ ID NO: 120195 - protein, 15 aa, Homo sapiens
  CDR3 for alpha chain variable domain of TCR clone 60098 (TRAV27, TRAJ38)
CAARRNAGNNPKLIW

SEQ ID NO: 120196 - protein, 13 aa, Homo sapiens
  CDR3 for beta chain variable domain of TCR clone 60098 (TRBV12-5, TRBJ2-3)
CASGDRQSDTQYF

SEQ ID NO: 120197 - protein, 13 aa, Homo sapiens
  CDR3 for alpha chain variable domain of TCR clone 60099 (TRAV12-1, TRAJ40)
CVVPTSGTYKYIF

SEQ ID NO: 120198 - protein, 18 aa, Homo sapiens
  CDR3 for beta chain variable domain of TCR clone 60099 (TRBV7-6, TRBJ2-1)
CASSPRTSWMSSYNEQFF

SEQ ID NO: 120199 - protein, 13 aa, Homo sapiens
  CDR3 for alpha chain variable domain of TCR clone 60100 (TRAV23/DV6, TRAJ22)
CAPYSGSARQLTF

SEQ ID NO: 120200 - protein, 15 aa, Homo sapiens
  CDR3 for beta chain variable domain of TCR clone 60100 (TRBV11-2, TRBJ1-6)
CAGSLDPWAVSPLHF

SEQ ID NO: 120201 - protein, 13 aa, Homo sapiens
  CDR3 for alpha chain variable domain of TCR clone 60101 (TRAV21, TRAJ45)
CAVMGGGADGLTF

SEQ ID NO: 120202 - protein, 16 aa, Homo sapiens
  CDR3 for beta chain variable domain of TCR clone 60101 (TRBV20-1, TRBJ2-1)
GSARDHLAGGRGEQFF

SEQ ID NO: 120203 - protein, 14 aa, Homo sapiens
  CDR3 for alpha chain variable domain of TCR clone 60102 (TRAV8-4, TRAJ8)
CAVSLNTGFQKLVF

SEQ ID NO: 120204 - protein, 13 aa, Homo sapiens
  CDR3 for beta chain variable domain of TCR clone 60102 (TRBV7-9, TRBJ2-3)
CASSPRSTDTQYF

SEQ ID NO: 120205 - protein, 12 aa, Homo sapiens
  CDR3 for alpha chain variable domain of TCR clone 60103 (TRAV13-1, TRAJ49)
CAASPMGNQFYF

SEQ ID NO: 120206 - protein, 13 aa, Homo sapiens
  CDR3 for beta chain variable domain of TCR clone 60103 (TRBV20-1, TRBJ2-2)
CSASAAGTGDLFF

SEQ ID NO: 120207 - protein, 14 aa, Homo sapiens
  CDR3 for alpha chain variable domain of TCR clone 60104 (TRAV17, TRAJ40)
CATAPTSGTYKYIF

SEQ ID NO: 120208 - protein, 13 aa, Homo sapiens
  CDR3 for beta chain variable domain of TCR clone 60104 (TRBV27, TRBJ2-1)
CASSSGSYNEQFF

SEQ ID NO: 120209 - protein, 13 aa, Homo sapiens
  CDR3 for alpha chain variable domain of TCR clone 60105 (TRAV1-2, TRAJ24)
CAVTTDSWGKLQF

SEQ ID NO: 120210 - protein, 14 aa, Homo sapiens
  CDR3 for beta chain variable domain of TCR clone 60105 (TRBV7-2, TRBJ1-2)
CARSQTGSTYGYTF

SEQ ID NO: 120211 - protein, 16 aa, Homo sapiens
  CDR3 for alpha chain variable domain of TCR clone 60106 (TRAV30, TRAJ24)
CGTEIVDADSWGKFQF

SEQ ID NO: 120212 - protein, 14 aa, Homo sapiens
  CDR3 for beta chain variable domain of TCR clone 60106 (TRBV20-1, TRBJ2-2)
SAVLVPRAPGSCFF

SEQ ID NO: 120213 - protein, 15 aa, Homo sapiens
  CDR3 for alpha chain variable domain of TCR clone 60107 (TRAV14/DV4, TRAJ26)
CATREGQNYGQNFVF

SEQ ID NO: 120214 - protein, 13 aa, Homo sapiens
  CDR3 for beta chain variable domain of TCR clone 60107 (TRBV24-1, TRBJ2-2)
CATSDWSTGELFF

SEQ ID NO: 120215 - protein, 13 aa, Homo sapiens
  CDR3 for alpha chain variable domain of TCR clone 60108 (TRAV21, TRAJ20)
CAVGLRVDYKLSF

SEQ ID NO: 120216 - protein, 13 aa, Homo sapiens
  CDR3 for beta chain variable domain of TCR clone 60108 (TRBV6-3, TRBJ2-5)
CVSRGPAEETQYF

SEQ ID NO: 120217 - protein, 17 aa, Homo sapiens
  CDR3 for alpha chain variable domain of TCR clone 60109 (TRAV3, TRAJ12)
CAVRDGGRMDSSYKLIF

SEQ ID NO: 120218 - protein, 19 aa, Homo sapiens
  CDR3 for beta chain variable domain of TCR clone 60109 (TRBV6-5, TRBJ2-1)
CASRSGGLAGESSYNEQFF

SEQ ID NO: 120219 - protein, 13 aa, Homo sapiens
  CDR3 for alpha chain variable domain of TCR clone 60110 (TRAV27, TRAJ49)
CAPRPHTGNQFYF

SEQ ID NO: 120220 - protein, 16 aa, Homo sapiens
  CDR3 for beta chain variable domain of TCR clone 60110 (TRBV4-1, TRBJ1-2)
CASSQDAGQVLYGYTF

SEQ ID NO: 120221 - protein, 15 aa, Homo sapiens
  CDR3 for alpha chain variable domain of TCR clone 60111 (TRAV2, TRAJ24)
CAVEVLTDSWGKFQF

SEQ ID NO: 120222 - protein, 14 aa, Homo sapiens
  CDR3 for beta chain variable domain of TCR clone 60111 (TRBV19, TRBJ2-1)
CASSMGSGRWSSSS

SEQ ID NO: 120223 - protein, 15 aa, Homo sapiens
  CDR3 for alpha chain variable domain of TCR clone 60112 (TRAV26-1, TRAJ57)
CIVRVEGSGNTPLVF

SEQ ID NO: 120224 - protein, 14 aa, Homo sapiens
  CDR3 for beta chain variable domain of TCR clone 60112 (TRBV18, TRBJ2-5)
CASSPGVSQETQYF

SEQ ID NO: 120225 - protein, 14 aa, Homo sapiens
  CDR3 for alpha chain variable domain of TCR clone 60113 (TRAV26-1, TRAJ45)
CIEVTGGGADGLTF

SEQ ID NO: 120226 - protein, 12 aa, Homo sapiens
  CDR3 for beta chain variable domain of TCR clone 60113 (TRBV7-8, TRBJ2-7)
CASSLGDREQYF

SEQ ID NO: 120227 - protein, 10 aa, Homo sapiens
  CDR3 for alpha chain variable domain of TCR clone 60114 (TRAV23/DV6, TRAJ57)
CAASSTLSQG

SEQ ID NO: 120228 - protein, 10 aa, Homo sapiens
  CDR3 for beta chain variable domain of TCR clone 60114 (TRBV25-1, TRBJ1-1)
PTWGNTEAFF

SEQ ID NO: 120229 - protein, 11 aa, Homo sapiens
  CDR3 for alpha chain variable domain of TCR clone 60115 (TRAV1-1, TRAJ23)
CAVRQGGKLIF

SEQ ID NO: 120230 - protein, 20 aa, Homo sapiens
  CDR3 for beta chain variable domain of TCR clone 60115 (TRBV7-8, TRBJ2-2)
CASSLLFPGPTIHITGELFF

SEQ ID NO: 120231 - protein, 13 aa, Homo sapiens
  CDR3 for alpha chain variable domain of TCR clone 60116 (TRAV20, TRAJ49)
CAVQARTGNQFYF

SEQ ID NO: 120232 - protein, 14 aa, Homo sapiens
  CDR3 for beta chain variable domain of TCR clone 60116 (TRBV5-1, TRBJ1-1)
CASSLQGTSTEAFF

SEQ ID NO: 120233 - protein, 11 aa, Homo sapiens
  CDR3 for alpha chain variable domain of TCR clone 60117 (TRAV3, TRAJ13)
CAVTSYQEVTF

SEQ ID NO: 120234 - protein, 15 aa, Homo sapiens
  CDR3 for beta chain variable domain of TCR clone 60117 (TRBV7-9, TRBJ2-7)
CASSSSGLAVYEQYF

SEQ ID NO: 120235 - protein, 14 aa, Homo sapiens
  CDR3 for alpha chain variable domain of TCR clone 60118 (TRAV8-3, TRAJ9)
CAMVYSTGGFKTIF

SEQ ID NO: 120236 - protein, 14 aa, Homo sapiens
  CDR3 for beta chain variable domain of TCR clone 60118 (TRBV7-3, TRBJ2-2)
CASSSGGYTGELFF

SEQ ID NO: 120237 - protein, 13 aa, Homo sapiens
  CDR3 for alpha chain variable domain of TCR clone 60119 (TRAV8-6, TRAJ21)
CAVSRYNFNKFYF

SEQ ID NO: 120238 - protein, 15 aa, Homo sapiens
  CDR3 for beta chain variable domain of TCR clone 60119 (TRBV5-1, TRBJ2-3)
CASSVTSGSTDTQYF

SEQ ID NO: 120239 - protein, 14 aa, Homo sapiens
  CDR3 for alpha chain variable domain of TCR clone 60120 (TRAV12-3, TRAJ10)
SHLPLPGGGNKLTF

SEQ ID NO: 120240 - protein, 12 aa, Homo sapiens
  CDR3 for beta chain variable domain of TCR clone 60120 (TRBV7-8, TRBJ2-7)
CASSLGDREQYF

SEQ ID NO: 120241 - protein, 12 aa, Homo sapiens
  CDR3 for alpha chain variable domain of TCR clone 60121 (TRAV16, TRAJ10)
CSRTGGGNKLTF

SEQ ID NO: 120242 - protein, 19 aa, Homo sapiens
  CDR3 for beta chain variable domain of TCR clone 60121 (TRBV25-1, TRBJ2-2)
CAIPVYRVDRGRKTGELFF

SEQ ID NO: 120243 - protein, 12 aa, Homo sapiens
  CDR3 for alpha chain variable domain of TCR clone 60122 (TRAV3, TRAJ7)
CADLLWEQQTRF

SEQ ID NO: 120244 - protein, 13 aa, Homo sapiens
  CDR3 for beta chain variable domain of TCR clone 60122 (TRBV7-3, TRBJ2-5)
CASSFRGGVTQYF

SEQ ID NO: 120245 - protein, 10 aa, Homo sapiens
  CDR3 for alpha chain variable domain of TCR clone 60123 (TRAV30, TRAJ34)
CGTNPDKLIF

SEQ ID NO: 120246 - protein, 12 aa, Homo sapiens
  CDR3 for beta chain variable domain of TCR clone 60123 (TRBV19, TRBJ1-1)
CASSPSDTEAFF

SEQ ID NO: 120247 - protein, 14 aa, Homo sapiens
  CDR3 for alpha chain variable domain of TCR clone 60124 (TRAV16, TRAJ17)
CALSGRAAGNKLTF

SEQ ID NO: 120248 - protein, 13 aa, Homo sapiens
  CDR3 for beta chain variable domain of TCR clone 60124 (TRBV15, TRBJ1-6)
CATSGGLNSPLHF

SEQ ID NO: 120249 - protein, 10 aa, Homo sapiens
  CDR3 for alpha chain variable domain of TCR clone 60125 (TRAV38-2/DV8, TRAJ40)
CASGTYKYIF

SEQ ID NO: 120250 - protein, 14 aa, Homo sapiens
  CDR3 for beta chain variable domain of TCR clone 60125 (TRBV7-9, TRBJ2-1)
CTSSPRDSLYEQFF

SEQ ID NO: 120251 - protein, 14 aa, Homo sapiens
  CDR3 for alpha chain variable domain of TCR clone 60126 (TRAV16, TRAJ15)
CALSGPQAGTAPIF

SEQ ID NO: 120252 - protein, 12 aa, Homo sapiens
  CDR3 for beta chain variable domain of TCR clone 60126 (TRBV18, TRBJ2-5)
CASSPSKETQYF

SEQ ID NO: 120253 - protein, 14 aa, Homo sapiens
  CDR3 for alpha chain variable domain of TCR clone 60127 (TRAV38-1, TRAJ29)
CAFITPSGNTPLVF

SEQ ID NO: 120254 - protein, 14 aa, Homo sapiens
  CDR3 for beta chain variable domain of TCR clone 60127 (TRBV19, TRBJ2-1)
CASPTFVLSGEQFF

SEQ ID NO: 120255 - protein, 20 aa, Homo sapiens
  CDR3 for alpha chain variable domain of TCR clone 60128 (TRAV12-3, TRAJ41)
SLFIRDSQPSDSATPEALNF

SEQ ID NO: 120256 - protein, 13 aa, Homo sapiens
  CDR3 for beta chain variable domain of TCR clone 60128 (TRBV7-9, TRBJ1-2)
CASSLKQNYGYTF

SEQ ID NO: 120257 - protein, 13 aa, Homo sapiens
  CDR3 for alpha chain variable domain of TCR clone 60129 (TRAV21, TRAJ27)
CAARPGNAGKSTF

SEQ ID NO: 120258 - protein, 14 aa, Homo sapiens
  CDR3 for beta chain variable domain of TCR clone 60129 (TRBV19, TRBJ2-2)
CASSGQGIAGELFF

SEQ ID NO: 120259 - protein, 13 aa, Homo sapiens
  CDR3 for alpha chain variable domain of TCR clone 60130 (TRAV12-1, TRAJ21)
CVVIGDNLNKFYF

SEQ ID NO: 120260 - protein, 14 aa, Homo sapiens
  CDR3 for beta chain variable domain of TCR clone 60130 (TRBV7-3, TRBJ2-2)
CASSLYPLTGELFF

SEQ ID NO: 120261 - protein, 18 aa, Homo sapiens
  CDR3 for alpha chain variable domain of TCR clone 60131 (TRAV21, TRAJ52)
CAVGPSPAGGTSYGKLTF

SEQ ID NO: 120262 - protein, 14 aa, Homo sapiens
  CDR3 for beta chain variable domain of TCR clone 60131 (TRBV20-1, TRBJ2-1)
CSAQIGGSANEQFF

SEQ ID NO: 120263 - protein, 12 aa, Homo sapiens
  CDR3 for alpha chain variable domain of TCR clone 60132 (TRAV12-3, TRAJ20)
CAMVRGDYKLSS

SEQ ID NO: 120264 - protein, 12 aa, Homo sapiens
  CDR3 for beta chain variable domain of TCR clone 60132 (TRBV6-1, TRBJ2-7)
CASSDYSYEQYF

SEQ ID NO: 120265 - protein, 14 aa, Homo sapiens
  CDR3 for alpha chain variable domain of TCR clone 60133 (TRAV12-3, TRAJ10)
SHLPLTGGGNKLTF

SEQ ID NO: 120266 - protein, 15 aa, Homo sapiens
  CDR3 for beta chain variable domain of TCR clone 60133 (TRBV19, TRBJ1-5)
CASSIVWADNQPQHF

SEQ ID NO: 120267 - protein, 16 aa, Homo sapiens
  CDR3 for alpha chain variable domain of TCR clone 60134 (TRAV30, TRAJ24)
CGTEIVDADSWGKFQF

SEQ ID NO: 120268 - protein, 15 aa, Homo sapiens
  CDR3 for beta chain variable domain of TCR clone 60134 (TRBV28, TRBJ2-1)
CASSIIAGGRSEQLF

SEQ ID NO: 120269 - protein, 14 aa, Homo sapiens
  CDR3 for alpha chain variable domain of TCR clone 60135 (TRAV21, TRAJ45)
CAVSSGGGADGLTF

SEQ ID NO: 120270 - protein, 14 aa, Homo sapiens
  CDR3 for beta chain variable domain of TCR clone 60135 (TRBV12-5, TRBJ2-5)
CASGSRTHQETQYF

SEQ ID NO: 120271 - protein, 16 aa, Homo sapiens
  CDR3 for alpha chain variable domain of TCR clone 60136 (TRAV23/DV6, TRAJ9)
CAASIGGNTGGFKTIF

SEQ ID NO: 120272 - protein, 15 aa, Homo sapiens
  CDR3 for beta chain variable domain of TCR clone 60136 (TRBV7-9, TRBJ2-7)
CASSPGGGLTYEQYF

SEQ ID NO: 120273 - protein, 12 aa, Homo sapiens
  CDR3 for alpha chain variable domain of TCR clone 60137 (TRAV13-1, TRAJ21)
CAAKEGFNKFYF

SEQ ID NO: 120274 - protein, 16 aa, Homo sapiens
  CDR3 for beta chain variable domain of TCR clone 60137 (TRBV2, TRBJ2-1)
CASSVGGSLSYNEQFF

SEQ ID NO: 120275 - protein, 14 aa, Homo sapiens
  CDR3 for alpha chain variable domain of TCR clone 60138 (TRAV1-2, TRAJ6)
CAVSLSGGSHIPTF

SEQ ID NO: 120276 - protein, 15 aa, Homo sapiens
  CDR3 for beta chain variable domain of TCR clone 60138 (TRBV28, TRBJ2-7)
CASSPGGRGFYEQYF

SEQ ID NO: 120277 - protein, 13 aa, Homo sapiens
  CDR3 for alpha chain variable domain of TCR clone 60139 (TRAV8-3, TRAJ48)
CAVVLFGNEKLTF

SEQ ID NO: 120278 - protein, 15 aa, Homo sapiens
  CDR3 for beta chain variable domain of TCR clone 60139 (TRBV11-2, TRBJ2-1)
CASSSPSTRYNEQFF

SEQ ID NO: 120279 - protein, 14 aa, Homo sapiens
  CDR3 for alpha chain variable domain of TCR clone 60140 (TRAV26-1, TRAJ45)
CIEVTGGGADGLTF

SEQ ID NO: 120280 - protein, 14 aa, Homo sapiens
  CDR3 for beta chain variable domain of TCR clone 60140 (TRBV5-4, TRBJ1-1)
CASSLDSRRDEAFF

SEQ ID NO: 120281 - protein, 16 aa, Homo sapiens
  CDR3 for alpha chain variable domain of TCR clone 60141 (TRAV27, TRAJ52)
CAGAPAGGSSYGKLTF

SEQ ID NO: 120282 - protein, 12 aa, Homo sapiens
  CDR3 for beta chain variable domain of TCR clone 60141 (TRBV27, TRBJ2-1)
CASRGFYNEQFF

SEQ ID NO: 120283 - protein, 15 aa, Homo sapiens
  CDR3 for alpha chain variable domain of TCR clone 60142 (TRAV12-2, TRAJ52)
CAVTSGGTSYGKLTF

SEQ ID NO: 120284 - protein, 15 aa, Homo sapiens
  CDR3 for beta chain variable domain of TCR clone 60142 (TRBV7-2, TRBJ2-1)
CASSPGVISGNEQFF

SEQ ID NO: 120285 - protein, 14 aa, Homo sapiens
  CDR3 for alpha chain variable domain of TCR clone 60143 (TRAV8-4, TRAJ9)
CAVRINTGGFKTIF

SEQ ID NO: 120286 - protein, 15 aa, Homo sapiens
  CDR3 for beta chain variable domain of TCR clone 60143 (TRBV10-2, TRBJ2-6)
CASSEQGTRANVLTF

SEQ ID NO: 120287 - protein, 11 aa, Homo sapiens
  CDR3 for alpha chain variable domain of TCR clone 60144 (TRAV17, TRAJ9)
CATTGGFKTIF

SEQ ID NO: 120288 - protein, 13 aa, Homo sapiens
  CDR3 for beta chain variable domain of TCR clone 60144 (TRBV20-1, TRBJ1-1)
RSAPLGGGTEAFF

SEQ ID NO: 120289 - protein, 15 aa, Homo sapiens
  CDR3 for alpha chain variable domain of TCR clone 60145 (TRAV13-1, TRAJ32)
CAASNGWWRYKQAHL

SEQ ID NO: 120290 - protein, 15 aa, Homo sapiens
  CDR3 for beta chain variable domain of TCR clone 60145 (TRBV20-1, TRBJ2-7)
CSARDRVSGMDEQYF

SEQ ID NO: 120291 - protein, 16 aa, Homo sapiens
  CDR3 for alpha chain variable domain of TCR clone 60146 (TRAV3, TRAJ37)
CAVRGKGSGNTGKLIF

SEQ ID NO: 120292 - protein, 16 aa, Homo sapiens
  CDR3 for beta chain variable domain of TCR clone 60146 (TRBV12-5, TRBJ2-5)
CASGPRTSGSQETQHF

SEQ ID NO: 120293 - protein, 12 aa, Homo sapiens
  CDR3 for alpha chain variable domain of TCR clone 60147 (TRAV14/DV4, TRAJ11)
CAMSLYDSTLTL

SEQ ID NO: 120294 - protein, 19 aa, Homo sapiens
  CDR3 for beta chain variable domain of TCR clone 60147 (TRBV28, TRBJ2-4)
CASSFQPGGPAHSKNIQYF

SEQ ID NO: 120295 - protein, 12 aa, Homo sapiens
  CDR3 for alpha chain variable domain of TCR clone 60148 (TRAV8-1, TRAJ31)
CAVINNNARPMF

SEQ ID NO: 120296 - protein, 15 aa, Homo sapiens
  CDR3 for beta chain variable domain of TCR clone 60148 (TRBV20-1, TRBJ2-2)
CSARGGQGNTGELFF

SEQ ID NO: 120297 - protein, 16 aa, Homo sapiens
  CDR3 for alpha chain variable domain of TCR clone 60149 (TRAV14/DV4, TRAJ53)
CAMREGGGGSNYKLTF

SEQ ID NO: 120298 - protein, 19 aa, Homo sapiens
  CDR3 for beta chain variable domain of TCR clone 60149 (TRBV28, TRBJ2-4)
CASSFQPGGPAHSKNIRYF

SEQ ID NO: 120299 - protein, 13 aa, Homo sapiens
  CDR3 for alpha chain variable domain of TCR clone 60150 (TRAV8-6, TRAJ21)
CAVGPCSLNKFYF

SEQ ID NO: 120300 - protein, 14 aa, Homo sapiens
  CDR3 for beta chain variable domain of TCR clone 60150 (TRBV7-9, TRBJ2-5)
CASSLDTAQETQYF

SEQ ID NO: 120301 - protein, 15 aa, Homo sapiens
  CDR3 for alpha chain variable domain of TCR clone 60151 (TRAV17, TRAJ57)
CATGPSQGGSEKLVF

SEQ ID NO: 120302 - protein, 16 aa, Homo sapiens
  CDR3 for beta chain variable domain of TCR clone 60151 (TRBV12-4, TRBJ1-5)
CASSRPVVGSNQPQHF

SEQ ID NO: 120303 - protein, 14 aa, Homo sapiens
  CDR3 for alpha chain variable domain of TCR clone 60152 (TRAV8-3, TRAJ4)
CAVGAAGGYNKLIF

SEQ ID NO: 120304 - protein, 15 aa, Homo sapiens
  CDR3 for beta chain variable domain of TCR clone 60152 (TRBV6-5, TRBJ2-1)
CASSYDAGAGSEQFF

SEQ ID NO: 120305 - protein, 12 aa, Homo sapiens
  CDR3 for alpha chain variable domain of TCR clone 60153 (TRAV20, TRAJ56)
CAVTGANSKLTF

SEQ ID NO: 120306 - protein, 12 aa, Homo sapiens
  CDR3 for beta chain variable domain of TCR clone 60153 (TRBV19, TRBJ2-1)
CASSQISNEQFF

SEQ ID NO: 120307 - protein, 11 aa, Homo sapiens
  CDR3 for alpha chain variable domain of TCR clone 60154 (TRAV12-1, TRAJ43)
CVEYDNNDMRL

SEQ ID NO: 120308 - protein, 15 aa, Homo sapiens
  CDR3 for beta chain variable domain of TCR clone 60154 (TRBV18, TRBJ2-5)
CASSPRASEAETQYF

SEQ ID NO: 120309 - protein, 12 aa, Homo sapiens
  CDR3 for alpha chain variable domain of TCR clone 60155 (TRAV12-3, TRAJ5)
CAMDTGRGALTF

SEQ ID NO: 120310 - protein, 13 aa, Homo sapiens
  CDR3 for beta chain variable domain of TCR clone 60155 (TRBV7-7, TRBJ2-2)
CASSLTSAGELFF

SEQ ID NO: 120311 - protein, 14 aa, Homo sapiens
  CDR3 for alpha chain variable domain of TCR clone 60156 (TRAV12-3, TRAJ29)
CAMILLSGNTTLVF

SEQ ID NO: 120312 - protein, 16 aa, Homo sapiens
  CDR3 for beta chain variable domain of TCR clone 60156 (TRBV28, TRBJ2-7)
CASSSGTSGRGYEQYF

SEQ ID NO: 120313 - protein, 16 aa, Homo sapiens
  CDR3 for alpha chain variable domain of TCR clone 60157 (TRAV30, TRAJ24)
CGTEIVDADSWGKFQF

SEQ ID NO: 120314 - protein, 12 aa, Homo sapiens
  CDR3 for beta chain variable domain of TCR clone 60157 (TRBV7-9, TRBJ1-4)
CASSTDREKLFF

SEQ ID NO: 120315 - protein, 11 aa, Homo sapiens
  CDR3 for alpha chain variable domain of TCR clone 60158 (TRAV1-1, TRAJ23)
CAVRQGGKLIF

SEQ ID NO: 120316 - protein, 14 aa, Homo sapiens
  CDR3 for beta chain variable domain of TCR clone 60158 (TRBV5-1, TRBJ2-7)
CASSRGESLYEQYF

SEQ ID NO: 120317 - protein, 12 aa, Homo sapiens
  CDR3 for alpha chain variable domain of TCR clone 60159 (TRAV16, TRAJ56)
CAPTGANSKLTF

SEQ ID NO: 120318 - protein, 17 aa, Homo sapiens
  CDR3 for beta chain variable domain of TCR clone 60159 (TRBV27, TRBJ2-6)
CASSWTGFASGANVLTF

SEQ ID NO: 120319 - protein, 15 aa, Homo sapiens
  CDR3 for alpha chain variable domain of TCR clone 60160 (TRAV13-2, TRAJ10)
CAENRDTGGGNKLTF

SEQ ID NO: 120320 - protein, 16 aa, Homo sapiens
  CDR3 for beta chain variable domain of TCR clone 60160 (TRBV2, TRBJ1-3)
CASSRTGGSTGNTMYF

SEQ ID NO: 120321 - protein, 13 aa, Homo sapiens
  CDR3 for alpha chain variable domain of TCR clone 60161 (TRAV21, TRAJ27)
CAARPGNAGKSTF

SEQ ID NO: 120322 - protein, 14 aa, Homo sapiens
  CDR3 for beta chain variable domain of TCR clone 60161 (TRBV11-2, TRBJ2-7)
CASNLGAGAYEQYF

SEQ ID NO: 120323 - protein, 13 aa, Homo sapiens
  CDR3 for alpha chain variable domain of TCR clone 60162 (TRAV27, TRAJ57)
CAGFQGGSEKLVF

SEQ ID NO: 120324 - protein, 14 aa, Homo sapiens
  CDR3 for beta chain variable domain of TCR clone 60162 (TRBV20-1, TRBJ1-2)
CSGRRDGRAYGYTF

SEQ ID NO: 120325 - protein, 14 aa, Homo sapiens
  CDR3 for alpha chain variable domain of TCR clone 60163 (TRAV1-2, TRAJ16)
CAVNRFSDGQKLLF

SEQ ID NO: 120326 - protein, 13 aa, Homo sapiens
  CDR3 for beta chain variable domain of TCR clone 60163 (TRBV7-2, TRBJ2-5)
CASSQTSVETQYF

SEQ ID NO: 120327 - protein, 13 aa, Homo sapiens
  CDR3 for alpha chain variable domain of TCR clone 60164 (TRAV8-3, TRAJ43)
CAVMPYNNNDMRF

SEQ ID NO: 120328 - protein, 17 aa, Homo sapiens
  CDR3 for beta chain variable domain of TCR clone 60164 (TRBV7-7, TRBJ1-1)
CASIGDRPNLGVTEAFF

SEQ ID NO: 120329 - protein, 18 aa, Homo sapiens
  CDR3 for alpha chain variable domain of TCR clone 60165 (TRAV21, TRAJ52)
CAVRPSPAGGTSYGKLTF

SEQ ID NO: 120330 - protein, 14 aa, Homo sapiens
  CDR3 for beta chain variable domain of TCR clone 60165 (TRBV11-2, TRBJ2-7)
CASSLGAGAYEQYF

SEQ ID NO: 120331 - protein, 10 aa, Homo sapiens
  CDR3 for alpha chain variable domain of TCR clone 60166 (TRAV1-2, TRAJ20)
CALNDYKLSF

SEQ ID NO: 120332 - protein, 14 aa, Homo sapiens
  CDR3 for beta chain variable domain of TCR clone 60166 (TRBV19, TRBJ2-1)
CASPIFVLSGEQFF

SEQ ID NO: 120333 - protein, 14 aa, Homo sapiens
  CDR3 for alpha chain variable domain of TCR clone 60167 (TRAV38-1, TRAJ29)
CAFITPSGNTPLVF

SEQ ID NO: 120334 - protein, 14 aa, Homo sapiens
  CDR3 for beta chain variable domain of TCR clone 60167 (TRBV7-2, TRBJ2-7)
CASRSQGAAYEQYF

SEQ ID NO: 120335 - protein, 10 aa, Homo sapiens
  CDR3 for alpha chain variable domain of TCR clone 60168 (TRAV26-1, TRAJ40)
CIAGTYKYIF

SEQ ID NO: 120336 - protein, 15 aa, Homo sapiens
  CDR3 for beta chain variable domain of TCR clone 60168 (TRBV19, TRBJ2-1)
CASSSPGEPLDEQFF

SEQ ID NO: 120337 - protein, 12 aa, Homo sapiens
  CDR3 for alpha chain variable domain of TCR clone 60169 (TRAV29/DV5, TRAJ49)
CAATDTGNQFYF

SEQ ID NO: 120338 - protein, 12 aa, Homo sapiens
  CDR3 for beta chain variable domain of TCR clone 60169 (TRBV12-4, TRBJ2-7)
RASSLGGYEQYF

SEQ ID NO: 120339 - protein, 12 aa, Homo sapiens
  CDR3 for alpha chain variable domain of TCR clone 60170 (TRAV2, TRAJ9)
CAVGAGGFKTIF

SEQ ID NO: 120340 - protein, 14 aa, Homo sapiens
  CDR3 for beta chain variable domain of TCR clone 60170 (TRBV20-1, TRBJ2-3)
CSARGGTSTDTQYF

SEQ ID NO: 120341 - protein, 12 aa, Homo sapiens
  CDR3 for alpha chain variable domain of TCR clone 60171 (TRAV12-3, TRAJ5)
CAMDTGRRALTF

SEQ ID NO: 120342 - protein, 14 aa, Homo sapiens
  CDR3 for beta chain variable domain of TCR clone 60171 (TRBV20-1, TRBJ2-1)
CSAQIGGSANKQFF

SEQ ID NO: 120343 - protein, 17 aa, Homo sapiens
  CDR3 for alpha chain variable domain of TCR clone 60172 (TRAV23/DV6, TRAJ58)
CAARLLRGETSGSRLTF

SEQ ID NO: 120344 - protein, 13 aa, Homo sapiens
  CDR3 for beta chain variable domain of TCR clone 60172 (TRBV7-3, TRBJ2-1)
CQQLSGGTNEQFF

SEQ ID NO: 120345 - protein, 14 aa, Homo sapiens
  CDR3 for alpha chain variable domain of TCR clone 60173 (TRAV38-1, TRAJ29)
CAFITPSGNTHLVF

SEQ ID NO: 120346 - protein, 14 aa, Homo sapiens
  CDR3 for beta chain variable domain of TCR clone 60173 (TRBV18, TRBJ2-7)
CASSPRGGAYEQYF

SEQ ID NO: 120347 - protein, 10 aa, Homo sapiens
  CDR3 for alpha chain variable domain of TCR clone 60174 (TRAV12-1, TRAJ37)
ARGNTGELIF

SEQ ID NO: 120348 - protein, 15 aa, Homo sapiens
  CDR3 for beta chain variable domain of TCR clone 60174 (TRBV7-2, TRBJ2-3)
CASSLEQGGTDTRYF

SEQ ID NO: 120349 - protein, 16 aa, Homo sapiens
  CDR3 for alpha chain variable domain of TCR clone 60175 (TRAV3, TRAJ37)
CAVRGKGSSNTGKLIF

SEQ ID NO: 120350 - protein, 12 aa, Homo sapiens
  CDR3 for beta chain variable domain of TCR clone 60175 (TRBV11-2, TRBJ2-2)
CASSLGGGELFF

SEQ ID NO: 120351 - protein, 14 aa, Homo sapiens
  CDR3 for alpha chain variable domain of TCR clone 60176 (TRAV12-3, TRAJ10)
SHLPLTGGGNKLTF

SEQ ID NO: 120352 - protein, 15 aa, Homo sapiens
  CDR3 for beta chain variable domain of TCR clone 60176 (TRBV29-1, TRBJ2-7)
CSIEFFDRGSYEQYF

SEQ ID NO: 120353 - protein, 13 aa, Homo sapiens
  CDR3 for alpha chain variable domain of TCR clone 60177 (TRAV12-3, TRAJ13)
CAMSSGGYQKVTF

SEQ ID NO: 120354 - protein, 13 aa, Homo sapiens
  CDR3 for beta chain variable domain of TCR clone 60177 (TRBV20-1, TRBJ1-1)
CSAPPGGHTEASF

SEQ ID NO: 120355 - protein, 11 aa, Homo sapiens
  CDR3 for alpha chain variable domain of TCR clone 60178 (TRAV12-2, TRAJ20)
CAVKYDYKLSF

SEQ ID NO: 120356 - protein, 14 aa, Homo sapiens
  CDR3 for beta chain variable domain of TCR clone 60178 (TRBV7-8, TRBJ2-3)
CASSFPDGQDTQYF

SEQ ID NO: 120357 - protein, 15 aa, Homo sapiens
  CDR3 for alpha chain variable domain of TCR clone 60179 (TRAV12-3, TRAJ6)
CAMSATTGGSYIPTF

SEQ ID NO: 120358 - protein, 12 aa, Homo sapiens
  CDR3 for beta chain variable domain of TCR clone 60179 (TRBV11-2, TRBJ2-2)
CASSLPTGELFF

SEQ ID NO: 120359 - protein, 17 aa, Homo sapiens
  CDR3 for alpha chain variable domain of TCR clone 60180 (TRAV2, TRAJ22)
IIQVREADAAEQRQLTF

SEQ ID NO: 120360 - protein, 16 aa, Homo sapiens
  CDR3 for beta chain variable domain of TCR clone 60180 (TRBV2, TRBJ2-5)
CASSETQGVGEETQYF

SEQ ID NO: 120361 - protein, 17 aa, Homo sapiens
  CDR3 for alpha chain variable domain of TCR clone 60181 (TRAV3, TRAJ6)
CAVRDGPRAGGSYIPTF

SEQ ID NO: 120362 - protein, 16 aa, Homo sapiens
  CDR3 for beta chain variable domain of TCR clone 60181 (TRBV4-3, TRBJ2-2)
CASSHLQGSGTGELFF

SEQ ID NO: 120363 - protein, 17 aa, Homo sapiens
  CDR3 for alpha chain variable domain of TCR clone 60182 (TRAV3, TRAJ12)
CAVRDGGRMDSSYKLIF

SEQ ID NO: 120364 - protein, 17 aa, Homo sapiens
  CDR3 for beta chain variable domain of TCR clone 60182 (TRBV13, TRBJ2-3)
CASSLSRVAGGRNTQYF

SEQ ID NO: 120365 - protein, 13 aa, Homo sapiens
  CDR3 for alpha chain variable domain of TCR clone 60183 (TRAV13-1, TRAJ39)
CAASIWAGDMLTF

SEQ ID NO: 120366 - protein, 13 aa, Homo sapiens
  CDR3 for beta chain variable domain of TCR clone 60183 (TRBV7-9, TRBJ1-2)
CASSLKQNYGYTF

SEQ ID NO: 120367 - protein, 15 aa, Homo sapiens
  CDR3 for alpha chain variable domain of TCR clone 60184 (TRAV16, TRAJ12)
CSKWPLRDSSYKLIF

SEQ ID NO: 120368 - protein, 12 aa, Homo sapiens
  CDR3 for beta chain variable domain of TCR clone 60184 (TRBV7-9, TRBJ2-7)
CASSIKREEQYF

SEQ ID NO: 120369 - protein, 14 aa, Homo sapiens
  CDR3 for alpha chain variable domain of TCR clone 60185 (TRAV12-2, TRAJ33)
CAVKRARSNYQLIW

SEQ ID NO: 120370 - protein, 19 aa, Homo sapiens
  CDR3 for beta chain variable domain of TCR clone 60185 (TRBV25-1, TRBJ2-2)
CAILVYRVDRGRKTGELFF

SEQ ID NO: 120371 - protein, 13 aa, Homo sapiens
  CDR3 for alpha chain variable domain of TCR clone 60186 (TRAV21, TRAJ45)
CAVMGGGADGLTF

SEQ ID NO: 120372 - protein, 16 aa, Homo sapiens
  CDR3 for beta chain variable domain of TCR clone 60186 (TRBV28, TRBJ2-1)
CASSSPEYPRDNEQFF

SEQ ID NO: 120373 - protein, 15 aa, Homo sapiens
  CDR3 for alpha chain variable domain of TCR clone 60187 (TRAV25, TRAJ52)
CAGRPGGTSYGKLTF

SEQ ID NO: 120374 - protein, 15 aa, Homo sapiens
  CDR3 for beta chain variable domain of TCR clone 60187 (TRBV4-2, TRBJ1-2)
CASSQRTGGRDGYTF

SEQ ID NO: 120375 - protein, 12 aa, Homo sapiens
  CDR3 for alpha chain variable domain of TCR clone 60188 (TRAV38-2/DV8, TRAJ57)
CTWKGGSEKLVF

SEQ ID NO: 120376 - protein, 13 aa, Homo sapiens
  CDR3 for beta chain variable domain of TCR clone 60188 (TRBV5-1, TRBJ1-5)
CASSLAQDQPQHF

SEQ ID NO: 120377 - protein, 20 aa, Homo sapiens
  CDR3 for alpha chain variable domain of TCR clone 60189 (TRAV8-3, TRAJ44)
LSTSVLWVRLYTGTASKLTF

SEQ ID NO: 120378 - protein, 14 aa, Homo sapiens
  CDR3 for beta chain variable domain of TCR clone 60189 (TRBV12-5, TRBJ2-5)
CASGSRTHQETQYF

SEQ ID NO: 120379 - protein, 17 aa, Homo sapiens
  CDR3 for alpha chain variable domain of TCR clone 60190 (TRAV4, TRAJ18)
CLVGERSVGSTLGGLYF

SEQ ID NO: 120380 - protein, 16 aa, Homo sapiens
  CDR3 for beta chain variable domain of TCR clone 60190 (TRBV15, TRBJ1-4)
CATSRDSPPGREKLFF

SEQ ID NO: 120381 - protein, 12 aa, Homo sapiens
  CDR3 for alpha chain variable domain of TCR clone 60191 (TRAV21, TRAJ33)
CAKMDSNYQLIW

SEQ ID NO: 120382 - protein, 15 aa, Homo sapiens
  CDR3 for beta chain variable domain of TCR clone 60191 (TRBV7-9, TRBJ2-7)
CASSLALAEAYEQYF

SEQ ID NO: 120383 - protein, 17 aa, Homo sapiens
  CDR3 for alpha chain variable domain of TCR clone 60192 (TRAV3, TRAJ6)
CAVRDGPRAGGSYIPTF

SEQ ID NO: 120384 - protein, 15 aa, Homo sapiens
  CDR3 for beta chain variable domain of TCR clone 60192 (TRBV28, TRBJ2-1)
CASSIIAGGRSGQFF

SEQ ID NO: 120385 - protein, 11 aa, Homo sapiens
  CDR3 for alpha chain variable domain of TCR clone 60193 (TRAV2, TRAJ33)
CAVDSNYQLIW

SEQ ID NO: 120386 - protein, 16 aa, Homo sapiens
  CDR3 for beta chain variable domain of TCR clone 60193 (TRBV5-1, TRBJ1-1)
CASSSGGNSLNTEAFF

SEQ ID NO: 120387 - protein, 13 aa, Homo sapiens
  CDR3 for alpha chain variable domain of TCR clone 60194 (TRAV20, TRAJ49)
CAVQARTGNQLYF

SEQ ID NO: 120388 - protein, 14 aa, Homo sapiens
  CDR3 for beta chain variable domain of TCR clone 60194 (TRBV5-1, TRBJ1-1)
CASSLQGASTEAFF

SEQ ID NO: 120389 - protein, 15 aa, Homo sapiens
  CDR3 for alpha chain variable domain of TCR clone 60195 (TRAV4, TRAJ39)
CLVGPNNNAGNMLTF

SEQ ID NO: 120390 - protein, 11 aa, Homo sapiens
  CDR3 for beta chain variable domain of TCR clone 60195 (TRBV19, TRBJ1-1)
CASSIGSEAFF

SEQ ID NO: 120391 - protein, 15 aa, Homo sapiens
  CDR3 for alpha chain variable domain of TCR clone 60196 (TRAV3, TRAJ29)
CAVRGINSGNTPLVF

SEQ ID NO: 120392 - protein, 16 aa, Homo sapiens
  CDR3 for beta chain variable domain of TCR clone 60196 (TRBV4-1, TRBJ2-5)
CASSQTFYGDQETQYF

SEQ ID NO: 120393 - protein, 17 aa, Homo sapiens
  CDR3 for alpha chain variable domain of TCR clone 60197 (TRAV13-1, TRAJ52)
CAASSGAGGTNYGKLTF

SEQ ID NO: 120394 - protein, 15 aa, Homo sapiens
  CDR3 for beta chain variable domain of TCR clone 60197 (TRBV2, TRBJ2-1)
CASSELAGSYDEQFF

SEQ ID NO: 120395 - protein, 15 aa, Homo sapiens
  CDR3 for alpha chain variable domain of TCR clone 60198 (TRAV12-3, TRAJ6)
CAMGAASGGSYIPTF

SEQ ID NO: 120396 - protein, 13 aa, Homo sapiens
  CDR3 for beta chain variable domain of TCR clone 60198 (TRBV20-1, TRBJ1-2)
CSASTERIYGYTF

SEQ ID NO: 120397 - protein, 13 aa, Homo sapiens
  CDR3 for alpha chain variable domain of TCR clone 60199 (TRAV34, TRAJ33)
CGADMNSNYQLIW

SEQ ID NO: 120398 - protein, 16 aa, Homo sapiens
  CDR3 for beta chain variable domain of TCR clone 60199 (TRBV20-1, TRBJ2-1)
CSASLAGGPGYNEQLF

SEQ ID NO: 120399 - protein, 14 aa, Homo sapiens
  CDR3 for alpha chain variable domain of TCR clone 60200 (TRAV14/DV4, TRAJ26)
CAMREGAYGQNFVF

SEQ ID NO: 120400 - protein, 17 aa, Homo sapiens
  CDR3 for beta chain variable domain of TCR clone 60200 (TRBV7-2, TRBJ2-7)
CASSFETSGSTSSTSGR

SEQ ID NO: 120401 - protein, 18 aa, Homo sapiens
  CDR3 for alpha chain variable domain of TCR clone 60201 (TRAV13-1, TRAJ52)
CAASKRSAGGTSSGKLTF

SEQ ID NO: 120402 - protein, 13 aa, Homo sapiens
  CDR3 for beta chain variable domain of TCR clone 60201 (TRBV12-4, TRBJ1-2)
CASSLRQGKGYTF

SEQ ID NO: 120403 - protein, 14 aa, Homo sapiens
  CDR3 for alpha chain variable domain of TCR clone 60202 (TRAV8-3, TRAJ4)
CAVGAAGGYNKLIF

SEQ ID NO: 120404 - protein, 15 aa, Homo sapiens
  CDR3 for beta chain variable domain of TCR clone 60202 (TRBV7-8, TRBJ2-3)
CASSPRTGSTDTQYF

SEQ ID NO: 120405 - protein, 14 aa, Homo sapiens
  CDR3 for alpha chain variable domain of TCR clone 60203 (TRAV29/DV5, TRAJ36)
CAARRKTGANNLYF

SEQ ID NO: 120406 - protein, 14 aa, Homo sapiens
  CDR3 for beta chain variable domain of TCR clone 60203 (TRBV12-5, TRBJ2-5)
CASGSRTHQETQYF

SEQ ID NO: 120407 - protein, 16 aa, Homo sapiens
  CDR3 for alpha chain variable domain of TCR clone 60204 (TRAV3, TRAJ18)
CAVSDGRGSTLGRLYF

SEQ ID NO: 120408 - protein, 15 aa, Homo sapiens
  CDR3 for beta chain variable domain of TCR clone 60204 (TRBV7-9, TRBJ1-6)
CASSSPGRGNSPLHF

SEQ ID NO: 120409 - protein, 14 aa, Homo sapiens
  CDR3 for alpha chain variable domain of TCR clone 60205 (TRAV1-2, TRAJ8)
CAVREDTGFQKLVF

SEQ ID NO: 120410 - protein, 15 aa, Homo sapiens
  CDR3 for beta chain variable domain of TCR clone 60205 (TRBV19, TRBJ2-1)
CASSMGWNSNNEQFF

SEQ ID NO: 120411 - protein, 13 aa, Homo sapiens
  CDR3 for alpha chain variable domain of TCR clone 60206 (TRAV21, TRAJ27)
CAARPGNAGKSTF

SEQ ID NO: 120412 - protein, 15 aa, Homo sapiens
  CDR3 for beta chain variable domain of TCR clone 60206 (TRBV7-3, TRBJ2-1)
CASSLGQGPFGEQFF

SEQ ID NO: 120413 - protein, 13 aa, Homo sapiens
  CDR3 for alpha chain variable domain of TCR clone 60207 (TRAV26-2, TRAJ43)
CILRAVNNNDMRF

SEQ ID NO: 120414 - protein, 15 aa, Homo sapiens
  CDR3 for beta chain variable domain of TCR clone 60207 (TRBV20-1, TRBJ2-7)
CSARDRVSGMDEQYF

SEQ ID NO: 120415 - protein, 15 aa, Homo sapiens
  CDR3 for alpha chain variable domain of TCR clone 60208 (TRAV8-3, TRAJ23)
CAVGDRYNKGGKLIF

SEQ ID NO: 120416 - protein, 22 aa, Homo sapiens
  CDR3 for beta chain variable domain of TCR clone 60208 (TRBV29-1, TRBJ2-5)
TVSNMSPEDSSIYLCSAGTQYF

SEQ ID NO: 120417 - protein, 12 aa, Homo sapiens
  CDR3 for alpha chain variable domain of TCR clone 60209 (TRAV8-3, TRAJ26)
CAGDNYGQNFAF

SEQ ID NO: 120418 - protein, 14 aa, Homo sapiens
  CDR3 for beta chain variable domain of TCR clone 60209 (TRBV5-5, TRBJ1-5)
CASSGQGVDQPQHF

SEQ ID NO: 120419 - protein, 22 aa, Homo sapiens
  CDR3 for alpha chain variable domain of TCR clone 60210 (TRAV4, )
CLVGPHNYDIQNPDPAGYQLRD

SEQ ID NO: 120420 - protein, 17 aa, Homo sapiens
  CDR3 for beta chain variable domain of TCR clone 60210 (TRBV24-1, TRBJ2-1)
CATSDVSTSGTYNEQFF

SEQ ID NO: 120421 - protein, 10 aa, Homo sapiens
  CDR3 for alpha chain variable domain of TCR clone 60211 (TRAV2, TRAJ15)
RGQAGTALIF

SEQ ID NO: 120422 - protein, 15 aa, Homo sapiens
  CDR3 for beta chain variable domain of TCR clone 60211 (TRBV6-3, TRBJ2-7)
CASSSPGTVFYEQYF

SEQ ID NO: 120423 - protein, 18 aa, Homo sapiens
  CDR3 for alpha chain variable domain of TCR clone 60212 (TRAV13-1, TRAJ52)
CAAKNPDAGGTSYGKLTF

SEQ ID NO: 120424 - protein, 11 aa, Homo sapiens
  CDR3 for beta chain variable domain of TCR clone 60212 (TRBV29-1, TRBJ2-5)
CSEDRTGTQYF

SEQ ID NO: 120425 - protein, 12 aa, Homo sapiens
  CDR3 for alpha chain variable domain of TCR clone 60213 (TRAV12-3, TRAJ17)
CAMTITGNKLTF

SEQ ID NO: 120426 - protein, 12 aa, Homo sapiens
  CDR3 for beta chain variable domain of TCR clone 60213 (TRBV14, TRBJ2-5)
CASSQLKETQYF

SEQ ID NO: 120427 - protein, 14 aa, Homo sapiens
  CDR3 for alpha chain variable domain of TCR clone 60214 (TRAV17, TRAJ11)
YATDTSRGYSTLTF

SEQ ID NO: 120428 - protein, 13 aa, Homo sapiens
  CDR3 for beta chain variable domain of TCR clone 60214 (TRBV19, TRBJ2-5)
CASRDSRRETQYF

SEQ ID NO: 120429 - protein, 13 aa, Homo sapiens
  CDR3 for alpha chain variable domain of TCR clone 60215 (TRAV3, TRAJ43)
CAVRDTRGGDMRF

SEQ ID NO: 120430 - protein, 15 aa, Homo sapiens
  CDR3 for beta chain variable domain of TCR clone 60215 (TRBV6-5, TRBJ1-5)
CAGSYSRRSNQPQHF

SEQ ID NO: 120431 - protein, 13 aa, Homo sapiens
  CDR3 for alpha chain variable domain of TCR clone 60216 (TRAV26-1, TRAJ34)
CIVRGHNTDKLIF

SEQ ID NO: 120432 - protein, 15 aa, Homo sapiens
  CDR3 for beta chain variable domain of TCR clone 60216 (TRBV4-1, TRBJ2-7)
CASSQECGPSYEQYF

SEQ ID NO: 120433 - protein, 17 aa, Homo sapiens
  CDR3 for alpha chain variable domain of TCR clone 60217 (TRAV3, TRAJ12)
CAVRDGGRMDSSYKLIC

SEQ ID NO: 120434 - protein, 14 aa, Homo sapiens
  CDR3 for beta chain variable domain of TCR clone 60217 (TRBV7-9, TRBJ1-2)
CASSRQGANYGYTF

SEQ ID NO: 120435 - protein, 11 aa, Homo sapiens
  CDR3 for alpha chain variable domain of TCR clone 60218 (TRAV27, TRAJ47)
CRSNQGNKLVF

SEQ ID NO: 120436 - protein, 15 aa, Homo sapiens
  CDR3 for beta chain variable domain of TCR clone 60218 (TRBV7-9, TRBJ1-4)
CASSRTGGFNEKLFF

SEQ ID NO: 120437 - protein, 15 aa, Homo sapiens
  CDR3 for alpha chain variable domain of TCR clone 60219 (TRAV25, TRAJ52)
CAGRPGGTSYGKLTF

SEQ ID NO: 120438 - protein, 17 aa, Homo sapiens
  CDR3 for beta chain variable domain of TCR clone 60219 (TRBV7-8, TRBJ2-6)
CASSAGTGGAGANVLIF

SEQ ID NO: 120439 - protein, 12 aa, Homo sapiens
  CDR3 for alpha chain variable domain of TCR clone 60220 (TRAV3, TRAJ43)
CAVRAPNNDMRF

SEQ ID NO: 120440 - protein, 15 aa, Homo sapiens
  CDR3 for beta chain variable domain of TCR clone 60220 (TRBV27, TRBJ1-5)
CASSLGTGFDQPQHF

SEQ ID NO: 120441 - protein, 15 aa, Homo sapiens
  CDR3 for alpha chain variable domain of TCR clone 60221 (TRAV4, TRAJ5)
CLVGDLDMGRRALTF

SEQ ID NO: 120442 - protein, 16 aa, Homo sapiens
  CDR3 for beta chain variable domain of TCR clone 60221 (TRBV11-3, TRBJ2-5)
CASSSVVAGSTETQYF

SEQ ID NO: 120443 - protein, 13 aa, Homo sapiens
  CDR3 for alpha chain variable domain of TCR clone 60222 (TRAV8-6, TRAJ49)
CAVITNTGNQFYF

SEQ ID NO: 120444 - protein, 14 aa, Homo sapiens
  CDR3 for beta chain variable domain of TCR clone 60222 (TRBV11-2, TRBJ2-7)
CASSLGAGAYEQYF

SEQ ID NO: 120445 - protein, 13 aa, Homo sapiens
  CDR3 for alpha chain variable domain of TCR clone 60223 (TRAV12-3, TRAJ13)
CAMGTGGYQKVTF

SEQ ID NO: 120446 - protein, 14 aa, Homo sapiens
  CDR3 for beta chain variable domain of TCR clone 60223 (TRBV7-2, TRBJ2-5)
CASSTGGELNTQYF

SEQ ID NO: 120447 - protein, 16 aa, Homo sapiens
  CDR3 for alpha chain variable domain of TCR clone 60224 (TRAV30, TRAJ24)
CGTEVVGADSWGKFQF

SEQ ID NO: 120448 - protein, 15 aa, Homo sapiens
  CDR3 for beta chain variable domain of TCR clone 60224 (TRBV7-9, TRBJ1-4)
CASSARTGGNEKLFF

SEQ ID NO: 120449 - protein, 14 aa, Homo sapiens
  CDR3 for alpha chain variable domain of TCR clone 60225 (TRAV8-2, TRAJ4)
CVVSPSGGYNKLIF

SEQ ID NO: 120450 - protein, 15 aa, Homo sapiens
  CDR3 for beta chain variable domain of TCR clone 60225 (TRBV4-1, TRBJ1-4)
CASSDAGGTNEKLFF

SEQ ID NO: 120451 - protein, 13 aa, Homo sapiens
  CDR3 for alpha chain variable domain of TCR clone 60226 (TRAV36/DV7, TRAJ37)
CTVFSSNTGKLIF

SEQ ID NO: 120452 - protein, 18 aa, Homo sapiens
  CDR3 for beta chain variable domain of TCR clone 60226 (TRBV11-2, TRBJ2-3)
CASSLGGASRGAPNTQYF

SEQ ID NO: 120453 - protein, 15 aa, Homo sapiens
  CDR3 for alpha chain variable domain of TCR clone 60227 (TRAV12-2, TRAJ53)
CALNGGGGSNYKLTF

SEQ ID NO: 120454 - protein, 17 aa, Homo sapiens
  CDR3 for beta chain variable domain of TCR clone 60227 (TRBV7-3, TRBJ2-3)
RASSLMKRMRGADTQYF

SEQ ID NO: 120455 - protein, 23 aa, Homo sapiens
  CDR3 for alpha chain variable domain of TCR clone 60228 (TRAV26-1, TRAJ38)
CIVRPLNAGNNHIQNPDPAVYQL

SEQ ID NO: 120456 - protein, 13 aa, Homo sapiens
  CDR3 for beta chain variable domain of TCR clone 60228 (TRBV18, TRBJ1-1)
CASSPNGYTEAFF

SEQ ID NO: 120457 - protein, 13 aa, Homo sapiens
  CDR3 for alpha chain variable domain of TCR clone 60229 (TRAV30, TRAJ49)
CGTEPNTGNQLYF

SEQ ID NO: 120458 - protein, 14 aa, Homo sapiens
  CDR3 for beta chain variable domain of TCR clone 60229 (TRBV29-1, TRBJ2-1)
CSVEFRGIPFEQFF

SEQ ID NO: 120459 - protein, 12 aa, Homo sapiens
  CDR3 for alpha chain variable domain of TCR clone 60230 (TRAV3, TRAJ26)
CAVRVYGQNFVF

SEQ ID NO: 120460 - protein, 16 aa, Homo sapiens
  CDR3 for beta chain variable domain of TCR clone 60230 (TRBV11-2, TRBJ1-2)
CASSPSGREANYGYTF

SEQ ID NO: 120461 - protein, 18 aa, Homo sapiens
  CDR3 for alpha chain variable domain of TCR clone 60231 (TRAV21, TRAJ52)
CAVRPSPAGGTSYGKPTF

SEQ ID NO: 120462 - protein, 15 aa, Homo sapiens
  CDR3 for beta chain variable domain of TCR clone 60231 (TRBV20-1, TRBJ1-5)
CSAFKNGQRNQPQHF

SEQ ID NO: 120463 - protein, 12 aa, Homo sapiens
  CDR3 for alpha chain variable domain of TCR clone 60232 (TRAV1-1, TRAJ39)
CAVPVVGNMLTF

SEQ ID NO: 120464 - protein, 15 aa, Homo sapiens
  CDR3 for beta chain variable domain of TCR clone 60232 (TRBV2, TRBJ2-1)
CASSELAGSYNEQFF

SEQ ID NO: 120465 - protein, 12 aa, Homo sapiens
  CDR3 for alpha chain variable domain of TCR clone 60233 (TRAV27, )
CAGALKLATTIS

SEQ ID NO: 120466 - protein, 15 aa, Homo sapiens
  CDR3 for beta chain variable domain of TCR clone 60233 (TRBV7-2, TRBJ2-7)
CASSSVAGQTYEQYS

SEQ ID NO: 120467 - protein, 11 aa, Homo sapiens
  CDR3 for alpha chain variable domain of TCR clone 60234 (TRAV1-1, TRAJ23)
CAVRQGGKLIF

SEQ ID NO: 120468 - protein, 20 aa, Homo sapiens
  CDR3 for beta chain variable domain of TCR clone 60234 (TRBV7-8, TRBJ2-2)
CASSHLFPGPTIHNTGELFF

SEQ ID NO: 120469 - protein, 12 aa, Homo sapiens
  CDR3 for alpha chain variable domain of TCR clone 60235 (TRAV12-1, TRAJ39)
CGEDNAGNMLTF

SEQ ID NO: 120470 - protein, 14 aa, Homo sapiens
  CDR3 for beta chain variable domain of TCR clone 60235 (TRBV19, TRBJ2-7)
CASNFRDTFTGMYF

SEQ ID NO: 120471 - protein, 19 aa, Homo sapiens
  CDR3 for alpha chain variable domain of TCR clone 60236 (TRAV26-1, TRAJ52)
CIVRAHRNAGGTSYGKLTF

SEQ ID NO: 120472 - protein, 14 aa, Homo sapiens
  CDR3 for beta chain variable domain of TCR clone 60236 (TRBV19, TRBJ2-2)
CASSGQGIAGELFF

SEQ ID NO: 120473 - protein, 16 aa, Homo sapiens
  CDR3 for alpha chain variable domain of TCR clone 60237 (TRAV3, TRAJ37)
CAVRVRGSGNTGKLVF

SEQ ID NO: 120474 - protein, 11 aa, Homo sapiens
  CDR3 for beta chain variable domain of TCR clone 60237 (TRBV11-2, TRBJ2-2)
CASSLPGELFF

SEQ ID NO: 120475 - protein, 15 aa, Homo sapiens
  CDR3 for alpha chain variable domain of TCR clone 60238 (TRAV12-1, TRAJ45)
CVVLSGGGGADGLTF

SEQ ID NO: 120476 - protein, 15 aa, Homo sapiens
  CDR3 for beta chain variable domain of TCR clone 60238 (TRBV20-1, TRBJ2-7)
CSARDRVSGMDEQYS

SEQ ID NO: 120477 - protein, 12 aa, Homo sapiens
  CDR3 for alpha chain variable domain of TCR clone 60239 (TRAV27, TRAJ35)
CAVADFGNVLHC

SEQ ID NO: 120478 - protein, 16 aa, Homo sapiens
  CDR3 for beta chain variable domain of TCR clone 60239 (TRBV6-1, TRBJ2-1)
CASISRQGSSYNEQFF

SEQ ID NO: 120479 - protein, 14 aa, Homo sapiens
  CDR3 for alpha chain variable domain of TCR clone 60240 (TRAV1-2, TRAJ16)
CAVNRFSDGQKLLF

SEQ ID NO: 120480 - protein, 13 aa, Homo sapiens
  CDR3 for beta chain variable domain of TCR clone 60240 (TRBV12-5, TRBJ2-1)
CASGLGRGNEQFF

SEQ ID NO: 120481 - protein, 12 aa, Homo sapiens
  CDR3 for alpha chain variable domain of TCR clone 60241 (TRAV27, TRAJ36)
CAGMTGANNLFF

SEQ ID NO: 120482 - protein, 14 aa, Homo sapiens
  CDR3 for beta chain variable domain of TCR clone 60241 (TRBV12-4, TRBJ2-3)
RASSLVPSTDTQYF

SEQ ID NO: 120483 - protein, 12 aa, Homo sapiens
  CDR3 for alpha chain variable domain of TCR clone 60242 (TRAV16, TRAJ10)
CSRTGGGNKLTF

SEQ ID NO: 120484 - protein, 15 aa, Homo sapiens
  CDR3 for beta chain variable domain of TCR clone 60242 (TRBV19, TRBJ1-1)
CASTSGQIQNTEAFF

SEQ ID NO: 120485 - protein, 16 aa, Homo sapiens
  CDR3 for alpha chain variable domain of TCR clone 60243 (TRAV21, TRAJ52)
CAVTNAGGTSYGELTF

SEQ ID NO: 120486 - protein, 11 aa, Homo sapiens
  CDR3 for beta chain variable domain of TCR clone 60243 (TRBV2, TRBJ1-1)
CASREGTEAFF

SEQ ID NO: 120487 - protein, 14 aa, Homo sapiens
  CDR3 for alpha chain variable domain of TCR clone 60244 (TRAV1-2, TRAJ16)
CAVNRFSDGQKLLF

SEQ ID NO: 120488 - protein, 15 aa, Homo sapiens
  CDR3 for beta chain variable domain of TCR clone 60244 (TRBV11-2, TRBJ1-6)
CASSLDPWAVSPLHF

SEQ ID NO: 120489 - protein, 14 aa, Homo sapiens
  CDR3 for alpha chain variable domain of TCR clone 60245 (TRAV26-2, TRAJ31)
CILIPGNDNARLMF

SEQ ID NO: 120490 - protein, 16 aa, Homo sapiens
  CDR3 for beta chain variable domain of TCR clone 60245 (TRBV7-3, TRBJ2-1)
CASSLVSGSSNNEQFF

SEQ ID NO: 120491 - protein, 14 aa, Homo sapiens
  CDR3 for alpha chain variable domain of TCR clone 60246 (TRAV12-2, TRAJ13)
CAVKKTGGYQKVTF

SEQ ID NO: 120492 - protein, 13 aa, Homo sapiens
  CDR3 for beta chain variable domain of TCR clone 60246 (TRBV7-9, TRBJ1-2)
RASSLKQNYGYTF

SEQ ID NO: 120493 - protein, 17 aa, Homo sapiens
  CDR3 for alpha chain variable domain of TCR clone 60247 (TRAV13-1, TRAJ28)
CAASPPYSGAGSYQLTF

SEQ ID NO: 120494 - protein, 17 aa, Homo sapiens
  CDR3 for beta chain variable domain of TCR clone 60247 (TRBV11-2, TRBJ2-1)
CASSLYPPGVEYNEQFF

SEQ ID NO: 120495 - protein, 15 aa, Homo sapiens
  CDR3 for alpha chain variable domain of TCR clone 60248 (TRAV3, TRAJ22)
CAVRDRGGSARQLTF

SEQ ID NO: 120496 - protein, 13 aa, Homo sapiens
  CDR3 for beta chain variable domain of TCR clone 60248 (TRBV12-4, TRBJ1-1)
CASSPGTGFEAFF

SEQ ID NO: 120497 - protein, 13 aa, Homo sapiens
  CDR3 for alpha chain variable domain of TCR clone 60249 (TRAV2, TRAJ13)
TTVLPGGYQKVTF

SEQ ID NO: 120498 - protein, 16 aa, Homo sapiens
  CDR3 for beta chain variable domain of TCR clone 60249 (TRBV6-1, TRBJ2-5)
CASSETLDRGAETQYF

SEQ ID NO: 120499 - protein, 12 aa, Homo sapiens
  CDR3 for alpha chain variable domain of TCR clone 60250 (TRAV12-2, TRAJ34)
CAVSNNTDKLIF

SEQ ID NO: 120500 - protein, 16 aa, Homo sapiens
  CDR3 for beta chain variable domain of TCR clone 60250 (TRBV27, TRBJ2-5)
CASSYGPGGQKETQYF

SEQ ID NO: 120501 - protein, 13 aa, Homo sapiens
  CDR3 for alpha chain variable domain of TCR clone 60251 (TRAV2, TRAJ40)
CAVVTSGTYKYIF

SEQ ID NO: 120502 - protein, 14 aa, Homo sapiens
  CDR3 for beta chain variable domain of TCR clone 60251 (TRBV19, TRBJ2-5)
CASSMTGQQETQYF

SEQ ID NO: 120503 - protein, 12 aa, Homo sapiens
  CDR3 for alpha chain variable domain of TCR clone 60252 (TRAV1-2, TRAJ34)
CPVREGHRQAHL

SEQ ID NO: 120504 - protein, 14 aa, Homo sapiens
  CDR3 for beta chain variable domain of TCR clone 60252 (TRBV6-5, TRBJ2-2)
CASTEGQETGELFF

SEQ ID NO: 120505 - protein, 13 aa, Homo sapiens
  CDR3 for alpha chain variable domain of TCR clone 60253 (TRAV20, TRAJ34)
CAAGSYNTDKLIF

SEQ ID NO: 120506 - protein, 12 aa, Homo sapiens
  CDR3 for beta chain variable domain of TCR clone 60253 (TRBV7-9, TRBJ1-1)
CASSLVRGEAFF

SEQ ID NO: 120507 - protein, 14 aa, Homo sapiens
  CDR3 for alpha chain variable domain of TCR clone 60254 (TRAV17, TRAJ35)
CATDRPGFGNVLHC

SEQ ID NO: 120508 - protein, 15 aa, Homo sapiens
  CDR3 for beta chain variable domain of TCR clone 60254 (TRBV28, TRBJ2-5)
CASSSGRVIRETQYF

SEQ ID NO: 120509 - protein, 13 aa, Homo sapiens
  CDR3 for alpha chain variable domain of TCR clone 60255 (TRAV12-2, TRAJ20)
CAVYPSNDYRLSF

SEQ ID NO: 120510 - protein, 15 aa, Homo sapiens
  CDR3 for beta chain variable domain of TCR clone 60255 (TRBV27, TRBJ2-5)
CASSLYPRGGETQYS

SEQ ID NO: 120511 - protein, 12 aa, Homo sapiens
  CDR3 for alpha chain variable domain of TCR clone 60256 (TRAV8-3, TRAJ20)
CAVGANDYKLSF

SEQ ID NO: 120512 - protein, 14 aa, Homo sapiens
  CDR3 for beta chain variable domain of TCR clone 60256 (TRBV25-1, TRBJ1-1)
CASTHLGGNTEAFF

SEQ ID NO: 120513 - protein, 14 aa, Homo sapiens
  CDR3 for alpha chain variable domain of TCR clone 60257 (TRAV35, TRAJ42)
CAVRYGGSQGNLIF

SEQ ID NO: 120514 - protein, 15 aa, Homo sapiens
  CDR3 for beta chain variable domain of TCR clone 60257 (TRBV7-9, TRBJ2-1)
CASSLGWGRANEQFF

SEQ ID NO: 120515 - protein, 15 aa, Homo sapiens
  CDR3 for alpha chain variable domain of TCR clone 60258 (TRAV4, TRAJ39)
CLVGPNNNAGNMLTF

SEQ ID NO: 120516 - protein, 14 aa, Homo sapiens
  CDR3 for beta chain variable domain of TCR clone 60258 (TRBV7-3, TRBJ2-1)
CASSLAGGTNEQFF

SEQ ID NO: 120517 - protein, 15 aa, Homo sapiens
  CDR3 for alpha chain variable domain of TCR clone 60259 (TRAV21, TRAJ52)
CAVRGGGTSCGKLTF

SEQ ID NO: 120518 - protein, 15 aa, Homo sapiens
  CDR3 for beta chain variable domain of TCR clone 60259 (TRBV18, TRBJ1-5)
CASSPSDRSNQPQHF

SEQ ID NO: 120519 - protein, 17 aa, Homo sapiens
  CDR3 for alpha chain variable domain of TCR clone 60260 (TRAV27, TRAJ26)
CAGARAPLDNYGQNFVS

SEQ ID NO: 120520 - protein, 15 aa, Homo sapiens
  CDR3 for beta chain variable domain of TCR clone 60260 (TRBV11-2, TRBJ2-5)
CASSPRSGGLETQYF

SEQ ID NO: 120521 - protein, 13 aa, Homo sapiens
  CDR3 for alpha chain variable domain of TCR clone 60261 (TRAV21, TRAJ57)
CAVTQGGSEKLVF

SEQ ID NO: 120522 - protein, 16 aa, Homo sapiens
  CDR3 for beta chain variable domain of TCR clone 60261 (TRBV29-1, TRBJ2-7)
CSVEYAEDGTAYEQYF

SEQ ID NO: 120523 - protein, 15 aa, Homo sapiens
  CDR3 for alpha chain variable domain of TCR clone 60262 (TRAV26-1, TRAJ22)
CIVRVSFWYCKATDL

SEQ ID NO: 120524 - protein, 13 aa, Homo sapiens
  CDR3 for beta chain variable domain of TCR clone 60262 (TRBV7-9, TRBJ1-2)
CASSLKQNYGYTF

SEQ ID NO: 120525 - protein, 14 aa, Homo sapiens
  CDR3 for alpha chain variable domain of TCR clone 60263 (TRAV27, TRAJ38)
CAARRNAGNNRKLI

SEQ ID NO: 120526 - protein, 13 aa, Homo sapiens
  CDR3 for beta chain variable domain of TCR clone 60263 (TRBV12-5, TRBJ2-3)
CASGDRQSDTQYF

SEQ ID NO: 120527 - protein, 14 aa, Homo sapiens
  CDR3 for alpha chain variable domain of TCR clone 60264 (TRAV1-2, TRAJ16)
CAVKRFSDGQKLLF

SEQ ID NO: 120528 - protein, 16 aa, Homo sapiens
  CDR3 for beta chain variable domain of TCR clone 60264 (TRBV12-5, TRBJ2-5)
CASGPRTSGNQETQYF

SEQ ID NO: 120529 - protein, 14 aa, Homo sapiens
  CDR3 for alpha chain variable domain of TCR clone 60265 (TRAV17, TRAJ54)
CATDANQGAQKLVF

SEQ ID NO: 120530 - protein, 17 aa, Homo sapiens
  CDR3 for beta chain variable domain of TCR clone 60265 (TRBV11-2, TRBJ2-1)
CASSLYPPGVEYNEQFF

SEQ ID NO: 120531 - protein, 15 aa, Homo sapiens
  CDR3 for alpha chain variable domain of TCR clone 60266 (TRAV12-3, TRAJ6)
CAMSATSGGSYIPTF

SEQ ID NO: 120532 - protein, 16 aa, Homo sapiens
  CDR3 for beta chain variable domain of TCR clone 60266 (TRBV7-3, TRBJ2-2)
CASSLKRGTLSGELFF

SEQ ID NO: 120533 - protein, 18 aa, Homo sapiens
  CDR3 for alpha chain variable domain of TCR clone 60267 (TRAV21, TRAJ52)
CAVRPSPAGGTSYGKLTF

SEQ ID NO: 120534 - protein, 17 aa, Homo sapiens
  CDR3 for beta chain variable domain of TCR clone 60267 (TRBV13, TRBJ2-3)
CASSRSRGAGGRNTQYF

SEQ ID NO: 120535 - protein, 16 aa, Homo sapiens
  CDR3 for alpha chain variable domain of TCR clone 60268 (TRAV23/DV6, TRAJ9)
CVASIGGNTGGFKTIF

SEQ ID NO: 120536 - protein, 14 aa, Homo sapiens
  CDR3 for beta chain variable domain of TCR clone 60268 (TRBV9, TRBJ2-7)
CASSVGVGSYEQYF

SEQ ID NO: 120537 - protein, 15 aa, Homo sapiens
  CDR3 for alpha chain variable domain of TCR clone 60269 (TRAV38-1, TRAJ37)
CAFIFGSGNTGRLIF

SEQ ID NO: 120538 - protein, 12 aa, Homo sapiens
  CDR3 for beta chain variable domain of TCR clone 60269 (TRBV7-9, TRBJ2-7)
CASSLEGYEQYF

SEQ ID NO: 120539 - protein, 13 aa, Homo sapiens
  CDR3 for alpha chain variable domain of TCR clone 60270 (TRAV2, TRAJ15)
CAVASQAGTALIF

SEQ ID NO: 120540 - protein, 15 aa, Homo sapiens
  CDR3 for beta chain variable domain of TCR clone 60270 (TRBV11-3, TRBJ2-3)
CASLKDGREGDTQYF

SEQ ID NO: 120541 - protein, 15 aa, Homo sapiens
  CDR3 for alpha chain variable domain of TCR clone 60271 (TRAV2, TRAJ9)
CAVEDRGTGGFKTIF

SEQ ID NO: 120542 - protein, 16 aa, Homo sapiens
  CDR3 for beta chain variable domain of TCR clone 60271 (TRBV24-1, TRBJ2-3)
CATSNPGTGATDTQYF

SEQ ID NO: 120543 - protein, 14 aa, Homo sapiens
  CDR3 for alpha chain variable domain of TCR clone 60272 (TRAV12-2, TRAJ13)
CAVKKTGGYQEVTF

SEQ ID NO: 120544 - protein, 14 aa, Homo sapiens
  CDR3 for beta chain variable domain of TCR clone 60272 (TRBV7-6, TRBJ2-3)
CASSLGTVTDTQYF

SEQ ID NO: 120545 - protein, 17 aa, Homo sapiens
  CDR3 for alpha chain variable domain of TCR clone 60273 (TRAV8-6, TRAJ8)
CAGKEGIENTGFQKLVF

SEQ ID NO: 120546 - protein, 12 aa, Homo sapiens
  CDR3 for beta chain variable domain of TCR clone 60273 (TRBV19, TRBJ1-4)
CASKDWPGGLFF

SEQ ID NO: 120547 - protein, 15 aa, Homo sapiens
  CDR3 for alpha chain variable domain of TCR clone 60274 (TRAV26-1, TRAJ42)
FIFRVKGGSQGNLIF

SEQ ID NO: 120548 - protein, 14 aa, Homo sapiens
  CDR3 for beta chain variable domain of TCR clone 60274 (TRBV19, TRBJ2-2)
CATTGHANTGELFF

SEQ ID NO: 120549 - protein, 15 aa, Homo sapiens
  CDR3 for alpha chain variable domain of TCR clone 60275 (TRAV25, TRAJ52)
CAGRPGGTSYGKLTF

SEQ ID NO: 120550 - protein, 14 aa, Homo sapiens
  CDR3 for beta chain variable domain of TCR clone 60275 (TRBV7-2, TRBJ2-7)
CASSPKTSFYEQYF

SEQ ID NO: 120551 - protein, 13 aa, Homo sapiens
  CDR3 for alpha chain variable domain of TCR clone 60276 (TRAV8-4, TRAJ30)
CAVSVNRDDKIIF

SEQ ID NO: 120552 - protein, 13 aa, Homo sapiens
  CDR3 for beta chain variable domain of TCR clone 60276 (TRBV7-3, TRBJ1-1)
CASSQDWGAEAFF

SEQ ID NO: 120553 - protein, 14 aa, Homo sapiens
  CDR3 for alpha chain variable domain of TCR clone 60277 (TRAV12-3, TRAJ57)
CARALEGGSERLVF

SEQ ID NO: 120554 - protein, 17 aa, Homo sapiens
  CDR3 for beta chain variable domain of TCR clone 60277 (TRBV11-3, TRBJ2-3)
CASSLGLTGGGTDTQYF

SEQ ID NO: 120555 - protein, 16 aa, Homo sapiens
  CDR3 for alpha chain variable domain of TCR clone 60278 (TRAV12-2, TRAJ39)
CAVNRGPNNTGNMLTF

SEQ ID NO: 120556 - protein, 10 aa, Homo sapiens
  CDR3 for beta chain variable domain of TCR clone 60278 (TRBV2, TRBJ2-4)
CASRGSIQYF

SEQ ID NO: 120557 - protein, 15 aa, Homo sapiens
  CDR3 for alpha chain variable domain of TCR clone 60279 (TRAV4, TRAJ36)
CLVGDRQTGANNLFF

SEQ ID NO: 120558 - protein, 15 aa, Homo sapiens
  CDR3 for beta chain variable domain of TCR clone 60279 (TRBV7-6, TRBJ2-1)
CASNSLAGEGNEQFF

SEQ ID NO: 120559 - protein, 13 aa, Homo sapiens
  CDR3 for alpha chain variable domain of TCR clone 60280 (TRAV13-1, TRAJ5)
CAASDTGRRALTF

SEQ ID NO: 120560 - protein, 12 aa, Homo sapiens
  CDR3 for beta chain variable domain of TCR clone 60280 (TRBV28, TRBJ2-3)
CASSLYRDTQYV

SEQ ID NO: 120561 - protein, 14 aa, Homo sapiens
  CDR3 for alpha chain variable domain of TCR clone 60281 (TRAV2, TRAJ9)
CAVEDRGGGFKTIF

SEQ ID NO: 120562 - protein, 15 aa, Homo sapiens
  CDR3 for beta chain variable domain of TCR clone 60281 (TRBV19, TRBJ2-1)
CASSHRDRGPNEQFF

SEQ ID NO: 120563 - protein, 15 aa, Homo sapiens
  CDR3 for alpha chain variable domain of TCR clone 60282 (TRAV8-4, TRAJ47)
CAVSDPEAYGNKLVF

SEQ ID NO: 120564 - protein, 15 aa, Homo sapiens
  CDR3 for beta chain variable domain of TCR clone 60282 (TRBV11-2, TRBJ2-1)
CASSLGPDSYNEQFF

SEQ ID NO: 120565 - protein, 12 aa, Homo sapiens
  CDR3 for alpha chain variable domain of TCR clone 60283 (TRAV8-3, TRAJ26)
CAGDNYGQNFVS

SEQ ID NO: 120566 - protein, 12 aa, Homo sapiens
  CDR3 for beta chain variable domain of TCR clone 60283 (TRBV11-2, TRBJ2-1)
CASSPGNNGQFF

SEQ ID NO: 120567 - protein, 12 aa, Homo sapiens
  CDR3 for alpha chain variable domain of TCR clone 60284 (TRAV35, TRAJ30)
CAGLNRDDKIIF

SEQ ID NO: 120568 - protein, 15 aa, Homo sapiens
  CDR3 for beta chain variable domain of TCR clone 60284 (TRBV9, TRBJ1-6)
CASSVAGTGDSPLLF

SEQ ID NO: 120569 - protein, 15 aa, Homo sapiens
  CDR3 for alpha chain variable domain of TCR clone 60285 (TRAV8-3, TRAJ11)
CAVGLLNSGYSTLTF

SEQ ID NO: 120570 - protein, 13 aa, Homo sapiens
  CDR3 for beta chain variable domain of TCR clone 60285 (TRBV27, TRBJ1-4)
CASSLMGDEKLFF

SEQ ID NO: 120571 - protein, 14 aa, Homo sapiens
  CDR3 for alpha chain variable domain of TCR clone 60286 (TRAV1-2, TRAJ8)
CAVREDTGFQKLVF

SEQ ID NO: 120572 - protein, 14 aa, Homo sapiens
  CDR3 for beta chain variable domain of TCR clone 60286 (TRBV18, TRBJ2-5)
CASSPLRVQETQYF

SEQ ID NO: 120573 - protein, 13 aa, Homo sapiens
  CDR3 for alpha chain variable domain of TCR clone 60287 (TRAV17, TRAJ26)
CATVDNYGQNFVF

SEQ ID NO: 120574 - protein, 15 aa, Homo sapiens
  CDR3 for beta chain variable domain of TCR clone 60287 (TRBV11-3, TRBJ2-3)
CASLKDGREGDTQYF

SEQ ID NO: 120575 - protein, 15 aa, Homo sapiens
  CDR3 for alpha chain variable domain of TCR clone 60288 (TRAV12-2, TRAJ53)
CAVNGGGGSNYKLTF

SEQ ID NO: 120576 - protein, 13 aa, Homo sapiens
  CDR3 for beta chain variable domain of TCR clone 60288 (TRBV15, TRBJ1-6)
CATSGGLNSPLHF

SEQ ID NO: 120577 - protein, 13 aa, Homo sapiens
  CDR3 for alpha chain variable domain of TCR clone 60289 (TRAV13-1, TRAJ4)
CSASIGGYNKLIF

SEQ ID NO: 120578 - protein, 16 aa, Homo sapiens
  CDR3 for beta chain variable domain of TCR clone 60289 (TRBV20-1, TRBJ2-1)
CSAPGLAGSYSDEQFF

SEQ ID NO: 120579 - protein, 17 aa, Homo sapiens
  CDR3 for alpha chain variable domain of TCR clone 60290 (TRAV26-1, TRAJ37)
CIVRVITVSSNTGKLIF

SEQ ID NO: 120580 - protein, 14 aa, Homo sapiens
  CDR3 for beta chain variable domain of TCR clone 60290 (TRBV7-9, TRBJ2-2)
CASSGLADTGELFF

SEQ ID NO: 120581 - protein, 15 aa, Homo sapiens
  CDR3 for alpha chain variable domain of TCR clone 60291 (TRAV12-2, TRAJ53)
CAVNGGGGSNYQLTF

SEQ ID NO: 120582 - protein, 13 aa, Homo sapiens
  CDR3 for beta chain variable domain of TCR clone 60291 (TRBV3-1, TRBJ1-1)
CASSPGVITEAFF

SEQ ID NO: 120583 - protein, 14 aa, Homo sapiens
  CDR3 for alpha chain variable domain of TCR clone 60292 (TRAV1-2, TRAJ16)
CAVNRFSDGQKLLF

SEQ ID NO: 120584 - protein, 16 aa, Homo sapiens
  CDR3 for beta chain variable domain of TCR clone 60292 (TRBV18, TRBJ1-3)
CASSLGILNGENTIYF

SEQ ID NO: 120585 - protein, 13 aa, Homo sapiens
  CDR3 for alpha chain variable domain of TCR clone 60293 (TRAV2, TRAJ40)
CAVVTSGTYKYIF

SEQ ID NO: 120586 - protein, 14 aa, Homo sapiens
  CDR3 for beta chain variable domain of TCR clone 60293 (TRBV3-1, TRBJ2-7)
CASSRTSGKEEQYF

SEQ ID NO: 120587 - protein, 13 aa, Homo sapiens
  CDR3 for alpha chain variable domain of TCR clone 60294 (TRAV8-1, TRAJ30)
CAVIMNRDDKIIF

SEQ ID NO: 120588 - protein, 14 aa, Homo sapiens
  CDR3 for beta chain variable domain of TCR clone 60294 (TRBV20-1, TRBJ2-5)
CSAREMTKQETQYF

SEQ ID NO: 120589 - protein, 15 aa, Homo sapiens
  CDR3 for alpha chain variable domain of TCR clone 60295 (TRAV12-3, TRAJ6)
CAMSATTGGSYIPTF

SEQ ID NO: 120590 - protein, 12 aa, Homo sapiens
  CDR3 for beta chain variable domain of TCR clone 60295 (TRBV11-3, TRBJ1-1)
CASSHRQGEAFF

SEQ ID NO: 120591 - protein, 16 aa, Homo sapiens
  CDR3 for alpha chain variable domain of TCR clone 60296 (TRAV27, TRAJ52)
CAGAGAGGTSYGKLTF

SEQ ID NO: 120592 - protein, 17 aa, Homo sapiens
  CDR3 for beta chain variable domain of TCR clone 60296 (TRBV24-1, TRBJ2-3)
CASSDLPSGEDTDTQYF

SEQ ID NO: 120593 - protein, 12 aa, Homo sapiens
  CDR3 for alpha chain variable domain of TCR clone 60297 (TRAV3, TRAJ27)
CAVRDGAGKSTF

SEQ ID NO: 120594 - protein, 13 aa, Homo sapiens
  CDR3 for beta chain variable domain of TCR clone 60297 (TRBV10-3, TRBJ1-2)
CAINADLNYGDTF

SEQ ID NO: 120595 - protein, 13 aa, Homo sapiens
  CDR3 for alpha chain variable domain of TCR clone 60298 (TRAV2, TRAJ21)
CAVEGSNFNKFYF

SEQ ID NO: 120596 - protein, 14 aa, Homo sapiens
  CDR3 for beta chain variable domain of TCR clone 60298 (TRBV25-1, TRBJ1-1)
CASTHLGGNTEAFF

SEQ ID NO: 120597 - protein, 14 aa, Homo sapiens
  CDR3 for alpha chain variable domain of TCR clone 60299 (TRAV12-2, TRAJ36)
CAVKISTGAKNLFF

SEQ ID NO: 120598 - protein, 14 aa, Homo sapiens
  CDR3 for beta chain variable domain of TCR clone 60299 (TRBV25-1, TRBJ1-2)
CASSDTTGVVGYTF

SEQ ID NO: 120599 - protein, 11 aa, Homo sapiens
  CDR3 for alpha chain variable domain of TCR clone 60300 (TRAV1-2, TRAJ40)
CAVAGTYKYIF

SEQ ID NO: 120600 - protein, 16 aa, Homo sapiens
  CDR3 for beta chain variable domain of TCR clone 60300 (TRBV29-1, TRBJ2-7)
CSVEVVGTSGSYEQYF

SEQ ID NO: 120601 - protein, 14 aa, Homo sapiens
  CDR3 for alpha chain variable domain of TCR clone 60301 (TRAV23/DV6, TRAJ24)
CAASLSDSWGKLQF

SEQ ID NO: 120602 - protein, 15 aa, Homo sapiens
  CDR3 for beta chain variable domain of TCR clone 60301 (TRBV4-1, TRBJ2-7)
CASSQNTGRLYEQYF

SEQ ID NO: 120603 - protein, 14 aa, Homo sapiens
  CDR3 for alpha chain variable domain of TCR clone 60302 (TRAV17, TRAJ6)
CATDASGGSYIPTF

SEQ ID NO: 120604 - protein, 13 aa, Homo sapiens
  CDR3 for beta chain variable domain of TCR clone 60302 (TRBV10-3, TRBJ2-7)
CASKLAVNYEQYF

SEQ ID NO: 120605 - protein, 17 aa, Homo sapiens
  CDR3 for alpha chain variable domain of TCR clone 60303 (TRAV8-6, TRAJ8)
CAVKEGIEDTGFQKLVF

SEQ ID NO: 120606 - protein, 12 aa, Homo sapiens
  CDR3 for beta chain variable domain of TCR clone 60303 (TRBV19, TRBJ1-4)
CASKDWPGGLFF

SEQ ID NO: 120607 - protein, 16 aa, Homo sapiens
  CDR3 for alpha chain variable domain of TCR clone 60304 (TRAV3, TRAJ37)
CAVRPHGSGNTGKLIF

SEQ ID NO: 120608 - protein, 14 aa, Homo sapiens
  CDR3 for beta chain variable domain of TCR clone 60304 (TRBV6-1, TRBJ1-3)
CASVQGGGGNTIYF

SEQ ID NO: 120609 - protein, 13 aa, Homo sapiens
  CDR3 for alpha chain variable domain of TCR clone 60305 (TRAV20, TRAJ37)
CDGCSSNTGKLIF

SEQ ID NO: 120610 - protein, 11 aa, Homo sapiens
  CDR3 for beta chain variable domain of TCR clone 60305 (TRBV12-4, TRBJ2-3)
CASTATDTQYF

SEQ ID NO: 120611 - protein, 13 aa, Homo sapiens
  CDR3 for alpha chain variable domain of TCR clone 60306 (TRAV8-6, TRAJ49)
CAVIANTGNQFYF

SEQ ID NO: 120612 - protein, 17 aa, Homo sapiens
  CDR3 for beta chain variable domain of TCR clone 60306 (TRBV11-2, TRBJ2-1)
CASSLYPPGVEYNEQFF

SEQ ID NO: 120613 - protein, 13 aa, Homo sapiens
  CDR3 for alpha chain variable domain of TCR clone 60307 (TRAV36/DV7, TRAJ37)
CAVFSSNTGKLIF

SEQ ID NO: 120614 - protein, 13 aa, Homo sapiens
  CDR3 for beta chain variable domain of TCR clone 60307 (TRBV10-3, TRBJ2-7)
CASKLAVNYEQYF

SEQ ID NO: 120615 - protein, 14 aa, Homo sapiens
  CDR3 for alpha chain variable domain of TCR clone 60308 (TRAV12-2, TRAJ13)
CAVKKTGGYQKVTF

SEQ ID NO: 120616 - protein, 14 aa, Homo sapiens
  CDR3 for beta chain variable domain of TCR clone 60308 (TRBV25-1, TRBJ1-4)
CASSGGGQPEKLFF

SEQ ID NO: 120617 - protein, 14 aa, Homo sapiens
  CDR3 for alpha chain variable domain of TCR clone 60309 (TRAV8-1, TRAJ23)
CAVGTYNQGGKLIF

SEQ ID NO: 120618 - protein, 16 aa, Homo sapiens
  CDR3 for beta chain variable domain of TCR clone 60309 (TRBV18, TRBJ1-5)
CDSSPSTGNSNQPQHF

SEQ ID NO: 120619 - protein, 16 aa, Homo sapiens
  CDR3 for alpha chain variable domain of TCR clone 60310 (TRAV17, TRAJ53)
CATDALSGGSNYKLTF

SEQ ID NO: 120620 - protein, 17 aa, Homo sapiens
  CDR3 for beta chain variable domain of TCR clone 60310 (TRBV13, TRBJ2-3)
CASSLSRVAGGRNTQYF

SEQ ID NO: 120621 - protein, 14 aa, Homo sapiens
  CDR3 for alpha chain variable domain of TCR clone 60311 (TRAV30, TRAJ33)
CGTVAPRSNYQLIW

SEQ ID NO: 120622 - protein, 16 aa, Homo sapiens
  CDR3 for beta chain variable domain of TCR clone 60311 (TRBV27, TRBJ2-2)
CASSSTGGGDTGELFF

SEQ ID NO: 120623 - protein, 14 aa, Homo sapiens
  CDR3 for alpha chain variable domain of TCR clone 60312 (TRAV26-1, TRAJ49)
CIVRLTNTGNQFYF

SEQ ID NO: 120624 - protein, 14 aa, Homo sapiens
  CDR3 for beta chain variable domain of TCR clone 60312 (TRBV7-2, TRBJ2-7)
CASSPKTSFYEQYF

SEQ ID NO: 120625 - protein, 14 aa, Homo sapiens
  CDR3 for alpha chain variable domain of TCR clone 60313 (TRAV12-2, TRAJ45)
CAVNIGGGADGLTF

SEQ ID NO: 120626 - protein, 13 aa, Homo sapiens
  CDR3 for beta chain variable domain of TCR clone 60313 (TRBV19, TRBJ2-2)
CAGSIWSTGELFF

SEQ ID NO: 120627 - protein, 11 aa, Homo sapiens
  CDR3 for alpha chain variable domain of TCR clone 60314 (TRAV2, TRAJ13)
CASGGYQKVTF

SEQ ID NO: 120628 - protein, 14 aa, Homo sapiens
  CDR3 for beta chain variable domain of TCR clone 60314 (TRBV6-3, TRBJ1-1)
CASSYQRRDTEAFF

SEQ ID NO: 120629 - protein, 14 aa, Homo sapiens
  CDR3 for alpha chain variable domain of TCR clone 60315 (TRAV1-2, TRAJ16)
CAVNRFSDGQKLLF

SEQ ID NO: 120630 - protein, 14 aa, Homo sapiens
  CDR3 for beta chain variable domain of TCR clone 60315 (TRBV7-3, TRBJ1-1)
CASSLGTGYAEAFF

SEQ ID NO: 120631 - protein, 11 aa, Homo sapiens
  CDR3 for alpha chain variable domain of TCR clone 60316 (TRAV3, TRAJ21)
CAVGNFNKFYF

SEQ ID NO: 120632 - protein, 16 aa, Homo sapiens
  CDR3 for beta chain variable domain of TCR clone 60316 (TRBV7-6, TRBJ2-1)
CASSVPGPSSYNEQFF

SEQ ID NO: 120633 - protein, 14 aa, Homo sapiens
  CDR3 for alpha chain variable domain of TCR clone 60317 (TRAV12-1, TRAJ23)
CVVNAAGRKAYLRT

SEQ ID NO: 120634 - protein, 12 aa, Homo sapiens
  CDR3 for beta chain variable domain of TCR clone 60317 (TRBV6-5, TRBJ2-3)
CASSDATDTQYF

SEQ ID NO: 120635 - protein, 14 aa, Homo sapiens
  CDR3 for alpha chain variable domain of TCR clone 60318 (TRAV2, TRAJ9)
CAVEGRSGGFKTIF

SEQ ID NO: 120636 - protein, 18 aa, Homo sapiens
  CDR3 for beta chain variable domain of TCR clone 60318 (TRBV20-1, TRBJ2-5)
CSQTGDSGRLGGKETQYF

SEQ ID NO: 120637 - protein, 12 aa, Homo sapiens
  CDR3 for alpha chain variable domain of TCR clone 60319 (TRAV21, TRAJ11)
CAATSGYSTLNF

SEQ ID NO: 120638 - protein, 14 aa, Homo sapiens
  CDR3 for beta chain variable domain of TCR clone 60319 (TRBV20-1, TRBJ2-7)
CSAPELAGVGEQYF

SEQ ID NO: 120639 - protein, 15 aa, Homo sapiens
  CDR3 for alpha chain variable domain of TCR clone 60320 (TRAV8-1, TRAJ6)
CAVNAKPGGSYIPTF

SEQ ID NO: 120640 - protein, 12 aa, Homo sapiens
  CDR3 for beta chain variable domain of TCR clone 60320 (TRBV5-7, TRBJ2-7)
CASSVQGGEQYF

SEQ ID NO: 120641 - protein, 14 aa, Homo sapiens
  CDR3 for alpha chain variable domain of TCR clone 60321 (TRAV26-1, TRAJ16)
CIVRVPSDGQKLPF

SEQ ID NO: 120642 - protein, 17 aa, Homo sapiens
  CDR3 for beta chain variable domain of TCR clone 60321 (TRBV20-1, TRBJ2-1)
CSASSSGLAGSYNEQFF

SEQ ID NO: 120643 - protein, 15 aa, Homo sapiens
  CDR3 for alpha chain variable domain of TCR clone 60322 (TRAV2, TRAJ22)
CAVPSRGGSARQLNF

SEQ ID NO: 120644 - protein, 11 aa, Homo sapiens
  CDR3 for beta chain variable domain of TCR clone 60322 (TRBV27, TRBJ2-3)
CASSLGDTQYF

SEQ ID NO: 120645 - protein, 15 aa, Homo sapiens
  CDR3 for alpha chain variable domain of TCR clone 60323 (TRAV12-3, TRAJ6)
CAMSATTGGSYIPTF

SEQ ID NO: 120646 - protein, 11 aa, Homo sapiens
  CDR3 for beta chain variable domain of TCR clone 60323 (TRBV12-4, TRBJ2-3)
CASTATDTQYF

SEQ ID NO: 120647 - protein, 17 aa, Homo sapiens
  CDR3 for alpha chain variable domain of TCR clone 60324 (TRAV3, TRAJ38)
CAVRDCLNAGNNRKLIW

SEQ ID NO: 120648 - protein, 13 aa, Homo sapiens
  CDR3 for beta chain variable domain of TCR clone 60324 (TRBV7-2, TRBJ1-4)
CASSLAGLEKLFF

SEQ ID NO: 120649 - protein, 13 aa, Homo sapiens
  CDR3 for alpha chain variable domain of TCR clone 60325 (TRAV12-3, TRAJ33)
CAMSVNSNYQLIW

SEQ ID NO: 120650 - protein, 14 aa, Homo sapiens
  CDR3 for beta chain variable domain of TCR clone 60325 (TRBV5-1, TRBJ2-7)
CASSRGESLYEQYF

SEQ ID NO: 120651 - protein, 16 aa, Homo sapiens
  CDR3 for alpha chain variable domain of TCR clone 60326 (TRAV14/DV4, TRAJ54)
CAMREGRIQGAQKLVF

SEQ ID NO: 120652 - protein, 14 aa, Homo sapiens
  CDR3 for beta chain variable domain of TCR clone 60326 (TRBV19, TRBJ2-1)
CASPTFVLSGEQFF

SEQ ID NO: 120653 - protein, 17 aa, Homo sapiens
  CDR3 for alpha chain variable domain of TCR clone 60327 (TRAV26-1, TRAJ47)
CTVPSLLYMEYGNKLVF

SEQ ID NO: 120654 - protein, 14 aa, Homo sapiens
  CDR3 for beta chain variable domain of TCR clone 60327 (TRBV7-3, TRBJ1-5)
RASSFSGCNQPQHF

SEQ ID NO: 120655 - protein, 15 aa, Homo sapiens
  CDR3 for alpha chain variable domain of TCR clone 60328 (TRAV21, TRAJ24)
CAARSSTDSWGKLQF

SEQ ID NO: 120656 - protein, 19 aa, Homo sapiens
  CDR3 for beta chain variable domain of TCR clone 60328 (TRBV14, TRBJ2-1)
CASSQDQLWEAPGYNEQFF

SEQ ID NO: 120657 - protein, 14 aa, Homo sapiens
  CDR3 for alpha chain variable domain of TCR clone 60329 (TRAV1-2, TRAJ16)
CAVNRFSDGQKLLF

SEQ ID NO: 120658 - protein, 12 aa, Homo sapiens
  CDR3 for beta chain variable domain of TCR clone 60329 (TRBV11-3, TRBJ2-2)
CASSLGGGELFF

SEQ ID NO: 120659 - protein, 13 aa, Homo sapiens
  CDR3 for alpha chain variable domain of TCR clone 60330 (TRAV13-1, TRAJ5)
CAARVTGRRAPTF

SEQ ID NO: 120660 - protein, 15 aa, Homo sapiens
  CDR3 for beta chain variable domain of TCR clone 60330 (TRBV7-9, TRBJ2-7)
CASSPGGGLTYEQYF

SEQ ID NO: 120661 - protein, 12 aa, Homo sapiens
  CDR3 for alpha chain variable domain of TCR clone 60331 (TRAV35, TRAJ43)
CAGAYNNNDMRF

SEQ ID NO: 120662 - protein, 14 aa, Homo sapiens
  CDR3 for beta chain variable domain of TCR clone 60331 (TRBV2, TRBJ2-2)
CASSWQGATGEPFF

SEQ ID NO: 120663 - protein, 18 aa, Homo sapiens
  CDR3 for alpha chain variable domain of TCR clone 60332 (TRAV8-4, TRAJ52)
CAVARANAGGTSYGKLTF

SEQ ID NO: 120664 - protein, 20 aa, Homo sapiens
  CDR3 for beta chain variable domain of TCR clone 60332 (TRBV19, TRBJ2-1)
CASSISRTVTSTRLNNEQFF

SEQ ID NO: 120665 - protein, 14 aa, Homo sapiens
  CDR3 for alpha chain variable domain of TCR clone 60333 (TRAV8-2, TRAJ4)
CVVSPSGGYNKLIF

SEQ ID NO: 120666 - protein, 16 aa, Homo sapiens
  CDR3 for beta chain variable domain of TCR clone 60333 (TRBV7-3, TRBJ2-1)
CASSLEGYRSYNEQFV

SEQ ID NO: 120667 - protein, 12 aa, Homo sapiens
  CDR3 for alpha chain variable domain of TCR clone 60334 (TRAV12-3, TRAJ17)
CAMTLTGNKLTF

SEQ ID NO: 120668 - protein, 14 aa, Homo sapiens
  CDR3 for beta chain variable domain of TCR clone 60334 (TRBV4-1, TRBJ2-7)
CAGSQDREHVEQYF

SEQ ID NO: 120669 - protein, 13 aa, Homo sapiens
  CDR3 for alpha chain variable domain of TCR clone 60335 (TRAV23/DV6, TRAJ15)
CAALPAGRNCSDL

SEQ ID NO: 120670 - protein, 14 aa, Homo sapiens
  CDR3 for beta chain variable domain of TCR clone 60335 (TRBV7-9, TRBJ1-2)
CASSRQGANYGDTF

SEQ ID NO: 120671 - protein, 12 aa, Homo sapiens
  CDR3 for alpha chain variable domain of TCR clone 60336 (TRAV13-2, TRAJ8)
CAPWLGFQKLVF

SEQ ID NO: 120672 - protein, 16 aa, Homo sapiens
  CDR3 for beta chain variable domain of TCR clone 60336 (TRBV7-3, TRBJ2-2)
CASSLKRGTLSGELFF

SEQ ID NO: 120673 - protein, 14 aa, Homo sapiens
  CDR3 for alpha chain variable domain of TCR clone 60337 (TRAV29/DV5, TRAJ32)
CAAAYGGATNKPIF

SEQ ID NO: 120674 - protein, 15 aa, Homo sapiens
  CDR3 for beta chain variable domain of TCR clone 60337 (TRBV27, TRBJ2-7)
CASSTAGTGSYEQYF

SEQ ID NO: 120675 - protein, 14 aa, Homo sapiens
  CDR3 for alpha chain variable domain of TCR clone 60338 (TRAV4, TRAJ26)
CLVGSHNYGQNFVF

SEQ ID NO: 120676 - protein, 17 aa, Homo sapiens
  CDR3 for beta chain variable domain of TCR clone 60338 (TRBV24-1, TRBJ2-1)
CATSDVSTSGTYNEQFF

SEQ ID NO: 120677 - protein, 14 aa, Homo sapiens
  CDR3 for alpha chain variable domain of TCR clone 60339 (TRAV1-2, TRAJ8)
CAVREDTGLQKLVF

SEQ ID NO: 120678 - protein, 17 aa, Homo sapiens
  CDR3 for beta chain variable domain of TCR clone 60339 (TRBV13, TRBJ2-3)
CASSLSRVAGGRNTQYF

SEQ ID NO: 120679 - protein, 13 aa, Homo sapiens
  CDR3 for alpha chain variable domain of TCR clone 60340 (TRAV27, TRAJ41)
CAGEGNSGYALNF

SEQ ID NO: 120680 - protein, 12 aa, Homo sapiens
  CDR3 for beta chain variable domain of TCR clone 60340 (TRBV7-8, TRBJ2-7)
CASSLGDREQYF

SEQ ID NO: 120681 - protein, 15 aa, Homo sapiens
  CDR3 for alpha chain variable domain of TCR clone 60341 (TRAV34, TRAJ38)
CGADFTPGNNRKLIW

SEQ ID NO: 120682 - protein, 18 aa, Homo sapiens
  CDR3 for beta chain variable domain of TCR clone 60341 (TRBV7-9, TRBJ2-7)
CASSLTTSGSRTWYEQYF

SEQ ID NO: 120683 - protein, 16 aa, Homo sapiens
  CDR3 for alpha chain variable domain of TCR clone 60342 (TRAV13-1, TRAJ48)
CAASIFGNFGNGKLTF

SEQ ID NO: 120684 - protein, 14 aa, Homo sapiens
  CDR3 for beta chain variable domain of TCR clone 60342 (TRBV24-1, TRBJ1-1)
CATSIPRGDTEAFF

SEQ ID NO: 120685 - protein, 14 aa, Homo sapiens
  CDR3 for alpha chain variable domain of TCR clone 60343 (TRAV1-2, TRAJ16)
CAVNRFSDGQKLLF

SEQ ID NO: 120686 - protein, 16 aa, Homo sapiens
  CDR3 for beta chain variable domain of TCR clone 60343 (TRBV12-5, TRBJ2-5)
CASGPRTSGNQETRYF

SEQ ID NO: 120687 - protein, 13 aa, Homo sapiens
  CDR3 for alpha chain variable domain of TCR clone 60344 (TRAV12-3, TRAJ53)
CAMRGGSNNKLTF

SEQ ID NO: 120688 - protein, 15 aa, Homo sapiens
  CDR3 for beta chain variable domain of TCR clone 60344 (TRBV2, TRBJ2-1)
CATQARLVMIGEQFF

SEQ ID NO: 120689 - protein, 14 aa, Homo sapiens
  CDR3 for alpha chain variable domain of TCR clone 60345 (TRAV36/DV7, TRAJ48)
CAQRRDFGNGKLTF

SEQ ID NO: 120690 - protein, 14 aa, Homo sapiens
  CDR3 for beta chain variable domain of TCR clone 60345 (TRBV28, TRBJ2-4)
CASTQVTGVNIQYF

SEQ ID NO: 120691 - protein, 10 aa, Homo sapiens
  CDR3 for alpha chain variable domain of TCR clone 60346 (TRAV12-3, TRAJ49)
CAMNDDQFYF

SEQ ID NO: 120692 - protein, 13 aa, Homo sapiens
  CDR3 for beta chain variable domain of TCR clone 60346 (TRBV12-4, TRBJ1-1)
CASSPGTGFVAFF

SEQ ID NO: 120693 - protein, 14 aa, Homo sapiens
  CDR3 for alpha chain variable domain of TCR clone 60347 (TRAV12-2, TRAJ13)
CAVKKTGGYQKVTF

SEQ ID NO: 120694 - protein, 13 aa, Homo sapiens
  CDR3 for beta chain variable domain of TCR clone 60347 (TRBV20-1, TRBJ1-1)
CSARVGQGTEAFF

SEQ ID NO: 120695 - protein, 16 aa, Homo sapiens
  CDR3 for alpha chain variable domain of TCR clone 60348 (TRAV4, TRAJ18)
CCVLLIGGSTLGRLYF

SEQ ID NO: 120696 - protein, 12 aa, Homo sapiens
  CDR3 for beta chain variable domain of TCR clone 60348 (TRBV6-3, TRBJ2-7)
CASSRTPYEQYF

SEQ ID NO: 120697 - protein, 14 aa, Homo sapiens
  CDR3 for alpha chain variable domain of TCR clone 60349 (TRAV12-3, TRAJ10)
SHLPLTGGGNKLTF

SEQ ID NO: 120698 - protein, 17 aa, Homo sapiens
  CDR3 for beta chain variable domain of TCR clone 60349 (TRBV11-2, TRBJ2-3)
CASSPTGTGGLTDTQYF

SEQ ID NO: 120699 - protein, 10 aa, Homo sapiens
  CDR3 for alpha chain variable domain of TCR clone 60350 (TRAV1-2, TRAJ31)
CALFDARLMF

SEQ ID NO: 120700 - protein, 15 aa, Homo sapiens
  CDR3 for beta chain variable domain of TCR clone 60350 (TRBV4-1, TRBJ1-4)
CASSDTGGTNEKLFF

SEQ ID NO: 120701 - protein, 17 aa, Homo sapiens
  CDR3 for alpha chain variable domain of TCR clone 60351 (TRAV8-6, TRAJ58)
CAVSSWVGETSGSRLTF

SEQ ID NO: 120702 - protein, 19 aa, Homo sapiens
  CDR3 for beta chain variable domain of TCR clone 60351 (TRBV25-1, TRBJ2-2)
CAILVYRVDRGRKTGELFF

SEQ ID NO: 120703 - protein, 14 aa, Homo sapiens
  CDR3 for alpha chain variable domain of TCR clone 60352 (TRAV12-1, TRAJ30)
CVVNIGNRDDKIIF

SEQ ID NO: 120704 - protein, 14 aa, Homo sapiens
  CDR3 for beta chain variable domain of TCR clone 60352 (TRBV7-9, TRBJ2-5)
CASSPRPSGETHYF

SEQ ID NO: 120705 - protein, 18 aa, Homo sapiens
  CDR3 for alpha chain variable domain of TCR clone 60353 (TRAV12-3, TRAJ52)
CAMSMGGAGGTSYGKLTF

SEQ ID NO: 120706 - protein, 15 aa, Homo sapiens
  CDR3 for beta chain variable domain of TCR clone 60353 (TRBV27, TRBJ1-6)
CASSFDRGLGSPLHF

SEQ ID NO: 120707 - protein, 21 aa, Homo sapiens
  CDR3 for alpha chain variable domain of TCR clone 60354 (TRAV13-1, TRAJ26)
SLHITETQPEDSAVYFCAIVF

SEQ ID NO: 120708 - protein, 15 aa, Homo sapiens
  CDR3 for beta chain variable domain of TCR clone 60354 (TRBV12-4, TRBJ2-1)
CASSLLGRTYNEQFF

SEQ ID NO: 120709 - protein, 18 aa, Homo sapiens
  CDR3 for alpha chain variable domain of TCR clone 60355 (TRAV26-1, TRAJ26)
CCVLLHRQSYFPWSEFCL

SEQ ID NO: 120710 - protein, 16 aa, Homo sapiens
  CDR3 for beta chain variable domain of TCR clone 60355 (TRBV12-4, TRBJ2-7)
CASRSTGTGPSYEQYF

SEQ ID NO: 120711 - protein, 14 aa, Homo sapiens
  CDR3 for alpha chain variable domain of TCR clone 60356 (TRAV12-2, TRAJ40)
CAVKIPSGTYKYIF

SEQ ID NO: 120712 - protein, 15 aa, Homo sapiens
  CDR3 for beta chain variable domain of TCR clone 60356 (TRBV13, TRBJ1-5)
CASSFGQGGVQPQHF

SEQ ID NO: 120713 - protein, 15 aa, Homo sapiens
  CDR3 for alpha chain variable domain of TCR clone 60357 (TRAV8-6, TRAJ45)
CAVSEQGGGADGLTF

SEQ ID NO: 120714 - protein, 14 aa, Homo sapiens
  CDR3 for beta chain variable domain of TCR clone 60357 (TRBV28, TRBJ2-5)
CASRGSSFWETRYF

SEQ ID NO: 120715 - protein, 11 aa, Homo sapiens
  CDR3 for alpha chain variable domain of TCR clone 60358 (TRAV17, TRAJ36)
CAPTGANNPFF

SEQ ID NO: 120716 - protein, 12 aa, Homo sapiens
  CDR3 for beta chain variable domain of TCR clone 60358 (TRBV29-1, TRBJ2-3)
CSVVLGADTQYF

SEQ ID NO: 120717 - protein, 10 aa, Homo sapiens
  CDR3 for alpha chain variable domain of TCR clone 60359 (TRAV38-2/DV8, TRAJ40)
CSSGTYKYIF

SEQ ID NO: 120718 - protein, 14 aa, Homo sapiens
  CDR3 for beta chain variable domain of TCR clone 60359 (TRBV7-9, TRBJ2-1)
CASSPRDSLYEQFF

SEQ ID NO: 120719 - protein, 20 aa, Homo sapiens
  CDR3 for alpha chain variable domain of TCR clone 60360 (TRAV12-3, TRAJ52)
CAMTQSYQNAGGTSYGKLTF

SEQ ID NO: 120720 - protein, 16 aa, Homo sapiens
  CDR3 for beta chain variable domain of TCR clone 60360 (TRBV9, TRBJ1-3)
CASSVGLASSGNAIYF

SEQ ID NO: 120721 - protein, 12 aa, Homo sapiens
  CDR3 for alpha chain variable domain of TCR clone 60361 (TRAV13-1, TRAJ53)
CAAGGSNYKLTF

SEQ ID NO: 120722 - protein, 11 aa, Homo sapiens
  CDR3 for beta chain variable domain of TCR clone 60361 (TRBV2, TRBJ1-1)
CASRESTEAFF

SEQ ID NO: 120723 - protein, 13 aa, Homo sapiens
  CDR3 for alpha chain variable domain of TCR clone 60362 (TRAV12-2, TRAJ40)
CAVKRTGTYKYIF

SEQ ID NO: 120724 - protein, 14 aa, Homo sapiens
  CDR3 for beta chain variable domain of TCR clone 60362 (TRBV7-2, TRBJ2-7)
CASSPKTSFYEQYF

SEQ ID NO: 120725 - protein, 12 aa, Homo sapiens
  CDR3 for alpha chain variable domain of TCR clone 60363 (TRAV13-2, TRAJ23)
CAERHRGGKLIF

SEQ ID NO: 120726 - protein, 16 aa, Homo sapiens
  CDR3 for beta chain variable domain of TCR clone 60363 (TRBV20-1, TRBJ1-4)
CRAPGQGLLTNEKLFF

SEQ ID NO: 120727 - protein, 15 aa, Homo sapiens
  CDR3 for alpha chain variable domain of TCR clone 60364 (TRAV34, TRAJ38)
CGADFTPGNNRKLIW

SEQ ID NO: 120728 - protein, 14 aa, Homo sapiens
  CDR3 for beta chain variable domain of TCR clone 60364 (TRBV7-6, TRBJ2-3)
CASSLGTVTDTQYF

SEQ ID NO: 120729 - protein, 16 aa, Homo sapiens
  CDR3 for alpha chain variable domain of TCR clone 60365 (TRAV12-3, TRAJ53)
CAMSPGSGGSNYKLTF

SEQ ID NO: 120730 - protein, 12 aa, Homo sapiens
  CDR3 for beta chain variable domain of TCR clone 60365 (TRBV2, TRBJ2-1)
CAYGPPGNEQFF

SEQ ID NO: 120731 - protein, 17 aa, Homo sapiens
  CDR3 for alpha chain variable domain of TCR clone 60366 (TRAV26-1, TRAJ22)
CIVRVPSHSGSARQLTF

SEQ ID NO: 120732 - protein, 16 aa, Homo sapiens
  CDR3 for beta chain variable domain of TCR clone 60366 (TRBV28, TRBJ2-1)
CASRRSGRVVGNERFF

SEQ ID NO: 120733 - protein, 13 aa, Homo sapiens
  CDR3 for alpha chain variable domain of TCR clone 60367 (TRAV12-3, TRAJ7)
CATSASGNNRLAF

SEQ ID NO: 120734 - protein, 14 aa, Homo sapiens
  CDR3 for beta chain variable domain of TCR clone 60367 (TRBV13, TRBJ2-5)
CASSLGPRGETQYF

SEQ ID NO: 120735 - protein, 15 aa, Homo sapiens
  CDR3 for alpha chain variable domain of TCR clone 60368 (TRAV38-2/DV8, TRAJ45)
CAYWDSGGGADGLTF

SEQ ID NO: 120736 - protein, 14 aa, Homo sapiens
  CDR3 for beta chain variable domain of TCR clone 60368 (TRBV7-9, TRBJ2-1)
CASSSMVGFGEQFF

SEQ ID NO: 120737 - protein, 13 aa, Homo sapiens
  CDR3 for alpha chain variable domain of TCR clone 60369 (TRAV3, TRAJ21)
CAVREPDFNKFYF

SEQ ID NO: 120738 - protein, 13 aa, Homo sapiens
  CDR3 for beta chain variable domain of TCR clone 60369 (TRBV9, TRBJ2-1)
CASSPSGGNEQFV

SEQ ID NO: 120739 - protein, 11 aa, Homo sapiens
  CDR3 for alpha chain variable domain of TCR clone 60370 (TRAV12-1, TRAJ30)
CVVNGQDKIIF

SEQ ID NO: 120740 - protein, 12 aa, Homo sapiens
  CDR3 for beta chain variable domain of TCR clone 60370 (TRBV27, TRBJ2-2)
CASKPFTGELFF

SEQ ID NO: 120741 - protein, 16 aa, Homo sapiens
  CDR3 for alpha chain variable domain of TCR clone 60371 (TRAV27, TRAJ53)
CAAPEESGGSNYKLTF

SEQ ID NO: 120742 - protein, 15 aa, Homo sapiens
  CDR3 for beta chain variable domain of TCR clone 60371 (TRBV20-1, TRBJ1-1)
CSASRGVTGNTEAFF

SEQ ID NO: 120743 - protein, 14 aa, Homo sapiens
  CDR3 for alpha chain variable domain of TCR clone 60372 (TRAV23/DV6, TRAJ17)
CAARGRAAGNTLTF

SEQ ID NO: 120744 - protein, 12 aa, Homo sapiens
  CDR3 for beta chain variable domain of TCR clone 60372 (TRBV7-9, TRBJ2-3)
CASSFITDTQYF

SEQ ID NO: 120745 - protein, 14 aa, Homo sapiens
  CDR3 for alpha chain variable domain of TCR clone 60373 (TRAV23/DV6, TRAJ8)
CAASKKTGFQKLVF

SEQ ID NO: 120746 - protein, 16 aa, Homo sapiens
  CDR3 for beta chain variable domain of TCR clone 60373 (TRBV4-1, TRBJ2-6)
CASSQVGDPGANVLTF

SEQ ID NO: 120747 - protein, 13 aa, Homo sapiens
  CDR3 for alpha chain variable domain of TCR clone 60374 (TRAV12-2, TRAJ20)
CAVYPSNDYKLSF

SEQ ID NO: 120748 - protein, 13 aa, Homo sapiens
  CDR3 for beta chain variable domain of TCR clone 60374 (TRBV7-3, TRBJ2-1)
CASSPVAYNEQFF

SEQ ID NO: 120749 - protein, 11 aa, Homo sapiens
  CDR3 for alpha chain variable domain of TCR clone 60375 (TRAV2, TRAJ13)
CASGGYQKVTF

SEQ ID NO: 120750 - protein, 16 aa, Homo sapiens
  CDR3 for beta chain variable domain of TCR clone 60375 (TRBV6-1, TRBJ2-5)
CTSSETLDRGAETQYF

SEQ ID NO: 120751 - protein, 17 aa, Homo sapiens
  CDR3 for alpha chain variable domain of TCR clone 60376 (TRAV23/DV6, TRAJ57)
CAASSTLSQGGSEKLVF

SEQ ID NO: 120752 - protein, 14 aa, Homo sapiens
  CDR3 for beta chain variable domain of TCR clone 60376 (TRBV7-8, TRBJ2-1)
CASSSQGTYNGRFF

SEQ ID NO: 120753 - protein, 13 aa, Homo sapiens
  CDR3 for alpha chain variable domain of TCR clone 60377 (TRAV8-3, TRAJ21)
CAVGIYNFNKFYF

SEQ ID NO: 120754 - protein, 13 aa, Homo sapiens
  CDR3 for beta chain variable domain of TCR clone 60377 (TRBV3-1, TRBJ1-1)
CASSPGVITEAFF

SEQ ID NO: 120755 - protein, 12 aa, Homo sapiens
  CDR3 for alpha chain variable domain of TCR clone 60378 (TRAV23/DV6, TRAJ30)
CAASKGDDKISF

SEQ ID NO: 120756 - protein, 13 aa, Homo sapiens
  CDR3 for beta chain variable domain of TCR clone 60378 (TRBV19, TRBJ1-2)
CASSVPGQDGYTF

SEQ ID NO: 120757 - protein, 20 aa, Homo sapiens
  CDR3 for alpha chain variable domain of TCR clone 60379 (TRAV8-3, TRAJ45)
LSTSVLWGSYSGGGADGLIF

SEQ ID NO: 120758 - protein, 11 aa, Homo sapiens
  CDR3 for beta chain variable domain of TCR clone 60379 (TRBV20-1, TRBJ2-5)
CSADRAETQYF

SEQ ID NO: 120759 - protein, 12 aa, Homo sapiens
  CDR3 for alpha chain variable domain of TCR clone 60380 (TRAV1-1, TRAJ8)
CAGGTGFQKLVF

SEQ ID NO: 120760 - protein, 15 aa, Homo sapiens
  CDR3 for beta chain variable domain of TCR clone 60380 (TRBV7-9, TRBJ1-4)
CASSRTGGFKEKLFF

SEQ ID NO: 120761 - protein, 13 aa, Homo sapiens
  CDR3 for alpha chain variable domain of TCR clone 60381 (TRAV2, TRAJ9)
CAVDSTGGFKTIF

SEQ ID NO: 120762 - protein, 15 aa, Homo sapiens
  CDR3 for beta chain variable domain of TCR clone 60381 (TRBV10-3, TRBJ2-1)
CAITFGGGTDNEQFF

SEQ ID NO: 120763 - protein, 15 aa, Homo sapiens
  CDR3 for alpha chain variable domain of TCR clone 60382 (TRAV8-3, TRAJ15)
CAVGAPNKAGTALIF

SEQ ID NO: 120764 - protein, 14 aa, Homo sapiens
  CDR3 for beta chain variable domain of TCR clone 60382 (TRBV20-1, TRBJ2-1)
CSPNDEASYNEQFF

SEQ ID NO: 120765 - protein, 15 aa, Homo sapiens
  CDR3 for alpha chain variable domain of TCR clone 60383 (TRAV16, TRAJ20)
FALKGGLRADYKLSF

SEQ ID NO: 120766 - protein, 16 aa, Homo sapiens
  CDR3 for beta chain variable domain of TCR clone 60383 (TRBV11-3, TRBJ2-2)
CASSSRTSPGTGELFF

SEQ ID NO: 120767 - protein, 13 aa, Homo sapiens
  CDR3 for alpha chain variable domain of TCR clone 60384 (TRAV13-2, TRAJ48)
CAEMDFGNEKLTF

SEQ ID NO: 120768 - protein, 15 aa, Homo sapiens
  CDR3 for beta chain variable domain of TCR clone 60384 (TRBV7-2, TRBJ2-1)
CASSFQADEYNEQFF

SEQ ID NO: 120769 - protein, 13 aa, Homo sapiens
  CDR3 for alpha chain variable domain of TCR clone 60385 (TRAV1-2, TRAJ9)
CAALNTGGFKTIF

SEQ ID NO: 120770 - protein, 15 aa, Homo sapiens
  CDR3 for beta chain variable domain of TCR clone 60385 (TRBV19, TRBJ1-1)
CASTSGQIQNTEAFS

SEQ ID NO: 120771 - protein, 12 aa, Homo sapiens
  CDR3 for alpha chain variable domain of TCR clone 60386 (TRAV29/DV5, TRAJ26)
CAAIPSGQSFVF

SEQ ID NO: 120772 - protein, 15 aa, Homo sapiens
  CDR3 for beta chain variable domain of TCR clone 60386 (TRBV19, TRBJ1-5)
CASSDSGPRNQPQHF

SEQ ID NO: 120773 - protein, 12 aa, Homo sapiens
  CDR3 for alpha chain variable domain of TCR clone 60387 (TRAV8-3, TRAJ40)
CAVTSGTYKYIF

SEQ ID NO: 120774 - protein, 15 aa, Homo sapiens
  CDR3 for beta chain variable domain of TCR clone 60387 (TRBV18, TRBJ1-5)
CASSPSDRSNQPQHF

SEQ ID NO: 120775 - protein, 16 aa, Homo sapiens
  CDR3 for alpha chain variable domain of TCR clone 60388 (TRAV27, TRAJ13)
CAGAKSDSGGYQKVTF

SEQ ID NO: 120776 - protein, 15 aa, Homo sapiens
  CDR3 for beta chain variable domain of TCR clone 60388 (TRBV29-1, TRBJ2-1)
CSVGRPALFYNEQFF

SEQ ID NO: 120777 - protein, 10 aa, Homo sapiens
  CDR3 for alpha chain variable domain of TCR clone 60389 (TRAV13-1, TRAJ7)
LIGGNNRLAF

SEQ ID NO: 120778 - protein, 13 aa, Homo sapiens
  CDR3 for beta chain variable domain of TCR clone 60389 (TRBV3-1, TRBJ1-1)
CASSPGVITEAFF

SEQ ID NO: 120779 - protein, 13 aa, Homo sapiens
  CDR3 for alpha chain variable domain of TCR clone 60390 (TRAV27, TRAJ54)
CAGAGQGAQKLVF

SEQ ID NO: 120780 - protein, 15 aa, Homo sapiens
  CDR3 for beta chain variable domain of TCR clone 60390 (TRBV18, TRBJ2-6)
CASSPSYAGANFLTF

SEQ ID NO: 120781 - protein, 10 aa, Homo sapiens
  CDR3 for alpha chain variable domain of TCR clone 60391 (TRAV23/DV6, TRAJ57)
CAASSTLSQG

SEQ ID NO: 120782 - protein, 15 aa, Homo sapiens
  CDR3 for beta chain variable domain of TCR clone 60391 (TRBV7-9, TRBJ1-5)
CASSQGHQPNQPQHF

SEQ ID NO: 120783 - protein, 12 aa, Homo sapiens
  CDR3 for alpha chain variable domain of TCR clone 60392 (TRAV3, TRAJ43)
CAVRDPNNDMLF

SEQ ID NO: 120784 - protein, 15 aa, Homo sapiens
  CDR3 for beta chain variable domain of TCR clone 60392 (TRBV4-3, TRBJ2-7)
CASSQGDWGDYEQYF

SEQ ID NO: 120785 - protein, 14 aa, Homo sapiens
  CDR3 for alpha chain variable domain of TCR clone 60393 (TRAV12-2, TRAJ44)
CAVNPAGTASKLTF

SEQ ID NO: 120786 - protein, 17 aa, Homo sapiens
  CDR3 for beta chain variable domain of TCR clone 60393 (TRBV13, TRBJ2-3)
CASSLSRVAGGRNTQYF

SEQ ID NO: 120787 - protein, 12 aa, Homo sapiens
  CDR3 for alpha chain variable domain of TCR clone 60394 (TRAV12-1, TRAJ40)
CVVYSGTYKYIF

SEQ ID NO: 120788 - protein, 15 aa, Homo sapiens
  CDR3 for beta chain variable domain of TCR clone 60394 (TRBV7-9, TRBJ1-6)
CASSSPERGNSPLHF

SEQ ID NO: 120789 - protein, 14 aa, Homo sapiens
  CDR3 for alpha chain variable domain of TCR clone 60395 (TRAV4, TRAJ26)
CLVGPHNYGQNFVF

SEQ ID NO: 120790 - protein, 17 aa, Homo sapiens
  CDR3 for beta chain variable domain of TCR clone 60395 (TRBV24-1, TRBJ2-1)
CATSDASTSGTYNEQFF

SEQ ID NO: 120791 - protein, 12 aa, Homo sapiens
  CDR3 for alpha chain variable domain of TCR clone 60396 (TRAV17, TRAJ12)
YAGGDSSYKLIF

SEQ ID NO: 120792 - protein, 12 aa, Homo sapiens
  CDR3 for beta chain variable domain of TCR clone 60396 (TRBV29-1, TRBJ1-1)
CSESDGNTEAFF

SEQ ID NO: 120793 - protein, 12 aa, Homo sapiens
  CDR3 for alpha chain variable domain of TCR clone 60397 (TRAV25, TRAJ11)
CAGYSGYSTLTF

SEQ ID NO: 120794 - protein, 13 aa, Homo sapiens
  CDR3 for beta chain variable domain of TCR clone 60397 (TRBV7-9, TRBJ1-2)
CASSLKQNYGYAF

SEQ ID NO: 120795 - protein, 14 aa, Homo sapiens
  CDR3 for alpha chain variable domain of TCR clone 60398 (TRAV35, TRAJ13)
CAGSPSRGYQKVTF

SEQ ID NO: 120796 - protein, 17 aa, Homo sapiens
  CDR3 for beta chain variable domain of TCR clone 60398 (TRBV7-6, TRBJ2-5)
CASSPGLADPWGETQYF

SEQ ID NO: 120797 - protein, 14 aa, Homo sapiens
  CDR3 for alpha chain variable domain of TCR clone 60399 (TRAV1-1, TRAJ27)
CAVIYNTNAGKSTC

SEQ ID NO: 120798 - protein, 15 aa, Homo sapiens
  CDR3 for beta chain variable domain of TCR clone 60399 (TRBV7-2, TRBJ2-1)
CASSSGLAGGNEQFF

SEQ ID NO: 120799 - protein, 15 aa, Homo sapiens
  CDR3 for alpha chain variable domain of TCR clone 60400 (TRAV23/DV6, TRAJ18)
CAARYRGSTLGRLYF

SEQ ID NO: 120800 - protein, 13 aa, Homo sapiens
  CDR3 for beta chain variable domain of TCR clone 60400 (TRBV7-8, TRBJ2-7)
CASSSPSGSEQYF

SEQ ID NO: 120801 - protein, 14 aa, Homo sapiens
  CDR3 for alpha chain variable domain of TCR clone 60401 (TRAV16, TRAJ33)
CALSAMDSNYQLIC

SEQ ID NO: 120802 - protein, 16 aa, Homo sapiens
  CDR3 for beta chain variable domain of TCR clone 60401 (TRBV25-1, TRBJ2-7)
CASSELTGGGIYEQYF

SEQ ID NO: 120803 - protein, 12 aa, Homo sapiens
  CDR3 for alpha chain variable domain of TCR clone 60402 (TRAV13-2, TRAJ23)
CAERHRGGKLIF

SEQ ID NO: 120804 - protein, 15 aa, Homo sapiens
  CDR3 for beta chain variable domain of TCR clone 60402 (TRBV11-1, TRBJ2-1)
CASSNGGGSSNEQFF

SEQ ID NO: 120805 - protein, 14 aa, Homo sapiens
  CDR3 for alpha chain variable domain of TCR clone 60403 (TRAV1-2, TRAJ8)
CAVREDTGFQKLVF

SEQ ID NO: 120806 - protein, 16 aa, Homo sapiens
  CDR3 for beta chain variable domain of TCR clone 60403 (TRBV6-1, TRBJ2-5)
CASSETPDRGAETQYF

SEQ ID NO: 120807 - protein, 16 aa, Homo sapiens
  CDR3 for alpha chain variable domain of TCR clone 60404 (TRAV30, TRAJ24)
CGTEIVDADSWGKFQF

SEQ ID NO: 120808 - protein, 13 aa, Homo sapiens
  CDR3 for beta chain variable domain of TCR clone 60404 (TRBV11-3, TRBJ2-7)
CASSLDKLYEQYF

SEQ ID NO: 120809 - protein, 16 aa, Homo sapiens
  CDR3 for alpha chain variable domain of TCR clone 60405 (TRAV30, TRAJ24)
CGTEIVDADSWGNSSL

SEQ ID NO: 120810 - protein, 15 aa, Homo sapiens
  CDR3 for beta chain variable domain of TCR clone 60405 (TRBV27, TRBJ2-1)
CASSNGGGSSNEQFF

SEQ ID NO: 120811 - protein, 15 aa, Homo sapiens
  CDR3 for alpha chain variable domain of TCR clone 60406 (TRAV4, TRAJ10)
CLVGDEEGVGNKLTF

SEQ ID NO: 120812 - protein, 15 aa, Homo sapiens
  CDR3 for beta chain variable domain of TCR clone 60406 (TRBV7-2, TRBJ2-7)
CASSLTGQGTYEQYF

SEQ ID NO: 120813 - protein, 15 aa, Homo sapiens
  CDR3 for alpha chain variable domain of TCR clone 60407 (TRAV3, TRAJ5)
CAVRDLDTGRRALTF

SEQ ID NO: 120814 - protein, 15 aa, Homo sapiens
  CDR3 for beta chain variable domain of TCR clone 60407 (TRBV7-9, TRBJ1-5)
CASSQGHQPNQPQHF

SEQ ID NO: 120815 - protein, 14 aa, Homo sapiens
  CDR3 for alpha chain variable domain of TCR clone 60408 (TRAV23/DV6, TRAJ17)
CAARGRAAGNKLTV

SEQ ID NO: 120816 - protein, 12 aa, Homo sapiens
  CDR3 for beta chain variable domain of TCR clone 60408 (TRBV7-9, TRBJ2-3)
CASSFITDTQYF

SEQ ID NO: 120817 - protein, 13 aa, Homo sapiens
  CDR3 for alpha chain variable domain of TCR clone 60409 (TRAV16, TRAJ31)
CALSAHNNAKLMF

SEQ ID NO: 120818 - protein, 17 aa, Homo sapiens
  CDR3 for beta chain variable domain of TCR clone 60409 (TRBV12-4, TRBJ2-1)
CASSPGLAGGRINEQFF

SEQ ID NO: 120819 - protein, 12 aa, Homo sapiens
  CDR3 for alpha chain variable domain of TCR clone 60410 (TRAV3, TRAJ20)
CAVRDPDYKLSF

SEQ ID NO: 120820 - protein, 15 aa, Homo sapiens
  CDR3 for beta chain variable domain of TCR clone 60410 (TRBV5-1, TRBJ2-1)
CASSPPRAPYNEQFF

SEQ ID NO: 120821 - protein, 13 aa, Homo sapiens
  CDR3 for alpha chain variable domain of TCR clone 60411 (TRAV13-2, TRAJ8)
CAFMNTGFRKLVF

SEQ ID NO: 120822 - protein, 15 aa, Homo sapiens
  CDR3 for beta chain variable domain of TCR clone 60411 (TRBV19, TRBJ2-3)
CAAGDTNAPNDTQYF

SEQ ID NO: 120823 - protein, 14 aa, Homo sapiens
  CDR3 for alpha chain variable domain of TCR clone 60412 (TRAV29/DV5, TRAJ44)
CAAFLVGTASKPTF

SEQ ID NO: 120824 - protein, 15 aa, Homo sapiens
  CDR3 for beta chain variable domain of TCR clone 60412 (TRBV7-3, TRBJ2-2)
CASSETGQGTGELFF

SEQ ID NO: 120825 - protein, 12 aa, Homo sapiens
  CDR3 for alpha chain variable domain of TCR clone 60413 (TRAV13-2, TRAJ23)
CAERHRGGELIF

SEQ ID NO: 120826 - protein, 13 aa, Homo sapiens
  CDR3 for beta chain variable domain of TCR clone 60413 (TRBV15, TRBJ1-6)
CATSGGLNSPLHF

SEQ ID NO: 120827 - protein, 12 aa, Homo sapiens
  CDR3 for alpha chain variable domain of TCR clone 60414 (TRAV12-3, TRAJ29)
CAAAKGNTPLVF

SEQ ID NO: 120828 - protein, 12 aa, Homo sapiens
  CDR3 for beta chain variable domain of TCR clone 60414 (TRBV24-1, TRBJ1-1)
CATLYPDTEAFF

SEQ ID NO: 120829 - protein, 14 aa, Homo sapiens
  CDR3 for alpha chain variable domain of TCR clone 60415 (TRAV9-2, TRAJ39)
CALYIYNAGNMLTF

SEQ ID NO: 120830 - protein, 14 aa, Homo sapiens
  CDR3 for beta chain variable domain of TCR clone 60415 (TRBV7-2, TRBJ2-5)
CASSPRGSSETQYF

SEQ ID NO: 120831 - protein, 13 aa, Homo sapiens
  CDR3 for alpha chain variable domain of TCR clone 60416 (TRAV38-1, TRAJ42)
CARWGGSQGNLIF

SEQ ID NO: 120832 - protein, 10 aa, Homo sapiens
  CDR3 for beta chain variable domain of TCR clone 60416 (TRBV2, TRBJ2-5)
CTSSAATQYF

SEQ ID NO: 120833 - protein, 12 aa, Homo sapiens
  CDR3 for alpha chain variable domain of TCR clone 60417 (TRAV21, TRAJ33)
CAKMDSNYQLIW

SEQ ID NO: 120834 - protein, 12 aa, Homo sapiens
  CDR3 for beta chain variable domain of TCR clone 60417 (TRBV11-2, TRBJ2-2)
CASSLGGGELFS

SEQ ID NO: 120835 - protein, 15 aa, Homo sapiens
  CDR3 for alpha chain variable domain of TCR clone 60418 (TRAV3, TRAJ42)
CAVRGGTGSQGNPIF

SEQ ID NO: 120836 - protein, 14 aa, Homo sapiens
  CDR3 for beta chain variable domain of TCR clone 60418 (TRBV19, TRBJ1-2)
CASSSLFARDVYTF

SEQ ID NO: 120837 - protein, 17 aa, Homo sapiens
  CDR3 for alpha chain variable domain of TCR clone 60419 (TRAV14/DV4, TRAJ28)
CAMRGTSSGAGSYQLTF

SEQ ID NO: 120838 - protein, 13 aa, Homo sapiens
  CDR3 for beta chain variable domain of TCR clone 60419 (TRBV28, TRBJ2-5)
CASSVAGGETQYF

SEQ ID NO: 120839 - protein, 13 aa, Homo sapiens
  CDR3 for alpha chain variable domain of TCR clone 60420 (TRAV8-3, TRAJ44)
CAVVHGTASKLTF

SEQ ID NO: 120840 - protein, 14 aa, Homo sapiens
  CDR3 for beta chain variable domain of TCR clone 60420 (TRBV11-2, TRBJ2-3)
CASSRLARTDTQYF

SEQ ID NO: 120841 - protein, 11 aa, Homo sapiens
  CDR3 for alpha chain variable domain of TCR clone 60421 (TRAV1-2, TRAJ34)
CAGYDTDKLIF

SEQ ID NO: 120842 - protein, 16 aa, Homo sapiens
  CDR3 for beta chain variable domain of TCR clone 60421 (TRBV10-3, TRBJ2-1)
CAISGVGDGGGGEQFF

SEQ ID NO: 120843 - protein, 14 aa, Homo sapiens
  CDR3 for alpha chain variable domain of TCR clone 60422 (TRAV13-1, TRAJ44)
CAAKATGTASKLTF

SEQ ID NO: 120844 - protein, 16 aa, Homo sapiens
  CDR3 for beta chain variable domain of TCR clone 60422 (TRBV7-3, TRBJ2-3)
CQQLNEKDAGADTQYF

SEQ ID NO: 120845 - protein, 13 aa, Homo sapiens
  CDR3 for alpha chain variable domain of TCR clone 60423 (TRAV17, TRAJ9)
CATDYTGGFKTIF

SEQ ID NO: 120846 - protein, 17 aa, Homo sapiens
  CDR3 for beta chain variable domain of TCR clone 60423 (TRBV13, TRBJ2-3)
CASSLSRVAGGRNTQYF

SEQ ID NO: 120847 - protein, 12 aa, Homo sapiens
  CDR3 for alpha chain variable domain of TCR clone 60424 (TRAV8-3, TRAJ26)
CAGDNYGQNFVF

SEQ ID NO: 120848 - protein, 15 aa, Homo sapiens
  CDR3 for beta chain variable domain of TCR clone 60424 (TRBV9, TRBJ2-1)
CASSLAGSSYNESSS

SEQ ID NO: 120849 - protein, 16 aa, Homo sapiens
  CDR3 for alpha chain variable domain of TCR clone 60425 (TRAV3, TRAJ3)
CAVGDRAKSSASKIIF

SEQ ID NO: 120850 - protein, 13 aa, Homo sapiens
  CDR3 for beta chain variable domain of TCR clone 60425 (TRBV10-3, TRBJ2-7)
CASKLAVNYEQYF

SEQ ID NO: 120851 - protein, 14 aa, Homo sapiens
  CDR3 for alpha chain variable domain of TCR clone 60426 (TRAV8-4, TRAJ38)
CARLNAGNNRKRIW

SEQ ID NO: 120852 - protein, 12 aa, Homo sapiens
  CDR3 for beta chain variable domain of TCR clone 60426 (TRBV6-1, TRBJ2-7)
CASSEPLYEQYF

SEQ ID NO: 120853 - protein, 14 aa, Homo sapiens
  CDR3 for alpha chain variable domain of TCR clone 60427 (TRAV13-2, TRAJ11)
YAETGNSGYSTLTF

SEQ ID NO: 120854 - protein, 11 aa, Homo sapiens
  CDR3 for beta chain variable domain of TCR clone 60427 (TRBV10-3, TRBJ2-7)
CAISEGLEQYF

SEQ ID NO: 120855 - protein, 14 aa, Homo sapiens
  CDR3 for alpha chain variable domain of TCR clone 60428 (TRAV12-1, TRAJ22)
CVVTTSGSARQLTF

SEQ ID NO: 120856 - protein, 16 aa, Homo sapiens
  CDR3 for beta chain variable domain of TCR clone 60428 (TRBV6-6, TRBJ2-1)
RASSLLSDSSYNEQFF

SEQ ID NO: 120857 - protein, 14 aa, Homo sapiens
  CDR3 for alpha chain variable domain of TCR clone 60429 (TRAV23/DV6, TRAJ4)
CAANLSGGYNKLIF

SEQ ID NO: 120858 - protein, 11 aa, Homo sapiens
  CDR3 for beta chain variable domain of TCR clone 60429 (TRBV7-9, TRBJ2-3)
CASSPTDAQYF

SEQ ID NO: 120859 - protein, 15 aa, Homo sapiens
  CDR3 for alpha chain variable domain of TCR clone 60430 (TRAV3, TRAJ3)
CAVRDMSSSASTIIF

SEQ ID NO: 120860 - protein, 14 aa, Homo sapiens
  CDR3 for beta chain variable domain of TCR clone 60430 (TRBV19, TRBJ2-1)
CASPTFVLSGEQFF

SEQ ID NO: 120861 - protein, 11 aa, Homo sapiens
  CDR3 for alpha chain variable domain of TCR clone 60431 (TRAV13-1, TRAJ39)
CASHAGHMLTF

SEQ ID NO: 120862 - protein, 14 aa, Homo sapiens
  CDR3 for beta chain variable domain of TCR clone 60431 (TRBV11-2, TRBJ1-5)
CASSLDRGRQPQHF

SEQ ID NO: 120863 - protein, 16 aa, Homo sapiens
  CDR3 for alpha chain variable domain of TCR clone 60432 (TRAV26-1, TRAJ53)
CIVRVAMGGSNYKLTF

SEQ ID NO: 120864 - protein, 14 aa, Homo sapiens
  CDR3 for beta chain variable domain of TCR clone 60432 (TRBV25-1, TRBJ1-1)
CASTHLGGNTEAFF

SEQ ID NO: 120865 - protein, 17 aa, Homo sapiens
  CDR3 for alpha chain variable domain of TCR clone 60433 (TRAV26-1, TRAJ47)
RIVPSLLYMEYGNKLVF

SEQ ID NO: 120866 - protein, 14 aa, Homo sapiens
  CDR3 for beta chain variable domain of TCR clone 60433 (TRBV7-3, TRBJ1-5)
RASSFSGCNQPQHF

SEQ ID NO: 120867 - protein, 16 aa, Homo sapiens
  CDR3 for alpha chain variable domain of TCR clone 60434 (TRAV1-2, TRAJ10)
CAVRGVLTGGGNKLTF

SEQ ID NO: 120868 - protein, 14 aa, Homo sapiens
  CDR3 for beta chain variable domain of TCR clone 60434 (TRBV7-8, TRBJ2-3)
CASSLEAGTDTQYF

SEQ ID NO: 120869 - protein, 11 aa, Homo sapiens
  CDR3 for alpha chain variable domain of TCR clone 60435 (TRAV12-1, TRAJ34)
CVVNKGRELSF

SEQ ID NO: 120870 - protein, 12 aa, Homo sapiens
  CDR3 for beta chain variable domain of TCR clone 60435 (TRBV2, TRBJ2-1)
CAYGPPGNEQFF

SEQ ID NO: 120871 - protein, 13 aa, Homo sapiens
  CDR3 for alpha chain variable domain of TCR clone 60436 (TRAV2, TRAJ15)
RAVASQAGTALIF

SEQ ID NO: 120872 - protein, 16 aa, Homo sapiens
  CDR3 for beta chain variable domain of TCR clone 60436 (TRBV5-1, TRBJ1-1)
CASSSGGNSLNTEAFF

SEQ ID NO: 120873 - protein, 12 aa, Homo sapiens
  CDR3 for alpha chain variable domain of TCR clone 60437 (TRAV17, TRAJ53)
CAGGGSNYKLTF

SEQ ID NO: 120874 - protein, 16 aa, Homo sapiens
  CDR3 for beta chain variable domain of TCR clone 60437 (TRBV11-2, TRBJ2-3)
CASSFQGRGTLDTQYF

SEQ ID NO: 120875 - protein, 13 aa, Homo sapiens
  CDR3 for alpha chain variable domain of TCR clone 60438 (TRAV2, TRAJ40)
CAVVTSGTYKYIL

SEQ ID NO: 120876 - protein, 13 aa, Homo sapiens
  CDR3 for beta chain variable domain of TCR clone 60438 (TRBV7-9, TRBJ2-5)
CASLPSGRETQYF

SEQ ID NO: 120877 - protein, 13 aa, Homo sapiens
  CDR3 for alpha chain variable domain of TCR clone 60439 (TRAV8-6, TRAJ13)
CAVRDGGYQKVTF

SEQ ID NO: 120878 - protein, 15 aa, Homo sapiens
  CDR3 for beta chain variable domain of TCR clone 60439 (TRBV7-9, TRBJ2-2)
CASRPEGTSTGELVF

SEQ ID NO: 120879 - protein, 15 aa, Homo sapiens
  CDR3 for alpha chain variable domain of TCR clone 60440 (TRAV12-1, TRAJ44)
CVADLPTGTASKLTF

SEQ ID NO: 120880 - protein, 16 aa, Homo sapiens
  CDR3 for beta chain variable domain of TCR clone 60440 (TRBV27, TRBJ2-2)
CASSFRGLVRTGELFF

SEQ ID NO: 120881 - protein, 14 aa, Homo sapiens
  CDR3 for alpha chain variable domain of TCR clone 60441 (TRAV8-2, TRAJ4)
CVVSPSGGYNKLIF

SEQ ID NO: 120882 - protein, 15 aa, Homo sapiens
  CDR3 for beta chain variable domain of TCR clone 60441 (TRBV4-1, TRBJ1-4)
CASSDTGGTNEKLFF

SEQ ID NO: 120883 - protein, 15 aa, Homo sapiens
  CDR3 for alpha chain variable domain of TCR clone 60442 (TRAV23/DV6, TRAJ30)
CAASSQESRDDKIIF

SEQ ID NO: 120884 - protein, 17 aa, Homo sapiens
  CDR3 for beta chain variable domain of TCR clone 60442 (TRBV4-3, TRBJ2-1)
CASSQFSGGRASGEQFF

SEQ ID NO: 120885 - protein, 14 aa, Homo sapiens
  CDR3 for alpha chain variable domain of TCR clone 60443 (TRAV30, TRAJ26)
CGTEIVSYGQNFVF

SEQ ID NO: 120886 - protein, 13 aa, Homo sapiens
  CDR3 for beta chain variable domain of TCR clone 60443 (TRBV19, TRBJ1-3)
CASRLPLGNTIYF

SEQ ID NO: 120887 - protein, 14 aa, Homo sapiens
  CDR3 for alpha chain variable domain of TCR clone 60444 (TRAV2, TRAJ9)
CAVEDRSGGFKTIF

SEQ ID NO: 120888 - protein, 15 aa, Homo sapiens
  CDR3 for beta chain variable domain of TCR clone 60444 (TRBV12-4, TRBJ2-5)
CASSLSGAFQETQYL

SEQ ID NO: 120889 - protein, 16 aa, Homo sapiens
  CDR3 for alpha chain variable domain of TCR clone 60445 (TRAV38-1, TRAJ37)
CAFKGDGSSNTGKLIF

SEQ ID NO: 120890 - protein, 13 aa, Homo sapiens
  CDR3 for beta chain variable domain of TCR clone 60445 (TRBV12-4, TRBJ2-5)
CASSLFRRETKYF

SEQ ID NO: 120891 - protein, 15 aa, Homo sapiens
  CDR3 for alpha chain variable domain of TCR clone 60446 (TRAV12-3, TRAJ6)
CAMSATTGGSYIPTF

SEQ ID NO: 120892 - protein, 16 aa, Homo sapiens
  CDR3 for beta chain variable domain of TCR clone 60446 (TRBV20-1, TRBJ1-2)
CSASLGQGVANYGYTF

SEQ ID NO: 120893 - protein, 12 aa, Homo sapiens
  CDR3 for alpha chain variable domain of TCR clone 60447 (TRAV13-1, TRAJ21)
CAAKEGFNKFYF

SEQ ID NO: 120894 - protein, 14 aa, Homo sapiens
  CDR3 for beta chain variable domain of TCR clone 60447 (TRBV20-1, TRBJ2-3)
CSARGGTSTDTQYF

SEQ ID NO: 120895 - protein, 18 aa, Homo sapiens
  CDR3 for alpha chain variable domain of TCR clone 60448 (TRAV13-1, TRAJ52)
CAAKNPNAGGTSYGKLTF

SEQ ID NO: 120896 - protein, 15 aa, Homo sapiens
  CDR3 for beta chain variable domain of TCR clone 60448 (TRBV10-3, TRBJ2-3)
CAISLTSGGTDTQYF

SEQ ID NO: 120897 - protein, 15 aa, Homo sapiens
  CDR3 for alpha chain variable domain of TCR clone 60449 (TRAV21, TRAJ24)
CAARSSTDSWGKLQF

SEQ ID NO: 120898 - protein, 14 aa, Homo sapiens
  CDR3 for beta chain variable domain of TCR clone 60449 (TRBV12-5, TRBJ2-5)
CASGSRTHQETQYF

SEQ ID NO: 120899 - protein, 14 aa, Homo sapiens
  CDR3 for alpha chain variable domain of TCR clone 60450 (TRAV12-2, TRAJ44)
CAVNPAGPASKLTF

SEQ ID NO: 120900 - protein, 16 aa, Homo sapiens
  CDR3 for beta chain variable domain of TCR clone 60450 (TRBV2, TRBJ2-6)
CASSEVGGAGANVLTF

SEQ ID NO: 120901 - protein, 12 aa, Homo sapiens
  CDR3 for alpha chain variable domain of TCR clone 60451 (TRAV16, TRAJ10)
CSRTGGGNKLTF

SEQ ID NO: 120902 - protein, 19 aa, Homo sapiens
  CDR3 for beta chain variable domain of TCR clone 60451 (TRBV25-1, TRBJ2-2)
CAILVYRVDRGRKTGELLF

SEQ ID NO: 120903 - protein, 14 aa, Homo sapiens
  CDR3 for alpha chain variable domain of TCR clone 60452 (TRAV3, TRAJ36)
CAVRDGTGSNNLFF

SEQ ID NO: 120904 - protein, 16 aa, Homo sapiens
  CDR3 for beta chain variable domain of TCR clone 60452 (TRBV7-3, TRBJ2-5)
CASIQPGGSVQETQYF

SEQ ID NO: 120905 - protein, 14 aa, Homo sapiens
  CDR3 for alpha chain variable domain of TCR clone 60453 (TRAV1-2, TRAJ16)
CAVNRFSDGQKLLL

SEQ ID NO: 120906 - protein, 15 aa, Homo sapiens
  CDR3 for beta chain variable domain of TCR clone 60453 (TRBV7-2, TRBJ2-1)
CASSSGLAGGNEQFF

SEQ ID NO: 120907 - protein, 13 aa, Homo sapiens
  CDR3 for alpha chain variable domain of TCR clone 60454 (TRAV21, TRAJ57)
CAATQGGSEKLVF

SEQ ID NO: 120908 - protein, 15 aa, Homo sapiens
  CDR3 for beta chain variable domain of TCR clone 60454 (TRBV5-1, TRBJ1-1)
CASSSTTGTNTEAFF

SEQ ID NO: 120909 - protein, 22 aa, Homo sapiens
  CDR3 for alpha chain variable domain of TCR clone 60455 (TRAV16, )
CALRTQIPDIQNPDPAVYQLRD

SEQ ID NO: 120910 - protein, 15 aa, Homo sapiens
  CDR3 for beta chain variable domain of TCR clone 60455 (TRBV27, TRBJ2-1)
CASSNGGGSSNEQFF

SEQ ID NO: 120911 - protein, 12 aa, Homo sapiens
  CDR3 for alpha chain variable domain of TCR clone 60456 (TRAV13-2, TRAJ23)
RAERHRGGKLIF

SEQ ID NO: 120912 - protein, 12 aa, Homo sapiens
  CDR3 for beta chain variable domain of TCR clone 60456 (TRBV11-2, TRBJ2-2)
CASSLGGGELFF

SEQ ID NO: 120913 - protein, 11 aa, Homo sapiens
  CDR3 for alpha chain variable domain of TCR clone 60457 (TRAV13-2, TRAJ20)
CADSNDYKLSF

SEQ ID NO: 120914 - protein, 15 aa, Homo sapiens
  CDR3 for beta chain variable domain of TCR clone 60457 (TRBV7-9, TRBJ1-5)
CASSQGHQPNQPQHF

SEQ ID NO: 120915 - protein, 17 aa, Homo sapiens
  CDR3 for alpha chain variable domain of TCR clone 60458 (TRAV12-2, TRAJ6)
CAPQGPPRAGGSYIPTF

SEQ ID NO: 120916 - protein, 15 aa, Homo sapiens
  CDR3 for beta chain variable domain of TCR clone 60458 (TRBV7-3, TRBJ2-1)
CASSQRGGALIEQFF

SEQ ID NO: 120917 - protein, 11 aa, Homo sapiens
  CDR3 for alpha chain variable domain of TCR clone 60459 (TRAV8-2, TRAJ26)
CVVTLLLGSEF

SEQ ID NO: 120918 - protein, 15 aa, Homo sapiens
  CDR3 for beta chain variable domain of TCR clone 60459 (TRBV11-2, TRBJ2-2)
CASSSDGVNAGELFF

SEQ ID NO: 120919 - protein, 14 aa, Homo sapiens
  CDR3 for alpha chain variable domain of TCR clone 60460 (TRAV12-1, TRAJ45)
CVVNIGGGADGLTF

SEQ ID NO: 120920 - protein, 15 aa, Homo sapiens
  CDR3 for beta chain variable domain of TCR clone 60460 (TRBV7-2, TRBJ2-7)
CASSLKGALTYEQYL

SEQ ID NO: 120921 - protein, 15 aa, Homo sapiens
  CDR3 for alpha chain variable domain of TCR clone 60461 (TRAV12-1, TRAJ44)
CVVFVNTGTASKLTF

SEQ ID NO: 120922 - protein, 17 aa, Homo sapiens
  CDR3 for beta chain variable domain of TCR clone 60461 (TRBV7-8, TRBJ2-6)
CSSSAGTGGAGANVLTF

SEQ ID NO: 120923 - protein, 13 aa, Homo sapiens
  CDR3 for alpha chain variable domain of TCR clone 60462 (TRAV12-1, TRAJ20)
CVVNGANDYKLSF

SEQ ID NO: 120924 - protein, 15 aa, Homo sapiens
  CDR3 for beta chain variable domain of TCR clone 60462 (TRBV20-1, TRBJ2-7)
CSARDRVSGMDEQYF

SEQ ID NO: 120925 - protein, 12 aa, Homo sapiens
  CDR3 for alpha chain variable domain of TCR clone 60463 (TRAV3, TRAJ31)
CAVRDGHARLMF

SEQ ID NO: 120926 - protein, 18 aa, Homo sapiens
  CDR3 for beta chain variable domain of TCR clone 60463 (TRBV7-2, TRBJ2-3)
CASSLKREGSGITDTQYF

SEQ ID NO: 120927 - protein, 13 aa, Homo sapiens
  CDR3 for alpha chain variable domain of TCR clone 60464 (TRAV27, TRAJ42)
CAGARGSHGNLIF

SEQ ID NO: 120928 - protein, 14 aa, Homo sapiens
  CDR3 for beta chain variable domain of TCR clone 60464 (TRBV20-1, TRBJ1-1)
CSAQTRIGGTEAFF

SEQ ID NO: 120929 - protein, 12 aa, Homo sapiens
  CDR3 for alpha chain variable domain of TCR clone 60465 (TRAV12-2, TRAJ10)
WGVTGRGNKLTF

SEQ ID NO: 120930 - protein, 17 aa, Homo sapiens
  CDR3 for beta chain variable domain of TCR clone 60465 (TRBV28, TRBJ2-1)
CASSSARQALTYNEQFF

SEQ ID NO: 120931 - protein, 15 aa, Homo sapiens
  CDR3 for alpha chain variable domain of TCR clone 60466 (TRAV8-4, TRAJ36)
CAVRKSWTGANNLFF

SEQ ID NO: 120932 - protein, 11 aa, Homo sapiens
  CDR3 for beta chain variable domain of TCR clone 60466 (TRBV10-3, TRBJ2-7)
CAISEGLEQYF

SEQ ID NO: 120933 - protein, 13 aa, Homo sapiens
  CDR3 for alpha chain variable domain of TCR clone 60467 (TRAV8-6, TRAJ49)
CAVIANTGNQFYF

SEQ ID NO: 120934 - protein, 14 aa, Homo sapiens
  CDR3 for beta chain variable domain of TCR clone 60467 (TRBV5-1, TRBJ2-7)
CASSRGESLYEQYF

SEQ ID NO: 120935 - protein, 23 aa, Homo sapiens
  CDR3 for alpha chain variable domain of TCR clone 60468 (TRAV30, TRAJ43)
CTLRPPSPVTQEPTSAALSDMRF

SEQ ID NO: 120936 - protein, 13 aa, Homo sapiens
  CDR3 for beta chain variable domain of TCR clone 60468 (TRBV12-4, TRBJ2-2)
CASSITGSGELFF

SEQ ID NO: 120937 - protein, 12 aa, Homo sapiens
  CDR3 for alpha chain variable domain of TCR clone 60469 (TRAV27, TRAJ9)
CAGESGGFKTSF

SEQ ID NO: 120938 - protein, 18 aa, Homo sapiens
  CDR3 for beta chain variable domain of TCR clone 60469 (TRBV10-2, TRBJ2-2)
CISAPAVHRQADAGELFF

SEQ ID NO: 120939 - protein, 16 aa, Homo sapiens
  CDR3 for alpha chain variable domain of TCR clone 60470 (TRAV4, TRAJ37)
CLVGWFGSSNTGKLIF

SEQ ID NO: 120940 - protein, 15 aa, Homo sapiens
  CDR3 for beta chain variable domain of TCR clone 60470 (TRBV12-4, TRBJ2-3)
CASSLAERPTDTQYL

SEQ ID NO: 120941 - protein, 14 aa, Homo sapiens
  CDR3 for alpha chain variable domain of TCR clone 60471 (TRAV9-2, TRAJ39)
CALYIYNAGNMLTF

SEQ ID NO: 120942 - protein, 15 aa, Homo sapiens
  CDR3 for beta chain variable domain of TCR clone 60471 (TRBV19, TRBJ2-4)
CVSRGPRRGENIQYF

SEQ ID NO: 120943 - protein, 15 aa, Homo sapiens
  CDR3 for alpha chain variable domain of TCR clone 60472 (TRAV12-3, TRAJ49)
CAMAVTPNTGNQFYF

SEQ ID NO: 120944 - protein, 18 aa, Homo sapiens
  CDR3 for beta chain variable domain of TCR clone 60472 (TRBV4-1, TRBJ1-5)
CASSQDPRGQGLNQAQHF

SEQ ID NO: 120945 - protein, 15 aa, Homo sapiens
  CDR3 for alpha chain variable domain of TCR clone 60473 (TRAV16, TRAJ48)
CALSISNFGNEKLTF

SEQ ID NO: 120946 - protein, 15 aa, Homo sapiens
  CDR3 for beta chain variable domain of TCR clone 60473 (TRBV7-9, TRBJ2-7)
CASSPGLAFDYEQYF

SEQ ID NO: 120947 - protein, 12 aa, Homo sapiens
  CDR3 for alpha chain variable domain of TCR clone 60474 (TRAV1-1, TRAJ8)
CAGGTGFQKLVF

SEQ ID NO: 120948 - protein, 14 aa, Homo sapiens
  CDR3 for beta chain variable domain of TCR clone 60474 (TRBV7-9, TRBJ2-1)
CASSPRDSLYEQFF

SEQ ID NO: 120949 - protein, 16 aa, Homo sapiens
  CDR3 for alpha chain variable domain of TCR clone 60475 (TRAV3, TRAJ28)
CAVLPRSGAVSYQLTF

SEQ ID NO: 120950 - protein, 13 aa, Homo sapiens
  CDR3 for beta chain variable domain of TCR clone 60475 (TRBV12-4, TRBJ2-5)
CASRLAVQETQYF

SEQ ID NO: 120951 - protein, 14 aa, Homo sapiens
  CDR3 for alpha chain variable domain of TCR clone 60476 (TRAV16, TRAJ33)
FALSAMDSNYQLIW

SEQ ID NO: 120952 - protein, 17 aa, Homo sapiens
  CDR3 for beta chain variable domain of TCR clone 60476 (TRBV25-1, TRBJ2-7)
CASSDARVVFSSYEQYF

SEQ ID NO: 120953 - protein, 14 aa, Homo sapiens
  CDR3 for alpha chain variable domain of TCR clone 60477 (TRAV26-1, TRAJ21)
CIVRVVYNFNKFYF

SEQ ID NO: 120954 - protein, 16 aa, Homo sapiens
  CDR3 for beta chain variable domain of TCR clone 60477 (TRBV19, TRBJ2-1)
CASSKAGPSSYNEQFF

SEQ ID NO: 120955 - protein, 16 aa, Homo sapiens
  CDR3 for alpha chain variable domain of TCR clone 60478 (TRAV21, TRAJ45)
CAVSWWSGGGADGLTF

SEQ ID NO: 120956 - protein, 14 aa, Homo sapiens
  CDR3 for beta chain variable domain of TCR clone 60478 (TRBV4-2, TRBJ1-2)
CASSPGGSNYGYTF

SEQ ID NO: 120957 - protein, 14 aa, Homo sapiens
  CDR3 for alpha chain variable domain of TCR clone 60479 (TRAV1-2, TRAJ16)
CAVNRFSDGQKLLF

SEQ ID NO: 120958 - protein, 17 aa, Homo sapiens
  CDR3 for beta chain variable domain of TCR clone 60479 (TRBV20-1, TRBJ2-1)
CSASPSGLAGSYNEQFF

SEQ ID NO: 120959 - protein, 18 aa, Homo sapiens
  CDR3 for alpha chain variable domain of TCR clone 60480 (TRAV12-3, TRAJ52)
CAMSRTNAGGTIYGKLTF

SEQ ID NO: 120960 - protein, 17 aa, Homo sapiens
  CDR3 for beta chain variable domain of TCR clone 60480 (TRBV7-3, TRBJ2-3)
CASSLMKRMRGADTQYF

SEQ ID NO: 120961 - protein, 12 aa, Homo sapiens
  CDR3 for alpha chain variable domain of TCR clone 60481 (TRAV13-1, TRAJ49)
CAASPMGYQFYF

SEQ ID NO: 120962 - protein, 13 aa, Homo sapiens
  CDR3 for beta chain variable domain of TCR clone 60481 (TRBV20-1, TRBJ2-2)
CSASAAGTGELFF

SEQ ID NO: 120963 - protein, 14 aa, Homo sapiens
  CDR3 for alpha chain variable domain of TCR clone 60482 (TRAV1-2, TRAJ8)
CVVREDTGFQKLVF

SEQ ID NO: 120964 - protein, 16 aa, Homo sapiens
  CDR3 for beta chain variable domain of TCR clone 60482 (TRBV7-3, TRBJ2-2)
CASSLKRGTLSGELFF

SEQ ID NO: 120965 - protein, 11 aa, Homo sapiens
  CDR3 for alpha chain variable domain of TCR clone 60483 (TRAV13-1, TRAJ43)
RAAHNNNDMRF

SEQ ID NO: 120966 - protein, 15 aa, Homo sapiens
  CDR3 for beta chain variable domain of TCR clone 60483 (TRBV6-1, TRBJ2-2)
CASSRLRGDTGELFF

SEQ ID NO: 120967 - protein, 16 aa, Homo sapiens
  CDR3 for alpha chain variable domain of TCR clone 60484 (TRAV30, TRAJ24)
CGTEIVDADSWGKFQF

SEQ ID NO: 120968 - protein, 12 aa, Homo sapiens
  CDR3 for beta chain variable domain of TCR clone 60484 (TRBV12-4, TRBJ2-3)
CASSTLPDTQYF

SEQ ID NO: 120969 - protein, 15 aa, Homo sapiens
  CDR3 for alpha chain variable domain of TCR clone 60485 (TRAV3, TRAJ5)
CAVRGLYTGRRALTF

SEQ ID NO: 120970 - protein, 16 aa, Homo sapiens
  CDR3 for beta chain variable domain of TCR clone 60485 (TRBV20-1, TRBJ1-4)
CSAPGQGLLTNEKLFF

SEQ ID NO: 120971 - protein, 14 aa, Homo sapiens
  CDR3 for alpha chain variable domain of TCR clone 60486 (TRAV8-1, TRAJ13)
CAVKRSGGYRKVTF

SEQ ID NO: 120972 - protein, 16 aa, Homo sapiens
  CDR3 for beta chain variable domain of TCR clone 60486 (TRBV7-9, TRBJ2-1)
CASSDVAGGSYNEQFF

SEQ ID NO: 120973 - protein, 15 aa, Homo sapiens
  CDR3 for alpha chain variable domain of TCR clone 60487 (TRAV12-1, TRAJ42)
CVVKTGGGSQGNLIF

SEQ ID NO: 120974 - protein, 15 aa, Homo sapiens
  CDR3 for beta chain variable domain of TCR clone 60487 (TRBV7-9, TRBJ1-4)
CASSARTGGNEKLFF

SEQ ID NO: 120975 - protein, 15 aa, Homo sapiens
  CDR3 for alpha chain variable domain of TCR clone 60488 (TRAV25, TRAJ52)
CAGRPGGTSYGKLTF

SEQ ID NO: 120976 - protein, 15 aa, Homo sapiens
  CDR3 for beta chain variable domain of TCR clone 60488 (TRBV12-4, TRBJ2-5)
CASSPPTGLQETQYF

SEQ ID NO: 120977 - protein, 13 aa, Homo sapiens
  CDR3 for alpha chain variable domain of TCR clone 60489 (TRAV38-2/DV8, TRAJ56)
CAYKGGANSKLTF

SEQ ID NO: 120978 - protein, 12 aa, Homo sapiens
  CDR3 for beta chain variable domain of TCR clone 60489 (TRBV11-2, TRBJ2-2)
CASSLGGGELFF

SEQ ID NO: 120979 - protein, 11 aa, Homo sapiens
  CDR3 for alpha chain variable domain of TCR clone 60490 (TRAV2, TRAJ13)
CASGGYQEVTF

SEQ ID NO: 120980 - protein, 18 aa, Homo sapiens
  CDR3 for beta chain variable domain of TCR clone 60490 (TRBV10-2, TRBJ2-2)
CISAPAVHRQADAGELFF

SEQ ID NO: 120981 - protein, 23 aa, Homo sapiens
  CDR3 for alpha chain variable domain of TCR clone 60491 (TRAV12-1, TRAJ41)
SSVIQPPTSVWSPNSNSGYALNF

SEQ ID NO: 120982 - protein, 12 aa, Homo sapiens
  CDR3 for beta chain variable domain of TCR clone 60491 (TRBV14, TRBJ2-5)
CASSQLKETQYF

SEQ ID NO: 120983 - protein, 12 aa, Homo sapiens
  CDR3 for alpha chain variable domain of TCR clone 60492 (TRAV17, TRAJ57)
CATDGGSEKLVF

SEQ ID NO: 120984 - protein, 13 aa, Homo sapiens
  CDR3 for beta chain variable domain of TCR clone 60492 (TRBV7-9, TRBJ2-7)
CASSFAGVYEQYF

SEQ ID NO: 120985 - protein, 11 aa, Homo sapiens
  CDR3 for alpha chain variable domain of TCR clone 60493 (TRAV1-2, TRAJ40)
CAVPGAYKYIF

SEQ ID NO: 120986 - protein, 11 aa, Homo sapiens
  CDR3 for beta chain variable domain of TCR clone 60493 (TRBV29-1, TRBJ2-7)
VGTSGSYEQYF

SEQ ID NO: 120987 - protein, 14 aa, Homo sapiens
  CDR3 for alpha chain variable domain of TCR clone 60494 (TRAV26-1, TRAJ45)
CIEVTGGGADGLTF

SEQ ID NO: 120988 - protein, 14 aa, Homo sapiens
  CDR3 for beta chain variable domain of TCR clone 60494 (TRBV7-6, TRBJ2-3)
CASSLGTVTDTQYF

SEQ ID NO: 120989 - protein, 13 aa, Homo sapiens
  CDR3 for alpha chain variable domain of TCR clone 60495 (TRAV12-2, TRAJ20)
CAVNRFDDYKLSF

SEQ ID NO: 120990 - protein, 12 aa, Homo sapiens
  CDR3 for beta chain variable domain of TCR clone 60495 (TRBV19, TRBJ2-1)
CASAQISNEQFF

SEQ ID NO: 120991 - protein, 17 aa, Homo sapiens
  CDR3 for alpha chain variable domain of TCR clone 60496 (TRAV3, TRAJ6)
CAVRDGPRAGGSYIPTF

SEQ ID NO: 120992 - protein, 20 aa, Homo sapiens
  CDR3 for beta chain variable domain of TCR clone 60496 (TRBV28, TRBJ2-1)
CASTPIGRSPGLAGGNDQFF

SEQ ID NO: 120993 - protein, 23 aa, Homo sapiens
  CDR3 for alpha chain variable domain of TCR clone 60497 (TRAV30, TRAJ43)
CTLRPPSSVTQGPTSAALSDMRF

SEQ ID NO: 120994 - protein, 13 aa, Homo sapiens
  CDR3 for beta chain variable domain of TCR clone 60497 (TRBV12-4, TRBJ2-2)
CASSITGSGELFF

SEQ ID NO: 120995 - protein, 11 aa, Homo sapiens
  CDR3 for alpha chain variable domain of TCR clone 60498 (TRAV21, TRAJ34)
CAVTNTDKLIF

SEQ ID NO: 120996 - protein, 13 aa, Homo sapiens
  CDR3 for beta chain variable domain of TCR clone 60498 (TRBV19, TRBJ1-3)
CASRLSLGNTIYF

SEQ ID NO: 120997 - protein, 13 aa, Homo sapiens
  CDR3 for alpha chain variable domain of TCR clone 60499 (TRAV3, TRAJ21)
CAVREPDFNKFYF

SEQ ID NO: 120998 - protein, 13 aa, Homo sapiens
  CDR3 for beta chain variable domain of TCR clone 60499 (TRBV28, TRBJ2-5)
CAGVSRGEETQYF

SEQ ID NO: 120999 - protein, 10 aa, Homo sapiens
  CDR3 for alpha chain variable domain of TCR clone 60500 (TRAV21, TRAJ49)
CAVTGNQFYF

SEQ ID NO: 121000 - protein, 15 aa, Homo sapiens
  CDR3 for beta chain variable domain of TCR clone 60500 (TRBV6-1, TRBJ2-3)
CASTTLAGYTDTQYF

SEQ ID NO: 121001 - protein, 14 aa, Homo sapiens
  CDR3 for alpha chain variable domain of TCR clone 60501 (TRAV12-3, TRAJ10)
SHLPLTGGGNKLTF

SEQ ID NO: 121002 - protein, 12 aa, Homo sapiens
  CDR3 for beta chain variable domain of TCR clone 60501 (TRBV24-1, TRBJ1-4)
CATSDPNEKLFF

SEQ ID NO: 121003 - protein, 14 aa, Homo sapiens
  CDR3 for alpha chain variable domain of TCR clone 60502 (TRAV12-3, TRAJ57)
CARALEGGSEELVF

SEQ ID NO: 121004 - protein, 17 aa, Homo sapiens
  CDR3 for beta chain variable domain of TCR clone 60502 (TRBV11-3, TRBJ2-3)
CASSLGLTGGGTDTQYF

SEQ ID NO: 121005 - protein, 12 aa, Homo sapiens
  CDR3 for alpha chain variable domain of TCR clone 60503 (TRAV38-2/DV8, TRAJ48)
CALLSGNEKLTF

SEQ ID NO: 121006 - protein, 15 aa, Homo sapiens
  CDR3 for beta chain variable domain of TCR clone 60503 (TRBV7-6, TRBJ2-3)
CASSPIIYSTDTQYF

SEQ ID NO: 121007 - protein, 11 aa, Homo sapiens
  CDR3 for alpha chain variable domain of TCR clone 60504 (TRAV17, TRAJ9)
CATTGGFKTSF

SEQ ID NO: 121008 - protein, 14 aa, Homo sapiens
  CDR3 for beta chain variable domain of TCR clone 60504 (TRBV7-9, TRBJ2-2)
CASSGLADTGELFF

SEQ ID NO: 121009 - protein, 15 aa, Homo sapiens
  CDR3 for alpha chain variable domain of TCR clone 60505 (TRAV14/DV4, TRAJ12)
CAMREGWDSSYKLIF

SEQ ID NO: 121010 - protein, 16 aa, Homo sapiens
  CDR3 for beta chain variable domain of TCR clone 60505 (TRBV2, TRBJ2-5)
CARGETQGVGEETQYF

SEQ ID NO: 121011 - protein, 16 aa, Homo sapiens
  CDR3 for alpha chain variable domain of TCR clone 60506 (TRAV23/DV6, TRAJ9)
CAASIGGNTGVFKTIF

SEQ ID NO: 121012 - protein, 14 aa, Homo sapiens
  CDR3 for beta chain variable domain of TCR clone 60506 (TRBV9, TRBJ2-7)
CASSVGVGSYEQYF

SEQ ID NO: 121013 - protein, 15 aa, Homo sapiens
  CDR3 for alpha chain variable domain of TCR clone 60507 (TRAV2, TRAJ9)
CAVAALNTGGFKTIF

SEQ ID NO: 121014 - protein, 14 aa, Homo sapiens
  CDR3 for beta chain variable domain of TCR clone 60507 (TRBV7-8, TRBJ2-5)
CASSATWGQETQYF

SEQ ID NO: 121015 - protein, 14 aa, Homo sapiens
  CDR3 for alpha chain variable domain of TCR clone 60508 (TRAV17, TRAJ33)
CATEARRSNYQLIW

SEQ ID NO: 121016 - protein, 14 aa, Homo sapiens
  CDR3 for beta chain variable domain of TCR clone 60508 (TRBV25-1, TRBJ1-4)
CASSGGGQPEKLFF

SEQ ID NO: 121017 - protein, 15 aa, Homo sapiens
  CDR3 for alpha chain variable domain of TCR clone 60509 (TRAV1-2, TRAJ38)
CAVRDNAGNNRKLIW

SEQ ID NO: 121018 - protein, 13 aa, Homo sapiens
  CDR3 for beta chain variable domain of TCR clone 60509 (TRBV27, TRBJ1-2)
CASSPSHRGRYTF

SEQ ID NO: 121019 - protein, 13 aa, Homo sapiens
  CDR3 for alpha chain variable domain of TCR clone 60510 (TRAV27, TRAJ57)
CRSAQGGSEKLVF

SEQ ID NO: 121020 - protein, 11 aa, Homo sapiens
  CDR3 for beta chain variable domain of TCR clone 60510 (TRBV11-2, TRBJ1-1)
CASSINTEVFF

SEQ ID NO: 121021 - protein, 18 aa, Homo sapiens
  CDR3 for alpha chain variable domain of TCR clone 60511 (TRAV21, TRAJ52)
CAVRPSPAGGTSYGKLTF

SEQ ID NO: 121022 - protein, 16 aa, Homo sapiens
  CDR3 for beta chain variable domain of TCR clone 60511 (TRBV13, TRBJ2-3)
CQQPLQGSGVRNTQYF

SEQ ID NO: 121023 - protein, 15 aa, Homo sapiens
  CDR3 for alpha chain variable domain of TCR clone 60512 (TRAV17, TRAJ16)
CATALRFSDGQKLLV

SEQ ID NO: 121024 - protein, 15 aa, Homo sapiens
  CDR3 for beta chain variable domain of TCR clone 60512 (TRBV20-1, TRBJ1-1)
CSASRGVTGNTEAFF

SEQ ID NO: 121025 - protein, 14 aa, Homo sapiens
  CDR3 for alpha chain variable domain of TCR clone 60513 (TRAV17, TRAJ16)
CATADFSDGQKLLF

SEQ ID NO: 121026 - protein, 15 aa, Homo sapiens
  CDR3 for beta chain variable domain of TCR clone 60513 (TRBV18, TRBJ2-1)
CARSPPSASYNEQFF

SEQ ID NO: 121027 - protein, 12 aa, Homo sapiens
  CDR3 for alpha chain variable domain of TCR clone 60514 (TRAV27, TRAJ35)
CAGADFGNVLHC

SEQ ID NO: 121028 - protein, 16 aa, Homo sapiens
  CDR3 for beta chain variable domain of TCR clone 60514 (TRBV6-1, TRBJ2-1)
CASIFRQGSSYNEQFF

SEQ ID NO: 121029 - protein, 15 aa, Homo sapiens
  CDR3 for alpha chain variable domain of TCR clone 60515 (TRAV16, TRAJ16)
CALQGGGSDGQNLLF

SEQ ID NO: 121030 - protein, 14 aa, Homo sapiens
  CDR3 for beta chain variable domain of TCR clone 60515 (TRBV6-1, TRBJ2-7)
CASSERVNPYEQYF

SEQ ID NO: 121031 - protein, 15 aa, Homo sapiens
  CDR3 for alpha chain variable domain of TCR clone 60516 (TRAV4, TRAJ17)
CLVGDIGAAGNKLTF

SEQ ID NO: 121032 - protein, 14 aa, Homo sapiens
  CDR3 for beta chain variable domain of TCR clone 60516 (TRBV6-3, TRBJ2-7)
CASSYSVGVYEQYF

SEQ ID NO: 121033 - protein, 16 aa, Homo sapiens
  CDR3 for alpha chain variable domain of TCR clone 60517 (TRAV3, TRAJ10)
CAVRDMRAGGGNKLTF

SEQ ID NO: 121034 - protein, 16 aa, Homo sapiens
  CDR3 for beta chain variable domain of TCR clone 60517 (TRBV12-5, TRBJ2-5)
CASGPRTSGNQETQYL

SEQ ID NO: 121035 - protein, 15 aa, Homo sapiens
  CDR3 for alpha chain variable domain of TCR clone 60518 (TRAV3, TRAJ22)
CAVRDRGGSARQLTF

SEQ ID NO: 121036 - protein, 12 aa, Homo sapiens
  CDR3 for beta chain variable domain of TCR clone 60518 (TRBV11-2, TRBJ1-1)
CQQLSLQPAAFF

SEQ ID NO: 121037 - protein, 14 aa, Homo sapiens
  CDR3 for alpha chain variable domain of TCR clone 60519 (TRAV8-2, TRAJ4)
CVVSPSGGYNKLIF

SEQ ID NO: 121038 - protein, 12 aa, Homo sapiens
  CDR3 for beta chain variable domain of TCR clone 60519 (TRBV11-2, TRBJ2-2)
CASSLPTGELFF

SEQ ID NO: 121039 - protein, 11 aa, Homo sapiens
  CDR3 for alpha chain variable domain of TCR clone 60520 (TRAV3, TRAJ21)
CAVGNFDKFYF

SEQ ID NO: 121040 - protein, 16 aa, Homo sapiens
  CDR3 for beta chain variable domain of TCR clone 60520 (TRBV19, TRBJ2-1)
CAGSKAGPSSYNEQFF

SEQ ID NO: 121041 - protein, 11 aa, Homo sapiens
  CDR3 for alpha chain variable domain of TCR clone 60521 (TRAV1-1, TRAJ20)
CAVFNDYKLSF

SEQ ID NO: 121042 - protein, 16 aa, Homo sapiens
  CDR3 for beta chain variable domain of TCR clone 60521 (TRBV29-1, TRBJ2-2)
CSVEKTSEGSTGELFF

SEQ ID NO: 121043 - protein, 12 aa, Homo sapiens
  CDR3 for alpha chain variable domain of TCR clone 60522 (TRAV17, TRAJ49)
CATVTTGNQFYF

SEQ ID NO: 121044 - protein, 16 aa, Homo sapiens
  CDR3 for beta chain variable domain of TCR clone 60522 (TRBV4-1, TRBJ2-5)
CASSSGLAGVLGTQYF

SEQ ID NO: 121045 - protein, 15 aa, Homo sapiens
  CDR3 for alpha chain variable domain of TCR clone 60523 (TRAV17, TRAJ56)
CATDANTGANSKLTF

SEQ ID NO: 121046 - protein, 14 aa, Homo sapiens
  CDR3 for beta chain variable domain of TCR clone 60523 (TRBV19, TRBJ1-5)
CASSLGTGSQPQHF

SEQ ID NO: 121047 - protein, 11 aa, Homo sapiens
  CDR3 for alpha chain variable domain of TCR clone 60524 (TRAV2, TRAJ13)
CASGGYQKVTF

SEQ ID NO: 121048 - protein, 15 aa, Homo sapiens
  CDR3 for beta chain variable domain of TCR clone 60524 (TRBV7-2, TRBJ2-7)
CASSLKGALTYEQYF

SEQ ID NO: 121049 - protein, 13 aa, Homo sapiens
  CDR3 for alpha chain variable domain of TCR clone 60525 (TRAV35, TRAJ43)
CAGHPYNNNDMRF

SEQ ID NO: 121050 - protein, 15 aa, Homo sapiens
  CDR3 for beta chain variable domain of TCR clone 60525 (TRBV25-1, TRBJ1-4)
CASSKRIATNEKLFF

SEQ ID NO: 121051 - protein, 13 aa, Homo sapiens
  CDR3 for alpha chain variable domain of TCR clone 60526 (TRAV26-2, TRAJ43)
CILRAVNNNDMRL

SEQ ID NO: 121052 - protein, 14 aa, Homo sapiens
  CDR3 for beta chain variable domain of TCR clone 60526 (TRBV19, TRBJ2-1)
CASPTFVLSGEQFF

SEQ ID NO: 121053 - protein, 14 aa, Homo sapiens
  CDR3 for alpha chain variable domain of TCR clone 60527 (TRAV13-1, TRAJ13)
CAASRVGGYQKVTF

SEQ ID NO: 121054 - protein, 17 aa, Homo sapiens
  CDR3 for beta chain variable domain of TCR clone 60527 (TRBV15, TRBJ1-5)
CATSRAPPGTRNQPQRF

SEQ ID NO: 121055 - protein, 14 aa, Homo sapiens
  CDR3 for alpha chain variable domain of TCR clone 60528 (TRAV13-1, TRAJ39)
CATSKNNAGNMLTF

SEQ ID NO: 121056 - protein, 15 aa, Homo sapiens
  CDR3 for beta chain variable domain of TCR clone 60528 (TRBV7-9, TRBJ1-6)
CASSSPGRGNSPLHF

SEQ ID NO: 121057 - protein, 15 aa, Homo sapiens
  CDR3 for alpha chain variable domain of TCR clone 60529 (TRAV13-2, TRAJ45)
CAEHHSGGVADGLTF

SEQ ID NO: 121058 - protein, 15 aa, Homo sapiens
  CDR3 for beta chain variable domain of TCR clone 60529 (TRBV7-2, TRBJ2-7)
CASSLALGSAYEQYF

SEQ ID NO: 121059 - protein, 14 aa, Homo sapiens
  CDR3 for alpha chain variable domain of TCR clone 60530 (TRAV8-2, TRAJ11)
CVVSEKSGYSTLTF

SEQ ID NO: 121060 - protein, 16 aa, Homo sapiens
  CDR3 for beta chain variable domain of TCR clone 60530 (TRBV28, TRBJ2-1)
SASSSPEYPRDNEQFF

SEQ ID NO: 121061 - protein, 14 aa, Homo sapiens
  CDR3 for alpha chain variable domain of TCR clone 60531 (TRAV35, TRAJ40)
CSGSTTSGTYKYIF

SEQ ID NO: 121062 - protein, 13 aa, Homo sapiens
  CDR3 for beta chain variable domain of TCR clone 60531 (TRBV20-1, TRBJ1-6)
CSAPLGVGSPLHF

SEQ ID NO: 121063 - protein, 14 aa, Homo sapiens
  CDR3 for alpha chain variable domain of TCR clone 60532 (TRAV20, TRAJ42)
CAVQAGGSQGNLIF

SEQ ID NO: 121064 - protein, 14 aa, Homo sapiens
  CDR3 for beta chain variable domain of TCR clone 60532 (TRBV28, TRBJ1-2)
CASMIQGANYGYTF

SEQ ID NO: 121065 - protein, 16 aa, Homo sapiens
  CDR3 for alpha chain variable domain of TCR clone 60533 (TRAV26-1, )
CIDIQNPDPAVYQLID

SEQ ID NO: 121066 - protein, 19 aa, Homo sapiens
  CDR3 for beta chain variable domain of TCR clone 60533 (TRBV19, TRBJ2-5)
CASSIGQVTDFFLGETQYF

SEQ ID NO: 121067 - protein, 14 aa, Homo sapiens
  CDR3 for alpha chain variable domain of TCR clone 60534 (TRAV3, TRAJ6)
CAVRRTGGSYIPTF

SEQ ID NO: 121068 - protein, 12 aa, Homo sapiens
  CDR3 for beta chain variable domain of TCR clone 60534 (TRBV6-1, TRBJ1-3)
CSTLDSGNTIYF

SEQ ID NO: 121069 - protein, 11 aa, Homo sapiens
  CDR3 for alpha chain variable domain of TCR clone 60535 (TRAV8-4, TRAJ26)
CAGGEGQNFGF

SEQ ID NO: 121070 - protein, 17 aa, Homo sapiens
  CDR3 for beta chain variable domain of TCR clone 60535 (TRBV7-9, TRBJ2-3)
CASSPTVAGDLTDTQYF

SEQ ID NO: 121071 - protein, 13 aa, Homo sapiens
  CDR3 for alpha chain variable domain of TCR clone 60536 (TRAV2, TRAJ40)
CAVVTSGTYKYIL

SEQ ID NO: 121072 - protein, 14 aa, Homo sapiens
  CDR3 for beta chain variable domain of TCR clone 60536 (TRBV11-3, TRBJ1-6)
CASSFSGGDSPLHF

SEQ ID NO: 121073 - protein, 16 aa, Homo sapiens
  CDR3 for alpha chain variable domain of TCR clone 60537 (TRAV21, TRAJ37)
CAVRTAVSSNTGKLIF

SEQ ID NO: 121074 - protein, 13 aa, Homo sapiens
  CDR3 for beta chain variable domain of TCR clone 60537 (TRBV7-9, TRBJ2-5)
CASLPSGRETQYF

SEQ ID NO: 121075 - protein, 14 aa, Homo sapiens
  CDR3 for alpha chain variable domain of TCR clone 60538 (TRAV12-3, TRAJ10)
SHLPLTGGGNKLTF

SEQ ID NO: 121076 - protein, 15 aa, Homo sapiens
  CDR3 for beta chain variable domain of TCR clone 60538 (TRBV5-1, TRBJ2-7)
CASSLNGGPAREQYF

SEQ ID NO: 121077 - protein, 15 aa, Homo sapiens
  CDR3 for alpha chain variable domain of TCR clone 60539 (TRAV13-1, TRAJ40)
CAESRSRQGTYKYIF

SEQ ID NO: 121078 - protein, 15 aa, Homo sapiens
  CDR3 for beta chain variable domain of TCR clone 60539 (TRBV19, TRBJ2-1)
CASSMGWNSNNEQFF

SEQ ID NO: 121079 - protein, 11 aa, Homo sapiens
  CDR3 for alpha chain variable domain of TCR clone 60540 (TRAV2, TRAJ20)
CAVTDDYKLSF

SEQ ID NO: 121080 - protein, 20 aa, Homo sapiens
  CDR3 for beta chain variable domain of TCR clone 60540 (TRBV19, TRBJ2-1)
CASSISRTVTSTRLNNEQFF

SEQ ID NO: 121081 - protein, 12 aa, Homo sapiens
  CDR3 for alpha chain variable domain of TCR clone 60541 (TRAV16, TRAJ10)
CSRTGGGNKLTF

SEQ ID NO: 121082 - protein, 17 aa, Homo sapiens
  CDR3 for beta chain variable domain of TCR clone 60541 (TRBV28, TRBJ2-5)
CASSRQGGLAGAETQHF

SEQ ID NO: 121083 - protein, 15 aa, Homo sapiens
  CDR3 for alpha chain variable domain of TCR clone 60542 (TRAV3, TRAJ22)
CAVRDRGGFARQLTF

SEQ ID NO: 121084 - protein, 17 aa, Homo sapiens
  CDR3 for beta chain variable domain of TCR clone 60542 (TRBV28, TRBJ2-5)
CASSTPEGDALQETQYF

SEQ ID NO: 121085 - protein, 16 aa, Homo sapiens
  CDR3 for alpha chain variable domain of TCR clone 60543 (TRAV20, TRAJ38)
CAVQASNVGNNRKPIW

SEQ ID NO: 121086 - protein, 16 aa, Homo sapiens
  CDR3 for beta chain variable domain of TCR clone 60543 (TRBV7-8, TRBJ2-6)
CASRVGDSSGANVLTF

SEQ ID NO: 121087 - protein, 14 aa, Homo sapiens
  CDR3 for alpha chain variable domain of TCR clone 60544 (TRAV21, TRAJ35)
CAVMPIGFGNVLHC

SEQ ID NO: 121088 - protein, 12 aa, Homo sapiens
  CDR3 for beta chain variable domain of TCR clone 60544 (TRBV7-9, TRBJ2-7)
CASSIKRKEQYF

SEQ ID NO: 121089 - protein, 13 aa, Homo sapiens
  CDR3 for alpha chain variable domain of TCR clone 60545 (TRAV26-1, TRAJ34)
WIVRGHNTDKLIF

SEQ ID NO: 121090 - protein, 15 aa, Homo sapiens
  CDR3 for beta chain variable domain of TCR clone 60545 (TRBV4-1, TRBJ2-7)
CASSQEWGPSYEQYF

SEQ ID NO: 121091 - protein, 14 aa, Homo sapiens
  CDR3 for alpha chain variable domain of TCR clone 60546 (TRAV12-3, TRAJ29)
CAISPYSGNTPLVF

SEQ ID NO: 121092 - protein, 15 aa, Homo sapiens
  CDR3 for beta chain variable domain of TCR clone 60546 (TRBV27, TRBJ2-1)
CASSNGGGSSNEQFF

SEQ ID NO: 121093 - protein, 11 aa, Homo sapiens
  CDR3 for alpha chain variable domain of TCR clone 60547 (TRAV1-2, TRAJ40)
CAVPETYKYIF

SEQ ID NO: 121094 - protein, 16 aa, Homo sapiens
  CDR3 for beta chain variable domain of TCR clone 60547 (TRBV29-1, TRBJ2-7)
CSVEVVGTSGSYEQYF

SEQ ID NO: 121095 - protein, 16 aa, Homo sapiens
  CDR3 for alpha chain variable domain of TCR clone 60548 (TRAV8-3, TRAJ38)
CAVQASNAGNNRKPIW

SEQ ID NO: 121096 - protein, 16 aa, Homo sapiens
  CDR3 for beta chain variable domain of TCR clone 60548 (TRBV7-8, TRBJ2-6)
CASRVGDSSGANVLTF

SEQ ID NO: 121097 - protein, 12 aa, Homo sapiens
  CDR3 for alpha chain variable domain of TCR clone 60549 (TRAV13-1, TRAJ27)
CAAHTTAGKSTF

SEQ ID NO: 121098 - protein, 14 aa, Homo sapiens
  CDR3 for beta chain variable domain of TCR clone 60549 (TRBV19, TRBJ2-2)
CASSGQGIAGELFF

SEQ ID NO: 121099 - protein, 12 aa, Homo sapiens
  CDR3 for alpha chain variable domain of TCR clone 60550 (TRAV1-2, TRAJ42)
CVAGGSQGNLIF

SEQ ID NO: 121100 - protein, 14 aa, Homo sapiens
  CDR3 for beta chain variable domain of TCR clone 60550 (TRBV4-1, TRBJ2-3)
CASSQDWSTDTQYF

SEQ ID NO: 121101 - protein, 13 aa, Homo sapiens
  CDR3 for alpha chain variable domain of TCR clone 60551 (TRAV27, TRAJ41)
WAGEGNSGYALNF

SEQ ID NO: 121102 - protein, 14 aa, Homo sapiens
  CDR3 for beta chain variable domain of TCR clone 60551 (TRBV7-2, TRBJ1-1)
CASSFLTGTTEAFF

SEQ ID NO: 121103 - protein, 14 aa, Homo sapiens
  CDR3 for alpha chain variable domain of TCR clone 60552 (TRAV12-2, TRAJ13)
CAVKKTGGYQKVTF

SEQ ID NO: 121104 - protein, 13 aa, Homo sapiens
  CDR3 for beta chain variable domain of TCR clone 60552 (TRBV4-2, TRBJ1-1)
CASSQAGNTEVFF

SEQ ID NO: 121105 - protein, 15 aa, Homo sapiens
  CDR3 for alpha chain variable domain of TCR clone 60553 (TRAV2, TRAJ13)
CCLLLCFRGLQKVTF

SEQ ID NO: 121106 - protein, 16 aa, Homo sapiens
  CDR3 for beta chain variable domain of TCR clone 60553 (TRBV6-1, TRBJ2-5)
CASSETLDRGAETQYF

SEQ ID NO: 121107 - protein, 16 aa, Homo sapiens
  CDR3 for alpha chain variable domain of TCR clone 60554 (TRAV30, TRAJ24)
CGTEIVDADSWGKLQF

SEQ ID NO: 121108 - protein, 15 aa, Homo sapiens
  CDR3 for beta chain variable domain of TCR clone 60554 (TRBV27, TRBJ2-1)
CASSNGGGSSNEQFF

SEQ ID NO: 121109 - protein, 13 aa, Homo sapiens
  CDR3 for alpha chain variable domain of TCR clone 60555 (TRAV27, TRAJ42)
CAGARGSQGNLIS

SEQ ID NO: 121110 - protein, 15 aa, Homo sapiens
  CDR3 for beta chain variable domain of TCR clone 60555 (TRBV10-3, TRBJ2-2)
CAIRTDREDTGELFF

SEQ ID NO: 121111 - protein, 16 aa, Homo sapiens
  CDR3 for alpha chain variable domain of TCR clone 60556 (TRAV35, TRAJ37)
CWAFLRCSSNTGKLIF

SEQ ID NO: 121112 - protein, 13 aa, Homo sapiens
  CDR3 for beta chain variable domain of TCR clone 60556 (TRBV2, TRBJ1-2)
CASSVRGNYGYTF

SEQ ID NO: 121113 - protein, 13 aa, Homo sapiens
  CDR3 for alpha chain variable domain of TCR clone 60557 (TRAV17, TRAJ40)
CATDEGGTHKYIF

SEQ ID NO: 121114 - protein, 13 aa, Homo sapiens
  CDR3 for beta chain variable domain of TCR clone 60557 (TRBV7-9, TRBJ1-2)
CASSLKQNYGYTF

SEQ ID NO: 121115 - protein, 14 aa, Homo sapiens
  CDR3 for alpha chain variable domain of TCR clone 60558 (TRAV1-2, TRAJ6)
CAVSLSGGSYIPAF

SEQ ID NO: 121116 - protein, 15 aa, Homo sapiens
  CDR3 for beta chain variable domain of TCR clone 60558 (TRBV7-9, TRBJ2-7)
CAISPGGGLTYEQYF

SEQ ID NO: 121117 - protein, 17 aa, Homo sapiens
  CDR3 for alpha chain variable domain of TCR clone 60559 (TRAV36/DV7, TRAJ52)
CAVAQRAGGTSYGKLTF

SEQ ID NO: 121118 - protein, 17 aa, Homo sapiens
  CDR3 for beta chain variable domain of TCR clone 60559 (TRBV20-1, TRBJ2-2)
CSASGSGQGGLTGELFS

SEQ ID NO: 121119 - protein, 10 aa, Homo sapiens
  CDR3 for alpha chain variable domain of TCR clone 60560 (TRAV12-3, TRAJ18)
CAMSAEAQPW

SEQ ID NO: 121120 - protein, 13 aa, Homo sapiens
  CDR3 for beta chain variable domain of TCR clone 60560 (TRBV15, TRBJ1-6)
GATSGGLNSPLHF

SEQ ID NO: 121121 - protein, 16 aa, Homo sapiens
  CDR3 for alpha chain variable domain of TCR clone 60561 (TRAV8-3, TRAJ13)
CAVVAYPSGGYQKVTF

SEQ ID NO: 121122 - protein, 14 aa, Homo sapiens
  CDR3 for beta chain variable domain of TCR clone 60561 (TRBV18, TRBJ2-5)
CASSPRASSETQYF

SEQ ID NO: 121123 - protein, 14 aa, Homo sapiens
  CDR3 for alpha chain variable domain of TCR clone 60562 (TRAV1-2, TRAJ8)
CAVRGDTGFQKPVF

SEQ ID NO: 121124 - protein, 16 aa, Homo sapiens
  CDR3 for beta chain variable domain of TCR clone 60562 (TRBV6-1, TRBJ2-5)
CASSETLDRGAETQYF

SEQ ID NO: 121125 - protein, 13 aa, Homo sapiens
  CDR3 for alpha chain variable domain of TCR clone 60563 (TRAV20, TRAJ21)
CAVKGYNFNKFYF

SEQ ID NO: 121126 - protein, 14 aa, Homo sapiens
  CDR3 for beta chain variable domain of TCR clone 60563 (TRBV3-1, TRBJ2-5)
CASSQGPDQETQYF

SEQ ID NO: 121127 - protein, 11 aa, Homo sapiens
  CDR3 for alpha chain variable domain of TCR clone 60564 (TRAV21, TRAJ41)
CAVRSGYALNF

SEQ ID NO: 121128 - protein, 16 aa, Homo sapiens
  CDR3 for beta chain variable domain of TCR clone 60564 (TRBV13, TRBJ2-2)
CASSPRTGEHTGELFF

SEQ ID NO: 121129 - protein, 12 aa, Homo sapiens
  CDR3 for alpha chain variable domain of TCR clone 60565 (TRAV12-1, TRAJ40)
CVVYSGTYKYIF

SEQ ID NO: 121130 - protein, 18 aa, Homo sapiens
  CDR3 for beta chain variable domain of TCR clone 60565 (TRBV11-2, TRBJ2-3)
CASSLGGASPGAPNTQYF

SEQ ID NO: 121131 - protein, 16 aa, Homo sapiens
  CDR3 for alpha chain variable domain of TCR clone 60566 (TRAV23/DV6, TRAJ9)
CAASIGGNTGGFKTIF

SEQ ID NO: 121132 - protein, 12 aa, Homo sapiens
  CDR3 for beta chain variable domain of TCR clone 60566 (TRBV11-2, TRBJ2-1)
CASSPGNNEQFF

SEQ ID NO: 121133 - protein, 14 aa, Homo sapiens
  CDR3 for alpha chain variable domain of TCR clone 60567 (TRAV23/DV6, TRAJ4)
CAANLSGSYNKLIF

SEQ ID NO: 121134 - protein, 17 aa, Homo sapiens
  CDR3 for beta chain variable domain of TCR clone 60567 (TRBV4-1, TRBJ1-3)
CASSPQRGIRFGNTIYF

SEQ ID NO: 121135 - protein, 13 aa, Homo sapiens
  CDR3 for alpha chain variable domain of TCR clone 60568 (TRAV3, TRAJ6)
CAARRGGSYIPTF

SEQ ID NO: 121136 - protein, 16 aa, Homo sapiens
  CDR3 for beta chain variable domain of TCR clone 60568 (TRBV7-9, TRBJ2-2)
CASSLATGVGTGELFF

SEQ ID NO: 121137 - protein, 14 aa, Homo sapiens
  CDR3 for alpha chain variable domain of TCR clone 60569 (TRAV26-1, TRAJ38)
CIADNAGNNRKLIW

SEQ ID NO: 121138 - protein, 17 aa, Homo sapiens
  CDR3 for beta chain variable domain of TCR clone 60569 (TRBV7-9, TRBJ2-3)
CASSPTVAGDPTDTQYF

SEQ ID NO: 121139 - protein, 12 aa, Homo sapiens
  CDR3 for alpha chain variable domain of TCR clone 60570 (TRAV13-2, TRAJ23)
CAERHRGGKLIF

SEQ ID NO: 121140 - protein, 13 aa, Homo sapiens
  CDR3 for beta chain variable domain of TCR clone 60570 (TRBV2, TRBJ1-6)
CADSGSCNSPLHF

SEQ ID NO: 121141 - protein, 14 aa, Homo sapiens
  CDR3 for alpha chain variable domain of TCR clone 60571 (TRAV35, TRAJ42)
CCVPYGGSQGNLIF

SEQ ID NO: 121142 - protein, 18 aa, Homo sapiens
  CDR3 for beta chain variable domain of TCR clone 60571 (TRBV13, TRBJ2-6)
CASSPMTSGGSGANALTF

SEQ ID NO: 121143 - protein, 14 aa, Homo sapiens
  CDR3 for alpha chain variable domain of TCR clone 60572 (TRAV12-2, TRAJ6)
CASKWGGGSYIPTF

SEQ ID NO: 121144 - protein, 14 aa, Homo sapiens
  CDR3 for beta chain variable domain of TCR clone 60572 (TRBV7-8, TRBJ1-2)
CASSAGTAIYGYTF

SEQ ID NO: 121145 - protein, 16 aa, Homo sapiens
  CDR3 for alpha chain variable domain of TCR clone 60573 (TRAV1-1, TRAJ29)
CAVRSTRNSGNTPLVF

SEQ ID NO: 121146 - protein, 16 aa, Homo sapiens
  CDR3 for beta chain variable domain of TCR clone 60573 (TRBV28, TRBJ1-4)
CASSPPYRGRSEKLFF

SEQ ID NO: 121147 - protein, 15 aa, Homo sapiens
  CDR3 for alpha chain variable domain of TCR clone 60574 (TRAV4, TRAJ36)
CLVDDRQTGANNLFF

SEQ ID NO: 121148 - protein, 15 aa, Homo sapiens
  CDR3 for beta chain variable domain of TCR clone 60574 (TRBV7-6, TRBJ2-1)
CASSSLAGEGNEQFF

SEQ ID NO: 121149 - protein, 11 aa, Homo sapiens
  CDR3 for alpha chain variable domain of TCR clone 60575 (TRAV35, TRAJ34)
CWARNTDKLIF

SEQ ID NO: 121150 - protein, 14 aa, Homo sapiens
  CDR3 for beta chain variable domain of TCR clone 60575 (TRBV5-1, TRBJ2-7)
FSSSRGESLYEQYF

SEQ ID NO: 121151 - protein, 15 aa, Homo sapiens
  CDR3 for alpha chain variable domain of TCR clone 60576 (TRAV26-1, TRAJ23)
CIVRVAGYQGGKLIF

SEQ ID NO: 121152 - protein, 18 aa, Homo sapiens
  CDR3 for beta chain variable domain of TCR clone 60576 (TRBV28, TRBJ2-1)
CASSSTSGGANSYNEQFF

SEQ ID NO: 121153 - protein, 14 aa, Homo sapiens
  CDR3 for alpha chain variable domain of TCR clone 60577 (TRAV1-2, TRAJ8)
CAVREDKGFQKLVF

SEQ ID NO: 121154 - protein, 14 aa, Homo sapiens
  CDR3 for beta chain variable domain of TCR clone 60577 (TRBV15, TRBJ2-3)
CATRSGTSTDTQYF

SEQ ID NO: 121155 - protein, 13 aa, Homo sapiens
  CDR3 for alpha chain variable domain of TCR clone 60578 (TRAV2, TRAJ40)
CAVVTSGTYKYIF

SEQ ID NO: 121156 - protein, 16 aa, Homo sapiens
  CDR3 for beta chain variable domain of TCR clone 60578 (TRBV19, TRBJ2-1)
CASSKAGPSSYNEQLF

SEQ ID NO: 121157 - protein, 16 aa, Homo sapiens
  CDR3 for alpha chain variable domain of TCR clone 60579 (TRAV17, TRAJ22)
CATGPISSGSARQLTF

SEQ ID NO: 121158 - protein, 14 aa, Homo sapiens
  CDR3 for beta chain variable domain of TCR clone 60579 (TRBV7-9, TRBJ2-2)
CASSGLADTGELFF

SEQ ID NO: 121159 - protein, 13 aa, Homo sapiens
  CDR3 for alpha chain variable domain of TCR clone 60580 (TRAV13-1, TRAJ21)
CAASIYNFNKFYF

SEQ ID NO: 121160 - protein, 19 aa, Homo sapiens
  CDR3 for beta chain variable domain of TCR clone 60580 (TRBV19, TRBJ2-5)
CASSIGQVTDFFLGETQYF

SEQ ID NO: 121161 - protein, 18 aa, Homo sapiens
  CDR3 for alpha chain variable domain of TCR clone 60581 (TRAV21, TRAJ52)
CAVRPSPAGGTSYGKLTF

SEQ ID NO: 121162 - protein, 14 aa, Homo sapiens
  CDR3 for beta chain variable domain of TCR clone 60581 (TRBV7-2, TRBJ2-3)
CASSQTGSSYTQYF

SEQ ID NO: 121163 - protein, 14 aa, Homo sapiens
  CDR3 for alpha chain variable domain of TCR clone 60582 (TRAV16, TRAJ33)
CALSAMDSNYQLIW

SEQ ID NO: 121164 - protein, 18 aa, Homo sapiens
  CDR3 for beta chain variable domain of TCR clone 60582 (TRBV11-2, TRBJ2-3)
CASSLGGASRGAPNTQYF

SEQ ID NO: 121165 - protein, 15 aa, Homo sapiens
  CDR3 for alpha chain variable domain of TCR clone 60583 (TRAV3, TRAJ22)
CAVRDRGGSARQPTF

SEQ ID NO: 121166 - protein, 16 aa, Homo sapiens
  CDR3 for beta chain variable domain of TCR clone 60583 (TRBV5-4, TRBJ2-3)
CASQQPGAGGSDTQYF

SEQ ID NO: 121167 - protein, 12 aa, Homo sapiens
  CDR3 for alpha chain variable domain of TCR clone 60584 (TRAV12-3, TRAJ17)
CAMTPTGNKLTF

SEQ ID NO: 121168 - protein, 15 aa, Homo sapiens
  CDR3 for beta chain variable domain of TCR clone 60584 (TRBV20-1, TRBJ2-7)
CSDRDRVSGMDEQYF

SEQ ID NO: 121169 - protein, 16 aa, Homo sapiens
  CDR3 for alpha chain variable domain of TCR clone 60585 (TRAV8-6, TRAJ7)
CVVSEGPYYGNNRLAF

SEQ ID NO: 121170 - protein, 13 aa, Homo sapiens
  CDR3 for beta chain variable domain of TCR clone 60585 (TRBV19, TRBJ2-1)
CASSMYRVNEQFF

SEQ ID NO: 121171 - protein, 15 aa, Homo sapiens
  CDR3 for alpha chain variable domain of TCR clone 60586 (TRAV12-1, TRAJ9)
CVVSLGDTGGFKTIF

SEQ ID NO: 121172 - protein, 16 aa, Homo sapiens
  CDR3 for beta chain variable domain of TCR clone 60586 (TRBV27, TRBJ2-5)
CASSFGPGGTKETQYF

SEQ ID NO: 121173 - protein, 14 aa, Homo sapiens
  CDR3 for alpha chain variable domain of TCR clone 60587 (TRAV1-2, TRAJ8)
CAVREDTGFQKLVF

SEQ ID NO: 121174 - protein, 16 aa, Homo sapiens
  CDR3 for beta chain variable domain of TCR clone 60587 (TRBV7-3, TRBJ2-2)
CASSVKRGTLSGELFF

SEQ ID NO: 121175 - protein, 14 aa, Homo sapiens
  CDR3 for alpha chain variable domain of TCR clone 60588 (TRAV13-1, TRAJ44)
CAAKATGTASKLTF

SEQ ID NO: 121176 - protein, 17 aa, Homo sapiens
  CDR3 for beta chain variable domain of TCR clone 60588 (TRBV7-3, TRBJ2-3)
CASSLMKRMRGADTQYL

SEQ ID NO: 121177 - protein, 14 aa, Homo sapiens
  CDR3 for alpha chain variable domain of TCR clone 60589 (TRAV26-2, TRAJ27)
CILRDISDAGKSTF

SEQ ID NO: 121178 - protein, 15 aa, Homo sapiens
  CDR3 for beta chain variable domain of TCR clone 60589 (TRBV10-3, TRBJ2-3)
CAISLTSGGTDTQYF

SEQ ID NO: 121179 - protein, 11 aa, Homo sapiens
  CDR3 for alpha chain variable domain of TCR clone 60590 (TRAV2, TRAJ33)
CAVESNYQLIW

SEQ ID NO: 121180 - protein, 14 aa, Homo sapiens
  CDR3 for beta chain variable domain of TCR clone 60590 (TRBV11-2, TRBJ2-7)
CASSSTGEGYEQYF

SEQ ID NO: 121181 - protein, 15 aa, Homo sapiens
  CDR3 for alpha chain variable domain of TCR clone 60591 (TRAV36/DV7, TRAJ53)
CAVEGSGGSNYKLPF

SEQ ID NO: 121182 - protein, 16 aa, Homo sapiens
  CDR3 for beta chain variable domain of TCR clone 60591 (TRBV27, TRBJ2-2)
CASSLSGFWVTGELFF

SEQ ID NO: 121183 - protein, 15 aa, Homo sapiens
  CDR3 for alpha chain variable domain of TCR clone 60592 (TRAV21, TRAJ37)
CSVRPTLSNTGKLIF

SEQ ID NO: 121184 - protein, 16 aa, Homo sapiens
  CDR3 for beta chain variable domain of TCR clone 60592 (TRBV24-1, TRBJ2-3)
CATSDRRQDLTDTQYF

SEQ ID NO: 121185 - protein, 12 aa, Homo sapiens
  CDR3 for alpha chain variable domain of TCR clone 60593 (TRAV14/DV4, TRAJ11)
CAMSLYDSTLTF

SEQ ID NO: 121186 - protein, 19 aa, Homo sapiens
  CDR3 for beta chain variable domain of TCR clone 60593 (TRBV28, TRBJ2-4)
CASSLQPGGPAHSKNIQYF

SEQ ID NO: 121187 - protein, 14 aa, Homo sapiens
  CDR3 for alpha chain variable domain of TCR clone 60594 (TRAV12-3, TRAJ58)
CAMSTETSGSGLTF

SEQ ID NO: 121188 - protein, 12 aa, Homo sapiens
  CDR3 for beta chain variable domain of TCR clone 60594 (TRBV7-8, TRBJ2-7)
CASSLGDREQYF

SEQ ID NO: 121189 - protein, 16 aa, Homo sapiens
  CDR3 for alpha chain variable domain of TCR clone 60595 (TRAV3, TRAJ37)
CAVRPHSSGNTGKLIF

SEQ ID NO: 121190 - protein, 11 aa, Homo sapiens
  CDR3 for beta chain variable domain of TCR clone 60595 (TRBV10-3, TRBJ2-7)
CAISEGLEQYF

SEQ ID NO: 121191 - protein, 16 aa, Homo sapiens
  CDR3 for alpha chain variable domain of TCR clone 60596 (TRAV30, TRAJ24)
CGTEIVDADSWGKFQF

SEQ ID NO: 121192 - protein, 13 aa, Homo sapiens
  CDR3 for beta chain variable domain of TCR clone 60596 (TRBV20-1, TRBJ2-2)
CSASAAGTGELFF

SEQ ID NO: 121193 - protein, 13 aa, Homo sapiens
  CDR3 for alpha chain variable domain of TCR clone 60597 (TRAV3, TRAJ21)
CAVREPDFNKFYF

SEQ ID NO: 121194 - protein, 14 aa, Homo sapiens
  CDR3 for beta chain variable domain of TCR clone 60597 (TRBV27, TRBJ2-2)
CASRPGVNTGELFF

SEQ ID NO: 121195 - protein, 12 aa, Homo sapiens
  CDR3 for alpha chain variable domain of TCR clone 60598 (TRAV13-1, TRAJ21)
CAAKEGFNKFYF

SEQ ID NO: 121196 - protein, 18 aa, Homo sapiens
  CDR3 for beta chain variable domain of TCR clone 60598 (TRBV20-1, TRBJ2-6)
CGAETTPTHGSGANVLTF

SEQ ID NO: 121197 - protein, 14 aa, Homo sapiens
  CDR3 for alpha chain variable domain of TCR clone 60599 (TRAV26-1, TRAJ38)
CIADNAGNNRKLIW

SEQ ID NO: 121198 - protein, 13 aa, Homo sapiens
  CDR3 for beta chain variable domain of TCR clone 60599 (TRBV20-1, TRBJ1-1)
CSARGAGNTEAFF

SEQ ID NO: 121199 - protein, 15 aa, Homo sapiens
  CDR3 for alpha chain variable domain of TCR clone 60600 (TRAV14/DV4, TRAJ10)
CAMRELTGGGNKLTF

SEQ ID NO: 121200 - protein, 13 aa, Homo sapiens
  CDR3 for beta chain variable domain of TCR clone 60600 (TRBV4-2, TRBJ1-1)
CASSQAGNTEAFF

SEQ ID NO: 121201 - protein, 12 aa, Homo sapiens
  CDR3 for alpha chain variable domain of TCR clone 60601 (TRAV12-3, TRAJ17)
CAMTLTGNTLTF

SEQ ID NO: 121202 - protein, 13 aa, Homo sapiens
  CDR3 for beta chain variable domain of TCR clone 60601 (TRBV7-9, TRBJ1-2)
CASSLKQNYGYTF

SEQ ID NO: 121203 - protein, 13 aa, Homo sapiens
  CDR3 for alpha chain variable domain of TCR clone 60602 (TRAV12-2, TRAJ15)
CAVFNQAGTALIF

SEQ ID NO: 121204 - protein, 22 aa, Homo sapiens
  CDR3 for beta chain variable domain of TCR clone 60602 (TRBV7-8, TRBJ1-5)
RRTPPCISVPAAGGGADQPQHF

SEQ ID NO: 121205 - protein, 12 aa, Homo sapiens
  CDR3 for alpha chain variable domain of TCR clone 60603 (TRAV21, TRAJ11)
CAVTSGYSTLTF

SEQ ID NO: 121206 - protein, 14 aa, Homo sapiens
  CDR3 for beta chain variable domain of TCR clone 60603 (TRBV20-1, TRBJ2-7)
CSAPELAGVGEQYF

SEQ ID NO: 121207 - protein, 14 aa, Homo sapiens
  CDR3 for alpha chain variable domain of TCR clone 60604 (TRAV12-3, TRAJ10)
SHLPLTGGGNKLTF

SEQ ID NO: 121208 - protein, 16 aa, Homo sapiens
  CDR3 for beta chain variable domain of TCR clone 60604 (TRBV10-3, TRBJ1-1)
CAISTGFPAMNTEAFF

SEQ ID NO: 121209 - protein, 14 aa, Homo sapiens
  CDR3 for alpha chain variable domain of TCR clone 60605 (TRAV4, TRAJ20)
CLVSRRSNDYKLSF

SEQ ID NO: 121210 - protein, 18 aa, Homo sapiens
  CDR3 for beta chain variable domain of TCR clone 60605 (TRBV2, TRBJ2-5)
CASSGDPQGRGAQETQYF

SEQ ID NO: 121211 - protein, 19 aa, Homo sapiens
  CDR3 for alpha chain variable domain of TCR clone 60606 (TRAV3, TRAJ6)
CAVRDRNPSRSGGSYIPTF

SEQ ID NO: 121212 - protein, 15 aa, Homo sapiens
  CDR3 for beta chain variable domain of TCR clone 60606 (TRBV18, TRBJ2-7)
CASSPTFMDSCEQYF

SEQ ID NO: 121213 - protein, 16 aa, Homo sapiens
  CDR3 for alpha chain variable domain of TCR clone 60607 (TRAV12-2, TRAJ10)
CAVNRVLTGGGNKLAF

SEQ ID NO: 121214 - protein, 14 aa, Homo sapiens
  CDR3 for beta chain variable domain of TCR clone 60607 (TRBV9, TRBJ2-1)
CASSVALAVNEQFF

SEQ ID NO: 121215 - protein, 13 aa, Homo sapiens
  CDR3 for alpha chain variable domain of TCR clone 60608 (TRAV8-6, TRAJ21)
CAVSPSSLNKFYF

SEQ ID NO: 121216 - protein, 14 aa, Homo sapiens
  CDR3 for beta chain variable domain of TCR clone 60608 (TRBV7-9, TRBJ2-5)
CASSLYTAQETQYF

SEQ ID NO: 121217 - protein, 14 aa, Homo sapiens
  CDR3 for alpha chain variable domain of TCR clone 60609 (TRAV29/DV5, TRAJ44)
CAASATGTASKLTF

SEQ ID NO: 121218 - protein, 16 aa, Homo sapiens
  CDR3 for beta chain variable domain of TCR clone 60609 (TRBV7-9, TRBJ1-3)
CASSQTSGLRMGTMYF

SEQ ID NO: 121219 - protein, 11 aa, Homo sapiens
  CDR3 for alpha chain variable domain of TCR clone 60610 (TRAV13-1, TRAJ6)
CATLGSYITTF

SEQ ID NO: 121220 - protein, 13 aa, Homo sapiens
  CDR3 for beta chain variable domain of TCR clone 60610 (TRBV6-6, TRBJ2-1)
CASSLHQGDEQFF

SEQ ID NO: 121221 - protein, 15 aa, Homo sapiens
  CDR3 for alpha chain variable domain of TCR clone 60611 (TRAV35, TRAJ40)
CAGQLGTSGTYKYIF

SEQ ID NO: 121222 - protein, 14 aa, Homo sapiens
  CDR3 for beta chain variable domain of TCR clone 60611 (TRBV7-3, TRBJ2-1)
CASSLAGGTNEEFF

SEQ ID NO: 121223 - protein, 14 aa, Homo sapiens
  CDR3 for alpha chain variable domain of TCR clone 60612 (TRAV27, TRAJ22)
CAGVPVLGKRQLTF

SEQ ID NO: 121224 - protein, 17 aa, Homo sapiens
  CDR3 for beta chain variable domain of TCR clone 60612 (TRBV14, TRBJ2-1)
CASSQDRRVTSYNEQFF

SEQ ID NO: 121225 - protein, 18 aa, Homo sapiens
  CDR3 for alpha chain variable domain of TCR clone 60613 (TRAV21, TRAJ52)
CAVRPSPAGGTSYGKLTF

SEQ ID NO: 121226 - protein, 12 aa, Homo sapiens
  CDR3 for beta chain variable domain of TCR clone 60613 (TRBV11-2, TRBJ2-2)
RASSLGGGELFF

SEQ ID NO: 121227 - protein, 15 aa, Homo sapiens
  CDR3 for alpha chain variable domain of TCR clone 60614 (TRAV8-3, TRAJ45)
CASSYSGGGADGLTF

SEQ ID NO: 121228 - protein, 15 aa, Homo sapiens
  CDR3 for beta chain variable domain of TCR clone 60614 (TRBV7-2, TRBJ2-3)
CASSLAGAFIDTQYF

SEQ ID NO: 121229 - protein, 14 aa, Homo sapiens
  CDR3 for alpha chain variable domain of TCR clone 60615 (TRAV12-1, TRAJ17)
CVVNPKAAGNKLTF

SEQ ID NO: 121230 - protein, 15 aa, Homo sapiens
  CDR3 for beta chain variable domain of TCR clone 60615 (TRBV18, TRBJ1-5)
CASSETGGNNQPQHF

SEQ ID NO: 121231 - protein, 14 aa, Homo sapiens
  CDR3 for alpha chain variable domain of TCR clone 60616 (TRAV1-2, TRAJ16)
CAVNRFSDGQKLLF

SEQ ID NO: 121232 - protein, 16 aa, Homo sapiens
  CDR3 for beta chain variable domain of TCR clone 60616 (TRBV5-1, TRBJ2-3)
CASSSVGRRSTDTQYF

SEQ ID NO: 121233 - protein, 18 aa, Homo sapiens
  CDR3 for alpha chain variable domain of TCR clone 60617 (TRAV21, TRAJ52)
CAVRPSPAGGTSYGKLTF

SEQ ID NO: 121234 - protein, 14 aa, Homo sapiens
  CDR3 for beta chain variable domain of TCR clone 60617 (TRBV15, TRBJ2-3)
CATRSGTSTDTQYF

SEQ ID NO: 121235 - protein, 14 aa, Homo sapiens
  CDR3 for alpha chain variable domain of TCR clone 60618 (TRAV20, TRAJ42)
CAVQAGGSQGNLIF

SEQ ID NO: 121236 - protein, 12 aa, Homo sapiens
  CDR3 for beta chain variable domain of TCR clone 60618 (TRBV24-1, TRBJ1-1)
CATLYPDTEAFF

SEQ ID NO: 121237 - protein, 14 aa, Homo sapiens
  CDR3 for alpha chain variable domain of TCR clone 60619 (TRAV1-2, TRAJ16)
CAVNRFSDGQKLLF

SEQ ID NO: 121238 - protein, 13 aa, Homo sapiens
  CDR3 for beta chain variable domain of TCR clone 60619 (TRBV18, TRBJ2-5)
CASSPAGKGTQYF

SEQ ID NO: 121239 - protein, 11 aa, Homo sapiens
  CDR3 for alpha chain variable domain of TCR clone 60620 (TRAV1-2, TRAJ31)
CAVNNNARLMF

SEQ ID NO: 121240 - protein, 13 aa, Homo sapiens
  CDR3 for beta chain variable domain of TCR clone 60620 (TRBV7-3, TRBJ1-1)
CASSQDWGAEAFF

SEQ ID NO: 121241 - protein, 14 aa, Homo sapiens
  CDR3 for alpha chain variable domain of TCR clone 60621 (TRAV4, TRAJ17)
CLVGDMAAGSKLTF

SEQ ID NO: 121242 - protein, 15 aa, Homo sapiens
  CDR3 for beta chain variable domain of TCR clone 60621 (TRBV5-5, TRBJ1-5)
CASSSTPGSNQPQHF

SEQ ID NO: 121243 - protein, 12 aa, Homo sapiens
  CDR3 for alpha chain variable domain of TCR clone 60622 (TRAV13-2, TRAJ23)
CAEHHRGGKLIF

SEQ ID NO: 121244 - protein, 16 aa, Homo sapiens
  CDR3 for beta chain variable domain of TCR clone 60622 (TRBV20-1, TRBJ1-4)
CSAPGQGLLTNEKLFF

SEQ ID NO: 121245 - protein, 12 aa, Homo sapiens
  CDR3 for alpha chain variable domain of TCR clone 60623 (TRAV16, TRAJ10)
CSRTGGGNKLTF

SEQ ID NO: 121246 - protein, 15 aa, Homo sapiens
  CDR3 for beta chain variable domain of TCR clone 60623 (TRBV7-9, TRBJ1-5)
CASSQGHQPNQPQHF

SEQ ID NO: 121247 - protein, 13 aa, Homo sapiens
  CDR3 for alpha chain variable domain of TCR clone 60624 (TRAV8-3, TRAJ44)
CAVVPSTASKLTF

SEQ ID NO: 121248 - protein, 14 aa, Homo sapiens
  CDR3 for beta chain variable domain of TCR clone 60624 (TRBV11-2, TRBJ2-3)
CASSRLARTDTQYF

SEQ ID NO: 121249 - protein, 17 aa, Homo sapiens
  CDR3 for alpha chain variable domain of TCR clone 60625 (TRAV3, TRAJ6)
CAVRDGPRAGGSYIPTF

SEQ ID NO: 121250 - protein, 11 aa, Homo sapiens
  CDR3 for beta chain variable domain of TCR clone 60625 (TRBV6-3, TRBJ2-3)
CATGQADTQYF

SEQ ID NO: 121251 - protein, 16 aa, Homo sapiens
  CDR3 for alpha chain variable domain of TCR clone 60626 (TRAV8-6, TRAJ39)
CAVMLMNNNAGNMLTF

SEQ ID NO: 121252 - protein, 16 aa, Homo sapiens
  CDR3 for beta chain variable domain of TCR clone 60626 (TRBV15, TRBJ2-5)
CATSRYLEAAQETQYF

SEQ ID NO: 121253 - protein, 16 aa, Homo sapiens
  CDR3 for alpha chain variable domain of TCR clone 60627 (TRAV20, TRAJ52)
CAVLPDGGTSYGKLTS

SEQ ID NO: 121254 - protein, 12 aa, Homo sapiens
  CDR3 for beta chain variable domain of TCR clone 60627 (TRBV19, TRBJ2-1)
CASSQISNEQFF

SEQ ID NO: 121255 - protein, 14 aa, Homo sapiens
  CDR3 for alpha chain variable domain of TCR clone 60628 (TRAV8-3, TRAJ4)
CAVGAAGGYNKLIF

SEQ ID NO: 121256 - protein, 12 aa, Homo sapiens
  CDR3 for beta chain variable domain of TCR clone 60628 (TRBV20-1, TRBJ1-5)
CSARAPDQPQHF

SEQ ID NO: 121257 - protein, 14 aa, Homo sapiens
  CDR3 for alpha chain variable domain of TCR clone 60629 (TRAV1-1, TRAJ27)
CAVIYNTNAGKSTF

SEQ ID NO: 121258 - protein, 15 aa, Homo sapiens
  CDR3 for beta chain variable domain of TCR clone 60629 (TRBV7-2, TRBJ2-1)
CASSSGLAGGIEQFF

SEQ ID NO: 121259 - protein, 14 aa, Homo sapiens
  CDR3 for alpha chain variable domain of TCR clone 60630 (TRAV12-1, TRAJ17)
CVVNYKAAGNKLTF

SEQ ID NO: 121260 - protein, 12 aa, Homo sapiens
  CDR3 for beta chain variable domain of TCR clone 60630 (TRBV28, TRBJ1-1)
CASMGRNTEAFF

SEQ ID NO: 121261 - protein, 21 aa, Homo sapiens
  CDR3 for alpha chain variable domain of TCR clone 60631 (TRAV1-1, TRAJ6)
CLLLLRCERLERTGGSYIPTF

SEQ ID NO: 121262 - protein, 13 aa, Homo sapiens
  CDR3 for beta chain variable domain of TCR clone 60631 (TRBV10-2, TRBJ2-7)
CASGASWGYEQYF

SEQ ID NO: 121263 - protein, 12 aa, Homo sapiens
  CDR3 for alpha chain variable domain of TCR clone 60632 (TRAV9-2, TRAJ26)
CALRGYGQNFVL

SEQ ID NO: 121264 - protein, 12 aa, Homo sapiens
  CDR3 for beta chain variable domain of TCR clone 60632 (TRBV29-1, TRBJ2-3)
CSVTGGADTQYF

SEQ ID NO: 121265 - protein, 14 aa, Homo sapiens
  CDR3 for alpha chain variable domain of TCR clone 60633 (TRAV12-3, TRAJ10)
SHLPLTGGGNKLTF

SEQ ID NO: 121266 - protein, 14 aa, Homo sapiens
  CDR3 for beta chain variable domain of TCR clone 60633 (TRBV19, TRBJ2-1)
CASPTFVLSDEQFF

SEQ ID NO: 121267 - protein, 12 aa, Homo sapiens
  CDR3 for alpha chain variable domain of TCR clone 60634 (TRAV27, TRAJ9)
CAGESGGFKTIF

SEQ ID NO: 121268 - protein, 14 aa, Homo sapiens
  CDR3 for beta chain variable domain of TCR clone 60634 (TRBV6-1, TRBJ2-1)
CASAKGGFYNEQFF

SEQ ID NO: 121269 - protein, 12 aa, Homo sapiens
  CDR3 for alpha chain variable domain of TCR clone 60635 (TRAV21, TRAJ11)
CAATSGYSTLTF

SEQ ID NO: 121270 - protein, 14 aa, Homo sapiens
  CDR3 for beta chain variable domain of TCR clone 60635 (TRBV20-1, TRBJ2-7)
CSDPELAGVGEQYF

SEQ ID NO: 121271 - protein, 13 aa, Homo sapiens
  CDR3 for alpha chain variable domain of TCR clone 60636 (TRAV8-1, TRAJ9)
CAVNSVGGFKTIL

SEQ ID NO: 121272 - protein, 15 aa, Homo sapiens
  CDR3 for beta chain variable domain of TCR clone 60636 (TRBV11-2, TRBJ2-3)
CASSGRDGLTDTQYF

SEQ ID NO: 121273 - protein, 11 aa, Homo sapiens
  CDR3 for alpha chain variable domain of TCR clone 60637 (TRAV1-1, TRAJ23)
CAVRQGGKLIS

SEQ ID NO: 121274 - protein, 20 aa, Homo sapiens
  CDR3 for beta chain variable domain of TCR clone 60637 (TRBV7-8, TRBJ2-2)
CASSHLFPGPTVHITGELFF

SEQ ID NO: 121275 - protein, 17 aa, Homo sapiens
  CDR3 for alpha chain variable domain of TCR clone 60638 (TRAV3, TRAJ12)
CAVRDGGRMDSSYKLIF

SEQ ID NO: 121276 - protein, 13 aa, Homo sapiens
  CDR3 for beta chain variable domain of TCR clone 60638 (TRBV15, TRBJ1-6)
CDTSGGLNSPLHF

SEQ ID NO: 121277 - protein, 15 aa, Homo sapiens
  CDR3 for alpha chain variable domain of TCR clone 60639 (TRAV12-2, TRAJ53)
CAVHGGGGSNYKLTF

SEQ ID NO: 121278 - protein, 17 aa, Homo sapiens
  CDR3 for beta chain variable domain of TCR clone 60639 (TRBV7-3, TRBJ2-3)
CASSLMKRMRGADTQYF

SEQ ID NO: 121279 - protein, 11 aa, Homo sapiens
  CDR3 for alpha chain variable domain of TCR clone 60640 (TRAV17, TRAJ31)
CDTSNNARLMF

SEQ ID NO: 121280 - protein, 16 aa, Homo sapiens
  CDR3 for beta chain variable domain of TCR clone 60640 (TRBV7-8, TRBJ2-4)
CASSAERTLAKNIQYF

SEQ ID NO: 121281 - protein, 17 aa, Homo sapiens
  CDR3 for alpha chain variable domain of TCR clone 60641 (TRAV27, TRAJ45)
ASTSVRSSGGGADGLTF

SEQ ID NO: 121282 - protein, 17 aa, Homo sapiens
  CDR3 for beta chain variable domain of TCR clone 60641 (TRBV11-2, TRBJ2-1)
CASSLYPPGVEYNEQFF

SEQ ID NO: 121283 - protein, 14 aa, Homo sapiens
  CDR3 for alpha chain variable domain of TCR clone 60642 (TRAV4, TRAJ26)
CLVGPHNYGQNFVF

SEQ ID NO: 121284 - protein, 16 aa, Homo sapiens
  CDR3 for beta chain variable domain of TCR clone 60642 (TRBV24-1, TRBJ2-3)
CATSDPGTGATDTQYF

SEQ ID NO: 121285 - protein, 15 aa, Homo sapiens
  CDR3 for alpha chain variable domain of TCR clone 60643 (TRAV35, TRAJ40)
CAGQLGTSGTYKYIV

SEQ ID NO: 121286 - protein, 14 aa, Homo sapiens
  CDR3 for beta chain variable domain of TCR clone 60643 (TRBV7-3, TRBJ2-1)
CASSLAGGTNEQFF

SEQ ID NO: 121287 - protein, 16 aa, Homo sapiens
  CDR3 for alpha chain variable domain of TCR clone 60644 (TRAV12-1, TRAJ48)
CAVNMVSNFGNEKLTF

SEQ ID NO: 121288 - protein, 18 aa, Homo sapiens
  CDR3 for beta chain variable domain of TCR clone 60644 (TRBV11-2, TRBJ2-6)
CASSLNPFLGTGANVLTF

SEQ ID NO: 121289 - protein, 15 aa, Homo sapiens
  CDR3 for alpha chain variable domain of TCR clone 60645 (TRAV3, TRAJ27)
CAVRGFTPMQANQPL

SEQ ID NO: 121290 - protein, 12 aa, Homo sapiens
  CDR3 for beta chain variable domain of TCR clone 60645 (TRBV11-2, TRBJ2-2)
CASSLGGGELFL

SEQ ID NO: 121291 - protein, 14 aa, Homo sapiens
  CDR3 for alpha chain variable domain of TCR clone 60646 (TRAV8-6, TRAJ5)
CAVSVDTGRRALTF

SEQ ID NO: 121292 - protein, 11 aa, Homo sapiens
  CDR3 for beta chain variable domain of TCR clone 60646 (TRBV7-3, TRBJ2-5)
CASSVSETQYF

SEQ ID NO: 121293 - protein, 10 aa, Homo sapiens
  CDR3 for alpha chain variable domain of TCR clone 60647 (TRAV8-4, TRAJ43)
CAVSADDMRF

SEQ ID NO: 121294 - protein, 12 aa, Homo sapiens
  CDR3 for beta chain variable domain of TCR clone 60647 (TRBV11-2, TRBJ2-2)
CASSLGGGELFF

SEQ ID NO: 121295 - protein, 12 aa, Homo sapiens
  CDR3 for alpha chain variable domain of TCR clone 60648 (TRAV12-3, TRAJ17)
CAMTLTGNKLTF

SEQ ID NO: 121296 - protein, 14 aa, Homo sapiens
  CDR3 for beta chain variable domain of TCR clone 60648 (TRBV7-3, TRBJ1-1)
CASSLGTGYTEAFF

SEQ ID NO: 121297 - protein, 13 aa, Homo sapiens
  CDR3 for alpha chain variable domain of TCR clone 60649 (TRAV23/DV6, TRAJ27)
CAARPGNAGKSTF

SEQ ID NO: 121298 - protein, 14 aa, Homo sapiens
  CDR3 for beta chain variable domain of TCR clone 60649 (TRBV7-6, TRBJ2-3)
CASSLGTVTDTQYF

SEQ ID NO: 121299 - protein, 11 aa, Homo sapiens
  CDR3 for alpha chain variable domain of TCR clone 60650 (TRAV1-1, TRAJ23)
CAVRQGGKRIF

SEQ ID NO: 121300 - protein, 13 aa, Homo sapiens
  CDR3 for beta chain variable domain of TCR clone 60650 (TRBV7-3, TRBJ1-1)
CASSQDWGAEAFF

SEQ ID NO: 121301 - protein, 10 aa, Homo sapiens
  CDR3 for alpha chain variable domain of TCR clone 60651 (TRAV23/DV6, TRAJ57)
CAASSTLSQG

SEQ ID NO: 121302 - protein, 14 aa, Homo sapiens
  CDR3 for beta chain variable domain of TCR clone 60651 (TRBV7-6, TRBJ2-3)
CASSLGTVTDTQYF

SEQ ID NO: 121303 - protein, 14 aa, Homo sapiens
  CDR3 for alpha chain variable domain of TCR clone 60652 (TRAV12-1, TRAJ12)
CVVNDRDSSYKLIF

SEQ ID NO: 121304 - protein, 14 aa, Homo sapiens
  CDR3 for beta chain variable domain of TCR clone 60652 (TRBV4-2, TRBJ2-1)
CASGLDRAYNEQFF

SEQ ID NO: 121305 - protein, 11 aa, Homo sapiens
  CDR3 for alpha chain variable domain of TCR clone 60653 (TRAV2, TRAJ3)
CAVRKEQCFQD

SEQ ID NO: 121306 - protein, 16 aa, Homo sapiens
  CDR3 for beta chain variable domain of TCR clone 60653 (TRBV6-1, TRBJ2-1)
CASILRQGSSYNEQFF

SEQ ID NO: 121307 - protein, 11 aa, Homo sapiens
  CDR3 for alpha chain variable domain of TCR clone 60654 (TRAV2, TRAJ3)
CAVRKEQCFQD

SEQ ID NO: 121308 - protein, 13 aa, Homo sapiens
  CDR3 for beta chain variable domain of TCR clone 60654 (TRBV7-9, TRBJ1-2)
CASSLKQNYGYTF

SEQ ID NO: 121309 - protein, 16 aa, Homo sapiens
  CDR3 for alpha chain variable domain of TCR clone 60655 (TRAV3, TRAJ21)
CAVRDIERGNFNKFYF

SEQ ID NO: 121310 - protein, 14 aa, Homo sapiens
  CDR3 for beta chain variable domain of TCR clone 60655 (TRBV4-2, TRBJ2-1)
CASGLDRAYNEQFF

SEQ ID NO: 121311 - protein, 19 aa, Homo sapiens
  CDR3 for alpha chain variable domain of TCR clone 60656 (TRAV38-1, TRAJ53)
CAFMKHGLESGGSNYKLTF

SEQ ID NO: 121312 - protein, 13 aa, Homo sapiens
  CDR3 for beta chain variable domain of TCR clone 60656 (TRBV19, TRBJ2-2)
CASSPLGIGELFF

SEQ ID NO: 121313 - protein, 14 aa, Homo sapiens
  CDR3 for alpha chain variable domain of TCR clone 60657 (TRAV12-2, TRAJ13)
RAVNPSGGYQKVTF

SEQ ID NO: 121314 - protein, 14 aa, Homo sapiens
  CDR3 for beta chain variable domain of TCR clone 60657 (TRBV12-4, TRBJ1-1)
CASSLGTGGTEAFF

SEQ ID NO: 121315 - protein, 16 aa, Homo sapiens
  CDR3 for alpha chain variable domain of TCR clone 60658 (TRAV3, TRAJ37)
CAVRPHGSGNTGKLIF

SEQ ID NO: 121316 - protein, 14 aa, Homo sapiens
  CDR3 for beta chain variable domain of TCR clone 60658 (TRBV20-1, TRBJ2-1)
CSARGGSSYDEQFF

SEQ ID NO: 121317 - protein, 20 aa, Homo sapiens
  CDR3 for alpha chain variable domain of TCR clone 60659 (TRAV27, TRAJ41)
CAVRTQIPDIQNPDPAGYQL

SEQ ID NO: 121318 - protein, 16 aa, Homo sapiens
  CDR3 for beta chain variable domain of TCR clone 60659 (TRBV5-1, TRBJ2-3)
CASSLGLAVYTDTQYF

SEQ ID NO: 121319 - protein, 16 aa, Homo sapiens
  CDR3 for alpha chain variable domain of TCR clone 60660 (TRAV30, TRAJ24)
CGTEIVDADSWGKFQF

SEQ ID NO: 121320 - protein, 13 aa, Homo sapiens
  CDR3 for beta chain variable domain of TCR clone 60660 (TRBV12-4, TRBJ2-5)
CASRKRGKETQYF

SEQ ID NO: 121321 - protein, 11 aa, Homo sapiens
  CDR3 for alpha chain variable domain of TCR clone 60661 (TRAV2, TRAJ33)
CAVESNYQLIW

SEQ ID NO: 121322 - protein, 16 aa, Homo sapiens
  CDR3 for beta chain variable domain of TCR clone 60661 (TRBV7-3, TRBJ2-1)
CASSLEGYRSYNEQFF

SEQ ID NO: 121323 - protein, 14 aa, Homo sapiens
  CDR3 for alpha chain variable domain of TCR clone 60662 (TRAV1-2, TRAJ16)
CAVNRFSDGQKLPF

SEQ ID NO: 121324 - protein, 16 aa, Homo sapiens
  CDR3 for beta chain variable domain of TCR clone 60662 (TRBV19, TRBJ2-3)
CASSPEWDRGTDTQYF

SEQ ID NO: 121325 - protein, 14 aa, Homo sapiens
  CDR3 for alpha chain variable domain of TCR clone 60663 (TRAV12-2, TRAJ31)
CAVGLRNNNARLMF

SEQ ID NO: 121326 - protein, 15 aa, Homo sapiens
  CDR3 for beta chain variable domain of TCR clone 60663 (TRBV2, TRBJ1-2)
CASSEIGGANYGYTF

SEQ ID NO: 121327 - protein, 19 aa, Homo sapiens
  CDR3 for alpha chain variable domain of TCR clone 60664 (TRAV2, TRAJ20)
ILQVREADAAVYRNCKLSF

SEQ ID NO: 121328 - protein, 16 aa, Homo sapiens
  CDR3 for beta chain variable domain of TCR clone 60664 (TRBV19, TRBJ2-1)
CASSKAGPSSYNEQFF

SEQ ID NO: 121329 - protein, 14 aa, Homo sapiens
  CDR3 for alpha chain variable domain of TCR clone 60665 (TRAV1-1, TRAJ27)
CAVIYNTNAGKSTF

SEQ ID NO: 121330 - protein, 16 aa, Homo sapiens
  CDR3 for beta chain variable domain of TCR clone 60665 (TRBV12-4, TRBJ1-5)
CASSRPVGGSNQPQHF

SEQ ID NO: 121331 - protein, 17 aa, Homo sapiens
  CDR3 for alpha chain variable domain of TCR clone 60666 (TRAV36/DV7, TRAJ42)
CAGGGMNYGGSQGNLIF

SEQ ID NO: 121332 - protein, 15 aa, Homo sapiens
  CDR3 for beta chain variable domain of TCR clone 60666 (TRBV27, TRBJ2-3)
CASSLGLAATDTQYF

SEQ ID NO: 121333 - protein, 11 aa, Homo sapiens
  CDR3 for alpha chain variable domain of TCR clone 60667 (TRAV13-2, TRAJ23)
CAESPRGKLIF

SEQ ID NO: 121334 - protein, 14 aa, Homo sapiens
  CDR3 for beta chain variable domain of TCR clone 60667 (TRBV7-2, TRBJ2-7)
CASRSQGAAYEQYF

SEQ ID NO: 121335 - protein, 15 aa, Homo sapiens
  CDR3 for alpha chain variable domain of TCR clone 60668 (TRAV2, TRAJ9)
CAVEDRGTGGFKTIF

SEQ ID NO: 121336 - protein, 16 aa, Homo sapiens
  CDR3 for beta chain variable domain of TCR clone 60668 (TRBV19, TRBJ2-2)
CASRSPGTGATGELFF

SEQ ID NO: 121337 - protein, 16 aa, Homo sapiens
  CDR3 for alpha chain variable domain of TCR clone 60669 (TRAV21, TRAJ37)
CAVRTAGSSNTGKLIF

SEQ ID NO: 121338 - protein, 13 aa, Homo sapiens
  CDR3 for beta chain variable domain of TCR clone 60669 (TRBV7-9, TRBJ2-5)
CASLPSGRETQYC

SEQ ID NO: 121339 - protein, 15 aa, Homo sapiens
  CDR3 for alpha chain variable domain of TCR clone 60670 (TRAV8-2, TRAJ16)
CVVSDGFSDGQKLLF

SEQ ID NO: 121340 - protein, 20 aa, Homo sapiens
  CDR3 for beta chain variable domain of TCR clone 60670 (TRBV7-8, TRBJ2-2)
CASSHLFPGPTIHITGELFF

SEQ ID NO: 121341 - protein, 14 aa, Homo sapiens
  CDR3 for alpha chain variable domain of TCR clone 60671 (TRAV12-3, TRAJ6)
CAMSATGGSYIPTF

SEQ ID NO: 121342 - protein, 16 aa, Homo sapiens
  CDR3 for beta chain variable domain of TCR clone 60671 (TRBV4-2, TRBJ2-1)
CASSPRAGQGANEPFF

SEQ ID NO: 121343 - protein, 14 aa, Homo sapiens
  CDR3 for alpha chain variable domain of TCR clone 60672 (TRAV8-3, TRAJ9)
CAVVYNPGGFKTIF

SEQ ID NO: 121344 - protein, 14 aa, Homo sapiens
  CDR3 for beta chain variable domain of TCR clone 60672 (TRBV7-3, TRBJ2-2)
CASSSGGYTGELFF

SEQ ID NO: 121345 - protein, 14 aa, Homo sapiens
  CDR3 for alpha chain variable domain of TCR clone 60673 (TRAV8-1, TRAJ22)
CAAPSPGSARQLTF

SEQ ID NO: 121346 - protein, 14 aa, Homo sapiens
  CDR3 for beta chain variable domain of TCR clone 60673 (TRBV9, TRBJ2-2)
CASSVGQGAGELFF

SEQ ID NO: 121347 - protein, 10 aa, Homo sapiens
  CDR3 for alpha chain variable domain of TCR clone 60674 (TRAV23/DV6, TRAJ31)
CARGGARLMF

SEQ ID NO: 121348 - protein, 14 aa, Homo sapiens
  CDR3 for beta chain variable domain of TCR clone 60674 (TRBV25-1, TRBJ1-1)
CASTHLGGNTEAFF

SEQ ID NO: 121349 - protein, 14 aa, Homo sapiens
  CDR3 for alpha chain variable domain of TCR clone 60675 (TRAV1-1, TRAJ27)
CAVIYNTNAGKSTF

SEQ ID NO: 121350 - protein, 15 aa, Homo sapiens
  CDR3 for beta chain variable domain of TCR clone 60675 (TRBV7-2, TRBJ2-1)
CASSSGIAGGNEQFF

SEQ ID NO: 121351 - protein, 14 aa, Homo sapiens
  CDR3 for alpha chain variable domain of TCR clone 60676 (TRAV1-2, TRAJ8)
CAVREDTGFQKPVF

SEQ ID NO: 121352 - protein, 15 aa, Homo sapiens
  CDR3 for beta chain variable domain of TCR clone 60676 (TRBV4-1, TRBJ2-7)
CASSQNTGRLYEQYF

SEQ ID NO: 121353 - protein, 15 aa, Homo sapiens
  CDR3 for alpha chain variable domain of TCR clone 60677 (TRAV25, TRAJ52)
CAGTSGGTSYGKLTF

SEQ ID NO: 121354 - protein, 13 aa, Homo sapiens
  CDR3 for beta chain variable domain of TCR clone 60677 (TRBV19, TRBJ1-2)
CASSVPGQDGYTF

SEQ ID NO: 121355 - protein, 16 aa, Homo sapiens
  CDR3 for alpha chain variable domain of TCR clone 60678 (TRAV12-2, TRAJ32)
CAVNMNCGGATNKLIF

SEQ ID NO: 121356 - protein, 16 aa, Homo sapiens
  CDR3 for beta chain variable domain of TCR clone 60678 (TRBV7-8, TRBJ2-3)
CASSTEGQRETDTQYF

SEQ ID NO: 121357 - protein, 15 aa, Homo sapiens
  CDR3 for alpha chain variable domain of TCR clone 60679 (TRAV8-2, TRAJ40)
CVVLGTTSGTYKYIF

SEQ ID NO: 121358 - protein, 16 aa, Homo sapiens
  CDR3 for beta chain variable domain of TCR clone 60679 (TRBV7-3, TRBJ2-1)
CASSLEGYRSYNEQFC

SEQ ID NO: 121359 - protein, 13 aa, Homo sapiens
  CDR3 for alpha chain variable domain of TCR clone 60680 (TRAV13-2, TRAJ31)
CAENLNNNARLMF

SEQ ID NO: 121360 - protein, 14 aa, Homo sapiens
  CDR3 for beta chain variable domain of TCR clone 60680 (TRBV19, TRBJ1-5)
CASRAPDSFLSQHF

SEQ ID NO: 121361 - protein, 13 aa, Homo sapiens
  CDR3 for alpha chain variable domain of TCR clone 60681 (TRAV26-1, TRAJ33)
CIVRVEGNYQLIW

SEQ ID NO: 121362 - protein, 16 aa, Homo sapiens
  CDR3 for beta chain variable domain of TCR clone 60681 (TRBV15, TRBJ2-7)
CATSRDRGRRRGEQYS

SEQ ID NO: 121363 - protein, 18 aa, Homo sapiens
  CDR3 for alpha chain variable domain of TCR clone 60682 (TRAV17, TRAJ45)
CATSLDSYSGGGADGLTF

SEQ ID NO: 121364 - protein, 15 aa, Homo sapiens
  CDR3 for beta chain variable domain of TCR clone 60682 (TRBV11-2, TRBJ2-1)
CASSKNRGLIYEQFF

SEQ ID NO: 121365 - protein, 15 aa, Homo sapiens
  CDR3 for alpha chain variable domain of TCR clone 60683 (TRAV14/DV4, TRAJ12)
CAMRVERDSSYKLIF

SEQ ID NO: 121366 - protein, 16 aa, Homo sapiens
  CDR3 for beta chain variable domain of TCR clone 60683 (TRBV11-2, TRBJ1-2)
CASSLDTGGADYGYTF

SEQ ID NO: 121367 - protein, 14 aa, Homo sapiens
  CDR3 for alpha chain variable domain of TCR clone 60684 (TRAV12-1, TRAJ27)
CGEHIRTNAGKSTF

SEQ ID NO: 121368 - protein, 15 aa, Homo sapiens
  CDR3 for beta chain variable domain of TCR clone 60684 (TRBV19, TRBJ1-1)
CASTSGQIQNNEAFF

SEQ ID NO: 121369 - protein, 14 aa, Homo sapiens
  CDR3 for alpha chain variable domain of TCR clone 60685 (TRAV12-3, TRAJ39)
SATHLSNAGNMLTF

SEQ ID NO: 121370 - protein, 13 aa, Homo sapiens
  CDR3 for beta chain variable domain of TCR clone 60685 (TRBV28, TRBJ1-2)
CASSPGSRNGYTF

SEQ ID NO: 121371 - protein, 14 aa, Homo sapiens
  CDR3 for alpha chain variable domain of TCR clone 60686 (TRAV1-2, TRAJ16)
CAVNRFSDGQKLLF

SEQ ID NO: 121372 - protein, 16 aa, Homo sapiens
  CDR3 for beta chain variable domain of TCR clone 60686 (TRBV28, TRBJ1-5)
CASSFRGGYSNQPQHF

SEQ ID NO: 121373 - protein, 13 aa, Homo sapiens
  CDR3 for alpha chain variable domain of TCR clone 60687 (TRAV21, TRAJ36)
CAVIKTVANNLFF

SEQ ID NO: 121374 - protein, 13 aa, Homo sapiens
  CDR3 for beta chain variable domain of TCR clone 60687 (TRBV29-1, TRBJ2-3)
CSATRGGRDTQYF

SEQ ID NO: 121375 - protein, 14 aa, Homo sapiens
  CDR3 for alpha chain variable domain of TCR clone 60688 (TRAV1-2, TRAJ8)
CAVREDTGFQKLVS

SEQ ID NO: 121376 - protein, 12 aa, Homo sapiens
  CDR3 for beta chain variable domain of TCR clone 60688 (TRBV11-3, TRBJ1-1)
CASSHRQGEAFF

SEQ ID NO: 121377 - protein, 13 aa, Homo sapiens
  CDR3 for alpha chain variable domain of TCR clone 60689 (TRAV2, TRAJ36)
CAVEPPGLGQTTS

SEQ ID NO: 121378 - protein, 14 aa, Homo sapiens
  CDR3 for beta chain variable domain of TCR clone 60689 (TRBV29-1, TRBJ1-5)
CSVQDIGSNQPQHF

SEQ ID NO: 121379 - protein, 13 aa, Homo sapiens
  CDR3 for alpha chain variable domain of TCR clone 60690 (TRAV2, TRAJ40)
CAVVTSGTYKYIF

SEQ ID NO: 121380 - protein, 14 aa, Homo sapiens
  CDR3 for beta chain variable domain of TCR clone 60690 (TRBV6-3, TRBJ2-7)
CASSYLQQGGEQYF

SEQ ID NO: 121381 - protein, 16 aa, Homo sapiens
  CDR3 for alpha chain variable domain of TCR clone 60691 (TRAV38-2/DV8, TRAJ47)
CAYRSAIMEYGNKRVF

SEQ ID NO: 121382 - protein, 14 aa, Homo sapiens
  CDR3 for beta chain variable domain of TCR clone 60691 (TRBV19, TRBJ2-7)
CASSIFAGTYEQYF

SEQ ID NO: 121383 - protein, 12 aa, Homo sapiens
  CDR3 for alpha chain variable domain of TCR clone 60692 (TRAV13-1, TRAJ20)
CAARQNDYKLSL

SEQ ID NO: 121384 - protein, 14 aa, Homo sapiens
  CDR3 for beta chain variable domain of TCR clone 60692 (TRBV5-1, TRBJ2-7)
CASSFASGVNEQYF

SEQ ID NO: 121385 - protein, 15 aa, Homo sapiens
  CDR3 for alpha chain variable domain of TCR clone 60693 (TRAV38-1, TRAJ57)
CAFMDSQGGSEKLFF

SEQ ID NO: 121386 - protein, 16 aa, Homo sapiens
  CDR3 for beta chain variable domain of TCR clone 60693 (TRBV10-3, TRBJ2-1)
CAIRGGGRGDYNEQFF

SEQ ID NO: 121387 - protein, 17 aa, Homo sapiens
  CDR3 for alpha chain variable domain of TCR clone 60694 (TRAV14/DV4, TRAJ12)
CAMRELPWMDSSYKLIF

SEQ ID NO: 121388 - protein, 18 aa, Homo sapiens
  CDR3 for beta chain variable domain of TCR clone 60694 (TRBV12-4, TRBJ2-7)
CASSSSDSQPTGSYEQYF

SEQ ID NO: 121389 - protein, 15 aa, Homo sapiens
  CDR3 for alpha chain variable domain of TCR clone 60695 (TRAV3, TRAJ22)
CAVRDRGGSARQLTF

SEQ ID NO: 121390 - protein, 13 aa, Homo sapiens
  CDR3 for beta chain variable domain of TCR clone 60695 (TRBV7-2, TRBJ1-5)
CASSLAGGGANEF

SEQ ID NO: 121391 - protein, 14 aa, Homo sapiens
  CDR3 for alpha chain variable domain of TCR clone 60696 (TRAV4, TRAJ17)
CLVGDMAAGDKLTF

SEQ ID NO: 121392 - protein, 14 aa, Homo sapiens
  CDR3 for beta chain variable domain of TCR clone 60696 (TRBV4-1, TRBJ2-7)
CASSPVAGGDEQYF

SEQ ID NO: 121393 - protein, 17 aa, Homo sapiens
  CDR3 for alpha chain variable domain of TCR clone 60697 (TRAV2, TRAJ22)
ILQVREADAAEQRQLTF

SEQ ID NO: 121394 - protein, 19 aa, Homo sapiens
  CDR3 for beta chain variable domain of TCR clone 60697 (TRBV25-1, TRBJ2-2)
CAILVYRVDRGRKTGELFF

SEQ ID NO: 121395 - protein, 16 aa, Homo sapiens
  CDR3 for alpha chain variable domain of TCR clone 60698 (TRAV16, TRAJ4)
CALSRMISGGYNKLIF

SEQ ID NO: 121396 - protein, 16 aa, Homo sapiens
  CDR3 for beta chain variable domain of TCR clone 60698 (TRBV24-1, TRBJ2-3)
CATSDPGTGATDTQYF

SEQ ID NO: 121397 - protein, 12 aa, Homo sapiens
  CDR3 for alpha chain variable domain of TCR clone 60699 (TRAV17, TRAJ12)
CATLRSSYKLIF

SEQ ID NO: 121398 - protein, 16 aa, Homo sapiens
  CDR3 for beta chain variable domain of TCR clone 60699 (TRBV28, TRBJ2-7)
CDSSLFFETGGPEQYF

SEQ ID NO: 121399 - protein, 16 aa, Homo sapiens
  CDR3 for alpha chain variable domain of TCR clone 60700 (TRAV12-2, TRAJ40)
CAVVRGGTSGTYKYIF

SEQ ID NO: 121400 - protein, 14 aa, Homo sapiens
  CDR3 for beta chain variable domain of TCR clone 60700 (TRBV20-1, TRBJ2-5)
CSARDGRAGETQYF

SEQ ID NO: 121401 - protein, 13 aa, Homo sapiens
  CDR3 for alpha chain variable domain of TCR clone 60701 (TRAV12-3, TRAJ33)
CAMSVNSNYQLIW

SEQ ID NO: 121402 - protein, 13 aa, Homo sapiens
  CDR3 for beta chain variable domain of TCR clone 60701 (TRBV7-2, TRBJ2-2)
CASSLGVTGELFF

SEQ ID NO: 121403 - protein, 12 aa, Homo sapiens
  CDR3 for alpha chain variable domain of TCR clone 60702 (TRAV12-3, TRAJ17)
CVMTLTGNKLTF

SEQ ID NO: 121404 - protein, 15 aa, Homo sapiens
  CDR3 for beta chain variable domain of TCR clone 60702 (TRBV20-1, TRBJ2-7)
CSARYRVSGMDEQYF

SEQ ID NO: 121405 - protein, 15 aa, Homo sapiens
  CDR3 for alpha chain variable domain of TCR clone 60703 (TRAV21, TRAJ40)
CAVRPQTSGTYTYIF

SEQ ID NO: 121406 - protein, 13 aa, Homo sapiens
  CDR3 for beta chain variable domain of TCR clone 60703 (TRBV7-2, TRBJ2-2)
CASSSVRAGELFF

SEQ ID NO: 121407 - protein, 12 aa, Homo sapiens
  CDR3 for alpha chain variable domain of TCR clone 60704 (TRAV12-3, TRAJ17)
CAMTLTGNKLTF

SEQ ID NO: 121408 - protein, 16 aa, Homo sapiens
  CDR3 for beta chain variable domain of TCR clone 60704 (TRBV5-1, TRBJ2-1)
CASSIRSGGSYNEQFF

SEQ ID NO: 121409 - protein, 14 aa, Homo sapiens
  CDR3 for alpha chain variable domain of TCR clone 60705 (TRAV35, TRAJ10)
CAGILTGGGNKLTF

SEQ ID NO: 121410 - protein, 16 aa, Homo sapiens
  CDR3 for beta chain variable domain of TCR clone 60705 (TRBV12-5, TRBJ2-5)
CASGPRTSGNQGTQYF

SEQ ID NO: 121411 - protein, 14 aa, Homo sapiens
  CDR3 for alpha chain variable domain of TCR clone 60706 (TRAV12-2, TRAJ17)
CAVLFKAAGNKLTF

SEQ ID NO: 121412 - protein, 15 aa, Homo sapiens
  CDR3 for beta chain variable domain of TCR clone 60706 (TRBV7-3, TRBJ2-3)
CASSLGLTLGDTQYF

SEQ ID NO: 121413 - protein, 14 aa, Homo sapiens
  CDR3 for alpha chain variable domain of TCR clone 60707 (TRAV13-2, TRAJ17)
CAENSKAAGNKLTF

SEQ ID NO: 121414 - protein, 14 aa, Homo sapiens
  CDR3 for beta chain variable domain of TCR clone 60707 (TRBV19, TRBJ2-1)
CASPTFVLSGEQFS

SEQ ID NO: 121415 - protein, 13 aa, Homo sapiens
  CDR3 for alpha chain variable domain of TCR clone 60708 (TRAV1-2, TRAJ9)
CAALNTGGFKTIF

SEQ ID NO: 121416 - protein, 17 aa, Homo sapiens
  CDR3 for beta chain variable domain of TCR clone 60708 (TRBV5-5, TRBJ2-1)
CASSFRGGASSYNEQFF

SEQ ID NO: 121417 - protein, 11 aa, Homo sapiens
  CDR3 for alpha chain variable domain of TCR clone 60709 (TRAV1-1, TRAJ23)
CAVRQGGKLIF

SEQ ID NO: 121418 - protein, 13 aa, Homo sapiens
  CDR3 for beta chain variable domain of TCR clone 60709 (TRBV11-2, TRBJ2-5)
CASSFSSQETQYF

SEQ ID NO: 121419 - protein, 14 aa, Homo sapiens
  CDR3 for alpha chain variable domain of TCR clone 60710 (TRAV14/DV4, TRAJ42)
CPRGSLRSQGNLIF

SEQ ID NO: 121420 - protein, 13 aa, Homo sapiens
  CDR3 for beta chain variable domain of TCR clone 60710 (TRBV24-1, TRBJ2-1)
CVTSAGPYNEQFF

SEQ ID NO: 121421 - protein, 14 aa, Homo sapiens
  CDR3 for alpha chain variable domain of TCR clone 60711 (TRAV12-2, TRAJ13)
CAVKKTGGYQKVTF

SEQ ID NO: 121422 - protein, 15 aa, Homo sapiens
  CDR3 for beta chain variable domain of TCR clone 60711 (TRBV2, TRBJ2-1)
CASSELAGSYNEQFF

SEQ ID NO: 121423 - protein, 14 aa, Homo sapiens
  CDR3 for alpha chain variable domain of TCR clone 60712 (TRAV12-3, TRAJ10)
SHLPLTGGGNKLTF

SEQ ID NO: 121424 - protein, 15 aa, Homo sapiens
  CDR3 for beta chain variable domain of TCR clone 60712 (TRBV6-1, TRBJ2-1)
CASSELRGQYNEQFF

SEQ ID NO: 121425 - protein, 16 aa, Homo sapiens
  CDR3 for alpha chain variable domain of TCR clone 60713 (TRAV30, TRAJ48)
CGTEIKSNFGNEKLTF

SEQ ID NO: 121426 - protein, 12 aa, Homo sapiens
  CDR3 for beta chain variable domain of TCR clone 60713 (TRBV11-2, TRBJ2-2)
CASSLPTGELFF

SEQ ID NO: 121427 - protein, 12 aa, Homo sapiens
  CDR3 for alpha chain variable domain of TCR clone 60714 (TRAV12-3, TRAJ17)
CAMTLTGNKLTF

SEQ ID NO: 121428 - protein, 14 aa, Homo sapiens
  CDR3 for beta chain variable domain of TCR clone 60714 (TRBV20-1, TRBJ2-7)
SARDRVSGMDEQYF

SEQ ID NO: 121429 - protein, 12 aa, Homo sapiens
  CDR3 for alpha chain variable domain of TCR clone 60715 (TRAV3, TRAJ20)
CAVRNPDYKLSF

SEQ ID NO: 121430 - protein, 13 aa, Homo sapiens
  CDR3 for beta chain variable domain of TCR clone 60715 (TRBV9, TRBJ2-1)
CASSVGQGGEQFF

SEQ ID NO: 121431 - protein, 14 aa, Homo sapiens
  CDR3 for alpha chain variable domain of TCR clone 60716 (TRAV1-2, TRAJ8)
CAVREDTGFQKLVF

SEQ ID NO: 121432 - protein, 12 aa, Homo sapiens
  CDR3 for beta chain variable domain of TCR clone 60716 (TRBV11-2, TRBJ2-1)
CASSPGNNEQFS

SEQ ID NO: 121433 - protein, 13 aa, Homo sapiens
  CDR3 for alpha chain variable domain of TCR clone 60717 (TRAV21, TRAJ37)
CAVSSGNTGQLIF

SEQ ID NO: 121434 - protein, 17 aa, Homo sapiens
  CDR3 for beta chain variable domain of TCR clone 60717 (TRBV5-1, TRBJ2-5)
CASSLLGLAANQETQYF

SEQ ID NO: 121435 - protein, 14 aa, Homo sapiens
  CDR3 for alpha chain variable domain of TCR clone 60718 (TRAV12-2, TRAJ45)
CAVNIGGGADGLTF

SEQ ID NO: 121436 - protein, 13 aa, Homo sapiens
  CDR3 for beta chain variable domain of TCR clone 60718 (TRBV7-9, TRBJ1-2)
CASSLKQNYGYTF

SEQ ID NO: 121437 - protein, 15 aa, Homo sapiens
  CDR3 for alpha chain variable domain of TCR clone 60719 (TRAV13-1, TRAJ17)
CAASIERAAGNKLTF

SEQ ID NO: 121438 - protein, 16 aa, Homo sapiens
  CDR3 for beta chain variable domain of TCR clone 60719 (TRBV7-3, TRBJ2-2)
CASSLKRGTLSGELFF

SEQ ID NO: 121439 - protein, 17 aa, Homo sapiens
  CDR3 for alpha chain variable domain of TCR clone 60720 (TRAV3, TRAJ6)
CAVRDGPRAGGSYIPTF

SEQ ID NO: 121440 - protein, 13 aa, Homo sapiens
  CDR3 for beta chain variable domain of TCR clone 60720 (TRBV12-4, TRBJ2-5)
CASRLAVQETQYF

SEQ ID NO: 121441 - protein, 12 aa, Homo sapiens
  CDR3 for alpha chain variable domain of TCR clone 60721 (TRAV30, TRAJ43)
CGTEERGNDMRF

SEQ ID NO: 121442 - protein, 17 aa, Homo sapiens
  CDR3 for beta chain variable domain of TCR clone 60721 (TRBV3-1, TRBJ2-2)
CASSQFRDKVDTGELFF

SEQ ID NO: 121443 - protein, 12 aa, Homo sapiens
  CDR3 for alpha chain variable domain of TCR clone 60722 (TRAV27, TRAJ13)
CAGVRGYQKVNF

SEQ ID NO: 121444 - protein, 16 aa, Homo sapiens
  CDR3 for beta chain variable domain of TCR clone 60722 (TRBV28, TRBJ2-1)
CASSSSYSGSLNEQFF

SEQ ID NO: 121445 - protein, 14 aa, Homo sapiens
  CDR3 for alpha chain variable domain of TCR clone 60723 (TRAV12-3, TRAJ42)
CAMNYGGSQGNLIF

SEQ ID NO: 121446 - protein, 16 aa, Homo sapiens
  CDR3 for beta chain variable domain of TCR clone 60723 (TRBV7-3, TRBJ2-2)
CASSLKRGTLSGELFF

SEQ ID NO: 121447 - protein, 16 aa, Homo sapiens
  CDR3 for alpha chain variable domain of TCR clone 60724 (TRAV17, TRAJ28)
CATASVSGAGSYQLTF

SEQ ID NO: 121448 - protein, 11 aa, Homo sapiens
  CDR3 for beta chain variable domain of TCR clone 60724 (TRBV7-9, TRBJ2-5)
CASGLGETQYF

SEQ ID NO: 121449 - protein, 14 aa, Homo sapiens
  CDR3 for alpha chain variable domain of TCR clone 60725 (TRAV2, TRAJ9)
CAVEDRSGGFKTIF

SEQ ID NO: 121450 - protein, 15 aa, Homo sapiens
  CDR3 for beta chain variable domain of TCR clone 60725 (TRBV5-1, TRBJ2-7)
CASSLNGGPAREQYF

SEQ ID NO: 121451 - protein, 14 aa, Homo sapiens
  CDR3 for alpha chain variable domain of TCR clone 60726 (TRAV1-2, TRAJ16)
CAVNRFSDGQKLLF

SEQ ID NO: 121452 - protein, 14 aa, Homo sapiens
  CDR3 for beta chain variable domain of TCR clone 60726 (TRBV5-4, TRBJ2-5)
CASSLVRGQETQYF

SEQ ID NO: 121453 - protein, 14 aa, Homo sapiens
  CDR3 for alpha chain variable domain of TCR clone 60727 (TRAV23/DV6, TRAJ6)
CAASRSGGSYIPPF

SEQ ID NO: 121454 - protein, 17 aa, Homo sapiens
  CDR3 for beta chain variable domain of TCR clone 60727 (TRBV20-1, TRBJ2-1)
CSASASGLAGSYNEQFF

SEQ ID NO: 121455 - protein, 14 aa, Homo sapiens
  CDR3 for alpha chain variable domain of TCR clone 60728 (TRAV8-4, TRAJ8)
CAVSVGTGLQKLVF

SEQ ID NO: 121456 - protein, 15 aa, Homo sapiens
  CDR3 for beta chain variable domain of TCR clone 60728 (TRBV2, TRBJ2-3)
CASSGEGTGTDTQYF

SEQ ID NO: 121457 - protein, 16 aa, Homo sapiens
  CDR3 for alpha chain variable domain of TCR clone 60729 (TRAV17, TRAJ22)
CATDAISSGSARQLTF

SEQ ID NO: 121458 - protein, 15 aa, Homo sapiens
  CDR3 for beta chain variable domain of TCR clone 60729 (TRBV5-1, TRBJ2-1)
GASSPPRAPYNEQFF

SEQ ID NO: 121459 - protein, 18 aa, Homo sapiens
  CDR3 for alpha chain variable domain of TCR clone 60730 (TRAV21, TRAJ52)
CAVRPSPAGGTSYGELTF

SEQ ID NO: 121460 - protein, 13 aa, Homo sapiens
  CDR3 for beta chain variable domain of TCR clone 60730 (TRBV12-4, TRBJ2-1)
CASSHYTDNEQFF

SEQ ID NO: 121461 - protein, 17 aa, Homo sapiens
  CDR3 for alpha chain variable domain of TCR clone 60731 (TRAV13-1, TRAJ52)
CAASSGAGGTSYGKLTF

SEQ ID NO: 121462 - protein, 17 aa, Homo sapiens
  CDR3 for beta chain variable domain of TCR clone 60731 (TRBV13, TRBJ2-3)
CASSLSRVAGGRNTQYF

SEQ ID NO: 121463 - protein, 12 aa, Homo sapiens
  CDR3 for alpha chain variable domain of TCR clone 60732 (TRAV13-1, TRAJ27)
CAAHTNAGKSTF

SEQ ID NO: 121464 - protein, 13 aa, Homo sapiens
  CDR3 for beta chain variable domain of TCR clone 60732 (TRBV7-3, TRBJ1-1)
CASSQDWGAEAFF

SEQ ID NO: 121465 - protein, 13 aa, Homo sapiens
  CDR3 for alpha chain variable domain of TCR clone 60733 (TRAV26-2, TRAJ54)
CISRVGGAQKLVF

SEQ ID NO: 121466 - protein, 16 aa, Homo sapiens
  CDR3 for beta chain variable domain of TCR clone 60733 (TRBV4-1, TRBJ1-1)
CASSSMSERPNTEAFF

SEQ ID NO: 121467 - protein, 11 aa, Homo sapiens
  CDR3 for alpha chain variable domain of TCR clone 60734 (TRAV4, TRAJ23)
CLVAPGGKLIF

SEQ ID NO: 121468 - protein, 15 aa, Homo sapiens
  CDR3 for beta chain variable domain of TCR clone 60734 (TRBV7-2, TRBJ2-1)
CASSFPADEYNEQFF

SEQ ID NO: 121469 - protein, 15 aa, Homo sapiens
  CDR3 for alpha chain variable domain of TCR clone 60735 (TRAV3, TRAJ22)
CAVRDRGGSARQLTF

SEQ ID NO: 121470 - protein, 14 aa, Homo sapiens
  CDR3 for beta chain variable domain of TCR clone 60735 (TRBV10-2, TRBJ1-5)
CASSSTGRNQPQHF

SEQ ID NO: 121471 - protein, 13 aa, Homo sapiens
  CDR3 for alpha chain variable domain of TCR clone 60736 (TRAV17, TRAJ5)
CALRGTGRRALTF

SEQ ID NO: 121472 - protein, 13 aa, Homo sapiens
  CDR3 for beta chain variable domain of TCR clone 60736 (TRBV4-2, TRBJ1-1)
CASSQAGNTEVFF

SEQ ID NO: 121473 - protein, 12 aa, Homo sapiens
  CDR3 for alpha chain variable domain of TCR clone 60737 (TRAV21, TRAJ49)
CAVNDGGNQFYF

SEQ ID NO: 121474 - protein, 14 aa, Homo sapiens
  CDR3 for beta chain variable domain of TCR clone 60737 (TRBV18, TRBJ2-7)
CVSSPRGGSYEQYF

SEQ ID NO: 121475 - protein, 15 aa, Homo sapiens
  CDR3 for alpha chain variable domain of TCR clone 60738 (TRAV3, TRAJ47)
CAVRDIGEYGNKLVF

SEQ ID NO: 121476 - protein, 17 aa, Homo sapiens
  CDR3 for beta chain variable domain of TCR clone 60738 (TRBV24-1, TRBJ2-1)
CATSDVSTSGTYNEQFF

SEQ ID NO: 121477 - protein, 14 aa, Homo sapiens
  CDR3 for alpha chain variable domain of TCR clone 60739 (TRAV2, TRAJ39)
CAVEGDNAGNMLTF

SEQ ID NO: 121478 - protein, 16 aa, Homo sapiens
  CDR3 for beta chain variable domain of TCR clone 60739 (TRBV13, TRBJ2-2)
CASSPRTGEHTGELFF

SEQ ID NO: 121479 - protein, 15 aa, Homo sapiens
  CDR3 for alpha chain variable domain of TCR clone 60740 (TRAV21, TRAJ18)
CAVRDRGSTLGRLYF

SEQ ID NO: 121480 - protein, 14 aa, Homo sapiens
  CDR3 for beta chain variable domain of TCR clone 60740 (TRBV19, TRBJ2-1)
CASPTFVLSGEQFF

SEQ ID NO: 121481 - protein, 14 aa, Homo sapiens
  CDR3 for alpha chain variable domain of TCR clone 60741 (TRAV8-3, TRAJ47)
CAVGAQGYGNKLVF

SEQ ID NO: 121482 - protein, 15 aa, Homo sapiens
  CDR3 for beta chain variable domain of TCR clone 60741 (TRBV27, TRBJ2-1)
CASSNGGGSSNEQFF

SEQ ID NO: 121483 - protein, 12 aa, Homo sapiens
  CDR3 for alpha chain variable domain of TCR clone 60742 (TRAV12-3, TRAJ17)
CAMTLTGNKLTF

SEQ ID NO: 121484 - protein, 12 aa, Homo sapiens
  CDR3 for beta chain variable domain of TCR clone 60742 (TRBV2, TRBJ2-1)
SAYGPPGNEQFF

SEQ ID NO: 121485 - protein, 11 aa, Homo sapiens
  CDR3 for alpha chain variable domain of TCR clone 60743 (TRAV12-1, TRAJ34)
CAVTNTDKLIF

SEQ ID NO: 121486 - protein, 12 aa, Homo sapiens
  CDR3 for beta chain variable domain of TCR clone 60743 (TRBV7-9, TRBJ1-1)
CASSLVRGEAFF

SEQ ID NO: 121487 - protein, 15 aa, Homo sapiens
  CDR3 for alpha chain variable domain of TCR clone 60744 (TRAV12-1, TRAJ42)
CVVTRDGGSQGNLIF

SEQ ID NO: 121488 - protein, 14 aa, Homo sapiens
  CDR3 for beta chain variable domain of TCR clone 60744 (TRBV11-2, TRBJ2-3)
CASSLGGGENTQYF

SEQ ID NO: 121489 - protein, 17 aa, Homo sapiens
  CDR3 for alpha chain variable domain of TCR clone 60745 (TRAV3, TRAJ38)
CAARDCLNAGNNRKLIW

SEQ ID NO: 121490 - protein, 13 aa, Homo sapiens
  CDR3 for beta chain variable domain of TCR clone 60745 (TRBV23-1, TRBJ1-4)
CASRGKFNEKLFF

SEQ ID NO: 121491 - protein, 15 aa, Homo sapiens
  CDR3 for alpha chain variable domain of TCR clone 60746 (TRAV25, TRAJ52)
CAGTSGGTSYGKLTF

SEQ ID NO: 121492 - protein, 14 aa, Homo sapiens
  CDR3 for beta chain variable domain of TCR clone 60746 (TRBV25-1, TRBJ1-1)
CASTHLGGNTEAFF

SEQ ID NO: 121493 - protein, 14 aa, Homo sapiens
  CDR3 for alpha chain variable domain of TCR clone 60747 (TRAV12-2, TRAJ13)
CAVKKTGGYQKVTF

SEQ ID NO: 121494 - protein, 15 aa, Homo sapiens
  CDR3 for beta chain variable domain of TCR clone 60747 (TRBV3-1, TRBJ2-1)
CASSQAPSGSYEQYF

SEQ ID NO: 121495 - protein, 13 aa, Homo sapiens
  CDR3 for alpha chain variable domain of TCR clone 60748 (TRAV8-3, TRAJ36)
CAVGATGANNPFF

SEQ ID NO: 121496 - protein, 13 aa, Homo sapiens
  CDR3 for beta chain variable domain of TCR clone 60748 (TRBV12-4, TRBJ1-2)
CASSLRQGKGYTF

SEQ ID NO: 121497 - protein, 14 aa, Homo sapiens
  CDR3 for alpha chain variable domain of TCR clone 60749 (TRAV2, TRAJ37)
CAVDFTSNTGKLIF

SEQ ID NO: 121498 - protein, 14 aa, Homo sapiens
  CDR3 for beta chain variable domain of TCR clone 60749 (TRBV7-2, TRBJ2-7)
CASSPKASFYEQYF

SEQ ID NO: 121499 - protein, 11 aa, Homo sapiens
  CDR3 for alpha chain variable domain of TCR clone 60750 (TRAV2, TRAJ33)
CALESNYQLIW

SEQ ID NO: 121500 - protein, 15 aa, Homo sapiens
  CDR3 for beta chain variable domain of TCR clone 60750 (TRBV18, TRBJ1-5)
CASSPSDRSNQPQHF

SEQ ID NO: 121501 - protein, 13 aa, Homo sapiens
  CDR3 for alpha chain variable domain of TCR clone 60751 (TRAV8-6, TRAJ41)
CSVSENSGYALNF

SEQ ID NO: 121502 - protein, 17 aa, Homo sapiens
  CDR3 for beta chain variable domain of TCR clone 60751 (TRBV7-2, TRBJ2-3)
CASSLEARGTSTDTQYF

SEQ ID NO: 121503 - protein, 21 aa, Homo sapiens
  CDR3 for alpha chain variable domain of TCR clone 60752 (TRAV26-1, TRAJ17)
CCVLLHRQSSGSKAAGNKLTF

SEQ ID NO: 121504 - protein, 14 aa, Homo sapiens
  CDR3 for beta chain variable domain of TCR clone 60752 (TRBV28, TRBJ1-2)
CASRIQGENYGYTF

SEQ ID NO: 121505 - protein, 18 aa, Homo sapiens
  CDR3 for alpha chain variable domain of TCR clone 60753 (TRAV14/DV4, TRAJ15)
CAMREFPPTGQAGTALIF

SEQ ID NO: 121506 - protein, 15 aa, Homo sapiens
  CDR3 for beta chain variable domain of TCR clone 60753 (TRBV6-3, TRBJ2-7)
CASSSPGTVFYEQYF

SEQ ID NO: 121507 - protein, 12 aa, Homo sapiens
  CDR3 for alpha chain variable domain of TCR clone 60754 (TRAV2, TRAJ9)
CAVGAGGFKTIF

SEQ ID NO: 121508 - protein, 16 aa, Homo sapiens
  CDR3 for beta chain variable domain of TCR clone 60754 (TRBV13, TRBJ2-2)
SASSPRTGEHTGELFF

SEQ ID NO: 121509 - protein, 16 aa, Homo sapiens
  CDR3 for alpha chain variable domain of TCR clone 60755 (TRAV20, TRAJ22)
CAVRLVSSGSARQLTF

SEQ ID NO: 121510 - protein, 14 aa, Homo sapiens
  CDR3 for beta chain variable domain of TCR clone 60755 (TRBV25-1, TRBJ1-1)
CASTHLGGNTEAFF

SEQ ID NO: 121511 - protein, 15 aa, Homo sapiens
  CDR3 for alpha chain variable domain of TCR clone 60756 (TRAV26-1, TRAJ40)
CIVRVTTSGTYKYVF

SEQ ID NO: 121512 - protein, 13 aa, Homo sapiens
  CDR3 for beta chain variable domain of TCR clone 60756 (TRBV7-7, TRBJ2-5)
CASSRSGQETQYF

SEQ ID NO: 121513 - protein, 12 aa, Homo sapiens
  CDR3 for alpha chain variable domain of TCR clone 60757 (TRAV12-3, TRAJ17)
CAMTLTGNKLTF

SEQ ID NO: 121514 - protein, 15 aa, Homo sapiens
  CDR3 for beta chain variable domain of TCR clone 60757 (TRBV11-3, TRBJ2-7)
CASSPGPASSYGQYF

SEQ ID NO: 121515 - protein, 14 aa, Homo sapiens
  CDR3 for alpha chain variable domain of TCR clone 60758 (TRAV12-3, TRAJ10)
SHLPLTGGGNKLTF

SEQ ID NO: 121516 - protein, 18 aa, Homo sapiens
  CDR3 for beta chain variable domain of TCR clone 60758 (TRBV18, TRBJ1-1)
CASSLPGAPQGAGTEAFF

SEQ ID NO: 121517 - protein, 14 aa, Homo sapiens
  CDR3 for alpha chain variable domain of TCR clone 60759 (TRAV2, TRAJ37)
CAVDFTSNTGKLIF

SEQ ID NO: 121518 - protein, 16 aa, Homo sapiens
  CDR3 for beta chain variable domain of TCR clone 60759 (TRBV20-1, TRBJ2-1)
CSARSTSESSYNERFF

SEQ ID NO: 121519 - protein, 14 aa, Homo sapiens
  CDR3 for alpha chain variable domain of TCR clone 60760 (TRAV12-2, TRAJ17)
CAVLFKAAGNKLTF

SEQ ID NO: 121520 - protein, 14 aa, Homo sapiens
  CDR3 for beta chain variable domain of TCR clone 60760 (TRBV10-3, TRBJ2-1)
CAISSDLAYNEQFF

SEQ ID NO: 121521 - protein, 14 aa, Homo sapiens
  CDR3 for alpha chain variable domain of TCR clone 60761 (TRAV1-2, TRAJ16)
CAVNRFSDGQKLLF

SEQ ID NO: 121522 - protein, 16 aa, Homo sapiens
  CDR3 for beta chain variable domain of TCR clone 60761 (TRBV7-3, TRBJ2-2)
CASSLKRGTLSGELLF

SEQ ID NO: 121523 - protein, 13 aa, Homo sapiens
  CDR3 for alpha chain variable domain of TCR clone 60762 (TRAV3, TRAJ20)
CAVRDTPRYKLSF

SEQ ID NO: 121524 - protein, 15 aa, Homo sapiens
  CDR3 for beta chain variable domain of TCR clone 60762 (TRBV7-9, TRBJ2-2)
CASGPLDTFPGELFF

SEQ ID NO: 121525 - protein, 16 aa, Homo sapiens
  CDR3 for alpha chain variable domain of TCR clone 60763 (TRAV22, TRAJ45)
CAVERGKRGGADGLTF

SEQ ID NO: 121526 - protein, 15 aa, Homo sapiens
  CDR3 for beta chain variable domain of TCR clone 60763 (TRBV28, TRBJ2-1)
CASSIIAGGRSEQFF

SEQ ID NO: 121527 - protein, 14 aa, Homo sapiens
  CDR3 for alpha chain variable domain of TCR clone 60764 (TRAV12-3, TRAJ56)
CAMSVTGANSKLTF

SEQ ID NO: 121528 - protein, 17 aa, Homo sapiens
  CDR3 for beta chain variable domain of TCR clone 60764 (TRBV20-1, TRBJ2-3)
CSASLLGWGGSADTQYF

SEQ ID NO: 121529 - protein, 15 aa, Homo sapiens
  CDR3 for alpha chain variable domain of TCR clone 60765 (TRAV3, TRAJ22)
CAVRDRGGSARQLTF

SEQ ID NO: 121530 - protein, 14 aa, Homo sapiens
  CDR3 for beta chain variable domain of TCR clone 60765 (TRBV20-1, TRBJ2-1)
CSAQIGGSANEQFF

SEQ ID NO: 121531 - protein, 13 aa, Homo sapiens
  CDR3 for alpha chain variable domain of TCR clone 60766 (TRAV12-1, TRAJ39)
CGDDNNAGNMLTF

SEQ ID NO: 121532 - protein, 15 aa, Homo sapiens
  CDR3 for beta chain variable domain of TCR clone 60766 (TRBV6-3, TRBJ2-7)
CASSSPGTVFYEQYF

SEQ ID NO: 121533 - protein, 10 aa, Homo sapiens
  CDR3 for alpha chain variable domain of TCR clone 60767 (TRAV12-3, TRAJ49)
CAMNDDQFYF

SEQ ID NO: 121534 - protein, 14 aa, Homo sapiens
  CDR3 for beta chain variable domain of TCR clone 60767 (TRBV7-2, TRBJ2-7)
CASSPKTSFYEQYF

SEQ ID NO: 121535 - protein, 11 aa, Homo sapiens
  CDR3 for alpha chain variable domain of TCR clone 60768 (TRAV3, TRAJ21)
CAVGNFNKFYF

SEQ ID NO: 121536 - protein, 15 aa, Homo sapiens
  CDR3 for beta chain variable domain of TCR clone 60768 (TRBV20-1, TRBJ2-5)
CSATPLTGDQETQYF

SEQ ID NO: 121537 - protein, 18 aa, Homo sapiens
  CDR3 for alpha chain variable domain of TCR clone 60769 (TRAV13-1, TRAJ52)
CAAKNPNAGGTSYGKLTF

SEQ ID NO: 121538 - protein, 14 aa, Homo sapiens
  CDR3 for beta chain variable domain of TCR clone 60769 (TRBV2, TRBJ2-3)
CASSEGQNTDTQYF

SEQ ID NO: 121539 - protein, 13 aa, Homo sapiens
  CDR3 for alpha chain variable domain of TCR clone 60770 (TRAV27, TRAJ53)
CSGQGGSNYKLTF

SEQ ID NO: 121540 - protein, 13 aa, Homo sapiens
  CDR3 for beta chain variable domain of TCR clone 60770 (TRBV29-1, TRBJ1-1)
CSVESGFGTEAFF

SEQ ID NO: 121541 - protein, 13 aa, Homo sapiens
  CDR3 for alpha chain variable domain of TCR clone 60771 (TRAV27, TRAJ57)
CRSAQGVSEKLVF

SEQ ID NO: 121542 - protein, 11 aa, Homo sapiens
  CDR3 for beta chain variable domain of TCR clone 60771 (TRBV11-2, TRBJ1-1)
CASSINTEAFF

SEQ ID NO: 121543 - protein, 17 aa, Homo sapiens
  CDR3 for alpha chain variable domain of TCR clone 60772 (TRAV3, TRAJ6)
CAVRDGPRAGGSYIPTF

SEQ ID NO: 121544 - protein, 14 aa, Homo sapiens
  CDR3 for beta chain variable domain of TCR clone 60772 (TRBV12-4, TRBJ2-7)
CASSRQGRSYEQYF

SEQ ID NO: 121545 - protein, 12 aa, Homo sapiens
  CDR3 for alpha chain variable domain of TCR clone 60773 (TRAV12-3, TRAJ17)
CAMTLTGNKLTF

SEQ ID NO: 121546 - protein, 13 aa, Homo sapiens
  CDR3 for beta chain variable domain of TCR clone 60773 (TRBV12-4, TRBJ1-2)
CASSSGLTVISTF

SEQ ID NO: 121547 - protein, 13 aa, Homo sapiens
  CDR3 for alpha chain variable domain of TCR clone 60774 (TRAV24, TRAJ37)
CAPLSSNTGKLIF

SEQ ID NO: 121548 - protein, 16 aa, Homo sapiens
  CDR3 for beta chain variable domain of TCR clone 60774 (TRBV5-4, TRBJ2-3)
CASSLGAGGPSDTQYF

SEQ ID NO: 121549 - protein, 13 aa, Homo sapiens
  CDR3 for alpha chain variable domain of TCR clone 60775 (TRAV8-3, TRAJ28)
CAVGAVGSYQLTF

SEQ ID NO: 121550 - protein, 12 aa, Homo sapiens
  CDR3 for beta chain variable domain of TCR clone 60775 (TRBV19, TRBJ1-5)
CASSIAQQPQHF

SEQ ID NO: 121551 - protein, 19 aa, Homo sapiens
  CDR3 for alpha chain variable domain of TCR clone 60776 (TRAV3, TRAJ6)
CAVRDRNPSRSGGSYIPTF

SEQ ID NO: 121552 - protein, 15 aa, Homo sapiens
  CDR3 for beta chain variable domain of TCR clone 60776 (TRBV18, TRBJ2-7)
CASSPTFRDSYEQYF

SEQ ID NO: 121553 - protein, 13 aa, Homo sapiens
  CDR3 for alpha chain variable domain of TCR clone 60777 (TRAV27, TRAJ45)
CRSSGGGADGPTF

SEQ ID NO: 121554 - protein, 17 aa, Homo sapiens
  CDR3 for beta chain variable domain of TCR clone 60777 (TRBV11-2, TRBJ2-1)
CASSLYPPGVEYNEQFF

SEQ ID NO: 121555 - protein, 17 aa, Homo sapiens
  CDR3 for alpha chain variable domain of TCR clone 60778 (TRAV35, TRAJ28)
CAGLQVYSGAGSYQLTF

SEQ ID NO: 121556 - protein, 15 aa, Homo sapiens
  CDR3 for beta chain variable domain of TCR clone 60778 (TRBV2, TRBJ1-2)
CAISEIGGANYGYTF

SEQ ID NO: 121557 - protein, 13 aa, Homo sapiens
  CDR3 for alpha chain variable domain of TCR clone 60779 (TRAV12-3, TRAJ54)
CAMTLQGAQKLVF

SEQ ID NO: 121558 - protein, 14 aa, Homo sapiens
  CDR3 for beta chain variable domain of TCR clone 60779 (TRBV4-1, TRBJ2-2)
CASSQAVNTGELFL

SEQ ID NO: 121559 - protein, 13 aa, Homo sapiens
  CDR3 for alpha chain variable domain of TCR clone 60780 (TRAV23/DV6, TRAJ24)
CAASEDSWGKLQF

SEQ ID NO: 121560 - protein, 13 aa, Homo sapiens
  CDR3 for beta chain variable domain of TCR clone 60780 (TRBV7-9, TRBJ1-2)
CASSLKQNYGYTF

SEQ ID NO: 121561 - protein, 14 aa, Homo sapiens
  CDR3 for alpha chain variable domain of TCR clone 60781 (TRAV35, TRAJ42)
CAGRYGGSQGNLIF

SEQ ID NO: 121562 - protein, 15 aa, Homo sapiens
  CDR3 for beta chain variable domain of TCR clone 60781 (TRBV5-5, TRBJ2-7)
CASSLAAPLSYEQYF

SEQ ID NO: 121563 - protein, 12 aa, Homo sapiens
  CDR3 for alpha chain variable domain of TCR clone 60782 (TRAV17, TRAJ4)
RAVSGGYNKLIF

SEQ ID NO: 121564 - protein, 13 aa, Homo sapiens
  CDR3 for beta chain variable domain of TCR clone 60782 (TRBV6-1, TRBJ1-1)
CASSEGWGTEAFF

SEQ ID NO: 121565 - protein, 12 aa, Homo sapiens
  CDR3 for alpha chain variable domain of TCR clone 60783 (TRAV13-1, TRAJ21)
CAAKEGFNKFYF

SEQ ID NO: 121566 - protein, 20 aa, Homo sapiens
  CDR3 for beta chain variable domain of TCR clone 60783 (TRBV28, TRBJ2-1)
CASAPIGRSPGLAGGNEQFF

SEQ ID NO: 121567 - protein, 14 aa, Homo sapiens
  CDR3 for alpha chain variable domain of TCR clone 60784 (TRAV21, TRAJ35)
CAVMPIGFGNVLHC

SEQ ID NO: 121568 - protein, 13 aa, Homo sapiens
  CDR3 for beta chain variable domain of TCR clone 60784 (TRBV23-1, TRBJ1-4)
CASRGKFNEKPFF

SEQ ID NO: 121569 - protein, 15 aa, Homo sapiens
  CDR3 for alpha chain variable domain of TCR clone 60785 (TRAV40, TRAJ39)
CLLPPRGNAGNMLTF

SEQ ID NO: 121570 - protein, 15 aa, Homo sapiens
  CDR3 for beta chain variable domain of TCR clone 60785 (TRBV27, TRBJ2-2)
CASSFGRLNTGELFF

SEQ ID NO: 121571 - protein, 14 aa, Homo sapiens
  CDR3 for alpha chain variable domain of TCR clone 60786 (TRAV26-1, TRAJ22)
CIVTLSGSARQLTF

SEQ ID NO: 121572 - protein, 16 aa, Homo sapiens
  CDR3 for beta chain variable domain of TCR clone 60786 (TRBV19, TRBJ2-1)
CASSKVGPSSYNEQFF

SEQ ID NO: 121573 - protein, 19 aa, Homo sapiens
  CDR3 for alpha chain variable domain of TCR clone 60787 (TRAV21, TRAJ41)
CAVREFRVCTQLRQRHLAV

SEQ ID NO: 121574 - protein, 15 aa, Homo sapiens
  CDR3 for beta chain variable domain of TCR clone 60787 (TRBV18, TRBJ1-5)
CASSPQARSNQPQHF

SEQ ID NO: 121575 - protein, 19 aa, Homo sapiens
  CDR3 for alpha chain variable domain of TCR clone 60788 (TRAV2, TRAJ20)
ILQLREADAAVYRDCKLSF

SEQ ID NO: 121576 - protein, 16 aa, Homo sapiens
  CDR3 for beta chain variable domain of TCR clone 60788 (TRBV19, TRBJ2-1)
CASSKAGPSSYNEQFF

SEQ ID NO: 121577 - protein, 13 aa, Homo sapiens
  CDR3 for alpha chain variable domain of TCR clone 60789 (TRAV30, TRAJ6)
CGLIEGGSYIPTF

SEQ ID NO: 121578 - protein, 16 aa, Homo sapiens
  CDR3 for beta chain variable domain of TCR clone 60789 (TRBV7-6, TRBJ2-3)
CASSARTSRGTDTQYF

SEQ ID NO: 121579 - protein, 15 aa, Homo sapiens
  CDR3 for alpha chain variable domain of TCR clone 60790 (TRAV17, TRAJ56)
CATDANTRANSKLTF

SEQ ID NO: 121580 - protein, 14 aa, Homo sapiens
  CDR3 for beta chain variable domain of TCR clone 60790 (TRBV19, TRBJ1-5)
CASSLGTGGQPQHF

SEQ ID NO: 121581 - protein, 19 aa, Homo sapiens
  CDR3 for alpha chain variable domain of TCR clone 60791 (TRAV26-1, TRAJ52)
CIVRAHRNARGTSYGKLTF

SEQ ID NO: 121582 - protein, 15 aa, Homo sapiens
  CDR3 for beta chain variable domain of TCR clone 60791 (TRBV29-1, TRBJ2-1)
CSGRDRKSSYNEQFF

SEQ ID NO: 121583 - protein, 14 aa, Homo sapiens
  CDR3 for alpha chain variable domain of TCR clone 60792 (TRAV1-2, TRAJ8)
CAVREDTGFQKLVF

SEQ ID NO: 121584 - protein, 14 aa, Homo sapiens
  CDR3 for beta chain variable domain of TCR clone 60792 (TRBV19, TRBJ2-2)
CASSGQGIAGELFF

SEQ ID NO: 121585 - protein, 12 aa, Homo sapiens
  CDR3 for alpha chain variable domain of TCR clone 60793 (TRAV17, TRAJ57)
CATDGGSAKLVF

SEQ ID NO: 121586 - protein, 13 aa, Homo sapiens
  CDR3 for beta chain variable domain of TCR clone 60793 (TRBV7-9, TRBJ2-7)
CASSFAGAYEQYF

SEQ ID NO: 121587 - protein, 12 aa, Homo sapiens
  CDR3 for alpha chain variable domain of TCR clone 60794 (TRAV12-3, TRAJ4)
CAMTGAGTRLAV

SEQ ID NO: 121588 - protein, 14 aa, Homo sapiens
  CDR3 for beta chain variable domain of TCR clone 60794 (TRBV10-3, TRBJ1-1)
CAISDTNRGVEAFF

SEQ ID NO: 121589 - protein, 14 aa, Homo sapiens
  CDR3 for alpha chain variable domain of TCR clone 60795 (TRAV30, TRAJ33)
CGTVAPRSNYQLIW

SEQ ID NO: 121590 - protein, 12 aa, Homo sapiens
  CDR3 for beta chain variable domain of TCR clone 60795 (TRBV7-8, TRBJ2-1)
CASSLGHNEQFF

SEQ ID NO: 121591 - protein, 16 aa, Homo sapiens
  CDR3 for alpha chain variable domain of TCR clone 60796 (TRAV12-3, TRAJ53)
CAMSPGSGGSNYKLTF

SEQ ID NO: 121592 - protein, 13 aa, Homo sapiens
  CDR3 for beta chain variable domain of TCR clone 60796 (TRBV23-1, TRBJ1-4)
CASRGKFNEKLFF

SEQ ID NO: 121593 - protein, 17 aa, Homo sapiens
  CDR3 for alpha chain variable domain of TCR clone 60797 (TRAV3, TRAJ6)
CAVRDGPRAGGSYIPTF

SEQ ID NO: 121594 - protein, 16 aa, Homo sapiens
  CDR3 for beta chain variable domain of TCR clone 60797 (TRBV7-8, TRBJ2-3)
CASSIEGQRETDTQYF

SEQ ID NO: 121595 - protein, 12 aa, Homo sapiens
  CDR3 for alpha chain variable domain of TCR clone 60798 (TRAV2, TRAJ33)
CAVWGSNYQLIW

SEQ ID NO: 121596 - protein, 14 aa, Homo sapiens
  CDR3 for beta chain variable domain of TCR clone 60798 (TRBV25-1, TRBJ1-1)
CASTHLGGNTEAFF

SEQ ID NO: 121597 - protein, 20 aa, Homo sapiens
  CDR3 for alpha chain variable domain of TCR clone 60799 (TRAV27, TRAJ10)
ASTSVPSRGILTGGGNKLTF

SEQ ID NO: 121598 - protein, 16 aa, Homo sapiens
  CDR3 for beta chain variable domain of TCR clone 60799 (TRBV2, TRBJ2-1)
CASSVGGSLSYNEQFF

SEQ ID NO: 121599 - protein, 13 aa, Homo sapiens
  CDR3 for alpha chain variable domain of TCR clone 60800 (TRAV20, TRAJ42)
CAVQGGSQGNLIF

SEQ ID NO: 121600 - protein, 12 aa, Homo sapiens
  CDR3 for beta chain variable domain of TCR clone 60800 (TRBV5-1, TRBJ2-7)
CASSLDSYEQYF

SEQ ID NO: 121601 - protein, 13 aa, Homo sapiens
  CDR3 for alpha chain variable domain of TCR clone 60801 (TRAV35, TRAJ33)
CAGLMDSNYQLIW

SEQ ID NO: 121602 - protein, 14 aa, Homo sapiens
  CDR3 for beta chain variable domain of TCR clone 60801 (TRBV5-1, TRBJ1-1)
CASSSTGEDTEAFF

SEQ ID NO: 121603 - protein, 13 aa, Homo sapiens
  CDR3 for alpha chain variable domain of TCR clone 60802 (TRAV2, TRAJ20)
CAVEDPSEYKISF

SEQ ID NO: 121604 - protein, 16 aa, Homo sapiens
  CDR3 for beta chain variable domain of TCR clone 60802 (TRBV25-1, TRBJ2-7)
CASSELTGGGIYEQYF

SEQ ID NO: 121605 - protein, 13 aa, Homo sapiens
  CDR3 for alpha chain variable domain of TCR clone 60803 (TRAV21, TRAJ29)
CAAPNSGNTPLVF

SEQ ID NO: 121606 - protein, 15 aa, Homo sapiens
  CDR3 for beta chain variable domain of TCR clone 60803 (TRBV28, TRBJ2-5)
CASSPGQGSIETQYF

SEQ ID NO: 121607 - protein, 11 aa, Homo sapiens
  CDR3 for alpha chain variable domain of TCR clone 60804 (TRAV23/DV6, TRAJ58)
CAARLLRGETS

SEQ ID NO: 121608 - protein, 18 aa, Homo sapiens
  CDR3 for beta chain variable domain of TCR clone 60804 (TRBV13, TRBJ2-1)
CASSFGVAGVHSYNEQFF

SEQ ID NO: 121609 - protein, 12 aa, Homo sapiens
  CDR3 for alpha chain variable domain of TCR clone 60805 (TRAV12-1, TRAJ40)
CVVPSGTYRYIF

SEQ ID NO: 121610 - protein, 15 aa, Homo sapiens
  CDR3 for beta chain variable domain of TCR clone 60805 (TRBV12-4, TRBJ2-1)
CASSPLCGRNSEQFF

SEQ ID NO: 121611 - protein, 12 aa, Homo sapiens
  CDR3 for alpha chain variable domain of TCR clone 60806 (TRAV13-2, TRAJ8)
CAERTGFQKLVF

SEQ ID NO: 121612 - protein, 19 aa, Homo sapiens
  CDR3 for beta chain variable domain of TCR clone 60806 (TRBV7-2, TRBJ2-3)
CASSFLSRNWGGGTDTQYF

SEQ ID NO: 121613 - protein, 11 aa, Homo sapiens
  CDR3 for alpha chain variable domain of TCR clone 60807 (TRAV2, TRAJ33)
CTVESNYQLIW

SEQ ID NO: 121614 - protein, 15 aa, Homo sapiens
  CDR3 for beta chain variable domain of TCR clone 60807 (TRBV19, TRBJ1-1)
CASTSGQIQNTEAFF

SEQ ID NO: 121615 - protein, 16 aa, Homo sapiens
  CDR3 for alpha chain variable domain of TCR clone 60808 (TRAV26-1, TRAJ37)
CIVRGDGSGNTGKLIF

SEQ ID NO: 121616 - protein, 17 aa, Homo sapiens
  CDR3 for beta chain variable domain of TCR clone 60808 (TRBV4-1, TRBJ2-7)
CSSSRDPLGVRGGEQYF

SEQ ID NO: 121617 - protein, 13 aa, Homo sapiens
  CDR3 for alpha chain variable domain of TCR clone 60809 (TRAV27, TRAJ45)
CRSSGGGAGGLTF

SEQ ID NO: 121618 - protein, 15 aa, Homo sapiens
  CDR3 for beta chain variable domain of TCR clone 60809 (TRBV9, TRBJ2-2)
CASSDFAGASGELFF

SEQ ID NO: 121619 - protein, 14 aa, Homo sapiens
  CDR3 for alpha chain variable domain of TCR clone 60810 (TRAV8-2, TRAJ4)
CVVSPSGGYNKLIF

SEQ ID NO: 121620 - protein, 14 aa, Homo sapiens
  CDR3 for beta chain variable domain of TCR clone 60810 (TRBV19, TRBJ2-5)
CASSSSRIQETQYF

SEQ ID NO: 121621 - protein, 12 aa, Homo sapiens
  CDR3 for alpha chain variable domain of TCR clone 60811 (TRAV16, TRAJ26)
CASKDGGQNFAF

SEQ ID NO: 121622 - protein, 13 aa, Homo sapiens
  CDR3 for beta chain variable domain of TCR clone 60811 (TRBV25-1, TRBJ1-1)
CASSDRGRAEAFF

SEQ ID NO: 121623 - protein, 14 aa, Homo sapiens
  CDR3 for alpha chain variable domain of TCR clone 60812 (TRAV16, TRAJ33)
CALSAMDSNYQLIW

SEQ ID NO: 121624 - protein, 12 aa, Homo sapiens
  CDR3 for beta chain variable domain of TCR clone 60812 (TRBV7-8, TRBJ2-7)
CASSLGDREQYF

SEQ ID NO: 121625 - protein, 16 aa, Homo sapiens
  CDR3 for alpha chain variable domain of TCR clone 60813 (TRAV12-3, TRAJ53)
SAMSPGSGGSNYKLTF

SEQ ID NO: 121626 - protein, 11 aa, Homo sapiens
  CDR3 for beta chain variable domain of TCR clone 60813 (TRBV29-1, TRBJ2-5)
CSEDRTGTQYF

SEQ ID NO: 121627 - protein, 13 aa, Homo sapiens
  CDR3 for alpha chain variable domain of TCR clone 60814 (TRAV21, TRAJ27)
CAALNTNAGKSTF

SEQ ID NO: 121628 - protein, 14 aa, Homo sapiens
  CDR3 for beta chain variable domain of TCR clone 60814 (TRBV27, TRBJ1-1)
CGSSLLSGLSEAFF

SEQ ID NO: 121629 - protein, 12 aa, Homo sapiens
  CDR3 for alpha chain variable domain of TCR clone 60815 (TRAV12-3, TRAJ17)
CAMTLTGNKLTF

SEQ ID NO: 121630 - protein, 14 aa, Homo sapiens
  CDR3 for beta chain variable domain of TCR clone 60815 (TRBV2, TRBJ2-1)
CASSEALIYNEQFF

SEQ ID NO: 121631 - protein, 14 aa, Homo sapiens
  CDR3 for alpha chain variable domain of TCR clone 60816 (TRAV12-3, TRAJ10)
SHLPLTGGGNKLTF

SEQ ID NO: 121632 - protein, 16 aa, Homo sapiens
  CDR3 for beta chain variable domain of TCR clone 60816 (TRBV20-1, TRBJ1-2)
CSASMGQGVANYGFTF

SEQ ID NO: 121633 - protein, 14 aa, Homo sapiens
  CDR3 for alpha chain variable domain of TCR clone 60817 (TRAV16, TRAJ44)
CALSTTGTASKLTF

SEQ ID NO: 121634 - protein, 14 aa, Homo sapiens
  CDR3 for beta chain variable domain of TCR clone 60817 (TRBV25-1, TRBJ1-1)
CASTHLGGNTEAFF

SEQ ID NO: 121635 - protein, 14 aa, Homo sapiens
  CDR3 for alpha chain variable domain of TCR clone 60818 (TRAV26-2, TRAJ32)
CCVGYGGATNKLIF

SEQ ID NO: 121636 - protein, 13 aa, Homo sapiens
  CDR3 for beta chain variable domain of TCR clone 60818 (TRBV12-5, TRBJ2-3)
CASGERQSDTQYF

SEQ ID NO: 121637 - protein, 19 aa, Homo sapiens
  CDR3 for alpha chain variable domain of TCR clone 60819 (TRAV2, TRAJ20)
ILQVREADAAVYQDCKLSF

SEQ ID NO: 121638 - protein, 16 aa, Homo sapiens
  CDR3 for beta chain variable domain of TCR clone 60819 (TRBV20-1, TRBJ1-4)
CSAPGQGLLTNEKLFF

SEQ ID NO: 121639 - protein, 13 aa, Homo sapiens
  CDR3 for alpha chain variable domain of TCR clone 60820 (TRAV26-1, TRAJ33)
CIVRVEGNYQLIW

SEQ ID NO: 121640 - protein, 16 aa, Homo sapiens
  CDR3 for beta chain variable domain of TCR clone 60820 (TRBV15, TRBJ2-7)
CATSRDRGRRREEQYF

SEQ ID NO: 121641 - protein, 13 aa, Homo sapiens
  CDR3 for alpha chain variable domain of TCR clone 60821 (TRAV8-3, TRAJ43)
CAVGPDNNNDMRF

SEQ ID NO: 121642 - protein, 18 aa, Homo sapiens
  CDR3 for beta chain variable domain of TCR clone 60821 (TRBV3-1, TRBJ2-1)
CASSQDLPGRPLFDEQFF

SEQ ID NO: 121643 - protein, 13 aa, Homo sapiens
  CDR3 for alpha chain variable domain of TCR clone 60822 (TRAV12-3, TRAJ6)
CANPSGGSYIPTF

SEQ ID NO: 121644 - protein, 14 aa, Homo sapiens
  CDR3 for beta chain variable domain of TCR clone 60822 (TRBV19, TRBJ1-1)
CASSRGRDATEAFF

SEQ ID NO: 121645 - protein, 11 aa, Homo sapiens
  CDR3 for alpha chain variable domain of TCR clone 60823 (TRAV35, TRAJ34)
CWARNTDKLIF

SEQ ID NO: 121646 - protein, 15 aa, Homo sapiens
  CDR3 for beta chain variable domain of TCR clone 60823 (TRBV27, TRBJ2-1)
CASSNGGGSSNEQFF

SEQ ID NO: 121647 - protein, 14 aa, Homo sapiens
  CDR3 for alpha chain variable domain of TCR clone 60824 (TRAV23/DV6, TRAJ39)
CAASISNAGNMLTF

SEQ ID NO: 121648 - protein, 12 aa, Homo sapiens
  CDR3 for beta chain variable domain of TCR clone 60824 (TRBV20-1, TRBJ2-5)
CSVGTGSETQYF

SEQ ID NO: 121649 - protein, 16 aa, Homo sapiens
  CDR3 for alpha chain variable domain of TCR clone 60825 (TRAV3, TRAJ10)
CAVRDMRAGGGNKLTF

SEQ ID NO: 121650 - protein, 13 aa, Homo sapiens
  CDR3 for beta chain variable domain of TCR clone 60825 (TRBV6-1, TRBJ1-1)
CASGRQGNTEAFF

SEQ ID NO: 121651 - protein, 13 aa, Homo sapiens
  CDR3 for alpha chain variable domain of TCR clone 60826 (TRAV12-3, TRAJ5)
CAMRPTGGRALTF

SEQ ID NO: 121652 - protein, 13 aa, Homo sapiens
  CDR3 for beta chain variable domain of TCR clone 60826 (TRBV2, TRBJ2-7)
CASSVVEAYEQYF

SEQ ID NO: 121653 - protein, 16 aa, Homo sapiens
  CDR3 for alpha chain variable domain of TCR clone 60827 (TRAV30, TRAJ24)
CGTEIVDADSWGKFQF

SEQ ID NO: 121654 - protein, 15 aa, Homo sapiens
  CDR3 for beta chain variable domain of TCR clone 60827 (TRBV7-9, TRBJ2-7)
CASSSSGLAVYEQYF

SEQ ID NO: 121655 - protein, 11 aa, Homo sapiens
  CDR3 for alpha chain variable domain of TCR clone 60828 (TRAV1-2, TRAJ31)
CAVNNNARLMF

SEQ ID NO: 121656 - protein, 11 aa, Homo sapiens
  CDR3 for beta chain variable domain of TCR clone 60828 (TRBV7-2, TRBJ2-7)
CASSLGWEQYF

SEQ ID NO: 121657 - protein, 13 aa, Homo sapiens
  CDR3 for alpha chain variable domain of TCR clone 60829 (TRAV21, TRAJ20)
CAVGLRVDYKLSF

SEQ ID NO: 121658 - protein, 16 aa, Homo sapiens
  CDR3 for beta chain variable domain of TCR clone 60829 (TRBV10-3, TRBJ2-1)
CAISGVGDGGGGEQFF

SEQ ID NO: 121659 - protein, 12 aa, Homo sapiens
  CDR3 for alpha chain variable domain of TCR clone 60830 (TRAV2, TRAJ9)
CAVGAGGFKTIF

SEQ ID NO: 121660 - protein, 16 aa, Homo sapiens
  CDR3 for beta chain variable domain of TCR clone 60830 (TRBV13, TRBJ2-2)
RASSPRTGKHTGELFF

SEQ ID NO: 121661 - protein, 16 aa, Homo sapiens
  CDR3 for alpha chain variable domain of TCR clone 60831 (TRAV16, TRAJ4)
CALSRMFSGGYNKLIF

SEQ ID NO: 121662 - protein, 15 aa, Homo sapiens
  CDR3 for beta chain variable domain of TCR clone 60831 (TRBV11-3, TRBJ2-3)
CASLKDGREGDTQYF

SEQ ID NO: 121663 - protein, 13 aa, Homo sapiens
  CDR3 for alpha chain variable domain of TCR clone 60832 (TRAV12-3, TRAJ31)
CAMSANNNARLMF

SEQ ID NO: 121664 - protein, 16 aa, Homo sapiens
  CDR3 for beta chain variable domain of TCR clone 60832 (TRBV7-9, TRBJ1-2)
CACSLGFSSGEGGYTF

SEQ ID NO: 121665 - protein, 15 aa, Homo sapiens
  CDR3 for alpha chain variable domain of TCR clone 60833 (TRAV3, TRAJ5)
CAVRDLDTGRRALTF

SEQ ID NO: 121666 - protein, 12 aa, Homo sapiens
  CDR3 for beta chain variable domain of TCR clone 60833 (TRBV7-9, TRBJ2-7)
CASSLEGYEQYF

SEQ ID NO: 121667 - protein, 12 aa, Homo sapiens
  CDR3 for alpha chain variable domain of TCR clone 60834 (TRAV12-3, TRAJ17)
CAMTLTGNKLTF

SEQ ID NO: 121668 - protein, 12 aa, Homo sapiens
  CDR3 for beta chain variable domain of TCR clone 60834 (TRBV12-5, TRBJ2-5)
CASGQGVETQYF

SEQ ID NO: 121669 - protein, 10 aa, Homo sapiens
  CDR3 for alpha chain variable domain of TCR clone 60835 (TRAV2, TRAJ34)
CAVVNDKLIF

SEQ ID NO: 121670 - protein, 15 aa, Homo sapiens
  CDR3 for beta chain variable domain of TCR clone 60835 (TRBV3-1, TRBJ2-2)
RASSQDWTRAGELFF

SEQ ID NO: 121671 - protein, 10 aa, Homo sapiens
  CDR3 for alpha chain variable domain of TCR clone 60836 (TRAV21, TRAJ43)
CAVRTGDMRF

SEQ ID NO: 121672 - protein, 13 aa, Homo sapiens
  CDR3 for beta chain variable domain of TCR clone 60836 (TRBV20-1, TRBJ2-7)
CSAPGLADYEQYF

SEQ ID NO: 121673 - protein, 16 aa, Homo sapiens
  CDR3 for alpha chain variable domain of TCR clone 60837 (TRAV16, TRAJ4)
CALSRMFSCGYNKLIF

SEQ ID NO: 121674 - protein, 16 aa, Homo sapiens
  CDR3 for beta chain variable domain of TCR clone 60837 (TRBV12-4, TRBJ1-5)
CASSRPVGGSNQPQHF

SEQ ID NO: 121675 - protein, 13 aa, Homo sapiens
  CDR3 for alpha chain variable domain of TCR clone 60838 (TRAV12-3, TRAJ6)
CANPSGGSYIPTF

SEQ ID NO: 121676 - protein, 14 aa, Homo sapiens
  CDR3 for beta chain variable domain of TCR clone 60838 (TRBV19, TRBJ1-1)
CASSRDRDATEASF

SEQ ID NO: 121677 - protein, 13 aa, Homo sapiens
  CDR3 for alpha chain variable domain of TCR clone 60839 (TRAV2, TRAJ40)
CAVVTSGTYKYIF

SEQ ID NO: 121678 - protein, 15 aa, Homo sapiens
  CDR3 for beta chain variable domain of TCR clone 60839 (TRBV5-1, TRBJ2-7)
CASSLNGGPAREQYF

SEQ ID NO: 121679 - protein, 11 aa, Homo sapiens
  CDR3 for alpha chain variable domain of TCR clone 60840 (TRAV12-2, TRAJ33)
CAVTSNYQLIW

SEQ ID NO: 121680 - protein, 15 aa, Homo sapiens
  CDR3 for beta chain variable domain of TCR clone 60840 (TRBV9, TRBJ1-6)
CASSVAGTGDSPLHF

SEQ ID NO: 121681 - protein, 14 aa, Homo sapiens
  CDR3 for alpha chain variable domain of TCR clone 60841 (TRAV17, TRAJ49)
CATDARDTGNQFYS

SEQ ID NO: 121682 - protein, 14 aa, Homo sapiens
  CDR3 for beta chain variable domain of TCR clone 60841 (TRBV5-5, TRBJ1-2)
CASSFGQINYGYTF

SEQ ID NO: 121683 - protein, 11 aa, Homo sapiens
  CDR3 for alpha chain variable domain of TCR clone 60842 (TRAV2, TRAJ33)
CAVESNYQLIW

SEQ ID NO: 121684 - protein, 14 aa, Homo sapiens
  CDR3 for beta chain variable domain of TCR clone 60842 (TRBV19, TRBJ2-1)
CASKDPSSYNEQFF

SEQ ID NO: 121685 - protein, 16 aa, Homo sapiens
  CDR3 for alpha chain variable domain of TCR clone 60843 (TRAV3, TRAJ10)
CAVRDMRAGGGNKLTF

SEQ ID NO: 121686 - protein, 13 aa, Homo sapiens
  CDR3 for beta chain variable domain of TCR clone 60843 (TRBV7-2, TRBJ1-6)
CASSLGSNSPLHF

SEQ ID NO: 121687 - protein, 13 aa, Homo sapiens
  CDR3 for alpha chain variable domain of TCR clone 60844 (TRAV13-1, TRAJ49)
CAAIWALGNQFYF

SEQ ID NO: 121688 - protein, 11 aa, Homo sapiens
  CDR3 for beta chain variable domain of TCR clone 60844 (TRBV11-2, TRBJ2-2)
CASSLPGELFF

SEQ ID NO: 121689 - protein, 17 aa, Homo sapiens
  CDR3 for alpha chain variable domain of TCR clone 60845 (TRAV8-6, TRAJ58)
CAVSSWVGETSGSRLTF

SEQ ID NO: 121690 - protein, 13 aa, Homo sapiens
  CDR3 for beta chain variable domain of TCR clone 60845 (TRBV4-2, TRBJ2-1)
CQRPGQGLNEQFF

SEQ ID NO: 121691 - protein, 14 aa, Homo sapiens
  CDR3 for alpha chain variable domain of TCR clone 60846 (TRAV16, TRAJ33)
CALSAMDSNYQLIW

SEQ ID NO: 121692 - protein, 12 aa, Homo sapiens
  CDR3 for beta chain variable domain of TCR clone 60846 (TRBV5-1, TRBJ1-2)
CASSLDTYGYTF

SEQ ID NO: 121693 - protein, 14 aa, Homo sapiens
  CDR3 for alpha chain variable domain of TCR clone 60847 (TRAV12-2, TRAJ44)
CAVNPVGTASKLTF

SEQ ID NO: 121694 - protein, 15 aa, Homo sapiens
  CDR3 for beta chain variable domain of TCR clone 60847 (TRBV28, TRBJ2-7)
CASSVRQVSSYEQYF

SEQ ID NO: 121695 - protein, 12 aa, Homo sapiens
  CDR3 for alpha chain variable domain of TCR clone 60848 (TRAV23/DV6, TRAJ53)
CAASKLGSGGSN

SEQ ID NO: 121696 - protein, 13 aa, Homo sapiens
  CDR3 for beta chain variable domain of TCR clone 60848 (TRBV28, TRBJ2-7)
CASSPGGVYEQYF

SEQ ID NO: 121697 - protein, 13 aa, Homo sapiens
  CDR3 for alpha chain variable domain of TCR clone 60849 (TRAV21, TRAJ20)
CAVGLKVDYKLSF

SEQ ID NO: 121698 - protein, 13 aa, Homo sapiens
  CDR3 for beta chain variable domain of TCR clone 60849 (TRBV6-1, TRBJ1-1)
CASSRQGNTEAFF

SEQ ID NO: 121699 - protein, 20 aa, Homo sapiens
  CDR3 for alpha chain variable domain of TCR clone 60850 (TRAV12-1, TRAJ42)
SSVIHPPTSVKGGSQGNLIF

SEQ ID NO: 121700 - protein, 18 aa, Homo sapiens
  CDR3 for beta chain variable domain of TCR clone 60850 (TRBV11-2, TRBJ2-3)
CASSLGGASRGAPNTQYF

SEQ ID NO: 121701 - protein, 13 aa, Homo sapiens
  CDR3 for alpha chain variable domain of TCR clone 60851 (TRAV21, TRAJ27)
CAARPGNAGKSTF

SEQ ID NO: 121702 - protein, 13 aa, Homo sapiens
  CDR3 for beta chain variable domain of TCR clone 60851 (TRBV7-3, TRBJ2-1)
CASSPGSYNEQFF

SEQ ID NO: 121703 - protein, 13 aa, Homo sapiens
  CDR3 for alpha chain variable domain of TCR clone 60852 (TRAV20, TRAJ37)
CAGCSSNTGKLIF

SEQ ID NO: 121704 - protein, 15 aa, Homo sapiens
  CDR3 for beta chain variable domain of TCR clone 60852 (TRBV28, TRBJ2-1)
CASSIIAGGRSEQFF

SEQ ID NO: 121705 - protein, 11 aa, Homo sapiens
  CDR3 for alpha chain variable domain of TCR clone 60853 (TRAV2, TRAJ13)
CASGGYQKVTF

SEQ ID NO: 121706 - protein, 13 aa, Homo sapiens
  CDR3 for beta chain variable domain of TCR clone 60853 (TRBV7-3, TRBJ1-1)
CASSLTQGTEAFF

SEQ ID NO: 121707 - protein, 13 aa, Homo sapiens
  CDR3 for alpha chain variable domain of TCR clone 60854 (TRAV13-1, TRAJ39)
CSKYSNAGNMLTF

SEQ ID NO: 121708 - protein, 16 aa, Homo sapiens
  CDR3 for beta chain variable domain of TCR clone 60854 (TRBV20-1, TRBJ1-4)
CSAPGQGLLTNENLFF

SEQ ID NO: 121709 - protein, 13 aa, Homo sapiens
  CDR3 for alpha chain variable domain of TCR clone 60855 (TRAV13-2, TRAJ53)
CAENMGSNYKLTF

SEQ ID NO: 121710 - protein, 16 aa, Homo sapiens
  CDR3 for beta chain variable domain of TCR clone 60855 (TRBV19, TRBJ2-2)
CASSFPGQGLAGELFF

SEQ ID NO: 121711 - protein, 11 aa, Homo sapiens
  CDR3 for alpha chain variable domain of TCR clone 60856 (TRAV1-2, TRAJ20)
CAVANDYKFSF

SEQ ID NO: 121712 - protein, 14 aa, Homo sapiens
  CDR3 for beta chain variable domain of TCR clone 60856 (TRBV12-5, TRBJ2-5)
CASGSRTHQETQYF

SEQ ID NO: 121713 - protein, 16 aa, Homo sapiens
  CDR3 for alpha chain variable domain of TCR clone 60857 (TRAV26-2, TRAJ57)
CILRDVGSGGSEKLVF

SEQ ID NO: 121714 - protein, 13 aa, Homo sapiens
  CDR3 for beta chain variable domain of TCR clone 60857 (TRBV18, TRBJ2-3)
CASSPGVTDTHYF

SEQ ID NO: 121715 - protein, 15 aa, Homo sapiens
  CDR3 for alpha chain variable domain of TCR clone 60858 (TRAV26-2, TRAJ28)
CILVESGAGSYQLPF

SEQ ID NO: 121716 - protein, 16 aa, Homo sapiens
  CDR3 for beta chain variable domain of TCR clone 60858 (TRBV4-2, TRBJ1-2)
CASSQEIGGASYGYTF

SEQ ID NO: 121717 - protein, 13 aa, Homo sapiens
  CDR3 for alpha chain variable domain of TCR clone 60859 (TRAV21, TRAJ57)
CAVTQGGSEKLVF

SEQ ID NO: 121718 - protein, 11 aa, Homo sapiens
  CDR3 for beta chain variable domain of TCR clone 60859 (TRBV11-2, TRBJ2-2)
CASSLPGGLFF

SEQ ID NO: 121719 - protein, 10 aa, Homo sapiens
  CDR3 for alpha chain variable domain of TCR clone 60860 (TRAV9-2, TRAJ49)
CALTGNQFYF

SEQ ID NO: 121720 - protein, 12 aa, Homo sapiens
  CDR3 for beta chain variable domain of TCR clone 60860 (TRBV19, TRBJ1-5)
CASSIAQQPQHF

SEQ ID NO: 121721 - protein, 14 aa, Homo sapiens
  CDR3 for alpha chain variable domain of TCR clone 60861 (TRAV12-2, TRAJ13)
CAVKKTGGYQKVTF

SEQ ID NO: 121722 - protein, 13 aa, Homo sapiens
  CDR3 for beta chain variable domain of TCR clone 60861 (TRBV11-3, TRBJ2-3)
CASSHDTKDTQYF

SEQ ID NO: 121723 - protein, 13 aa, Homo sapiens
  CDR3 for alpha chain variable domain of TCR clone 60862 (TRAV27, TRAJ45)
CRSSGGGADGLTF

SEQ ID NO: 121724 - protein, 17 aa, Homo sapiens
  CDR3 for beta chain variable domain of TCR clone 60862 (TRBV11-2, TRBJ2-1)
CASSLNPPGVEYNEQFF

SEQ ID NO: 121725 - protein, 14 aa, Homo sapiens
  CDR3 for alpha chain variable domain of TCR clone 60863 (TRAV1-2, TRAJ16)
CAVNRFSDGQKLLF

SEQ ID NO: 121726 - protein, 15 aa, Homo sapiens
  CDR3 for beta chain variable domain of TCR clone 60863 (TRBV11-2, TRBJ1-6)
CASSQGGQIRSPLHF

SEQ ID NO: 121727 - protein, 13 aa, Homo sapiens
  CDR3 for alpha chain variable domain of TCR clone 60864 (TRAV8-3, TRAJ28)
CAVGAVGSYQLTF

SEQ ID NO: 121728 - protein, 13 aa, Homo sapiens
  CDR3 for beta chain variable domain of TCR clone 60864 (TRBV6-3, TRBJ1-6)
CASSEGTGPPLHF

SEQ ID NO: 121729 - protein, 12 aa, Homo sapiens
  CDR3 for alpha chain variable domain of TCR clone 60865 (TRAV1-2, TRAJ33)
CAALDSNYQLIW

SEQ ID NO: 121730 - protein, 11 aa, Homo sapiens
  CDR3 for beta chain variable domain of TCR clone 60865 (TRBV29-1, TRBJ2-5)
CSEDRTGTQYF

SEQ ID NO: 121731 - protein, 14 aa, Homo sapiens
  CDR3 for alpha chain variable domain of TCR clone 60866 (TRAV21, TRAJ15)
CAVSINQAGTALIF

SEQ ID NO: 121732 - protein, 11 aa, Homo sapiens
  CDR3 for beta chain variable domain of TCR clone 60866 (TRBV20-1, TRBJ2-7)
CSARTSYEQYF

SEQ ID NO: 121733 - protein, 11 aa, Homo sapiens
  CDR3 for alpha chain variable domain of TCR clone 60867 (TRAV12-3, TRAJ27)
CAMANAGKSTF

SEQ ID NO: 121734 - protein, 19 aa, Homo sapiens
  CDR3 for beta chain variable domain of TCR clone 60867 (TRBV7-2, TRBJ2-3)
CASSFLSRNWGGGTDTQYF

SEQ ID NO: 121735 - protein, 13 aa, Homo sapiens
  CDR3 for alpha chain variable domain of TCR clone 60868 (TRAV36/DV7, TRAJ54)
CPVCTQGAQKLVF

SEQ ID NO: 121736 - protein, 13 aa, Homo sapiens
  CDR3 for beta chain variable domain of TCR clone 60868 (TRBV7-6, TRBJ2-7)
CASSLDHTHEQYF

SEQ ID NO: 121737 - protein, 14 aa, Homo sapiens
  CDR3 for alpha chain variable domain of TCR clone 60869 (TRAV12-1, TRAJ6)
CVVARIRRKLHAYI

SEQ ID NO: 121738 - protein, 15 aa, Homo sapiens
  CDR3 for beta chain variable domain of TCR clone 60869 (TRBV7-3, TRBJ2-1)
CASSLKASEYNERFF

SEQ ID NO: 121739 - protein, 12 aa, Homo sapiens
  CDR3 for alpha chain variable domain of TCR clone 60870 (TRAV12-3, TRAJ17)
CSMTLTGNKLTF

SEQ ID NO: 121740 - protein, 13 aa, Homo sapiens
  CDR3 for beta chain variable domain of TCR clone 60870 (TRBV7-3, TRBJ1-1)
CASSQDWGAEAFF

SEQ ID NO: 121741 - protein, 13 aa, Homo sapiens
  CDR3 for alpha chain variable domain of TCR clone 60871 (TRAV12-2, TRAJ50)
CAVIVTSYDKVIF

SEQ ID NO: 121742 - protein, 20 aa, Homo sapiens
  CDR3 for beta chain variable domain of TCR clone 60871 (TRBV20-1, TRBJ1-2)
CKPDLVHSDSDQCANYGYTF

SEQ ID NO: 121743 - protein, 12 aa, Homo sapiens
  CDR3 for alpha chain variable domain of TCR clone 60872 (TRAV20, TRAJ39)
CAVGNAGNMITF

SEQ ID NO: 121744 - protein, 16 aa, Homo sapiens
  CDR3 for beta chain variable domain of TCR clone 60872 (TRBV15, TRBJ1-2)
CATSRGPRTGGGGYTF

SEQ ID NO: 121745 - protein, 16 aa, Homo sapiens
  CDR3 for alpha chain variable domain of TCR clone 60873 (TRAV3, TRAJ10)
CAVRDMRAGGGNKLTF

SEQ ID NO: 121746 - protein, 19 aa, Homo sapiens
  CDR3 for beta chain variable domain of TCR clone 60873 (TRBV6-3, TRBJ1-2)
CASSYSKGRTGPPNYGHTF

SEQ ID NO: 121747 - protein, 15 aa, Homo sapiens
  CDR3 for alpha chain variable domain of TCR clone 60874 (TRAV17, TRAJ52)
CATEAGGTSYGNLTF

SEQ ID NO: 121748 - protein, 14 aa, Homo sapiens
  CDR3 for beta chain variable domain of TCR clone 60874 (TRBV28, TRBJ1-5)
CASSLGVLVKPQHF

SEQ ID NO: 121749 - protein, 16 aa, Homo sapiens
  CDR3 for alpha chain variable domain of TCR clone 60875 (TRAV8-6, TRAJ23)
CAVSDRLGNQGGKLIF

SEQ ID NO: 121750 - protein, 14 aa, Homo sapiens
  CDR3 for beta chain variable domain of TCR clone 60875 (TRBV18, TRBJ2-5)
CASSPGVSQETQYF

SEQ ID NO: 121751 - protein, 12 aa, Homo sapiens
  CDR3 for alpha chain variable domain of TCR clone 60876 (TRAV23/DV6, TRAJ30)
CAASKGDDKIIF

SEQ ID NO: 121752 - protein, 15 aa, Homo sapiens
  CDR3 for beta chain variable domain of TCR clone 60876 (TRBV29-1, TRBJ2-1)
CSGRDRKSPYNEQFF

SEQ ID NO: 121753 - protein, 14 aa, Homo sapiens
  CDR3 for alpha chain variable domain of TCR clone 60877 (TRAV8-6, TRAJ52)
CAVIGGTSYGKLTF

SEQ ID NO: 121754 - protein, 16 aa, Homo sapiens
  CDR3 for beta chain variable domain of TCR clone 60877 (TRBV25-1, TRBJ1-1)
CASSGDRDRGRIEAFF

SEQ ID NO: 121755 - protein, 14 aa, Homo sapiens
  CDR3 for alpha chain variable domain of TCR clone 60878 (TRAV8-3, TRAJ4)
CAVGASGGYNKLIF

SEQ ID NO: 121756 - protein, 16 aa, Homo sapiens
  CDR3 for beta chain variable domain of TCR clone 60878 (TRBV20-1, TRBJ2-2)
CSASASGIPGAGELFF

SEQ ID NO: 121757 - protein, 12 aa, Homo sapiens
  CDR3 for alpha chain variable domain of TCR clone 60879 (TRAV1-1, TRAJ23)
CAVTNQGGKLIF

SEQ ID NO: 121758 - protein, 17 aa, Homo sapiens
  CDR3 for beta chain variable domain of TCR clone 60879 (TRBV6-6, TRBJ2-7)
CASSYSYGVPTSSTSGR

SEQ ID NO: 121759 - protein, 18 aa, Homo sapiens
  CDR3 for alpha chain variable domain of TCR clone 60880 (TRAV26-2, TRAJ45)
CILRLWGYSGGGADGPTF

SEQ ID NO: 121760 - protein, 17 aa, Homo sapiens
  CDR3 for beta chain variable domain of TCR clone 60880 (TRBV28, TRBJ2-3)
CASSPTPAGGRVDTQYF

SEQ ID NO: 121761 - protein, 15 aa, Homo sapiens
  CDR3 for alpha chain variable domain of TCR clone 60881 (TRAV14/DV4, TRAJ10)
CAMRELTGGGNKLTF

SEQ ID NO: 121762 - protein, 14 aa, Homo sapiens
  CDR3 for beta chain variable domain of TCR clone 60881 (TRBV7-2, TRBJ2-7)
CASSPKTSFYEQYF

SEQ ID NO: 121763 - protein, 14 aa, Homo sapiens
  CDR3 for alpha chain variable domain of TCR clone 60882 (TRAV8-2, TRAJ11)
CVVSEKSGYSTLTF

SEQ ID NO: 121764 - protein, 16 aa, Homo sapiens
  CDR3 for beta chain variable domain of TCR clone 60882 (TRBV28, TRBJ2-1)
CASSSPEYPRDNEKFF

SEQ ID NO: 121765 - protein, 12 aa, Homo sapiens
  CDR3 for alpha chain variable domain of TCR clone 60883 (TRAV13-2, TRAJ8)
CAPWLGFQKFVF

SEQ ID NO: 121766 - protein, 16 aa, Homo sapiens
  CDR3 for beta chain variable domain of TCR clone 60883 (TRBV18, TRBJ1-1)
CASSPGVGGRGGEAFF

SEQ ID NO: 121767 - protein, 15 aa, Homo sapiens
  CDR3 for alpha chain variable domain of TCR clone 60884 (TRAV26-1, TRAJ29)
CIVRVEGSGNTPLVF

SEQ ID NO: 121768 - protein, 15 aa, Homo sapiens
  CDR3 for beta chain variable domain of TCR clone 60884 (TRBV7-2, TRBJ1-2)
CASSPRAGWNYGYTF

SEQ ID NO: 121769 - protein, 15 aa, Homo sapiens
  CDR3 for alpha chain variable domain of TCR clone 60885 (TRAV17, TRAJ13)
CATDAGSGGYQKVIF

SEQ ID NO: 121770 - protein, 17 aa, Homo sapiens
  CDR3 for beta chain variable domain of TCR clone 60885 (TRBV11-2, TRBJ2-1)
CASSLYPPGVEYNEQFF

SEQ ID NO: 121771 - protein, 13 aa, Homo sapiens
  CDR3 for alpha chain variable domain of TCR clone 60886 (TRAV12-2, TRAJ9)
CAGGNTGGFKTIF

SEQ ID NO: 121772 - protein, 17 aa, Homo sapiens
  CDR3 for beta chain variable domain of TCR clone 60886 (TRBV11-2, TRBJ2-1)
CASSLYPPGVEYNEQFF

SEQ ID NO: 121773 - protein, 14 aa, Homo sapiens
  CDR3 for alpha chain variable domain of TCR clone 60887 (TRAV1-2, TRAJ16)
CAVNRFSDGQKLLF

SEQ ID NO: 121774 - protein, 16 aa, Homo sapiens
  CDR3 for beta chain variable domain of TCR clone 60887 (TRBV20-1, TRBJ1-2)
CSASMGQGVANYGHTF

SEQ ID NO: 121775 - protein, 14 aa, Homo sapiens
  CDR3 for alpha chain variable domain of TCR clone 60888 (TRAV8-1, TRAJ9)
CAVNAWTGGFKTIF

SEQ ID NO: 121776 - protein, 15 aa, Homo sapiens
  CDR3 for beta chain variable domain of TCR clone 60888 (TRBV6-3, TRBJ2-7)
CASSSPGTVFYEQYF

SEQ ID NO: 121777 - protein, 11 aa, Homo sapiens
  CDR3 for alpha chain variable domain of TCR clone 60889 (TRAV21, TRAJ7)
CAAYGSNRLAF

SEQ ID NO: 121778 - protein, 14 aa, Homo sapiens
  CDR3 for beta chain variable domain of TCR clone 60889 (TRBV4-1, TRBJ2-7)
CASSRTGVAFEQYF

SEQ ID NO: 121779 - protein, 15 aa, Homo sapiens
  CDR3 for alpha chain variable domain of TCR clone 60890 (TRAV1-2, TRAJ16)
CAVRARFSDGQKLLF

SEQ ID NO: 121780 - protein, 11 aa, Homo sapiens
  CDR3 for beta chain variable domain of TCR clone 60890 (TRBV11-3, TRBJ2-3)
CASGFGTSGGP

SEQ ID NO: 121781 - protein, 11 aa, Homo sapiens
  CDR3 for alpha chain variable domain of TCR clone 60891 (TRAV12-3, TRAJ35)
CAVGFGNVLHC

SEQ ID NO: 121782 - protein, 14 aa, Homo sapiens
  CDR3 for beta chain variable domain of TCR clone 60891 (TRBV7-3, TRBJ2-1)
CASSLGTSANEQFF

SEQ ID NO: 121783 - protein, 14 aa, Homo sapiens
  CDR3 for alpha chain variable domain of TCR clone 60892 (TRAV1-2, TRAJ8)
CAVREDTGFQKIVF

SEQ ID NO: 121784 - protein, 12 aa, Homo sapiens
  CDR3 for beta chain variable domain of TCR clone 60892 (TRBV2, TRBJ2-1)
CAYGPPGNEQFF

SEQ ID NO: 121785 - protein, 13 aa, Homo sapiens
  CDR3 for alpha chain variable domain of TCR clone 60893 (TRAV16, TRAJ34)
CITVLSHTDKLIF

SEQ ID NO: 121786 - protein, 13 aa, Homo sapiens
  CDR3 for beta chain variable domain of TCR clone 60893 (TRBV12-5, TRBJ2-3)
CASGDRQSDTQYF

SEQ ID NO: 121787 - protein, 17 aa, Homo sapiens
  CDR3 for alpha chain variable domain of TCR clone 60894 (TRAV13-1, TRAJ53)
CAASWKSSGGSNYKLAF

SEQ ID NO: 121788 - protein, 19 aa, Homo sapiens
  CDR3 for beta chain variable domain of TCR clone 60894 (TRBV7-9, TRBJ2-1)
CASSHNRGALLRSYNEQFF

SEQ ID NO: 121789 - protein, 16 aa, Homo sapiens
  CDR3 for alpha chain variable domain of TCR clone 60895 (TRAV8-6, TRAJ39)
CAVMPMNNNAGNMLTF

SEQ ID NO: 121790 - protein, 16 aa, Homo sapiens
  CDR3 for beta chain variable domain of TCR clone 60895 (TRBV15, TRBJ2-5)
CATSIYLEAAQETQYF

SEQ ID NO: 121791 - protein, 13 aa, Homo sapiens
  CDR3 for alpha chain variable domain of TCR clone 60896 (TRAV13-2, TRAJ13)
CAERPGGYQKVTF

SEQ ID NO: 121792 - protein, 15 aa, Homo sapiens
  CDR3 for beta chain variable domain of TCR clone 60896 (TRBV27, TRBJ2-1)
CASSNGGGSSNEQFF

SEQ ID NO: 121793 - protein, 17 aa, Homo sapiens
  CDR3 for alpha chain variable domain of TCR clone 60897 (TRAV16, TRAJ58)
CITVLSKGETSGSRLTF

SEQ ID NO: 121794 - protein, 17 aa, Homo sapiens
  CDR3 for beta chain variable domain of TCR clone 60897 (TRBV18, TRBJ2-1)
CASSKGLSGGADNKQFF

SEQ ID NO: 121795 - protein, 13 aa, Homo sapiens
  CDR3 for alpha chain variable domain of TCR clone 60898 (TRAV17, TRAJ9)
CATDYTGGFKTIF

SEQ ID NO: 121796 - protein, 16 aa, Homo sapiens
  CDR3 for beta chain variable domain of TCR clone 60898 (TRBV7-7, TRBJ2-1)
CASSLASGTSNNEQFF

SEQ ID NO: 121797 - protein, 14 aa, Homo sapiens
  CDR3 for alpha chain variable domain of TCR clone 60899 (TRAV26-2, TRAJ32)
CCVGYGGATNRLIF

SEQ ID NO: 121798 - protein, 13 aa, Homo sapiens
  CDR3 for beta chain variable domain of TCR clone 60899 (TRBV12-5, TRBJ2-3)
CASGDRQSDTQYF

SEQ ID NO: 121799 - protein, 19 aa, Homo sapiens
  CDR3 for alpha chain variable domain of TCR clone 60900 (TRAV26-1, TRAJ52)
CIVRAHRNAGGTSYGKLTF

SEQ ID NO: 121800 - protein, 15 aa, Homo sapiens
  CDR3 for beta chain variable domain of TCR clone 60900 (TRBV29-1, TRBJ2-1)
CSGKDRKSSYNEQFF

SEQ ID NO: 121801 - protein, 12 aa, Homo sapiens
  CDR3 for alpha chain variable domain of TCR clone 60901 (TRAV21, TRAJ23)
CAVGPQGGKLIF

SEQ ID NO: 121802 - protein, 15 aa, Homo sapiens
  CDR3 for beta chain variable domain of TCR clone 60901 (TRBV7-2, TRBJ1-2)
CASSPRAGWNYGYTF

SEQ ID NO: 121803 - protein, 14 aa, Homo sapiens
  CDR3 for alpha chain variable domain of TCR clone 60902 (TRAV25, TRAJ23)
CAGQGDNQGGKLIF

SEQ ID NO: 121804 - protein, 12 aa, Homo sapiens
  CDR3 for beta chain variable domain of TCR clone 60902 (TRBV7-9, TRBJ1-1)
CASGLVRGEAFF

SEQ ID NO: 121805 - protein, 18 aa, Homo sapiens
  CDR3 for alpha chain variable domain of TCR clone 60903 (TRAV21, TRAJ52)
YAVRPSPAGGTSYGKLTF

SEQ ID NO: 121806 - protein, 15 aa, Homo sapiens
  CDR3 for beta chain variable domain of TCR clone 60903 (TRBV5-1, TRBJ2-1)
CASSLVANSYNEQFF

SEQ ID NO: 121807 - protein, 12 aa, Homo sapiens
  CDR3 for alpha chain variable domain of TCR clone 60904 (TRAV3, TRAJ7)
CAGLLWEQQTRF

SEQ ID NO: 121808 - protein, 13 aa, Homo sapiens
  CDR3 for beta chain variable domain of TCR clone 60904 (TRBV7-3, TRBJ2-5)
CASSFRGGETQYF

SEQ ID NO: 121809 - protein, 14 aa, Homo sapiens
  CDR3 for alpha chain variable domain of TCR clone 60905 (TRAV16, TRAJ3)
CALSQYSSASKIIF

SEQ ID NO: 121810 - protein, 15 aa, Homo sapiens
  CDR3 for beta chain variable domain of TCR clone 60905 (TRBV6-3, TRBJ2-7)
CASSSPGTVFYEQYF

SEQ ID NO: 121811 - protein, 18 aa, Homo sapiens
  CDR3 for alpha chain variable domain of TCR clone 60906 (TRAV12-3, TRAJ52)
CAMSVGGAGGTSYGKLTF

SEQ ID NO: 121812 - protein, 15 aa, Homo sapiens
  CDR3 for beta chain variable domain of TCR clone 60906 (TRBV27, TRBJ1-6)
CASSFYMGLGSPLHF

SEQ ID NO: 121813 - protein, 14 aa, Homo sapiens
  CDR3 for alpha chain variable domain of TCR clone 60907 (TRAV12-3, TRAJ29)
CAMILLSGNTPLVF

SEQ ID NO: 121814 - protein, 16 aa, Homo sapiens
  CDR3 for beta chain variable domain of TCR clone 60907 (TRBV28, TRBJ2-7)
CASSAGTSGRGYEQYF

SEQ ID NO: 121815 - protein, 12 aa, Homo sapiens
  CDR3 for alpha chain variable domain of TCR clone 60908 (TRAV21, TRAJ33)
YAKMDSNYQLIW

SEQ ID NO: 121816 - protein, 14 aa, Homo sapiens
  CDR3 for beta chain variable domain of TCR clone 60908 (TRBV2, TRBJ2-7)
CASSLTSGGYEQYF

SEQ ID NO: 121817 - protein, 14 aa, Homo sapiens
  CDR3 for alpha chain variable domain of TCR clone 60909 (TRAV26-1, TRAJ57)
CIRAGQGGPEKLVF

SEQ ID NO: 121818 - protein, 13 aa, Homo sapiens
  CDR3 for beta chain variable domain of TCR clone 60909 (TRBV19, TRBJ2-7)
CASSLTTSYEQYF

SEQ ID NO: 121819 - protein, 16 aa, Homo sapiens
  CDR3 for alpha chain variable domain of TCR clone 60910 (TRAV8-4, TRAJ28)
CAVESNSGAGSYQLTF

SEQ ID NO: 121820 - protein, 13 aa, Homo sapiens
  CDR3 for beta chain variable domain of TCR clone 60910 (TRBV7-9, TRBJ1-2)
CASSLKQNYGYTF

SEQ ID NO: 121821 - protein, 11 aa, Homo sapiens
  CDR3 for alpha chain variable domain of TCR clone 60911 (TRAV2, TRAJ13)
CASGGYQKVTF

SEQ ID NO: 121822 - protein, 12 aa, Homo sapiens
  CDR3 for beta chain variable domain of TCR clone 60911 (TRBV7-9, TRBJ1-4)
CASSTDREKLFF

SEQ ID NO: 121823 - protein, 14 aa, Homo sapiens
  CDR3 for alpha chain variable domain of TCR clone 60912 (TRAV1-2, TRAJ16)
CAVNRFSDGQKLLF

SEQ ID NO: 121824 - protein, 14 aa, Homo sapiens
  CDR3 for beta chain variable domain of TCR clone 60912 (TRBV7-2, TRBJ2-3)
CASSLGGGERYAVF

SEQ ID NO: 121825 - protein, 14 aa, Homo sapiens
  CDR3 for alpha chain variable domain of TCR clone 60913 (TRAV2, TRAJ9)
CAVEDRSGGFKTTF

SEQ ID NO: 121826 - protein, 14 aa, Homo sapiens
  CDR3 for beta chain variable domain of TCR clone 60913 (TRBV7-9, TRBJ2-7)
CASSPSGGQNEQYF

SEQ ID NO: 121827 - protein, 15 aa, Homo sapiens
  CDR3 for alpha chain variable domain of TCR clone 60914 (TRAV12-2, TRAJ53)
CAVNGGGGSNYKLTF

SEQ ID NO: 121828 - protein, 17 aa, Homo sapiens
  CDR3 for beta chain variable domain of TCR clone 60914 (TRBV7-3, TRBJ2-3)
RASSLTKRMRGAATQYF

SEQ ID NO: 121829 - protein, 17 aa, Homo sapiens
  CDR3 for alpha chain variable domain of TCR clone 60915 (TRAV3, TRAJ28)
RAVREAYSGAGSYQLTF

SEQ ID NO: 121830 - protein, 18 aa, Homo sapiens
  CDR3 for beta chain variable domain of TCR clone 60915 (TRBV27, TRBJ2-1)
CASGNRAVGVGSKNEQFF

SEQ ID NO: 121831 - protein, 13 aa, Homo sapiens
  CDR3 for alpha chain variable domain of TCR clone 60916 (TRAV26-2, TRAJ37)
CIRGSSNTGKLIF

SEQ ID NO: 121832 - protein, 14 aa, Homo sapiens
  CDR3 for beta chain variable domain of TCR clone 60916 (TRBV13, TRBJ1-1)
CASTVITVNTEAFF

SEQ ID NO: 121833 - protein, 15 aa, Homo sapiens
  CDR3 for alpha chain variable domain of TCR clone 60917 (TRAV21, TRAJ52)
CAVRGGGTSYGKLTF

SEQ ID NO: 121834 - protein, 14 aa, Homo sapiens
  CDR3 for beta chain variable domain of TCR clone 60917 (TRBV7-3, TRBJ2-2)
CASSLYPLTGELFF

SEQ ID NO: 121835 - protein, 12 aa, Homo sapiens
  CDR3 for alpha chain variable domain of TCR clone 60918 (TRAV13-1, TRAJ21)
CAAKEGFNKFYF

SEQ ID NO: 121836 - protein, 17 aa, Homo sapiens
  CDR3 for beta chain variable domain of TCR clone 60918 (TRBV6-5, TRBJ2-4)
CASRPTPGQGSKNIQYF

SEQ ID NO: 121837 - protein, 13 aa, Homo sapiens
  CDR3 for alpha chain variable domain of TCR clone 60919 (TRAV2, TRAJ40)
CAVVTSGTYKYIF

SEQ ID NO: 121838 - protein, 13 aa, Homo sapiens
  CDR3 for beta chain variable domain of TCR clone 60919 (TRBV7-9, TRBJ2-5)
YASLPSGRETQYF

SEQ ID NO: 121839 - protein, 15 aa, Homo sapiens
  CDR3 for alpha chain variable domain of TCR clone 60920 (TRAV3, TRAJ47)
CAVRDIGEYGNKLVF

SEQ ID NO: 121840 - protein, 14 aa, Homo sapiens
  CDR3 for beta chain variable domain of TCR clone 60920 (TRBV13, TRBJ2-5)
CASSLARVGETQYF

SEQ ID NO: 121841 - protein, 13 aa, Homo sapiens
  CDR3 for alpha chain variable domain of TCR clone 60921 (TRAV3, TRAJ29)
CAVRDIIDTPLFF

SEQ ID NO: 121842 - protein, 14 aa, Homo sapiens
  CDR3 for beta chain variable domain of TCR clone 60921 (TRBV27, TRBJ2-1)
CASSATGGYNEQFF

SEQ ID NO: 121843 - protein, 13 aa, Homo sapiens
  CDR3 for alpha chain variable domain of TCR clone 60922 (TRAV12-3, TRAJ6)
CANPSGGSYIPTF

SEQ ID NO: 121844 - protein, 14 aa, Homo sapiens
  CDR3 for beta chain variable domain of TCR clone 60922 (TRBV19, TRBJ1-1)
CASSGDRDATEAFF

SEQ ID NO: 121845 - protein, 13 aa, Homo sapiens
  CDR3 for alpha chain variable domain of TCR clone 60923 (TRAV13-1, TRAJ5)
CAASDTGRRALTF

SEQ ID NO: 121846 - protein, 12 aa, Homo sapiens
  CDR3 for beta chain variable domain of TCR clone 60923 (TRBV28, TRBJ2-3)
CASSLSRDTQYF

SEQ ID NO: 121847 - protein, 16 aa, Homo sapiens
  CDR3 for alpha chain variable domain of TCR clone 60924 (TRAV21, TRAJ37)
CAVRTAGSSNTGKLIF

SEQ ID NO: 121848 - protein, 13 aa, Homo sapiens
  CDR3 for beta chain variable domain of TCR clone 60924 (TRBV7-9, TRBJ2-5)
CASLRSGRETQYF

SEQ ID NO: 121849 - protein, 13 aa, Homo sapiens
  CDR3 for alpha chain variable domain of TCR clone 60925 (TRAV12-3, TRAJ43)
CAMIRPNDNDMRF

SEQ ID NO: 121850 - protein, 12 aa, Homo sapiens
  CDR3 for beta chain variable domain of TCR clone 60925 (TRBV11-2, TRBJ2-5)
CASSLGQETQYF

SEQ ID NO: 121851 - protein, 11 aa, Homo sapiens
  CDR3 for alpha chain variable domain of TCR clone 60926 (TRAV13-1, TRAJ43)
CAASNLLTCAL

SEQ ID NO: 121852 - protein, 13 aa, Homo sapiens
  CDR3 for beta chain variable domain of TCR clone 60926 (TRBV11-2, TRBJ2-5)
CASSSTGEETQYF

SEQ ID NO: 121853 - protein, 17 aa, Homo sapiens
  CDR3 for alpha chain variable domain of TCR clone 60927 (TRAV35, TRAJ38)
CAGQLQRNAGNNRKLIW

SEQ ID NO: 121854 - protein, 14 aa, Homo sapiens
  CDR3 for beta chain variable domain of TCR clone 60927 (TRBV19, TRBJ2-1)
CASPTFVLSGEQFF

SEQ ID NO: 121855 - protein, 12 aa, Homo sapiens
  CDR3 for alpha chain variable domain of TCR clone 60928 (TRAV12-3, TRAJ17)
CAMTLTGNRLTF

SEQ ID NO: 121856 - protein, 20 aa, Homo sapiens
  CDR3 for beta chain variable domain of TCR clone 60928 (TRBV7-8, TRBJ2-2)
CASSHLFPGPTIHITGELFF

SEQ ID NO: 121857 - protein, 13 aa, Homo sapiens
  CDR3 for alpha chain variable domain of TCR clone 60929 (TRAV8-3, TRAJ28)
CAVGEVGSYQLTF

SEQ ID NO: 121858 - protein, 16 aa, Homo sapiens
  CDR3 for beta chain variable domain of TCR clone 60929 (TRBV19, TRBJ2-1)
CASSKAGPSSYNEQFF

SEQ ID NO: 121859 - protein, 16 aa, Homo sapiens
  CDR3 for alpha chain variable domain of TCR clone 60930 (TRAV8-3, TRAJ8)
CAVPRDGNTGFQKIVF

SEQ ID NO: 121860 - protein, 14 aa, Homo sapiens
  CDR3 for beta chain variable domain of TCR clone 60930 (TRBV28, TRBJ1-1)
CASSESGRGTEAFF

SEQ ID NO: 121861 - protein, 11 aa, Homo sapiens
  CDR3 for alpha chain variable domain of TCR clone 60931 (TRAV17, TRAJ9)
CATTGGFKTIF

SEQ ID NO: 121862 - protein, 16 aa, Homo sapiens
  CDR3 for beta chain variable domain of TCR clone 60931 (TRBV7-8, TRBJ2-4)
CTSSAERTLAKNIQYF

SEQ ID NO: 121863 - protein, 12 aa, Homo sapiens
  CDR3 for alpha chain variable domain of TCR clone 60932 (TRAV2, TRAJ31)
CAVEDNTARLMF

SEQ ID NO: 121864 - protein, 16 aa, Homo sapiens
  CDR3 for beta chain variable domain of TCR clone 60932 (TRBV10-3, TRBJ2-1)
CAISGVGDGGGGEQFF

SEQ ID NO: 121865 - protein, 14 aa, Homo sapiens
  CDR3 for alpha chain variable domain of TCR clone 60933 (TRAV26-1, TRAJ26)
CIVRATFLGQNVVF

SEQ ID NO: 121866 - protein, 16 aa, Homo sapiens
  CDR3 for beta chain variable domain of TCR clone 60933 (TRBV12-4, TRBJ2-7)
CASRSTGTGPSYEQYF

SEQ ID NO: 121867 - protein, 12 aa, Homo sapiens
  CDR3 for alpha chain variable domain of TCR clone 60934 (TRAV12-1, TRAJ34)
CVVAGATDKLIF

SEQ ID NO: 121868 - protein, 15 aa, Homo sapiens
  CDR3 for beta chain variable domain of TCR clone 60934 (TRBV27, TRBJ2-1)
CASSNGGGSSNEQFF

SEQ ID NO: 121869 - protein, 14 aa, Homo sapiens
  CDR3 for alpha chain variable domain of TCR clone 60935 (TRAV1-2, TRAJ16)
CAVNRFSDGQKLLF

SEQ ID NO: 121870 - protein, 13 aa, Homo sapiens
  CDR3 for beta chain variable domain of TCR clone 60935 (TRBV2, TRBJ1-5)
CATAGPGNQPQHF

SEQ ID NO: 121871 - protein, 12 aa, Homo sapiens
  CDR3 for alpha chain variable domain of TCR clone 60936 (TRAV12-2, TRAJ7)
CAVMRGNNRLAF

SEQ ID NO: 121872 - protein, 15 aa, Homo sapiens
  CDR3 for beta chain variable domain of TCR clone 60936 (TRBV2, TRBJ2-1)
CASSELAGGYNEQLF

SEQ ID NO: 121873 - protein, 14 aa, Homo sapiens
  CDR3 for alpha chain variable domain of TCR clone 60937 (TRAV17, TRAJ54)
CATDANQGAQKLVV

SEQ ID NO: 121874 - protein, 12 aa, Homo sapiens
  CDR3 for beta chain variable domain of TCR clone 60937 (TRBV6-3, TRBJ2-1)
CASSGSYNEQFF

SEQ ID NO: 121875 - protein, 15 aa, Homo sapiens
  CDR3 for alpha chain variable domain of TCR clone 60938 (TRAV8-3, TRAJ45)
CASSYSGGGADGLTF

SEQ ID NO: 121876 - protein, 12 aa, Homo sapiens
  CDR3 for beta chain variable domain of TCR clone 60938 (TRBV5-1, TRBJ2-5)
CASSFSWETQYF

SEQ ID NO: 121877 - protein, 13 aa, Homo sapiens
  CDR3 for alpha chain variable domain of TCR clone 60939 (TRAV8-3, TRAJ43)
CAVGPDNNNDMRF

SEQ ID NO: 121878 - protein, 18 aa, Homo sapiens
  CDR3 for beta chain variable domain of TCR clone 60939 (TRBV11-2, TRBJ2-3)
CASSLGGASRGAPNTQYF

SEQ ID NO: 121879 - protein, 12 aa, Homo sapiens
  CDR3 for alpha chain variable domain of TCR clone 60940 (TRAV27, TRAJ35)
CAGADFGNVLHC

SEQ ID NO: 121880 - protein, 16 aa, Homo sapiens
  CDR3 for beta chain variable domain of TCR clone 60940 (TRBV6-1, TRBJ2-1)
CASILRQGSSYDEQFF

SEQ ID NO: 121881 - protein, 13 aa, Homo sapiens
  CDR3 for alpha chain variable domain of TCR clone 60941 (TRAV8-4, TRAJ30)
CAVSVNRDEKIIF

SEQ ID NO: 121882 - protein, 13 aa, Homo sapiens
  CDR3 for beta chain variable domain of TCR clone 60941 (TRBV3-1, TRBJ2-2)
CASLARGSGELFF

SEQ ID NO: 121883 - protein, 13 aa, Homo sapiens
  CDR3 for alpha chain variable domain of TCR clone 60942 (TRAV2, TRAJ40)
CAVVTSGTYKYIF

SEQ ID NO: 121884 - protein, 15 aa, Homo sapiens
  CDR3 for beta chain variable domain of TCR clone 60942 (TRBV2, TRBJ2-1)
CASSELAGSYNEQFF

SEQ ID NO: 121885 - protein, 14 aa, Homo sapiens
  CDR3 for alpha chain variable domain of TCR clone 60943 (TRAV35, TRAJ13)
CAGSPSGGYQKVTF

SEQ ID NO: 121886 - protein, 13 aa, Homo sapiens
  CDR3 for beta chain variable domain of TCR clone 60943 (TRBV29-1, TRBJ1-1)
CSVGDSRNTESFF

SEQ ID NO: 121887 - protein, 15 aa, Homo sapiens
  CDR3 for alpha chain variable domain of TCR clone 60944 (TRAV3, TRAJ5)
CAVRDLDTGRRALTF

SEQ ID NO: 121888 - protein, 13 aa, Homo sapiens
  CDR3 for beta chain variable domain of TCR clone 60944 (TRBV20-1, TRBJ1-1)
CSARGGGNTEAFF

SEQ ID NO: 121889 - protein, 14 aa, Homo sapiens
  CDR3 for alpha chain variable domain of TCR clone 60945 (TRAV4, TRAJ17)
CLVGPQAAGNKLTF

SEQ ID NO: 121890 - protein, 15 aa, Homo sapiens
  CDR3 for beta chain variable domain of TCR clone 60945 (TRBV9, TRBJ2-1)
CAGSLAGSSYNEQFF

SEQ ID NO: 121891 - protein, 16 aa, Homo sapiens
  CDR3 for alpha chain variable domain of TCR clone 60946 (TRAV26-1, TRAJ36)
CIVRVTDQTGANNLFF

SEQ ID NO: 121892 - protein, 14 aa, Homo sapiens
  CDR3 for beta chain variable domain of TCR clone 60946 (TRBV7-2, TRBJ2-7)
CASSLYPGRYEQYF

SEQ ID NO: 121893 - protein, 12 aa, Homo sapiens
  CDR3 for alpha chain variable domain of TCR clone 60947 (TRAV1-2, TRAJ33)
CAALDSNYQLIW

SEQ ID NO: 121894 - protein, 14 aa, Homo sapiens
  CDR3 for beta chain variable domain of TCR clone 60947 (TRBV7-2, TRBJ2-7)
CASSLYPGRYEQYF

SEQ ID NO: 121895 - protein, 14 aa, Homo sapiens
  CDR3 for alpha chain variable domain of TCR clone 60948 (TRAV13-1, TRAJ44)
CAAKATGTASKLTF

SEQ ID NO: 121896 - protein, 15 aa, Homo sapiens
  CDR3 for beta chain variable domain of TCR clone 60948 (TRBV11-2, TRBJ2-4)
CASSRPGTGINIQYF

SEQ ID NO: 121897 - protein, 15 aa, Homo sapiens
  CDR3 for alpha chain variable domain of TCR clone 60949 (TRAV12-3, TRAJ6)
CAMSAASGGSYIPTF

SEQ ID NO: 121898 - protein, 13 aa, Homo sapiens
  CDR3 for beta chain variable domain of TCR clone 60949 (TRBV20-1, TRBJ1-2)
CSASTERIYGCTF

SEQ ID NO: 121899 - protein, 14 aa, Homo sapiens
  CDR3 for alpha chain variable domain of TCR clone 60950 (TRAV26-1, TRAJ38)
CIADNAGNNRKLFW

SEQ ID NO: 121900 - protein, 13 aa, Homo sapiens
  CDR3 for beta chain variable domain of TCR clone 60950 (TRBV7-9, TRBJ2-3)
CASSPGSTDTQYF

SEQ ID NO: 121901 - protein, 16 aa, Homo sapiens
  CDR3 for alpha chain variable domain of TCR clone 60951 (TRAV12-3, TRAJ53)
CAMSPGSGGINYKLTF

SEQ ID NO: 121902 - protein, 16 aa, Homo sapiens
  CDR3 for beta chain variable domain of TCR clone 60951 (TRBV4-2, TRBJ1-1)
CASSQAGFGMNTEAFF

SEQ ID NO: 121903 - protein, 13 aa, Homo sapiens
  CDR3 for alpha chain variable domain of TCR clone 60952 (TRAV8-3, TRAJ28)
CAVGAVGSYQLTF

SEQ ID NO: 121904 - protein, 14 aa, Homo sapiens
  CDR3 for beta chain variable domain of TCR clone 60952 (TRBV12-5, TRBJ2-5)
CASGSRTHQETQYF

SEQ ID NO: 121905 - protein, 14 aa, Homo sapiens
  CDR3 for alpha chain variable domain of TCR clone 60953 (TRAV26-1, TRAJ39)
CIVRGSRAGNMLTF

SEQ ID NO: 121906 - protein, 14 aa, Homo sapiens
  CDR3 for beta chain variable domain of TCR clone 60953 (TRBV7-9, TRBJ1-1)
CASTPLQSYTEAFF

SEQ ID NO: 121907 - protein, 13 aa, Homo sapiens
  CDR3 for alpha chain variable domain of TCR clone 60954 (TRAV12-3, TRAJ33)
CAMSVNSNYQLIW

SEQ ID NO: 121908 - protein, 14 aa, Homo sapiens
  CDR3 for beta chain variable domain of TCR clone 60954 (TRBV7-2, TRBJ2-7)
CASRSQGAAYEQYF

SEQ ID NO: 121909 - protein, 14 aa, Homo sapiens
  CDR3 for alpha chain variable domain of TCR clone 60955 (TRAV12-2, TRAJ40)
CAVKIPPGTYKYIF

SEQ ID NO: 121910 - protein, 12 aa, Homo sapiens
  CDR3 for beta chain variable domain of TCR clone 60955 (TRBV11-2, TRBJ2-2)
CASSLGGGELFF

SEQ ID NO: 121911 - protein, 12 aa, Homo sapiens
  CDR3 for alpha chain variable domain of TCR clone 60956 (TRAV17, TRAJ20)
CATALNDYKPSF

SEQ ID NO: 121912 - protein, 12 aa, Homo sapiens
  CDR3 for beta chain variable domain of TCR clone 60956 (TRBV10-3, TRBJ2-7)
CAHGADSGEQYF

SEQ ID NO: 121913 - protein, 15 aa, Homo sapiens
  CDR3 for alpha chain variable domain of TCR clone 60957 (TRAV26-2, TRAJ48)
CILRDANFGNEKLTF

SEQ ID NO: 121914 - protein, 13 aa, Homo sapiens
  CDR3 for beta chain variable domain of TCR clone 60957 (TRBV2, TRBJ1-1)
CASSPLDPGEAFF

SEQ ID NO: 121915 - protein, 13 aa, Homo sapiens
  CDR3 for alpha chain variable domain of TCR clone 60958 (TRAV25, TRAJ26)
CAGMDNYGQNFVF

SEQ ID NO: 121916 - protein, 15 aa, Homo sapiens
  CDR3 for beta chain variable domain of TCR clone 60958 (TRBV10-3, TRBJ2-1)
CAIRNGTSGHNAQFF

SEQ ID NO: 121917 - protein, 18 aa, Homo sapiens
  CDR3 for alpha chain variable domain of TCR clone 60959 (TRAV26-1, TRAJ52)
CIVRVEGAGGTGYGKLTF

SEQ ID NO: 121918 - protein, 13 aa, Homo sapiens
  CDR3 for beta chain variable domain of TCR clone 60959 (TRBV7-3, TRBJ1-2)
CASSLKRGYGYTF

SEQ ID NO: 121919 - protein, 14 aa, Homo sapiens
  CDR3 for alpha chain variable domain of TCR clone 60960 (TRAV16, TRAJ42)
CSLLAGGSQGNLIF

SEQ ID NO: 121920 - protein, 15 aa, Homo sapiens
  CDR3 for beta chain variable domain of TCR clone 60960 (TRBV2, TRBJ2-7)
CASSEGLARSYEQYF

SEQ ID NO: 121921 - protein, 15 aa, Homo sapiens
  CDR3 for alpha chain variable domain of TCR clone 60961 (TRAV20, TRAJ43)
CAVQAGKSSNNDMRF

SEQ ID NO: 121922 - protein, 14 aa, Homo sapiens
  CDR3 for beta chain variable domain of TCR clone 60961 (TRBV27, TRBJ2-1)
CASRHRGGGKEQFF

SEQ ID NO: 121923 - protein, 16 aa, Homo sapiens
  CDR3 for alpha chain variable domain of TCR clone 60962 (TRAV12-3, TRAJ53)
CAMSPGSGGSNYKLTF

SEQ ID NO: 121924 - protein, 16 aa, Homo sapiens
  CDR3 for beta chain variable domain of TCR clone 60962 (TRBV5-1, TRBJ2-3)
CASSLEGGSFADTQYF

SEQ ID NO: 121925 - protein, 16 aa, Homo sapiens
  CDR3 for alpha chain variable domain of TCR clone 60963 (TRAV21, TRAJ37)
CAVRTAGSSNTGKLIF

SEQ ID NO: 121926 - protein, 13 aa, Homo sapiens
  CDR3 for beta chain variable domain of TCR clone 60963 (TRBV7-9, TRBJ2-5)
CANLPSGRETQYF

SEQ ID NO: 121927 - protein, 15 aa, Homo sapiens
  CDR3 for alpha chain variable domain of TCR clone 60964 (TRAV38-2/DV8, TRAJ48)
CAYRRGGFGNEKLTF

SEQ ID NO: 121928 - protein, 16 aa, Homo sapiens
  CDR3 for beta chain variable domain of TCR clone 60964 (TRBV28, TRBJ2-7)
CASSPWVATGDLSQYF

SEQ ID NO: 121929 - protein, 15 aa, Homo sapiens
  CDR3 for alpha chain variable domain of TCR clone 60965 (TRAV12-3, TRAJ49)
CATAVTPNTGNQFYF

SEQ ID NO: 121930 - protein, 18 aa, Homo sapiens
  CDR3 for beta chain variable domain of TCR clone 60965 (TRBV4-1, TRBJ1-5)
CASSQDPRGQGLNQPQHF

SEQ ID NO: 121931 - protein, 11 aa, Homo sapiens
  CDR3 for alpha chain variable domain of TCR clone 60966 (TRAV13-2, TRAJ45)
VTGGGADGLTF

SEQ ID NO: 121932 - protein, 17 aa, Homo sapiens
  CDR3 for beta chain variable domain of TCR clone 60966 (TRBV19, TRBJ1-1)
CASSIAGRGLMNTEALF

SEQ ID NO: 121933 - protein, 17 aa, Homo sapiens
  CDR3 for alpha chain variable domain of TCR clone 60967 (TRAV3, TRAJ6)
CAVRDGPRAGGSYIPPF

SEQ ID NO: 121934 - protein, 16 aa, Homo sapiens
  CDR3 for beta chain variable domain of TCR clone 60967 (TRBV5-1, TRBJ1-3)
CASSPWAPSSGNTIYF

SEQ ID NO: 121935 - protein, 12 aa, Homo sapiens
  CDR3 for alpha chain variable domain of TCR clone 60968 (TRAV17, TRAJ12)
CATLRSSYKLIF

SEQ ID NO: 121936 - protein, 15 aa, Homo sapiens
  CDR3 for beta chain variable domain of TCR clone 60968 (TRBV4-1, TRBJ2-5)
CASSQWDLYQETQYF

SEQ ID NO: 121937 - protein, 17 aa, Homo sapiens
  CDR3 for alpha chain variable domain of TCR clone 60969 (TRAV3, TRAJ6)
CAVRDDPRAGGSYIPTF

SEQ ID NO: 121938 - protein, 19 aa, Homo sapiens
  CDR3 for beta chain variable domain of TCR clone 60969 (TRBV25-1, TRBJ2-2)
CAILVYRVDRGRKTGELFF

SEQ ID NO: 121939 - protein, 15 aa, Homo sapiens
  CDR3 for alpha chain variable domain of TCR clone 60970 (TRAV3, TRAJ4)
CAVRDGTGGDNKLIF

SEQ ID NO: 121940 - protein, 13 aa, Homo sapiens
  CDR3 for beta chain variable domain of TCR clone 60970 (TRBV12-5, TRBJ1-2)
CASGVRTGNGYTF

SEQ ID NO: 121941 - protein, 15 aa, Homo sapiens
  CDR3 for alpha chain variable domain of TCR clone 60971 (TRAV12-1, TRAJ8)
CVVNVENTGFQKLVF

SEQ ID NO: 121942 - protein, 16 aa, Homo sapiens
  CDR3 for beta chain variable domain of TCR clone 60971 (TRBV7-2, TRBJ2-7)
CASNLEAGGPWYEQYF

SEQ ID NO: 121943 - protein, 14 aa, Homo sapiens
  CDR3 for alpha chain variable domain of TCR clone 60972 (TRAV9-2, TRAJ15)
CALSESQAGTALIF

SEQ ID NO: 121944 - protein, 18 aa, Homo sapiens
  CDR3 for beta chain variable domain of TCR clone 60972 (TRBV6-6, TRBJ1-3)
CASSYSKWDSISGNTIYF

SEQ ID NO: 121945 - protein, 16 aa, Homo sapiens
  CDR3 for alpha chain variable domain of TCR clone 60973 (TRAV30, TRAJ24)
CVTEIVDADSWGKFQF

SEQ ID NO: 121946 - protein, 15 aa, Homo sapiens
  CDR3 for beta chain variable domain of TCR clone 60973 (TRBV20-1, TRBJ2-7)
CSARDRVSGMDEQYF

SEQ ID NO: 121947 - protein, 14 aa, Homo sapiens
  CDR3 for alpha chain variable domain of TCR clone 60974 (TRAV13-1, TRAJ44)
CAAKATGTASKLTF

SEQ ID NO: 121948 - protein, 14 aa, Homo sapiens
  CDR3 for beta chain variable domain of TCR clone 60974 (TRBV19, TRBJ2-2)
CASSTLHRSGELVF

SEQ ID NO: 121949 - protein, 11 aa, Homo sapiens
  CDR3 for alpha chain variable domain of TCR clone 60975 (TRAV12-2, TRAJ33)
CAVGSNYQLIW

SEQ ID NO: 121950 - protein, 14 aa, Homo sapiens
  CDR3 for beta chain variable domain of TCR clone 60975 (TRBV6-1, TRBJ2-2)
CASVEHSESGELFF

SEQ ID NO: 121951 - protein, 13 aa, Homo sapiens
  CDR3 for alpha chain variable domain of TCR clone 60976 (TRAV12-2, TRAJ11)
CAVPNSGYSTLTF

SEQ ID NO: 121952 - protein, 14 aa, Homo sapiens
  CDR3 for beta chain variable domain of TCR clone 60976 (TRBV4-1, TRBJ2-2)
CASSQAVNTGELSF

SEQ ID NO: 121953 - protein, 14 aa, Homo sapiens
  CDR3 for alpha chain variable domain of TCR clone 60977 (TRAV1-2, TRAJ8)
CAVREDTGFQKLVF

SEQ ID NO: 121954 - protein, 13 aa, Homo sapiens
  CDR3 for beta chain variable domain of TCR clone 60977 (TRBV20-1, TRBJ1-1)
CSARGGGNTEALF

SEQ ID NO: 121955 - protein, 12 aa, Homo sapiens
  CDR3 for alpha chain variable domain of TCR clone 60978 (TRAV12-3, TRAJ4)
CAMTGAGTRMAV

SEQ ID NO: 121956 - protein, 14 aa, Homo sapiens
  CDR3 for beta chain variable domain of TCR clone 60978 (TRBV10-3, TRBJ1-1)
CAISDTDRGVEAFF

SEQ ID NO: 121957 - protein, 12 aa, Homo sapiens
  CDR3 for alpha chain variable domain of TCR clone 60979 (TRAV26-2, TRAJ47)
CILVEYGNKLVF

SEQ ID NO: 121958 - protein, 14 aa, Homo sapiens
  CDR3 for beta chain variable domain of TCR clone 60979 (TRBV12-5, TRBJ2-5)
CASGSRTHQETQYF

SEQ ID NO: 121959 - protein, 16 aa, Homo sapiens
  CDR3 for alpha chain variable domain of TCR clone 60980 (TRAV23/DV6, TRAJ9)
CAASIGGNTGGFKTIF

SEQ ID NO: 121960 - protein, 14 aa, Homo sapiens
  CDR3 for beta chain variable domain of TCR clone 60980 (TRBV9, TRBJ2-7)
CASSVGVGYYEQYF

SEQ ID NO: 121961 - protein, 11 aa, Homo sapiens
  CDR3 for alpha chain variable domain of TCR clone 60981 (TRAV20, TRAJ34)
CRTKGTDKLIF

SEQ ID NO: 121962 - protein, 18 aa, Homo sapiens
  CDR3 for beta chain variable domain of TCR clone 60981 (TRBV18, TRBJ1-3)
CASSPRGGAGPSGNTIYF

SEQ ID NO: 121963 - protein, 14 aa, Homo sapiens
  CDR3 for alpha chain variable domain of TCR clone 60982 (TRAV12-2, TRAJ13)
CAVKKTGGYQKVTF

SEQ ID NO: 121964 - protein, 16 aa, Homo sapiens
  CDR3 for beta chain variable domain of TCR clone 60982 (TRBV4-1, TRBJ1-2)
CASSQDAGQVLYGYTF

SEQ ID NO: 121965 - protein, 13 aa, Homo sapiens
  CDR3 for alpha chain variable domain of TCR clone 60983 (TRAV26-1, TRAJ30)
CIVRVESNDKIIF

SEQ ID NO: 121966 - protein, 18 aa, Homo sapiens
  CDR3 for beta chain variable domain of TCR clone 60983 (TRBV20-1, TRBJ2-6)
CSAETTPTHGSGANVLTF

SEQ ID NO: 121967 - protein, 12 aa, Homo sapiens
  CDR3 for alpha chain variable domain of TCR clone 60984 (TRAV12-3, TRAJ17)
CAMTLTGSKLTF

SEQ ID NO: 121968 - protein, 15 aa, Homo sapiens
  CDR3 for beta chain variable domain of TCR clone 60984 (TRBV20-1, TRBJ2-7)
CSARDWVSGMDEQYF

SEQ ID NO: 121969 - protein, 13 aa, Homo sapiens
  CDR3 for alpha chain variable domain of TCR clone 60985 (TRAV8-3, TRAJ43)
CAVVPYNNNDMRF

SEQ ID NO: 121970 - protein, 16 aa, Homo sapiens
  CDR3 for beta chain variable domain of TCR clone 60985 (TRBV7-2, TRBJ2-5)
CASSPFPTGGEETQYV

SEQ ID NO: 121971 - protein, 15 aa, Homo sapiens
  CDR3 for alpha chain variable domain of TCR clone 60986 (TRAV21, TRAJ37)
CAVRPTLSNTGKLIF

SEQ ID NO: 121972 - protein, 13 aa, Homo sapiens
  CDR3 for beta chain variable domain of TCR clone 60986 (TRBV7-6, TRBJ2-3)
CASSLRSDNTQYF

SEQ ID NO: 121973 - protein, 13 aa, Homo sapiens
  CDR3 for alpha chain variable domain of TCR clone 60987 (TRAV12-3, TRAJ47)
CAMKKEYGNKLVL

SEQ ID NO: 121974 - protein, 15 aa, Homo sapiens
  CDR3 for beta chain variable domain of TCR clone 60987 (TRBV20-1, TRBJ2-7)
CSARDRVSGMDEQYF

SEQ ID NO: 121975 - protein, 12 aa, Homo sapiens
  CDR3 for alpha chain variable domain of TCR clone 60988 (TRAV23/DV6, TRAJ30)
CSASKGDDKIIF

SEQ ID NO: 121976 - protein, 18 aa, Homo sapiens
  CDR3 for beta chain variable domain of TCR clone 60988 (TRBV10-3, TRBJ2-3)
CAISESRVGPMRGDTQYF

SEQ ID NO: 121977 - protein, 14 aa, Homo sapiens
  CDR3 for alpha chain variable domain of TCR clone 60989 (TRAV1-2, TRAJ16)
CAVNRFSDGQKLLF

SEQ ID NO: 121978 - protein, 16 aa, Homo sapiens
  CDR3 for beta chain variable domain of TCR clone 60989 (TRBV11-2, TRBJ1-2)
CASSLDRGGNNYGYTF

SEQ ID NO: 121979 - protein, 11 aa, Homo sapiens
  CDR3 for alpha chain variable domain of TCR clone 60990 (TRAV12-1, TRAJ8)
CGVTGFQKLVF

SEQ ID NO: 121980 - protein, 14 aa, Homo sapiens
  CDR3 for beta chain variable domain of TCR clone 60990 (TRBV19, TRBJ2-1)
CASGKSTQYNEQFF

SEQ ID NO: 121981 - protein, 14 aa, Homo sapiens
  CDR3 for alpha chain variable domain of TCR clone 60991 (TRAV8-2, TRAJ4)
CVVSPSGGYNKLIF

SEQ ID NO: 121982 - protein, 12 aa, Homo sapiens
  CDR3 for beta chain variable domain of TCR clone 60991 (TRBV19, TRBJ1-1)
CASMNRYTEAFF

SEQ ID NO: 121983 - protein, 11 aa, Homo sapiens
  CDR3 for alpha chain variable domain of TCR clone 60992 (TRAV4, TRAJ31)
CLVGLNARLMF

SEQ ID NO: 121984 - protein, 16 aa, Homo sapiens
  CDR3 for beta chain variable domain of TCR clone 60992 (TRBV15, TRBJ2-6)
CAASVNGGFLANVLTF

SEQ ID NO: 121985 - protein, 13 aa, Homo sapiens
  CDR3 for alpha chain variable domain of TCR clone 60993 (TRAV12-3, TRAJ41)
CAIAPNSGYALNF

SEQ ID NO: 121986 - protein, 14 aa, Homo sapiens
  CDR3 for beta chain variable domain of TCR clone 60993 (TRBV7-2, TRBJ1-3)
CASSLGTAGNTIYS

SEQ ID NO: 121987 - protein, 13 aa, Homo sapiens
  CDR3 for alpha chain variable domain of TCR clone 60994 (TRAV16, TRAJ28)
CALTGAGSYQPTF

SEQ ID NO: 121988 - protein, 13 aa, Homo sapiens
  CDR3 for beta chain variable domain of TCR clone 60994 (TRBV7-3, TRBJ1-1)
CASSQDWGAEAFF

SEQ ID NO: 121989 - protein, 16 aa, Homo sapiens
  CDR3 for alpha chain variable domain of TCR clone 60995 (TRAV23/DV6, TRAJ9)
CAASIGGNTGGFKTIF

SEQ ID NO: 121990 - protein, 16 aa, Homo sapiens
  CDR3 for beta chain variable domain of TCR clone 60995 (TRBV7-9, TRBJ1-2)
CASSLGFSSGEDGYTF

SEQ ID NO: 121991 - protein, 15 aa, Homo sapiens
  CDR3 for alpha chain variable domain of TCR clone 60996 (TRAV26-1, TRAJ22)
CIVRVPNGSARQLTF

SEQ ID NO: 121992 - protein, 13 aa, Homo sapiens
  CDR3 for beta chain variable domain of TCR clone 60996 (TRBV7-9, TRBJ2-7)
CASSLTDRYEQYF

SEQ ID NO: 121993 - protein, 17 aa, Homo sapiens
  CDR3 for alpha chain variable domain of TCR clone 60997 (TRAV12-3, TRAJ6)
CALSARGGAGGSYIPTF

SEQ ID NO: 121994 - protein, 12 aa, Homo sapiens
  CDR3 for beta chain variable domain of TCR clone 60997 (TRBV12-4, TRBJ2-3)
CASSTLPDTQYF

SEQ ID NO: 121995 - protein, 15 aa, Homo sapiens
  CDR3 for alpha chain variable domain of TCR clone 60998 (TRAV8-3, TRAJ15)
CAVGAPNQAGTALIF

SEQ ID NO: 121996 - protein, 14 aa, Homo sapiens
  CDR3 for beta chain variable domain of TCR clone 60998 (TRBV20-1, TRBJ2-1)
CSPNGEASYNEQFF

SEQ ID NO: 121997 - protein, 15 aa, Homo sapiens
  CDR3 for alpha chain variable domain of TCR clone 60999 (TRAV2, TRAJ44)
CAVEAYTGTASKLTS

SEQ ID NO: 121998 - protein, 14 aa, Homo sapiens
  CDR3 for beta chain variable domain of TCR clone 60999 (TRBV11-2, TRBJ2-1)
CASSPGSRDNEQFF

SEQ ID NO: 121999 - protein, 16 aa, Homo sapiens
  CDR3 for alpha chain variable domain of TCR clone 61000 (TRAV30, TRAJ24)
CGTEIVDADSWGKFQF

SEQ ID NO: 122000 - protein, 15 aa, Homo sapiens
  CDR3 for beta chain variable domain of TCR clone 61000 (TRBV7-2, TRBJ2-1)
CASSLASGRVNEQFF

SEQ ID NO: 122001 - protein, 15 aa, Homo sapiens
  CDR3 for alpha chain variable domain of TCR clone 61001 (TRAV3, TRAJ45)
CAVRTPYGGADGLTF

SEQ ID NO: 122002 - protein, 16 aa, Homo sapiens
  CDR3 for beta chain variable domain of TCR clone 61001 (TRBV6-1, TRBJ2-2)
CASSFGQGANTGELFF

SEQ ID NO: 122003 - protein, 17 aa, Homo sapiens
  CDR3 for alpha chain variable domain of TCR clone 61002 (TRAV8-1, TRAJ43)
CAVTNDMRFGAGTRLTV

SEQ ID NO: 122004 - protein, 14 aa, Homo sapiens
  CDR3 for beta chain variable domain of TCR clone 61002 (TRBV28, TRBJ2-7)
CASSTLRGRFEQYF

SEQ ID NO: 122005 - protein, 14 aa, Homo sapiens
  CDR3 for alpha chain variable domain of TCR clone 61003 (TRAV1-1, TRAJ23)
CAVSIYNQGGKLIF

SEQ ID NO: 122006 - protein, 17 aa, Homo sapiens
  CDR3 for beta chain variable domain of TCR clone 61003 (TRBV13, TRBJ2-3)
CASSLSRVAGGRNTQYF

SEQ ID NO: 122007 - protein, 16 aa, Homo sapiens
  CDR3 for alpha chain variable domain of TCR clone 61004 (TRAV16, TRAJ4)
CALSRMFSGGYNKLIF

SEQ ID NO: 122008 - protein, 16 aa, Homo sapiens
  CDR3 for beta chain variable domain of TCR clone 61004 (TRBV24-1, TRBJ2-3)
CATSDPGKGATDTQYF

SEQ ID NO: 122009 - protein, 15 aa, Homo sapiens
  CDR3 for alpha chain variable domain of TCR clone 61005 (TRAV17, TRAJ57)
CATGPSQGGSEKLVF

SEQ ID NO: 122010 - protein, 16 aa, Homo sapiens
  CDR3 for beta chain variable domain of TCR clone 61005 (TRBV12-4, TRBJ1-5)
CASIRPVGGSNQPQHF

SEQ ID NO: 122011 - protein, 14 aa, Homo sapiens
  CDR3 for alpha chain variable domain of TCR clone 61006 (TRAV1-2, TRAJ16)
CAVNRFSDGQKLLF

SEQ ID NO: 122012 - protein, 15 aa, Homo sapiens
  CDR3 for beta chain variable domain of TCR clone 61006 (TRBV7-8, TRBJ2-1)
CASSSRLAAYNEQFF

SEQ ID NO: 122013 - protein, 14 aa, Homo sapiens
  CDR3 for alpha chain variable domain of TCR clone 61007 (TRAV29/DV5, TRAJ20)
CAATIRSNDYKLSF

SEQ ID NO: 122014 - protein, 15 aa, Homo sapiens
  CDR3 for beta chain variable domain of TCR clone 61007 (TRBV20-1, TRBJ2-1)
CSAGSAGSSYNEQFF

SEQ ID NO: 122015 - protein, 13 aa, Homo sapiens
  CDR3 for alpha chain variable domain of TCR clone 61008 (TRAV20, TRAJ54)
CAVQAGGAQKLVF

SEQ ID NO: 122016 - protein, 20 aa, Homo sapiens
  CDR3 for beta chain variable domain of TCR clone 61008 (TRBV7-8, TRBJ2-2)
CASSHLFPGPTIHITGELFF

SEQ ID NO: 122017 - protein, 11 aa, Homo sapiens
  CDR3 for alpha chain variable domain of TCR clone 61009 (TRAV2, TRAJ33)
CAVESNYQLIW

SEQ ID NO: 122018 - protein, 14 aa, Homo sapiens
  CDR3 for beta chain variable domain of TCR clone 61009 (TRBV11-2, TRBJ2-5)
CASSRTGGIETQYF

SEQ ID NO: 122019 - protein, 17 aa, Homo sapiens
  CDR3 for alpha chain variable domain of TCR clone 61010 (TRAV4, )
CLVDIQNPDPAGYQLRD

SEQ ID NO: 122020 - protein, 15 aa, Homo sapiens
  CDR3 for beta chain variable domain of TCR clone 61010 (TRBV20-1, TRBJ1-5)
CSARVGRVVSQPQHF

SEQ ID NO: 122021 - protein, 14 aa, Homo sapiens
  CDR3 for alpha chain variable domain of TCR clone 61011 (TRAV12-2, TRAJ11)
CAVNRESGYRTLTF

SEQ ID NO: 122022 - protein, 10 aa, Homo sapiens
  CDR3 for beta chain variable domain of TCR clone 61011 (TRBV20-1, TRBJ2-5)
CSARFETQYF

SEQ ID NO: 122023 - protein, 14 aa, Homo sapiens
  CDR3 for alpha chain variable domain of TCR clone 61012 (TRAV2, TRAJ9)
CAVEDRSGGFKTIF

SEQ ID NO: 122024 - protein, 14 aa, Homo sapiens
  CDR3 for beta chain variable domain of TCR clone 61012 (TRBV27, TRBJ1-2)
CASRTTGANYGYTF

SEQ ID NO: 122025 - protein, 14 aa, Homo sapiens
  CDR3 for alpha chain variable domain of TCR clone 61013 (TRAV1-2, TRAJ16)
CAVNRFSDGQKLPF

SEQ ID NO: 122026 - protein, 15 aa, Homo sapiens
  CDR3 for beta chain variable domain of TCR clone 61013 (TRBV4-2, TRBJ1-1)
CASSQQGAGDTEAFF

SEQ ID NO: 122027 - protein, 12 aa, Homo sapiens
  CDR3 for alpha chain variable domain of TCR clone 61014 (TRAV20, TRAJ33)
CAVRGSNYQLIW

SEQ ID NO: 122028 - protein, 15 aa, Homo sapiens
  CDR3 for beta chain variable domain of TCR clone 61014 (TRBV11-3, TRBJ2-3)
CAGLKDGREGDTQYF

SEQ ID NO: 122029 - protein, 16 aa, Homo sapiens
  CDR3 for alpha chain variable domain of TCR clone 61015 (TRAV21, TRAJ17)
CAVRPGEEAAGNKLTF

SEQ ID NO: 122030 - protein, 13 aa, Homo sapiens
  CDR3 for beta chain variable domain of TCR clone 61015 (TRBV7-9, TRBJ1-2)
CASSLKQNYGYTF

SEQ ID NO: 122031 - protein, 13 aa, Homo sapiens
  CDR3 for alpha chain variable domain of TCR clone 61016 (TRAV2, TRAJ21)
CAVEDLNSNKFYF

SEQ ID NO: 122032 - protein, 15 aa, Homo sapiens
  CDR3 for beta chain variable domain of TCR clone 61016 (TRBV28, TRBJ2-5)
CASSPGQGSIETQYF

SEQ ID NO: 122033 - protein, 12 aa, Homo sapiens
  CDR3 for alpha chain variable domain of TCR clone 61017 (TRAV3, TRAJ31)
CAVRDGNARLMF

SEQ ID NO: 122034 - protein, 18 aa, Homo sapiens
  CDR3 for beta chain variable domain of TCR clone 61017 (TRBV7-2, TRBJ2-3)
CASSLKREGSGITDTQYS

SEQ ID NO: 122035 - protein, 14 aa, Homo sapiens
  CDR3 for alpha chain variable domain of TCR clone 61018 (TRAV3, TRAJ9)
CAVRPNTGGFKTIF

SEQ ID NO: 122036 - protein, 15 aa, Homo sapiens
  CDR3 for beta chain variable domain of TCR clone 61018 (TRBV7-2, TRBJ2-1)
CASSLASGRVNEQFF

SEQ ID NO: 122037 - protein, 12 aa, Homo sapiens
  CDR3 for alpha chain variable domain of TCR clone 61019 (TRAV13-1, TRAJ23)
CAASKKGGKLIF

SEQ ID NO: 122038 - protein, 13 aa, Homo sapiens
  CDR3 for beta chain variable domain of TCR clone 61019 (TRBV7-9, TRBJ1-2)
CASSLKQNYGYTF

SEQ ID NO: 122039 - protein, 15 aa, Homo sapiens
  CDR3 for alpha chain variable domain of TCR clone 61020 (TRAV3, TRAJ12)
CAVRDIRDSSYKLIF

SEQ ID NO: 122040 - protein, 15 aa, Homo sapiens
  CDR3 for beta chain variable domain of TCR clone 61020 (TRBV27, TRBJ2-7)
CASSLRNEQGCEQYF

SEQ ID NO: 122041 - protein, 16 aa, Homo sapiens
  CDR3 for alpha chain variable domain of TCR clone 61021 (TRAV12-2, TRAJ32)
RAVNLGQGGATNKLIF

SEQ ID NO: 122042 - protein, 15 aa, Homo sapiens
  CDR3 for beta chain variable domain of TCR clone 61021 (TRBV20-1, TRBJ2-7)
CSARGPLAGGREQYF

SEQ ID NO: 122043 - protein, 14 aa, Homo sapiens
  CDR3 for alpha chain variable domain of TCR clone 61022 (TRAV1-2, TRAJ16)
CAVNRFSDGQKLLF

SEQ ID NO: 122044 - protein, 11 aa, Homo sapiens
  CDR3 for beta chain variable domain of TCR clone 61022 (TRBV11-2, TRBJ2-2)
CASSLPWELFF

SEQ ID NO: 122045 - protein, 14 aa, Homo sapiens
  CDR3 for alpha chain variable domain of TCR clone 61023 (TRAV1-2, TRAJ16)
CAVNRFSDGQKLPF

SEQ ID NO: 122046 - protein, 14 aa, Homo sapiens
  CDR3 for beta chain variable domain of TCR clone 61023 (TRBV18, TRBJ2-7)
CASSPRGGAYEQYF

SEQ ID NO: 122047 - protein, 14 aa, Homo sapiens
  CDR3 for alpha chain variable domain of TCR clone 61024 (TRAV12-1, TRAJ24)
CVVRSTDSWGKFQF

SEQ ID NO: 122048 - protein, 13 aa, Homo sapiens
  CDR3 for beta chain variable domain of TCR clone 61024 (TRBV2, TRBJ2-3)
CASILAGGKGQYF

SEQ ID NO: 122049 - protein, 12 aa, Homo sapiens
  CDR3 for alpha chain variable domain of TCR clone 61025 (TRAV13-1, TRAJ27)
CAAHTNAGKSTF

SEQ ID NO: 122050 - protein, 14 aa, Homo sapiens
  CDR3 for beta chain variable domain of TCR clone 61025 (TRBV12-5, TRBJ2-5)
CASGSRTRQETQYF

SEQ ID NO: 122051 - protein, 16 aa, Homo sapiens
  CDR3 for alpha chain variable domain of TCR clone 61026 (TRAV30, TRAJ24)
CGTAIVDADSWGKFQF

SEQ ID NO: 122052 - protein, 12 aa, Homo sapiens
  CDR3 for beta chain variable domain of TCR clone 61026 (TRBV11-2, TRBJ2-2)
CASSLGGGELFF

SEQ ID NO: 122053 - protein, 13 aa, Homo sapiens
  CDR3 for alpha chain variable domain of TCR clone 61027 (TRAV3, TRAJ20)
CAVRDTPRYKLSF

SEQ ID NO: 122054 - protein, 15 aa, Homo sapiens
  CDR3 for beta chain variable domain of TCR clone 61027 (TRBV6-3, TRBJ2-2)
CASSFLATLTGELFF

SEQ ID NO: 122055 - protein, 13 aa, Homo sapiens
  CDR3 for alpha chain variable domain of TCR clone 61028 (TRAV12-1, TRAJ33)
CGDAPDSNYQLIW

SEQ ID NO: 122056 - protein, 12 aa, Homo sapiens
  CDR3 for beta chain variable domain of TCR clone 61028 (TRBV11-2, TRBJ2-2)
CASSRGGGELFF

SEQ ID NO: 122057 - protein, 15 aa, Homo sapiens
  CDR3 for alpha chain variable domain of TCR clone 61029 (TRAV3, TRAJ9)
CAVRARDTGGFKTIF

SEQ ID NO: 122058 - protein, 12 aa, Homo sapiens
  CDR3 for beta chain variable domain of TCR clone 61029 (TRBV11-2, TRBJ2-7)
CASSLPTYEQYF

SEQ ID NO: 122059 - protein, 14 aa, Homo sapiens
  CDR3 for alpha chain variable domain of TCR clone 61030 (TRAV16, TRAJ17)
CALSGRAAGNKPTF

SEQ ID NO: 122060 - protein, 15 aa, Homo sapiens
  CDR3 for beta chain variable domain of TCR clone 61030 (TRBV3-1, TRBJ1-2)
CASSPTRLPEGGYTF

SEQ ID NO: 122061 - protein, 13 aa, Homo sapiens
  CDR3 for alpha chain variable domain of TCR clone 61031 (TRAV12-3, TRAJ40)
CAMSARGTYKYIF

SEQ ID NO: 122062 - protein, 12 aa, Homo sapiens
  CDR3 for beta chain variable domain of TCR clone 61031 (TRBV7-8, TRBJ2-7)
CASSLGDREQYF

SEQ ID NO: 122063 - protein, 14 aa, Homo sapiens
  CDR3 for alpha chain variable domain of TCR clone 61032 (TRAV8-4, TRAJ8)
CAVSLNTGSQKLVF

SEQ ID NO: 122064 - protein, 13 aa, Homo sapiens
  CDR3 for beta chain variable domain of TCR clone 61032 (TRBV7-9, TRBJ2-3)
CASSPGSTDTQYF

SEQ ID NO: 122065 - protein, 15 aa, Homo sapiens
  CDR3 for alpha chain variable domain of TCR clone 61033 (TRAV21, TRAJ52)
CAVRGGGTSYGKLTF

SEQ ID NO: 122066 - protein, 15 aa, Homo sapiens
  CDR3 for beta chain variable domain of TCR clone 61033 (TRBV18, TRBJ1-5)
CTSSPSDRSNQPQHF

SEQ ID NO: 122067 - protein, 10 aa, Homo sapiens
  CDR3 for alpha chain variable domain of TCR clone 61034 (TRAV23/DV6, TRAJ43)
CAAAVAALEP

SEQ ID NO: 122068 - protein, 13 aa, Homo sapiens
  CDR3 for beta chain variable domain of TCR clone 61034 (TRBV12-4, TRBJ1-2)
CASSLRQGKGYTF

SEQ ID NO: 122069 - protein, 17 aa, Homo sapiens
  CDR3 for alpha chain variable domain of TCR clone 61035 (TRAV26-1, TRAJ46)
IASSESEKKSSGDKLTF

SEQ ID NO: 122070 - protein, 14 aa, Homo sapiens
  CDR3 for beta chain variable domain of TCR clone 61035 (TRBV19, TRBJ2-1)
CASPTFVLSGEQFF

SEQ ID NO: 122071 - protein, 16 aa, Homo sapiens
  CDR3 for alpha chain variable domain of TCR clone 61036 (TRAV26-1, TRAJ37)
YIVRGDGSGNTGKLIF

SEQ ID NO: 122072 - protein, 17 aa, Homo sapiens
  CDR3 for beta chain variable domain of TCR clone 61036 (TRBV4-1, TRBJ2-7)
CASSRDPLGVRGGEQYF

SEQ ID NO: 122073 - protein, 17 aa, Homo sapiens
  CDR3 for alpha chain variable domain of TCR clone 61037 (TRAV26-1, TRAJ46)
IASSESEKKSSGDKLTF

SEQ ID NO: 122074 - protein, 15 aa, Homo sapiens
  CDR3 for beta chain variable domain of TCR clone 61037 (TRBV27, TRBJ2-2)
CQQFSGTSSHRGAVF

SEQ ID NO: 122075 - protein, 15 aa, Homo sapiens
  CDR3 for alpha chain variable domain of TCR clone 61038 (TRAV21, TRAJ52)
CAVRGGGTSYGKLTF

SEQ ID NO: 122076 - protein, 16 aa, Homo sapiens
  CDR3 for beta chain variable domain of TCR clone 61038 (TRBV20-1, TRBJ1-4)
CSAPGQGLLTNEKLFF

SEQ ID NO: 122077 - protein, 12 aa, Homo sapiens
  CDR3 for alpha chain variable domain of TCR clone 61039 (TRAV21, TRAJ3)
CCFYSSASNIIF

SEQ ID NO: 122078 - protein, 16 aa, Homo sapiens
  CDR3 for beta chain variable domain of TCR clone 61039 (TRBV19, TRBJ2-1)
CASSKAGPSSYNEQFF

SEQ ID NO: 122079 - protein, 11 aa, Homo sapiens
  CDR3 for alpha chain variable domain of TCR clone 61040 (TRAV2, TRAJ13)
CASGGYRKVTF

SEQ ID NO: 122080 - protein, 13 aa, Homo sapiens
  CDR3 for beta chain variable domain of TCR clone 61040 (TRBV10-3, TRBJ1-2)
CAISERDSYGYTF

SEQ ID NO: 122081 - protein, 18 aa, Homo sapiens
  CDR3 for alpha chain variable domain of TCR clone 61041 (TRAV26-2, TRAJ45)
CILRVDKYSRGGADGLTF

SEQ ID NO: 122082 - protein, 17 aa, Homo sapiens
  CDR3 for beta chain variable domain of TCR clone 61041 (TRBV25-1, TRBJ2-1)
CASSAYGQGRGVYEQFF

SEQ ID NO: 122083 - protein, 11 aa, Homo sapiens
  CDR3 for alpha chain variable domain of TCR clone 61042 (TRAV21, TRAJ34)
CAHYNTDKLIF

SEQ ID NO: 122084 - protein, 15 aa, Homo sapiens
  CDR3 for beta chain variable domain of TCR clone 61042 (TRBV4-2, TRBJ1-2)
CASSRSGDSIYGYTF

SEQ ID NO: 122085 - protein, 16 aa, Homo sapiens
  CDR3 for alpha chain variable domain of TCR clone 61043 (TRAV3, TRAJ3)
CAVRDRTKSSASKIIF

SEQ ID NO: 122086 - protein, 16 aa, Homo sapiens
  CDR3 for beta chain variable domain of TCR clone 61043 (TRBV20-1, TRBJ2-4)
CSATSLAELAKNIQYF

SEQ ID NO: 122087 - protein, 12 aa, Homo sapiens
  CDR3 for alpha chain variable domain of TCR clone 61044 (TRAV21, TRAJ23)
CAVMLQGGKLIF

SEQ ID NO: 122088 - protein, 13 aa, Homo sapiens
  CDR3 for beta chain variable domain of TCR clone 61044 (TRBV13, TRBJ2-7)
CASSSGLTHEQYF

SEQ ID NO: 122089 - protein, 14 aa, Homo sapiens
  CDR3 for alpha chain variable domain of TCR clone 61045 (TRAV12-1, TRAJ17)
CVVNPKAAGNKLTF

SEQ ID NO: 122090 - protein, 14 aa, Homo sapiens
  CDR3 for beta chain variable domain of TCR clone 61045 (TRBV7-8, TRBJ2-7)
CASSPGLADYEQYF

SEQ ID NO: 122091 - protein, 15 aa, Homo sapiens
  CDR3 for alpha chain variable domain of TCR clone 61046 (TRAV20, TRAJ53)
CAVQASGGSNYKLTF

SEQ ID NO: 122092 - protein, 16 aa, Homo sapiens
  CDR3 for beta chain variable domain of TCR clone 61046 (TRBV7-3, TRBJ2-2)
CASSLKRGTLSGELFF

SEQ ID NO: 122093 - protein, 14 aa, Homo sapiens
  CDR3 for alpha chain variable domain of TCR clone 61047 (TRAV38-1, TRAJ45)
CAYYSGGGADGLTF

SEQ ID NO: 122094 - protein, 20 aa, Homo sapiens
  CDR3 for beta chain variable domain of TCR clone 61047 (TRBV28, TRBJ2-1)
CASTPIGRSPGQAGGNEQFF

SEQ ID NO: 122095 - protein, 11 aa, Homo sapiens
  CDR3 for alpha chain variable domain of TCR clone 61048 (TRAV12-1, TRAJ21)
CVVYNFNKFYF

SEQ ID NO: 122096 - protein, 14 aa, Homo sapiens
  CDR3 for beta chain variable domain of TCR clone 61048 (TRBV7-2, TRBJ1-1)
CASSFLTGTTEAFF

SEQ ID NO: 122097 - protein, 15 aa, Homo sapiens
  CDR3 for alpha chain variable domain of TCR clone 61049 (TRAV2, TRAJ15)
CAVEDRGQAGTALIF

SEQ ID NO: 122098 - protein, 13 aa, Homo sapiens
  CDR3 for beta chain variable domain of TCR clone 61049 (TRBV10-2, TRBJ2-7)
CASGANGGYEQYF

SEQ ID NO: 122099 - protein, 16 aa, Homo sapiens
  CDR3 for alpha chain variable domain of TCR clone 61050 (TRAV3, TRAJ10)
CAVRDMRAGGGNKLTF

SEQ ID NO: 122100 - protein, 15 aa, Homo sapiens
  CDR3 for beta chain variable domain of TCR clone 61050 (TRBV7-2, TRBJ2-1)
CASTHGTGIYNEQFF

SEQ ID NO: 122101 - protein, 15 aa, Homo sapiens
  CDR3 for alpha chain variable domain of TCR clone 61051 (TRAV23/DV6, TRAJ18)
CAARYRGSALGRLYF

SEQ ID NO: 122102 - protein, 15 aa, Homo sapiens
  CDR3 for beta chain variable domain of TCR clone 61051 (TRBV7-8, TRBJ2-1)
CASSLADSLYNEQFF

SEQ ID NO: 122103 - protein, 12 aa, Homo sapiens
  CDR3 for alpha chain variable domain of TCR clone 61052 (TRAV13-1, TRAJ27)
CAAHTNAGKSTF

SEQ ID NO: 122104 - protein, 14 aa, Homo sapiens
  CDR3 for beta chain variable domain of TCR clone 61052 (TRBV19, TRBJ2-2)
YASSGQGIAGELFF

SEQ ID NO: 122105 - protein, 12 aa, Homo sapiens
  CDR3 for alpha chain variable domain of TCR clone 61053 (TRAV16, TRAJ56)
CAPTGANSKLTF

SEQ ID NO: 122106 - protein, 17 aa, Homo sapiens
  CDR3 for beta chain variable domain of TCR clone 61053 (TRBV11-2, TRBJ2-1)
CASSLYPPGVEYNEQFF

SEQ ID NO: 122107 - protein, 15 aa, Homo sapiens
  CDR3 for alpha chain variable domain of TCR clone 61054 (TRAV25, TRAJ53)
CAATGGGGSNYKMTF

SEQ ID NO: 122108 - protein, 19 aa, Homo sapiens
  CDR3 for beta chain variable domain of TCR clone 61054 (TRBV7-2, TRBJ2-3)
CASSFLSRNWGGGTDTQYF

SEQ ID NO: 122109 - protein, 17 aa, Homo sapiens
  CDR3 for alpha chain variable domain of TCR clone 61055 (TRAV3, TRAJ38)
CAVRDCLNAGNNRKLIW

SEQ ID NO: 122110 - protein, 13 aa, Homo sapiens
  CDR3 for beta chain variable domain of TCR clone 61055 (TRBV29-1, TRBJ1-3)
CSVEGGSGNTIYF

SEQ ID NO: 122111 - protein, 14 aa, Homo sapiens
  CDR3 for alpha chain variable domain of TCR clone 61056 (TRAV12-2, TRAJ40)
CAVKIPSGTYKYIF

SEQ ID NO: 122112 - protein, 14 aa, Homo sapiens
  CDR3 for beta chain variable domain of TCR clone 61056 (TRBV7-6, TRBJ2-3)
CASSVAGGTDTQYF

SEQ ID NO: 122113 - protein, 13 aa, Homo sapiens
  CDR3 for alpha chain variable domain of TCR clone 61057 (TRAV21, TRAJ45)
CAVMGGGADGLTF

SEQ ID NO: 122114 - protein, 14 aa, Homo sapiens
  CDR3 for beta chain variable domain of TCR clone 61057 (TRBV4-3, TRBJ1-4)
CASSPLQRNERLFF

SEQ ID NO: 122115 - protein, 16 aa, Homo sapiens
  CDR3 for alpha chain variable domain of TCR clone 61058 (TRAV3, TRAJ37)
CAVRGKGSGNTGKLIF

SEQ ID NO: 122116 - protein, 17 aa, Homo sapiens
  CDR3 for beta chain variable domain of TCR clone 61058 (TRBV7-9, TRBJ1-1)
CASSLSGFRTMNTEAFF

SEQ ID NO: 122117 - protein, 12 aa, Homo sapiens
  CDR3 for alpha chain variable domain of TCR clone 61059 (TRAV27, TRAJ9)
CAGESGGFKTIF

SEQ ID NO: 122118 - protein, 15 aa, Homo sapiens
  CDR3 for beta chain variable domain of TCR clone 61059 (TRBV7-9, TRBJ2-2)
CASGPLDTFPGELFF

SEQ ID NO: 122119 - protein, 17 aa, Homo sapiens
  CDR3 for alpha chain variable domain of TCR clone 61060 (TRAV3, TRAJ6)
CAVRDGPRAGGSYIPRF

SEQ ID NO: 122120 - protein, 14 aa, Homo sapiens
  CDR3 for beta chain variable domain of TCR clone 61060 (TRBV7-2, TRBJ2-7)
CASSPKTSFYEQYF

SEQ ID NO: 122121 - protein, 12 aa, Homo sapiens
  CDR3 for alpha chain variable domain of TCR clone 61061 (TRAV17, TRAJ57)
CATDGGSENLVF

SEQ ID NO: 122122 - protein, 13 aa, Homo sapiens
  CDR3 for beta chain variable domain of TCR clone 61061 (TRBV7-9, TRBJ2-7)
CASSFAGAYEQYF

SEQ ID NO: 122123 - protein, 13 aa, Homo sapiens
  CDR3 for alpha chain variable domain of TCR clone 61062 (TRAV16, TRAJ29)
CALSRRVNTPLVF

SEQ ID NO: 122124 - protein, 15 aa, Homo sapiens
  CDR3 for beta chain variable domain of TCR clone 61062 (TRBV4-1, TRBJ2-3)
CASSRGQGIPDTQYF

SEQ ID NO: 122125 - protein, 14 aa, Homo sapiens
  CDR3 for alpha chain variable domain of TCR clone 61063 (TRAV2, TRAJ9)
CAVDPNPGGFKTIF

SEQ ID NO: 122126 - protein, 13 aa, Homo sapiens
  CDR3 for beta chain variable domain of TCR clone 61063 (TRBV20-1, TRBJ2-1)
CSASTGTSNEQFF

SEQ ID NO: 122127 - protein, 11 aa, Homo sapiens
  CDR3 for alpha chain variable domain of TCR clone 61064 (TRAV21, TRAJ34)
CAVTNTDKLIF

SEQ ID NO: 122128 - protein, 16 aa, Homo sapiens
  CDR3 for beta chain variable domain of TCR clone 61064 (TRBV2, TRBJ2-7)
CASRKGSLGLVYEQYF

SEQ ID NO: 122129 - protein, 14 aa, Homo sapiens
  CDR3 for alpha chain variable domain of TCR clone 61065 (TRAV8-1, TRAJ5)
CAVRTDTGRRALTF

SEQ ID NO: 122130 - protein, 12 aa, Homo sapiens
  CDR3 for beta chain variable domain of TCR clone 61065 (TRBV12-5, TRBJ2-3)
CASQASTDTQYF

SEQ ID NO: 122131 - protein, 14 aa, Homo sapiens
  CDR3 for alpha chain variable domain of TCR clone 61066 (TRAV12-2, TRAJ40)
CAVKIPSGTYKYTF

SEQ ID NO: 122132 - protein, 17 aa, Homo sapiens
  CDR3 for beta chain variable domain of TCR clone 61066 (TRBV11-2, TRBJ2-1)
CASSLYPPGVEYNEQFF

SEQ ID NO: 122133 - protein, 12 aa, Homo sapiens
  CDR3 for alpha chain variable domain of TCR clone 61067 (TRAV26-2, TRAJ21)
CILKGNFNKFYF

SEQ ID NO: 122134 - protein, 14 aa, Homo sapiens
  CDR3 for beta chain variable domain of TCR clone 61067 (TRBV7-9, TRBJ1-1)
CASTPLKSYTEAFF

SEQ ID NO: 122135 - protein, 14 aa, Homo sapiens
  CDR3 for alpha chain variable domain of TCR clone 61068 (TRAV12-2, TRAJ13)
CAVKKTGGYQKVTF

SEQ ID NO: 122136 - protein, 15 aa, Homo sapiens
  CDR3 for beta chain variable domain of TCR clone 61068 (TRBV6-3, TRBJ2-2)
CANSFLATLTGELFF

SEQ ID NO: 122137 - protein, 16 aa, Homo sapiens
  CDR3 for alpha chain variable domain of TCR clone 61069 (TRAV30, TRAJ24)
CGTEIVDADSWGKFQF

SEQ ID NO: 122138 - protein, 13 aa, Homo sapiens
  CDR3 for beta chain variable domain of TCR clone 61069 (TRBV12-5, TRBJ2-5)
SSGSRTHQETQYF

SEQ ID NO: 122139 - protein, 15 aa, Homo sapiens
  CDR3 for alpha chain variable domain of TCR clone 61070 (TRAV4, TRAJ39)
CLVGPNNNAGNMLTF

SEQ ID NO: 122140 - protein, 13 aa, Homo sapiens
  CDR3 for beta chain variable domain of TCR clone 61070 (TRBV20-1, TRBJ1-1)
CSARGGGNTEAFF

SEQ ID NO: 122141 - protein, 13 aa, Homo sapiens
  CDR3 for alpha chain variable domain of TCR clone 61071 (TRAV12-1, TRAJ26)
CVVRRNYGQNFVF

SEQ ID NO: 122142 - protein, 16 aa, Homo sapiens
  CDR3 for beta chain variable domain of TCR clone 61071 (TRBV12-5, TRBJ2-5)
CASGPRTSGNQETQYF

SEQ ID NO: 122143 - protein, 14 aa, Homo sapiens
  CDR3 for alpha chain variable domain of TCR clone 61072 (TRAV27, TRAJ15)
CAVFDNQAGTALIF

SEQ ID NO: 122144 - protein, 11 aa, Homo sapiens
  CDR3 for beta chain variable domain of TCR clone 61072 (TRBV29-1, TRBJ1-1)
CSVEVGTRTFF

SEQ ID NO: 122145 - protein, 14 aa, Homo sapiens
  CDR3 for alpha chain variable domain of TCR clone 61073 (TRAV9-2, TRAJ20)
CALRDPLNDYKLSF

SEQ ID NO: 122146 - protein, 13 aa, Homo sapiens
  CDR3 for beta chain variable domain of TCR clone 61073 (TRBV7-2, TRBJ2-2)
CASSLAVTGELFF

SEQ ID NO: 122147 - protein, 16 aa, Homo sapiens
  CDR3 for alpha chain variable domain of TCR clone 61074 (TRAV12-3, TRAJ58)
CAMTDTEETSGSRLTF

SEQ ID NO: 122148 - protein, 22 aa, Homo sapiens
  CDR3 for beta chain variable domain of TCR clone 61074 (TRBV23-1, TRBJ2-7)
CASSRRMDSGQGYVGGGYEQYF

SEQ ID NO: 122149 - protein, 14 aa, Homo sapiens
  CDR3 for alpha chain variable domain of TCR clone 61075 (TRAV1-2, TRAJ16)
CAVNRFSDGQKLLF

SEQ ID NO: 122150 - protein, 14 aa, Homo sapiens
  CDR3 for beta chain variable domain of TCR clone 61075 (TRBV18, TRBJ2-3)
CASSGLADTDTQYF

SEQ ID NO: 122151 - protein, 14 aa, Homo sapiens
  CDR3 for alpha chain variable domain of TCR clone 61076 (TRAV35, TRAJ50)
CAGHRKTSYDKVIF

SEQ ID NO: 122152 - protein, 13 aa, Homo sapiens
  CDR3 for beta chain variable domain of TCR clone 61076 (TRBV7-9, TRBJ1-2)
CASSLKQNYGYTF

SEQ ID NO: 122153 - protein, 16 aa, Homo sapiens
  CDR3 for alpha chain variable domain of TCR clone 61077 (TRAV26-1, )
CIDIQNPDPAVYQLRD

SEQ ID NO: 122154 - protein, 19 aa, Homo sapiens
  CDR3 for beta chain variable domain of TCR clone 61077 (TRBV19, TRBJ2-5)
CASSIGQATDFFLGETQYF

SEQ ID NO: 122155 - protein, 14 aa, Homo sapiens
  CDR3 for alpha chain variable domain of TCR clone 61078 (TRAV1-2, TRAJ15)
CAVRDRQAGTALIF

SEQ ID NO: 122156 - protein, 11 aa, Homo sapiens
  CDR3 for beta chain variable domain of TCR clone 61078 (TRBV11-2, TRBJ2-2)
CASSLPGELFF

SEQ ID NO: 122157 - protein, 13 aa, Homo sapiens
  CDR3 for alpha chain variable domain of TCR clone 61079 (TRAV36/DV7, TRAJ37)
CAVFSSNTGKLIF

SEQ ID NO: 122158 - protein, 15 aa, Homo sapiens
  CDR3 for beta chain variable domain of TCR clone 61079 (TRBV5-1, TRBJ2-2)
CASSSQGGSTGELFF

SEQ ID NO: 122159 - protein, 14 aa, Homo sapiens
  CDR3 for alpha chain variable domain of TCR clone 61080 (TRAV12-2, TRAJ13)
CAVKKTGGYQKVTF

SEQ ID NO: 122160 - protein, 16 aa, Homo sapiens
  CDR3 for beta chain variable domain of TCR clone 61080 (TRBV20-1, TRBJ1-4)
CSARPYGGELNEKLFF

SEQ ID NO: 122161 - protein, 12 aa, Homo sapiens
  CDR3 for alpha chain variable domain of TCR clone 61081 (TRAV8-2, TRAJ5)
CVVSGIGRALTF

SEQ ID NO: 122162 - protein, 14 aa, Homo sapiens
  CDR3 for beta chain variable domain of TCR clone 61081 (TRBV19, TRBJ2-7)
CASNFRDTFTGMYF

SEQ ID NO: 122163 - protein, 14 aa, Homo sapiens
  CDR3 for alpha chain variable domain of TCR clone 61082 (TRAV2, TRAJ22)
CAVGRGGSARQLTF

SEQ ID NO: 122164 - protein, 14 aa, Homo sapiens
  CDR3 for beta chain variable domain of TCR clone 61082 (TRBV19, TRBJ2-1)
CASPTFILSGEQFF

SEQ ID NO: 122165 - protein, 13 aa, Homo sapiens
  CDR3 for alpha chain variable domain of TCR clone 61083 (TRAV29/DV5, TRAJ13)
CAARPGGYQKVTF

SEQ ID NO: 122166 - protein, 14 aa, Homo sapiens
  CDR3 for beta chain variable domain of TCR clone 61083 (TRBV7-6, TRBJ2-3)
CASSLGTVTDTQYF

SEQ ID NO: 122167 - protein, 14 aa, Homo sapiens
  CDR3 for alpha chain variable domain of TCR clone 61084 (TRAV27, TRAJ22)
CAGLPSGSARQLTF

SEQ ID NO: 122168 - protein, 16 aa, Homo sapiens
  CDR3 for beta chain variable domain of TCR clone 61084 (TRBV19, TRBJ2-3)
CASSFYTTGIGDTQYF

SEQ ID NO: 122169 - protein, 13 aa, Homo sapiens
  CDR3 for alpha chain variable domain of TCR clone 61085 (TRAV27, TRAJ6)
CAGGTRGSYIPTF

SEQ ID NO: 122170 - protein, 16 aa, Homo sapiens
  CDR3 for beta chain variable domain of TCR clone 61085 (TRBV20-1, TRBJ1-4)
CSAPGQGLLTNEKLFF

SEQ ID NO: 122171 - protein, 14 aa, Homo sapiens
  CDR3 for alpha chain variable domain of TCR clone 61086 (TRAV12-3, TRAJ56)
CAMSVTGANSKLTF

SEQ ID NO: 122172 - protein, 14 aa, Homo sapiens
  CDR3 for beta chain variable domain of TCR clone 61086 (TRBV5-4, TRBJ1-1)
CASSLDSRRDEAFF

SEQ ID NO: 122173 - protein, 13 aa, Homo sapiens
  CDR3 for alpha chain variable domain of TCR clone 61087 (TRAV20, TRAJ37)
CAGCTSNTGKLIF

SEQ ID NO: 122174 - protein, 11 aa, Homo sapiens
  CDR3 for beta chain variable domain of TCR clone 61087 (TRBV12-4, TRBJ2-3)
CASTATDTQYF

SEQ ID NO: 122175 - protein, 11 aa, Homo sapiens
  CDR3 for alpha chain variable domain of TCR clone 61088 (TRAV12-1, TRAJ30)
CVVNGQDKIIF

SEQ ID NO: 122176 - protein, 17 aa, Homo sapiens
  CDR3 for beta chain variable domain of TCR clone 61088 (TRBV19, TRBJ1-1)
CASSIAGRGLINTEAFF

SEQ ID NO: 122177 - protein, 16 aa, Homo sapiens
  CDR3 for alpha chain variable domain of TCR clone 61089 (TRAV12-3, TRAJ53)
CAMSPGSGGSNYKLTF

SEQ ID NO: 122178 - protein, 11 aa, Homo sapiens
  CDR3 for beta chain variable domain of TCR clone 61089 (TRBV19, TRBJ1-1)
CASSIGSEAFF

SEQ ID NO: 122179 - protein, 13 aa, Homo sapiens
  CDR3 for alpha chain variable domain of TCR clone 61090 (TRAV13-1, TRAJ21)
CAASIYNFNKFYF

SEQ ID NO: 122180 - protein, 17 aa, Homo sapiens
  CDR3 for beta chain variable domain of TCR clone 61090 (TRBV28, TRBJ2-2)
CASSFVAGGLYGGELFF

SEQ ID NO: 122181 - protein, 12 aa, Homo sapiens
  CDR3 for alpha chain variable domain of TCR clone 61091 (TRAV12-3, TRAJ17)
CAVTLTGNKLTF

SEQ ID NO: 122182 - protein, 15 aa, Homo sapiens
  CDR3 for beta chain variable domain of TCR clone 61091 (TRBV20-1, TRBJ2-7)
CSARDRVSGMDERYF

SEQ ID NO: 122183 - protein, 14 aa, Homo sapiens
  CDR3 for alpha chain variable domain of TCR clone 61092 (TRAV8-4, TRAJ9)
CAVRINTGGFKTIF

SEQ ID NO: 122184 - protein, 15 aa, Homo sapiens
  CDR3 for beta chain variable domain of TCR clone 61092 (TRBV10-2, TRBJ2-6)
CASSEQGTGAKVLTF

SEQ ID NO: 122185 - protein, 11 aa, Homo sapiens
  CDR3 for alpha chain variable domain of TCR clone 61093 (TRAV21, TRAJ34)
CAHYNTDKLIF

SEQ ID NO: 122186 - protein, 20 aa, Homo sapiens
  CDR3 for beta chain variable domain of TCR clone 61093 (TRBV28, TRBJ2-1)
CASTPIGRSPGLAGGNEQFF

SEQ ID NO: 122187 - protein, 14 aa, Homo sapiens
  CDR3 for alpha chain variable domain of TCR clone 61094 (TRAV1-2, TRAJ8)
CAVGEDTGFQKLVF

SEQ ID NO: 122188 - protein, 13 aa, Homo sapiens
  CDR3 for beta chain variable domain of TCR clone 61094 (TRBV12-4, TRBJ2-5)
CASSPGTEETQYF

SEQ ID NO: 122189 - protein, 16 aa, Homo sapiens
  CDR3 for alpha chain variable domain of TCR clone 61095 (TRAV38-1, TRAJ37)
CAFKGDCSSNTGKLIF

SEQ ID NO: 122190 - protein, 13 aa, Homo sapiens
  CDR3 for beta chain variable domain of TCR clone 61095 (TRBV12-4, TRBJ2-5)
CASSLFRRETQYF

SEQ ID NO: 122191 - protein, 17 aa, Homo sapiens
  CDR3 for alpha chain variable domain of TCR clone 61096 (TRAV3, TRAJ38)
CAVRDCLNAGNNRKLIW

SEQ ID NO: 122192 - protein, 13 aa, Homo sapiens
  CDR3 for beta chain variable domain of TCR clone 61096 (TRBV27, TRBJ2-1)
CTSRTLGVGEQFF

SEQ ID NO: 122193 - protein, 10 aa, Homo sapiens
  CDR3 for alpha chain variable domain of TCR clone 61097 (TRAV1-2, TRAJ31)
CVSEDARLMF

SEQ ID NO: 122194 - protein, 14 aa, Homo sapiens
  CDR3 for beta chain variable domain of TCR clone 61097 (TRBV19, TRBJ2-1)
CASPTFVSSGEQFF

SEQ ID NO: 122195 - protein, 15 aa, Homo sapiens
  CDR3 for alpha chain variable domain of TCR clone 61098 (TRAV12-2, TRAJ43)
CAFDMRFGAGTRLTV

SEQ ID NO: 122196 - protein, 14 aa, Homo sapiens
  CDR3 for beta chain variable domain of TCR clone 61098 (TRBV11-2, TRBJ2-1)
CASSPGSRDNEQFF

SEQ ID NO: 122197 - protein, 12 aa, Homo sapiens
  CDR3 for alpha chain variable domain of TCR clone 61099 (TRAV30, TRAJ39)
CGRGNAGNMLTF

SEQ ID NO: 122198 - protein, 17 aa, Homo sapiens
  CDR3 for beta chain variable domain of TCR clone 61099 (TRBV13, TRBJ2-3)
CASSLSRVAGGRNTQYF

SEQ ID NO: 122199 - protein, 15 aa, Homo sapiens
  CDR3 for alpha chain variable domain of TCR clone 61100 (TRAV13-1, TRAJ49)
CAASTAGNTGNQFYF

SEQ ID NO: 122200 - protein, 12 aa, Homo sapiens
  CDR3 for beta chain variable domain of TCR clone 61100 (TRBV11-2, TRBJ2-2)
CASSLGGGELFF

SEQ ID NO: 122201 - protein, 15 aa, Homo sapiens
  CDR3 for alpha chain variable domain of TCR clone 61101 (TRAV21, TRAJ53)
CATLNSGGSNYKLTF

SEQ ID NO: 122202 - protein, 17 aa, Homo sapiens
  CDR3 for beta chain variable domain of TCR clone 61101 (TRBV7-8, TRBJ2-6)
CASSAGTGGAGANVLTS

SEQ ID NO: 122203 - protein, 15 aa, Homo sapiens
  CDR3 for alpha chain variable domain of TCR clone 61102 (TRAV3, TRAJ5)
CAVRDRKTGRRALTF

SEQ ID NO: 122204 - protein, 15 aa, Homo sapiens
  CDR3 for beta chain variable domain of TCR clone 61102 (TRBV7-8, TRBJ2-1)
CASSLADSLYNEQFI

SEQ ID NO: 122205 - protein, 13 aa, Homo sapiens
  CDR3 for alpha chain variable domain of TCR clone 61103 (TRAV12-3, TRAJ7)
CAMSASGNNRHAF

SEQ ID NO: 122206 - protein, 14 aa, Homo sapiens
  CDR3 for beta chain variable domain of TCR clone 61103 (TRBV13, TRBJ2-5)
CASSLGPRGETQYF

SEQ ID NO: 122207 - protein, 14 aa, Homo sapiens
  CDR3 for alpha chain variable domain of TCR clone 61104 (TRAV12-1, TRAJ17)
CVVNYKAAGNKLTF

SEQ ID NO: 122208 - protein, 15 aa, Homo sapiens
  CDR3 for beta chain variable domain of TCR clone 61104 (TRBV7-2, TRBJ2-1)
CTSTHGTGIYNEQFF

SEQ ID NO: 122209 - protein, 15 aa, Homo sapiens
  CDR3 for alpha chain variable domain of TCR clone 61105 (TRAV8-3, TRAJ45)
CASSYSGGGADGLTF

SEQ ID NO: 122210 - protein, 13 aa, Homo sapiens
  CDR3 for beta chain variable domain of TCR clone 61105 (TRBV2, TRBJ2-5)
CASGTPYQETQYF

SEQ ID NO: 122211 - protein, 13 aa, Homo sapiens
  CDR3 for alpha chain variable domain of TCR clone 61106 (TRAV3, TRAJ21)
CAVREPDFNKFYF

SEQ ID NO: 122212 - protein, 15 aa, Homo sapiens
  CDR3 for beta chain variable domain of TCR clone 61106 (TRBV5-1, TRBJ2-7)
CASSLDLTSSYEQYF

SEQ ID NO: 122213 - protein, 11 aa, Homo sapiens
  CDR3 for alpha chain variable domain of TCR clone 61107 (TRAV12-3, TRAJ27)
CAMANAGKSTF

SEQ ID NO: 122214 - protein, 13 aa, Homo sapiens
  CDR3 for beta chain variable domain of TCR clone 61107 (TRBV20-1, TRBJ1-1)
CSARVGGNTDAFF

SEQ ID NO: 122215 - protein, 14 aa, Homo sapiens
  CDR3 for alpha chain variable domain of TCR clone 61108 (TRAV1-2, TRAJ16)
CAVNRFSDGQKLLF

SEQ ID NO: 122216 - protein, 13 aa, Homo sapiens
  CDR3 for beta chain variable domain of TCR clone 61108 (TRBV19, TRBJ1-2)
CASSVAGQDGYTF

SEQ ID NO: 122217 - protein, 16 aa, Homo sapiens
  CDR3 for alpha chain variable domain of TCR clone 61109 (TRAV23/DV6, TRAJ9)
CAASIGGNTGGFKTIF

SEQ ID NO: 122218 - protein, 18 aa, Homo sapiens
  CDR3 for beta chain variable domain of TCR clone 61109 (TRBV7-9, TRBJ2-7)
CASSLTASGSRTWYEQYF

SEQ ID NO: 122219 - protein, 13 aa, Homo sapiens
  CDR3 for alpha chain variable domain of TCR clone 61110 (TRAV3, TRAJ15)
CAVRDQAGTALIF

SEQ ID NO: 122220 - protein, 16 aa, Homo sapiens
  CDR3 for beta chain variable domain of TCR clone 61110 (TRBV7-3, TRBJ2-2)
CASSLKRGTLSGELFF

SEQ ID NO: 122221 - protein, 14 aa, Homo sapiens
  CDR3 for alpha chain variable domain of TCR clone 61111 (TRAV1-2, TRAJ16)
CAVNRFSDGQKLLF

SEQ ID NO: 122222 - protein, 15 aa, Homo sapiens
  CDR3 for beta chain variable domain of TCR clone 61111 (TRBV20-1, TRBJ2-1)
CSASSAGSSYNEQFF

SEQ ID NO: 122223 - protein, 15 aa, Homo sapiens
  CDR3 for alpha chain variable domain of TCR clone 61112 (TRAV14/DV4, TRAJ26)
CAMREGQNYGQNFVF

SEQ ID NO: 122224 - protein, 14 aa, Homo sapiens
  CDR3 for beta chain variable domain of TCR clone 61112 (TRBV7-2, TRBJ2-7)
CASRSQGAAYEQYF

SEQ ID NO: 122225 - protein, 15 aa, Homo sapiens
  CDR3 for alpha chain variable domain of TCR clone 61113 (TRAV26-1, TRAJ48)
CIARWSWFGNEKLTF

SEQ ID NO: 122226 - protein, 12 aa, Homo sapiens
  CDR3 for beta chain variable domain of TCR clone 61113 (TRBV19, TRBJ2-5)
CARSISEETQYF

SEQ ID NO: 122227 - protein, 15 aa, Homo sapiens
  CDR3 for alpha chain variable domain of TCR clone 61114 (TRAV27, TRAJ38)
CAARRNAGNNRKLIR

SEQ ID NO: 122228 - protein, 13 aa, Homo sapiens
  CDR3 for beta chain variable domain of TCR clone 61114 (TRBV12-5, TRBJ2-3)
CASGDRQSDTQYF

SEQ ID NO: 122229 - protein, 11 aa, Homo sapiens
  CDR3 for alpha chain variable domain of TCR clone 61115 (TRAV12-1, TRAJ30)
CVVNGQDKIIF

SEQ ID NO: 122230 - protein, 15 aa, Homo sapiens
  CDR3 for beta chain variable domain of TCR clone 61115 (TRBV28, TRBJ2-5)
CSSSSGRTIQETQYF

SEQ ID NO: 122231 - protein, 13 aa, Homo sapiens
  CDR3 for alpha chain variable domain of TCR clone 61116 (TRAV12-2, TRAJ39)
CAVNINAGNMLTF

SEQ ID NO: 122232 - protein, 13 aa, Homo sapiens
  CDR3 for beta chain variable domain of TCR clone 61116 (TRBV2, TRBJ1-5)
CATAGPGNQPQHF

SEQ ID NO: 122233 - protein, 17 aa, Homo sapiens
  CDR3 for alpha chain variable domain of TCR clone 61117 (TRAV13-1, TRAJ52)
CAAGRNAGGTSYGKLTF

SEQ ID NO: 122234 - protein, 16 aa, Homo sapiens
  CDR3 for beta chain variable domain of TCR clone 61117 (TRBV24-1, TRBJ2-3)
CATSDRRQDLTDTQYF

SEQ ID NO: 122235 - protein, 14 aa, Homo sapiens
  CDR3 for alpha chain variable domain of TCR clone 61118 (TRAV16, TRAJ33)
CALSAMYSNYQLIW

SEQ ID NO: 122236 - protein, 12 aa, Homo sapiens
  CDR3 for beta chain variable domain of TCR clone 61118 (TRBV5-1, TRBJ1-2)
CASSQDTYGYTF

SEQ ID NO: 122237 - protein, 14 aa, Homo sapiens
  CDR3 for alpha chain variable domain of TCR clone 61119 (TRAV12-2, TRAJ17)
CAVLFKAAGNKLTF

SEQ ID NO: 122238 - protein, 15 aa, Homo sapiens
  CDR3 for beta chain variable domain of TCR clone 61119 (TRBV11-2, TRBJ2-2)
CASSSDRVNAGELFF

SEQ ID NO: 122239 - protein, 12 aa, Homo sapiens
  CDR3 for alpha chain variable domain of TCR clone 61120 (TRAV12-2, TRAJ4)
GWPEGGDNKLIF

SEQ ID NO: 122240 - protein, 16 aa, Homo sapiens
  CDR3 for beta chain variable domain of TCR clone 61120 (TRBV6-1, TRBJ2-5)
CASSETLDRGAETQYF

SEQ ID NO: 122241 - protein, 13 aa, Homo sapiens
  CDR3 for alpha chain variable domain of TCR clone 61121 (TRAV36/DV7, TRAJ49)
CAGDSNTGNQFYF

SEQ ID NO: 122242 - protein, 12 aa, Homo sapiens
  CDR3 for beta chain variable domain of TCR clone 61121 (TRBV11-2, TRBJ2-2)
CASSLGGGDLFF

SEQ ID NO: 122243 - protein, 14 aa, Homo sapiens
  CDR3 for alpha chain variable domain of TCR clone 61122 (TRAV12-3, TRAJ22)
CAMSLFGSTRQLTF

SEQ ID NO: 122244 - protein, 11 aa, Homo sapiens
  CDR3 for beta chain variable domain of TCR clone 61122 (TRBV12-4, TRBJ2-2)
CASSSAGELFF

SEQ ID NO: 122245 - protein, 11 aa, Homo sapiens
  CDR3 for alpha chain variable domain of TCR clone 61123 (TRAV8-3, TRAJ49)
CAVNTGNQIYF

SEQ ID NO: 122246 - protein, 12 aa, Homo sapiens
  CDR3 for beta chain variable domain of TCR clone 61123 (TRBV11-2, TRBJ2-7)
CASSPPADEQYF

SEQ ID NO: 122247 - protein, 13 aa, Homo sapiens
  CDR3 for alpha chain variable domain of TCR clone 61124 (TRAV8-1, TRAJ9)
CAVNSVGGFKTIF

SEQ ID NO: 122248 - protein, 15 aa, Homo sapiens
  CDR3 for beta chain variable domain of TCR clone 61124 (TRBV11-2, TRBJ2-3)
CASSGREGLTDTQYF

SEQ ID NO: 122249 - protein, 10 aa, Homo sapiens
  CDR3 for alpha chain variable domain of TCR clone 61125 (TRAV23/DV6, TRAJ9)
GASKYWRLQN

SEQ ID NO: 122250 - protein, 14 aa, Homo sapiens
  CDR3 for beta chain variable domain of TCR clone 61125 (TRBV6-1, TRBJ2-7)
CASTRTGDYYEQYF

SEQ ID NO: 122251 - protein, 14 aa, Homo sapiens
  CDR3 for alpha chain variable domain of TCR clone 61126 (TRAV17, TRAJ6)
CATDASGGSSIPTF

SEQ ID NO: 122252 - protein, 19 aa, Homo sapiens
  CDR3 for beta chain variable domain of TCR clone 61126 (TRBV4-3, TRBJ2-7)
CASSQEFIGWQVTPYEQYF

SEQ ID NO: 122253 - protein, 13 aa, Homo sapiens
  CDR3 for alpha chain variable domain of TCR clone 61127 (TRAV8-6, TRAJ49)
CAVITNTGNQFHF

SEQ ID NO: 122254 - protein, 14 aa, Homo sapiens
  CDR3 for beta chain variable domain of TCR clone 61127 (TRBV7-2, TRBJ2-7)
CASRSQGAAYEQYF

SEQ ID NO: 122255 - protein, 13 aa, Homo sapiens
  CDR3 for alpha chain variable domain of TCR clone 61128 (TRAV13-1, TRAJ39)
CSKYSNAGNMLTF

SEQ ID NO: 122256 - protein, 12 aa, Homo sapiens
  CDR3 for beta chain variable domain of TCR clone 61128 (TRBV11-2, TRBJ2-2)
CASSLGGGELFF

SEQ ID NO: 122257 - protein, 14 aa, Homo sapiens
  CDR3 for alpha chain variable domain of TCR clone 61129 (TRAV12-3, TRAJ58)
CALSTETSGSRLTF

SEQ ID NO: 122258 - protein, 13 aa, Homo sapiens
  CDR3 for beta chain variable domain of TCR clone 61129 (TRBV27, TRBJ2-3)
CASSWGRTDTQYF

SEQ ID NO: 122259 - protein, 18 aa, Homo sapiens
  CDR3 for alpha chain variable domain of TCR clone 61130 (TRAV26-1, TRAJ23)
CIVRVGLEVWNQGGKLIF

SEQ ID NO: 122260 - protein, 15 aa, Homo sapiens
  CDR3 for beta chain variable domain of TCR clone 61130 (TRBV10-3, TRBJ2-3)
RAISDWDRDTDTQYF

SEQ ID NO: 122261 - protein, 14 aa, Homo sapiens
  CDR3 for alpha chain variable domain of TCR clone 61131 (TRAV12-2, TRAJ40)
CAVKIPSGTYKYIF

SEQ ID NO: 122262 - protein, 14 aa, Homo sapiens
  CDR3 for beta chain variable domain of TCR clone 61131 (TRBV20-1, TRBJ1-1)
CSAQSRIGGTEAFF

SEQ ID NO: 122263 - protein, 13 aa, Homo sapiens
  CDR3 for alpha chain variable domain of TCR clone 61132 (TRAV3, TRAJ21)
CAVRDPDFNKFYF

SEQ ID NO: 122264 - protein, 15 aa, Homo sapiens
  CDR3 for beta chain variable domain of TCR clone 61132 (TRBV2, TRBJ2-1)
CASSELAGGYNEQFF

SEQ ID NO: 122265 - protein, 11 aa, Homo sapiens
  CDR3 for alpha chain variable domain of TCR clone 61133 (TRAV12-1, TRAJ43)
CAEYDNNDMRF

SEQ ID NO: 122266 - protein, 16 aa, Homo sapiens
  CDR3 for beta chain variable domain of TCR clone 61133 (TRBV5-4, TRBJ2-1)
CASSLVGSGQDNEQFF

SEQ ID NO: 122267 - protein, 15 aa, Homo sapiens
  CDR3 for alpha chain variable domain of TCR clone 61134 (TRAV26-1, TRAJ23)
CIVRVLNNQGGKLNF

SEQ ID NO: 122268 - protein, 15 aa, Homo sapiens
  CDR3 for beta chain variable domain of TCR clone 61134 (TRBV7-3, TRBJ2-1)
CASSFGQSNYNEQFF

SEQ ID NO: 122269 - protein, 15 aa, Homo sapiens
  CDR3 for alpha chain variable domain of TCR clone 61135 (TRAV12-3, TRAJ6)
CAMSATSGGSYIPTF

SEQ ID NO: 122270 - protein, 11 aa, Homo sapiens
  CDR3 for beta chain variable domain of TCR clone 61135 (TRBV20-1, TRBJ1-5)
CSAQGDKPQHF

SEQ ID NO: 122271 - protein, 16 aa, Homo sapiens
  CDR3 for alpha chain variable domain of TCR clone 61136 (TRAV30, TRAJ24)
CGTEIVDADSWGKFQF

SEQ ID NO: 122272 - protein, 13 aa, Homo sapiens
  CDR3 for beta chain variable domain of TCR clone 61136 (TRBV11-2, TRBJ2-7)
CASSGTRPYEQYF

SEQ ID NO: 122273 - protein, 14 aa, Homo sapiens
  CDR3 for alpha chain variable domain of TCR clone 61137 (TRAV12-2, TRAJ13)
CAVKKTGGYQKVTF

SEQ ID NO: 122274 - protein, 17 aa, Homo sapiens
  CDR3 for beta chain variable domain of TCR clone 61137 (TRBV13, TRBJ2-3)
CASSLPRVAGGRNTQYF

SEQ ID NO: 122275 - protein, 15 aa, Homo sapiens
  CDR3 for alpha chain variable domain of TCR clone 61138 (TRAV1-2, TRAJ35)
CAVRDPGGFGNVLHF

SEQ ID NO: 122276 - protein, 14 aa, Homo sapiens
  CDR3 for beta chain variable domain of TCR clone 61138 (TRBV5-1, TRBJ2-1)
CASSLDDRFDEQFF

SEQ ID NO: 122277 - protein, 17 aa, Homo sapiens
  CDR3 for alpha chain variable domain of TCR clone 61139 (TRAV3, TRAJ38)
CAVGDCLNADNNRKLIW

SEQ ID NO: 122278 - protein, 14 aa, Homo sapiens
  CDR3 for beta chain variable domain of TCR clone 61139 (TRBV5-5, TRBJ1-5)
CASSGQGVDQPQHF

SEQ ID NO: 122279 - protein, 12 aa, Homo sapiens
  CDR3 for alpha chain variable domain of TCR clone 61140 (TRAV27, TRAJ21)
CAGVRQLQQILL

SEQ ID NO: 122280 - protein, 16 aa, Homo sapiens
  CDR3 for beta chain variable domain of TCR clone 61140 (TRBV7-9, TRBJ1-4)
CASSLEGQSEKLFLAV

SEQ ID NO: 122281 - protein, 11 aa, Homo sapiens
  CDR3 for alpha chain variable domain of TCR clone 61141 (TRAV35, TRAJ30)
CAGPGDDKITF

SEQ ID NO: 122282 - protein, 14 aa, Homo sapiens
  CDR3 for beta chain variable domain of TCR clone 61141 (TRBV7-6, TRBJ1-6)
CASSQAGGGSPLHF

SEQ ID NO: 122283 - protein, 15 aa, Homo sapiens
  CDR3 for alpha chain variable domain of TCR clone 61142 (TRAV38-1, TRAJ57)
CAFMDYQGGSEKLVF

SEQ ID NO: 122284 - protein, 16 aa, Homo sapiens
  CDR3 for beta chain variable domain of TCR clone 61142 (TRBV10-3, TRBJ2-1)
CAIRGGGRGDYNEQFF

SEQ ID NO: 122285 - protein, 10 aa, Homo sapiens
  CDR3 for alpha chain variable domain of TCR clone 61143 (TRAV1-2, TRAJ18)
CAVRGEAQPW

SEQ ID NO: 122286 - protein, 19 aa, Homo sapiens
  CDR3 for beta chain variable domain of TCR clone 61143 (TRBV6-3, TRBJ1-2)
CASSYSKGRTGPPNYGYTL

SEQ ID NO: 122287 - protein, 16 aa, Homo sapiens
  CDR3 for alpha chain variable domain of TCR clone 61144 (TRAV22, TRAJ45)
CAVERGKRGGADGLPF

SEQ ID NO: 122288 - protein, 13 aa, Homo sapiens
  CDR3 for beta chain variable domain of TCR clone 61144 (TRBV27, TRBJ1-1)
CASSLSIGAEAFF

SEQ ID NO: 122289 - protein, 14 aa, Homo sapiens
  CDR3 for alpha chain variable domain of TCR clone 61145 (TRAV13-2, TRAJ32)
CAESLGGATNKLIF

SEQ ID NO: 122290 - protein, 14 aa, Homo sapiens
  CDR3 for beta chain variable domain of TCR clone 61145 (TRBV25-1, TRBJ1-1)
CASTHLGGNTEAFF

SEQ ID NO: 122291 - protein, 17 aa, Homo sapiens
  CDR3 for alpha chain variable domain of TCR clone 61146 (TRAV13-1, TRAJ28)
CAASPPYSGAGRYQLTF

SEQ ID NO: 122292 - protein, 19 aa, Homo sapiens
  CDR3 for beta chain variable domain of TCR clone 61146 (TRBV25-1, TRBJ2-2)
CAILVYRVDRGRKTGELFF

SEQ ID NO: 122293 - protein, 12 aa, Homo sapiens
  CDR3 for alpha chain variable domain of TCR clone 61147 (TRAV21, TRAJ33)
CAKMDSNYQLIW

SEQ ID NO: 122294 - protein, 15 aa, Homo sapiens
  CDR3 for beta chain variable domain of TCR clone 61147 (TRBV19, TRBJ1-1)
CASTSGQIQNTEAFF

SEQ ID NO: 122295 - protein, 17 aa, Homo sapiens
  CDR3 for alpha chain variable domain of TCR clone 61148 (TRAV3, TRAJ6)
CAVRDGPRAGGSYRPTF

SEQ ID NO: 122296 - protein, 15 aa, Homo sapiens
  CDR3 for beta chain variable domain of TCR clone 61148 (TRBV11-3, TRBJ2-7)
CASSPGPASSYEQYF

SEQ ID NO: 122297 - protein, 12 aa, Homo sapiens
  CDR3 for alpha chain variable domain of TCR clone 61149 (TRAV13-1, TRAJ21)
CAAKEGFNKFYF

SEQ ID NO: 122298 - protein, 16 aa, Homo sapiens
  CDR3 for beta chain variable domain of TCR clone 61149 (TRBV20-1, TRBJ1-4)
CSAPGQGLLTNEKLFF

SEQ ID NO: 122299 - protein, 11 aa, Homo sapiens
  CDR3 for alpha chain variable domain of TCR clone 61150 (TRAV13-1, TRAJ30)
CAASRNDKIIF

SEQ ID NO: 122300 - protein, 15 aa, Homo sapiens
  CDR3 for beta chain variable domain of TCR clone 61150 (TRBV18, TRBJ1-1)
CASSPSSWVNTEAFF

SEQ ID NO: 122301 - protein, 16 aa, Homo sapiens
  CDR3 for alpha chain variable domain of TCR clone 61151 (TRAV26-1, TRAJ37)
CIVRGDGSGNTGKLIS

SEQ ID NO: 122302 - protein, 17 aa, Homo sapiens
  CDR3 for beta chain variable domain of TCR clone 61151 (TRBV4-1, TRBJ2-7)
CASSRDPLGVRGGEQYF

SEQ ID NO: 122303 - protein, 13 aa, Homo sapiens
  CDR3 for alpha chain variable domain of TCR clone 61152 (TRAV20, TRAJ40)
YAVPFSGTYKYIF

SEQ ID NO: 122304 - protein, 13 aa, Homo sapiens
  CDR3 for beta chain variable domain of TCR clone 61152 (TRBV15, TRBJ2-5)
CATSQIGEETQYF

SEQ ID NO: 122305 - protein, 16 aa, Homo sapiens
  CDR3 for alpha chain variable domain of TCR clone 61153 (TRAV30, TRAJ24)
CGKEIVDADSWGKFQF

SEQ ID NO: 122306 - protein, 15 aa, Homo sapiens
  CDR3 for beta chain variable domain of TCR clone 61153 (TRBV4-3, TRBJ1-5)
CASSQEAVGGQPQHF

SEQ ID NO: 122307 - protein, 13 aa, Homo sapiens
  CDR3 for alpha chain variable domain of TCR clone 61154 (TRAV35, TRAJ37)
CAGSSGNTGKLIF

SEQ ID NO: 122308 - protein, 16 aa, Homo sapiens
  CDR3 for beta chain variable domain of TCR clone 61154 (TRBV10-3, TRBJ2-1)
CAISSTSGNSYNEQFF

SEQ ID NO: 122309 - protein, 12 aa, Homo sapiens
  CDR3 for alpha chain variable domain of TCR clone 61155 (TRAV36/DV7, TRAJ54)
CAVVRGAQELVF

SEQ ID NO: 122310 - protein, 13 aa, Homo sapiens
  CDR3 for beta chain variable domain of TCR clone 61155 (TRBV20-1, TRBJ1-1)
CSARGGGNTEAFF

SEQ ID NO: 122311 - protein, 16 aa, Homo sapiens
  CDR3 for alpha chain variable domain of TCR clone 61156 (TRAV3, TRAJ18)
CAVRDGRGSTLGRLYF

SEQ ID NO: 122312 - protein, 15 aa, Homo sapiens
  CDR3 for beta chain variable domain of TCR clone 61156 (TRBV7-9, TRBJ1-6)
CASSSLGRGNSPLHF

SEQ ID NO: 122313 - protein, 13 aa, Homo sapiens
  CDR3 for alpha chain variable domain of TCR clone 61157 (TRAV8-3, TRAJ44)
CAVVPGTASKLTF

SEQ ID NO: 122314 - protein, 13 aa, Homo sapiens
  CDR3 for beta chain variable domain of TCR clone 61157 (TRBV7-9, TRBJ1-2)
CASSLKQNYGYTF

SEQ ID NO: 122315 - protein, 12 aa, Homo sapiens
  CDR3 for alpha chain variable domain of TCR clone 61158 (TRAV25, TRAJ30)
CAGKNRDDKIIF

SEQ ID NO: 122316 - protein, 11 aa, Homo sapiens
  CDR3 for beta chain variable domain of TCR clone 61158 (TRBV12-4, TRBJ2-7)
CATPEKGEQCF

SEQ ID NO: 122317 - protein, 13 aa, Homo sapiens
  CDR3 for alpha chain variable domain of TCR clone 61159 (TRAV2, TRAJ40)
CAVVTSGPYKYIF

SEQ ID NO: 122318 - protein, 15 aa, Homo sapiens
  CDR3 for beta chain variable domain of TCR clone 61159 (TRBV11-3, TRBJ2-3)
CASLKDGREGDTQYF

SEQ ID NO: 122319 - protein, 13 aa, Homo sapiens
  CDR3 for alpha chain variable domain of TCR clone 61160 (TRAV2, TRAJ40)
CAVVTSGTYKYIF

SEQ ID NO: 122320 - protein, 12 aa, Homo sapiens
  CDR3 for beta chain variable domain of TCR clone 61160 (TRBV11-3, TRBJ1-1)
CASSHRQGEAFF

SEQ ID NO: 122321 - protein, 12 aa, Homo sapiens
  CDR3 for alpha chain variable domain of TCR clone 61161 (TRAV12-3, TRAJ17)
CAMTLTGNKLTF

SEQ ID NO: 122322 - protein, 12 aa, Homo sapiens
  CDR3 for beta chain variable domain of TCR clone 61161 (TRBV2, TRBJ2-1)
CASGPPGNEQFF

SEQ ID NO: 122323 - protein, 16 aa, Homo sapiens
  CDR3 for alpha chain variable domain of TCR clone 61162 (TRAV3, TRAJ37)
CAVRVRGSGNTGKLIF

SEQ ID NO: 122324 - protein, 15 aa, Homo sapiens
  CDR3 for beta chain variable domain of TCR clone 61162 (TRBV9, TRBJ1-6)
CASSVAGTWDSPLHF

SEQ ID NO: 122325 - protein, 13 aa, Homo sapiens
  CDR3 for alpha chain variable domain of TCR clone 61163 (TRAV3, TRAJ21)
CAVREPDFNKFYF

SEQ ID NO: 122326 - protein, 18 aa, Homo sapiens
  CDR3 for beta chain variable domain of TCR clone 61163 (TRBV7-9, TRBJ2-7)
CASSLTTSGSRTWYEQYF

SEQ ID NO: 122327 - protein, 14 aa, Homo sapiens
  CDR3 for alpha chain variable domain of TCR clone 61164 (TRAV2, TRAJ29)
CAVTPPSGNIPLVF

SEQ ID NO: 122328 - protein, 13 aa, Homo sapiens
  CDR3 for beta chain variable domain of TCR clone 61164 (TRBV11-2, TRBJ2-1)
CASSLGLAGGRFF

SEQ ID NO: 122329 - protein, 12 aa, Homo sapiens
  CDR3 for alpha chain variable domain of TCR clone 61165 (TRAV10, TRAJ43)
CVVVRVGNDMRF

SEQ ID NO: 122330 - protein, 15 aa, Homo sapiens
  CDR3 for beta chain variable domain of TCR clone 61165 (TRBV20-1, TRBJ2-7)
CSARDRVSGMDEQYF

SEQ ID NO: 122331 - protein, 12 aa, Homo sapiens
  CDR3 for alpha chain variable domain of TCR clone 61166 (TRAV17, TRAJ4)
FATDGGYNKLIF

SEQ ID NO: 122332 - protein, 13 aa, Homo sapiens
  CDR3 for beta chain variable domain of TCR clone 61166 (TRBV29-1, TRBJ2-2)
CSTTGVNTGELFF

SEQ ID NO: 122333 - protein, 14 aa, Homo sapiens
  CDR3 for alpha chain variable domain of TCR clone 61167 (TRAV2, TRAJ37)
CAVDFTSNTGKLIF

SEQ ID NO: 122334 - protein, 13 aa, Homo sapiens
  CDR3 for beta chain variable domain of TCR clone 61167 (TRBV11-2, TRBJ2-1)
CASSSEAYNEQFF

SEQ ID NO: 122335 - protein, 13 aa, Homo sapiens
  CDR3 for alpha chain variable domain of TCR clone 61168 (TRAV3, TRAJ26)
CAVSRGYGQNFVF

SEQ ID NO: 122336 - protein, 15 aa, Homo sapiens
  CDR3 for beta chain variable domain of TCR clone 61168 (TRBV6-5, TRBJ2-2)
CASSSWIGGTGELFF

SEQ ID NO: 122337 - protein, 13 aa, Homo sapiens
  CDR3 for alpha chain variable domain of TCR clone 61169 (TRAV9-2, TRAJ53)
CALSGGSNYKLTF

SEQ ID NO: 122338 - protein, 17 aa, Homo sapiens
  CDR3 for beta chain variable domain of TCR clone 61169 (TRBV11-2, TRBJ2-1)
CASSLYPPGVEYNGQFF

SEQ ID NO: 122339 - protein, 17 aa, Homo sapiens
  CDR3 for alpha chain variable domain of TCR clone 61170 (TRAV21, TRAJ10)
CAVRVYILTGGGNKLTF

SEQ ID NO: 122340 - protein, 16 aa, Homo sapiens
  CDR3 for beta chain variable domain of TCR clone 61170 (TRBV20-1, TRBJ1-2)
CSASMGQGVANYGYTF

SEQ ID NO: 122341 - protein, 16 aa, Homo sapiens
  CDR3 for alpha chain variable domain of TCR clone 61171 (TRAV8-3, TRAJ48)
CAVGLIYNFGNEKLTF

SEQ ID NO: 122342 - protein, 13 aa, Homo sapiens
  CDR3 for beta chain variable domain of TCR clone 61171 (TRBV20-1, TRBJ1-5)
CSASWGRSQPQHF

SEQ ID NO: 122343 - protein, 12 aa, Homo sapiens
  CDR3 for alpha chain variable domain of TCR clone 61172 (TRAV2, TRAJ32)
CAVGGATNKLIF

SEQ ID NO: 122344 - protein, 15 aa, Homo sapiens
  CDR3 for beta chain variable domain of TCR clone 61172 (TRBV7-8, TRBJ2-1)
CASSSRTSREDEQFF

SEQ ID NO: 122345 - protein, 14 aa, Homo sapiens
  CDR3 for alpha chain variable domain of TCR clone 61173 (TRAV26-1, TRAJ39)
CIVRGSRAGNMLTF

SEQ ID NO: 122346 - protein, 15 aa, Homo sapiens
  CDR3 for beta chain variable domain of TCR clone 61173 (TRBV7-9, TRBJ1-5)
CASSQGHQPNQPKHF

SEQ ID NO: 122347 - protein, 16 aa, Homo sapiens
  CDR3 for alpha chain variable domain of TCR clone 61174 (TRAV30, TRAJ24)
CGKEIVDADSWGKFQF

SEQ ID NO: 122348 - protein, 15 aa, Homo sapiens
  CDR3 for beta chain variable domain of TCR clone 61174 (TRBV18, TRBJ2-1)
CASLPDRGRDNEQFF

SEQ ID NO: 122349 - protein, 18 aa, Homo sapiens
  CDR3 for alpha chain variable domain of TCR clone 61175 (TRAV26-2, TRAJ45)
CILRVDKYSGGGADGLTF

SEQ ID NO: 122350 - protein, 16 aa, Homo sapiens
  CDR3 for beta chain variable domain of TCR clone 61175 (TRBV2, TRBJ1-4)
CASNLLQGATNEKLFS

SEQ ID NO: 122351 - protein, 12 aa, Homo sapiens
  CDR3 for alpha chain variable domain of TCR clone 61176 (TRAV1-1, TRAJ30)
CAVRGRDDKIIF

SEQ ID NO: 122352 - protein, 14 aa, Homo sapiens
  CDR3 for beta chain variable domain of TCR clone 61176 (TRBV6-1, TRBJ1-3)
CTSVQGGGGNTIYF

SEQ ID NO: 122353 - protein, 15 aa, Homo sapiens
  CDR3 for alpha chain variable domain of TCR clone 61177 (TRAV17, TRAJ57)
CATRPSQGGSEKLVF

SEQ ID NO: 122354 - protein, 16 aa, Homo sapiens
  CDR3 for beta chain variable domain of TCR clone 61177 (TRBV12-4, TRBJ1-5)
CASSRPVGGSNQPQHF

SEQ ID NO: 122355 - protein, 14 aa, Homo sapiens
  CDR3 for alpha chain variable domain of TCR clone 61178 (TRAV17, TRAJ34)
CATDSLEGTDKLIF

SEQ ID NO: 122356 - protein, 13 aa, Homo sapiens
  CDR3 for beta chain variable domain of TCR clone 61178 (TRBV7-3, TRBJ1-1)
CASSQDWGAEAFF

SEQ ID NO: 122357 - protein, 14 aa, Homo sapiens
  CDR3 for alpha chain variable domain of TCR clone 61179 (TRAV38-1, TRAJ29)
CASITPSGNTPLVF

SEQ ID NO: 122358 - protein, 14 aa, Homo sapiens
  CDR3 for beta chain variable domain of TCR clone 61179 (TRBV18, TRBJ2-7)
CASSPRGGAYEQYF

SEQ ID NO: 122359 - protein, 16 aa, Homo sapiens
  CDR3 for alpha chain variable domain of TCR clone 61180 (TRAV21, TRAJ52)
CAVTSAGGTSYGKLTF

SEQ ID NO: 122360 - protein, 11 aa, Homo sapiens
  CDR3 for beta chain variable domain of TCR clone 61180 (TRBV2, TRBJ1-1)
CASREGTEAFF

SEQ ID NO: 122361 - protein, 11 aa, Homo sapiens
  CDR3 for alpha chain variable domain of TCR clone 61181 (TRAV21, TRAJ11)
CAVNGYSTLTF

SEQ ID NO: 122362 - protein, 11 aa, Homo sapiens
  CDR3 for beta chain variable domain of TCR clone 61181 (TRBV19, TRBJ1-1)
CACSIGSEAFF

SEQ ID NO: 122363 - protein, 16 aa, Homo sapiens
  CDR3 for alpha chain variable domain of TCR clone 61182 (TRAV12-3, TRAJ53)
CAMSPGSGGSNYKLTF

SEQ ID NO: 122364 - protein, 11 aa, Homo sapiens
  CDR3 for beta chain variable domain of TCR clone 61182 (TRBV29-1, TRBJ2-5)
CSEDRTGTQYS

SEQ ID NO: 122365 - protein, 15 aa, Homo sapiens
  CDR3 for alpha chain variable domain of TCR clone 61183 (TRAV26-1, TRAJ17)
CIVSSFRAAGNKLTF

SEQ ID NO: 122366 - protein, 11 aa, Homo sapiens
  CDR3 for beta chain variable domain of TCR clone 61183 (TRBV10-3, TRBJ2-7)
CAISEGLEQYF

SEQ ID NO: 122367 - protein, 13 aa, Homo sapiens
  CDR3 for alpha chain variable domain of TCR clone 61184 (TRAV30, TRAJ49)
CGTEPNTGNQVYF

SEQ ID NO: 122368 - protein, 14 aa, Homo sapiens
  CDR3 for beta chain variable domain of TCR clone 61184 (TRBV29-1, TRBJ2-1)
CSVEFRGIPFEQFF

SEQ ID NO: 122369 - protein, 14 aa, Homo sapiens
  CDR3 for alpha chain variable domain of TCR clone 61185 (TRAV13-1, TRAJ20)
CAARPGSNDYKLSF

SEQ ID NO: 122370 - protein, 13 aa, Homo sapiens
  CDR3 for beta chain variable domain of TCR clone 61185 (TRBV7-9, TRBJ1-2)
CASSLKQNYGYTF

SEQ ID NO: 122371 - protein, 11 aa, Homo sapiens
  CDR3 for alpha chain variable domain of TCR clone 61186 (TRAV13-1, TRAJ39)
CASHAGNMLTF

SEQ ID NO: 122372 - protein, 16 aa, Homo sapiens
  CDR3 for beta chain variable domain of TCR clone 61186 (TRBV7-3, TRBJ2-2)
CASSLKRGTLSGELFF

SEQ ID NO: 122373 - protein, 11 aa, Homo sapiens
  CDR3 for alpha chain variable domain of TCR clone 61187 (TRAV3, TRAJ21)
CAVGNFNKFYF

SEQ ID NO: 122374 - protein, 14 aa, Homo sapiens
  CDR3 for beta chain variable domain of TCR clone 61187 (TRBV11-2, TRBJ1-5)
CASSLDRGRQPQHF

SEQ ID NO: 122375 - protein, 15 aa, Homo sapiens
  CDR3 for alpha chain variable domain of TCR clone 61188 (TRAV8-3, TRAJ15)
CAVGAPNQAGTTLIF

SEQ ID NO: 122376 - protein, 14 aa, Homo sapiens
  CDR3 for beta chain variable domain of TCR clone 61188 (TRBV20-1, TRBJ2-1)
CSPNDEASYNEQFF

SEQ ID NO: 122377 - protein, 15 aa, Homo sapiens
  CDR3 for alpha chain variable domain of TCR clone 61189 (TRAV13-2, TRAJ13)
CAERPGGYQKVTLEL

SEQ ID NO: 122378 - protein, 15 aa, Homo sapiens
  CDR3 for beta chain variable domain of TCR clone 61189 (TRBV11-3, TRBJ2-7)
CASSPGPASSYEQYF

SEQ ID NO: 122379 - protein, 13 aa, Homo sapiens
  CDR3 for alpha chain variable domain of TCR clone 61190 (TRAV16, TRAJ39)
CALKDNAGNMLTF

SEQ ID NO: 122380 - protein, 14 aa, Homo sapiens
  CDR3 for beta chain variable domain of TCR clone 61190 (TRBV18, TRBJ2-7)
CASSPRGGAYEQYF

SEQ ID NO: 122381 - protein, 14 aa, Homo sapiens
  CDR3 for alpha chain variable domain of TCR clone 61191 (TRAV4, TRAJ43)
CLVGPMYNNNDMRF

SEQ ID NO: 122382 - protein, 13 aa, Homo sapiens
  CDR3 for beta chain variable domain of TCR clone 61191 (TRBV29-1, TRBJ2-1)
CSVEGGRVNEQFF

SEQ ID NO: 122383 - protein, 14 aa, Homo sapiens
  CDR3 for alpha chain variable domain of TCR clone 61192 (TRAV16, TRAJ33)
CALSATDSNYQLIW

SEQ ID NO: 122384 - protein, 12 aa, Homo sapiens
  CDR3 for beta chain variable domain of TCR clone 61192 (TRBV5-1, TRBJ1-2)
CASSQDTYGYTF

SEQ ID NO: 122385 - protein, 14 aa, Homo sapiens
  CDR3 for alpha chain variable domain of TCR clone 61193 (TRAV1-2, TRAJ8)
CAVREDTGFQKLVF

SEQ ID NO: 122386 - protein, 16 aa, Homo sapiens
  CDR3 for beta chain variable domain of TCR clone 61193 (TRBV12-4, TRBJ2-7)
CASSPEGQGSSYEQYF

SEQ ID NO: 122387 - protein, 11 aa, Homo sapiens
  CDR3 for alpha chain variable domain of TCR clone 61194 (TRAV8-4, TRAJ34)
CAVSWTDKLIF

SEQ ID NO: 122388 - protein, 15 aa, Homo sapiens
  CDR3 for beta chain variable domain of TCR clone 61194 (TRBV28, TRBJ2-5)
CASSPPWSYQETQYF

SEQ ID NO: 122389 - protein, 18 aa, Homo sapiens
  CDR3 for alpha chain variable domain of TCR clone 61195 (TRAV21, TRAJ52)
WAVRPSPAGGTSYGKLTF

SEQ ID NO: 122390 - protein, 13 aa, Homo sapiens
  CDR3 for beta chain variable domain of TCR clone 61195 (TRBV7-3, TRBJ1-1)
CASSQDWGAEAFF

SEQ ID NO: 122391 - protein, 12 aa, Homo sapiens
  CDR3 for alpha chain variable domain of TCR clone 61196 (TRAV12-1, TRAJ40)
CVVYSGTYKYIF

SEQ ID NO: 122392 - protein, 18 aa, Homo sapiens
  CDR3 for beta chain variable domain of TCR clone 61196 (TRBV11-2, TRBJ2-3)
CASSLGGASRGAPNTQYV

SEQ ID NO: 122393 - protein, 13 aa, Homo sapiens
  CDR3 for alpha chain variable domain of TCR clone 61197 (TRAV3, TRAJ36)
CAVRGTGANNLFF

SEQ ID NO: 122394 - protein, 15 aa, Homo sapiens
  CDR3 for beta chain variable domain of TCR clone 61197 (TRBV24-1, TRBJ2-1)
CATSGSGGFYNEQFF

SEQ ID NO: 122395 - protein, 14 aa, Homo sapiens
  CDR3 for alpha chain variable domain of TCR clone 61198 (TRAV1-2, TRAJ8)
CAVREDTGFQKLVF

SEQ ID NO: 122396 - protein, 14 aa, Homo sapiens
  CDR3 for beta chain variable domain of TCR clone 61198 (TRBV7-6, TRBJ2-3)
FASSLGTVTDTQYF

SEQ ID NO: 122397 - protein, 17 aa, Homo sapiens
  CDR3 for alpha chain variable domain of TCR clone 61199 (TRAV26-1, TRAJ46)
IASSESEKKSSGDKLTF

SEQ ID NO: 122398 - protein, 11 aa, Homo sapiens
  CDR3 for beta chain variable domain of TCR clone 61199 (TRBV5-6, TRBJ2-5)
CASSLERTQYF

SEQ ID NO: 122399 - protein, 12 aa, Homo sapiens
  CDR3 for alpha chain variable domain of TCR clone 61200 (TRAV12-1, TRAJ23)
CVVNIPGGRLIF

SEQ ID NO: 122400 - protein, 15 aa, Homo sapiens
  CDR3 for beta chain variable domain of TCR clone 61200 (TRBV7-2, TRBJ2-7)
CASSLVSSGSYEQYF

SEQ ID NO: 122401 - protein, 14 aa, Homo sapiens
  CDR3 for alpha chain variable domain of TCR clone 61201 (TRAV12-2, TRAJ13)
CAVKKTGGYQKVTF

SEQ ID NO: 122402 - protein, 14 aa, Homo sapiens
  CDR3 for beta chain variable domain of TCR clone 61201 (TRBV7-9, TRBJ2-1)
CASSSRDSLYEQFF

SEQ ID NO: 122403 - protein, 12 aa, Homo sapiens
  CDR3 for alpha chain variable domain of TCR clone 61202 (TRAV13-1, TRAJ48)
CAANFGNEKLTS

SEQ ID NO: 122404 - protein, 13 aa, Homo sapiens
  CDR3 for beta chain variable domain of TCR clone 61202 (TRBV27, TRBJ1-1)
CASSLSIGAEAFF

SEQ ID NO: 122405 - protein, 12 aa, Homo sapiens
  CDR3 for alpha chain variable domain of TCR clone 61203 (TRAV8-3, TRAJ26)
CAGDNYGQNFVF

SEQ ID NO: 122406 - protein, 18 aa, Homo sapiens
  CDR3 for beta chain variable domain of TCR clone 61203 (TRBV27, TRBJ2-1)
CASGNRAVGVGSKNEQFF

SEQ ID NO: 122407 - protein, 16 aa, Homo sapiens
  CDR3 for alpha chain variable domain of TCR clone 61204 (TRAV3, TRAJ37)
CAVRGEGSGNTGKLIF

SEQ ID NO: 122408 - protein, 16 aa, Homo sapiens
  CDR3 for beta chain variable domain of TCR clone 61204 (TRBV12-5, TRBJ2-5)
CASGPRTSGNQETQYF

SEQ ID NO: 122409 - protein, 13 aa, Homo sapiens
  CDR3 for alpha chain variable domain of TCR clone 61205 (TRAV16, TRAJ31)
CALSAHNNAGLMF

SEQ ID NO: 122410 - protein, 17 aa, Homo sapiens
  CDR3 for beta chain variable domain of TCR clone 61205 (TRBV12-4, TRBJ2-1)
CASSPGLAGGRINEQFF

SEQ ID NO: 122411 - protein, 13 aa, Homo sapiens
  CDR3 for alpha chain variable domain of TCR clone 61206 (TRAV2, TRAJ15)
CAVASQAGTALIF

SEQ ID NO: 122412 - protein, 17 aa, Homo sapiens
  CDR3 for beta chain variable domain of TCR clone 61206 (TRBV5-1, TRBJ1-1)
FAPAAQGGNSLNTEAFF

SEQ ID NO: 122413 - protein, 16 aa, Homo sapiens
  CDR3 for alpha chain variable domain of TCR clone 61207 (TRAV30, TRAJ24)
CGTEIVDAASWGKFQF

SEQ ID NO: 122414 - protein, 14 aa, Homo sapiens
  CDR3 for beta chain variable domain of TCR clone 61207 (TRBV12-5, TRBJ2-5)
CASGSRTHQETHYF

SEQ ID NO: 122415 - protein, 15 aa, Homo sapiens
  CDR3 for alpha chain variable domain of TCR clone 61208 (TRAV26-1, TRAJ29)
CIVRVEGSGNTPLVF

SEQ ID NO: 122416 - protein, 11 aa, Homo sapiens
  CDR3 for beta chain variable domain of TCR clone 61208 (TRBV11-2, TRBJ1-1)
CASSINTEAFF

SEQ ID NO: 122417 - protein, 13 aa, Homo sapiens
  CDR3 for alpha chain variable domain of TCR clone 61209 (TRAV12-2, TRAJ20)
CAVYPSNDYKLSF

SEQ ID NO: 122418 - protein, 15 aa, Homo sapiens
  CDR3 for beta chain variable domain of TCR clone 61209 (TRBV27, TRBJ2-5)
CASSLFPRGGETQYF

SEQ ID NO: 122419 - protein, 14 aa, Homo sapiens
  CDR3 for alpha chain variable domain of TCR clone 61210 (TRAV12-2, TRAJ40)
CAVKIPSGTYKYIF

SEQ ID NO: 122420 - protein, 13 aa, Homo sapiens
  CDR3 for beta chain variable domain of TCR clone 61210 (TRBV7-2, TRBJ2-2)
CASSSVRAGELFF

SEQ ID NO: 122421 - protein, 11 aa, Homo sapiens
  CDR3 for alpha chain variable domain of TCR clone 61211 (TRAV12-3, TRAJ43)
CAMSVSNEMRF

SEQ ID NO: 122422 - protein, 12 aa, Homo sapiens
  CDR3 for beta chain variable domain of TCR clone 61211 (TRBV20-1, TRBJ1-1)
QCSTWGGTEAFF

SEQ ID NO: 122423 - protein, 17 aa, Homo sapiens
  CDR3 for alpha chain variable domain of TCR clone 61212 (TRAV21, TRAJ24)
CAGIRLRSTDSLGKLQF

SEQ ID NO: 122424 - protein, 15 aa, Homo sapiens
  CDR3 for beta chain variable domain of TCR clone 61212 (TRBV7-2, TRBJ2-3)
CASSPRGLSTDTQYF

SEQ ID NO: 122425 - protein, 12 aa, Homo sapiens
  CDR3 for alpha chain variable domain of TCR clone 61213 (TRAV3, TRAJ31)
CAVRDGNARLMF

SEQ ID NO: 122426 - protein, 13 aa, Homo sapiens
  CDR3 for beta chain variable domain of TCR clone 61213 (TRBV4-1, TRBJ2-2)
CASSQENTGELFF

SEQ ID NO: 122427 - protein, 17 aa, Homo sapiens
  CDR3 for alpha chain variable domain of TCR clone 61214 (TRAV8-6, TRAJ58)
CAVSSWVGETSGSRLTL

SEQ ID NO: 122428 - protein, 15 aa, Homo sapiens
  CDR3 for beta chain variable domain of TCR clone 61214 (TRBV6-5, TRBJ2-1)
CASSYDAGAGNEQFF

SEQ ID NO: 122429 - protein, 18 aa, Homo sapiens
  CDR3 for alpha chain variable domain of TCR clone 61215 (TRAV17, TRAJ45)
CATSLDLYSGGGADGLTF

SEQ ID NO: 122430 - protein, 13 aa, Homo sapiens
  CDR3 for beta chain variable domain of TCR clone 61215 (TRBV7-2, TRBJ2-2)
CASSLAVTGELFF

SEQ ID NO: 122431 - protein, 16 aa, Homo sapiens
  CDR3 for alpha chain variable domain of TCR clone 61216 (TRAV17, TRAJ53)
CATDALSGGRNYKLTF

SEQ ID NO: 122432 - protein, 12 aa, Homo sapiens
  CDR3 for beta chain variable domain of TCR clone 61216 (TRBV5-1, TRBJ2-7)
CASSFRGYEQYF

SEQ ID NO: 122433 - protein, 14 aa, Homo sapiens
  CDR3 for alpha chain variable domain of TCR clone 61217 (TRAV12-2, TRAJ4)
CALVLSGGYNKLIF

SEQ ID NO: 122434 - protein, 13 aa, Homo sapiens
  CDR3 for beta chain variable domain of TCR clone 61217 (TRBV7-2, TRBJ2-2)
CASSLAVTGELFF

SEQ ID NO: 122435 - protein, 11 aa, Homo sapiens
  CDR3 for alpha chain variable domain of TCR clone 61218 (TRAV2, TRAJ13)
CASGGYQKVTF

SEQ ID NO: 122436 - protein, 13 aa, Homo sapiens
  CDR3 for beta chain variable domain of TCR clone 61218 (TRBV25-1, TRBJ1-2)
CASSEAGASGYTF

SEQ ID NO: 122437 - protein, 11 aa, Homo sapiens
  CDR3 for alpha chain variable domain of TCR clone 61219 (TRAV12-3, TRAJ16)
LTGGDGQKLLF

SEQ ID NO: 122438 - protein, 14 aa, Homo sapiens
  CDR3 for beta chain variable domain of TCR clone 61219 (TRBV19, TRBJ2-1)
CASPTFVLSGEQFF

SEQ ID NO: 122439 - protein, 13 aa, Homo sapiens
  CDR3 for alpha chain variable domain of TCR clone 61220 (TRAV16, TRAJ26)
CITVLCLGQNFVF

SEQ ID NO: 122440 - protein, 12 aa, Homo sapiens
  CDR3 for beta chain variable domain of TCR clone 61220 (TRBV11-2, TRBJ2-1)
CANSPGNNEQFF

SEQ ID NO: 122441 - protein, 14 aa, Homo sapiens
  CDR3 for alpha chain variable domain of TCR clone 61221 (TRAV1-2, TRAJ16)
CAVNRFSDAQKLLF

SEQ ID NO: 122442 - protein, 15 aa, Homo sapiens
  CDR3 for beta chain variable domain of TCR clone 61221 (TRBV7-9, TRBJ1-6)
CASSSPGRGNSPLHF

SEQ ID NO: 122443 - protein, 17 aa, Homo sapiens
  CDR3 for alpha chain variable domain of TCR clone 61222 (TRAV8-6, TRAJ58)
CAVSSWVGETSGSRLTF

SEQ ID NO: 122444 - protein, 13 aa, Homo sapiens
  CDR3 for beta chain variable domain of TCR clone 61222 (TRBV10-2, TRBJ2-7)
CASGASGGYEQYF

SEQ ID NO: 122445 - protein, 13 aa, Homo sapiens
  CDR3 for alpha chain variable domain of TCR clone 61223 (TRAV1-1, TRAJ9)
CAAKNTGGFKTIF

SEQ ID NO: 122446 - protein, 15 aa, Homo sapiens
  CDR3 for beta chain variable domain of TCR clone 61223 (TRBV5-1, TRBJ2-1)
CASSPPRAPYNEQFF

SEQ ID NO: 122447 - protein, 14 aa, Homo sapiens
  CDR3 for alpha chain variable domain of TCR clone 61224 (TRAV13-1, TRAJ15)
CAASKTQAGTALIF

SEQ ID NO: 122448 - protein, 14 aa, Homo sapiens
  CDR3 for beta chain variable domain of TCR clone 61224 (TRBV28, TRBJ2-7)
CASKPGPDLYEQYF

SEQ ID NO: 122449 - protein, 14 aa, Homo sapiens
  CDR3 for alpha chain variable domain of TCR clone 61225 (TRAV2, TRAJ9)
CAVEDRSGGFKTIF

SEQ ID NO: 122450 - protein, 12 aa, Homo sapiens
  CDR3 for beta chain variable domain of TCR clone 61225 (TRBV5-1, TRBJ2-7)
CASSLGSYEQYF

SEQ ID NO: 122451 - protein, 14 aa, Homo sapiens
  CDR3 for alpha chain variable domain of TCR clone 61226 (TRAV35, TRAJ22)
CAGLRPGSARQLTF

SEQ ID NO: 122452 - protein, 16 aa, Homo sapiens
  CDR3 for beta chain variable domain of TCR clone 61226 (TRBV6-1, TRBJ2-5)
CASSETLDRGAETQYF

SEQ ID NO: 122453 - protein, 11 aa, Homo sapiens
  CDR3 for alpha chain variable domain of TCR clone 61227 (TRAV17, TRAJ39)
CATNPYNMITF

SEQ ID NO: 122454 - protein, 13 aa, Homo sapiens
  CDR3 for beta chain variable domain of TCR clone 61227 (TRBV7-8, TRBJ2-1)
CASTRDAVDEQFF

SEQ ID NO: 122455 - protein, 16 aa, Homo sapiens
  CDR3 for alpha chain variable domain of TCR clone 61228 (TRAV23/DV6, TRAJ9)
CAASIGGNTGGFKTIF

SEQ ID NO: 122456 - protein, 17 aa, Homo sapiens
  CDR3 for beta chain variable domain of TCR clone 61228 (TRBV13, TRBJ2-3)
CASSLSRVAEGRNTQYF

SEQ ID NO: 122457 - protein, 13 aa, Homo sapiens
  CDR3 for alpha chain variable domain of TCR clone 61229 (TRAV30, TRAJ34)
CGTVGNNTDKLIF

SEQ ID NO: 122458 - protein, 16 aa, Homo sapiens
  CDR3 for beta chain variable domain of TCR clone 61229 (TRBV7-9, TRBJ1-2)
CASSLGFSSGEDGYTF

SEQ ID NO: 122459 - protein, 16 aa, Homo sapiens
  CDR3 for alpha chain variable domain of TCR clone 61230 (TRAV8-3, TRAJ44)
CAVGASNTGTASKLTF

SEQ ID NO: 122460 - protein, 15 aa, Homo sapiens
  CDR3 for beta chain variable domain of TCR clone 61230 (TRBV27, TRBJ1-5)
CASTFNRGSNPPQHF

SEQ ID NO: 122461 - protein, 15 aa, Homo sapiens
  CDR3 for alpha chain variable domain of TCR clone 61231 (TRAV17, TRAJ23)
CATDAEDNEGGKLIF

SEQ ID NO: 122462 - protein, 12 aa, Homo sapiens
  CDR3 for beta chain variable domain of TCR clone 61231 (TRBV2, TRBJ2-1)
CAKREGYNEQFF

SEQ ID NO: 122463 - protein, 13 aa, Homo sapiens
  CDR3 for alpha chain variable domain of TCR clone 61232 (TRAV12-2, TRAJ17)
CRAFQAAGNKLTF

SEQ ID NO: 122464 - protein, 13 aa, Homo sapiens
  CDR3 for beta chain variable domain of TCR clone 61232 (TRBV19, TRBJ1-2)
CASSQGQVYGYTF

SEQ ID NO: 122465 - protein, 18 aa, Homo sapiens
  CDR3 for alpha chain variable domain of TCR clone 61233 (TRAV26-1, TRAJ52)
CIVRVEGAGGTSYGKLPF

SEQ ID NO: 122466 - protein, 13 aa, Homo sapiens
  CDR3 for beta chain variable domain of TCR clone 61233 (TRBV7-3, TRBJ1-2)
CASSLKRGYGYTF

SEQ ID NO: 122467 - protein, 13 aa, Homo sapiens
  CDR3 for alpha chain variable domain of TCR clone 61234 (TRAV21, TRAJ27)
CAARPGNAGKSTF

SEQ ID NO: 122468 - protein, 16 aa, Homo sapiens
  CDR3 for beta chain variable domain of TCR clone 61234 (TRBV7-3, TRBJ2-1)
CASSSKSGGIYNEQFF

SEQ ID NO: 122469 - protein, 14 aa, Homo sapiens
  CDR3 for alpha chain variable domain of TCR clone 61235 (TRAV30, TRAJ40)
CAVKIPSGTYKYIF

SEQ ID NO: 122470 - protein, 14 aa, Homo sapiens
  CDR3 for beta chain variable domain of TCR clone 61235 (TRBV20-1, TRBJ1-1)
CSAQTRIGGTEAFF

SEQ ID NO: 122471 - protein, 13 aa, Homo sapiens
  CDR3 for alpha chain variable domain of TCR clone 61236 (TRAV36/DV7, TRAJ54)
CAVDIRGAQKLVF

SEQ ID NO: 122472 - protein, 14 aa, Homo sapiens
  CDR3 for beta chain variable domain of TCR clone 61236 (TRBV19, TRBJ2-7)
CASNFRDTFTGMYF

SEQ ID NO: 122473 - protein, 13 aa, Homo sapiens
  CDR3 for alpha chain variable domain of TCR clone 61237 (TRAV2, TRAJ15)
CAVASRAGTALIF

SEQ ID NO: 122474 - protein, 16 aa, Homo sapiens
  CDR3 for beta chain variable domain of TCR clone 61237 (TRBV5-1, TRBJ1-1)
CASSSGGNSLNTEAFF

SEQ ID NO: 122475 - protein, 12 aa, Homo sapiens
  CDR3 for alpha chain variable domain of TCR clone 61238 (TRAV13-1, TRAJ49)
CAAPNTGNQFYF

SEQ ID NO: 122476 - protein, 17 aa, Homo sapiens
  CDR3 for beta chain variable domain of TCR clone 61238 (TRBV25-1, TRBJ2-7)
CASSDARVVCSSYEQYF

SEQ ID NO: 122477 - protein, 15 aa, Homo sapiens
  CDR3 for alpha chain variable domain of TCR clone 61239 (TRAV3, TRAJ20)
CAVRDIKLSDYKLSF

SEQ ID NO: 122478 - protein, 13 aa, Homo sapiens
  CDR3 for beta chain variable domain of TCR clone 61239 (TRBV24-1, TRBJ2-2)
CATSDWSTGELFF

SEQ ID NO: 122479 - protein, 20 aa, Homo sapiens
  CDR3 for alpha chain variable domain of TCR clone 61240 (TRAV8-3, TRAJ4)
CAVGARPDFKRSWWLQYADF

SEQ ID NO: 122480 - protein, 13 aa, Homo sapiens
  CDR3 for beta chain variable domain of TCR clone 61240 (TRBV20-1, TRBJ1-2)
CSATGIQGSGYTF

SEQ ID NO: 122481 - protein, 15 aa, Homo sapiens
  CDR3 for alpha chain variable domain of TCR clone 61241 (TRAV12-3, TRAJ27)
CAMRAYNTNAGKSTF

SEQ ID NO: 122482 - protein, 13 aa, Homo sapiens
  CDR3 for beta chain variable domain of TCR clone 61241 (TRBV11-2, TRBJ2-5)
CASSRGPSETQYV

SEQ ID NO: 122483 - protein, 15 aa, Homo sapiens
  CDR3 for alpha chain variable domain of TCR clone 61242 (TRAV13-1, TRAJ44)
CAASRGVGTASKLTF

SEQ ID NO: 122484 - protein, 14 aa, Homo sapiens
  CDR3 for beta chain variable domain of TCR clone 61242 (TRBV7-2, TRBJ2-5)
CASSPRGSSETQYF

SEQ ID NO: 122485 - protein, 14 aa, Homo sapiens
  CDR3 for alpha chain variable domain of TCR clone 61243 (TRAV9-2, TRAJ39)
CALYIYNAGNMLTF

SEQ ID NO: 122486 - protein, 14 aa, Homo sapiens
  CDR3 for beta chain variable domain of TCR clone 61243 (TRBV6-1, TRBJ1-3)
YASVQGGGGNTIYF

SEQ ID NO: 122487 - protein, 14 aa, Homo sapiens
  CDR3 for alpha chain variable domain of TCR clone 61244 (TRAV12-3, TRAJ10)
SHLPLTGGGNKLTF

SEQ ID NO: 122488 - protein, 14 aa, Homo sapiens
  CDR3 for beta chain variable domain of TCR clone 61244 (TRBV6-1, TRBJ1-3)
CASVQGGGGITIYF

SEQ ID NO: 122489 - protein, 16 aa, Homo sapiens
  CDR3 for alpha chain variable domain of TCR clone 61245 (TRAV13-1, TRAJ18)
CAASRMRGSTLGRLYF

SEQ ID NO: 122490 - protein, 16 aa, Homo sapiens
  CDR3 for beta chain variable domain of TCR clone 61245 (TRBV27, TRBJ1-1)
CASSSRGRTGYTEAFY

SEQ ID NO: 122491 - protein, 11 aa, Homo sapiens
  CDR3 for alpha chain variable domain of TCR clone 61246 (TRAV35, TRAJ22)
CAGPGVGQLTF

SEQ ID NO: 122492 - protein, 16 aa, Homo sapiens
  CDR3 for beta chain variable domain of TCR clone 61246 (TRBV7-3, TRBJ2-3)
CASSLGLAGVADTQYF

SEQ ID NO: 122493 - protein, 16 aa, Homo sapiens
  CDR3 for alpha chain variable domain of TCR clone 61247 (TRAV16, TRAJ42)
FARKMNYGGSQGNLIF

SEQ ID NO: 122494 - protein, 14 aa, Homo sapiens
  CDR3 for beta chain variable domain of TCR clone 61247 (TRBV14, TRBJ2-3)
CQQPDDRDTDTQYF

SEQ ID NO: 122495 - protein, 11 aa, Homo sapiens
  CDR3 for alpha chain variable domain of TCR clone 61248 (TRAV3, TRAJ21)
CSVGNFNKFYF

SEQ ID NO: 122496 - protein, 17 aa, Homo sapiens
  CDR3 for beta chain variable domain of TCR clone 61248 (TRBV24-1, TRBJ2-1)
CATSDVSTSGTYNEQFF

SEQ ID NO: 122497 - protein, 13 aa, Homo sapiens
  CDR3 for alpha chain variable domain of TCR clone 61249 (TRAV8-6, TRAJ49)
CAVITNTGNQFYF

SEQ ID NO: 122498 - protein, 20 aa, Homo sapiens
  CDR3 for beta chain variable domain of TCR clone 61249 (TRBV19, TRBJ2-1)
CASSISRTVTSTRLNNEQFF

SEQ ID NO: 122499 - protein, 14 aa, Homo sapiens
  CDR3 for alpha chain variable domain of TCR clone 61250 (TRAV39, TRAJ54)
CAVVLIQGAQKLVF

SEQ ID NO: 122500 - protein, 16 aa, Homo sapiens
  CDR3 for beta chain variable domain of TCR clone 61250 (TRBV3-1, TRBJ2-7)
CASSQGATGVAYDQYF

SEQ ID NO: 122501 - protein, 10 aa, Homo sapiens
  CDR3 for alpha chain variable domain of TCR clone 61251 (TRAV12-2, TRAJ52)
RSTSYGKLTF

SEQ ID NO: 122502 - protein, 11 aa, Homo sapiens
  CDR3 for beta chain variable domain of TCR clone 61251 (TRBV11-2, TRBJ2-2)
CASSLPGELFL

SEQ ID NO: 122503 - protein, 13 aa, Homo sapiens
  CDR3 for alpha chain variable domain of TCR clone 61252 (TRAV3, TRAJ27)
CAVRPLGAGKSTF

SEQ ID NO: 122504 - protein, 15 aa, Homo sapiens
  CDR3 for beta chain variable domain of TCR clone 61252 (TRBV7-9, TRBJ1-6)
CASSSPGRGNSPLHF

SEQ ID NO: 122505 - protein, 11 aa, Homo sapiens
  CDR3 for alpha chain variable domain of TCR clone 61253 (TRAV3, TRAJ17)
CAEAAGNKPTF

SEQ ID NO: 122506 - protein, 15 aa, Homo sapiens
  CDR3 for beta chain variable domain of TCR clone 61253 (TRBV12-4, TRBJ2-7)
CASSLGSGGPYEQYF

SEQ ID NO: 122507 - protein, 15 aa, Homo sapiens
  CDR3 for alpha chain variable domain of TCR clone 61254 (TRAV4, TRAJ39)
CLVGPNNNAGNMLTF

SEQ ID NO: 122508 - protein, 12 aa, Homo sapiens
  CDR3 for beta chain variable domain of TCR clone 61254 (TRBV29-1, TRBJ2-3)
CSVTGGADTQYF

SEQ ID NO: 122509 - protein, 15 aa, Homo sapiens
  CDR3 for alpha chain variable domain of TCR clone 61255 (TRAV35, TRAJ58)
CAGRRQETIGSRLTF

SEQ ID NO: 122510 - protein, 16 aa, Homo sapiens
  CDR3 for beta chain variable domain of TCR clone 61255 (TRBV2, TRBJ2-1)
CASSVGGSLSYNEQFF

SEQ ID NO: 122511 - protein, 10 aa, Homo sapiens
  CDR3 for alpha chain variable domain of TCR clone 61256 (TRAV12-1, TRAJ23)
CVVSGGKLIF

SEQ ID NO: 122512 - protein, 16 aa, Homo sapiens
  CDR3 for beta chain variable domain of TCR clone 61256 (TRBV12-5, TRBJ2-5)
CASGPRTSGNQETQYF

SEQ ID NO: 122513 - protein, 12 aa, Homo sapiens
  CDR3 for alpha chain variable domain of TCR clone 61257 (TRAV12-3, TRAJ17)
CAMTLTGNKLTF

SEQ ID NO: 122514 - protein, 13 aa, Homo sapiens
  CDR3 for beta chain variable domain of TCR clone 61257 (TRBV2, TRBJ2-5)
CASGTPYQETQYF

SEQ ID NO: 122515 - protein, 12 aa, Homo sapiens
  CDR3 for alpha chain variable domain of TCR clone 61258 (TRAV3, TRAJ26)
CAVRDYGQTFVF

SEQ ID NO: 122516 - protein, 16 aa, Homo sapiens
  CDR3 for beta chain variable domain of TCR clone 61258 (TRBV11-2, TRBJ1-2)
CASSPSGREANYGYTF

SEQ ID NO: 122517 - protein, 13 aa, Homo sapiens
  CDR3 for alpha chain variable domain of TCR clone 61259 (TRAV16, TRAJ9)
CALLNTGGFKTIF

SEQ ID NO: 122518 - protein, 13 aa, Homo sapiens
  CDR3 for beta chain variable domain of TCR clone 61259 (TRBV12-4, TRBJ2-7)
CASSPTETYEQYF

SEQ ID NO: 122519 - protein, 13 aa, Homo sapiens
  CDR3 for alpha chain variable domain of TCR clone 61260 (TRAV4, TRAJ13)
CLVESGGYQKVTF

SEQ ID NO: 122520 - protein, 17 aa, Homo sapiens
  CDR3 for beta chain variable domain of TCR clone 61260 (TRBV19, TRBJ2-7)
CASSISFYDSYPYEQYF

SEQ ID NO: 122521 - protein, 15 aa, Homo sapiens
  CDR3 for alpha chain variable domain of TCR clone 61261 (TRAV3, TRAJ17)
CAVRDGPAAGNKQTF

SEQ ID NO: 122522 - protein, 12 aa, Homo sapiens
  CDR3 for beta chain variable domain of TCR clone 61261 (TRBV12-4, TRBJ2-1)
CASSPGRNEQFF

SEQ ID NO: 122523 - protein, 12 aa, Homo sapiens
  CDR3 for alpha chain variable domain of TCR clone 61262 (TRAV12-3, TRAJ17)
CAMTLTGNKLTF

SEQ ID NO: 122524 - protein, 15 aa, Homo sapiens
  CDR3 for beta chain variable domain of TCR clone 61262 (TRBV28, TRBJ2-3)
CASSPDRQGANTQYF

SEQ ID NO: 122525 - protein, 14 aa, Homo sapiens
  CDR3 for alpha chain variable domain of TCR clone 61263 (TRAV13-2, TRAJ32)
CAESLGGATNKLIF

SEQ ID NO: 122526 - protein, 12 aa, Homo sapiens
  CDR3 for beta chain variable domain of TCR clone 61263 (TRBV11-2, TRBJ2-1)
CASSPRNNEQFF

SEQ ID NO: 122527 - protein, 16 aa, Homo sapiens
  CDR3 for alpha chain variable domain of TCR clone 61264 (TRAV3, TRAJ37)
CAVRPHGSGNTGTLIF

SEQ ID NO: 122528 - protein, 17 aa, Homo sapiens
  CDR3 for beta chain variable domain of TCR clone 61264 (TRBV5-1, TRBJ2-5)
CASSPVALGQNQETQYF

SEQ ID NO: 122529 - protein, 13 aa, Homo sapiens
  CDR3 for alpha chain variable domain of TCR clone 61265 (TRAV3, TRAJ15)
CAVRDQAGTALIF

SEQ ID NO: 122530 - protein, 13 aa, Homo sapiens
  CDR3 for beta chain variable domain of TCR clone 61265 (TRBV11-2, TRBJ2-5)
CASSFSSQETQYF

SEQ ID NO: 122531 - protein, 14 aa, Homo sapiens
  CDR3 for alpha chain variable domain of TCR clone 61266 (TRAV17, TRAJ31)
CATVLRNNNARLMF

SEQ ID NO: 122532 - protein, 13 aa, Homo sapiens
  CDR3 for beta chain variable domain of TCR clone 61266 (TRBV7-3, TRBJ1-2)
CASSLKRGYGYTF

SEQ ID NO: 122533 - protein, 13 aa, Homo sapiens
  CDR3 for alpha chain variable domain of TCR clone 61267 (TRAV26-2, TRAJ43)
CILRAVNNNDMRS

SEQ ID NO: 122534 - protein, 15 aa, Homo sapiens
  CDR3 for beta chain variable domain of TCR clone 61267 (TRBV7-2, TRBJ2-1)
CASTHGTGIYNEQFF

SEQ ID NO: 122535 - protein, 15 aa, Homo sapiens
  CDR3 for alpha chain variable domain of TCR clone 61268 (TRAV23/DV6, TRAJ13)
CAAWPGGGGYQKVTF

SEQ ID NO: 122536 - protein, 17 aa, Homo sapiens
  CDR3 for beta chain variable domain of TCR clone 61268 (TRBV19, TRBJ2-7)
CASSISLYDSYPYEQYF

SEQ ID NO: 122537 - protein, 14 aa, Homo sapiens
  CDR3 for alpha chain variable domain of TCR clone 61269 (TRAV30, TRAJ33)
CGTERRFSNYQLIW

SEQ ID NO: 122538 - protein, 16 aa, Homo sapiens
  CDR3 for beta chain variable domain of TCR clone 61269 (TRBV7-3, TRBJ2-2)
CVSSLKRGTLSGELFF

SEQ ID NO: 122539 - protein, 14 aa, Homo sapiens
  CDR3 for alpha chain variable domain of TCR clone 61270 (TRAV12-3, TRAJ10)
SHLPLTGGGNKLTF

SEQ ID NO: 122540 - protein, 16 aa, Homo sapiens
  CDR3 for beta chain variable domain of TCR clone 61270 (TRBV29-1, TRBJ2-6)
CSVEDITYSGANVLTF

SEQ ID NO: 122541 - protein, 14 aa, Homo sapiens
  CDR3 for alpha chain variable domain of TCR clone 61271 (TRAV2, TRAJ22)
CAVEVKRAARQLTF

SEQ ID NO: 122542 - protein, 14 aa, Homo sapiens
  CDR3 for beta chain variable domain of TCR clone 61271 (TRBV7-2, TRBJ1-5)
CASSTQGAGQPQHF

SEQ ID NO: 122543 - protein, 14 aa, Homo sapiens
  CDR3 for alpha chain variable domain of TCR clone 61272 (TRAV17, TRAJ31)
CATVLRNNNARLMF

SEQ ID NO: 122544 - protein, 14 aa, Homo sapiens
  CDR3 for beta chain variable domain of TCR clone 61272 (TRBV12-4, TRBJ2-5)
CASSLWQKQETQYV

SEQ ID NO: 122545 - protein, 11 aa, Homo sapiens
  CDR3 for alpha chain variable domain of TCR clone 61273 (TRAV3, TRAJ21)
CAVGNFNKFYF

SEQ ID NO: 122546 - protein, 13 aa, Homo sapiens
  CDR3 for beta chain variable domain of TCR clone 61273 (TRBV12-4, TRBJ2-7)
CASSPTETYEQYF

SEQ ID NO: 122547 - protein, 14 aa, Homo sapiens
  CDR3 for alpha chain variable domain of TCR clone 61274 (TRAV13-1, TRAJ35)
CAASKGGFGNVLHF

SEQ ID NO: 122548 - protein, 15 aa, Homo sapiens
  CDR3 for beta chain variable domain of TCR clone 61274 (TRBV7-3, TRBJ2-1)
CASSLGQGPFGEQFF

SEQ ID NO: 122549 - protein, 14 aa, Homo sapiens
  CDR3 for alpha chain variable domain of TCR clone 61275 (TRAV12-2, TRAJ13)
CAVKKTGGYQRVTF

SEQ ID NO: 122550 - protein, 14 aa, Homo sapiens
  CDR3 for beta chain variable domain of TCR clone 61275 (TRBV7-6, TRBJ2-3)
CASSLGTVTDTQYF

SEQ ID NO: 122551 - protein, 15 aa, Homo sapiens
  CDR3 for alpha chain variable domain of TCR clone 61276 (TRAV12-3, TRAJ49)
CAMAVTPNTVNQFYF

SEQ ID NO: 122552 - protein, 18 aa, Homo sapiens
  CDR3 for beta chain variable domain of TCR clone 61276 (TRBV4-1, TRBJ1-5)
CASSQDPRGQGLNQPQHF

SEQ ID NO: 122553 - protein, 13 aa, Homo sapiens
  CDR3 for alpha chain variable domain of TCR clone 61277 (TRAV25, TRAJ26)
CAGRDNYGQNFVF

SEQ ID NO: 122554 - protein, 13 aa, Homo sapiens
  CDR3 for beta chain variable domain of TCR clone 61277 (TRBV13, TRBJ2-5)
CASSLGGEGTQYF

SEQ ID NO: 122555 - protein, 14 aa, Homo sapiens
  CDR3 for alpha chain variable domain of TCR clone 61278 (TRAV1-2, TRAJ16)
CAVNRFSDGQKRLF

SEQ ID NO: 122556 - protein, 14 aa, Homo sapiens
  CDR3 for beta chain variable domain of TCR clone 61278 (TRBV7-9, TRBJ2-3)
CASSLEDGTDTQYF

SEQ ID NO: 122557 - protein, 15 aa, Homo sapiens
  CDR3 for alpha chain variable domain of TCR clone 61279 (TRAV34, TRAJ38)
CGADFTPGNNRNLIW

SEQ ID NO: 122558 - protein, 14 aa, Homo sapiens
  CDR3 for beta chain variable domain of TCR clone 61279 (TRBV19, TRBJ2-1)
CASPTFVLSGEQFF

SEQ ID NO: 122559 - protein, 15 aa, Homo sapiens
  CDR3 for alpha chain variable domain of TCR clone 61280 (TRAV13-1, TRAJ10)
CAATILTGGGNKLTF

SEQ ID NO: 122560 - protein, 16 aa, Homo sapiens
  CDR3 for beta chain variable domain of TCR clone 61280 (TRBV25-1, TRBJ1-1)
CASSGDRDRGRIEAFF

SEQ ID NO: 122561 - protein, 19 aa, Homo sapiens
  CDR3 for alpha chain variable domain of TCR clone 61281 (TRAV1-2, TRAJ26)
CLLPLCCERPDNYGQNFVF

SEQ ID NO: 122562 - protein, 12 aa, Homo sapiens
  CDR3 for beta chain variable domain of TCR clone 61281 (TRBV20-1, TRBJ1-2)
CSAPDQGPGYTF

SEQ ID NO: 122563 - protein, 15 aa, Homo sapiens
  CDR3 for alpha chain variable domain of TCR clone 61282 (TRAV12-3, TRAJ6)
CAMSATTGGSYIPTF

SEQ ID NO: 122564 - protein, 17 aa, Homo sapiens
  CDR3 for beta chain variable domain of TCR clone 61282 (TRBV28, TRBJ2-5)
CASSTPEGDALQETQYF

SEQ ID NO: 122565 - protein, 17 aa, Homo sapiens
  CDR3 for alpha chain variable domain of TCR clone 61283 (TRAV13-1, TRAJ52)
CAAGRNAGGTSYGKLTF

SEQ ID NO: 122566 - protein, 15 aa, Homo sapiens
  CDR3 for beta chain variable domain of TCR clone 61283 (TRBV2, TRBJ2-7)
CASTLLGSGATEQYF

SEQ ID NO: 122567 - protein, 15 aa, Homo sapiens
  CDR3 for alpha chain variable domain of TCR clone 61284 (TRAV21, TRAJ53)
CATLNSGGSNYKLTF

SEQ ID NO: 122568 - protein, 16 aa, Homo sapiens
  CDR3 for beta chain variable domain of TCR clone 61284 (TRBV7-7, TRBJ2-1)
CASSLASGTSYNEQFF

SEQ ID NO: 122569 - protein, 19 aa, Homo sapiens
  CDR3 for alpha chain variable domain of TCR clone 61285 (TRAV1-2, TRAJ16)
LSYNVLDGLEEKDGQKLLF

SEQ ID NO: 122570 - protein, 13 aa, Homo sapiens
  CDR3 for beta chain variable domain of TCR clone 61285 (TRBV20-1, TRBJ1-1)
CSARGGGNTEAFF

SEQ ID NO: 122571 - protein, 12 aa, Homo sapiens
  CDR3 for alpha chain variable domain of TCR clone 61286 (TRAV13-2, TRAJ8)
CAPWLGFQKLVF

SEQ ID NO: 122572 - protein, 16 aa, Homo sapiens
  CDR3 for beta chain variable domain of TCR clone 61286 (TRBV19, TRBJ2-1)
CASSKAGPSSYNEQFF

SEQ ID NO: 122573 - protein, 16 aa, Homo sapiens
  CDR3 for alpha chain variable domain of TCR clone 61287 (TRAV12-2, TRAJ18)
CAVTTDRGSTLGRLYS

SEQ ID NO: 122574 - protein, 14 aa, Homo sapiens
  CDR3 for beta chain variable domain of TCR clone 61287 (TRBV4-2, TRBJ1-5)
CASSQDSINQPQHF

SEQ ID NO: 122575 - protein, 13 aa, Homo sapiens
  CDR3 for alpha chain variable domain of TCR clone 61288 (TRAV12-1, TRAJ33)
CGDAPDSNYQLIW

SEQ ID NO: 122576 - protein, 15 aa, Homo sapiens
  CDR3 for beta chain variable domain of TCR clone 61288 (TRBV27, TRBJ2-1)
YASSNGGGSSNEQFF

SEQ ID NO: 122577 - protein, 12 aa, Homo sapiens
  CDR3 for alpha chain variable domain of TCR clone 61289 (TRAV21, TRAJ33)
CAVQDSNYQLIW

SEQ ID NO: 122578 - protein, 14 aa, Homo sapiens
  CDR3 for beta chain variable domain of TCR clone 61289 (TRBV28, TRBJ2-1)
CASSPGEGANEQFF

SEQ ID NO: 122579 - protein, 14 aa, Homo sapiens
  CDR3 for alpha chain variable domain of TCR clone 61290 (TRAV8-2, TRAJ45)
CVVSAGGGADGRTF

SEQ ID NO: 122580 - protein, 12 aa, Homo sapiens
  CDR3 for beta chain variable domain of TCR clone 61290 (TRBV12-4, TRBJ2-1)
CASSLVRVEQFF

SEQ ID NO: 122581 - protein, 15 aa, Homo sapiens
  CDR3 for alpha chain variable domain of TCR clone 61291 (TRAV12-1, TRAJ6)
CVVNCPLRRKLHTYI

SEQ ID NO: 122582 - protein, 19 aa, Homo sapiens
  CDR3 for beta chain variable domain of TCR clone 61291 (TRBV6-3, TRBJ1-2)
CASSYSKGRTGPPNYGYTF

SEQ ID NO: 122583 - protein, 14 aa, Homo sapiens
  CDR3 for alpha chain variable domain of TCR clone 61292 (TRAV1-2, TRAJ16)
CAVNRFSDGQKLLF

SEQ ID NO: 122584 - protein, 14 aa, Homo sapiens
  CDR3 for beta chain variable domain of TCR clone 61292 (TRBV7-2, TRBJ1-1)
CASSYRVDNTEAFF

SEQ ID NO: 122585 - protein, 13 aa, Homo sapiens
  CDR3 for alpha chain variable domain of TCR clone 61293 (TRAV8-6, TRAJ8)
CAFMNTGFQKLVF

SEQ ID NO: 122586 - protein, 15 aa, Homo sapiens
  CDR3 for beta chain variable domain of TCR clone 61293 (TRBV28, TRBJ2-5)
CASSSGRVIQGTQYF

SEQ ID NO: 122587 - protein, 12 aa, Homo sapiens
  CDR3 for alpha chain variable domain of TCR clone 61294 (TRAV13-1, TRAJ16)
CAAGIRWPEAAL

SEQ ID NO: 122588 - protein, 13 aa, Homo sapiens
  CDR3 for beta chain variable domain of TCR clone 61294 (TRBV4-1, TRBJ2-1)
CASSQAGGDEQFF

SEQ ID NO: 122589 - protein, 15 aa, Homo sapiens
  CDR3 for alpha chain variable domain of TCR clone 61295 (TRAV8-2, TRAJ40)
CVVLGTTSGTYKYIF

SEQ ID NO: 122590 - protein, 16 aa, Homo sapiens
  CDR3 for beta chain variable domain of TCR clone 61295 (TRBV7-3, TRBJ2-1)
CASSLEGYRCYNEQFF

SEQ ID NO: 122591 - protein, 13 aa, Homo sapiens
  CDR3 for alpha chain variable domain of TCR clone 61296 (TRAV2, TRAJ40)
CAVVTSGTYKYIF

SEQ ID NO: 122592 - protein, 16 aa, Homo sapiens
  CDR3 for beta chain variable domain of TCR clone 61296 (TRBV19, TRBJ2-2)
CASRSPGTGATGELFL

SEQ ID NO: 122593 - protein, 16 aa, Homo sapiens
  CDR3 for alpha chain variable domain of TCR clone 61297 (TRAV3, TRAJ34)
CAVRARGTPTSSSLGL

SEQ ID NO: 122594 - protein, 14 aa, Homo sapiens
  CDR3 for beta chain variable domain of TCR clone 61297 (TRBV25-1, TRBJ1-1)
CASTHLGGNTEAFF

SEQ ID NO: 122595 - protein, 11 aa, Homo sapiens
  CDR3 for alpha chain variable domain of TCR clone 61298 (TRAV12-1, TRAJ30)
CVVNGQDKIIF

SEQ ID NO: 122596 - protein, 12 aa, Homo sapiens
  CDR3 for beta chain variable domain of TCR clone 61298 (TRBV27, TRBJ2-2)
FASKLFTGELFF

SEQ ID NO: 122597 - protein, 14 aa, Homo sapiens
  CDR3 for alpha chain variable domain of TCR clone 61299 (TRAV30, TRAJ26)
CGTEIVSYGQNFVF

SEQ ID NO: 122598 - protein, 14 aa, Homo sapiens
  CDR3 for beta chain variable domain of TCR clone 61299 (TRBV19, TRBJ2-1)
CASPTFVLSGEQFF

SEQ ID NO: 122599 - protein, 13 aa, Homo sapiens
  CDR3 for alpha chain variable domain of TCR clone 61300 (TRAV13-2, TRAJ13)
CAERPGGYQKVTL

SEQ ID NO: 122600 - protein, 16 aa, Homo sapiens
  CDR3 for beta chain variable domain of TCR clone 61300 (TRBV18, TRBJ2-5)
CASSPPSSGGAKTQYF

SEQ ID NO: 122601 - protein, 10 aa, Homo sapiens
  CDR3 for alpha chain variable domain of TCR clone 61301 (TRAV1-2, TRAJ20)
CGLNDYKLSF

SEQ ID NO: 122602 - protein, 16 aa, Homo sapiens
  CDR3 for beta chain variable domain of TCR clone 61301 (TRBV20-1, TRBJ1-1)
CSARALTQGMNTEAFF

SEQ ID NO: 122603 - protein, 15 aa, Homo sapiens
  CDR3 for alpha chain variable domain of TCR clone 61302 (TRAV3, TRAJ11)
CAVRDRGSGCSTLTF

SEQ ID NO: 122604 - protein, 13 aa, Homo sapiens
  CDR3 for beta chain variable domain of TCR clone 61302 (TRBV7-9, TRBJ1-2)
CASSLKQNYGYTF

SEQ ID NO: 122605 - protein, 14 aa, Homo sapiens
  CDR3 for alpha chain variable domain of TCR clone 61303 (TRAV12-2, TRAJ13)
CAVKKTGGYQKVTF

SEQ ID NO: 122606 - protein, 15 aa, Homo sapiens
  CDR3 for beta chain variable domain of TCR clone 61303 (TRBV27, TRBJ2-1)
CASGNGGGSPNEQFF

SEQ ID NO: 122607 - protein, 14 aa, Homo sapiens
  CDR3 for alpha chain variable domain of TCR clone 61304 (TRAV12-3, TRAJ57)
CAMSAWGGSEKLVF

SEQ ID NO: 122608 - protein, 12 aa, Homo sapiens
  CDR3 for beta chain variable domain of TCR clone 61304 (TRBV12-4, TRBJ2-7)
CASSLGGYEQYF

SEQ ID NO: 122609 - protein, 18 aa, Homo sapiens
  CDR3 for alpha chain variable domain of TCR clone 61305 (TRAV17, TRAJ45)
CATSLDLYSGGGADGLTF

SEQ ID NO: 122610 - protein, 15 aa, Homo sapiens
  CDR3 for beta chain variable domain of TCR clone 61305 (TRBV12-4, TRBJ2-5)
CASSPPTGLQETQYF

SEQ ID NO: 122611 - protein, 11 aa, Homo sapiens
  CDR3 for alpha chain variable domain of TCR clone 61306 (TRAV17, TRAJ9)
CGFTGGFKTIF

SEQ ID NO: 122612 - protein, 14 aa, Homo sapiens
  CDR3 for beta chain variable domain of TCR clone 61306 (TRBV7-9, TRBJ2-2)
RASSLVQDTGELFF

SEQ ID NO: 122613 - protein, 13 aa, Homo sapiens
  CDR3 for alpha chain variable domain of TCR clone 61307 (TRAV38-1, TRAJ42)
CARWGGSQGNLIS

SEQ ID NO: 122614 - protein, 10 aa, Homo sapiens
  CDR3 for beta chain variable domain of TCR clone 61307 (TRBV2, TRBJ2-5)
CASSAATQYF

SEQ ID NO: 122615 - protein, 14 aa, Homo sapiens
  CDR3 for alpha chain variable domain of TCR clone 61308 (TRAV9-2, TRAJ39)
CALYIYNAGNMLTF

SEQ ID NO: 122616 - protein, 14 aa, Homo sapiens
  CDR3 for beta chain variable domain of TCR clone 61308 (TRBV7-9, TRBJ2-1)
CVSSPRDSLYEQFF

SEQ ID NO: 122617 - protein, 15 aa, Homo sapiens
  CDR3 for alpha chain variable domain of TCR clone 61309 (TRAV2, TRAJ22)
CAAPSRGGSARQLTF

SEQ ID NO: 122618 - protein, 14 aa, Homo sapiens
  CDR3 for beta chain variable domain of TCR clone 61309 (TRBV7-6, TRBJ2-3)
SASSLGTVTDTQYF

SEQ ID NO: 122619 - protein, 15 aa, Homo sapiens
  CDR3 for alpha chain variable domain of TCR clone 61310 (TRAV2, TRAJ13)
CATPSYSGGYQTVTF

SEQ ID NO: 122620 - protein, 14 aa, Homo sapiens
  CDR3 for beta chain variable domain of TCR clone 61310 (TRBV4-2, TRBJ2-1)
CASGLDRAYNEQFF

SEQ ID NO: 122621 - protein, 14 aa, Homo sapiens
  CDR3 for alpha chain variable domain of TCR clone 61311 (TRAV8-4, TRAJ8)
CAVSLNAGFQKLVF

SEQ ID NO: 122622 - protein, 13 aa, Homo sapiens
  CDR3 for beta chain variable domain of TCR clone 61311 (TRBV7-9, TRBJ2-3)
CASSPGSTDTQYF

SEQ ID NO: 122623 - protein, 21 aa, Homo sapiens
  CDR3 for alpha chain variable domain of TCR clone 61312 (TRAV25, TRAJ47)
TATQTTDVGTYFWEYGNKLVF

SEQ ID NO: 122624 - protein, 12 aa, Homo sapiens
  CDR3 for beta chain variable domain of TCR clone 61312 (TRBV19, TRBJ2-1)
CASSRQGAEQFF

SEQ ID NO: 122625 - protein, 15 aa, Homo sapiens
  CDR3 for alpha chain variable domain of TCR clone 61313 (TRAV12-3, TRAJ27)
CAMRAYNTNAGKSTF

SEQ ID NO: 122626 - protein, 13 aa, Homo sapiens
  CDR3 for beta chain variable domain of TCR clone 61313 (TRBV11-2, TRBJ2-5)
CASSRGPAETQYF

SEQ ID NO: 122627 - protein, 13 aa, Homo sapiens
  CDR3 for alpha chain variable domain of TCR clone 61314 (TRAV8-6, TRAJ32)
CAVSDRATNKLIF

SEQ ID NO: 122628 - protein, 13 aa, Homo sapiens
  CDR3 for beta chain variable domain of TCR clone 61314 (TRBV11-2, TRBJ2-7)
CASSLDLGYEQYL

SEQ ID NO: 122629 - protein, 15 aa, Homo sapiens
  CDR3 for alpha chain variable domain of TCR clone 61315 (TRAV4, TRAJ10)
CLVGDGSGGGNKPTF

SEQ ID NO: 122630 - protein, 15 aa, Homo sapiens
  CDR3 for beta chain variable domain of TCR clone 61315 (TRBV27, TRBJ2-3)
CASSSLAGVIDTQYF

SEQ ID NO: 122631 - protein, 14 aa, Homo sapiens
  CDR3 for alpha chain variable domain of TCR clone 61316 (TRAV9-2, TRAJ35)
CALRSIGFGNVLHC

SEQ ID NO: 122632 - protein, 13 aa, Homo sapiens
  CDR3 for beta chain variable domain of TCR clone 61316 (TRBV11-2, TRBJ2-7)
CASSGTRPYEQYF

SEQ ID NO: 122633 - protein, 13 aa, Homo sapiens
  CDR3 for alpha chain variable domain of TCR clone 61317 (TRAV30, TRAJ27)
CGTGNTNAGKSTF

SEQ ID NO: 122634 - protein, 13 aa, Homo sapiens
  CDR3 for beta chain variable domain of TCR clone 61317 (TRBV7-8, TRBJ2-7)
CASSLTGGREQYF

SEQ ID NO: 122635 - protein, 13 aa, Homo sapiens
  CDR3 for alpha chain variable domain of TCR clone 61318 (TRAV35, TRAJ42)
CAGFPGSQGNLIF

SEQ ID NO: 122636 - protein, 13 aa, Homo sapiens
  CDR3 for beta chain variable domain of TCR clone 61318 (TRBV29-1, TRBJ2-1)
CSIEGGRVNEQFF

SEQ ID NO: 122637 - protein, 13 aa, Homo sapiens
  CDR3 for alpha chain variable domain of TCR clone 61319 (TRAV12-3, TRAJ13)
CAMGTGGYKKVTF

SEQ ID NO: 122638 - protein, 14 aa, Homo sapiens
  CDR3 for beta chain variable domain of TCR clone 61319 (TRBV7-2, TRBJ2-5)
CASSTGGELKTQYF

SEQ ID NO: 122639 - protein, 13 aa, Homo sapiens
  CDR3 for alpha chain variable domain of TCR clone 61320 (TRAV12-1, TRAJ40)
CVAPTSGTYKYIF

SEQ ID NO: 122640 - protein, 18 aa, Homo sapiens
  CDR3 for beta chain variable domain of TCR clone 61320 (TRBV7-6, TRBJ2-1)
CASSPRTSGMSSYNEQFF

SEQ ID NO: 122641 - protein, 12 aa, Homo sapiens
  CDR3 for alpha chain variable domain of TCR clone 61321 (TRAV35, TRAJ30)
CAGLNRDDKIIF

SEQ ID NO: 122642 - protein, 14 aa, Homo sapiens
  CDR3 for beta chain variable domain of TCR clone 61321 (TRBV7-9, TRBJ1-2)
CASSRQGANYGYTF

SEQ ID NO: 122643 - protein, 12 aa, Homo sapiens
  CDR3 for alpha chain variable domain of TCR clone 61322 (TRAV12-3, TRAJ17)
CAMTLTGNKLTF

SEQ ID NO: 122644 - protein, 13 aa, Homo sapiens
  CDR3 for beta chain variable domain of TCR clone 61322 (TRBV11-2, TRBJ2-1)
CASSLGLAGGRFF

SEQ ID NO: 122645 - protein, 13 aa, Homo sapiens
  CDR3 for alpha chain variable domain of TCR clone 61323 (TRAV12-3, TRAJ33)
CAMSVNSNYQLIW

SEQ ID NO: 122646 - protein, 13 aa, Homo sapiens
  CDR3 for beta chain variable domain of TCR clone 61323 (TRBV7-2, TRBJ2-2)
CASSLAVTEELFF

SEQ ID NO: 122647 - protein, 12 aa, Homo sapiens
  CDR3 for alpha chain variable domain of TCR clone 61324 (TRAV16, TRAJ10)
CSRTGGGNKLTF

SEQ ID NO: 122648 - protein, 20 aa, Homo sapiens
  CDR3 for beta chain variable domain of TCR clone 61324 (TRBV7-8, TRBJ2-2)
CASSHLFPGPTIHITGELFF

SEQ ID NO: 122649 - protein, 15 aa, Homo sapiens
  CDR3 for alpha chain variable domain of TCR clone 61325 (TRAV21, TRAJ53)
CATLNGGGSNYKLTF

SEQ ID NO: 122650 - protein, 16 aa, Homo sapiens
  CDR3 for beta chain variable domain of TCR clone 61325 (TRBV20-1, TRBJ1-4)
CSAPGQGLLTNEKLFF

SEQ ID NO: 122651 - protein, 13 aa, Homo sapiens
  CDR3 for alpha chain variable domain of TCR clone 61326 (TRAV2, TRAJ40)
CAVVTPGTYKYIF

SEQ ID NO: 122652 - protein, 14 aa, Homo sapiens
  CDR3 for beta chain variable domain of TCR clone 61326 (TRBV19, TRBJ2-1)
CASPTFVLSGEQSF

SEQ ID NO: 122653 - protein, 14 aa, Homo sapiens
  CDR3 for alpha chain variable domain of TCR clone 61327 (TRAV17, TRAJ6)
CATNPAGGSYIPTF

SEQ ID NO: 122654 - protein, 13 aa, Homo sapiens
  CDR3 for beta chain variable domain of TCR clone 61327 (TRBV7-3, TRBJ1-1)
CASSQDWGAEAFF

SEQ ID NO: 122655 - protein, 12 aa, Homo sapiens
  CDR3 for alpha chain variable domain of TCR clone 61328 (TRAV8-3, TRAJ20)
CAVGANDYKLSF

SEQ ID NO: 122656 - protein, 13 aa, Homo sapiens
  CDR3 for beta chain variable domain of TCR clone 61328 (TRBV10-3, TRBJ2-7)
CASKLAVNYEQYF

SEQ ID NO: 122657 - protein, 16 aa, Homo sapiens
  CDR3 for alpha chain variable domain of TCR clone 61329 (TRAV4, TRAJ8)
CLAGDSGNTGFQKLVF

SEQ ID NO: 122658 - protein, 15 aa, Homo sapiens
  CDR3 for beta chain variable domain of TCR clone 61329 (TRBV15, TRBJ1-2)
CATSRVRASGSGYTF

SEQ ID NO: 122659 - protein, 15 aa, Homo sapiens
  CDR3 for alpha chain variable domain of TCR clone 61330 (TRAV8-3, TRAJ15)
CAVDAPNQAGTALIF

SEQ ID NO: 122660 - protein, 14 aa, Homo sapiens
  CDR3 for beta chain variable domain of TCR clone 61330 (TRBV20-1, TRBJ2-1)
CSPNDEASYNEQFF

SEQ ID NO: 122661 - protein, 13 aa, Homo sapiens
  CDR3 for alpha chain variable domain of TCR clone 61331 (TRAV36/DV7, TRAJ7)
CAVERYGNNRLAF

SEQ ID NO: 122662 - protein, 12 aa, Homo sapiens
  CDR3 for beta chain variable domain of TCR clone 61331 (TRBV11-2, TRBJ2-2)
CASSLPTGELFF

SEQ ID NO: 122663 - protein, 13 aa, Homo sapiens
  CDR3 for alpha chain variable domain of TCR clone 61332 (TRAV8-3, TRAJ28)
CAVGAVGGYQLTF

SEQ ID NO: 122664 - protein, 14 aa, Homo sapiens
  CDR3 for beta chain variable domain of TCR clone 61332 (TRBV18, TRBJ2-7)
CASSPRGGAYEQYF

SEQ ID NO: 122665 - protein, 10 aa, Homo sapiens
  CDR3 for alpha chain variable domain of TCR clone 61333 (TRAV1-2, TRAJ23)
CAGQGGKLIF

SEQ ID NO: 122666 - protein, 16 aa, Homo sapiens
  CDR3 for beta chain variable domain of TCR clone 61333 (TRBV11-2, TRBJ1-1)
CASSLRQGGKHSKAFF

SEQ ID NO: 122667 - protein, 16 aa, Homo sapiens
  CDR3 for alpha chain variable domain of TCR clone 61334 (TRAV16, TRAJ54)
CALSPPLIQGAQKLVF

SEQ ID NO: 122668 - protein, 14 aa, Homo sapiens
  CDR3 for beta chain variable domain of TCR clone 61334 (TRBV11-2, TRBJ2-5)
CASRPLAGRETQYF

SEQ ID NO: 122669 - protein, 17 aa, Homo sapiens
  CDR3 for alpha chain variable domain of TCR clone 61335 (TRAV13-1, TRAJ31)
CAPRDRLMFGDGTQLVV

SEQ ID NO: 122670 - protein, 16 aa, Homo sapiens
  CDR3 for beta chain variable domain of TCR clone 61335 (TRBV4-2, TRBJ2-3)
CASSQELAGDTDTQYF

SEQ ID NO: 122671 - protein, 15 aa, Homo sapiens
  CDR3 for alpha chain variable domain of TCR clone 61336 (TRAV8-3, TRAJ6)
CAVGPLGGGSCIPTF

SEQ ID NO: 122672 - protein, 14 aa, Homo sapiens
  CDR3 for beta chain variable domain of TCR clone 61336 (TRBV19, TRBJ2-2)
CASSTGQGAGELFF

SEQ ID NO: 122673 - protein, 14 aa, Homo sapiens
  CDR3 for alpha chain variable domain of TCR clone 61337 (TRAV1-2, TRAJ16)
RAVNRFSGGQKLLF

SEQ ID NO: 122674 - protein, 16 aa, Homo sapiens
  CDR3 for beta chain variable domain of TCR clone 61337 (TRBV9, TRBJ2-1)
CASSVGGGGNYNEQFF

SEQ ID NO: 122675 - protein, 12 aa, Homo sapiens
  CDR3 for alpha chain variable domain of TCR clone 61338 (TRAV1-1, TRAJ9)
CAVDTGGFKTIF

SEQ ID NO: 122676 - protein, 14 aa, Homo sapiens
  CDR3 for beta chain variable domain of TCR clone 61338 (TRBV7-8, TRBJ2-3)
CASSFKSSTDTQYF

SEQ ID NO: 122677 - protein, 18 aa, Homo sapiens
  CDR3 for alpha chain variable domain of TCR clone 61339 (TRAV21, TRAJ52)
CAVRPSPAGGTSYGKLTF

SEQ ID NO: 122678 - protein, 13 aa, Homo sapiens
  CDR3 for beta chain variable domain of TCR clone 61339 (TRBV7-3, TRBJ1-1)
RASSQDWGAEAFF

SEQ ID NO: 122679 - protein, 13 aa, Homo sapiens
  CDR3 for alpha chain variable domain of TCR clone 61340 (TRAV26-1, TRAJ39)
CIVRVVAGNMLTF

SEQ ID NO: 122680 - protein, 14 aa, Homo sapiens
  CDR3 for beta chain variable domain of TCR clone 61340 (TRBV20-1, TRBJ2-5)
CSASRQGIRETQYF

SEQ ID NO: 122681 - protein, 14 aa, Homo sapiens
  CDR3 for alpha chain variable domain of TCR clone 61341 (TRAV12-2, TRAJ13)
CAVKKTGGYQKVTF

SEQ ID NO: 122682 - protein, 15 aa, Homo sapiens
  CDR3 for beta chain variable domain of TCR clone 61341 (TRBV18, TRBJ2-1)
CASSPPSASYNEQFF

SEQ ID NO: 122683 - protein, 15 aa, Homo sapiens
  CDR3 for alpha chain variable domain of TCR clone 61342 (TRAV3, TRAJ5)
CAVRDRKTGRRALTF

SEQ ID NO: 122684 - protein, 15 aa, Homo sapiens
  CDR3 for beta chain variable domain of TCR clone 61342 (TRBV6-3, TRBJ2-7)
CASSSPGTVFYEQYF

SEQ ID NO: 122685 - protein, 17 aa, Homo sapiens
  CDR3 for alpha chain variable domain of TCR clone 61343 (TRAV17, TRAJ52)
CATERPSGGTSYGKLTF

SEQ ID NO: 122686 - protein, 15 aa, Homo sapiens
  CDR3 for beta chain variable domain of TCR clone 61343 (TRBV5-1, TRBJ2-1)
CASSLVANSYNEQFL

SEQ ID NO: 122687 - protein, 12 aa, Homo sapiens
  CDR3 for alpha chain variable domain of TCR clone 61344 (TRAV2, TRAJ31)
CAVEDNNARLMF

SEQ ID NO: 122688 - protein, 16 aa, Homo sapiens
  CDR3 for beta chain variable domain of TCR clone 61344 (TRBV6-1, TRBJ2-5)
CASSETLDRGAETQYF

SEQ ID NO: 122689 - protein, 16 aa, Homo sapiens
  CDR3 for alpha chain variable domain of TCR clone 61345 (TRAV30, TRAJ24)
CGTEIVDADSWGKFQV

SEQ ID NO: 122690 - protein, 14 aa, Homo sapiens
  CDR3 for beta chain variable domain of TCR clone 61345 (TRBV12-5, TRBJ2-5)
CASGSRTHQETLYF

SEQ ID NO: 122691 - protein, 16 aa, Homo sapiens
  CDR3 for alpha chain variable domain of TCR clone 61346 (TRAV12-3, TRAJ53)
CAMSPGSGGSNYKLTF

SEQ ID NO: 122692 - protein, 17 aa, Homo sapiens
  CDR3 for beta chain variable domain of TCR clone 61346 (TRBV7-2, TRBJ2-2)
CASSPRGAGEGTGELFF

SEQ ID NO: 122693 - protein, 12 aa, Homo sapiens
  CDR3 for alpha chain variable domain of TCR clone 61347 (TRAV21, TRAJ23)
CAVPNQGGKLIF

SEQ ID NO: 122694 - protein, 15 aa, Homo sapiens
  CDR3 for beta chain variable domain of TCR clone 61347 (TRBV27, TRBJ2-1)
CASSFGSGTGPEQFF

SEQ ID NO: 122695 - protein, 14 aa, Homo sapiens
  CDR3 for alpha chain variable domain of TCR clone 61348 (TRAV12-3, TRAJ58)
CAMSTETSGSRLTF

SEQ ID NO: 122696 - protein, 13 aa, Homo sapiens
  CDR3 for beta chain variable domain of TCR clone 61348 (TRBV27, TRBJ2-3)
CASRWGRTDTQYF

SEQ ID NO: 122697 - protein, 17 aa, Homo sapiens
  CDR3 for alpha chain variable domain of TCR clone 61349 (TRAV2, TRAJ36)
CAVEDRGNWGKQPLLLD

SEQ ID NO: 122698 - protein, 14 aa, Homo sapiens
  CDR3 for beta chain variable domain of TCR clone 61349 (TRBV7-9, TRBJ2-5)
CASSLDTAQETQYF

SEQ ID NO: 122699 - protein, 12 aa, Homo sapiens
  CDR3 for alpha chain variable domain of TCR clone 61350 (TRAV8-3, TRAJ41)
CAVALSGYALNF

SEQ ID NO: 122700 - protein, 13 aa, Homo sapiens
  CDR3 for beta chain variable domain of TCR clone 61350 (TRBV7-9, TRBJ2-3)
CASSPGSTDTQYF

SEQ ID NO: 122701 - protein, 16 aa, Homo sapiens
  CDR3 for alpha chain variable domain of TCR clone 61351 (TRAV26-1, TRAJ23)
CIVRVHPYNQGGKLIF

SEQ ID NO: 122702 - protein, 15 aa, Homo sapiens
  CDR3 for beta chain variable domain of TCR clone 61351 (TRBV5-7, TRBJ2-7)
CASSPYVEGSYEQYF

SEQ ID NO: 122703 - protein, 14 aa, Homo sapiens
  CDR3 for alpha chain variable domain of TCR clone 61352 (TRAV29/DV5, TRAJ34)
CAASASRETDKLIF

SEQ ID NO: 122704 - protein, 15 aa, Homo sapiens
  CDR3 for beta chain variable domain of TCR clone 61352 (TRBV7-8, TRBJ2-7)
CASGLERAGSYEQYF

SEQ ID NO: 122705 - protein, 14 aa, Homo sapiens
  CDR3 for alpha chain variable domain of TCR clone 61353 (TRAV13-1, TRAJ35)
CAASKGGFGNVLHC

SEQ ID NO: 122706 - protein, 19 aa, Homo sapiens
  CDR3 for beta chain variable domain of TCR clone 61353 (TRBV25-1, TRBJ2-2)
CAILVYRVDRGHKTGELFF

SEQ ID NO: 122707 - protein, 11 aa, Homo sapiens
  CDR3 for alpha chain variable domain of TCR clone 61354 (TRAV3, TRAJ21)
CAVGNFNKFYF

SEQ ID NO: 122708 - protein, 16 aa, Homo sapiens
  CDR3 for beta chain variable domain of TCR clone 61354 (TRBV24-1, TRBJ2-3)
CATSDPGTGATDTQYF

SEQ ID NO: 122709 - protein, 14 aa, Homo sapiens
  CDR3 for alpha chain variable domain of TCR clone 61355 (TRAV26-1, TRAJ6)
CIVSPVGGSYIPTF

SEQ ID NO: 122710 - protein, 16 aa, Homo sapiens
  CDR3 for beta chain variable domain of TCR clone 61355 (TRBV4-1, TRBJ2-5)
CAISSGLAGVLGTQYF

SEQ ID NO: 122711 - protein, 16 aa, Homo sapiens
  CDR3 for alpha chain variable domain of TCR clone 61356 (TRAV2, TRAJ4)
CAVEDRFSGGYNKLIV

SEQ ID NO: 122712 - protein, 13 aa, Homo sapiens
  CDR3 for beta chain variable domain of TCR clone 61356 (TRBV7-7, TRBJ2-5)
CASSRSGQETQYF

SEQ ID NO: 122713 - protein, 16 aa, Homo sapiens
  CDR3 for alpha chain variable domain of TCR clone 61357 (TRAV23/DV6, TRAJ22)
CAAAAISSGSARQLTF

SEQ ID NO: 122714 - protein, 14 aa, Homo sapiens
  CDR3 for beta chain variable domain of TCR clone 61357 (TRBV7-2, TRBJ2-7)
CASSPKTSFYEQYF

SEQ ID NO: 122715 - protein, 14 aa, Homo sapiens
  CDR3 for alpha chain variable domain of TCR clone 61358 (TRAV26-1, TRAJ38)
CIAGNAGNNRKLIW

SEQ ID NO: 122716 - protein, 16 aa, Homo sapiens
  CDR3 for beta chain variable domain of TCR clone 61358 (TRBV20-1, TRBJ2-7)
CSASTSGRLSSYEQYF

SEQ ID NO: 122717 - protein, 16 aa, Homo sapiens
  CDR3 for alpha chain variable domain of TCR clone 61359 (TRAV8-3, TRAJ8)
CAVPRDGNTGFQKLVV

SEQ ID NO: 122718 - protein, 15 aa, Homo sapiens
  CDR3 for beta chain variable domain of TCR clone 61359 (TRBV6-1, TRBJ2-6)
CASSSRPSGANVLTF

SEQ ID NO: 122719 - protein, 16 aa, Homo sapiens
  CDR3 for alpha chain variable domain of TCR clone 61360 (TRAV1-2, TRAJ6)
CAVRDQGTGGSYIPTF

SEQ ID NO: 122720 - protein, 11 aa, Homo sapiens
  CDR3 for beta chain variable domain of TCR clone 61360 (TRBV12-4, TRBJ2-3)
CASTATDTQYF

SEQ ID NO: 122721 - protein, 14 aa, Homo sapiens
  CDR3 for alpha chain variable domain of TCR clone 61361 (TRAV8-3, TRAJ4)
CAVGASGGYNKLIF

SEQ ID NO: 122722 - protein, 16 aa, Homo sapiens
  CDR3 for beta chain variable domain of TCR clone 61361 (TRBV4-2, TRBJ1-1)
CASSPSPGRAAPEAFF

SEQ ID NO: 122723 - protein, 15 aa, Homo sapiens
  CDR3 for alpha chain variable domain of TCR clone 61362 (TRAV16, TRAJ12)
CSKWPLRDSSYKLIF

SEQ ID NO: 122724 - protein, 13 aa, Homo sapiens
  CDR3 for beta chain variable domain of TCR clone 61362 (TRBV25-1, TRBJ2-5)
CASSESGRETQYF

SEQ ID NO: 122725 - protein, 14 aa, Homo sapiens
  CDR3 for alpha chain variable domain of TCR clone 61363 (TRAV1-2, TRAJ8)
CAVREDTGFQKLVF

SEQ ID NO: 122726 - protein, 16 aa, Homo sapiens
  CDR3 for beta chain variable domain of TCR clone 61363 (TRBV11-2, TRBJ2-7)
CASSLAPTGVNYEQYF

SEQ ID NO: 122727 - protein, 15 aa, Homo sapiens
  CDR3 for alpha chain variable domain of TCR clone 61364 (TRAV3, TRAJ3)
CAVRDRDSSASKIIF

SEQ ID NO: 122728 - protein, 18 aa, Homo sapiens
  CDR3 for beta chain variable domain of TCR clone 61364 (TRBV25-1, TRBJ1-2)
CASSGLQNGQGLIFDYTF

SEQ ID NO: 122729 - protein, 11 aa, Homo sapiens
  CDR3 for alpha chain variable domain of TCR clone 61365 (TRAV2, TRAJ13)
CASGGYQKVTF

SEQ ID NO: 122730 - protein, 15 aa, Homo sapiens
  CDR3 for beta chain variable domain of TCR clone 61365 (TRBV7-2, TRBJ2-1)
CASSLASGRVNEQFF

SEQ ID NO: 122731 - protein, 13 aa, Homo sapiens
  CDR3 for alpha chain variable domain of TCR clone 61366 (TRAV1-2, TRAJ9)
CAALNTGVFKTIF

SEQ ID NO: 122732 - protein, 17 aa, Homo sapiens
  CDR3 for beta chain variable domain of TCR clone 61366 (TRBV3-1, TRBJ2-7)
CASSEVGHRGPSYEQYF

SEQ ID NO: 122733 - protein, 19 aa, Homo sapiens
  CDR3 for alpha chain variable domain of TCR clone 61367 (TRAV26-1, TRAJ52)
FIVRAHRNAGGTSYGKLTF

SEQ ID NO: 122734 - protein, 15 aa, Homo sapiens
  CDR3 for beta chain variable domain of TCR clone 61367 (TRBV29-1, TRBJ2-1)
CSGRDRKSSYNEQFF

SEQ ID NO: 122735 - protein, 13 aa, Homo sapiens
  CDR3 for alpha chain variable domain of TCR clone 61368 (TRAV3, TRAJ21)
CAVREPDFNKFYF

SEQ ID NO: 122736 - protein, 15 aa, Homo sapiens
  CDR3 for beta chain variable domain of TCR clone 61368 (TRBV9, TRBJ1-6)
CASSVAWTGDSPLHF

SEQ ID NO: 122737 - protein, 16 aa, Homo sapiens
  CDR3 for alpha chain variable domain of TCR clone 61369 (TRAV13-1, TRAJ18)
CAASRMRGSTLGRLYF

SEQ ID NO: 122738 - protein, 16 aa, Homo sapiens
  CDR3 for beta chain variable domain of TCR clone 61369 (TRBV27, TRBJ1-1)
CASSSRGRTGYTEAFL

SEQ ID NO: 122739 - protein, 14 aa, Homo sapiens
  CDR3 for alpha chain variable domain of TCR clone 61370 (TRAV3, TRAJ9)
CALRGNTGGFKTIF

SEQ ID NO: 122740 - protein, 14 aa, Homo sapiens
  CDR3 for beta chain variable domain of TCR clone 61370 (TRBV15, TRBJ2-1)
CATSGVEDYNEQFF

SEQ ID NO: 122741 - protein, 12 aa, Homo sapiens
  CDR3 for alpha chain variable domain of TCR clone 61371 (TRAV2, TRAJ33)
CAVPDSNYQLIW

SEQ ID NO: 122742 - protein, 14 aa, Homo sapiens
  CDR3 for beta chain variable domain of TCR clone 61371 (TRBV7-2, TRBJ1-2)
CASSRGGTNYGYTF

SEQ ID NO: 122743 - protein, 12 aa, Homo sapiens
  CDR3 for alpha chain variable domain of TCR clone 61372 (TRAV2, TRAJ33)
CAVPDSNYQLIW

SEQ ID NO: 122744 - protein, 15 aa, Homo sapiens
  CDR3 for beta chain variable domain of TCR clone 61372 (TRBV6-5, TRBJ2-1)
CASSKGLAGNNEQFF

SEQ ID NO: 122745 - protein, 16 aa, Homo sapiens
  CDR3 for alpha chain variable domain of TCR clone 61373 (TRAV20, TRAJ52)
CAVLLDGGTSYGKLTF

SEQ ID NO: 122746 - protein, 12 aa, Homo sapiens
  CDR3 for beta chain variable domain of TCR clone 61373 (TRBV19, TRBJ2-1)
CASSQISNEQFF

SEQ ID NO: 122747 - protein, 14 aa, Homo sapiens
  CDR3 for alpha chain variable domain of TCR clone 61374 (TRAV35, TRAJ33)
CSGSSQDSNYQLIW

SEQ ID NO: 122748 - protein, 15 aa, Homo sapiens
  CDR3 for beta chain variable domain of TCR clone 61374 (TRBV5-1, TRBJ1-4)
FAPAAWKDGNEKLFF

SEQ ID NO: 122749 - protein, 14 aa, Homo sapiens
  CDR3 for alpha chain variable domain of TCR clone 61375 (TRAV21, TRAJ35)
CAVMAIGFGNVLHC

SEQ ID NO: 122750 - protein, 12 aa, Homo sapiens
  CDR3 for beta chain variable domain of TCR clone 61375 (TRBV7-9, TRBJ2-7)
CASSIKREEQYF

SEQ ID NO: 122751 - protein, 12 aa, Homo sapiens
  CDR3 for alpha chain variable domain of TCR clone 61376 (TRAV12-3, TRAJ17)
CAMTLTGNKLTF

SEQ ID NO: 122752 - protein, 16 aa, Homo sapiens
  CDR3 for beta chain variable domain of TCR clone 61376 (TRBV4-1, TRBJ1-2)
CASSQDAGQVLYGYTF

SEQ ID NO: 122753 - protein, 11 aa, Homo sapiens
  CDR3 for alpha chain variable domain of TCR clone 61377 (TRAV21, TRAJ34)
CAVTNTDKLIF

SEQ ID NO: 122754 - protein, 14 aa, Homo sapiens
  CDR3 for beta chain variable domain of TCR clone 61377 (TRBV7-9, TRBJ2-5)
CASSLAFGQETQYF

SEQ ID NO: 122755 - protein, 10 aa, Homo sapiens
  CDR3 for alpha chain variable domain of TCR clone 61378 (TRAV23/DV6, TRAJ31)
CARGGARLMF

SEQ ID NO: 122756 - protein, 16 aa, Homo sapiens
  CDR3 for beta chain variable domain of TCR clone 61378 (TRBV19, TRBJ2-1)
CASSKAGPSSYNEQFF

SEQ ID NO: 122757 - protein, 14 aa, Homo sapiens
  CDR3 for alpha chain variable domain of TCR clone 61379 (TRAV12-2, TRAJ13)
CAVKKTGGYQKVTF

SEQ ID NO: 122758 - protein, 12 aa, Homo sapiens
  CDR3 for beta chain variable domain of TCR clone 61379 (TRBV14, TRBJ1-1)
CASSQLKGLAFF

SEQ ID NO: 122759 - protein, 13 aa, Homo sapiens
  CDR3 for alpha chain variable domain of TCR clone 61380 (TRAV29/DV5, TRAJ34)
CAARVDNTDKLIF

SEQ ID NO: 122760 - protein, 15 aa, Homo sapiens
  CDR3 for beta chain variable domain of TCR clone 61380 (TRBV12-4, TRBJ1-5)
CASTQGTGPLQPQHF

SEQ ID NO: 122761 - protein, 14 aa, Homo sapiens
  CDR3 for alpha chain variable domain of TCR clone 61381 (TRAV3, TRAJ37)
CAVKESSNTGKLIF

SEQ ID NO: 122762 - protein, 14 aa, Homo sapiens
  CDR3 for beta chain variable domain of TCR clone 61381 (TRBV2, TRBJ1-5)
CASSENRGGQPQHF

SEQ ID NO: 122763 - protein, 13 aa, Homo sapiens
  CDR3 for alpha chain variable domain of TCR clone 61382 (TRAV2, TRAJ40)
CAVVTSGIYKYIF

SEQ ID NO: 122764 - protein, 15 aa, Homo sapiens
  CDR3 for beta chain variable domain of TCR clone 61382 (TRBV11-3, TRBJ2-3)
CASLKDGREGDTQYF

SEQ ID NO: 122765 - protein, 11 aa, Homo sapiens
  CDR3 for alpha chain variable domain of TCR clone 61383 (TRAV2, TRAJ13)
CASGGYQKVTF

SEQ ID NO: 122766 - protein, 15 aa, Homo sapiens
  CDR3 for beta chain variable domain of TCR clone 61383 (TRBV19, TRBJ2-1)
CASSIQATSYNEQFF

SEQ ID NO: 122767 - protein, 15 aa, Homo sapiens
  CDR3 for alpha chain variable domain of TCR clone 61384 (TRAV2, TRAJ15)
CAVEDRSQAGTALIF

SEQ ID NO: 122768 - protein, 13 aa, Homo sapiens
  CDR3 for beta chain variable domain of TCR clone 61384 (TRBV10-2, TRBJ2-7)
CASGASGGYEQYF

SEQ ID NO: 122769 - protein, 15 aa, Homo sapiens
  CDR3 for alpha chain variable domain of TCR clone 61385 (TRAV4, TRAJ4)
CLVGPLSGGYDKLIF

SEQ ID NO: 122770 - protein, 16 aa, Homo sapiens
  CDR3 for beta chain variable domain of TCR clone 61385 (TRBV7-8, TRBJ1-4)
CASSLGVGTSNEKLFF

SEQ ID NO: 122771 - protein, 15 aa, Homo sapiens
  CDR3 for alpha chain variable domain of TCR clone 61386 (TRAV26-1, TRAJ29)
CIVRVEGSGNTPLVF

SEQ ID NO: 122772 - protein, 13 aa, Homo sapiens
  CDR3 for beta chain variable domain of TCR clone 61386 (TRBV7-7, TRBJ2-3)
CASSLSRADTQYF

SEQ ID NO: 122773 - protein, 15 aa, Homo sapiens
  CDR3 for alpha chain variable domain of TCR clone 61387 (TRAV12-3, TRAJ48)
CAMNAKNFGNEKLTF

SEQ ID NO: 122774 - protein, 15 aa, Homo sapiens
  CDR3 for beta chain variable domain of TCR clone 61387 (TRBV5-1, TRBJ2-5)
CASSFKGGDQETQYF

SEQ ID NO: 122775 - protein, 14 aa, Homo sapiens
  CDR3 for alpha chain variable domain of TCR clone 61388 (TRAV1-2, TRAJ8)
CAVREDTGFRKLVF

SEQ ID NO: 122776 - protein, 14 aa, Homo sapiens
  CDR3 for beta chain variable domain of TCR clone 61388 (TRBV12-5, TRBJ2-5)
CASGSRTHQETQYF

SEQ ID NO: 122777 - protein, 14 aa, Homo sapiens
  CDR3 for alpha chain variable domain of TCR clone 61389 (TRAV2, TRAJ37)
CAVDFTSNTGKLIF

SEQ ID NO: 122778 - protein, 13 aa, Homo sapiens
  CDR3 for beta chain variable domain of TCR clone 61389 (TRBV20-1, TRBJ1-1)
CSAPLGGGTEAFC

SEQ ID NO: 122779 - protein, 12 aa, Homo sapiens
  CDR3 for alpha chain variable domain of TCR clone 61390 (TRAV8-3, TRAJ26)
CAGDNYGQNFVF

SEQ ID NO: 122780 - protein, 16 aa, Homo sapiens
  CDR3 for beta chain variable domain of TCR clone 61390 (TRBV20-1, TRBJ1-4)
CSAPGQGLLTNEKLFS

SEQ ID NO: 122781 - protein, 14 aa, Homo sapiens
  CDR3 for alpha chain variable domain of TCR clone 61391 (TRAV21, TRAJ17)
CAVRSKAAGNKLTF

SEQ ID NO: 122782 - protein, 15 aa, Homo sapiens
  CDR3 for beta chain variable domain of TCR clone 61391 (TRBV11-3, TRBJ2-3)
CASLKDGREGDTQYF

SEQ ID NO: 122783 - protein, 16 aa, Homo sapiens
  CDR3 for alpha chain variable domain of TCR clone 61392 (TRAV13-1, TRAJ10)
CAASSHFTGGGNELTF

SEQ ID NO: 122784 - protein, 15 aa, Homo sapiens
  CDR3 for beta chain variable domain of TCR clone 61392 (TRBV7-9, TRBJ1-6)
CASSSPGRGNSPLHF

SEQ ID NO: 122785 - protein, 13 aa, Homo sapiens
  CDR3 for alpha chain variable domain of TCR clone 61393 (TRAV13-1, TRAJ6)
CSASKGGSYIPTF

SEQ ID NO: 122786 - protein, 13 aa, Homo sapiens
  CDR3 for beta chain variable domain of TCR clone 61393 (TRBV7-9, TRBJ2-5)
CASLPSGRETQYF

SEQ ID NO: 122787 - protein, 11 aa, Homo sapiens
  CDR3 for alpha chain variable domain of TCR clone 61394 (TRAV13-1, TRAJ40)
CAVSGTYKYIF

SEQ ID NO: 122788 - protein, 13 aa, Homo sapiens
  CDR3 for beta chain variable domain of TCR clone 61394 (TRBV19, TRBJ1-5)
CASSIGGKQPQHF

SEQ ID NO: 122789 - protein, 12 aa, Homo sapiens
  CDR3 for alpha chain variable domain of TCR clone 61395 (TRAV10, TRAJ34)
CVVSGKHRQAHL

SEQ ID NO: 122790 - protein, 14 aa, Homo sapiens
  CDR3 for beta chain variable domain of TCR clone 61395 (TRBV19, TRBJ2-1)
CASRTFVLSGKQFF

SEQ ID NO: 122791 - protein, 16 aa, Homo sapiens
  CDR3 for alpha chain variable domain of TCR clone 61396 (TRAV8-3, TRAJ4)
CAVGARGSGGYNKPIF

SEQ ID NO: 122792 - protein, 16 aa, Homo sapiens
  CDR3 for beta chain variable domain of TCR clone 61396 (TRBV4-3, TRBJ2-5)
CASSQDSIQLQETQYF

SEQ ID NO: 122793 - protein, 12 aa, Homo sapiens
  CDR3 for alpha chain variable domain of TCR clone 61397 (TRAV21, TRAJ23)
CAVMLQGGKLIF

SEQ ID NO: 122794 - protein, 14 aa, Homo sapiens
  CDR3 for beta chain variable domain of TCR clone 61397 (TRBV7-9, TRBJ1-4)
CAITEGEANEELFF

SEQ ID NO: 122795 - protein, 13 aa, Homo sapiens
  CDR3 for alpha chain variable domain of TCR clone 61398 (TRAV16, TRAJ30)
CALAQNRDDKIIF

SEQ ID NO: 122796 - protein, 17 aa, Homo sapiens
  CDR3 for beta chain variable domain of TCR clone 61398 (TRBV2, TRBJ1-1)
CASTEPGQGASGAFLDK

SEQ ID NO: 122797 - protein, 12 aa, Homo sapiens
  CDR3 for alpha chain variable domain of TCR clone 61399 (TRAV8-3, TRAJ40)
CALTSGTYKYIF

SEQ ID NO: 122798 - protein, 14 aa, Homo sapiens
  CDR3 for beta chain variable domain of TCR clone 61399 (TRBV12-4, TRBJ2-3)
CASSGQGSTDTQYF

SEQ ID NO: 122799 - protein, 14 aa, Homo sapiens
  CDR3 for alpha chain variable domain of TCR clone 61400 (TRAV12-1, TRAJ17)
CVVNPKAAGNKLTF

SEQ ID NO: 122800 - protein, 15 aa, Homo sapiens
  CDR3 for beta chain variable domain of TCR clone 61400 (TRBV19, TRBJ2-4)
CASRGPRRGENIQYF

SEQ ID NO: 122801 - protein, 14 aa, Homo sapiens
  CDR3 for alpha chain variable domain of TCR clone 61401 (TRAV38-2/DV8, TRAJ30)
CAYMDGLGGYKIIF

SEQ ID NO: 122802 - protein, 15 aa, Homo sapiens
  CDR3 for beta chain variable domain of TCR clone 61401 (TRBV7-9, TRBJ2-2)
CASRPADRDTGELFF

SEQ ID NO: 122803 - protein, 14 aa, Homo sapiens
  CDR3 for alpha chain variable domain of TCR clone 61402 (TRAV3, TRAJ9)
CDVRLNTGGFKTIF

SEQ ID NO: 122804 - protein, 15 aa, Homo sapiens
  CDR3 for beta chain variable domain of TCR clone 61402 (TRBV7-2, TRBJ2-1)
CASSLASGRVNEQFF

SEQ ID NO: 122805 - protein, 11 aa, Homo sapiens
  CDR3 for alpha chain variable domain of TCR clone 61403 (TRAV1-2, TRAJ20)
CAVSSDYKLSF

SEQ ID NO: 122806 - protein, 16 aa, Homo sapiens
  CDR3 for beta chain variable domain of TCR clone 61403 (TRBV29-1, TRBJ2-6)
CSVEDITYSGANVLTF

SEQ ID NO: 122807 - protein, 14 aa, Homo sapiens
  CDR3 for alpha chain variable domain of TCR clone 61404 (TRAV2, TRAJ37)
CAVDFTSNTGKLIF

SEQ ID NO: 122808 - protein, 14 aa, Homo sapiens
  CDR3 for beta chain variable domain of TCR clone 61404 (TRBV11-1, TRBJ2-7)
CASSFRQGSYEQYF

SEQ ID NO: 122809 - protein, 18 aa, Homo sapiens
  CDR3 for alpha chain variable domain of TCR clone 61405 (TRAV29/DV5, TRAJ52)
CAAGFRGAGGTSYGKLTF

SEQ ID NO: 122810 - protein, 14 aa, Homo sapiens
  CDR3 for beta chain variable domain of TCR clone 61405 (TRBV5-8, TRBJ2-7)
CASKLGQGAYEQYF

SEQ ID NO: 122811 - protein, 15 aa, Homo sapiens
  CDR3 for alpha chain variable domain of TCR clone 61406 (TRAV26-1, TRAJ29)
CIVRVEGSGNTPLVF

SEQ ID NO: 122812 - protein, 15 aa, Homo sapiens
  CDR3 for beta chain variable domain of TCR clone 61406 (TRBV28, TRBJ2-5)
CASTPGQGSIETQYF

SEQ ID NO: 122813 - protein, 18 aa, Homo sapiens
  CDR3 for alpha chain variable domain of TCR clone 61407 (TRAV12-2, )
CAVEDIQNPDPAVYQLRD

SEQ ID NO: 122814 - protein, 16 aa, Homo sapiens
  CDR3 for beta chain variable domain of TCR clone 61407 (TRBV12-5, TRBJ2-5)
CASGPRTSGNQETQYF

SEQ ID NO: 122815 - protein, 16 aa, Homo sapiens
  CDR3 for alpha chain variable domain of TCR clone 61408 (TRAV30, TRAJ24)
CGTEIVDADSWGKFQF

SEQ ID NO: 122816 - protein, 13 aa, Homo sapiens
  CDR3 for beta chain variable domain of TCR clone 61408 (TRBV15, TRBJ2-7)
CATSTTGHYEQYF

SEQ ID NO: 122817 - protein, 14 aa, Homo sapiens
  CDR3 for alpha chain variable domain of TCR clone 61409 (TRAV14/DV4, TRAJ15)
CAMRRGQAGTALIF

SEQ ID NO: 122818 - protein, 11 aa, Homo sapiens
  CDR3 for beta chain variable domain of TCR clone 61409 (TRBV7-2, TRBJ2-7)
CASSSGLWQYF

SEQ ID NO: 122819 - protein, 17 aa, Homo sapiens
  CDR3 for alpha chain variable domain of TCR clone 61410 (TRAV16, TRAJ58)
CITVLPNGETSGSRLTF

SEQ ID NO: 122820 - protein, 13 aa, Homo sapiens
  CDR3 for beta chain variable domain of TCR clone 61410 (TRBV20-1, TRBJ2-2)
CSASAAGTGELFF

SEQ ID NO: 122821 - protein, 14 aa, Homo sapiens
  CDR3 for alpha chain variable domain of TCR clone 61411 (TRAV17, TRAJ32)
CATDPGGATNKLIF

SEQ ID NO: 122822 - protein, 16 aa, Homo sapiens
  CDR3 for beta chain variable domain of TCR clone 61411 (TRBV27, TRBJ2-2)
CASSFRGLVRTGELFF

SEQ ID NO: 122823 - protein, 14 aa, Homo sapiens
  CDR3 for alpha chain variable domain of TCR clone 61412 (TRAV27, TRAJ36)
CAGPPKRGANNLFF

SEQ ID NO: 122824 - protein, 15 aa, Homo sapiens
  CDR3 for beta chain variable domain of TCR clone 61412 (TRBV18, TRBJ2-7)
CASAPASTPNYEQYF

SEQ ID NO: 122825 - protein, 11 aa, Homo sapiens
  CDR3 for alpha chain variable domain of TCR clone 61413 (TRAV2, TRAJ33)
CAVESNYQLIW

SEQ ID NO: 122826 - protein, 13 aa, Homo sapiens
  CDR3 for beta chain variable domain of TCR clone 61413 (TRBV19, TRBJ1-1)
CASTRRGDTEAFF

SEQ ID NO: 122827 - protein, 20 aa, Homo sapiens
  CDR3 for alpha chain variable domain of TCR clone 61414 (TRAV12-1, TRAJ42)
SSVIKPPTSVKGGSQGNLIF

SEQ ID NO: 122828 - protein, 18 aa, Homo sapiens
  CDR3 for beta chain variable domain of TCR clone 61414 (TRBV11-2, TRBJ2-3)
CASSLGGASRGAPNTQYF

SEQ ID NO: 122829 - protein, 18 aa, Homo sapiens
  CDR3 for alpha chain variable domain of TCR clone 61415 (TRAV13-1, TRAJ52)
CAAKNPNAGGTSYGKLTF

SEQ ID NO: 122830 - protein, 14 aa, Homo sapiens
  CDR3 for beta chain variable domain of TCR clone 61415 (TRBV7-2, TRBJ2-7)
CASRSRGAAYEQYF

SEQ ID NO: 122831 - protein, 17 aa, Homo sapiens
  CDR3 for alpha chain variable domain of TCR clone 61416 (TRAV2, TRAJ22)
ILQVREADAAEQRQLTF

SEQ ID NO: 122832 - protein, 16 aa, Homo sapiens
  CDR3 for beta chain variable domain of TCR clone 61416 (TRBV2, TRBJ2-5)
CTSSETQGVGEETQYF

SEQ ID NO: 122833 - protein, 14 aa, Homo sapiens
  CDR3 for alpha chain variable domain of TCR clone 61417 (TRAV12-1, TRAJ12)
CVVTRMDSSYKLIF

SEQ ID NO: 122834 - protein, 14 aa, Homo sapiens
  CDR3 for beta chain variable domain of TCR clone 61417 (TRBV7-6, TRBJ2-3)
CASSLGTVTDTQYF

SEQ ID NO: 122835 - protein, 14 aa, Homo sapiens
  CDR3 for alpha chain variable domain of TCR clone 61418 (TRAV29/DV5, TRAJ20)
CAATIRSNDYKLIF

SEQ ID NO: 122836 - protein, 15 aa, Homo sapiens
  CDR3 for beta chain variable domain of TCR clone 61418 (TRBV20-1, TRBJ2-1)
CSASSAGSSYNEQFF

SEQ ID NO: 122837 - protein, 13 aa, Homo sapiens
  CDR3 for alpha chain variable domain of TCR clone 61419 (TRAV12-3, TRAJ33)
CAMSVNNNYQLIW

SEQ ID NO: 122838 - protein, 13 aa, Homo sapiens
  CDR3 for beta chain variable domain of TCR clone 61419 (TRBV7-2, TRBJ2-2)
CASSLAVTGELFF

SEQ ID NO: 122839 - protein, 15 aa, Homo sapiens
  CDR3 for alpha chain variable domain of TCR clone 61420 (TRAV26-1, TRAJ22)
CIVKVSFWFCKATDL

SEQ ID NO: 122840 - protein, 13 aa, Homo sapiens
  CDR3 for beta chain variable domain of TCR clone 61420 (TRBV24-1, TRBJ2-2)
CATSETNTGELFF

SEQ ID NO: 122841 - protein, 14 aa, Homo sapiens
  CDR3 for alpha chain variable domain of TCR clone 61421 (TRAV8-3, TRAJ9)
CAVVYNTGGFKTIF

SEQ ID NO: 122842 - protein, 14 aa, Homo sapiens
  CDR3 for beta chain variable domain of TCR clone 61421 (TRBV7-3, TRBJ2-2)
CASSSGGYTGELFF

SEQ ID NO: 122843 - protein, 18 aa, Homo sapiens
  CDR3 for alpha chain variable domain of TCR clone 61422 (TRAV21, TRAJ52)
CAVRPSPAGGTSYGKLTF

SEQ ID NO: 122844 - protein, 14 aa, Homo sapiens
  CDR3 for beta chain variable domain of TCR clone 61422 (TRBV7-9, TRBJ2-2)
CASSLVQDTGELFF

SEQ ID NO: 122845 - protein, 18 aa, Homo sapiens
  CDR3 for alpha chain variable domain of TCR clone 61423 (TRAV12-3, TRAJ52)
CAMSVGGAGGTSYGKLTF

SEQ ID NO: 122846 - protein, 16 aa, Homo sapiens
  CDR3 for beta chain variable domain of TCR clone 61423 (TRBV12-4, TRBJ1-5)
CASSRPVGGSNQPQHF

SEQ ID NO: 122847 - protein, 15 aa, Homo sapiens
  CDR3 for alpha chain variable domain of TCR clone 61424 (TRAV21, TRAJ53)
CATLNSGGSNYKLTF

SEQ ID NO: 122848 - protein, 15 aa, Homo sapiens
  CDR3 for beta chain variable domain of TCR clone 61424 (TRBV7-9, TRBJ1-5)
CASSQGHQPNQPQHF

SEQ ID NO: 122849 - protein, 15 aa, Homo sapiens
  CDR3 for alpha chain variable domain of TCR clone 61425 (TRAV12-1, TRAJ42)
CVVTRDGGSQGNLIF

SEQ ID NO: 122850 - protein, 15 aa, Homo sapiens
  CDR3 for beta chain variable domain of TCR clone 61425 (TRBV11-2, TRBJ1-1)
CASSFSTRMNTEAFF

SEQ ID NO: 122851 - protein, 13 aa, Homo sapiens
  CDR3 for alpha chain variable domain of TCR clone 61426 (TRAV13-1, TRAJ21)
CEASIYNFNKFYF

SEQ ID NO: 122852 - protein, 13 aa, Homo sapiens
  CDR3 for beta chain variable domain of TCR clone 61426 (TRBV27, TRBJ1-4)
CASSLMGDEKLFF

SEQ ID NO: 122853 - protein, 14 aa, Homo sapiens
  CDR3 for alpha chain variable domain of TCR clone 61427 (TRAV8-2, TRAJ4)
CVVSPSGGYNKLIF

SEQ ID NO: 122854 - protein, 12 aa, Homo sapiens
  CDR3 for beta chain variable domain of TCR clone 61427 (TRBV7-8, TRBJ2-7)
CASSLGDREQYF

SEQ ID NO: 122855 - protein, 16 aa, Homo sapiens
  CDR3 for alpha chain variable domain of TCR clone 61428 (TRAV21, TRAJ52)
CAVTNAGGTSYGKLTF

SEQ ID NO: 122856 - protein, 15 aa, Homo sapiens
  CDR3 for beta chain variable domain of TCR clone 61428 (TRBV2, TRBJ2-4)
CASRTQGAAKNIQYF

SEQ ID NO: 122857 - protein, 17 aa, Homo sapiens
  CDR3 for alpha chain variable domain of TCR clone 61429 (TRAV1-1, TRAJ28)
CAVDPAYSGAGSYQLPF

SEQ ID NO: 122858 - protein, 14 aa, Homo sapiens
  CDR3 for beta chain variable domain of TCR clone 61429 (TRBV19, TRBJ2-1)
CASPTFVLSGEQFF

SEQ ID NO: 122859 - protein, 12 aa, Homo sapiens
  CDR3 for alpha chain variable domain of TCR clone 61430 (TRAV12-3, TRAJ17)
CAMTLTGNKLTF

SEQ ID NO: 122860 - protein, 16 aa, Homo sapiens
  CDR3 for beta chain variable domain of TCR clone 61430 (TRBV4-2, TRBJ2-3)
CASSLSGTGSTDTQYF

SEQ ID NO: 122861 - protein, 12 aa, Homo sapiens
  CDR3 for alpha chain variable domain of TCR clone 61431 (TRAV38-1, TRAJ32)
CAPLVATNKLIF

SEQ ID NO: 122862 - protein, 14 aa, Homo sapiens
  CDR3 for beta chain variable domain of TCR clone 61431 (TRBV29-1, TRBJ2-5)
CSVETSGSGETQYF

SEQ ID NO: 122863 - protein, 13 aa, Homo sapiens
  CDR3 for alpha chain variable domain of TCR clone 61432 (TRAV1-2, TRAJ12)
CAVSMDSSYKLIF

SEQ ID NO: 122864 - protein, 14 aa, Homo sapiens
  CDR3 for beta chain variable domain of TCR clone 61432 (TRBV19, TRBJ2-1)
CASSSGRDHNEQFF

SEQ ID NO: 122865 - protein, 19 aa, Homo sapiens
  CDR3 for alpha chain variable domain of TCR clone 61433 (TRAV26-1, TRAJ52)
CIGRAHRNAGGTSYGKLTF

SEQ ID NO: 122866 - protein, 15 aa, Homo sapiens
  CDR3 for beta chain variable domain of TCR clone 61433 (TRBV29-1, TRBJ2-1)
CSGRDRKSSYNEQFF

SEQ ID NO: 122867 - protein, 13 aa, Homo sapiens
  CDR3 for alpha chain variable domain of TCR clone 61434 (TRAV17, TRAJ6)
RATGFGGSYIPTF

SEQ ID NO: 122868 - protein, 14 aa, Homo sapiens
  CDR3 for beta chain variable domain of TCR clone 61434 (TRBV5-1, TRBJ2-5)
CASSFGGSQETQYF

SEQ ID NO: 122869 - protein, 14 aa, Homo sapiens
  CDR3 for alpha chain variable domain of TCR clone 61435 (TRAV16, TRAJ44)
CALSTTGTASKLTF

SEQ ID NO: 122870 - protein, 15 aa, Homo sapiens
  CDR3 for beta chain variable domain of TCR clone 61435 (TRBV7-2, TRBJ2-1)
CASTSASGDYNEQFF

SEQ ID NO: 122871 - protein, 13 aa, Homo sapiens
  CDR3 for alpha chain variable domain of TCR clone 61436 (TRAV12-3, TRAJ53)
CAMRGGSNYKLTF

SEQ ID NO: 122872 - protein, 13 aa, Homo sapiens
  CDR3 for beta chain variable domain of TCR clone 61436 (TRBV7-9, TRBJ1-2)
CASSLKQNYGYTF

SEQ ID NO: 122873 - protein, 12 aa, Homo sapiens
  CDR3 for alpha chain variable domain of TCR clone 61437 (TRAV8-3, TRAJ26)
CAGDNYGQNFVS

SEQ ID NO: 122874 - protein, 18 aa, Homo sapiens
  CDR3 for beta chain variable domain of TCR clone 61437 (TRBV12-4, TRBJ2-2)
CASSLVAGTRGRTGELFF

SEQ ID NO: 122875 - protein, 11 aa, Homo sapiens
  CDR3 for alpha chain variable domain of TCR clone 61438 (TRAV1-1, TRAJ23)
CAVRQGGKLIF

SEQ ID NO: 122876 - protein, 20 aa, Homo sapiens
  CDR3 for beta chain variable domain of TCR clone 61438 (TRBV7-8, TRBJ2-2)
CASSHLFLGPTTHITGELFF

SEQ ID NO: 122877 - protein, 15 aa, Homo sapiens
  CDR3 for alpha chain variable domain of TCR clone 61439 (TRAV26-1, TRAJ29)
CIVRVEGSGNRPLVF

SEQ ID NO: 122878 - protein, 14 aa, Homo sapiens
  CDR3 for beta chain variable domain of TCR clone 61439 (TRBV18, TRBJ2-5)
CASSPGVSQETQYF

SEQ ID NO: 122879 - protein, 14 aa, Homo sapiens
  CDR3 for alpha chain variable domain of TCR clone 61440 (TRAV12-2, TRAJ40)
CAVKIPSGTYKYIF

SEQ ID NO: 122880 - protein, 17 aa, Homo sapiens
  CDR3 for beta chain variable domain of TCR clone 61440 (TRBV13, TRBJ2-3)
CASSLPRVAGGRNTQYF

SEQ ID NO: 122881 - protein, 12 aa, Homo sapiens
  CDR3 for alpha chain variable domain of TCR clone 61441 (TRAV12-1, TRAJ40)
CVVPSGTYKYVF

SEQ ID NO: 122882 - protein, 15 aa, Homo sapiens
  CDR3 for beta chain variable domain of TCR clone 61441 (TRBV12-4, TRBJ2-1)
CASSPLSGRNNEQFF

SEQ ID NO: 122883 - protein, 14 aa, Homo sapiens
  CDR3 for alpha chain variable domain of TCR clone 61442 (TRAV1-2, TRAJ8)
CAVRKDTGFQKLVF

SEQ ID NO: 122884 - protein, 15 aa, Homo sapiens
  CDR3 for beta chain variable domain of TCR clone 61442 (TRBV4-1, TRBJ2-7)
CASSQNTGRLYEQYF

SEQ ID NO: 122885 - protein, 14 aa, Homo sapiens
  CDR3 for alpha chain variable domain of TCR clone 61443 (TRAV9-2, TRAJ39)
CALYIYNAGNMLTF

SEQ ID NO: 122886 - protein, 16 aa, Homo sapiens
  CDR3 for beta chain variable domain of TCR clone 61443 (TRBV2, TRBJ2-1)
CASRSPAGGKYNEQFF

SEQ ID NO: 122887 - protein, 14 aa, Homo sapiens
  CDR3 for alpha chain variable domain of TCR clone 61444 (TRAV12-3, TRAJ10)
SHLPLTGGGNKLTF

SEQ ID NO: 122888 - protein, 16 aa, Homo sapiens
  CDR3 for beta chain variable domain of TCR clone 61444 (TRBV2, TRBJ2-1)
CASRLNTASAYNEQFF

SEQ ID NO: 122889 - protein, 16 aa, Homo sapiens
  CDR3 for alpha chain variable domain of TCR clone 61445 (TRAV3, TRAJ10)
CAVRDMRAGGGNKLTF

SEQ ID NO: 122890 - protein, 12 aa, Homo sapiens
  CDR3 for beta chain variable domain of TCR clone 61445 (TRBV2, TRBJ2-1)
CAYGPPGNEQFF

SEQ ID NO: 122891 - protein, 14 aa, Homo sapiens
  CDR3 for alpha chain variable domain of TCR clone 61446 (TRAV8-2, TRAJ4)
CVVSPSGGYNKLIF

SEQ ID NO: 122892 - protein, 16 aa, Homo sapiens
  CDR3 for beta chain variable domain of TCR clone 61446 (TRBV7-3, TRBJ2-2)
CASSLKRGTLSGELFF

SEQ ID NO: 122893 - protein, 11 aa, Homo sapiens
  CDR3 for alpha chain variable domain of TCR clone 61447 (TRAV2, TRAJ13)
CASGGYQKVTF

SEQ ID NO: 122894 - protein, 15 aa, Homo sapiens
  CDR3 for beta chain variable domain of TCR clone 61447 (TRBV20-1, TRBJ2-1)
CSARGIGGTYNEQFF

SEQ ID NO: 122895 - protein, 11 aa, Homo sapiens
  CDR3 for alpha chain variable domain of TCR clone 61448 (TRAV3, TRAJ32)
CAGREGIMVVL

SEQ ID NO: 122896 - protein, 13 aa, Homo sapiens
  CDR3 for beta chain variable domain of TCR clone 61448 (TRBV2, TRBJ1-1)
CASSEGGNTEAFF

SEQ ID NO: 122897 - protein, 13 aa, Homo sapiens
  CDR3 for alpha chain variable domain of TCR clone 61449 (TRAV26-1, )
CIVSHRIEGFWNQ

SEQ ID NO: 122898 - protein, 14 aa, Homo sapiens
  CDR3 for beta chain variable domain of TCR clone 61449 (TRBV20-1, TRBJ2-7)
CSAWTALSSYEQYF

SEQ ID NO: 122899 - protein, 14 aa, Homo sapiens
  CDR3 for alpha chain variable domain of TCR clone 61450 (TRAV12-1, TRAJ3)
CGAARYSSASKIVF

SEQ ID NO: 122900 - protein, 15 aa, Homo sapiens
  CDR3 for beta chain variable domain of TCR clone 61450 (TRBV7-2, TRBJ2-6)
CASSREGSGANVLTF

SEQ ID NO: 122901 - protein, 12 aa, Homo sapiens
  CDR3 for alpha chain variable domain of TCR clone 61451 (TRAV36/DV7, TRAJ54)
CAVVRGAQKLVF

SEQ ID NO: 122902 - protein, 13 aa, Homo sapiens
  CDR3 for beta chain variable domain of TCR clone 61451 (TRBV7-3, TRBJ1-1)
CASSQDWGAEAFF

SEQ ID NO: 122903 - protein, 15 aa, Homo sapiens
  CDR3 for alpha chain variable domain of TCR clone 61452 (TRAV20, TRAJ43)
CAVQAGKSSNNDMRF

SEQ ID NO: 122904 - protein, 11 aa, Homo sapiens
  CDR3 for beta chain variable domain of TCR clone 61452 (TRBV7-9, TRBJ2-3)
CASSYTDTQYF

SEQ ID NO: 122905 - protein, 14 aa, Homo sapiens
  CDR3 for alpha chain variable domain of TCR clone 61453 (TRAV8-4, TRAJ4)
CAVSPSGGYNKLIF

SEQ ID NO: 122906 - protein, 15 aa, Homo sapiens
  CDR3 for beta chain variable domain of TCR clone 61453 (TRBV7-8, TRBJ2-3)
CASNLSADSGGAQYF

SEQ ID NO: 122907 - protein, 11 aa, Homo sapiens
  CDR3 for alpha chain variable domain of TCR clone 61454 (TRAV2, TRAJ21)
CAVFNFNKFYF

SEQ ID NO: 122908 - protein, 16 aa, Homo sapiens
  CDR3 for beta chain variable domain of TCR clone 61454 (TRBV19, TRBJ2-2)
CASRSPGTGATGELFF

SEQ ID NO: 122909 - protein, 14 aa, Homo sapiens
  CDR3 for alpha chain variable domain of TCR clone 61455 (TRAV12-3, TRAJ10)
SHLPLTGGGNKLTF

SEQ ID NO: 122910 - protein, 15 aa, Homo sapiens
  CDR3 for beta chain variable domain of TCR clone 61455 (TRBV19, TRBJ2-3)
CASRETMGSRNTQYF

SEQ ID NO: 122911 - protein, 15 aa, Homo sapiens
  CDR3 for alpha chain variable domain of TCR clone 61456 (TRAV8-3, TRAJ41)
CAVGSNSNSGYALNF

SEQ ID NO: 122912 - protein, 17 aa, Homo sapiens
  CDR3 for beta chain variable domain of TCR clone 61456 (TRBV25-1, TRBJ2-1)
CASSAYGQGRVVYEQFF

SEQ ID NO: 122913 - protein, 13 aa, Homo sapiens
  CDR3 for alpha chain variable domain of TCR clone 61457 (TRAV20, TRAJ9)
CAVPDTGGFKTIF

SEQ ID NO: 122914 - protein, 15 aa, Homo sapiens
  CDR3 for beta chain variable domain of TCR clone 61457 (TRBV27, TRBJ2-7)
RASSKAGRGGYEQYF

SEQ ID NO: 122915 - protein, 14 aa, Homo sapiens
  CDR3 for alpha chain variable domain of TCR clone 61458 (TRAV12-3, TRAJ10)
SHLPLTGGGNKLTF

SEQ ID NO: 122916 - protein, 14 aa, Homo sapiens
  CDR3 for beta chain variable domain of TCR clone 61458 (TRBV2, TRBJ1-5)
CASSENRGGQPQHF

SEQ ID NO: 122917 - protein, 13 aa, Homo sapiens
  CDR3 for alpha chain variable domain of TCR clone 61459 (TRAV36/DV7, TRAJ57)
CAVVLGGSEKLVF

SEQ ID NO: 122918 - protein, 14 aa, Homo sapiens
  CDR3 for beta chain variable domain of TCR clone 61459 (TRBV4-1, TRBJ1-2)
CASSQDGQVRGYAF

SEQ ID NO: 122919 - protein, 17 aa, Homo sapiens
  CDR3 for alpha chain variable domain of TCR clone 61460 (TRAV3, TRAJ7)
CAVRDMSPLEGTTDSLL

SEQ ID NO: 122920 - protein, 17 aa, Homo sapiens
  CDR3 for beta chain variable domain of TCR clone 61460 (TRBV15, TRBJ1-2)
CATSGREIGVVNYGYTF

SEQ ID NO: 122921 - protein, 14 aa, Homo sapiens
  CDR3 for alpha chain variable domain of TCR clone 61461 (TRAV26-1, TRAJ40)
CIVRLLSGTYKYIF

SEQ ID NO: 122922 - protein, 13 aa, Homo sapiens
  CDR3 for beta chain variable domain of TCR clone 61461 (TRBV3-1, TRBJ1-1)
CASSQPQGAEAFF

SEQ ID NO: 122923 - protein, 16 aa, Homo sapiens
  CDR3 for alpha chain variable domain of TCR clone 61462 (TRAV30, TRAJ44)
CSTEDKRTGTASKLTF

SEQ ID NO: 122924 - protein, 16 aa, Homo sapiens
  CDR3 for beta chain variable domain of TCR clone 61462 (TRBV10-2, TRBJ2-7)
CASSESPGSSGFEQYF

SEQ ID NO: 122925 - protein, 15 aa, Homo sapiens
  CDR3 for alpha chain variable domain of TCR clone 61463 (TRAV2, TRAJ15)
CAVEDRGQAGTALIF

SEQ ID NO: 122926 - protein, 11 aa, Homo sapiens
  CDR3 for beta chain variable domain of TCR clone 61463 (TRBV29-1, TRBJ2-5)
CSEDRTGTQYF

SEQ ID NO: 122927 - protein, 17 aa, Homo sapiens
  CDR3 for alpha chain variable domain of TCR clone 61464 (TRAV13-1, TRAJ52)
CAAGRNAGGTSYGKLTF

SEQ ID NO: 122928 - protein, 13 aa, Homo sapiens
  CDR3 for beta chain variable domain of TCR clone 61464 (TRBV19, TRBJ1-5)
CASSIGGNQPQHF

SEQ ID NO: 122929 - protein, 13 aa, Homo sapiens
  CDR3 for alpha chain variable domain of TCR clone 61465 (TRAV36/DV7, TRAJ53)
CALSGGSDYKLTF

SEQ ID NO: 122930 - protein, 13 aa, Homo sapiens
  CDR3 for beta chain variable domain of TCR clone 61465 (TRBV28, TRBJ2-7)
CASSLPSRYEQYF

SEQ ID NO: 122931 - protein, 15 aa, Homo sapiens
  CDR3 for alpha chain variable domain of TCR clone 61466 (TRAV17, TRAJ35)
CATAFVLGFGNVLHC

SEQ ID NO: 122932 - protein, 16 aa, Homo sapiens
  CDR3 for beta chain variable domain of TCR clone 61466 (TRBV11-2, TRBJ2-7)
CASSPLAGGPRYEQYF

SEQ ID NO: 122933 - protein, 13 aa, Homo sapiens
  CDR3 for alpha chain variable domain of TCR clone 61467 (TRAV26-1, TRAJ30)
CIVRVEANDKIIF

SEQ ID NO: 122934 - protein, 17 aa, Homo sapiens
  CDR3 for beta chain variable domain of TCR clone 61467 (TRBV13, TRBJ2-3)
CASSLSRVAGGRNTQYF

SEQ ID NO: 122935 - protein, 13 aa, Homo sapiens
  CDR3 for alpha chain variable domain of TCR clone 61468 (TRAV12-1, TRAJ31)
CVVNMNNNARLMF

SEQ ID NO: 122936 - protein, 14 aa, Homo sapiens
  CDR3 for beta chain variable domain of TCR clone 61468 (TRBV4-1, TRBJ2-2)
CASSQAVNTGELFF

SEQ ID NO: 122937 - protein, 17 aa, Homo sapiens
  CDR3 for alpha chain variable domain of TCR clone 61469 (TRAV3, TRAJ42)
CAVRDRDYGGSQGNLIF

SEQ ID NO: 122938 - protein, 12 aa, Homo sapiens
  CDR3 for beta chain variable domain of TCR clone 61469 (TRBV11-2, TRBJ2-1)
CASSPGTNEQFF

SEQ ID NO: 122939 - protein, 12 aa, Homo sapiens
  CDR3 for alpha chain variable domain of TCR clone 61470 (TRAV8-3, TRAJ20)
CAVDANDYKLSF

SEQ ID NO: 122940 - protein, 16 aa, Homo sapiens
  CDR3 for beta chain variable domain of TCR clone 61470 (TRBV19, TRBJ2-2)
CANRSPGTGATGELFF

SEQ ID NO: 122941 - protein, 14 aa, Homo sapiens
  CDR3 for alpha chain variable domain of TCR clone 61471 (TRAV17, TRAJ23)
CATALGGQGGKLIF

SEQ ID NO: 122942 - protein, 13 aa, Homo sapiens
  CDR3 for beta chain variable domain of TCR clone 61471 (TRBV7-9, TRBJ1-2)
CASSLKQNYGYTF

SEQ ID NO: 122943 - protein, 14 aa, Homo sapiens
  CDR3 for alpha chain variable domain of TCR clone 61472 (TRAV29/DV5, TRAJ32)
CAAAYGGATNKLIF

SEQ ID NO: 122944 - protein, 15 aa, Homo sapiens
  CDR3 for beta chain variable domain of TCR clone 61472 (TRBV11-2, TRBJ1-2)
CASSLEGVQRNGYTF

SEQ ID NO: 122945 - protein, 15 aa, Homo sapiens
  CDR3 for alpha chain variable domain of TCR clone 61473 (TRAV34, TRAJ38)
CGADFTPGNNRQLIW

SEQ ID NO: 122946 - protein, 16 aa, Homo sapiens
  CDR3 for beta chain variable domain of TCR clone 61473 (TRBV12-5, TRBJ2-5)
CASGPRTSGNQETQYF

SEQ ID NO: 122947 - protein, 15 aa, Homo sapiens
  CDR3 for alpha chain variable domain of TCR clone 61474 (TRAV26-1, TRAJ29)
CIVRVEGSGNTPLVF

SEQ ID NO: 122948 - protein, 14 aa, Homo sapiens
  CDR3 for beta chain variable domain of TCR clone 61474 (TRBV7-9, TRBJ1-5)
CQQPRSQPNQPQHF

SEQ ID NO: 122949 - protein, 14 aa, Homo sapiens
  CDR3 for alpha chain variable domain of TCR clone 61475 (TRAV1-2, TRAJ16)
CAVNRFSDGQKLPF

SEQ ID NO: 122950 - protein, 17 aa, Homo sapiens
  CDR3 for beta chain variable domain of TCR clone 61475 (TRBV7-8, TRBJ2-6)
CASSAGTGGAGANVLTF

SEQ ID NO: 122951 - protein, 14 aa, Homo sapiens
  CDR3 for alpha chain variable domain of TCR clone 61476 (TRAV8-4, TRAJ9)
CAVRMNTGGFKTIF

SEQ ID NO: 122952 - protein, 15 aa, Homo sapiens
  CDR3 for beta chain variable domain of TCR clone 61476 (TRBV10-2, TRBJ2-6)
CASSEQGTGANVLTF

SEQ ID NO: 122953 - protein, 14 aa, Homo sapiens
  CDR3 for alpha chain variable domain of TCR clone 61477 (TRAV21, TRAJ35)
CAVMPIGFGNVLHC

SEQ ID NO: 122954 - protein, 12 aa, Homo sapiens
  CDR3 for beta chain variable domain of TCR clone 61477 (TRBV7-8, TRBJ2-7)
CASSIKREEQYF

SEQ ID NO: 122955 - protein, 15 aa, Homo sapiens
  CDR3 for alpha chain variable domain of TCR clone 61478 (TRAV16, TRAJ17)
CALRGQEAAGNKLTF

SEQ ID NO: 122956 - protein, 15 aa, Homo sapiens
  CDR3 for beta chain variable domain of TCR clone 61478 (TRBV12-4, TRBJ1-5)
CASTQGTGPLQPQHF

SEQ ID NO: 122957 - protein, 23 aa, Homo sapiens
  CDR3 for alpha chain variable domain of TCR clone 61479 (TRAV26-1, TRAJ38)
CIADNAGNNPIQNPDPAVYQLRD

SEQ ID NO: 122958 - protein, 12 aa, Homo sapiens
  CDR3 for beta chain variable domain of TCR clone 61479 (TRBV11-2, TRBJ2-2)
CASSLGGGELFF

SEQ ID NO: 122959 - protein, 17 aa, Homo sapiens
  CDR3 for alpha chain variable domain of TCR clone 61480 (TRAV26-2, TRAJ42)
CILRDESYGGSQGNLIF

SEQ ID NO: 122960 - protein, 15 aa, Homo sapiens
  CDR3 for beta chain variable domain of TCR clone 61480 (TRBV6-6, TRBJ2-7)
CAGSYSYGGSYEQYF

SEQ ID NO: 122961 - protein, 21 aa, Homo sapiens
  CDR3 for alpha chain variable domain of TCR clone 61481 (TRAV1-1, TRAJ6)
CLLLLRCERLEGTGGSYIPTF

SEQ ID NO: 122962 - protein, 14 aa, Homo sapiens
  CDR3 for beta chain variable domain of TCR clone 61481 (TRBV7-2, TRBJ2-5)
CASSLSGGGETQYF

SEQ ID NO: 122963 - protein, 17 aa, Homo sapiens
  CDR3 for alpha chain variable domain of TCR clone 61482 (TRAV23/DV6, TRAJ57)
CAPSSTLSQGGSEKLVF

SEQ ID NO: 122964 - protein, 14 aa, Homo sapiens
  CDR3 for beta chain variable domain of TCR clone 61482 (TRBV25-1, TRBJ1-1)
CASTHLGGNTEAFF

SEQ ID NO: 122965 - protein, 11 aa, Homo sapiens
  CDR3 for alpha chain variable domain of TCR clone 61483 (TRAV17, TRAJ36)
CAPTGANNLFF

SEQ ID NO: 122966 - protein, 12 aa, Homo sapiens
  CDR3 for beta chain variable domain of TCR clone 61483 (TRBV29-1, TRBJ2-3)
CSVAGGADTQYF

SEQ ID NO: 122967 - protein, 16 aa, Homo sapiens
  CDR3 for alpha chain variable domain of TCR clone 61484 (TRAV8-3, TRAJ10)
CAVGPIVTGGGNKLTF

SEQ ID NO: 122968 - protein, 16 aa, Homo sapiens
  CDR3 for beta chain variable domain of TCR clone 61484 (TRBV7-2, TRBJ2-5)
CASSSKWLSGQETQYF

SEQ ID NO: 122969 - protein, 14 aa, Homo sapiens
  CDR3 for alpha chain variable domain of TCR clone 61485 (TRAV12-3, TRAJ9)
CAMSVETGGFKTIF

SEQ ID NO: 122970 - protein, 12 aa, Homo sapiens
  CDR3 for beta chain variable domain of TCR clone 61485 (TRBV11-2, TRBJ2-1)
CASSPGNNEQFF

SEQ ID NO: 122971 - protein, 13 aa, Homo sapiens
  CDR3 for alpha chain variable domain of TCR clone 61486 (TRAV24, TRAJ42)
CAFSTGSQGNLIF

SEQ ID NO: 122972 - protein, 18 aa, Homo sapiens
  CDR3 for beta chain variable domain of TCR clone 61486 (TRBV12-4, TRBJ2-2)
CASSLVAGTRGRTGELFF

SEQ ID NO: 122973 - protein, 12 aa, Homo sapiens
  CDR3 for alpha chain variable domain of TCR clone 61487 (TRAV17, TRAJ57)
CATDGGSEKLVF

SEQ ID NO: 122974 - protein, 18 aa, Homo sapiens
  CDR3 for beta chain variable domain of TCR clone 61487 (TRBV6-3, TRBJ2-2)
CTSVPAVFLATLTGELFF

SEQ ID NO: 122975 - protein, 13 aa, Homo sapiens
  CDR3 for alpha chain variable domain of TCR clone 61488 (TRAV13-1, TRAJ6)
CAASKGGSYIPTF

SEQ ID NO: 122976 - protein, 14 aa, Homo sapiens
  CDR3 for beta chain variable domain of TCR clone 61488 (TRBV7-2, TRBJ2-1)
CASSVGVGYNEQFF

SEQ ID NO: 122977 - protein, 13 aa, Homo sapiens
  CDR3 for alpha chain variable domain of TCR clone 61489 (TRAV17, TRAJ34)
CATDLYNTDKLIF

SEQ ID NO: 122978 - protein, 12 aa, Homo sapiens
  CDR3 for beta chain variable domain of TCR clone 61489 (TRBV11-2, TRBJ2-2)
CTSSLGGGELFF

SEQ ID NO: 122979 - protein, 11 aa, Homo sapiens
  CDR3 for alpha chain variable domain of TCR clone 61490 (TRAV12-2, TRAJ23)
CARGRGGKLIF

SEQ ID NO: 122980 - protein, 14 aa, Homo sapiens
  CDR3 for beta chain variable domain of TCR clone 61490 (TRBV28, TRBJ2-5)
CASSLGDMAETQYF

SEQ ID NO: 122981 - protein, 15 aa, Homo sapiens
  CDR3 for alpha chain variable domain of TCR clone 61491 (TRAV3, TRAJ45)
CAGRTPWGGADGLTF

SEQ ID NO: 122982 - protein, 16 aa, Homo sapiens
  CDR3 for beta chain variable domain of TCR clone 61491 (TRBV6-1, TRBJ2-2)
CASSFGQGANTGELFF

SEQ ID NO: 122983 - protein, 15 aa, Homo sapiens
  CDR3 for alpha chain variable domain of TCR clone 61492 (TRAV8-3, TRAJ23)
CAVGDRYNQGGKLIF

SEQ ID NO: 122984 - protein, 14 aa, Homo sapiens
  CDR3 for beta chain variable domain of TCR clone 61492 (TRBV7-2, TRBJ2-7)
CASSPKTSFYEQYF

SEQ ID NO: 122985 - protein, 22 aa, Homo sapiens
  CDR3 for alpha chain variable domain of TCR clone 61493 (TRAV4, )
CLGGRVKPNIQNPDPAVYQLRD

SEQ ID NO: 122986 - protein, 12 aa, Homo sapiens
  CDR3 for beta chain variable domain of TCR clone 61493 (TRBV11-2, TRBJ2-2)
CASSLGGGELFF

SEQ ID NO: 122987 - protein, 11 aa, Homo sapiens
  CDR3 for alpha chain variable domain of TCR clone 61494 (TRAV3, TRAJ21)
CAVGNFNKFYF

SEQ ID NO: 122988 - protein, 14 aa, Homo sapiens
  CDR3 for beta chain variable domain of TCR clone 61494 (TRBV7-8, TRBJ2-7)
CASSPRDRVYEQYF

SEQ ID NO: 122989 - protein, 10 aa, Homo sapiens
  CDR3 for alpha chain variable domain of TCR clone 61495 (TRAV30, TRAJ48)
CGIGNEKLTL

SEQ ID NO: 122990 - protein, 15 aa, Homo sapiens
  CDR3 for beta chain variable domain of TCR clone 61495 (TRBV28, TRBJ2-1)
CASRKTGTAYNEQFF

SEQ ID NO: 122991 - protein, 12 aa, Homo sapiens
  CDR3 for alpha chain variable domain of TCR clone 61496 (TRAV12-2, TRAJ10)
WGVTGGGNKLTF

SEQ ID NO: 122992 - protein, 14 aa, Homo sapiens
  CDR3 for beta chain variable domain of TCR clone 61496 (TRBV20-1, TRBJ1-5)
CSASPGTVNQPQHF

SEQ ID NO: 122993 - protein, 19 aa, Homo sapiens
  CDR3 for alpha chain variable domain of TCR clone 61497 (TRAV1-2, TRAJ26)
CLLPLCCERPGNYGQNFVF

SEQ ID NO: 122994 - protein, 12 aa, Homo sapiens
  CDR3 for beta chain variable domain of TCR clone 61497 (TRBV7-9, TRBJ2-7)
CATRTDAYEQYF

SEQ ID NO: 122995 - protein, 14 aa, Homo sapiens
  CDR3 for alpha chain variable domain of TCR clone 61498 (TRAV2, TRAJ9)
CAVEDRSGGFKTIF

SEQ ID NO: 122996 - protein, 14 aa, Homo sapiens
  CDR3 for beta chain variable domain of TCR clone 61498 (TRBV5-1, TRBJ2-3)
CASSLFGPTDTQYL

SEQ ID NO: 122997 - protein, 14 aa, Homo sapiens
  CDR3 for alpha chain variable domain of TCR clone 61499 (TRAV29/DV5, TRAJ36)
CAARRKTGANNLFF

SEQ ID NO: 122998 - protein, 12 aa, Homo sapiens
  CDR3 for beta chain variable domain of TCR clone 61499 (TRBV7-9, TRBJ2-7)
CASSIKREEQYF

SEQ ID NO: 122999 - protein, 14 aa, Homo sapiens
  CDR3 for alpha chain variable domain of TCR clone 61500 (TRAV12-2, TRAJ13)
CAVKRTGGYQKVTF

SEQ ID NO: 123000 - protein, 16 aa, Homo sapiens
  CDR3 for beta chain variable domain of TCR clone 61500 (TRBV20-1, TRBJ1-2)
CSASMGQGVANYGYTF

SEQ ID NO: 123001 - protein, 11 aa, Homo sapiens
  CDR3 for alpha chain variable domain of TCR clone 61501 (TRAV3, TRAJ21)
CAVGNFNKFYF

SEQ ID NO: 123002 - protein, 13 aa, Homo sapiens
  CDR3 for beta chain variable domain of TCR clone 61501 (TRBV7-9, TRBJ1-2)
CASSLKQSYGYTF

SEQ ID NO: 123003 - protein, 15 aa, Homo sapiens
  CDR3 for alpha chain variable domain of TCR clone 61502 (TRAV12-3, TRAJ49)
CAMAVNPNTGNQFYF

SEQ ID NO: 123004 - protein, 18 aa, Homo sapiens
  CDR3 for beta chain variable domain of TCR clone 61502 (TRBV4-1, TRBJ1-5)
CASSQDPRGQGLNQPQHF

SEQ ID NO: 123005 - protein, 12 aa, Homo sapiens
  CDR3 for alpha chain variable domain of TCR clone 61503 (TRAV12-3, TRAJ5)
CAMDTGRRALTF

SEQ ID NO: 123006 - protein, 16 aa, Homo sapiens
  CDR3 for beta chain variable domain of TCR clone 61503 (TRBV2, TRBJ2-1)
CASRSPAGGKYNEQFF

SEQ ID NO: 123007 - protein, 13 aa, Homo sapiens
  CDR3 for alpha chain variable domain of TCR clone 61504 (TRAV39, TRAJ58)
CAGDETSGSRLTF

SEQ ID NO: 123008 - protein, 13 aa, Homo sapiens
  CDR3 for beta chain variable domain of TCR clone 61504 (TRBV15, TRBJ2-7)
CATSTTGHYEQYF

SEQ ID NO: 123009 - protein, 13 aa, Homo sapiens
  CDR3 for alpha chain variable domain of TCR clone 61505 (TRAV12-2, TRAJ37)
CAGGSGNTGKLIF

SEQ ID NO: 123010 - protein, 14 aa, Homo sapiens
  CDR3 for beta chain variable domain of TCR clone 61505 (TRBV6-1, TRBJ2-6)
CSSQQGAGANVLTF

SEQ ID NO: 123011 - protein, 16 aa, Homo sapiens
  CDR3 for alpha chain variable domain of TCR clone 61506 (TRAV12-2, TRAJ32)
CAVNLGQGGATNKLIF

SEQ ID NO: 123012 - protein, 13 aa, Homo sapiens
  CDR3 for beta chain variable domain of TCR clone 61506 (TRBV27, TRBJ2-3)
CASSWGRTDTQYF

SEQ ID NO: 123013 - protein, 14 aa, Homo sapiens
  CDR3 for alpha chain variable domain of TCR clone 61507 (TRAV8-3, TRAJ39)
CAVGANNAGNMLTF

SEQ ID NO: 123014 - protein, 16 aa, Homo sapiens
  CDR3 for beta chain variable domain of TCR clone 61507 (TRBV6-1, TRBJ2-5)
CASSETLYRGAETQYF

SEQ ID NO: 123015 - protein, 11 aa, Homo sapiens
  CDR3 for alpha chain variable domain of TCR clone 61508 (TRAV2, TRAJ13)
CASGDYQKVTF

SEQ ID NO: 123016 - protein, 15 aa, Homo sapiens
  CDR3 for beta chain variable domain of TCR clone 61508 (TRBV7-9, TRBJ1-6)
CASSSPGRGNSPLHF

SEQ ID NO: 123017 - protein, 18 aa, Homo sapiens
  CDR3 for alpha chain variable domain of TCR clone 61509 (TRAV21, TRAJ52)
CAVRPSPAGGTSSGKLTF

SEQ ID NO: 123018 - protein, 15 aa, Homo sapiens
  CDR3 for beta chain variable domain of TCR clone 61509 (TRBV19, TRBJ1-1)
CASTSGQIQNTEAFF

SEQ ID NO: 123019 - protein, 12 aa, Homo sapiens
  CDR3 for alpha chain variable domain of TCR clone 61510 (TRAV13-2, TRAJ23)
CAERHRGGKLIF

SEQ ID NO: 123020 - protein, 13 aa, Homo sapiens
  CDR3 for beta chain variable domain of TCR clone 61510 (TRBV20-1, TRBJ2-2)
CSALSGRAGELFF

SEQ ID NO: 123021 - protein, 16 aa, Homo sapiens
  CDR3 for alpha chain variable domain of TCR clone 61511 (TRAV14/DV4, TRAJ21)
CAMREGPENNFNKFYF

SEQ ID NO: 123022 - protein, 12 aa, Homo sapiens
  CDR3 for beta chain variable domain of TCR clone 61511 (TRBV29-1, TRBJ2-2)
CSVDKYTGELVF

SEQ ID NO: 123023 - protein, 12 aa, Homo sapiens
  CDR3 for alpha chain variable domain of TCR clone 61512 (TRAV12-1, TRAJ40)
CVVTSGTYKYIF

SEQ ID NO: 123024 - protein, 13 aa, Homo sapiens
  CDR3 for beta chain variable domain of TCR clone 61512 (TRBV7-3, TRBJ1-1)
CASSQDWGAEAFF

SEQ ID NO: 123025 - protein, 11 aa, Homo sapiens
  CDR3 for alpha chain variable domain of TCR clone 61513 (TRAV3, TRAJ21)
CAVGNFNKFYF

SEQ ID NO: 123026 - protein, 12 aa, Homo sapiens
  CDR3 for beta chain variable domain of TCR clone 61513 (TRBV28, TRBJ2-6)
CAIQAGANVLTF

SEQ ID NO: 123027 - protein, 17 aa, Homo sapiens
  CDR3 for alpha chain variable domain of TCR clone 61514 (TRAV8-1, TRAJ43)
CAVTTDMRFGAGTRLTV

SEQ ID NO: 123028 - protein, 17 aa, Homo sapiens
  CDR3 for beta chain variable domain of TCR clone 61514 (TRBV5-4, TRBJ2-1)
CASSSAGGRGPYNEQFF

SEQ ID NO: 123029 - protein, 12 aa, Homo sapiens
  CDR3 for alpha chain variable domain of TCR clone 61515 (TRAV27, TRAJ9)
CAGESGGFKTIF

SEQ ID NO: 123030 - protein, 14 aa, Homo sapiens
  CDR3 for beta chain variable domain of TCR clone 61515 (TRBV7-2, TRBJ2-7)
CASSPKTSFYEQYF

SEQ ID NO: 123031 - protein, 15 aa, Homo sapiens
  CDR3 for alpha chain variable domain of TCR clone 61516 (TRAV38-1, TRAJ37)
CAFIFGSGNTGKLIV

SEQ ID NO: 123032 - protein, 12 aa, Homo sapiens
  CDR3 for beta chain variable domain of TCR clone 61516 (TRBV7-9, TRBJ2-7)
CASSLEGYEQYF

SEQ ID NO: 123033 - protein, 16 aa, Homo sapiens
  CDR3 for alpha chain variable domain of TCR clone 61517 (TRAV1-2, TRAJ10)
CAVRGVLTGGGNKLTF

SEQ ID NO: 123034 - protein, 15 aa, Homo sapiens
  CDR3 for beta chain variable domain of TCR clone 61517 (TRBV7-9, TRBJ1-6)
CASSSPGRGNSTLHF

SEQ ID NO: 123035 - protein, 15 aa, Homo sapiens
  CDR3 for alpha chain variable domain of TCR clone 61518 (TRAV3, TRAJ5)
CPVRDLDTGRRALTF

SEQ ID NO: 123036 - protein, 13 aa, Homo sapiens
  CDR3 for beta chain variable domain of TCR clone 61518 (TRBV12-4, TRBJ2-7)
CASSPTETYEQYF

SEQ ID NO: 123037 - protein, 15 aa, Homo sapiens
  CDR3 for alpha chain variable domain of TCR clone 61519 (TRAV12-3, TRAJ49)
CAMAVTPNTGNQFYF

SEQ ID NO: 123038 - protein, 18 aa, Homo sapiens
  CDR3 for beta chain variable domain of TCR clone 61519 (TRBV4-1, TRBJ1-5)
CASSQDPRGQELNQPQHF

SEQ ID NO: 123039 - protein, 12 aa, Homo sapiens
  CDR3 for alpha chain variable domain of TCR clone 61520 (TRAV27, TRAJ58)
CAGARDTCRLTL

SEQ ID NO: 123040 - protein, 14 aa, Homo sapiens
  CDR3 for beta chain variable domain of TCR clone 61520 (TRBV7-3, TRBJ2-1)
CASSLGTSANEQFF

SEQ ID NO: 123041 - protein, 13 aa, Homo sapiens
  CDR3 for alpha chain variable domain of TCR clone 61521 (TRAV12-3, TRAJ7)
CAMTPYGNNRLAF

SEQ ID NO: 123042 - protein, 16 aa, Homo sapiens
  CDR3 for beta chain variable domain of TCR clone 61521 (TRBV20-1, TRBJ1-4)
GSARPYGGELNEKLFF

SEQ ID NO: 123043 - protein, 13 aa, Homo sapiens
  CDR3 for alpha chain variable domain of TCR clone 61522 (TRAV2, TRAJ40)
CAVVTSGTYKYIF

SEQ ID NO: 123044 - protein, 15 aa, Homo sapiens
  CDR3 for beta chain variable domain of TCR clone 61522 (TRBV7-6, TRBJ1-5)
CASSQSSGINQPQHF

SEQ ID NO: 123045 - protein, 19 aa, Homo sapiens
  CDR3 for alpha chain variable domain of TCR clone 61523 (TRAV1-2, TRAJ26)
CLLPLCCERPDNYGQNFVF

SEQ ID NO: 123046 - protein, 14 aa, Homo sapiens
  CDR3 for beta chain variable domain of TCR clone 61523 (TRBV6-1, TRBJ1-3)
CASVQGGGGNTIYF

SEQ ID NO: 123047 - protein, 19 aa, Homo sapiens
  CDR3 for alpha chain variable domain of TCR clone 61524 (TRAV2, TRAJ20)
IFQVREADAAVYRDCKLSF

SEQ ID NO: 123048 - protein, 12 aa, Homo sapiens
  CDR3 for beta chain variable domain of TCR clone 61524 (TRBV11-2, TRBJ2-2)
CASSLGGGELFF

SEQ ID NO: 123049 - protein, 13 aa, Homo sapiens
  CDR3 for alpha chain variable domain of TCR clone 61525 (TRAV12-2, TRAJ10)
CAVPTGGGNKLTF

SEQ ID NO: 123050 - protein, 17 aa, Homo sapiens
  CDR3 for beta chain variable domain of TCR clone 61525 (TRBV11-2, TRBJ2-1)
CASSLYPPGVEYNEQFF

SEQ ID NO: 123051 - protein, 12 aa, Homo sapiens
  CDR3 for alpha chain variable domain of TCR clone 61526 (TRAV38-1, TRAJ32)
CAPLGATNKLIF

SEQ ID NO: 123052 - protein, 17 aa, Homo sapiens
  CDR3 for beta chain variable domain of TCR clone 61526 (TRBV13, TRBJ2-3)
CDSSLSRVAGGRNTQYF

SEQ ID NO: 123053 - protein, 13 aa, Homo sapiens
  CDR3 for alpha chain variable domain of TCR clone 61527 (TRAV25, TRAJ48)
CAGPKGGNEKSTF

SEQ ID NO: 123054 - protein, 15 aa, Homo sapiens
  CDR3 for beta chain variable domain of TCR clone 61527 (TRBV9, TRBJ2-6)
CASSVLWNGANVLTF

SEQ ID NO: 123055 - protein, 15 aa, Homo sapiens
  CDR3 for alpha chain variable domain of TCR clone 61528 (TRAV13-1, TRAJ15)
CAASIERQAGTALIF

SEQ ID NO: 123056 - protein, 13 aa, Homo sapiens
  CDR3 for beta chain variable domain of TCR clone 61528 (TRBV5-1, TRBJ2-7)
CASSAIGGNEQYF

SEQ ID NO: 123057 - protein, 16 aa, Homo sapiens
  CDR3 for alpha chain variable domain of TCR clone 61529 (TRAV27, TRAJ13)
CAGAKSDSGGCQKVTF

SEQ ID NO: 123058 - protein, 15 aa, Homo sapiens
  CDR3 for beta chain variable domain of TCR clone 61529 (TRBV29-1, TRBJ2-1)
CSVGRHALFYNEQFF

SEQ ID NO: 123059 - protein, 16 aa, Homo sapiens
  CDR3 for alpha chain variable domain of TCR clone 61530 (TRAV14/DV4, TRAJ53)
CAMREGGGGSNYKLTF

SEQ ID NO: 123060 - protein, 15 aa, Homo sapiens
  CDR3 for beta chain variable domain of TCR clone 61530 (TRBV2, TRBJ2-7)
CASSEGLARSYEQYF

SEQ ID NO: 123061 - protein, 15 aa, Homo sapiens
  CDR3 for alpha chain variable domain of TCR clone 61531 (TRAV13-1, TRAJ32)
CAASIYGGATSKLIF

SEQ ID NO: 123062 - protein, 17 aa, Homo sapiens
  CDR3 for beta chain variable domain of TCR clone 61531 (TRBV7-3, TRBJ2-5)
CASSLGSGRSGSETQYF

SEQ ID NO: 123063 - protein, 14 aa, Homo sapiens
  CDR3 for alpha chain variable domain of TCR clone 61532 (TRAV8-4, TRAJ9)
CAVRINTGGLKTIF

SEQ ID NO: 123064 - protein, 14 aa, Homo sapiens
  CDR3 for beta chain variable domain of TCR clone 61532 (TRBV6-5, TRBJ1-3)
CASSYRSSGNTIYF

SEQ ID NO: 123065 - protein, 16 aa, Homo sapiens
  CDR3 for alpha chain variable domain of TCR clone 61533 (TRAV3, TRAJ18)
CAVRYGRGSTLGRLYF

SEQ ID NO: 123066 - protein, 15 aa, Homo sapiens
  CDR3 for beta chain variable domain of TCR clone 61533 (TRBV7-9, TRBJ1-6)
CASSSPGRGNSPLHF

SEQ ID NO: 123067 - protein, 15 aa, Homo sapiens
  CDR3 for alpha chain variable domain of TCR clone 61534 (TRAV8-2, TRAJ42)
CVVSAYMGSQGNLTF

SEQ ID NO: 123068 - protein, 11 aa, Homo sapiens
  CDR3 for beta chain variable domain of TCR clone 61534 (TRBV5-1, TRBJ2-1)
CASSIGQEQFF

SEQ ID NO: 123069 - protein, 14 aa, Homo sapiens
  CDR3 for alpha chain variable domain of TCR clone 61535 (TRAV8-3, TRAJ4)
CAEGAAGGYNKLIF

SEQ ID NO: 123070 - protein, 15 aa, Homo sapiens
  CDR3 for beta chain variable domain of TCR clone 61535 (TRBV6-5, TRBJ2-1)
CASSYDAGAGNEQFF

SEQ ID NO: 123071 - protein, 18 aa, Homo sapiens
  CDR3 for alpha chain variable domain of TCR clone 61536 (TRAV13-1, TRAJ52)
CAAKNPNDGGTSYGKLTF

SEQ ID NO: 123072 - protein, 14 aa, Homo sapiens
  CDR3 for beta chain variable domain of TCR clone 61536 (TRBV6-5, TRBJ1-1)
CASSFGQGLTEAFF

SEQ ID NO: 123073 - protein, 14 aa, Homo sapiens
  CDR3 for alpha chain variable domain of TCR clone 61537 (TRAV38-1, TRAJ35)
CAFLTIGFGNVLHC

SEQ ID NO: 123074 - protein, 17 aa, Homo sapiens
  CDR3 for beta chain variable domain of TCR clone 61537 (TRBV28, TRBJ1-1)
CASSGDLRTESNTEAFS

SEQ ID NO: 123075 - protein, 14 aa, Homo sapiens
  CDR3 for alpha chain variable domain of TCR clone 61538 (TRAV12-2, TRAJ13)
CAVKKTGGYQKVTF

SEQ ID NO: 123076 - protein, 15 aa, Homo sapiens
  CDR3 for beta chain variable domain of TCR clone 61538 (TRBV27, TRBJ2-1)
CASSNGAGSSNEQFF

SEQ ID NO: 123077 - protein, 15 aa, Homo sapiens
  CDR3 for alpha chain variable domain of TCR clone 61539 (TRAV13-1, TRAJ42)
CAASIVGGSQGNLIF

SEQ ID NO: 123078 - protein, 15 aa, Homo sapiens
  CDR3 for beta chain variable domain of TCR clone 61539 (TRBV19, TRBJ2-1)
CASSIVRGEGREQFF

SEQ ID NO: 123079 - protein, 13 aa, Homo sapiens
  CDR3 for alpha chain variable domain of TCR clone 61540 (TRAV2, TRAJ15)
CAVASQAGTALIF

SEQ ID NO: 123080 - protein, 16 aa, Homo sapiens
  CDR3 for beta chain variable domain of TCR clone 61540 (TRBV5-1, TRBJ1-1)
CASSSGSNSLNTEAFF

SEQ ID NO: 123081 - protein, 14 aa, Homo sapiens
  CDR3 for alpha chain variable domain of TCR clone 61541 (TRAV2, TRAJ37)
CAVDFTSNTGKLTF

SEQ ID NO: 123082 - protein, 13 aa, Homo sapiens
  CDR3 for beta chain variable domain of TCR clone 61541 (TRBV20-1, TRBJ1-1)
CSAPLGGGTEAFF

SEQ ID NO: 123083 - protein, 17 aa, Homo sapiens
  CDR3 for alpha chain variable domain of TCR clone 61542 (TRAV16, TRAJ58)
CITVLSNGETSGSRLTF

SEQ ID NO: 123084 - protein, 17 aa, Homo sapiens
  CDR3 for beta chain variable domain of TCR clone 61542 (TRBV18, TRBJ2-1)
CTSSKGLSGGADNEQFF

SEQ ID NO: 123085 - protein, 13 aa, Homo sapiens
  CDR3 for alpha chain variable domain of TCR clone 61543 (TRAV12-2, TRAJ4)
CAVFSGGYNKLIF

SEQ ID NO: 123086 - protein, 11 aa, Homo sapiens
  CDR3 for beta chain variable domain of TCR clone 61543 (TRBV11-2, TRBJ2-2)
CASSLPGELFF

SEQ ID NO: 123087 - protein, 17 aa, Homo sapiens
  CDR3 for alpha chain variable domain of TCR clone 61544 (TRAV8-3, TRAJ42)
CAVRDRDYGGSQGNLIF

SEQ ID NO: 123088 - protein, 14 aa, Homo sapiens
  CDR3 for beta chain variable domain of TCR clone 61544 (TRBV7-2, TRBJ2-7)
CASRSQGAAYEQYF

SEQ ID NO: 123089 - protein, 12 aa, Homo sapiens
  CDR3 for alpha chain variable domain of TCR clone 61545 (TRAV12-2, TRAJ26)
CAPPRVVRILSL

SEQ ID NO: 123090 - protein, 11 aa, Homo sapiens
  CDR3 for beta chain variable domain of TCR clone 61545 (TRBV12-4, TRBJ2-3)
CASTATDTQYF

SEQ ID NO: 123091 - protein, 12 aa, Homo sapiens
  CDR3 for alpha chain variable domain of TCR clone 61546 (TRAV25, TRAJ11)
CAGASGYSTLTF

SEQ ID NO: 123092 - protein, 15 aa, Homo sapiens
  CDR3 for beta chain variable domain of TCR clone 61546 (TRBV19, TRBJ1-1)
CASRETGGVNTEAFF

SEQ ID NO: 123093 - protein, 14 aa, Homo sapiens
  CDR3 for alpha chain variable domain of TCR clone 61547 (TRAV13-1, TRAJ6)
CAASITGGSYIPTF

SEQ ID NO: 123094 - protein, 15 aa, Homo sapiens
  CDR3 for beta chain variable domain of TCR clone 61547 (TRBV20-1, TRBJ2-7)
CSARDRVSGMDEQYF

SEQ ID NO: 123095 - protein, 14 aa, Homo sapiens
  CDR3 for alpha chain variable domain of TCR clone 61548 (TRAV1-2, TRAJ8)
CAVREDTGFQKLVF

SEQ ID NO: 123096 - protein, 14 aa, Homo sapiens
  CDR3 for beta chain variable domain of TCR clone 61548 (TRBV19, TRBJ1-5)
CASGTGDSNQPQHF

SEQ ID NO: 123097 - protein, 15 aa, Homo sapiens
  CDR3 for alpha chain variable domain of TCR clone 61549 (TRAV8-3, TRAJ11)
CAVGLLNSGYSTLTF

SEQ ID NO: 123098 - protein, 16 aa, Homo sapiens
  CDR3 for beta chain variable domain of TCR clone 61549 (TRBV7-9, TRBJ1-2)
CARSLGFSSGEDGYTF

SEQ ID NO: 123099 - protein, 14 aa, Homo sapiens
  CDR3 for alpha chain variable domain of TCR clone 61550 (TRAV8-4, TRAJ13)
CAVSEGWGLPESYL

SEQ ID NO: 123100 - protein, 15 aa, Homo sapiens
  CDR3 for beta chain variable domain of TCR clone 61550 (TRBV12-4, TRBJ1-1)
CASSLAVSRGAEAFF

SEQ ID NO: 123101 - protein, 14 aa, Homo sapiens
  CDR3 for alpha chain variable domain of TCR clone 61551 (TRAV1-1, TRAJ27)
CAVIYNTNAVKSTF

SEQ ID NO: 123102 - protein, 15 aa, Homo sapiens
  CDR3 for beta chain variable domain of TCR clone 61551 (TRBV9, TRBJ1-6)
CASSVAGTGDSPLHF

SEQ ID NO: 123103 - protein, 15 aa, Homo sapiens
  CDR3 for alpha chain variable domain of TCR clone 61552 (TRAV26-1, TRAJ29)
CIVRVEGSGNTPLVF

SEQ ID NO: 123104 - protein, 15 aa, Homo sapiens
  CDR3 for beta chain variable domain of TCR clone 61552 (TRBV7-9, TRBJ1-5)
GASSQGHQPNQPQHF

SEQ ID NO: 123105 - protein, 13 aa, Homo sapiens
  CDR3 for alpha chain variable domain of TCR clone 61553 (TRAV20, TRAJ20)
CAVQAGSGYKLSL

SEQ ID NO: 123106 - protein, 12 aa, Homo sapiens
  CDR3 for beta chain variable domain of TCR clone 61553 (TRBV3-1, TRBJ2-3)
CQQPRGGDTQYF

SEQ ID NO: 123107 - protein, 12 aa, Homo sapiens
  CDR3 for alpha chain variable domain of TCR clone 61554 (TRAV12-1, TRAJ40)
CVVYSGTYKYIF

SEQ ID NO: 123108 - protein, 18 aa, Homo sapiens
  CDR3 for beta chain variable domain of TCR clone 61554 (TRBV11-2, TRBJ2-3)
CASSIGGASRGAPNTQYF

SEQ ID NO: 123109 - protein, 13 aa, Homo sapiens
  CDR3 for alpha chain variable domain of TCR clone 61555 (TRAV12-3, TRAJ40)
CAMSARGTYKYIF

SEQ ID NO: 123110 - protein, 16 aa, Homo sapiens
  CDR3 for beta chain variable domain of TCR clone 61555 (TRBV20-1, TRBJ2-3)
CSGEAGLAGGQDTQCF

SEQ ID NO: 123111 - protein, 13 aa, Homo sapiens
  CDR3 for alpha chain variable domain of TCR clone 61556 (TRAV17, TRAJ22)
CAHHPGSARQLTF

SEQ ID NO: 123112 - protein, 14 aa, Homo sapiens
  CDR3 for beta chain variable domain of TCR clone 61556 (TRBV16, TRBJ1-1)
CASSQAGPNTEAFF

SEQ ID NO: 123113 - protein, 13 aa, Homo sapiens
  CDR3 for alpha chain variable domain of TCR clone 61557 (TRAV3, TRAJ27)
CAVRPLGAGKSTF

SEQ ID NO: 123114 - protein, 13 aa, Homo sapiens
  CDR3 for beta chain variable domain of TCR clone 61557 (TRBV7-9, TRBJ2-3)
CASSPGSTDTPYF

SEQ ID NO: 123115 - protein, 16 aa, Homo sapiens
  CDR3 for alpha chain variable domain of TCR clone 61558 (TRAV21, TRAJ37)
CAVRPRGSSNTGKLIF

SEQ ID NO: 123116 - protein, 14 aa, Homo sapiens
  CDR3 for beta chain variable domain of TCR clone 61558 (TRBV6-1, TRBJ1-3)
CASVQGGGGNTIYF

SEQ ID NO: 123117 - protein, 12 aa, Homo sapiens
  CDR3 for alpha chain variable domain of TCR clone 61559 (TRAV12-3, TRAJ21)
CAMFNNFNKFYF

SEQ ID NO: 123118 - protein, 14 aa, Homo sapiens
  CDR3 for beta chain variable domain of TCR clone 61559 (TRBV28, TRBJ2-1)
CASSIQGTVGEQFF

SEQ ID NO: 123119 - protein, 15 aa, Homo sapiens
  CDR3 for alpha chain variable domain of TCR clone 61560 (TRAV8-3, TRAJ45)
CASSYSGGGADGLTF

SEQ ID NO: 123120 - protein, 14 aa, Homo sapiens
  CDR3 for beta chain variable domain of TCR clone 61560 (TRBV7-2, TRBJ2-7)
CASRSQGAAYEQYF

SEQ ID NO: 123121 - protein, 16 aa, Homo sapiens
  CDR3 for alpha chain variable domain of TCR clone 61561 (TRAV12-3, TRAJ53)
CAMSPGSGGSNYKLTF

SEQ ID NO: 123122 - protein, 12 aa, Homo sapiens
  CDR3 for beta chain variable domain of TCR clone 61561 (TRBV5-1, TRBJ2-7)
CASSLDSYEQYF

SEQ ID NO: 123123 - protein, 13 aa, Homo sapiens
  CDR3 for alpha chain variable domain of TCR clone 61562 (TRAV8-3, TRAJ28)
CAVGAVGSYQLTF

SEQ ID NO: 123124 - protein, 14 aa, Homo sapiens
  CDR3 for beta chain variable domain of TCR clone 61562 (TRBV7-2, TRBJ2-7)
CASRSQGSAYEQYF

SEQ ID NO: 123125 - protein, 13 aa, Homo sapiens
  CDR3 for alpha chain variable domain of TCR clone 61563 (TRAV1-2, TRAJ9)
CAVLNTGGFKTIF

SEQ ID NO: 123126 - protein, 14 aa, Homo sapiens
  CDR3 for beta chain variable domain of TCR clone 61563 (TRBV20-1, TRBJ2-3)
CGARGGTSTDTQYF

SEQ ID NO: 123127 - protein, 12 aa, Homo sapiens
  CDR3 for alpha chain variable domain of TCR clone 61564 (TRAV25, TRAJ30)
CAGKNRDDKITF

SEQ ID NO: 123128 - protein, 11 aa, Homo sapiens
  CDR3 for beta chain variable domain of TCR clone 61564 (TRBV12-4, TRBJ2-7)
CATPEKGEQYF

SEQ ID NO: 123129 - protein, 12 aa, Homo sapiens
  CDR3 for alpha chain variable domain of TCR clone 61565 (TRAV30, TRAJ43)
CGTEDRGNDMRF

SEQ ID NO: 123130 - protein, 13 aa, Homo sapiens
  CDR3 for beta chain variable domain of TCR clone 61565 (TRBV27, TRBJ2-7)
CASSFSQGYEQYF

SEQ ID NO: 123131 - protein, 17 aa, Homo sapiens
  CDR3 for alpha chain variable domain of TCR clone 61566 (TRAV3, TRAJ42)
CAVRDRDYGGSQGNLIF

SEQ ID NO: 123132 - protein, 15 aa, Homo sapiens
  CDR3 for beta chain variable domain of TCR clone 61566 (TRBV28, TRBJ2-7)
CASSPGGRGFYEQYF

SEQ ID NO: 123133 - protein, 14 aa, Homo sapiens
  CDR3 for alpha chain variable domain of TCR clone 61567 (TRAV2, TRAJ37)
CAVDFTSNTGKLIF

SEQ ID NO: 123134 - protein, 14 aa, Homo sapiens
  CDR3 for beta chain variable domain of TCR clone 61567 (TRBV7-8, TRBJ2-3)
CASSLEAGTDTQYF

SEQ ID NO: 123135 - protein, 14 aa, Homo sapiens
  CDR3 for alpha chain variable domain of TCR clone 61568 (TRAV38-1, TRAJ40)
CASRPTSGTYKYIF

SEQ ID NO: 123136 - protein, 14 aa, Homo sapiens
  CDR3 for beta chain variable domain of TCR clone 61568 (TRBV25-1, TRBJ1-1)
CASTHLGGNTEAFF

SEQ ID NO: 123137 - protein, 16 aa, Homo sapiens
  CDR3 for alpha chain variable domain of TCR clone 61569 (TRAV3, TRAJ4)
CAVRAFFSGGYNKLIF

SEQ ID NO: 123138 - protein, 16 aa, Homo sapiens
  CDR3 for beta chain variable domain of TCR clone 61569 (TRBV4-1, TRBJ1-3)
CASSQDELLAGSTIYF

SEQ ID NO: 123139 - protein, 13 aa, Homo sapiens
  CDR3 for alpha chain variable domain of TCR clone 61570 (TRAV2, TRAJ40)
CAVVTSGTYKYIF

SEQ ID NO: 123140 - protein, 13 aa, Homo sapiens
  CDR3 for beta chain variable domain of TCR clone 61570 (TRBV7-2, TRBJ2-5)
CASSQTSVETQYF

SEQ ID NO: 123141 - protein, 15 aa, Homo sapiens
  CDR3 for alpha chain variable domain of TCR clone 61571 (TRAV12-2, TRAJ8)
CAVREENTGFQKLVF

SEQ ID NO: 123142 - protein, 15 aa, Homo sapiens
  CDR3 for beta chain variable domain of TCR clone 61571 (TRBV28, TRBJ2-4)
CAAGSGTLLMGMQYF

SEQ ID NO: 123143 - protein, 11 aa, Homo sapiens
  CDR3 for alpha chain variable domain of TCR clone 61572 (TRAV13-1, TRAJ6)
CATLGSYIPTF

SEQ ID NO: 123144 - protein, 13 aa, Homo sapiens
  CDR3 for beta chain variable domain of TCR clone 61572 (TRBV6-6, TRBJ2-1)
CASSLHQGDERFF

SEQ ID NO: 123145 - protein, 14 aa, Homo sapiens
  CDR3 for alpha chain variable domain of TCR clone 61573 (TRAV8-3, TRAJ39)
CAVGANNTGNMLTF

SEQ ID NO: 123146 - protein, 15 aa, Homo sapiens
  CDR3 for beta chain variable domain of TCR clone 61573 (TRBV4-3, TRBJ1-1)
CASSQELGRGTEAFF

SEQ ID NO: 123147 - protein, 12 aa, Homo sapiens
  CDR3 for alpha chain variable domain of TCR clone 61574 (TRAV25, TRAJ11)
CAGTSGYSTLTF

SEQ ID NO: 123148 - protein, 14 aa, Homo sapiens
  CDR3 for beta chain variable domain of TCR clone 61574 (TRBV5-8, TRBJ2-3)
CASSLGQGTDTQYF

SEQ ID NO: 123149 - protein, 14 aa, Homo sapiens
  CDR3 for alpha chain variable domain of TCR clone 61575 (TRAV1-2, TRAJ16)
CAVNRFSDGQKLLF

SEQ ID NO: 123150 - protein, 13 aa, Homo sapiens
  CDR3 for beta chain variable domain of TCR clone 61575 (TRBV10-3, TRBJ2-7)
CASKLALNYEQYF

SEQ ID NO: 123151 - protein, 15 aa, Homo sapiens
  CDR3 for alpha chain variable domain of TCR clone 61576 (TRAV1-2, TRAJ28)
CAVQYSGAGSYQLTF

SEQ ID NO: 123152 - protein, 13 aa, Homo sapiens
  CDR3 for beta chain variable domain of TCR clone 61576 (TRBV20-1, TRBJ2-7)
CSATHTGGYEQYF

SEQ ID NO: 123153 - protein, 15 aa, Homo sapiens
  CDR3 for alpha chain variable domain of TCR clone 61577 (TRAV3, TRAJ22)
FAVRDRGGSARQLTF

SEQ ID NO: 123154 - protein, 16 aa, Homo sapiens
  CDR3 for beta chain variable domain of TCR clone 61577 (TRBV4-2, TRBJ2-4)
CASSQELRRAKNIQYF

SEQ ID NO: 123155 - protein, 13 aa, Homo sapiens
  CDR3 for alpha chain variable domain of TCR clone 61578 (TRAV8-6, TRAJ32)
CAVSDRATNKLIF

SEQ ID NO: 123156 - protein, 13 aa, Homo sapiens
  CDR3 for beta chain variable domain of TCR clone 61578 (TRBV11-3, TRBJ2-7)
CASSLDLGYEQYF

SEQ ID NO: 123157 - protein, 14 aa, Homo sapiens
  CDR3 for alpha chain variable domain of TCR clone 61579 (TRAV12-1, TRAJ12)
CVVTRMDSSYKLIF

SEQ ID NO: 123158 - protein, 15 aa, Homo sapiens
  CDR3 for beta chain variable domain of TCR clone 61579 (TRBV20-1, TRBJ2-7)
CSARDRVSGMDEQYS

SEQ ID NO: 123159 - protein, 12 aa, Homo sapiens
  CDR3 for alpha chain variable domain of TCR clone 61580 (TRAV13-1, TRAJ21)
CAAKEGFNKFCF

SEQ ID NO: 123160 - protein, 14 aa, Homo sapiens
  CDR3 for beta chain variable domain of TCR clone 61580 (TRBV5-4, TRBJ1-1)
CASSLDSRRDEAFF

SEQ ID NO: 123161 - protein, 15 aa, Homo sapiens
  CDR3 for alpha chain variable domain of TCR clone 61581 (TRAV12-1, TRAJ10)
CGADILTGGGNKLTL

SEQ ID NO: 123162 - protein, 16 aa, Homo sapiens
  CDR3 for beta chain variable domain of TCR clone 61581 (TRBV20-1, TRBJ2-1)
CSARSTSESSYNEQFF

SEQ ID NO: 123163 - protein, 14 aa, Homo sapiens
  CDR3 for alpha chain variable domain of TCR clone 61582 (TRAV23/DV6, TRAJ37)
CAASTSSNTGKLIF

SEQ ID NO: 123164 - protein, 15 aa, Homo sapiens
  CDR3 for beta chain variable domain of TCR clone 61582 (TRBV20-1, TRBJ2-7)
CSARDRVSGMDEQYF

SEQ ID NO: 123165 - protein, 15 aa, Homo sapiens
  CDR3 for alpha chain variable domain of TCR clone 61583 (TRAV12-1, TRAJ45)
CVVLSGGGGAEGLTF

SEQ ID NO: 123166 - protein, 12 aa, Homo sapiens
  CDR3 for beta chain variable domain of TCR clone 61583 (TRBV12-5, TRBJ2-5)
CASGQGVETQYF

SEQ ID NO: 123167 - protein, 13 aa, Homo sapiens
  CDR3 for alpha chain variable domain of TCR clone 61584 (TRAV12-1, TRAJ34)
CVVTGYNTDKLIF

SEQ ID NO: 123168 - protein, 12 aa, Homo sapiens
  CDR3 for beta chain variable domain of TCR clone 61584 (TRBV28, TRBJ2-6)
CAIQAGANVLTF

SEQ ID NO: 123169 - protein, 16 aa, Homo sapiens
  CDR3 for alpha chain variable domain of TCR clone 61585 (TRAV16, TRAJ4)
CITVLPFSVGYNKLIF

SEQ ID NO: 123170 - protein, 14 aa, Homo sapiens
  CDR3 for beta chain variable domain of TCR clone 61585 (TRBV19, TRBJ2-7)
CASSMGQGAIEQYF

SEQ ID NO: 123171 - protein, 10 aa, Homo sapiens
  CDR3 for alpha chain variable domain of TCR clone 61586 (TRAV2, TRAJ34)
CAVVNDKLIF

SEQ ID NO: 123172 - protein, 14 aa, Homo sapiens
  CDR3 for beta chain variable domain of TCR clone 61586 (TRBV4-2, TRBJ2-1)
CASGLDRAYNEQFF

SEQ ID NO: 123173 - protein, 11 aa, Homo sapiens
  CDR3 for alpha chain variable domain of TCR clone 61587 (TRAV12-1, TRAJ30)
CVVNGQDKIIF

SEQ ID NO: 123174 - protein, 15 aa, Homo sapiens
  CDR3 for beta chain variable domain of TCR clone 61587 (TRBV28, TRBJ2-5)
CASSSGRTIQETQYL

SEQ ID NO: 123175 - protein, 14 aa, Homo sapiens
  CDR3 for alpha chain variable domain of TCR clone 61588 (TRAV12-3, TRAJ10)
SHLPLTGGGNKLTF

SEQ ID NO: 123176 - protein, 16 aa, Homo sapiens
  CDR3 for beta chain variable domain of TCR clone 61588 (TRBV5-8, TRBJ2-2)
CASSLINPGVAGELFF

SEQ ID NO: 123177 - protein, 14 aa, Homo sapiens
  CDR3 for alpha chain variable domain of TCR clone 61589 (TRAV17, TRAJ16)
CATADSSDGQKLLF

SEQ ID NO: 123178 - protein, 12 aa, Homo sapiens
  CDR3 for beta chain variable domain of TCR clone 61589 (TRBV24-1, TRBJ1-1)
CATLYPDTEAFF

SEQ ID NO: 123179 - protein, 12 aa, Homo sapiens
  CDR3 for alpha chain variable domain of TCR clone 61590 (TRAV17, TRAJ39)
CATGDAGNMLTF

SEQ ID NO: 123180 - protein, 14 aa, Homo sapiens
  CDR3 for beta chain variable domain of TCR clone 61590 (TRBV7-9, TRBJ1-2)
CASSRQGANYGYTF

SEQ ID NO: 123181 - protein, 14 aa, Homo sapiens
  CDR3 for alpha chain variable domain of TCR clone 61591 (TRAV8-3, TRAJ39)
CAVGANNAGNMLTF

SEQ ID NO: 123182 - protein, 15 aa, Homo sapiens
  CDR3 for beta chain variable domain of TCR clone 61591 (TRBV10-1, TRBJ2-3)
RASSATSGGFDTQYF

SEQ ID NO: 123183 - protein, 15 aa, Homo sapiens
  CDR3 for alpha chain variable domain of TCR clone 61592 (TRAV8-3, TRAJ6)
CAVGPLGGGSYIPTF

SEQ ID NO: 123184 - protein, 13 aa, Homo sapiens
  CDR3 for beta chain variable domain of TCR clone 61592 (TRBV10-3, TRBJ2-7)
CASKLAVNYEQYF

SEQ ID NO: 123185 - protein, 15 aa, Homo sapiens
  CDR3 for alpha chain variable domain of TCR clone 61593 (TRAV8-3, TRAJ11)
CAVGLLNSGYSTLTF

SEQ ID NO: 123186 - protein, 16 aa, Homo sapiens
  CDR3 for beta chain variable domain of TCR clone 61593 (TRBV11-3, TRBJ2-3)
CASSSGSGGGTDTQYF

SEQ ID NO: 123187 - protein, 14 aa, Homo sapiens
  CDR3 for alpha chain variable domain of TCR clone 61594 (TRAV13-1, TRAJ44)
CAAKATGTASKLTF

SEQ ID NO: 123188 - protein, 17 aa, Homo sapiens
  CDR3 for beta chain variable domain of TCR clone 61594 (TRBV7-3, TRBJ2-3)
RASSLMKRMRGVATQYF

SEQ ID NO: 123189 - protein, 18 aa, Homo sapiens
  CDR3 for alpha chain variable domain of TCR clone 61595 (TRAV26-1, TRAJ5)
CIVRVVPPRATGRRALTF

SEQ ID NO: 123190 - protein, 15 aa, Homo sapiens
  CDR3 for beta chain variable domain of TCR clone 61595 (TRBV7-9, TRBJ2-7)
CASSLPMGQANEQYF

SEQ ID NO: 123191 - protein, 16 aa, Homo sapiens
  CDR3 for alpha chain variable domain of TCR clone 61596 (TRAV20, TRAJ22)
CAVQASSSGSARQLTF

SEQ ID NO: 123192 - protein, 13 aa, Homo sapiens
  CDR3 for beta chain variable domain of TCR clone 61596 (TRBV7-2, TRBJ2-5)
CASSQTSVETHYF

SEQ ID NO: 123193 - protein, 12 aa, Homo sapiens
  CDR3 for alpha chain variable domain of TCR clone 61597 (TRAV2, TRAJ24)
CAATDSWGKFQF

SEQ ID NO: 123194 - protein, 13 aa, Homo sapiens
  CDR3 for beta chain variable domain of TCR clone 61597 (TRBV5-8, TRBJ1-1)
CTSSLGGGTEAFF

SEQ ID NO: 123195 - protein, 13 aa, Homo sapiens
  CDR3 for alpha chain variable domain of TCR clone 61598 (TRAV27, TRAJ45)
CRSSGGGADGLTF

SEQ ID NO: 123196 - protein, 16 aa, Homo sapiens
  CDR3 for beta chain variable domain of TCR clone 61598 (TRBV9, TRBJ2-2)
CASSAMGKGNTGELFF

SEQ ID NO: 123197 - protein, 12 aa, Homo sapiens
  CDR3 for alpha chain variable domain of TCR clone 61599 (TRAV9-2, TRAJ36)
CALKKGANNLFL

SEQ ID NO: 123198 - protein, 13 aa, Homo sapiens
  CDR3 for beta chain variable domain of TCR clone 61599 (TRBV27, TRBJ1-1)
CASSLSIGAEAFF

SEQ ID NO: 123199 - protein, 15 aa, Homo sapiens
  CDR3 for alpha chain variable domain of TCR clone 61600 (TRAV26-1, TRAJ40)
CIVRAVPSGTYKYNF

SEQ ID NO: 123200 - protein, 14 aa, Homo sapiens
  CDR3 for beta chain variable domain of TCR clone 61600 (TRBV19, TRBJ2-1)
CASKDPGLANEQFF

SEQ ID NO: 123201 - protein, 16 aa, Homo sapiens
  CDR3 for alpha chain variable domain of TCR clone 61601 (TRAV30, TRAJ24)
CGTEIVDADSWGKFQF

SEQ ID NO: 123202 - protein, 13 aa, Homo sapiens
  CDR3 for beta chain variable domain of TCR clone 61601 (TRBV7-2, TRBJ1-4)
CASNLAGLEKLFF

SEQ ID NO: 123203 - protein, 14 aa, Homo sapiens
  CDR3 for alpha chain variable domain of TCR clone 61602 (TRAV1-2, TRAJ16)
CAVNRFSDGQKLLL

SEQ ID NO: 123204 - protein, 15 aa, Homo sapiens
  CDR3 for beta chain variable domain of TCR clone 61602 (TRBV6-3, TRBJ2-7)
CASSSPGTVFYEQYF

SEQ ID NO: 123205 - protein, 13 aa, Homo sapiens
  CDR3 for alpha chain variable domain of TCR clone 61603 (TRAV35, TRAJ42)
SRNYGGSQGNLIF

SEQ ID NO: 123206 - protein, 15 aa, Homo sapiens
  CDR3 for beta chain variable domain of TCR clone 61603 (TRBV20-1, TRBJ2-1)
CSARGIGGTYNEQFF

SEQ ID NO: 123207 - protein, 11 aa, Homo sapiens
  CDR3 for alpha chain variable domain of TCR clone 61604 (TRAV3, TRAJ21)
CAVGNFNKFYF

SEQ ID NO: 123208 - protein, 13 aa, Homo sapiens
  CDR3 for beta chain variable domain of TCR clone 61604 (TRBV12-4, TRBJ2-5)
CASSLGGSRTQYF

SEQ ID NO: 123209 - protein, 14 aa, Homo sapiens
  CDR3 for alpha chain variable domain of TCR clone 61605 (TRAV9-2, TRAJ39)
CALYIYNAGNMLTF

SEQ ID NO: 123210 - protein, 16 aa, Homo sapiens
  CDR3 for beta chain variable domain of TCR clone 61605 (TRBV2, TRBJ2-3)
CASSTSVEGVTDTQYF

SEQ ID NO: 123211 - protein, 14 aa, Homo sapiens
  CDR3 for alpha chain variable domain of TCR clone 61606 (TRAV29/DV5, TRAJ32)
CAAAYGSATNKLIF

SEQ ID NO: 123212 - protein, 15 aa, Homo sapiens
  CDR3 for beta chain variable domain of TCR clone 61606 (TRBV27, TRBJ2-7)
CASSTAGTGSYEQYF

SEQ ID NO: 123213 - protein, 13 aa, Homo sapiens
  CDR3 for alpha chain variable domain of TCR clone 61607 (TRAV12-2, TRAJ10)
CAVPTGGGNKLTL

SEQ ID NO: 123214 - protein, 14 aa, Homo sapiens
  CDR3 for beta chain variable domain of TCR clone 61607 (TRBV25-1, TRBJ1-1)
CASTHLGGNTEAFF

SEQ ID NO: 123215 - protein, 13 aa, Homo sapiens
  CDR3 for alpha chain variable domain of TCR clone 61608 (TRAV8-2, TRAJ29)
CALPGAGNTPLVF

SEQ ID NO: 123216 - protein, 12 aa, Homo sapiens
  CDR3 for beta chain variable domain of TCR clone 61608 (TRBV24-1, TRBJ1-1)
CATLYPDTEAFF

SEQ ID NO: 123217 - protein, 12 aa, Homo sapiens
  CDR3 for alpha chain variable domain of TCR clone 61609 (TRAV30, TRAJ39)
CGRGNAGNMLTF

SEQ ID NO: 123218 - protein, 15 aa, Homo sapiens
  CDR3 for beta chain variable domain of TCR clone 61609 (TRBV19, TRBJ2-1)
CASSIGLAGWDEQFF

SEQ ID NO: 123219 - protein, 16 aa, Homo sapiens
  CDR3 for alpha chain variable domain of TCR clone 61610 (TRAV12-2, TRAJ40)
CAVIRGSTSGTYKYIF

SEQ ID NO: 123220 - protein, 14 aa, Homo sapiens
  CDR3 for beta chain variable domain of TCR clone 61610 (TRBV20-1, TRBJ2-5)
CSARDGRAGETQYF

SEQ ID NO: 123221 - protein, 15 aa, Homo sapiens
  CDR3 for alpha chain variable domain of TCR clone 61611 (TRAV8-4, TRAJ42)
CAVSDDRGSQGNLIF

SEQ ID NO: 123222 - protein, 17 aa, Homo sapiens
  CDR3 for beta chain variable domain of TCR clone 61611 (TRBV11-2, TRBJ2-1)
CASSLYPPGVEYNERFF

SEQ ID NO: 123223 - protein, 11 aa, Homo sapiens
  CDR3 for alpha chain variable domain of TCR clone 61612 (TRAV22, TRAJ20)
CAPLHDYKLSF

SEQ ID NO: 123224 - protein, 20 aa, Homo sapiens
  CDR3 for beta chain variable domain of TCR clone 61612 (TRBV19, TRBJ2-1)
CASSISRTVTSTRLNNEQFF

SEQ ID NO: 123225 - protein, 13 aa, Homo sapiens
  CDR3 for alpha chain variable domain of TCR clone 61613 (TRAV8-3, TRAJ44)
CAVVPGTASKLTF

SEQ ID NO: 123226 - protein, 14 aa, Homo sapiens
  CDR3 for beta chain variable domain of TCR clone 61613 (TRBV11-2, TRBJ2-3)
CASSRLARKDTQYF

SEQ ID NO: 123227 - protein, 10 aa, Homo sapiens
  CDR3 for alpha chain variable domain of TCR clone 61614 (TRAV23/DV6, TRAJ57)
CAASCTLSQG

SEQ ID NO: 123228 - protein, 14 aa, Homo sapiens
  CDR3 for beta chain variable domain of TCR clone 61614 (TRBV25-1, TRBJ1-1)
CASTHLGGNTEAFF

SEQ ID NO: 123229 - protein, 15 aa, Homo sapiens
  CDR3 for alpha chain variable domain of TCR clone 61615 (TRAV21, TRAJ37)
CAVRPTLSNTVKLIF

SEQ ID NO: 123230 - protein, 16 aa, Homo sapiens
  CDR3 for beta chain variable domain of TCR clone 61615 (TRBV24-1, TRBJ2-3)
CATSDRRQDLTDTQYF

SEQ ID NO: 123231 - protein, 15 aa, Homo sapiens
  CDR3 for alpha chain variable domain of TCR clone 61616 (TRAV1-2, TRAJ17)
CAVRGYGAAGNRLTF

SEQ ID NO: 123232 - protein, 23 aa, Homo sapiens
  CDR3 for beta chain variable domain of TCR clone 61616 (TRBV11-2, TRBJ2-5)
CASSSPGGEGAASRDPVLRARHA

SEQ ID NO: 123233 - protein, 16 aa, Homo sapiens
  CDR3 for alpha chain variable domain of TCR clone 61617 (TRAV3, TRAJ37)
CAVRPHGSGNTGKLIF

SEQ ID NO: 123234 - protein, 13 aa, Homo sapiens
  CDR3 for beta chain variable domain of TCR clone 61617 (TRBV4-2, TRBJ1-1)
CASSQAGNTEAFF

SEQ ID NO: 123235 - protein, 11 aa, Homo sapiens
  CDR3 for alpha chain variable domain of TCR clone 61618 (TRAV3, TRAJ21)
CAVGNFNKFYF

SEQ ID NO: 123236 - protein, 18 aa, Homo sapiens
  CDR3 for beta chain variable domain of TCR clone 61618 (TRBV7-3, TRBJ2-3)
CASSSTGTYPGSTDTQYF

SEQ ID NO: 123237 - protein, 14 aa, Homo sapiens
  CDR3 for alpha chain variable domain of TCR clone 61619 (TRAV1-1, TRAJ27)
RAVIYNTNAGKSTF

SEQ ID NO: 123238 - protein, 18 aa, Homo sapiens
  CDR3 for beta chain variable domain of TCR clone 61619 (TRBV7-3, TRBJ2-1)
CASSLTLASGRAMVSSSS

SEQ ID NO: 123239 - protein, 14 aa, Homo sapiens
  CDR3 for alpha chain variable domain of TCR clone 61620 (TRAV8-2, TRAJ4)
CVVSPSGGYNMLIF

SEQ ID NO: 123240 - protein, 15 aa, Homo sapiens
  CDR3 for beta chain variable domain of TCR clone 61620 (TRBV4-1, TRBJ1-4)
CASSDTGGTNEKLFF

SEQ ID NO: 123241 - protein, 18 aa, Homo sapiens
  CDR3 for alpha chain variable domain of TCR clone 61621 (TRAV13-1, TRAJ52)
CAASKRSAGGTSYGKLTF

SEQ ID NO: 123242 - protein, 13 aa, Homo sapiens
  CDR3 for beta chain variable domain of TCR clone 61621 (TRBV12-4, TRBJ1-2)
CASSLRQVKGYTF

SEQ ID NO: 123243 - protein, 14 aa, Homo sapiens
  CDR3 for alpha chain variable domain of TCR clone 61622 (TRAV13-1, TRAJ44)
CAAKATGTSSKLTF

SEQ ID NO: 123244 - protein, 17 aa, Homo sapiens
  CDR3 for beta chain variable domain of TCR clone 61622 (TRBV7-3, TRBJ2-3)
CASSLMKRMRGADTQYF

SEQ ID NO: 123245 - protein, 14 aa, Homo sapiens
  CDR3 for alpha chain variable domain of TCR clone 61623 (TRAV21, TRAJ15)
CAASLNQAGTALIF

SEQ ID NO: 123246 - protein, 11 aa, Homo sapiens
  CDR3 for beta chain variable domain of TCR clone 61623 (TRBV20-1, TRBJ2-7)
CSARTSYEQYF

SEQ ID NO: 123247 - protein, 17 aa, Homo sapiens
  CDR3 for alpha chain variable domain of TCR clone 61624 (TRAV3, TRAJ6)
CAVRDGPRAGGSYIPTF

SEQ ID NO: 123248 - protein, 14 aa, Homo sapiens
  CDR3 for beta chain variable domain of TCR clone 61624 (TRBV7-2, TRBJ2-7)
CASSPKTSFSEQYF

SEQ ID NO: 123249 - protein, 16 aa, Homo sapiens
  CDR3 for alpha chain variable domain of TCR clone 61625 (TRAV16, TRAJ52)
CALSAAGGTSYGKLTF

SEQ ID NO: 123250 - protein, 12 aa, Homo sapiens
  CDR3 for beta chain variable domain of TCR clone 61625 (TRBV12-4, TRBJ1-3)
CASSFAGNTIYF

SEQ ID NO: 123251 - protein, 15 aa, Homo sapiens
  CDR3 for alpha chain variable domain of TCR clone 61626 (TRAV25, TRAJ52)
CAGTSGGTSYGKLTF

SEQ ID NO: 123252 - protein, 14 aa, Homo sapiens
  CDR3 for beta chain variable domain of TCR clone 61626 (TRBV4-2, TRBJ1-5)
CASSRDRGNQPQHF

SEQ ID NO: 123253 - protein, 14 aa, Homo sapiens
  CDR3 for alpha chain variable domain of TCR clone 61627 (TRAV26-1, TRAJ45)
CIEVTGGGADGLTF

SEQ ID NO: 123254 - protein, 15 aa, Homo sapiens
  CDR3 for beta chain variable domain of TCR clone 61627 (TRBV20-1, TRBJ2-7)
CSARDRVSGMDEQYF

SEQ ID NO: 123255 - protein, 12 aa, Homo sapiens
  CDR3 for alpha chain variable domain of TCR clone 61628 (TRAV13-2, TRAJ23)
CAERQRGGKLIF

SEQ ID NO: 123256 - protein, 15 aa, Homo sapiens
  CDR3 for beta chain variable domain of TCR clone 61628 (TRBV19, TRBJ1-2)
CASSVGQVLNYGYTF

SEQ ID NO: 123257 - protein, 13 aa, Homo sapiens
  CDR3 for alpha chain variable domain of TCR clone 61629 (TRAV12-1, TRAJ39)
CGDDNNVGNMLTF

SEQ ID NO: 123258 - protein, 15 aa, Homo sapiens
  CDR3 for beta chain variable domain of TCR clone 61629 (TRBV5-1, TRBJ2-3)
CASSVTSGSTDTQYF

SEQ ID NO: 123259 - protein, 14 aa, Homo sapiens
  CDR3 for alpha chain variable domain of TCR clone 61630 (TRAV3, TRAJ37)
CAVKESGNTGKLIF

SEQ ID NO: 123260 - protein, 15 aa, Homo sapiens
  CDR3 for beta chain variable domain of TCR clone 61630 (TRBV24-1, TRBJ2-2)
CATSDLRESTGELFF

SEQ ID NO: 123261 - protein, 14 aa, Homo sapiens
  CDR3 for alpha chain variable domain of TCR clone 61631 (TRAV29/DV5, TRAJ36)
CAASRKTGANNLFF

SEQ ID NO: 123262 - protein, 14 aa, Homo sapiens
  CDR3 for beta chain variable domain of TCR clone 61631 (TRBV12-5, TRBJ2-5)
CASGSRTHQETQYF

SEQ ID NO: 123263 - protein, 12 aa, Homo sapiens
  CDR3 for alpha chain variable domain of TCR clone 61632 (TRAV27, TRAJ35)
CAGADFGNVLHC

SEQ ID NO: 123264 - protein, 13 aa, Homo sapiens
  CDR3 for beta chain variable domain of TCR clone 61632 (TRBV7-3, TRBJ1-1)
CASSQDWGAEAFL

SEQ ID NO: 123265 - protein, 15 aa, Homo sapiens
  CDR3 for alpha chain variable domain of TCR clone 61633 (TRAV3, TRAJ8)
CAVRDNETGFQKLVF

SEQ ID NO: 123266 - protein, 15 aa, Homo sapiens
  CDR3 for beta chain variable domain of TCR clone 61633 (TRBV6-3, TRBJ2-7)
CASSSPGTVFYEQYF

SEQ ID NO: 123267 - protein, 16 aa, Homo sapiens
  CDR3 for alpha chain variable domain of TCR clone 61634 (TRAV12-3, TRAJ53)
CAMSPGSGGSNYKLTF

SEQ ID NO: 123268 - protein, 16 aa, Homo sapiens
  CDR3 for beta chain variable domain of TCR clone 61634 (TRBV25-1, TRBJ1-1)
CASSGDRDRGRIEAFF

SEQ ID NO: 123269 - protein, 10 aa, Homo sapiens
  CDR3 for alpha chain variable domain of TCR clone 61635 (TRAV16, TRAJ22)
SAMYLRQLTF

SEQ ID NO: 123270 - protein, 15 aa, Homo sapiens
  CDR3 for beta chain variable domain of TCR clone 61635 (TRBV7-9, TRBJ1-6)
CASCSPGRGNSPLHF

SEQ ID NO: 123271 - protein, 14 aa, Homo sapiens
  CDR3 for alpha chain variable domain of TCR clone 61636 (TRAV38-1, TRAJ39)
CDFAYNNAGNMLTF

SEQ ID NO: 123272 - protein, 15 aa, Homo sapiens
  CDR3 for beta chain variable domain of TCR clone 61636 (TRBV19, TRBJ2-6)
CASSIGPSGANVLTF

SEQ ID NO: 123273 - protein, 11 aa, Homo sapiens
  CDR3 for alpha chain variable domain of TCR clone 61637 (TRAV12-1, TRAJ30)
CVVNGQDKIIF

SEQ ID NO: 123274 - protein, 13 aa, Homo sapiens
  CDR3 for beta chain variable domain of TCR clone 61637 (TRBV19, TRBJ1-5)
CASSMRGYQPQHF

SEQ ID NO: 123275 - protein, 13 aa, Homo sapiens
  CDR3 for alpha chain variable domain of TCR clone 61638 (TRAV35, TRAJ42)
CAGCPGSQGNLIF

SEQ ID NO: 123276 - protein, 14 aa, Homo sapiens
  CDR3 for beta chain variable domain of TCR clone 61638 (TRBV19, TRBJ2-1)
CASPTFVLSGEQFF

SEQ ID NO: 123277 - protein, 16 aa, Homo sapiens
  CDR3 for alpha chain variable domain of TCR clone 61639 (TRAV38-1, TRAJ56)
CAFMKRQTGANSKLTF

SEQ ID NO: 123278 - protein, 16 aa, Homo sapiens
  CDR3 for beta chain variable domain of TCR clone 61639 (TRBV12-5, TRBJ2-5)
CASGPRTSGNQETQYF

SEQ ID NO: 123279 - protein, 14 aa, Homo sapiens
  CDR3 for alpha chain variable domain of TCR clone 61640 (TRAV1-2, TRAJ16)
CAVNRFSDGQMLLF

SEQ ID NO: 123280 - protein, 15 aa, Homo sapiens
  CDR3 for beta chain variable domain of TCR clone 61640 (TRBV7-9, TRBJ1-6)
CASSSPGRGNSPLHF

SEQ ID NO: 123281 - protein, 15 aa, Homo sapiens
  CDR3 for alpha chain variable domain of TCR clone 61641 (TRAV21, TRAJ53)
CATLNSGGSNYKLTF

SEQ ID NO: 123282 - protein, 16 aa, Homo sapiens
  CDR3 for beta chain variable domain of TCR clone 61641 (TRBV9, TRBJ2-1)
CASSAGGGGNYNEQFF

SEQ ID NO: 123283 - protein, 11 aa, Homo sapiens
  CDR3 for alpha chain variable domain of TCR clone 61642 (TRAV2, TRAJ13)
CASGGYQKVTF

SEQ ID NO: 123284 - protein, 17 aa, Homo sapiens
  CDR3 for beta chain variable domain of TCR clone 61642 (TRBV25-1, TRBJ2-1)
CASSAYGQGRGVYEQFF

SEQ ID NO: 123285 - protein, 16 aa, Homo sapiens
  CDR3 for alpha chain variable domain of TCR clone 61643 (TRAV8-3, TRAJ8)
CAVPRDGNTGFQQLVF

SEQ ID NO: 123286 - protein, 15 aa, Homo sapiens
  CDR3 for beta chain variable domain of TCR clone 61643 (TRBV6-1, TRBJ2-6)
CASSSRPSGANVLTF

SEQ ID NO: 123287 - protein, 16 aa, Homo sapiens
  CDR3 for alpha chain variable domain of TCR clone 61644 (TRAV26-1, TRAJ23)
CTVRVHPYNQGGKLIF

SEQ ID NO: 123288 - protein, 15 aa, Homo sapiens
  CDR3 for beta chain variable domain of TCR clone 61644 (TRBV5-7, TRBJ2-7)
CASSPYFEGSYEQYF

SEQ ID NO: 123289 - protein, 13 aa, Homo sapiens
  CDR3 for alpha chain variable domain of TCR clone 61645 (TRAV2, TRAJ21)
CAVEDLNFNKFYF

SEQ ID NO: 123290 - protein, 12 aa, Homo sapiens
  CDR3 for beta chain variable domain of TCR clone 61645 (TRBV6-3, TRBJ2-7)
CASSEPGFEQYF

SEQ ID NO: 123291 - protein, 14 aa, Homo sapiens
  CDR3 for alpha chain variable domain of TCR clone 61646 (TRAV1-2, TRAJ16)
CAVNRFSDGQKLLF

SEQ ID NO: 123292 - protein, 16 aa, Homo sapiens
  CDR3 for beta chain variable domain of TCR clone 61646 (TRBV6-1, TRBJ1-3)
CASVQGGGGNTIYLER

SEQ ID NO: 123293 - protein, 14 aa, Homo sapiens
  CDR3 for alpha chain variable domain of TCR clone 61647 (TRAV29/DV5, TRAJ36)
CAARRKTGANNLFF

SEQ ID NO: 123294 - protein, 14 aa, Homo sapiens
  CDR3 for beta chain variable domain of TCR clone 61647 (TRBV12-5, TRBJ2-5)
CASGSRTHQETQYF

SEQ ID NO: 123295 - protein, 15 aa, Homo sapiens
  CDR3 for alpha chain variable domain of TCR clone 61648 (TRAV4, TRAJ36)
CLVGDRQTGANNRFF

SEQ ID NO: 123296 - protein, 15 aa, Homo sapiens
  CDR3 for beta chain variable domain of TCR clone 61648 (TRBV7-6, TRBJ2-1)
CASSSLAGEGNEQFF

SEQ ID NO: 123297 - protein, 13 aa, Homo sapiens
  CDR3 for alpha chain variable domain of TCR clone 61649 (TRAV2, TRAJ15)
CAVASQAGTALIF

SEQ ID NO: 123298 - protein, 15 aa, Homo sapiens
  CDR3 for beta chain variable domain of TCR clone 61649 (TRBV20-1, TRBJ2-7)
CSARDRVSGMDEKYF

SEQ ID NO: 123299 - protein, 13 aa, Homo sapiens
  CDR3 for alpha chain variable domain of TCR clone 61650 (TRAV29/DV5, TRAJ48)
CAASSFGNEKLTL

SEQ ID NO: 123300 - protein, 14 aa, Homo sapiens
  CDR3 for beta chain variable domain of TCR clone 61650 (TRBV3-1, TRBJ2-2)
CASSQDWVQGELFF

SEQ ID NO: 123301 - protein, 11 aa, Homo sapiens
  CDR3 for alpha chain variable domain of TCR clone 61651 (TRAV3, TRAJ13)
CAVTSYQKVNF

SEQ ID NO: 123302 - protein, 15 aa, Homo sapiens
  CDR3 for beta chain variable domain of TCR clone 61651 (TRBV7-9, TRBJ2-7)
CASSSSGLAVYEQYF

SEQ ID NO: 123303 - protein, 11 aa, Homo sapiens
  CDR3 for alpha chain variable domain of TCR clone 61652 (TRAV2, TRAJ13)
CASGGYQKVTF

SEQ ID NO: 123304 - protein, 17 aa, Homo sapiens
  CDR3 for beta chain variable domain of TCR clone 61652 (TRBV7-3, TRBJ2-3)
CASSPRGQGYGTDTQYF

SEQ ID NO: 123305 - protein, 11 aa, Homo sapiens
  CDR3 for alpha chain variable domain of TCR clone 61653 (TRAV4, TRAJ31)
CLVGDNARLMF

SEQ ID NO: 123306 - protein, 14 aa, Homo sapiens
  CDR3 for beta chain variable domain of TCR clone 61653 (TRBV4-1, TRBJ2-2)
CASSQAVNTGELFF

SEQ ID NO: 123307 - protein, 21 aa, Homo sapiens
  CDR3 for alpha chain variable domain of TCR clone 61654 (TRAV36/DV7, TRAJ39)
TATQTGDSAIYLPNAGSMLTF

SEQ ID NO: 123308 - protein, 17 aa, Homo sapiens
  CDR3 for beta chain variable domain of TCR clone 61654 (TRBV18, TRBJ2-1)
CASSKGLSGGADNEQFF

SEQ ID NO: 123309 - protein, 16 aa, Homo sapiens
  CDR3 for alpha chain variable domain of TCR clone 61655 (TRAV17, TRAJ28)
CATASVSGAGSYHLTF

SEQ ID NO: 123310 - protein, 11 aa, Homo sapiens
  CDR3 for beta chain variable domain of TCR clone 61655 (TRBV7-9, TRBJ2-5)
CASSLGETQYF

SEQ ID NO: 123311 - protein, 13 aa, Homo sapiens
  CDR3 for alpha chain variable domain of TCR clone 61656 (TRAV27, TRAJ37)
CAGGPSNTGKLIF

SEQ ID NO: 123312 - protein, 13 aa, Homo sapiens
  CDR3 for beta chain variable domain of TCR clone 61656 (TRBV11-2, TRBJ1-1)
CASSLGNGAEAFF

SEQ ID NO: 123313 - protein, 11 aa, Homo sapiens
  CDR3 for alpha chain variable domain of TCR clone 61657 (TRAV29/DV5, TRAJ31)
CAAMHNARLMF

SEQ ID NO: 123314 - protein, 15 aa, Homo sapiens
  CDR3 for beta chain variable domain of TCR clone 61657 (TRBV20-1, TRBJ2-7)
CSARGPLAGGREQYF

SEQ ID NO: 123315 - protein, 15 aa, Homo sapiens
  CDR3 for alpha chain variable domain of TCR clone 61658 (TRAV12-3, TRAJ27)
CAMRAYNTNAGKSTF

SEQ ID NO: 123316 - protein, 13 aa, Homo sapiens
  CDR3 for beta chain variable domain of TCR clone 61658 (TRBV11-2, TRBJ2-5)
CASSQGPSETQYF

SEQ ID NO: 123317 - protein, 14 aa, Homo sapiens
  CDR3 for alpha chain variable domain of TCR clone 61659 (TRAV13-1, TRAJ26)
CAASSAHYGQNFVF

SEQ ID NO: 123318 - protein, 17 aa, Homo sapiens
  CDR3 for beta chain variable domain of TCR clone 61659 (TRBV25-1, TRBJ2-5)
CASSRRVGRGGQETQYF

SEQ ID NO: 123319 - protein, 13 aa, Homo sapiens
  CDR3 for alpha chain variable domain of TCR clone 61660 (TRAV3, TRAJ41)
CAVSSNSGYALNF

SEQ ID NO: 123320 - protein, 14 aa, Homo sapiens
  CDR3 for beta chain variable domain of TCR clone 61660 (TRBV19, TRBJ2-1)
CASPTFVLSGEQFF

SEQ ID NO: 123321 - protein, 17 aa, Homo sapiens
  CDR3 for alpha chain variable domain of TCR clone 61661 (TRAV13-1, TRAJ43)
CAVGNDMRFGAGTRLTV

SEQ ID NO: 123322 - protein, 14 aa, Homo sapiens
  CDR3 for beta chain variable domain of TCR clone 61661 (TRBV7-9, TRBJ2-5)
CAGSPAQDQETQYF

SEQ ID NO: 123323 - protein, 15 aa, Homo sapiens
  CDR3 for alpha chain variable domain of TCR clone 61662 (TRAV23/DV6, TRAJ18)
CAARYRGSTLGRLYV

SEQ ID NO: 123324 - protein, 13 aa, Homo sapiens
  CDR3 for beta chain variable domain of TCR clone 61662 (TRBV7-2, TRBJ2-7)
CASSSPSGSEQYF

SEQ ID NO: 123325 - protein, 20 aa, Homo sapiens
  CDR3 for alpha chain variable domain of TCR clone 61663 (TRAV12-1, TRAJ42)
SSVIQPPTSVKGGSQGNLIF

SEQ ID NO: 123326 - protein, 18 aa, Homo sapiens
  CDR3 for beta chain variable domain of TCR clone 61663 (TRBV11-2, TRBJ2-3)
GASSLGGASRGAPNTQYF

SEQ ID NO: 123327 - protein, 12 aa, Homo sapiens
  CDR3 for alpha chain variable domain of TCR clone 61664 (TRAV17, TRAJ49)
CATVTTGNQFYF

SEQ ID NO: 123328 - protein, 13 aa, Homo sapiens
  CDR3 for beta chain variable domain of TCR clone 61664 (TRBV19, TRBJ2-7)
CASRKAGGSEQYF

SEQ ID NO: 123329 - protein, 15 aa, Homo sapiens
  CDR3 for alpha chain variable domain of TCR clone 61665 (TRAV12-3, TRAJ27)
CAMRAYNTNAGKSTC

SEQ ID NO: 123330 - protein, 13 aa, Homo sapiens
  CDR3 for beta chain variable domain of TCR clone 61665 (TRBV11-2, TRBJ2-5)
CASSRGPSETQYF

SEQ ID NO: 123331 - protein, 13 aa, Homo sapiens
  CDR3 for alpha chain variable domain of TCR clone 61666 (TRAV12-2, TRAJ6)
CAVNVSRKLHTYI

SEQ ID NO: 123332 - protein, 15 aa, Homo sapiens
  CDR3 for beta chain variable domain of TCR clone 61666 (TRBV6-1, TRBJ2-3)
CASSERGGITDTQYF

SEQ ID NO: 123333 - protein, 16 aa, Homo sapiens
  CDR3 for alpha chain variable domain of TCR clone 61667 (TRAV12-3, TRAJ53)
CAMSPGSGGSNYKLTF

SEQ ID NO: 123334 - protein, 17 aa, Homo sapiens
  CDR3 for beta chain variable domain of TCR clone 61667 (TRBV18, TRBJ2-3)
CASSAAGTSGSTDTQYF

SEQ ID NO: 123335 - protein, 14 aa, Homo sapiens
  CDR3 for alpha chain variable domain of TCR clone 61668 (TRAV8-3, TRAJ4)
CAVGAAGGYNKLIF

SEQ ID NO: 123336 - protein, 16 aa, Homo sapiens
  CDR3 for beta chain variable domain of TCR clone 61668 (TRBV19, TRBJ2-1)
CASSKAGPSSYNEQFF

SEQ ID NO: 123337 - protein, 19 aa, Homo sapiens
  CDR3 for alpha chain variable domain of TCR clone 61669 (TRAV21, TRAJ45)
CAVEAPRGDQEEGLTDSPF

SEQ ID NO: 123338 - protein, 12 aa, Homo sapiens
  CDR3 for beta chain variable domain of TCR clone 61669 (TRBV29-1, TRBJ1-3)
CSTRDSGNTIYF

SEQ ID NO: 123339 - protein, 16 aa, Homo sapiens
  CDR3 for alpha chain variable domain of TCR clone 61670 (TRAV23/DV6, TRAJ9)
CAASIGGNTGGFKTIF

SEQ ID NO: 123340 - protein, 18 aa, Homo sapiens
  CDR3 for beta chain variable domain of TCR clone 61670 (TRBV12-4, TRBJ2-2)
CASSLVAGTRGRTGELFF

SEQ ID NO: 123341 - protein, 14 aa, Homo sapiens
  CDR3 for alpha chain variable domain of TCR clone 61671 (TRAV10, TRAJ48)
CVGVFHFGNEKLTF

SEQ ID NO: 123342 - protein, 17 aa, Homo sapiens
  CDR3 for beta chain variable domain of TCR clone 61671 (TRBV11-2, TRBJ2-1)
CASSLYPPGVEYNEQFF

SEQ ID NO: 123343 - protein, 14 aa, Homo sapiens
  CDR3 for alpha chain variable domain of TCR clone 61672 (TRAV2, TRAJ9)
CAVEDRSGGFKAIF

SEQ ID NO: 123344 - protein, 13 aa, Homo sapiens
  CDR3 for beta chain variable domain of TCR clone 61672 (TRBV10-3, TRBJ2-7)
CASKLAVNYEQYF

SEQ ID NO: 123345 - protein, 13 aa, Homo sapiens
  CDR3 for alpha chain variable domain of TCR clone 61673 (TRAV20, TRAJ37)
CAGCSSNTGKLIF

SEQ ID NO: 123346 - protein, 11 aa, Homo sapiens
  CDR3 for beta chain variable domain of TCR clone 61673 (TRBV12-3, TRBJ2-3)
CASPATDTQYF

SEQ ID NO: 123347 - protein, 10 aa, Homo sapiens
  CDR3 for alpha chain variable domain of TCR clone 61674 (TRAV1-2, TRAJ31)
CAFFRCQTHV

SEQ ID NO: 123348 - protein, 13 aa, Homo sapiens
  CDR3 for beta chain variable domain of TCR clone 61674 (TRBV7-9, TRBJ1-2)
CASSSKQNYGYTF

SEQ ID NO: 123349 - protein, 14 aa, Homo sapiens
  CDR3 for alpha chain variable domain of TCR clone 61675 (TRAV38-1, TRAJ57)
CAFMNTGGSEKLVF

SEQ ID NO: 123350 - protein, 12 aa, Homo sapiens
  CDR3 for beta chain variable domain of TCR clone 61675 (TRBV11-2, TRBJ2-2)
CASSLPTGELFF

SEQ ID NO: 123351 - protein, 14 aa, Homo sapiens
  CDR3 for alpha chain variable domain of TCR clone 61676 (TRAV12-1, TRAJ34)
CGEPASYNTDKLIF

SEQ ID NO: 123352 - protein, 12 aa, Homo sapiens
  CDR3 for beta chain variable domain of TCR clone 61676 (TRBV24-1, TRBJ1-1)
CATLYPDTEAFF

SEQ ID NO: 123353 - protein, 13 aa, Homo sapiens
  CDR3 for alpha chain variable domain of TCR clone 61677 (TRAV12-1, TRAJ22)
CVVPSGSARRLTF

SEQ ID NO: 123354 - protein, 15 aa, Homo sapiens
  CDR3 for beta chain variable domain of TCR clone 61677 (TRBV11-3, TRBJ2-7)
CASSPGPASSYEQYF

SEQ ID NO: 123355 - protein, 16 aa, Homo sapiens
  CDR3 for alpha chain variable domain of TCR clone 61678 (TRAV30, TRAJ24)
CGTEIVDADSWGKFQF

SEQ ID NO: 123356 - protein, 14 aa, Homo sapiens
  CDR3 for beta chain variable domain of TCR clone 61678 (TRBV6-5, TRBJ1-2)
CASSYDGTGGGYTF

SEQ ID NO: 123357 - protein, 12 aa, Homo sapiens
  CDR3 for alpha chain variable domain of TCR clone 61679 (TRAV25, TRAJ7)
CAGSYGNNRLAF

SEQ ID NO: 123358 - protein, 12 aa, Homo sapiens
  CDR3 for beta chain variable domain of TCR clone 61679 (TRBV5-1, TRBJ1-2)
CASSQDNYGYTF

SEQ ID NO: 123359 - protein, 18 aa, Homo sapiens
  CDR3 for alpha chain variable domain of TCR clone 61680 (TRAV26-1, TRAJ52)
CIVDPVGAGGTSYGKLTF

SEQ ID NO: 123360 - protein, 14 aa, Homo sapiens
  CDR3 for beta chain variable domain of TCR clone 61680 (TRBV19, TRBJ2-1)
CASPTFVLSGEQFF

SEQ ID NO: 123361 - protein, 12 aa, Homo sapiens
  CDR3 for alpha chain variable domain of TCR clone 61681 (TRAV12-1, TRAJ29)
RVADSGNTPLVF

SEQ ID NO: 123362 - protein, 12 aa, Homo sapiens
  CDR3 for beta chain variable domain of TCR clone 61681 (TRBV2, TRBJ2-7)
CASKRGSYEQYF

SEQ ID NO: 123363 - protein, 14 aa, Homo sapiens
  CDR3 for alpha chain variable domain of TCR clone 61682 (TRAV8-3, TRAJ4)
SAVGAAGGYNKLIF

SEQ ID NO: 123364 - protein, 15 aa, Homo sapiens
  CDR3 for beta chain variable domain of TCR clone 61682 (TRBV6-5, TRBJ2-1)
CASSYDAGAGNEQFF

SEQ ID NO: 123365 - protein, 12 aa, Homo sapiens
  CDR3 for alpha chain variable domain of TCR clone 61683 (TRAV12-3, TRAJ17)
CAMTLTGDKLTF

SEQ ID NO: 123366 - protein, 17 aa, Homo sapiens
  CDR3 for beta chain variable domain of TCR clone 61683 (TRBV25-1, TRBJ2-1)
CASSAYGQGRGVYEQFF

SEQ ID NO: 123367 - protein, 18 aa, Homo sapiens
  CDR3 for alpha chain variable domain of TCR clone 61684 (TRAV13-1, TRAJ52)
CAAKNPNAGGTSYGKLTF

SEQ ID NO: 123368 - protein, 12 aa, Homo sapiens
  CDR3 for beta chain variable domain of TCR clone 61684 (TRBV11-2, TRBJ2-7)
CASSLPTYEQYF

SEQ ID NO: 123369 - protein, 12 aa, Homo sapiens
  CDR3 for alpha chain variable domain of TCR clone 61685 (TRAV2, TRAJ9)
CAVGAGGFKTIF

SEQ ID NO: 123370 - protein, 16 aa, Homo sapiens
  CDR3 for beta chain variable domain of TCR clone 61685 (TRBV13, TRBJ2-2)
CASSPRTGEHTGGMFF

SEQ ID NO: 123371 - protein, 15 aa, Homo sapiens
  CDR3 for alpha chain variable domain of TCR clone 61686 (TRAV2, TRAJ9)
CAVEDRGTGGFKTIF

SEQ ID NO: 123372 - protein, 14 aa, Homo sapiens
  CDR3 for beta chain variable domain of TCR clone 61686 (TRBV5-4, TRBJ1-1)
CASSLDSRRDEAFF

SEQ ID NO: 123373 - protein, 14 aa, Homo sapiens
  CDR3 for alpha chain variable domain of TCR clone 61687 (TRAV23/DV6, TRAJ8)
CAASKATGFQKLVF

SEQ ID NO: 123374 - protein, 15 aa, Homo sapiens
  CDR3 for beta chain variable domain of TCR clone 61687 (TRBV28, TRBJ2-3)
YASSPDRQGANTQYF

SEQ ID NO: 123375 - protein, 14 aa, Homo sapiens
  CDR3 for alpha chain variable domain of TCR clone 61688 (TRAV12-2, TRAJ13)
CAVKKTGGYQKVTF

SEQ ID NO: 123376 - protein, 16 aa, Homo sapiens
  CDR3 for beta chain variable domain of TCR clone 61688 (TRBV24-1, TRBJ2-3)
CATSEAREGRGDTQYF

SEQ ID NO: 123377 - protein, 14 aa, Homo sapiens
  CDR3 for alpha chain variable domain of TCR clone 61689 (TRAV26-1, TRAJ38)
CIADTAGNNRKLIW

SEQ ID NO: 123378 - protein, 17 aa, Homo sapiens
  CDR3 for beta chain variable domain of TCR clone 61689 (TRBV7-9, TRBJ2-3)
CASSPTVAGDLTDTQYF

SEQ ID NO: 123379 - protein, 13 aa, Homo sapiens
  CDR3 for alpha chain variable domain of TCR clone 61690 (TRAV8-6, TRAJ5)
CAVLDTGRRALTF

SEQ ID NO: 123380 - protein, 12 aa, Homo sapiens
  CDR3 for beta chain variable domain of TCR clone 61690 (TRBV7-9, TRBJ1-6)
CASSASESPLHS

SEQ ID NO: 123381 - protein, 14 aa, Homo sapiens
  CDR3 for alpha chain variable domain of TCR clone 61691 (TRAV12-3, TRAJ42)
CAMNYGGSQGNLIF

SEQ ID NO: 123382 - protein, 15 aa, Homo sapiens
  CDR3 for beta chain variable domain of TCR clone 61691 (TRBV5-7, TRBJ1-5)
CAGSYGKLWDQPQHF

SEQ ID NO: 123383 - protein, 16 aa, Homo sapiens
  CDR3 for alpha chain variable domain of TCR clone 61692 (TRAV23/DV6, TRAJ9)
CAASIGGNTGGFKTIF

SEQ ID NO: 123384 - protein, 15 aa, Homo sapiens
  CDR3 for beta chain variable domain of TCR clone 61692 (TRBV9, TRBJ1-6)
CASSVAGTGDSPLHF

SEQ ID NO: 123385 - protein, 14 aa, Homo sapiens
  CDR3 for alpha chain variable domain of TCR clone 61693 (TRAV35, TRAJ50)
CAGHRKTSYDKVIF

SEQ ID NO: 123386 - protein, 14 aa, Homo sapiens
  CDR3 for beta chain variable domain of TCR clone 61693 (TRBV6-1, TRBJ1-3)
CASVQGGGGNTIYF

SEQ ID NO: 123387 - protein, 14 aa, Homo sapiens
  CDR3 for alpha chain variable domain of TCR clone 61694 (TRAV17, TRAJ22)
CATDASGSARQLTF

SEQ ID NO: 123388 - protein, 16 aa, Homo sapiens
  CDR3 for beta chain variable domain of TCR clone 61694 (TRBV4-3, TRBJ1-6)
CASSQDPGVYNSPLHF

SEQ ID NO: 123389 - protein, 14 aa, Homo sapiens
  CDR3 for alpha chain variable domain of TCR clone 61695 (TRAV12-2, TRAJ53)
CAVKGGGSNYKLTF

SEQ ID NO: 123390 - protein, 14 aa, Homo sapiens
  CDR3 for beta chain variable domain of TCR clone 61695 (TRBV5-1, TRBJ2-7)
CASSFASGVNEQYF

SEQ ID NO: 123391 - protein, 11 aa, Homo sapiens
  CDR3 for alpha chain variable domain of TCR clone 61696 (TRAV17, TRAJ9)
CATTGGFKTIL

SEQ ID NO: 123392 - protein, 11 aa, Homo sapiens
  CDR3 for beta chain variable domain of TCR clone 61696 (TRBV29-1, TRBJ2-5)
CSEDRTGTQYF

SEQ ID NO: 123393 - protein, 13 aa, Homo sapiens
  CDR3 for alpha chain variable domain of TCR clone 61697 (TRAV22, TRAJ29)
CAVGGSGNTPLVF

SEQ ID NO: 123394 - protein, 14 aa, Homo sapiens
  CDR3 for beta chain variable domain of TCR clone 61697 (TRBV6-1, TRBJ1-3)
CASVQGGGGNTIYF

SEQ ID NO: 123395 - protein, 16 aa, Homo sapiens
  CDR3 for alpha chain variable domain of TCR clone 61698 (TRAV8-3, TRAJ44)
CAVGASNTGTASKLTF

SEQ ID NO: 123396 - protein, 15 aa, Homo sapiens
  CDR3 for beta chain variable domain of TCR clone 61698 (TRBV27, TRBJ1-5)
CASTFNRGSNQHQHF

SEQ ID NO: 123397 - protein, 14 aa, Homo sapiens
  CDR3 for alpha chain variable domain of TCR clone 61699 (TRAV12-2, TRAJ13)
CAVKKTGGYQKVTF

SEQ ID NO: 123398 - protein, 13 aa, Homo sapiens
  CDR3 for beta chain variable domain of TCR clone 61699 (TRBV3-1, TRBJ1-1)
CASSPGVITEAFF

SEQ ID NO: 123399 - protein, 18 aa, Homo sapiens
  CDR3 for alpha chain variable domain of TCR clone 61700 (TRAV26-2, TRAJ45)
CILRVDKYSGGGADGLTF

SEQ ID NO: 123400 - protein, 16 aa, Homo sapiens
  CDR3 for beta chain variable domain of TCR clone 61700 (TRBV2, TRBJ1-4)
CASNLLQVATNEKLFF

SEQ ID NO: 123401 - protein, 15 aa, Homo sapiens
  CDR3 for alpha chain variable domain of TCR clone 61701 (TRAV29/DV5, TRAJ24)
CAASGATDSWGKFQV

SEQ ID NO: 123402 - protein, 13 aa, Homo sapiens
  CDR3 for beta chain variable domain of TCR clone 61701 (TRBV19, TRBJ1-2)
CASSVPGQDGYTF

SEQ ID NO: 123403 - protein, 14 aa, Homo sapiens
  CDR3 for alpha chain variable domain of TCR clone 61702 (TRAV17, TRAJ40)
CATALTSGTYKYIF

SEQ ID NO: 123404 - protein, 12 aa, Homo sapiens
  CDR3 for beta chain variable domain of TCR clone 61702 (TRBV12-4, TRBJ2-7)
CASSLGGYEQYF

SEQ ID NO: 123405 - protein, 14 aa, Homo sapiens
  CDR3 for alpha chain variable domain of TCR clone 61703 (TRAV13-1, TRAJ44)
CAAKATGTASKLTF

SEQ ID NO: 123406 - protein, 13 aa, Homo sapiens
  CDR3 for beta chain variable domain of TCR clone 61703 (TRBV5-5, TRBJ1-2)
YASSFWRGEDYTF

SEQ ID NO: 123407 - protein, 11 aa, Homo sapiens
  CDR3 for alpha chain variable domain of TCR clone 61704 (TRAV3, TRAJ21)
CAVGNFNKFYF

SEQ ID NO: 123408 - protein, 14 aa, Homo sapiens
  CDR3 for beta chain variable domain of TCR clone 61704 (TRBV7-3, TRBJ2-2)
CASSSGGYTGELFF

SEQ ID NO: 123409 - protein, 14 aa, Homo sapiens
  CDR3 for alpha chain variable domain of TCR clone 61705 (TRAV1-2, TRAJ16)
CAVNRFSDSQKLLF

SEQ ID NO: 123410 - protein, 13 aa, Homo sapiens
  CDR3 for beta chain variable domain of TCR clone 61705 (TRBV20-1, TRBJ1-1)
CSARGGGNTEAFF

SEQ ID NO: 123411 - protein, 16 aa, Homo sapiens
  CDR3 for alpha chain variable domain of TCR clone 61706 (TRAV17, TRAJ28)
CATASVSGAGSYRLTF

SEQ ID NO: 123412 - protein, 11 aa, Homo sapiens
  CDR3 for beta chain variable domain of TCR clone 61706 (TRBV7-9, TRBJ2-5)
CASSLGETQYF

SEQ ID NO: 123413 - protein, 23 aa, Homo sapiens
  CDR3 for alpha chain variable domain of TCR clone 61707 (TRAV12-2, TRAJ22)
CAVSFRVHPGPLIVSGSARQLTF

SEQ ID NO: 123414 - protein, 13 aa, Homo sapiens
  CDR3 for beta chain variable domain of TCR clone 61707 (TRBV12-4, TRBJ1-2)
CASSLDSNYGYTF

SEQ ID NO: 123415 - protein, 15 aa, Homo sapiens
  CDR3 for alpha chain variable domain of TCR clone 61708 (TRAV4, TRAJ27)
CLVGDEGTNAGKSTF

SEQ ID NO: 123416 - protein, 12 aa, Homo sapiens
  CDR3 for beta chain variable domain of TCR clone 61708 (TRBV11-2, TRBJ2-2)
CASSLGGGELFF

SEQ ID NO: 123417 - protein, 18 aa, Homo sapiens
  CDR3 for alpha chain variable domain of TCR clone 61709 (TRAV13-1, TRAJ52)
CAAKNPNAGGTSYGKLTF

SEQ ID NO: 123418 - protein, 23 aa, Homo sapiens
  CDR3 for beta chain variable domain of TCR clone 61709 (TRBV7-9, TRBJ1-2)
EAQLEKSRLLSDRFSSGEDGYTF

SEQ ID NO: 123419 - protein, 15 aa, Homo sapiens
  CDR3 for alpha chain variable domain of TCR clone 61710 (TRAV21, TRAJ53)
GATLNSGGSNYKLTF

SEQ ID NO: 123420 - protein, 16 aa, Homo sapiens
  CDR3 for beta chain variable domain of TCR clone 61710 (TRBV9, TRBJ2-1)
CASSVGGGGNYNEQFF

SEQ ID NO: 123421 - protein, 12 aa, Homo sapiens
  CDR3 for alpha chain variable domain of TCR clone 61711 (TRAV13-1, TRAJ49)
CAASPMGNQFCF

SEQ ID NO: 123422 - protein, 13 aa, Homo sapiens
  CDR3 for beta chain variable domain of TCR clone 61711 (TRBV20-1, TRBJ2-2)
CSASAAGTGELFF

SEQ ID NO: 123423 - protein, 13 aa, Homo sapiens
  CDR3 for alpha chain variable domain of TCR clone 61712 (TRAV17, TRAJ9)
CATDYTGGFKTIF

SEQ ID NO: 123424 - protein, 12 aa, Homo sapiens
  CDR3 for beta chain variable domain of TCR clone 61712 (TRBV7-8, TRBJ2-7)
CASSLGDREQYF

SEQ ID NO: 123425 - protein, 14 aa, Homo sapiens
  CDR3 for alpha chain variable domain of TCR clone 61713 (TRAV26-1, TRAJ39)
CIVRGSRAGNMLTF

SEQ ID NO: 123426 - protein, 10 aa, Homo sapiens
  CDR3 for beta chain variable domain of TCR clone 61713 (TRBV7-9, TRBJ1-5)
CASSQGHQPN

SEQ ID NO: 123427 - protein, 14 aa, Homo sapiens
  CDR3 for alpha chain variable domain of TCR clone 61714 (TRAV26-1, TRAJ38)
CIADNAGNNRKLIW

SEQ ID NO: 123428 - protein, 17 aa, Homo sapiens
  CDR3 for beta chain variable domain of TCR clone 61714 (TRBV15, TRBJ1-1)
CATSRVGGADGDTEASF

SEQ ID NO: 123429 - protein, 13 aa, Homo sapiens
  CDR3 for alpha chain variable domain of TCR clone 61715 (TRAV35, TRAJ43)
CAGYPYNNNDMRF

SEQ ID NO: 123430 - protein, 15 aa, Homo sapiens
  CDR3 for beta chain variable domain of TCR clone 61715 (TRBV25-1, TRBJ1-4)
CASSERIATNEKLFF

SEQ ID NO: 123431 - protein, 14 aa, Homo sapiens
  CDR3 for alpha chain variable domain of TCR clone 61716 (TRAV2, TRAJ37)
CAVDFTSNTGKLIF

SEQ ID NO: 123432 - protein, 14 aa, Homo sapiens
  CDR3 for beta chain variable domain of TCR clone 61716 (TRBV11-2, TRBJ2-5)
CASSRTGGIETQYF

SEQ ID NO: 123433 - protein, 12 aa, Homo sapiens
  CDR3 for alpha chain variable domain of TCR clone 61717 (TRAV8-3, TRAJ26)
CAGDNYGQNFVF

SEQ ID NO: 123434 - protein, 16 aa, Homo sapiens
  CDR3 for beta chain variable domain of TCR clone 61717 (TRBV6-5, TRBJ2-1)
CASSETLAGHYNEQFF

SEQ ID NO: 123435 - protein, 17 aa, Homo sapiens
  CDR3 for alpha chain variable domain of TCR clone 61718 (TRAV3, TRAJ38)
CAVRDCLNAGNNRKLIW

SEQ ID NO: 123436 - protein, 14 aa, Homo sapiens
  CDR3 for beta chain variable domain of TCR clone 61718 (TRBV5-5, TRBJ1-5)
CASSRQGVDQPQHF

SEQ ID NO: 123437 - protein, 18 aa, Homo sapiens
  CDR3 for alpha chain variable domain of TCR clone 61719 (TRAV21, TRAJ52)
CAVRPSPAGGTSYGKLTF

SEQ ID NO: 123438 - protein, 15 aa, Homo sapiens
  CDR3 for beta chain variable domain of TCR clone 61719 (TRBV19, TRBJ1-5)
CASSIVWADNQPQHF

SEQ ID NO: 123439 - protein, 11 aa, Homo sapiens
  CDR3 for alpha chain variable domain of TCR clone 61720 (TRAV3, TRAJ21)
CAVGSFNKFYF

SEQ ID NO: 123440 - protein, 16 aa, Homo sapiens
  CDR3 for beta chain variable domain of TCR clone 61720 (TRBV7-6, TRBJ2-1)
CASSAPGPSSYNEQFF

SEQ ID NO: 123441 - protein, 14 aa, Homo sapiens
  CDR3 for alpha chain variable domain of TCR clone 61721 (TRAV12-2, TRAJ13)
CALKKTGGYQKVTF

SEQ ID NO: 123442 - protein, 16 aa, Homo sapiens
  CDR3 for beta chain variable domain of TCR clone 61721 (TRBV2, TRBJ2-1)
CASRSPAGGKYNEQFF

SEQ ID NO: 123443 - protein, 12 aa, Homo sapiens
  CDR3 for alpha chain variable domain of TCR clone 61722 (TRAV29/DV5, TRAJ15)
CASNQAGTALIF

SEQ ID NO: 123444 - protein, 12 aa, Homo sapiens
  CDR3 for beta chain variable domain of TCR clone 61722 (TRBV19, TRBJ1-5)
CASSIAQQPQHF

SEQ ID NO: 123445 - protein, 13 aa, Homo sapiens
  CDR3 for alpha chain variable domain of TCR clone 61723 (TRAV12-1, TRAJ11)
CVVSRAGYSTLTF

SEQ ID NO: 123446 - protein, 15 aa, Homo sapiens
  CDR3 for beta chain variable domain of TCR clone 61723 (TRBV7-3, TRBJ2-2)
CASSETGQGTGELFF

SEQ ID NO: 123447 - protein, 15 aa, Homo sapiens
  CDR3 for alpha chain variable domain of TCR clone 61724 (TRAV26-2, TRAJ57)
CILRDIRGGAEKLVF

SEQ ID NO: 123448 - protein, 15 aa, Homo sapiens
  CDR3 for beta chain variable domain of TCR clone 61724 (TRBV2, TRBJ2-1)
CASDIGLAGEGEQFF

SEQ ID NO: 123449 - protein, 13 aa, Homo sapiens
  CDR3 for alpha chain variable domain of TCR clone 61725 (TRAV35, TRAJ42)
CAGFPGSQGNLIF

SEQ ID NO: 123450 - protein, 15 aa, Homo sapiens
  CDR3 for beta chain variable domain of TCR clone 61725 (TRBV27, TRBJ2-1)
CASSPLAGGANEQFF

SEQ ID NO: 123451 - protein, 18 aa, Homo sapiens
  CDR3 for alpha chain variable domain of TCR clone 61726 (TRAV12-3, TRAJ52)
CAMSVGGAGGTSYGKLTF

SEQ ID NO: 123452 - protein, 13 aa, Homo sapiens
  CDR3 for beta chain variable domain of TCR clone 61726 (TRBV7-2, TRBJ2-7)
CASSSPSGSEQYF

SEQ ID NO: 123453 - protein, 18 aa, Homo sapiens
  CDR3 for alpha chain variable domain of TCR clone 61727 (TRAV2, TRAJ20)
LQVREADAAVYRDCKLSF

SEQ ID NO: 123454 - protein, 16 aa, Homo sapiens
  CDR3 for beta chain variable domain of TCR clone 61727 (TRBV19, TRBJ2-1)
CASSKAGPSSYNEQFF

SEQ ID NO: 123455 - protein, 14 aa, Homo sapiens
  CDR3 for alpha chain variable domain of TCR clone 61728 (TRAV8-3, TRAJ9)
CAVVYNTGGFKTIF

SEQ ID NO: 123456 - protein, 13 aa, Homo sapiens
  CDR3 for beta chain variable domain of TCR clone 61728 (TRBV11-3, TRBJ1-1)
CASSSNRDTEAFF

SEQ ID NO: 123457 - protein, 12 aa, Homo sapiens
  CDR3 for alpha chain variable domain of TCR clone 61729 (TRAV12-3, TRAJ17)
CAMTLTGNKLTF

SEQ ID NO: 123458 - protein, 15 aa, Homo sapiens
  CDR3 for beta chain variable domain of TCR clone 61729 (TRBV7-9, TRBJ1-6)
CASSSPGRGSSPLHF

SEQ ID NO: 123459 - protein, 13 aa, Homo sapiens
  CDR3 for alpha chain variable domain of TCR clone 61730 (TRAV8-3, TRAJ36)
CAVGATGANNLFF

SEQ ID NO: 123460 - protein, 15 aa, Homo sapiens
  CDR3 for beta chain variable domain of TCR clone 61730 (TRBV5-1, TRBJ2-3)
CASSVTAGSTDTQYF

SEQ ID NO: 123461 - protein, 11 aa, Homo sapiens
  CDR3 for alpha chain variable domain of TCR clone 61731 (TRAV17, TRAJ43)
CATPRSNDMRF

SEQ ID NO: 123462 - protein, 15 aa, Homo sapiens
  CDR3 for beta chain variable domain of TCR clone 61731 (TRBV19, TRBJ1-2)
CASSVGQVLNYGYTF

SEQ ID NO: 123463 - protein, 14 aa, Homo sapiens
  CDR3 for alpha chain variable domain of TCR clone 61732 (TRAV16, TRAJ33)
CALSVMDSNYQLIW

SEQ ID NO: 123464 - protein, 15 aa, Homo sapiens
  CDR3 for beta chain variable domain of TCR clone 61732 (TRBV28, TRBJ2-7)
CASSLEAYPIYEQYF

SEQ ID NO: 123465 - protein, 12 aa, Homo sapiens
  CDR3 for alpha chain variable domain of TCR clone 61733 (TRAV21, TRAJ13)
PGPSGGYQEVTF

SEQ ID NO: 123466 - protein, 15 aa, Homo sapiens
  CDR3 for beta chain variable domain of TCR clone 61733 (TRBV7-9, TRBJ1-6)
CASSSPGRGNSPLHF

SEQ ID NO: 123467 - protein, 14 aa, Homo sapiens
  CDR3 for alpha chain variable domain of TCR clone 61734 (TRAV12-3, TRAJ29)
CAMSPYSGNTPLVF

SEQ ID NO: 123468 - protein, 12 aa, Homo sapiens
  CDR3 for beta chain variable domain of TCR clone 61734 (TRBV11-2, TRBJ2-2)
CASSLGGGELFF

SEQ ID NO: 123469 - protein, 14 aa, Homo sapiens
  CDR3 for alpha chain variable domain of TCR clone 61735 (TRAV1-2, TRAJ29)
CAVGELTSATPLVF

SEQ ID NO: 123470 - protein, 14 aa, Homo sapiens
  CDR3 for beta chain variable domain of TCR clone 61735 (TRBV3-1, TRBJ2-5)
CASSQGPDQETQYF

SEQ ID NO: 123471 - protein, 16 aa, Homo sapiens
  CDR3 for alpha chain variable domain of TCR clone 61736 (TRAV14/DV4, TRAJ53)
CAMREGGGGSNYKLTF

SEQ ID NO: 123472 - protein, 13 aa, Homo sapiens
  CDR3 for beta chain variable domain of TCR clone 61736 (TRBV9, TRBJ2-1)
CASSPSGGSEQFF

SEQ ID NO: 123473 - protein, 13 aa, Homo sapiens
  CDR3 for alpha chain variable domain of TCR clone 61737 (TRAV27, TRAJ45)
CRSSGGGADGLTF

SEQ ID NO: 123474 - protein, 12 aa, Homo sapiens
  CDR3 for beta chain variable domain of TCR clone 61737 (TRBV19, TRBJ1-5)
CASSIAQQPQHF

SEQ ID NO: 123475 - protein, 14 aa, Homo sapiens
  CDR3 for alpha chain variable domain of TCR clone 61738 (TRAV13-1, TRAJ40)
CAASMTSGTYKYIF

SEQ ID NO: 123476 - protein, 15 aa, Homo sapiens
  CDR3 for beta chain variable domain of TCR clone 61738 (TRBV7-3, TRBJ2-1)
CASSPTGVGEVEQFF

SEQ ID NO: 123477 - protein, 15 aa, Homo sapiens
  CDR3 for alpha chain variable domain of TCR clone 61739 (TRAV17, TRAJ57)
CATGPSQGGSEKLGF

SEQ ID NO: 123478 - protein, 13 aa, Homo sapiens
  CDR3 for beta chain variable domain of TCR clone 61739 (TRBV27, TRBJ1-4)
CASSLMGDEKLFF

SEQ ID NO: 123479 - protein, 15 aa, Homo sapiens
  CDR3 for alpha chain variable domain of TCR clone 61740 (TRAV29/DV5, TRAJ24)
CAASGATDSWGKFQF

SEQ ID NO: 123480 - protein, 12 aa, Homo sapiens
  CDR3 for beta chain variable domain of TCR clone 61740 (TRBV11-2, TRBJ2-2)
CASSLGGGELFF

SEQ ID NO: 123481 - protein, 12 aa, Homo sapiens
  CDR3 for alpha chain variable domain of TCR clone 61741 (TRAV16, TRAJ10)
CSRTGGGNKLTF

SEQ ID NO: 123482 - protein, 16 aa, Homo sapiens
  CDR3 for beta chain variable domain of TCR clone 61741 (TRBV15, TRBJ2-3)
CATSRDLGIVTDTQYF

SEQ ID NO: 123483 - protein, 13 aa, Homo sapiens
  CDR3 for alpha chain variable domain of TCR clone 61742 (TRAV3, TRAJ21)
CAVREPDFNKFYF

SEQ ID NO: 123484 - protein, 13 aa, Homo sapiens
  CDR3 for beta chain variable domain of TCR clone 61742 (TRBV24-1, TRBJ2-2)
CATSDWSTGELFF

SEQ ID NO: 123485 - protein, 13 aa, Homo sapiens
  CDR3 for alpha chain variable domain of TCR clone 61743 (TRAV27, TRAJ56)
CAGKPGANSKLTF

SEQ ID NO: 123486 - protein, 18 aa, Homo sapiens
  CDR3 for beta chain variable domain of TCR clone 61743 (TRBV11-2, TRBJ2-3)
CAISLGGASRGAPNTQYF

SEQ ID NO: 123487 - protein, 13 aa, Homo sapiens
  CDR3 for alpha chain variable domain of TCR clone 61744 (TRAV21, TRAJ47)
CAVSGLYGNKLVF

SEQ ID NO: 123488 - protein, 17 aa, Homo sapiens
  CDR3 for beta chain variable domain of TCR clone 61744 (TRBV15, TRBJ2-3)
CATSGTTGEEGTDTQYF

SEQ ID NO: 123489 - protein, 14 aa, Homo sapiens
  CDR3 for alpha chain variable domain of TCR clone 61745 (TRAV29/DV5, TRAJ34)
CAASASRETDKLIF

SEQ ID NO: 123490 - protein, 15 aa, Homo sapiens
  CDR3 for beta chain variable domain of TCR clone 61745 (TRBV7-8, TRBJ2-7)
FASSLERAGSYEQYF

SEQ ID NO: 123491 - protein, 18 aa, Homo sapiens
  CDR3 for alpha chain variable domain of TCR clone 61746 (TRAV26-2, TRAJ54)
CILRDVEVGIQGAQRLVF

SEQ ID NO: 123492 - protein, 16 aa, Homo sapiens
  CDR3 for beta chain variable domain of TCR clone 61746 (TRBV6-1, TRBJ2-5)
CASSETLDRGAETQYF

SEQ ID NO: 123493 - protein, 13 aa, Homo sapiens
  CDR3 for alpha chain variable domain of TCR clone 61747 (TRAV1-2, TRAJ9)
CAALNTGGFKTIF

SEQ ID NO: 123494 - protein, 15 aa, Homo sapiens
  CDR3 for beta chain variable domain of TCR clone 61747 (TRBV19, TRBJ1-1)
CASASGQIQNTEAFL

SEQ ID NO: 123495 - protein, 14 aa, Homo sapiens
  CDR3 for alpha chain variable domain of TCR clone 61748 (TRAV26-1, TRAJ34)
CIVRIAYNTDKLIF

SEQ ID NO: 123496 - protein, 15 aa, Homo sapiens
  CDR3 for beta chain variable domain of TCR clone 61748 (TRBV20-1, TRBJ2-7)
CSARVPAAYFYEQYF

SEQ ID NO: 123497 - protein, 17 aa, Homo sapiens
  CDR3 for alpha chain variable domain of TCR clone 61749 (TRAV4, TRAJ42)
CLVGVLNYGGSQGNLIF

SEQ ID NO: 123498 - protein, 12 aa, Homo sapiens
  CDR3 for beta chain variable domain of TCR clone 61749 (TRBV20-1, TRBJ2-1)
CSAQYPYNEQFF

SEQ ID NO: 123499 - protein, 13 aa, Homo sapiens
  CDR3 for alpha chain variable domain of TCR clone 61750 (TRAV12-3, TRAJ33)
CAMSVNSNYQLIW

SEQ ID NO: 123500 - protein, 13 aa, Homo sapiens
  CDR3 for beta chain variable domain of TCR clone 61750 (TRBV7-2, TRBJ2-2)
CASSLAVTWELFF

SEQ ID NO: 123501 - protein, 11 aa, Homo sapiens
  CDR3 for alpha chain variable domain of TCR clone 61751 (TRAV12-2, TRAJ49)
RAVNTGNQFYF

SEQ ID NO: 123502 - protein, 12 aa, Homo sapiens
  CDR3 for beta chain variable domain of TCR clone 61751 (TRBV2, TRBJ2-3)
CASSGRFDTQYF

SEQ ID NO: 123503 - protein, 16 aa, Homo sapiens
  CDR3 for alpha chain variable domain of TCR clone 61752 (TRAV27, TRAJ13)
CAGAKSDSGGYQKVTF

SEQ ID NO: 123504 - protein, 14 aa, Homo sapiens
  CDR3 for beta chain variable domain of TCR clone 61752 (TRBV4-1, TRBJ2-2)
CASSQAVNTGELFF

SEQ ID NO: 123505 - protein, 15 aa, Homo sapiens
  CDR3 for alpha chain variable domain of TCR clone 61753 (TRAV38-1, TRAJ37)
CAFIFGSGNTGKLIF

SEQ ID NO: 123506 - protein, 12 aa, Homo sapiens
  CDR3 for beta chain variable domain of TCR clone 61753 (TRBV7-9, TRBJ2-7)
CASSLEVYEQYF

SEQ ID NO: 123507 - protein, 14 aa, Homo sapiens
  CDR3 for alpha chain variable domain of TCR clone 61754 (TRAV23/DV6, TRAJ11)
CAASLESGYSTLTL

SEQ ID NO: 123508 - protein, 15 aa, Homo sapiens
  CDR3 for beta chain variable domain of TCR clone 61754 (TRBV28, TRBJ2-7)
CASSSPGTEPFEQYF

SEQ ID NO: 123509 - protein, 13 aa, Homo sapiens
  CDR3 for alpha chain variable domain of TCR clone 61755 (TRAV2, TRAJ24)
CAVTTDSWGKLQF

SEQ ID NO: 123510 - protein, 13 aa, Homo sapiens
  CDR3 for beta chain variable domain of TCR clone 61755 (TRBV13, TRBJ2-5)
CQQLRPGQETQYF

SEQ ID NO: 123511 - protein, 14 aa, Homo sapiens
  CDR3 for alpha chain variable domain of TCR clone 61756 (TRAV1-2, TRAJ8)
CAVREDTGFQKLVF

SEQ ID NO: 123512 - protein, 15 aa, Homo sapiens
  CDR3 for beta chain variable domain of TCR clone 61756 (TRBV5-5, TRBJ1-5)
CASSSTPGSNQTQHF

SEQ ID NO: 123513 - protein, 12 aa, Homo sapiens
  CDR3 for alpha chain variable domain of TCR clone 61757 (TRAV2, TRAJ26)
CAGSPGRLWSEF

SEQ ID NO: 123514 - protein, 16 aa, Homo sapiens
  CDR3 for beta chain variable domain of TCR clone 61757 (TRBV7-2, TRBJ2-5)
CASSSKWLSGQETQYF

SEQ ID NO: 123515 - protein, 13 aa, Homo sapiens
  CDR3 for alpha chain variable domain of TCR clone 61758 (TRAV26-2, TRAJ43)
CILRAVNNNDMRF

SEQ ID NO: 123516 - protein, 16 aa, Homo sapiens
  CDR3 for beta chain variable domain of TCR clone 61758 (TRBV18, TRBJ2-7)
CASSPMGNRRAHEQYF

SEQ ID NO: 123517 - protein, 14 aa, Homo sapiens
  CDR3 for alpha chain variable domain of TCR clone 61759 (TRAV17, TRAJ35)
CATDRPGFGNVLHC

SEQ ID NO: 123518 - protein, 15 aa, Homo sapiens
  CDR3 for beta chain variable domain of TCR clone 61759 (TRBV28, TRBJ2-5)
CASSSGRVSQETQYF

SEQ ID NO: 123519 - protein, 16 aa, Homo sapiens
  CDR3 for alpha chain variable domain of TCR clone 61760 (TRAV30, TRAJ24)
CGTEIVDADSWGKFQF

SEQ ID NO: 123520 - protein, 18 aa, Homo sapiens
  CDR3 for beta chain variable domain of TCR clone 61760 (TRBV11-2, TRBJ2-6)
CVSSLNPFLGTGANVLTF

SEQ ID NO: 123521 - protein, 11 aa, Homo sapiens
  CDR3 for alpha chain variable domain of TCR clone 61761 (TRAV13-1, TRAJ15)
CAATPGTALIF

SEQ ID NO: 123522 - protein, 15 aa, Homo sapiens
  CDR3 for beta chain variable domain of TCR clone 61761 (TRBV28, TRBJ2-5)
CASSPPWPYQETQYF

SEQ ID NO: 123523 - protein, 16 aa, Homo sapiens
  CDR3 for alpha chain variable domain of TCR clone 61762 (TRAV26-1, TRAJ37)
CIVRGDGSGNTGKLIF

SEQ ID NO: 123524 - protein, 17 aa, Homo sapiens
  CDR3 for beta chain variable domain of TCR clone 61762 (TRBV4-1, TRBJ2-7)
CASSRDSLGVRGGEQYF

SEQ ID NO: 123525 - protein, 15 aa, Homo sapiens
  CDR3 for alpha chain variable domain of TCR clone 61763 (TRAV8-3, TRAJ15)
CAVGAPNQEGTALIF

SEQ ID NO: 123526 - protein, 14 aa, Homo sapiens
  CDR3 for beta chain variable domain of TCR clone 61763 (TRBV20-1, TRBJ2-1)
CSPNDEASYNEQFF

SEQ ID NO: 123527 - protein, 15 aa, Homo sapiens
  CDR3 for alpha chain variable domain of TCR clone 61764 (TRAV26-1, TRAJ56)
CIVRVATGANSKLTF

SEQ ID NO: 123528 - protein, 15 aa, Homo sapiens
  CDR3 for beta chain variable domain of TCR clone 61764 (TRBV27, TRBJ2-7)
CASSPQREGQREQYL

SEQ ID NO: 123529 - protein, 12 aa, Homo sapiens
  CDR3 for alpha chain variable domain of TCR clone 61765 (TRAV12-3, TRAJ17)
CAMTLTGNKLTF

SEQ ID NO: 123530 - protein, 19 aa, Homo sapiens
  CDR3 for beta chain variable domain of TCR clone 61765 (TRBV2, TRBJ2-2)
CASSQPGLAGGGNTGELFF

SEQ ID NO: 123531 - protein, 12 aa, Homo sapiens
  CDR3 for alpha chain variable domain of TCR clone 61766 (TRAV13-2, TRAJ23)
CAERHRGGKLIF

SEQ ID NO: 123532 - protein, 15 aa, Homo sapiens
  CDR3 for beta chain variable domain of TCR clone 61766 (TRBV19, TRBJ2-4)
CASRGPRRGENIQYF

SEQ ID NO: 123533 - protein, 14 aa, Homo sapiens
  CDR3 for alpha chain variable domain of TCR clone 61767 (TRAV12-2, TRAJ15)
CAPHTGQAGTALIF

SEQ ID NO: 123534 - protein, 15 aa, Homo sapiens
  CDR3 for beta chain variable domain of TCR clone 61767 (TRBV4-2, TRBJ1-2)
CASSQRTGGRDGYTF

SEQ ID NO: 123535 - protein, 14 aa, Homo sapiens
  CDR3 for alpha chain variable domain of TCR clone 61768 (TRAV8-4, TRAJ9)
CAVRINTGGFKTIF

SEQ ID NO: 123536 - protein, 15 aa, Homo sapiens
  CDR3 for beta chain variable domain of TCR clone 61768 (TRBV10-2, TRBJ2-6)
CASSERGTGANVLTF

SEQ ID NO: 123537 - protein, 15 aa, Homo sapiens
  CDR3 for alpha chain variable domain of TCR clone 61769 (TRAV12-1, TRAJ44)
CVVFVNTGTASKLTF

SEQ ID NO: 123538 - protein, 17 aa, Homo sapiens
  CDR3 for beta chain variable domain of TCR clone 61769 (TRBV7-8, TRBJ2-6)
CASSAGTGGARANVLTF

SEQ ID NO: 123539 - protein, 12 aa, Homo sapiens
  CDR3 for alpha chain variable domain of TCR clone 61770 (TRAV12-3, TRAJ17)
CAMTLTGNKLTF

SEQ ID NO: 123540 - protein, 15 aa, Homo sapiens
  CDR3 for beta chain variable domain of TCR clone 61770 (TRBV11-2, TRBJ2-2)
CASSSDRVDAGELFF

SEQ ID NO: 123541 - protein, 16 aa, Homo sapiens
  CDR3 for alpha chain variable domain of TCR clone 61771 (TRAV30, TRAJ24)
CGTEIVDAGSWGKFQF

SEQ ID NO: 123542 - protein, 13 aa, Homo sapiens
  CDR3 for beta chain variable domain of TCR clone 61771 (TRBV7-2, TRBJ1-4)
CASSLAGLEKLFF

SEQ ID NO: 123543 - protein, 11 aa, Homo sapiens
  CDR3 for alpha chain variable domain of TCR clone 61772 (TRAV12-1, TRAJ34)
CVVNKGGELIF

SEQ ID NO: 123544 - protein, 12 aa, Homo sapiens
  CDR3 for beta chain variable domain of TCR clone 61772 (TRBV2, TRBJ2-1)
CAYGPPGNEQFF

SEQ ID NO: 123545 - protein, 12 aa, Homo sapiens
  CDR3 for alpha chain variable domain of TCR clone 61773 (TRAV8-3, TRAJ26)
CAGDNYGQNFVF

SEQ ID NO: 123546 - protein, 15 aa, Homo sapiens
  CDR3 for beta chain variable domain of TCR clone 61773 (TRBV27, TRBJ2-1)
CASSNGGGSSNEQFF

SEQ ID NO: 123547 - protein, 14 aa, Homo sapiens
  CDR3 for alpha chain variable domain of TCR clone 61774 (TRAV38-1, TRAJ45)
CAYYSGGGADGLTF

SEQ ID NO: 123548 - protein, 20 aa, Homo sapiens
  CDR3 for beta chain variable domain of TCR clone 61774 (TRBV28, TRBJ2-1)
CASTPIRRSPGLAGGNEQFF

SEQ ID NO: 123549 - protein, 12 aa, Homo sapiens
  CDR3 for alpha chain variable domain of TCR clone 61775 (TRAV3, TRAJ31)
CAVRDGNARLMF

SEQ ID NO: 123550 - protein, 18 aa, Homo sapiens
  CDR3 for beta chain variable domain of TCR clone 61775 (TRBV7-2, TRBJ2-3)
CASSLKREGSGITYTQYF

SEQ ID NO: 123551 - protein, 12 aa, Homo sapiens
  CDR3 for alpha chain variable domain of TCR clone 61776 (TRAV12-2, TRAJ10)
WGVTGGGNKLTF

SEQ ID NO: 123552 - protein, 15 aa, Homo sapiens
  CDR3 for beta chain variable domain of TCR clone 61776 (TRBV4-1, TRBJ2-5)
CASSQWDLYQETQYF

SEQ ID NO: 123553 - protein, 17 aa, Homo sapiens
  CDR3 for alpha chain variable domain of TCR clone 61777 (TRAV13-2, TRAJ28)
CAEEPAGSGAGSYQLTF

SEQ ID NO: 123554 - protein, 14 aa, Homo sapiens
  CDR3 for beta chain variable domain of TCR clone 61777 (TRBV18, TRBJ2-5)
CASSPGVSQETQYF

SEQ ID NO: 123555 - protein, 16 aa, Homo sapiens
  CDR3 for alpha chain variable domain of TCR clone 61778 (TRAV3, TRAJ10)
CAVRDMRAGGGNKLTF

SEQ ID NO: 123556 - protein, 19 aa, Homo sapiens
  CDR3 for beta chain variable domain of TCR clone 61778 (TRBV6-3, TRBJ1-2)
CASSYSNGRTGPPNYGYTF

SEQ ID NO: 123557 - protein, 15 aa, Homo sapiens
  CDR3 for alpha chain variable domain of TCR clone 61779 (TRAV8-4, TRAJ11)
CAVSRALSGYSTLTF

SEQ ID NO: 123558 - protein, 13 aa, Homo sapiens
  CDR3 for beta chain variable domain of TCR clone 61779 (TRBV10-3, TRBJ2-7)
FASKLAVNYEQYF

SEQ ID NO: 123559 - protein, 15 aa, Homo sapiens
  CDR3 for alpha chain variable domain of TCR clone 61780 (TRAV17, TRAJ22)
CATAALLGSARQLTF

SEQ ID NO: 123560 - protein, 13 aa, Homo sapiens
  CDR3 for beta chain variable domain of TCR clone 61780 (TRBV29-1, TRBJ2-3)
CSAVPQGGDTQYF

SEQ ID NO: 123561 - protein, 16 aa, Homo sapiens
  CDR3 for alpha chain variable domain of TCR clone 61781 (TRAV30, TRAJ24)
CGTEIVDADSWGKFQF

SEQ ID NO: 123562 - protein, 13 aa, Homo sapiens
  CDR3 for beta chain variable domain of TCR clone 61781 (TRBV7-3, TRBJ1-2)
CASSLKRGYGYTF

SEQ ID NO: 123563 - protein, 10 aa, Homo sapiens
  CDR3 for alpha chain variable domain of TCR clone 61782 (TRAV12-1, TRAJ37)
ARGNTGKPIF

SEQ ID NO: 123564 - protein, 15 aa, Homo sapiens
  CDR3 for beta chain variable domain of TCR clone 61782 (TRBV7-2, TRBJ2-3)
CASSLEQGGTDTQYF

SEQ ID NO: 123565 - protein, 11 aa, Homo sapiens
  CDR3 for alpha chain variable domain of TCR clone 61783 (TRAV12-3, TRAJ26)
CAMSHGQNFVF

SEQ ID NO: 123566 - protein, 14 aa, Homo sapiens
  CDR3 for beta chain variable domain of TCR clone 61783 (TRBV5-1, TRBJ2-7)
CASSRGESLYEQYF

SEQ ID NO: 123567 - protein, 14 aa, Homo sapiens
  CDR3 for alpha chain variable domain of TCR clone 61784 (TRAV12-2, TRAJ4)
CAEDLSGGYSKLIF

SEQ ID NO: 123568 - protein, 13 aa, Homo sapiens
  CDR3 for beta chain variable domain of TCR clone 61784 (TRBV7-9, TRBJ1-2)
CASSLKQNYGYTF

SEQ ID NO: 123569 - protein, 14 aa, Homo sapiens
  CDR3 for alpha chain variable domain of TCR clone 61785 (TRAV1-2, TRAJ8)
CAAREDTGFQKLVF

SEQ ID NO: 123570 - protein, 17 aa, Homo sapiens
  CDR3 for beta chain variable domain of TCR clone 61785 (TRBV11-2, TRBJ2-1)
CASSLYPPGVEYNEQFF

SEQ ID NO: 123571 - protein, 13 aa, Homo sapiens
  CDR3 for alpha chain variable domain of TCR clone 61786 (TRAV5, TRAJ30)
CAEIANRDDKIIF

SEQ ID NO: 123572 - protein, 13 aa, Homo sapiens
  CDR3 for beta chain variable domain of TCR clone 61786 (TRBV5-4, TRBJ1-1)
CASSVDRASEAFF

SEQ ID NO: 123573 - protein, 16 aa, Homo sapiens
  CDR3 for alpha chain variable domain of TCR clone 61787 (TRAV30, TRAJ24)
CGTEIVDADSWGKFQF

SEQ ID NO: 123574 - protein, 15 aa, Homo sapiens
  CDR3 for beta chain variable domain of TCR clone 61787 (TRBV20-1, TRBJ2-7)
CSARDRVSGMDEQYV

SEQ ID NO: 123575 - protein, 18 aa, Homo sapiens
  CDR3 for alpha chain variable domain of TCR clone 61788 (TRAV21, TRAJ52)
CAVRPSPAGGTSYGKLTF

SEQ ID NO: 123576 - protein, 15 aa, Homo sapiens
  CDR3 for beta chain variable domain of TCR clone 61788 (TRBV7-9, TRBJ1-4)
CASSRTGGFNEKLFF

SEQ ID NO: 123577 - protein, 14 aa, Homo sapiens
  CDR3 for alpha chain variable domain of TCR clone 61789 (TRAV12-2, TRAJ9)
CAVNALEGGFKTIF

SEQ ID NO: 123578 - protein, 17 aa, Homo sapiens
  CDR3 for beta chain variable domain of TCR clone 61789 (TRBV15, TRBJ1-4)
RATSRYGTGDPNEKLFF

SEQ ID NO: 123579 - protein, 14 aa, Homo sapiens
  CDR3 for alpha chain variable domain of TCR clone 61790 (TRAV8-4, TRAJ9)
CAVRINTGGFKTIF

SEQ ID NO: 123580 - protein, 15 aa, Homo sapiens
  CDR3 for beta chain variable domain of TCR clone 61790 (TRBV10-2, TRBJ2-6)
CASSEQGAGANVLTF

SEQ ID NO: 123581 - protein, 16 aa, Homo sapiens
  CDR3 for alpha chain variable domain of TCR clone 61791 (TRAV12-3, TRAJ53)
CAMSPGSGGSNYKLTF

SEQ ID NO: 123582 - protein, 13 aa, Homo sapiens
  CDR3 for beta chain variable domain of TCR clone 61791 (TRBV20-1, TRBJ2-3)
CSASGGSTDTQYF

SEQ ID NO: 123583 - protein, 12 aa, Homo sapiens
  CDR3 for alpha chain variable domain of TCR clone 61792 (TRAV12-1, TRAJ40)
CVVYSGTYKYIF

SEQ ID NO: 123584 - protein, 18 aa, Homo sapiens
  CDR3 for beta chain variable domain of TCR clone 61792 (TRBV11-2, TRBJ2-3)
CASSLGGASRGVPNTQYF

SEQ ID NO: 123585 - protein, 15 aa, Homo sapiens
  CDR3 for alpha chain variable domain of TCR clone 61793 (TRAV17, TRAJ57)
CATGPSQGGSEKLGF

SEQ ID NO: 123586 - protein, 12 aa, Homo sapiens
  CDR3 for beta chain variable domain of TCR clone 61793 (TRBV12-4, TRBJ2-7)
CASSLGGYEQYF

SEQ ID NO: 123587 - protein, 11 aa, Homo sapiens
  CDR3 for alpha chain variable domain of TCR clone 61794 (TRAV12-2, TRAJ29)
CAVTLRSPLVL

SEQ ID NO: 123588 - protein, 16 aa, Homo sapiens
  CDR3 for beta chain variable domain of TCR clone 61794 (TRBV19, TRBJ1-5)
CASSIDRGGPRQPQHF

SEQ ID NO: 123589 - protein, 14 aa, Homo sapiens
  CDR3 for alpha chain variable domain of TCR clone 61795 (TRAV12-1, TRAJ12)
CVVTRMDSSYKLIF

SEQ ID NO: 123590 - protein, 13 aa, Homo sapiens
  CDR3 for beta chain variable domain of TCR clone 61795 (TRBV20-1, TRBJ1-1)
CSARRGGNTEAFF

SEQ ID NO: 123591 - protein, 14 aa, Homo sapiens
  CDR3 for alpha chain variable domain of TCR clone 61796 (TRAV8-4, TRAJ15)
CAVTTREAGTALIF

SEQ ID NO: 123592 - protein, 16 aa, Homo sapiens
  CDR3 for beta chain variable domain of TCR clone 61796 (TRBV29-1, TRBJ2-6)
CSVEDITYSGANVLTF

SEQ ID NO: 123593 - protein, 17 aa, Homo sapiens
  CDR3 for alpha chain variable domain of TCR clone 61797 (TRAV14/DV4, TRAJ28)
CAMRGTSSGAGSYQLTF

SEQ ID NO: 123594 - protein, 13 aa, Homo sapiens
  CDR3 for beta chain variable domain of TCR clone 61797 (TRBV28, TRBJ2-5)
CASSFAGGEAQYF

SEQ ID NO: 123595 - protein, 12 aa, Homo sapiens
  CDR3 for alpha chain variable domain of TCR clone 61798 (TRAV1-1, TRAJ8)
CAGGTGFQKLVF

SEQ ID NO: 123596 - protein, 15 aa, Homo sapiens
  CDR3 for beta chain variable domain of TCR clone 61798 (TRBV7-9, TRBJ1-4)
CASRRTGGFNEKLFF

SEQ ID NO: 123597 - protein, 13 aa, Homo sapiens
  CDR3 for alpha chain variable domain of TCR clone 61799 (TRAV16, TRAJ48)
CSPLNLGNEKLTF

SEQ ID NO: 123598 - protein, 11 aa, Homo sapiens
  CDR3 for beta chain variable domain of TCR clone 61799 (TRBV7-9, TRBJ2-3)
CASSPTDTQYF

SEQ ID NO: 123599 - protein, 13 aa, Homo sapiens
  CDR3 for alpha chain variable domain of TCR clone 61800 (TRAV3, TRAJ27)
CAVRPLGAGKSTF

SEQ ID NO: 123600 - protein, 15 aa, Homo sapiens
  CDR3 for beta chain variable domain of TCR clone 61800 (TRBV6-3, TRBJ2-7)
CASSSPGTVFYEQYF

SEQ ID NO: 123601 - protein, 14 aa, Homo sapiens
  CDR3 for alpha chain variable domain of TCR clone 61801 (TRAV3, TRAJ37)
CAVKESGNTGKLIF

SEQ ID NO: 123602 - protein, 14 aa, Homo sapiens
  CDR3 for beta chain variable domain of TCR clone 61801 (TRBV2, TRBJ1-5)
CASSGNRGGQPQHF

SEQ ID NO: 123603 - protein, 13 aa, Homo sapiens
  CDR3 for alpha chain variable domain of TCR clone 61802 (TRAV20, TRAJ31)
CAVQAIGGARLMF

SEQ ID NO: 123604 - protein, 12 aa, Homo sapiens
  CDR3 for beta chain variable domain of TCR clone 61802 (TRBV14, TRBJ2-7)
CASSLNQRGQYF

SEQ ID NO: 123605 - protein, 15 aa, Homo sapiens
  CDR3 for alpha chain variable domain of TCR clone 61803 (TRAV12-2, TRAJ53)
CAVNGGGGSNYKRTF

SEQ ID NO: 123606 - protein, 17 aa, Homo sapiens
  CDR3 for beta chain variable domain of TCR clone 61803 (TRBV7-3, TRBJ2-3)
CASSLMKRMRGADTQYF

SEQ ID NO: 123607 - protein, 14 aa, Homo sapiens
  CDR3 for alpha chain variable domain of TCR clone 61804 (TRAV20, TRAJ20)
CAVRRGYNDYKLSF

SEQ ID NO: 123608 - protein, 13 aa, Homo sapiens
  CDR3 for beta chain variable domain of TCR clone 61804 (TRBV19, TRBJ2-5)
CASSETATETQYF

SEQ ID NO: 123609 - protein, 11 aa, Homo sapiens
  CDR3 for alpha chain variable domain of TCR clone 61805 (TRAV4, TRAJ31)
CLVGDNARLMV

SEQ ID NO: 123610 - protein, 16 aa, Homo sapiens
  CDR3 for beta chain variable domain of TCR clone 61805 (TRBV7-2, TRBJ2-5)
CASSSKWLSGQETQYF

SEQ ID NO: 123611 - protein, 16 aa, Homo sapiens
  CDR3 for alpha chain variable domain of TCR clone 61806 (TRAV26-1, TRAJ23)
CIVRVHPYNQGGRLIF

SEQ ID NO: 123612 - protein, 15 aa, Homo sapiens
  CDR3 for beta chain variable domain of TCR clone 61806 (TRBV5-7, TRBJ2-7)
CASSPYFEGSYEQYF

SEQ ID NO: 123613 - protein, 17 aa, Homo sapiens
  CDR3 for alpha chain variable domain of TCR clone 61807 (TRAV36/DV7, TRAJ52)
CAVAQRAGGTSYGKLTF

SEQ ID NO: 123614 - protein, 13 aa, Homo sapiens
  CDR3 for beta chain variable domain of TCR clone 61807 (TRBV10-3, TRBJ2-7)
CASKLAVNYEQYF

SEQ ID NO: 123615 - protein, 15 aa, Homo sapiens
  CDR3 for alpha chain variable domain of TCR clone 61808 (TRAV12-1, TRAJ45)
CVVLSGGGGADGLTF

SEQ ID NO: 123616 - protein, 14 aa, Homo sapiens
  CDR3 for beta chain variable domain of TCR clone 61808 (TRBV7-9, TRBJ2-1)
CASSLVVGADEQFF

SEQ ID NO: 123617 - protein, 14 aa, Homo sapiens
  CDR3 for alpha chain variable domain of TCR clone 61809 (TRAV35, TRAJ50)
CASHRKTSYDKVIF

SEQ ID NO: 123618 - protein, 17 aa, Homo sapiens
  CDR3 for beta chain variable domain of TCR clone 61809 (TRBV7-8, TRBJ2-6)
CASSAGTGGAGANVLTF

SEQ ID NO: 123619 - protein, 15 aa, Homo sapiens
  CDR3 for alpha chain variable domain of TCR clone 61810 (TRAV8-3, TRAJ41)
CAVGLNSNSGYALNF

SEQ ID NO: 123620 - protein, 17 aa, Homo sapiens
  CDR3 for beta chain variable domain of TCR clone 61810 (TRBV25-1, TRBJ2-1)
CASSAYGQGRGVYEQFF

SEQ ID NO: 123621 - protein, 12 aa, Homo sapiens
  CDR3 for alpha chain variable domain of TCR clone 61811 (TRAV3, TRAJ20)
CAVRDPDYKLSF

SEQ ID NO: 123622 - protein, 13 aa, Homo sapiens
  CDR3 for beta chain variable domain of TCR clone 61811 (TRBV9, TRBJ2-1)
CASIVGQGGEQFF

SEQ ID NO: 123623 - protein, 15 aa, Homo sapiens
  CDR3 for alpha chain variable domain of TCR clone 61812 (TRAV35, TRAJ52)
CAGPRGGTSYGKLTF

SEQ ID NO: 123624 - protein, 14 aa, Homo sapiens
  CDR3 for beta chain variable domain of TCR clone 61812 (TRBV20-1, TRBJ2-7)
CSAWTALSSCEQYF

SEQ ID NO: 123625 - protein, 19 aa, Homo sapiens
  CDR3 for alpha chain variable domain of TCR clone 61813 (TRAV8-2, TRAJ26)
CVVTLLLGSEFCLWSRNQI

SEQ ID NO: 123626 - protein, 15 aa, Homo sapiens
  CDR3 for beta chain variable domain of TCR clone 61813 (TRBV11-2, TRBJ2-2)
CASSSDRVNAGELFF

SEQ ID NO: 123627 - protein, 14 aa, Homo sapiens
  CDR3 for alpha chain variable domain of TCR clone 61814 (TRAV12-2, TRAJ45)
RALPERGGADGLTF

SEQ ID NO: 123628 - protein, 14 aa, Homo sapiens
  CDR3 for beta chain variable domain of TCR clone 61814 (TRBV18, TRBJ1-5)
CASSPGNSNQPQHF

SEQ ID NO: 123629 - protein, 11 aa, Homo sapiens
  CDR3 for alpha chain variable domain of TCR clone 61815 (TRAV21, TRAJ11)
CDVNGYSTLTF

SEQ ID NO: 123630 - protein, 11 aa, Homo sapiens
  CDR3 for beta chain variable domain of TCR clone 61815 (TRBV19, TRBJ1-1)
CASSIGSEAFF

SEQ ID NO: 123631 - protein, 14 aa, Homo sapiens
  CDR3 for alpha chain variable domain of TCR clone 61816 (TRAV1-2, TRAJ16)
CAVNRFSDGQKLLF

SEQ ID NO: 123632 - protein, 14 aa, Homo sapiens
  CDR3 for beta chain variable domain of TCR clone 61816 (TRBV11-3, TRBJ2-1)
CASSATTSGSIQFF

SEQ ID NO: 123633 - protein, 13 aa, Homo sapiens
  CDR3 for alpha chain variable domain of TCR clone 61817 (TRAV3, TRAJ36)
CAVSLGGANNLFF

SEQ ID NO: 123634 - protein, 13 aa, Homo sapiens
  CDR3 for beta chain variable domain of TCR clone 61817 (TRBV7-9, TRBJ1-2)
CASSLKQNYGYTF

SEQ ID NO: 123635 - protein, 16 aa, Homo sapiens
  CDR3 for alpha chain variable domain of TCR clone 61818 (TRAV30, TRAJ24)
CGTEIVDADSWGKFQF

SEQ ID NO: 123636 - protein, 15 aa, Homo sapiens
  CDR3 for beta chain variable domain of TCR clone 61818 (TRBV9, TRBJ1-6)
CASSVAGTGESPLHF

SEQ ID NO: 123637 - protein, 14 aa, Homo sapiens
  CDR3 for alpha chain variable domain of TCR clone 61819 (TRAV3, TRAJ7)
CAVREEEREQQTRF

SEQ ID NO: 123638 - protein, 15 aa, Homo sapiens
  CDR3 for beta chain variable domain of TCR clone 61819 (TRBV7-8, TRBJ1-2)
CASSPRAGWNYGYTF

SEQ ID NO: 123639 - protein, 13 aa, Homo sapiens
  CDR3 for alpha chain variable domain of TCR clone 61820 (TRAV1-2, TRAJ9)
CAALNTGGVKTIF

SEQ ID NO: 123640 - protein, 13 aa, Homo sapiens
  CDR3 for beta chain variable domain of TCR clone 61820 (TRBV19, TRBJ1-2)
CASSVPGQDGYTF

SEQ ID NO: 123641 - protein, 15 aa, Homo sapiens
  CDR3 for alpha chain variable domain of TCR clone 61821 (TRAV13-1, TRAJ44)
CAASRGGGTASKLTF

SEQ ID NO: 123642 - protein, 14 aa, Homo sapiens
  CDR3 for beta chain variable domain of TCR clone 61821 (TRBV7-2, TRBJ2-5)
CASSPRGSAETQYF

SEQ ID NO: 123643 - protein, 15 aa, Homo sapiens
  CDR3 for alpha chain variable domain of TCR clone 61822 (TRAV21, TRAJ53)
CATLNSGGSNYKLTF

SEQ ID NO: 123644 - protein, 13 aa, Homo sapiens
  CDR3 for beta chain variable domain of TCR clone 61822 (TRBV12-4, TRBJ1-2)
CASSLRQGKGYTF

SEQ ID NO: 123645 - protein, 11 aa, Homo sapiens
  CDR3 for alpha chain variable domain of TCR clone 61823 (TRAV12-2, TRAJ49)
CAVHTGNQFYF

SEQ ID NO: 123646 - protein, 13 aa, Homo sapiens
  CDR3 for beta chain variable domain of TCR clone 61823 (TRBV7-2, TRBJ2-7)
CASSSPSGSEQYF

SEQ ID NO: 123647 - protein, 14 aa, Homo sapiens
  CDR3 for alpha chain variable domain of TCR clone 61824 (TRAV12-3, TRAJ12)
CAMSEVDSSYKLIF

SEQ ID NO: 123648 - protein, 16 aa, Homo sapiens
  CDR3 for beta chain variable domain of TCR clone 61824 (TRBV24-1, TRBJ2-3)
CATSDPGTGATDTQYF

SEQ ID NO: 123649 - protein, 12 aa, Homo sapiens
  CDR3 for alpha chain variable domain of TCR clone 61825 (TRAV12-3, TRAJ17)
CAMTLTVNKLTF

SEQ ID NO: 123650 - protein, 12 aa, Homo sapiens
  CDR3 for beta chain variable domain of TCR clone 61825 (TRBV2, TRBJ2-1)
CAYGPPGNEQFF

SEQ ID NO: 123651 - protein, 14 aa, Homo sapiens
  CDR3 for alpha chain variable domain of TCR clone 61826 (TRAV8-2, TRAJ4)
CVVSPSGGYNKLIF

SEQ ID NO: 123652 - protein, 16 aa, Homo sapiens
  CDR3 for beta chain variable domain of TCR clone 61826 (TRBV7-3, TRBJ2-1)
CASSLGGYRSYNEQFF

SEQ ID NO: 123653 - protein, 14 aa, Homo sapiens
  CDR3 for alpha chain variable domain of TCR clone 61827 (TRAV1-2, TRAJ16)
CAVNRFSDGQKLLF

SEQ ID NO: 123654 - protein, 17 aa, Homo sapiens
  CDR3 for beta chain variable domain of TCR clone 61827 (TRBV28, TRBJ2-5)
CASSTPEGDALQETQHF

SEQ ID NO: 123655 - protein, 14 aa, Homo sapiens
  CDR3 for alpha chain variable domain of TCR clone 61828 (TRAV12-2, TRAJ13)
CAVEKTGGYQKVTF

SEQ ID NO: 123656 - protein, 16 aa, Homo sapiens
  CDR3 for beta chain variable domain of TCR clone 61828 (TRBV12-5, TRBJ2-7)
CASGSQGAPTSSTSGR

SEQ ID NO: 123657 - protein, 14 aa, Homo sapiens
  CDR3 for alpha chain variable domain of TCR clone 61829 (TRAV1-2, TRAJ16)
CAVNRFSDGQKLLF

SEQ ID NO: 123658 - protein, 14 aa, Homo sapiens
  CDR3 for beta chain variable domain of TCR clone 61829 (TRBV13, TRBJ2-5)
CASSLGRGQETQYL

SEQ ID NO: 123659 - protein, 14 aa, Homo sapiens
  CDR3 for alpha chain variable domain of TCR clone 61830 (TRAV13-1, TRAJ35)
CAASKGGFGNVLHC

SEQ ID NO: 123660 - protein, 13 aa, Homo sapiens
  CDR3 for beta chain variable domain of TCR clone 61830 (TRBV7-3, TRBJ1-1)
CASSQDWEAEAFL

SEQ ID NO: 123661 - protein, 13 aa, Homo sapiens
  CDR3 for alpha chain variable domain of TCR clone 61831 (TRAV12-3, TRAJ33)
CAMSVNSNYQLIW

SEQ ID NO: 123662 - protein, 13 aa, Homo sapiens
  CDR3 for beta chain variable domain of TCR clone 61831 (TRBV7-2, TRBJ2-2)
CANSLAVTGELFF

SEQ ID NO: 123663 - protein, 16 aa, Homo sapiens
  CDR3 for alpha chain variable domain of TCR clone 61832 (TRAV30, TRAJ24)
CGTEIVDADSWGKFQF

SEQ ID NO: 123664 - protein, 14 aa, Homo sapiens
  CDR3 for beta chain variable domain of TCR clone 61832 (TRBV19, TRBJ2-7)
CASSVDSESYEQYF

SEQ ID NO: 123665 - protein, 14 aa, Homo sapiens
  CDR3 for alpha chain variable domain of TCR clone 61833 (TRAV2, TRAJ9)
CAVEDRSGGFKTIF

SEQ ID NO: 123666 - protein, 15 aa, Homo sapiens
  CDR3 for beta chain variable domain of TCR clone 61833 (TRBV3-1, TRBJ2-5)
CASSANLGGPETQYF

SEQ ID NO: 123667 - protein, 16 aa, Homo sapiens
  CDR3 for alpha chain variable domain of TCR clone 61834 (TRAV12-2, TRAJ18)
CAVTTDRGSTLGRLNF

SEQ ID NO: 123668 - protein, 13 aa, Homo sapiens
  CDR3 for beta chain variable domain of TCR clone 61834 (TRBV19, TRBJ2-3)
CATWDKITDTQYF

SEQ ID NO: 123669 - protein, 17 aa, Homo sapiens
  CDR3 for alpha chain variable domain of TCR clone 61835 (TRAV17, TRAJ28)
CSTDPRRGGAGSYQLTF

SEQ ID NO: 123670 - protein, 16 aa, Homo sapiens
  CDR3 for beta chain variable domain of TCR clone 61835 (TRBV25-1, TRBJ1-1)
CASSGDRDRGRIEAFF

SEQ ID NO: 123671 - protein, 14 aa, Homo sapiens
  CDR3 for alpha chain variable domain of TCR clone 61836 (TRAV1-2, TRAJ16)
CAVNRFSDGQKLLF

SEQ ID NO: 123672 - protein, 13 aa, Homo sapiens
  CDR3 for beta chain variable domain of TCR clone 61836 (TRBV6-5, TRBJ2-5)
CATAPSPQETQYF

SEQ ID NO: 123673 - protein, 13 aa, Homo sapiens
  CDR3 for alpha chain variable domain of TCR clone 61837 (TRAV20, TRAJ37)
CAVSSYNTDKLIF

SEQ ID NO: 123674 - protein, 14 aa, Homo sapiens
  CDR3 for beta chain variable domain of TCR clone 61837 (TRBV6-1, TRBJ2-6)
CASQQGAGANVLTF

SEQ ID NO: 123675 - protein, 14 aa, Homo sapiens
  CDR3 for alpha chain variable domain of TCR clone 61838 (TRAV12-3, TRAJ10)
SHLPLTGGGNKLTF

SEQ ID NO: 123676 - protein, 13 aa, Homo sapiens
  CDR3 for beta chain variable domain of TCR clone 61838 (TRBV7-7, TRBJ2-5)
CASSRSGQETQYL

SEQ ID NO: 123677 - protein, 12 aa, Homo sapiens
  CDR3 for alpha chain variable domain of TCR clone 61839 (TRAV3, TRAJ20)
CAVRDGDYKLSF

SEQ ID NO: 123678 - protein, 14 aa, Homo sapiens
  CDR3 for beta chain variable domain of TCR clone 61839 (TRBV7-9, TRBJ2-1)
CASSPRDSLYEQFF

SEQ ID NO: 123679 - protein, 12 aa, Homo sapiens
  CDR3 for alpha chain variable domain of TCR clone 61840 (TRAV13-1, TRAJ21)
CAAKEGFNKFYF

SEQ ID NO: 123680 - protein, 16 aa, Homo sapiens
  CDR3 for beta chain variable domain of TCR clone 61840 (TRBV7-2, TRBJ2-6)
CASSLAGRSGANGLTF

SEQ ID NO: 123681 - protein, 14 aa, Homo sapiens
  CDR3 for alpha chain variable domain of TCR clone 61841 (TRAV13-1, TRAJ35)
CAASKGGFGNVLHC

SEQ ID NO: 123682 - protein, 14 aa, Homo sapiens
  CDR3 for beta chain variable domain of TCR clone 61841 (TRBV20-1, TRBJ2-2)
CSAPDTANTGELFF

SEQ ID NO: 123683 - protein, 15 aa, Homo sapiens
  CDR3 for alpha chain variable domain of TCR clone 61842 (TRAV3, TRAJ4)
CAVRDGTGGYNKLIF

SEQ ID NO: 123684 - protein, 15 aa, Homo sapiens
  CDR3 for beta chain variable domain of TCR clone 61842 (TRBV7-2, TRBJ2-7)
CASSLSGALTYEQYF

SEQ ID NO: 123685 - protein, 12 aa, Homo sapiens
  CDR3 for alpha chain variable domain of TCR clone 61843 (TRAV30, TRAJ43)
CGPEERGNDMRF

SEQ ID NO: 123686 - protein, 13 aa, Homo sapiens
  CDR3 for beta chain variable domain of TCR clone 61843 (TRBV27, TRBJ2-7)
CASSFSQGYEQYF

SEQ ID NO: 123687 - protein, 13 aa, Homo sapiens
  CDR3 for alpha chain variable domain of TCR clone 61844 (TRAV26-2, TRAJ43)
CILRAVNNNDMRF

SEQ ID NO: 123688 - protein, 15 aa, Homo sapiens
  CDR3 for beta chain variable domain of TCR clone 61844 (TRBV29-1, TRBJ2-1)
CSVGRHALFYNEQFF

SEQ ID NO: 123689 - protein, 14 aa, Homo sapiens
  CDR3 for alpha chain variable domain of TCR clone 61845 (TRAV14/DV4, TRAJ15)
CAMRRDQAGTALIS

SEQ ID NO: 123690 - protein, 16 aa, Homo sapiens
  CDR3 for beta chain variable domain of TCR clone 61845 (TRBV15, TRBJ2-3)
CATSRDLGIVTDTQYF

SEQ ID NO: 123691 - protein, 12 aa, Homo sapiens
  CDR3 for alpha chain variable domain of TCR clone 61846 (TRAV12-3, TRAJ17)
CAMTLTGNKLTF

SEQ ID NO: 123692 - protein, 13 aa, Homo sapiens
  CDR3 for beta chain variable domain of TCR clone 61846 (TRBV27, TRBJ2-1)
CARRTLGVGEQFF

SEQ ID NO: 123693 - protein, 14 aa, Homo sapiens
  CDR3 for alpha chain variable domain of TCR clone 61847 (TRAV16, TRAJ42)
CALLAGGSQGNLIF

SEQ ID NO: 123694 - protein, 14 aa, Homo sapiens
  CDR3 for beta chain variable domain of TCR clone 61847 (TRBV2, TRBJ2-7)
CASSLTSGGYEQYF

SEQ ID NO: 123695 - protein, 17 aa, Homo sapiens
  CDR3 for alpha chain variable domain of TCR clone 61848 (TRAV3, TRAJ6)
CAVSRRTDTGGSYIPTF

SEQ ID NO: 123696 - protein, 18 aa, Homo sapiens
  CDR3 for beta chain variable domain of TCR clone 61848 (TRBV7-2, TRBJ2-3)
CASSLGTSRGRKADTQYF

SEQ ID NO: 123697 - protein, 14 aa, Homo sapiens
  CDR3 for alpha chain variable domain of TCR clone 61849 (TRAV17, TRAJ22)
CATSTSGSARQLTF

SEQ ID NO: 123698 - protein, 15 aa, Homo sapiens
  CDR3 for beta chain variable domain of TCR clone 61849 (TRBV4-1, TRBJ2-5)
CASSQWDLYQETQYF

SEQ ID NO: 123699 - protein, 14 aa, Homo sapiens
  CDR3 for alpha chain variable domain of TCR clone 61850 (TRAV12-2, TRAJ24)
CAVTPADSWGKLQF

SEQ ID NO: 123700 - protein, 12 aa, Homo sapiens
  CDR3 for beta chain variable domain of TCR clone 61850 (TRBV3-1, TRBJ2-1)
CASSQGSNGQFF

SEQ ID NO: 123701 - protein, 13 aa, Homo sapiens
  CDR3 for alpha chain variable domain of TCR clone 61851 (TRAV12-3, TRAJ40)
CAMSDSGTYKYIF

SEQ ID NO: 123702 - protein, 14 aa, Homo sapiens
  CDR3 for beta chain variable domain of TCR clone 61851 (TRBV7-2, TRBJ1-5)
RASSTQGAGQPQHF

SEQ ID NO: 123703 - protein, 14 aa, Homo sapiens
  CDR3 for alpha chain variable domain of TCR clone 61852 (TRAV1-2, TRAJ16)
CAVNRFSDGQKLLF

SEQ ID NO: 123704 - protein, 13 aa, Homo sapiens
  CDR3 for beta chain variable domain of TCR clone 61852 (TRBV20-1, TRBJ1-1)
RSARGGGNTEAFF

SEQ ID NO: 123705 - protein, 17 aa, Homo sapiens
  CDR3 for alpha chain variable domain of TCR clone 61853 (TRAV3, TRAJ7)
CAVRDMSTLEGTTDSLL

SEQ ID NO: 123706 - protein, 17 aa, Homo sapiens
  CDR3 for beta chain variable domain of TCR clone 61853 (TRBV15, TRBJ1-2)
CATSGREIDVVNYGYTF

SEQ ID NO: 123707 - protein, 15 aa, Homo sapiens
  CDR3 for alpha chain variable domain of TCR clone 61854 (TRAV13-1, TRAJ10)
CAATIPTGGGNKLTF

SEQ ID NO: 123708 - protein, 15 aa, Homo sapiens
  CDR3 for beta chain variable domain of TCR clone 61854 (TRBV2, TRBJ2-7)
CASTLLGSGATEQYF

SEQ ID NO: 123709 - protein, 19 aa, Homo sapiens
  CDR3 for alpha chain variable domain of TCR clone 61855 (TRAV13-1, TRAJ52)
CAASPYQNAGGTSYGKLTF

SEQ ID NO: 123710 - protein, 13 aa, Homo sapiens
  CDR3 for beta chain variable domain of TCR clone 61855 (TRBV15, TRBJ2-7)
CATSTTGHYEQYS

SEQ ID NO: 123711 - protein, 13 aa, Homo sapiens
  CDR3 for alpha chain variable domain of TCR clone 61856 (TRAV4, TRAJ20)
CLVGSSNDYKLSF

SEQ ID NO: 123712 - protein, 14 aa, Homo sapiens
  CDR3 for beta chain variable domain of TCR clone 61856 (TRBV19, TRBJ1-5)
CASRAPDSFLSQHF

SEQ ID NO: 123713 - protein, 14 aa, Homo sapiens
  CDR3 for alpha chain variable domain of TCR clone 61857 (TRAV26-1, TRAJ49)
CIVRLTSTGNQFYF

SEQ ID NO: 123714 - protein, 13 aa, Homo sapiens
  CDR3 for beta chain variable domain of TCR clone 61857 (TRBV4-1, TRBJ2-7)
CASSQGQAYERYF

SEQ ID NO: 123715 - protein, 13 aa, Homo sapiens
  CDR3 for alpha chain variable domain of TCR clone 61858 (TRAV1-2, TRAJ9)
CAALNTGGFKTIF

SEQ ID NO: 123716 - protein, 16 aa, Homo sapiens
  CDR3 for beta chain variable domain of TCR clone 61858 (TRBV27, TRBJ2-2)
CASSFRGLVRTGELFF

SEQ ID NO: 123717 - protein, 14 aa, Homo sapiens
  CDR3 for alpha chain variable domain of TCR clone 61859 (TRAV13-1, TRAJ39)
CAASKNNAGNMLTF

SEQ ID NO: 123718 - protein, 12 aa, Homo sapiens
  CDR3 for beta chain variable domain of TCR clone 61859 (TRBV11-2, TRBJ2-2)
CASSFGGGELFF

SEQ ID NO: 123719 - protein, 13 aa, Homo sapiens
  CDR3 for alpha chain variable domain of TCR clone 61860 (TRAV13-1, TRAJ6)
CAASKGGSYIPTF

SEQ ID NO: 123720 - protein, 14 aa, Homo sapiens
  CDR3 for beta chain variable domain of TCR clone 61860 (TRBV25-1, TRBJ1-1)
CASTHLGGNTEAFF

SEQ ID NO: 123721 - protein, 13 aa, Homo sapiens
  CDR3 for alpha chain variable domain of TCR clone 61861 (TRAV27, TRAJ45)
CRSSGGGADGLTF

SEQ ID NO: 123722 - protein, 11 aa, Homo sapiens
  CDR3 for beta chain variable domain of TCR clone 61861 (TRBV19, TRBJ1-1)
CAGSIGSEAFF

SEQ ID NO: 123723 - protein, 15 aa, Homo sapiens
  CDR3 for alpha chain variable domain of TCR clone 61862 (TRAV26-1, TRAJ48)
CIVRVWDFGNEKLTF

SEQ ID NO: 123724 - protein, 16 aa, Homo sapiens
  CDR3 for beta chain variable domain of TCR clone 61862 (TRBV4-1, TRBJ2-3)
CASSQRAGGLTDTQYF

SEQ ID NO: 123725 - protein, 13 aa, Homo sapiens
  CDR3 for alpha chain variable domain of TCR clone 61863 (TRAV36/DV7, TRAJ54)
RAVLIQGAQKLVF

SEQ ID NO: 123726 - protein, 13 aa, Homo sapiens
  CDR3 for beta chain variable domain of TCR clone 61863 (TRBV29-1, TRBJ2-4)
CSVGEGTKNIQYF

SEQ ID NO: 123727 - protein, 14 aa, Homo sapiens
  CDR3 for alpha chain variable domain of TCR clone 61864 (TRAV35, TRAJ22)
CAGLRPGSARQLTF

SEQ ID NO: 123728 - protein, 13 aa, Homo sapiens
  CDR3 for beta chain variable domain of TCR clone 61864 (TRBV7-2, TRBJ2-7)
CASSFGQEKEQYF

SEQ ID NO: 123729 - protein, 13 aa, Homo sapiens
  CDR3 for alpha chain variable domain of TCR clone 61865 (TRAV23/DV6, TRAJ58)
CAARLIRGPRLTF

SEQ ID NO: 123730 - protein, 13 aa, Homo sapiens
  CDR3 for beta chain variable domain of TCR clone 61865 (TRBV2, TRBJ1-6)
CADSGSYNSPLHF

SEQ ID NO: 123731 - protein, 12 aa, Homo sapiens
  CDR3 for alpha chain variable domain of TCR clone 61866 (TRAV12-3, TRAJ17)
CAMTLTGNKLTF

SEQ ID NO: 123732 - protein, 16 aa, Homo sapiens
  CDR3 for beta chain variable domain of TCR clone 61866 (TRBV2, TRBJ1-1)
CASSPPNRGMNTEAFF

SEQ ID NO: 123733 - protein, 14 aa, Homo sapiens
  CDR3 for alpha chain variable domain of TCR clone 61867 (TRAV12-2, TRAJ40)
CAVKIPSGTYKYIF

SEQ ID NO: 123734 - protein, 17 aa, Homo sapiens
  CDR3 for beta chain variable domain of TCR clone 61867 (TRBV13, TRBJ2-3)
YASSLSRVAGGRNTQYF

SEQ ID NO: 123735 - protein, 12 aa, Homo sapiens
  CDR3 for alpha chain variable domain of TCR clone 61868 (TRAV8-3, TRAJ26)
CAGDNYGQNFVF

SEQ ID NO: 123736 - protein, 17 aa, Homo sapiens
  CDR3 for beta chain variable domain of TCR clone 61868 (TRBV7-8, TRBJ2-6)
CASSAGTGGAGANVLSF

SEQ ID NO: 123737 - protein, 14 aa, Homo sapiens
  CDR3 for alpha chain variable domain of TCR clone 61869 (TRAV26-2, TRAJ23)
CSRTLYNQGGKLIF

SEQ ID NO: 123738 - protein, 15 aa, Homo sapiens
  CDR3 for beta chain variable domain of TCR clone 61869 (TRBV20-1, TRBJ2-7)
CSARDQVSGMDEQYF

SEQ ID NO: 123739 - protein, 13 aa, Homo sapiens
  CDR3 for alpha chain variable domain of TCR clone 61870 (TRAV13-2, TRAJ8)
CAFMNTGFQKPVF

SEQ ID NO: 123740 - protein, 17 aa, Homo sapiens
  CDR3 for beta chain variable domain of TCR clone 61870 (TRBV28, TRBJ2-1)
CASSSARQALTYNEQFF

SEQ ID NO: 123741 - protein, 16 aa, Homo sapiens
  CDR3 for alpha chain variable domain of TCR clone 61871 (TRAV30, TRAJ24)
CGTEIVDADSWGKFQF

SEQ ID NO: 123742 - protein, 12 aa, Homo sapiens
  CDR3 for beta chain variable domain of TCR clone 61871 (TRBV12-4, TRBJ2-1)
CASSLQGSEQFF

SEQ ID NO: 123743 - protein, 14 aa, Homo sapiens
  CDR3 for alpha chain variable domain of TCR clone 61872 (TRAV26-1, TRAJ34)
CIVRESYNTDKLIF

SEQ ID NO: 123744 - protein, 13 aa, Homo sapiens
  CDR3 for beta chain variable domain of TCR clone 61872 (TRBV19, TRBJ2-1)
CATSRGVYNEQLF

SEQ ID NO: 123745 - protein, 17 aa, Homo sapiens
  CDR3 for alpha chain variable domain of TCR clone 61873 (TRAV3, TRAJ42)
CAVRDRDYGGSQGNLIS

SEQ ID NO: 123746 - protein, 14 aa, Homo sapiens
  CDR3 for beta chain variable domain of TCR clone 61873 (TRBV19, TRBJ2-5)
CASSMTGQQETQYF

SEQ ID NO: 123747 - protein, 14 aa, Homo sapiens
  CDR3 for alpha chain variable domain of TCR clone 61874 (TRAV38-1, TRAJ35)
CAFLTIVFGNVLHC

SEQ ID NO: 123748 - protein, 17 aa, Homo sapiens
  CDR3 for beta chain variable domain of TCR clone 61874 (TRBV28, TRBJ1-1)
CASSGDLRTESNTEAFF

SEQ ID NO: 123749 - protein, 12 aa, Homo sapiens
  CDR3 for alpha chain variable domain of TCR clone 61875 (TRAV12-1, TRAJ29)
CVVDSGNTPLVF

SEQ ID NO: 123750 - protein, 12 aa, Homo sapiens
  CDR3 for beta chain variable domain of TCR clone 61875 (TRBV2, TRBJ2-7)
CASKRGSYEQYF

SEQ ID NO: 123751 - protein, 14 aa, Homo sapiens
  CDR3 for alpha chain variable domain of TCR clone 61876 (TRAV12-3, TRAJ10)
SHLPLTGGGNKLTF

SEQ ID NO: 123752 - protein, 14 aa, Homo sapiens
  CDR3 for beta chain variable domain of TCR clone 61876 (TRBV28, TRBJ2-1)
CASSIQGTVGEQFF

SEQ ID NO: 123753 - protein, 15 aa, Homo sapiens
  CDR3 for alpha chain variable domain of TCR clone 61877 (TRAV16, TRAJ17)
CALSGNKAAGNKLTF

SEQ ID NO: 123754 - protein, 12 aa, Homo sapiens
  CDR3 for beta chain variable domain of TCR clone 61877 (TRBV28, TRBJ2-3)
CASSLYRDTQYF

SEQ ID NO: 123755 - protein, 14 aa, Homo sapiens
  CDR3 for alpha chain variable domain of TCR clone 61878 (TRAV12-3, TRAJ9)
CAMSPNTGGFKTIF

SEQ ID NO: 123756 - protein, 14 aa, Homo sapiens
  CDR3 for beta chain variable domain of TCR clone 61878 (TRBV6-1, TRBJ1-3)
CASVQGGGGNTIYF

SEQ ID NO: 123757 - protein, 16 aa, Homo sapiens
  CDR3 for alpha chain variable domain of TCR clone 61879 (TRAV3, TRAJ10)
CAVRDMRAGGGNKLTF

SEQ ID NO: 123758 - protein, 16 aa, Homo sapiens
  CDR3 for beta chain variable domain of TCR clone 61879 (TRBV5-4, TRBJ2-3)
CASQQPGAGGADTQYF

SEQ ID NO: 123759 - protein, 16 aa, Homo sapiens
  CDR3 for alpha chain variable domain of TCR clone 61880 (TRAV14/DV4, TRAJ53)
CAMREGGGGSNYKLTF

SEQ ID NO: 123760 - protein, 15 aa, Homo sapiens
  CDR3 for beta chain variable domain of TCR clone 61880 (TRBV7-9, TRBJ1-6)
CASSSPGRGNSPLHF

SEQ ID NO: 123761 - protein, 13 aa, Homo sapiens
  CDR3 for alpha chain variable domain of TCR clone 61881 (TRAV39, TRAJ58)
CAGEETSGSRFTF

SEQ ID NO: 123762 - protein, 13 aa, Homo sapiens
  CDR3 for beta chain variable domain of TCR clone 61881 (TRBV15, TRBJ2-7)
CATSTTGHYEQYF

SEQ ID NO: 123763 - protein, 13 aa, Homo sapiens
  CDR3 for alpha chain variable domain of TCR clone 61882 (TRAV12-3, TRAJ9)
CAMSADGGFKTIF

SEQ ID NO: 123764 - protein, 15 aa, Homo sapiens
  CDR3 for beta chain variable domain of TCR clone 61882 (TRBV7-2, TRBJ2-2)
CASSLVAGSAGELFF

SEQ ID NO: 123765 - protein, 10 aa, Homo sapiens
  CDR3 for alpha chain variable domain of TCR clone 61883 (TRAV30, TRAJ48)
CGIGNEKLTF

SEQ ID NO: 123766 - protein, 14 aa, Homo sapiens
  CDR3 for beta chain variable domain of TCR clone 61883 (TRBV7-6, TRBJ2-3)
CASSVAGGIDTQYF

SEQ ID NO: 123767 - protein, 21 aa, Homo sapiens
  CDR3 for alpha chain variable domain of TCR clone 61884 (TRAV12-1, TRAJ32)
SSVIQPPTSMNYGGSTNKLIF

SEQ ID NO: 123768 - protein, 15 aa, Homo sapiens
  CDR3 for beta chain variable domain of TCR clone 61884 (TRBV7-9, TRBJ2-2)
CASGPLDTFPGELFF

SEQ ID NO: 123769 - protein, 12 aa, Homo sapiens
  CDR3 for alpha chain variable domain of TCR clone 61885 (TRAV3, TRAJ27)
CAVRDKAGKSTF

SEQ ID NO: 123770 - protein, 14 aa, Homo sapiens
  CDR3 for beta chain variable domain of TCR clone 61885 (TRBV5-1, TRBJ1-2)
CDSSVDSTNYGYTF

SEQ ID NO: 123771 - protein, 13 aa, Homo sapiens
  CDR3 for alpha chain variable domain of TCR clone 61886 (TRAV9-2, TRAJ53)
CALSGGSNYKLTF

SEQ ID NO: 123772 - protein, 12 aa, Homo sapiens
  CDR3 for beta chain variable domain of TCR clone 61886 (TRBV11-2, TRBJ2-2)
CASSLGGGELFF

SEQ ID NO: 123773 - protein, 11 aa, Homo sapiens
  CDR3 for alpha chain variable domain of TCR clone 61887 (TRAV1-1, TRAJ20)
CAVFNDYKLSF

SEQ ID NO: 123774 - protein, 16 aa, Homo sapiens
  CDR3 for beta chain variable domain of TCR clone 61887 (TRBV29-1, TRBJ2-2)
CSVERTSEGNTGELFF

SEQ ID NO: 123775 - protein, 13 aa, Homo sapiens
  CDR3 for alpha chain variable domain of TCR clone 61888 (TRAV1-2, TRAJ9)
CAALNTGGFKTIF

SEQ ID NO: 123776 - protein, 12 aa, Homo sapiens
  CDR3 for beta chain variable domain of TCR clone 61888 (TRBV14, TRBJ2-4)
CASSNLKSIQYF

SEQ ID NO: 123777 - protein, 16 aa, Homo sapiens
  CDR3 for alpha chain variable domain of TCR clone 61889 (TRAV1-2, TRAJ6)
RAVRDQGTGGSYIPTF

SEQ ID NO: 123778 - protein, 13 aa, Homo sapiens
  CDR3 for beta chain variable domain of TCR clone 61889 (TRBV28, TRBJ2-7)
CASTPGLAGEQYF

SEQ ID NO: 123779 - protein, 15 aa, Homo sapiens
  CDR3 for alpha chain variable domain of TCR clone 61890 (TRAV8-2, TRAJ40)
CVVLGTTSGTYKYIF

SEQ ID NO: 123780 - protein, 16 aa, Homo sapiens
  CDR3 for beta chain variable domain of TCR clone 61890 (TRBV7-3, TRBJ2-1)
CASSLEGYRSYNKQFF

SEQ ID NO: 123781 - protein, 15 aa, Homo sapiens
  CDR3 for alpha chain variable domain of TCR clone 61891 (TRAV14/DV4, TRAJ48)
CAMREGNAGNEKLTF

SEQ ID NO: 123782 - protein, 14 aa, Homo sapiens
  CDR3 for beta chain variable domain of TCR clone 61891 (TRBV28, TRBJ1-5)
CASSGQALYRPQHF

SEQ ID NO: 123783 - protein, 13 aa, Homo sapiens
  CDR3 for alpha chain variable domain of TCR clone 61892 (TRAV17, TRAJ9)
CATDYTGGFKTNF

SEQ ID NO: 123784 - protein, 16 aa, Homo sapiens
  CDR3 for beta chain variable domain of TCR clone 61892 (TRBV7-7, TRBJ2-1)
CASSLASGTSYNEQFF

SEQ ID NO: 123785 - protein, 14 aa, Homo sapiens
  CDR3 for alpha chain variable domain of TCR clone 61893 (TRAV29/DV5, TRAJ36)
CAARRKTGANNLFF

SEQ ID NO: 123786 - protein, 15 aa, Homo sapiens
  CDR3 for beta chain variable domain of TCR clone 61893 (TRBV12-4, TRBJ2-5)
CASSPPTGLQETQYF

SEQ ID NO: 123787 - protein, 13 aa, Homo sapiens
  CDR3 for alpha chain variable domain of TCR clone 61894 (TRAV29/DV5, TRAJ31)
CAASRNNNARLMF

SEQ ID NO: 123788 - protein, 12 aa, Homo sapiens
  CDR3 for beta chain variable domain of TCR clone 61894 (TRBV29-1, TRBJ2-3)
CSVTGGADTQYF

SEQ ID NO: 123789 - protein, 18 aa, Homo sapiens
  CDR3 for alpha chain variable domain of TCR clone 61895 (TRAV21, TRAJ52)
CAVRPSPAGGTSYGKLTF

SEQ ID NO: 123790 - protein, 13 aa, Homo sapiens
  CDR3 for beta chain variable domain of TCR clone 61895 (TRBV29-1, TRBJ1-1)
CSVGDSRNTEAFF

SEQ ID NO: 123791 - protein, 12 aa, Homo sapiens
  CDR3 for alpha chain variable domain of TCR clone 61896 (TRAV12-1, TRAJ40)
CVVYSGTYKYIL

SEQ ID NO: 123792 - protein, 19 aa, Homo sapiens
  CDR3 for beta chain variable domain of TCR clone 61896 (TRBV7-2, TRBJ2-3)
CASSFLSRNWGGGTDTQYF

SEQ ID NO: 123793 - protein, 16 aa, Homo sapiens
  CDR3 for alpha chain variable domain of TCR clone 61897 (TRAV16, TRAJ57)
CAPYLITKGGSEKLVF

SEQ ID NO: 123794 - protein, 17 aa, Homo sapiens
  CDR3 for beta chain variable domain of TCR clone 61897 (TRBV24-1, TRBJ2-4)
CATSDAEARGVRNIQYF

SEQ ID NO: 123795 - protein, 13 aa, Homo sapiens
  CDR3 for alpha chain variable domain of TCR clone 61898 (TRAV8-6, TRAJ49)
CAVITSTGNQFYF

SEQ ID NO: 123796 - protein, 13 aa, Homo sapiens
  CDR3 for beta chain variable domain of TCR clone 61898 (TRBV20-1, TRBJ1-1)
CSARGGGNTEAFF

SEQ ID NO: 123797 - protein, 14 aa, Homo sapiens
  CDR3 for alpha chain variable domain of TCR clone 61899 (TRAV26-1, TRAJ21)
CIVRPPYNFNNFYF

SEQ ID NO: 123798 - protein, 14 aa, Homo sapiens
  CDR3 for beta chain variable domain of TCR clone 61899 (TRBV19, TRBJ2-1)
CASPTFVLSGEQFF

SEQ ID NO: 123799 - protein, 12 aa, Homo sapiens
  CDR3 for alpha chain variable domain of TCR clone 61900 (TRAV17, TRAJ36)
CATLTGANNLFF

SEQ ID NO: 123800 - protein, 15 aa, Homo sapiens
  CDR3 for beta chain variable domain of TCR clone 61900 (TRBV20-1, TRBJ2-7)
CSARVPAAYFYEQYF

SEQ ID NO: 123801 - protein, 13 aa, Homo sapiens
  CDR3 for alpha chain variable domain of TCR clone 61901 (TRAV3, TRAJ7)
CAVSSYGNNRLAF

SEQ ID NO: 123802 - protein, 15 aa, Homo sapiens
  CDR3 for beta chain variable domain of TCR clone 61901 (TRBV6-3, TRBJ2-7)
CASSSPGTVFYEQYF

SEQ ID NO: 123803 - protein, 16 aa, Homo sapiens
  CDR3 for alpha chain variable domain of TCR clone 61902 (TRAV25, TRAJ53)
CAGPKGSGGSNYKLTF

SEQ ID NO: 123804 - protein, 15 aa, Homo sapiens
  CDR3 for beta chain variable domain of TCR clone 61902 (TRBV27, TRBJ2-1)
CASSNGGGSSNEQFF

SEQ ID NO: 123805 - protein, 14 aa, Homo sapiens
  CDR3 for alpha chain variable domain of TCR clone 61903 (TRAV1-2, TRAJ16)
CAVNRFSDGQKLLF

SEQ ID NO: 123806 - protein, 15 aa, Homo sapiens
  CDR3 for beta chain variable domain of TCR clone 61903 (TRBV5-8, TRBJ1-1)
CASSFPGTSLKGAFF

SEQ ID NO: 123807 - protein, 13 aa, Homo sapiens
  CDR3 for alpha chain variable domain of TCR clone 61904 (TRAV12-3, TRAJ33)
CAMSLNINYQLIW

SEQ ID NO: 123808 - protein, 13 aa, Homo sapiens
  CDR3 for beta chain variable domain of TCR clone 61904 (TRBV7-2, TRBJ2-2)
CASSLAVTGELFF

SEQ ID NO: 123809 - protein, 11 aa, Homo sapiens
  CDR3 for alpha chain variable domain of TCR clone 61905 (TRAV8-4, TRAJ20)
CAVTNVLTTTS

SEQ ID NO: 123810 - protein, 14 aa, Homo sapiens
  CDR3 for beta chain variable domain of TCR clone 61905 (TRBV7-2, TRBJ2-7)
CASRSQGAAYEQYF

SEQ ID NO: 123811 - protein, 14 aa, Homo sapiens
  CDR3 for alpha chain variable domain of TCR clone 61906 (TRAV16, TRAJ37)
CALDISGNTGKLIF

SEQ ID NO: 123812 - protein, 14 aa, Homo sapiens
  CDR3 for beta chain variable domain of TCR clone 61906 (TRBV7-6, TRBJ2-7)
CASSFRQGADELYF

SEQ ID NO: 123813 - protein, 19 aa, Homo sapiens
  CDR3 for alpha chain variable domain of TCR clone 61907 (TRAV1-2, TRAJ26)
CLLPLCCERPDNYGQNFVF

SEQ ID NO: 123814 - protein, 16 aa, Homo sapiens
  CDR3 for beta chain variable domain of TCR clone 61907 (TRBV7-2, TRBJ2-1)
CASSLVAGAGYNEQFF

SEQ ID NO: 123815 - protein, 17 aa, Homo sapiens
  CDR3 for alpha chain variable domain of TCR clone 61908 (TRAV36/DV7, TRAJ52)
CAVAQRAGGTSYGKLTL

SEQ ID NO: 123816 - protein, 14 aa, Homo sapiens
  CDR3 for beta chain variable domain of TCR clone 61908 (TRBV20-1, TRBJ1-1)
CSAQTRIGGTEAFF

SEQ ID NO: 123817 - protein, 12 aa, Homo sapiens
  CDR3 for alpha chain variable domain of TCR clone 61909 (TRAV25, TRAJ31)
CAGHLNNARLMF

SEQ ID NO: 123818 - protein, 14 aa, Homo sapiens
  CDR3 for beta chain variable domain of TCR clone 61909 (TRBV19, TRBJ2-1)
CASPTFVLSGEQFF

SEQ ID NO: 123819 - protein, 17 aa, Homo sapiens
  CDR3 for alpha chain variable domain of TCR clone 61910 (TRAV3, TRAJ6)
CAVRDGPRAGGSYKPPF

SEQ ID NO: 123820 - protein, 14 aa, Homo sapiens
  CDR3 for beta chain variable domain of TCR clone 61910 (TRBV7-2, TRBJ2-7)
CASSPKTSFYEQYF

SEQ ID NO: 123821 - protein, 13 aa, Homo sapiens
  CDR3 for alpha chain variable domain of TCR clone 61911 (TRAV8-6, TRAJ21)
CAVRPSSLNKFYF

SEQ ID NO: 123822 - protein, 14 aa, Homo sapiens
  CDR3 for beta chain variable domain of TCR clone 61911 (TRBV7-9, TRBJ2-5)
CASSLDTAQETQYF

SEQ ID NO: 123823 - protein, 14 aa, Homo sapiens
  CDR3 for alpha chain variable domain of TCR clone 61912 (TRAV1-2, TRAJ8)
CAVREDTGFQKLVF

SEQ ID NO: 123824 - protein, 16 aa, Homo sapiens
  CDR3 for beta chain variable domain of TCR clone 61912 (TRBV20-1, TRBJ2-4)
CSARTILAGQGDIQYF

SEQ ID NO: 123825 - protein, 15 aa, Homo sapiens
  CDR3 for alpha chain variable domain of TCR clone 61913 (TRAV23/DV6, TRAJ4)
RAASPLRGGYNKLIF

SEQ ID NO: 123826 - protein, 15 aa, Homo sapiens
  CDR3 for beta chain variable domain of TCR clone 61913 (TRBV7-9, TRBJ1-6)
CASSSPGRGNSPLHF

SEQ ID NO: 123827 - protein, 14 aa, Homo sapiens
  CDR3 for alpha chain variable domain of TCR clone 61914 (TRAV21, TRAJ35)
CAVMPIGFGNVLHC

SEQ ID NO: 123828 - protein, 12 aa, Homo sapiens
  CDR3 for beta chain variable domain of TCR clone 61914 (TRBV7-9, TRBJ2-7)
CASSIQREEQYF

SEQ ID NO: 123829 - protein, 15 aa, Homo sapiens
  CDR3 for alpha chain variable domain of TCR clone 61915 (TRAV8-4, TRAJ52)
CAVSDGGTSYGKLKF

SEQ ID NO: 123830 - protein, 12 aa, Homo sapiens
  CDR3 for beta chain variable domain of TCR clone 61915 (TRBV29-1, TRBJ2-3)
CSVTSGGDTQYF

SEQ ID NO: 123831 - protein, 19 aa, Homo sapiens
  CDR3 for alpha chain variable domain of TCR clone 61916 (TRAV21, TRAJ20)
SLVTQPPTSVLPNDYKLSF

SEQ ID NO: 123832 - protein, 14 aa, Homo sapiens
  CDR3 for beta chain variable domain of TCR clone 61916 (TRBV7-2, TRBJ1-3)
CASSRFRSGNTIYF

SEQ ID NO: 123833 - protein, 11 aa, Homo sapiens
  CDR3 for alpha chain variable domain of TCR clone 61917 (TRAV23/DV6, TRAJ58)
CAARLLRGETS

SEQ ID NO: 123834 - protein, 14 aa, Homo sapiens
  CDR3 for beta chain variable domain of TCR clone 61917 (TRBV19, TRBJ2-5)
CASSMTGQQETQYF

SEQ ID NO: 123835 - protein, 14 aa, Homo sapiens
  CDR3 for alpha chain variable domain of TCR clone 61918 (TRAV38-1, TRAJ45)
CAYYSGGGADGLTF

SEQ ID NO: 123836 - protein, 14 aa, Homo sapiens
  CDR3 for beta chain variable domain of TCR clone 61918 (TRBV6-1, TRBJ1-3)
CASVQGGGGNTIYF

SEQ ID NO: 123837 - protein, 14 aa, Homo sapiens
  CDR3 for alpha chain variable domain of TCR clone 61919 (TRAV12-2, TRAJ10)
CAVKIPSGTYKYIF

SEQ ID NO: 123838 - protein, 14 aa, Homo sapiens
  CDR3 for beta chain variable domain of TCR clone 61919 (TRBV20-1, TRBJ1-1)
CSAQTRIGGTEAFF

SEQ ID NO: 123839 - protein, 15 aa, Homo sapiens
  CDR3 for alpha chain variable domain of TCR clone 61920 (TRAV34, TRAJ38)
CGADFTPGNNRKLIW

SEQ ID NO: 123840 - protein, 15 aa, Homo sapiens
  CDR3 for beta chain variable domain of TCR clone 61920 (TRBV18, TRBJ1-2)
CASSPGNGLGYGYTF

SEQ ID NO: 123841 - protein, 11 aa, Homo sapiens
  CDR3 for alpha chain variable domain of TCR clone 61921 (TRAV13-1, TRAJ20)
CAASNDYKLSF

SEQ ID NO: 123842 - protein, 17 aa, Homo sapiens
  CDR3 for beta chain variable domain of TCR clone 61921 (TRBV13, TRBJ2-3)
CASSLSRVAGGRNTQYF

SEQ ID NO: 123843 - protein, 12 aa, Homo sapiens
  CDR3 for alpha chain variable domain of TCR clone 61922 (TRAV23/DV6, TRAJ30)
CAASKGDDKIIF

SEQ ID NO: 123844 - protein, 16 aa, Homo sapiens
  CDR3 for beta chain variable domain of TCR clone 61922 (TRBV13, TRBJ2-3)
CQQPLQGSGGGNTQYF

SEQ ID NO: 123845 - protein, 16 aa, Homo sapiens
  CDR3 for alpha chain variable domain of TCR clone 61923 (TRAV23/DV6, TRAJ52)
CAARPPGGTSYGKLTF

SEQ ID NO: 123846 - protein, 13 aa, Homo sapiens
  CDR3 for beta chain variable domain of TCR clone 61923 (TRBV7-9, TRBJ1-1)
CASSLSGETEAFF

SEQ ID NO: 123847 - protein, 12 aa, Homo sapiens
  CDR3 for alpha chain variable domain of TCR clone 61924 (TRAV1-1, TRAJ27)
CAFSETPMQANQ

SEQ ID NO: 123848 - protein, 17 aa, Homo sapiens
  CDR3 for beta chain variable domain of TCR clone 61924 (TRBV20-1, TRBJ2-3)
CSARDPKGVSATDTQYF

SEQ ID NO: 123849 - protein, 22 aa, Homo sapiens
  CDR3 for alpha chain variable domain of TCR clone 61925 (TRAV8-4, TRAJ45)
HLTKPSAHMSDAAEYSADGLTF

SEQ ID NO: 123850 - protein, 13 aa, Homo sapiens
  CDR3 for beta chain variable domain of TCR clone 61925 (TRBV7-3, TRBJ2-1)
CASSPVAYNEQFF

SEQ ID NO: 123851 - protein, 18 aa, Homo sapiens
  CDR3 for alpha chain variable domain of TCR clone 61926 (TRAV12-3, TRAJ52)
CAMSRTNAGGTSYGKLTF

SEQ ID NO: 123852 - protein, 17 aa, Homo sapiens
  CDR3 for beta chain variable domain of TCR clone 61926 (TRBV7-3, TRBJ2-3)
CASSLMKRMWGADTQYF

SEQ ID NO: 123853 - protein, 16 aa, Homo sapiens
  CDR3 for alpha chain variable domain of TCR clone 61927 (TRAV4, TRAJ22)
CLVGDLYSGSARQLTS

SEQ ID NO: 123854 - protein, 16 aa, Homo sapiens
  CDR3 for beta chain variable domain of TCR clone 61927 (TRBV7-9, TRBJ2-1)
CASIDVAGGSYNEQFF

SEQ ID NO: 123855 - protein, 12 aa, Homo sapiens
  CDR3 for alpha chain variable domain of TCR clone 61928 (TRAV12-1, TRAJ34)
CAMGYNTDKLIF

SEQ ID NO: 123856 - protein, 14 aa, Homo sapiens
  CDR3 for beta chain variable domain of TCR clone 61928 (TRBV4-1, TRBJ2-2)
CASSQAVNTGELFF

SEQ ID NO: 123857 - protein, 13 aa, Homo sapiens
  CDR3 for alpha chain variable domain of TCR clone 61929 (TRAV23/DV6, TRAJ16)
CAASISDGQKLLF

SEQ ID NO: 123858 - protein, 13 aa, Homo sapiens
  CDR3 for beta chain variable domain of TCR clone 61929 (TRBV2, TRBJ2-7)
CASSVGGSGEQYF

SEQ ID NO: 123859 - protein, 14 aa, Homo sapiens
  CDR3 for alpha chain variable domain of TCR clone 61930 (TRAV26-1, TRAJ48)
CIVRVGFGNEKLTF

SEQ ID NO: 123860 - protein, 13 aa, Homo sapiens
  CDR3 for beta chain variable domain of TCR clone 61930 (TRBV11-3, TRBJ2-3)
CASSHDTKDAQYF

SEQ ID NO: 123861 - protein, 15 aa, Homo sapiens
  CDR3 for alpha chain variable domain of TCR clone 61931 (TRAV3, TRAJ4)
CAVRDGTGGYNKLIF

SEQ ID NO: 123862 - protein, 12 aa, Homo sapiens
  CDR3 for beta chain variable domain of TCR clone 61931 (TRBV7-9, TRBJ2-7)
CASSFGSYEQYF

SEQ ID NO: 123863 - protein, 16 aa, Homo sapiens
  CDR3 for alpha chain variable domain of TCR clone 61932 (TRAV30, TRAJ24)
CGTEIVDADSWGKFQF

SEQ ID NO: 123864 - protein, 12 aa, Homo sapiens
  CDR3 for beta chain variable domain of TCR clone 61932 (TRBV7-8, TRBJ2-7)
CASSLGDREQYV

SEQ ID NO: 123865 - protein, 12 aa, Homo sapiens
  CDR3 for alpha chain variable domain of TCR clone 61933 (TRAV12-1, TRAJ40)
CVVYSGTYKYIF

SEQ ID NO: 123866 - protein, 14 aa, Homo sapiens
  CDR3 for beta chain variable domain of TCR clone 61933 (TRBV12-4, TRBJ1-4)
CASRMTGRSEKLFF

SEQ ID NO: 123867 - protein, 13 aa, Homo sapiens
  CDR3 for alpha chain variable domain of TCR clone 61934 (TRAV20, TRAJ49)
CAVQARTGNQFYF

SEQ ID NO: 123868 - protein, 14 aa, Homo sapiens
  CDR3 for beta chain variable domain of TCR clone 61934 (TRBV5-1, TRBJ1-1)
CASGLQGASTEAFF

SEQ ID NO: 123869 - protein, 13 aa, Homo sapiens
  CDR3 for alpha chain variable domain of TCR clone 61935 (TRAV12-3, TRAJ9)
CAMSGGGGFKTIF

SEQ ID NO: 123870 - protein, 12 aa, Homo sapiens
  CDR3 for beta chain variable domain of TCR clone 61935 (TRBV20-1, TRBJ1-1)
QCSTWGGTEAFF

SEQ ID NO: 123871 - protein, 12 aa, Homo sapiens
  CDR3 for alpha chain variable domain of TCR clone 61936 (TRAV2, TRAJ26)
CAGSPGRLWSEF

SEQ ID NO: 123872 - protein, 11 aa, Homo sapiens
  CDR3 for beta chain variable domain of TCR clone 61936 (TRBV11-2, TRBJ2-1)
PPGVEYNEQFF

SEQ ID NO: 123873 - protein, 16 aa, Homo sapiens
  CDR3 for alpha chain variable domain of TCR clone 61937 (TRAV30, TRAJ24)
CGTETVDADSWGKFQF

SEQ ID NO: 123874 - protein, 14 aa, Homo sapiens
  CDR3 for beta chain variable domain of TCR clone 61937 (TRBV12-5, TRBJ2-5)
CASGSRTRQETQYF

SEQ ID NO: 123875 - protein, 15 aa, Homo sapiens
  CDR3 for alpha chain variable domain of TCR clone 61938 (TRAV8-3, TRAJ27)
CAVGPSKTNAGKSTF

SEQ ID NO: 123876 - protein, 15 aa, Homo sapiens
  CDR3 for beta chain variable domain of TCR clone 61938 (TRBV7-3, TRBJ2-1)
CASSPTGGGEVEQFF

SEQ ID NO: 123877 - protein, 17 aa, Homo sapiens
  CDR3 for alpha chain variable domain of TCR clone 61939 (TRAV36/DV7, TRAJ52)
CAVAQRAGGTSYGKLTF

SEQ ID NO: 123878 - protein, 13 aa, Homo sapiens
  CDR3 for beta chain variable domain of TCR clone 61939 (TRBV19, TRBJ1-2)
CASSVPGQDGYTF

SEQ ID NO: 123879 - protein, 17 aa, Homo sapiens
  CDR3 for alpha chain variable domain of TCR clone 61940 (TRAV3, TRAJ6)
CAVRDGPRAGGSYIPTS

SEQ ID NO: 123880 - protein, 15 aa, Homo sapiens
  CDR3 for beta chain variable domain of TCR clone 61940 (TRBV7-8, TRBJ1-5)
CASSLERRGLEPQHF

SEQ ID NO: 123881 - protein, 13 aa, Homo sapiens
  CDR3 for alpha chain variable domain of TCR clone 61941 (TRAV26-1, TRAJ48)
CIVRVVGDEKLTF

SEQ ID NO: 123882 - protein, 17 aa, Homo sapiens
  CDR3 for beta chain variable domain of TCR clone 61941 (TRBV7-3, TRBJ2-2)
CAGSLSGTSGGTGELFF

SEQ ID NO: 123883 - protein, 14 aa, Homo sapiens
  CDR3 for alpha chain variable domain of TCR clone 61942 (TRAV13-2, TRAJ6)
CAENQSGGSYIPTF

SEQ ID NO: 123884 - protein, 16 aa, Homo sapiens
  CDR3 for beta chain variable domain of TCR clone 61942 (TRBV6-5, TRBJ1-6)
CASSRHLSSYNSPLHF

SEQ ID NO: 123885 - protein, 11 aa, Homo sapiens
  CDR3 for alpha chain variable domain of TCR clone 61943 (TRAV23/DV6, TRAJ58)
CAARLLRGETS

SEQ ID NO: 123886 - protein, 13 aa, Homo sapiens
  CDR3 for beta chain variable domain of TCR clone 61943 (TRBV6-4, TRBJ1-5)
CASSADLSQPQHF

SEQ ID NO: 123887 - protein, 13 aa, Homo sapiens
  CDR3 for alpha chain variable domain of TCR clone 61944 (TRAV21, TRAJ9)
CAVRRSGGFKTIF

SEQ ID NO: 123888 - protein, 16 aa, Homo sapiens
  CDR3 for beta chain variable domain of TCR clone 61944 (TRBV4-2, TRBJ1-1)
CASSQAGFGMNTEAFF

SEQ ID NO: 123889 - protein, 13 aa, Homo sapiens
  CDR3 for alpha chain variable domain of TCR clone 61945 (TRAV23/DV6, TRAJ16)
CAASISDGQKLLF

SEQ ID NO: 123890 - protein, 12 aa, Homo sapiens
  CDR3 for beta chain variable domain of TCR clone 61945 (TRBV11-2, TRBJ2-2)
CASSLGGGELFF

SEQ ID NO: 123891 - protein, 11 aa, Homo sapiens
  CDR3 for alpha chain variable domain of TCR clone 61946 (TRAV35, TRAJ30)
CAGPGDDKIIF

SEQ ID NO: 123892 - protein, 16 aa, Homo sapiens
  CDR3 for beta chain variable domain of TCR clone 61946 (TRBV7-3, TRBJ2-1)
CASSLEGYRSYNEQFF

SEQ ID NO: 123893 - protein, 14 aa, Homo sapiens
  CDR3 for alpha chain variable domain of TCR clone 61947 (TRAV12-1, TRAJ23)
CVVMIYNQGGKLIF

SEQ ID NO: 123894 - protein, 22 aa, Homo sapiens
  CDR3 for beta chain variable domain of TCR clone 61947 (TRBV7-3, TRBJ1-6)
CSSLTSRDEASDPSSYNSPFHF

SEQ ID NO: 123895 - protein, 13 aa, Homo sapiens
  CDR3 for alpha chain variable domain of TCR clone 61948 (TRAV26-1, TRAJ31)
CIVRVDGNARPMF

SEQ ID NO: 123896 - protein, 17 aa, Homo sapiens
  CDR3 for beta chain variable domain of TCR clone 61948 (TRBV11-2, TRBJ2-1)
CASSLYPPGVEYNEQFF

SEQ ID NO: 123897 - protein, 16 aa, Homo sapiens
  CDR3 for alpha chain variable domain of TCR clone 61949 (TRAV12-3, TRAJ53)
CAMSPGSGGSNYKLTF

SEQ ID NO: 123898 - protein, 15 aa, Homo sapiens
  CDR3 for beta chain variable domain of TCR clone 61949 (TRBV9, TRBJ1-6)
CASSVAGTGDSPLQF

SEQ ID NO: 123899 - protein, 15 aa, Homo sapiens
  CDR3 for alpha chain variable domain of TCR clone 61950 (TRAV17, TRAJ4)
CATGTWSGVYNKLIF

SEQ ID NO: 123900 - protein, 15 aa, Homo sapiens
  CDR3 for beta chain variable domain of TCR clone 61950 (TRBV20-1, TRBJ2-7)
CSARDRVSGMDEQYF

SEQ ID NO: 123901 - protein, 17 aa, Homo sapiens
  CDR3 for alpha chain variable domain of TCR clone 61951 (TRAV35, TRAJ47)
GLLDFRTHTEYGNKLVF

SEQ ID NO: 123902 - protein, 11 aa, Homo sapiens
  CDR3 for beta chain variable domain of TCR clone 61951 (TRBV29-1, TRBJ1-1)
CSVEVGTRTFF

SEQ ID NO: 123903 - protein, 13 aa, Homo sapiens
  CDR3 for alpha chain variable domain of TCR clone 61952 (TRAV26-2, TRAJ33)
CILTLDSNYQLIW

SEQ ID NO: 123904 - protein, 15 aa, Homo sapiens
  CDR3 for beta chain variable domain of TCR clone 61952 (TRBV4-1, TRBJ2-3)
CASSRGQGIPDTQYF

SEQ ID NO: 123905 - protein, 13 aa, Homo sapiens
  CDR3 for alpha chain variable domain of TCR clone 61953 (TRAV16, TRAJ54)
CALAKGGAQKLVF

SEQ ID NO: 123906 - protein, 20 aa, Homo sapiens
  CDR3 for beta chain variable domain of TCR clone 61953 (TRBV7-8, TRBJ2-2)
CASSHLFPGPTIHITGELFF

SEQ ID NO: 123907 - protein, 16 aa, Homo sapiens
  CDR3 for alpha chain variable domain of TCR clone 61954 (TRAV17, TRAJ36)
CATVSLNWGKQPLLWD

SEQ ID NO: 123908 - protein, 13 aa, Homo sapiens
  CDR3 for beta chain variable domain of TCR clone 61954 (TRBV4-1, TRBJ1-1)
CASSQLGTGEAVF

SEQ ID NO: 123909 - protein, 12 aa, Homo sapiens
  CDR3 for alpha chain variable domain of TCR clone 61955 (TRAV12-3, TRAJ17)
CAMTLTGNKLTF

SEQ ID NO: 123910 - protein, 13 aa, Homo sapiens
  CDR3 for beta chain variable domain of TCR clone 61955 (TRBV7-9, TRBJ2-5)
CASLSPGQETQYF

SEQ ID NO: 123911 - protein, 15 aa, Homo sapiens
  CDR3 for alpha chain variable domain of TCR clone 61956 (TRAV8-3, TRAJ20)
RAVEAKGSNDYKLSF

SEQ ID NO: 123912 - protein, 12 aa, Homo sapiens
  CDR3 for beta chain variable domain of TCR clone 61956 (TRBV7-2, TRBJ1-2)
CASRDSIYGYTF

SEQ ID NO: 123913 - protein, 14 aa, Homo sapiens
  CDR3 for alpha chain variable domain of TCR clone 61957 (TRAV1-2, TRAJ16)
CAVNRFSDGQKLLF

SEQ ID NO: 123914 - protein, 16 aa, Homo sapiens
  CDR3 for beta chain variable domain of TCR clone 61957 (TRBV19, TRBJ2-2)
CASSFPGQGLAGELFF

SEQ ID NO: 123915 - protein, 13 aa, Homo sapiens
  CDR3 for alpha chain variable domain of TCR clone 61958 (TRAV13-1, TRAJ12)
CAASPDSSYKLIF

SEQ ID NO: 123916 - protein, 13 aa, Homo sapiens
  CDR3 for beta chain variable domain of TCR clone 61958 (TRBV7-9, TRBJ1-2)
CASSLKQNYGYTF

SEQ ID NO: 123917 - protein, 14 aa, Homo sapiens
  CDR3 for alpha chain variable domain of TCR clone 61959 (TRAV12-3, TRAJ10)
SHLPLTGGGNKLTF

SEQ ID NO: 123918 - protein, 14 aa, Homo sapiens
  CDR3 for beta chain variable domain of TCR clone 61959 (TRBV9, TRBJ2-2)
CASSSRPYTGELFF

SEQ ID NO: 123919 - protein, 12 aa, Homo sapiens
  CDR3 for alpha chain variable domain of TCR clone 61960 (TRAV26-1, TRAJ36)
CIVRVRADNLFF

SEQ ID NO: 123920 - protein, 13 aa, Homo sapiens
  CDR3 for beta chain variable domain of TCR clone 61960 (TRBV11-2, TRBJ2-5)
CASSRGPSETQYC

SEQ ID NO: 123921 - protein, 14 aa, Homo sapiens
  CDR3 for alpha chain variable domain of TCR clone 61961 (TRAV13-2, TRAJ17)
CAENSKAAGNKLTF

SEQ ID NO: 123922 - protein, 16 aa, Homo sapiens
  CDR3 for beta chain variable domain of TCR clone 61961 (TRBV12-4, TRBJ1-5)
RASSRPVGGSNQPQHF

SEQ ID NO: 123923 - protein, 14 aa, Homo sapiens
  CDR3 for alpha chain variable domain of TCR clone 61962 (TRAV8-1, TRAJ23)
CAVGTYNQGGKLIF

SEQ ID NO: 123924 - protein, 16 aa, Homo sapiens
  CDR3 for beta chain variable domain of TCR clone 61962 (TRBV18, TRBJ1-5)
CASSPSTGDSNQPQHF

SEQ ID NO: 123925 - protein, 11 aa, Homo sapiens
  CDR3 for alpha chain variable domain of TCR clone 61963 (TRAV1-1, TRAJ20)
CVVFNDYKLSF

SEQ ID NO: 123926 - protein, 14 aa, Homo sapiens
  CDR3 for beta chain variable domain of TCR clone 61963 (TRBV19, TRBJ2-1)
CASSKDRGQDEQFF

SEQ ID NO: 123927 - protein, 15 aa, Homo sapiens
  CDR3 for alpha chain variable domain of TCR clone 61964 (TRAV3, TRAJ24)
CAVRDKMTAGGNCSL

SEQ ID NO: 123928 - protein, 14 aa, Homo sapiens
  CDR3 for beta chain variable domain of TCR clone 61964 (TRBV7-2, TRBJ2-3)
CASSQTGASYTQYF

SEQ ID NO: 123929 - protein, 14 aa, Homo sapiens
  CDR3 for alpha chain variable domain of TCR clone 61965 (TRAV9-2, TRAJ39)
CALYIYNAGNMLTF

SEQ ID NO: 123930 - protein, 16 aa, Homo sapiens
  CDR3 for beta chain variable domain of TCR clone 61965 (TRBV20-1, TRBJ1-4)
CSARPYGGELNEKLFF

SEQ ID NO: 123931 - protein, 13 aa, Homo sapiens
  CDR3 for alpha chain variable domain of TCR clone 61966 (TRAV16, TRAJ5)
CALPDTGRRALTF

SEQ ID NO: 123932 - protein, 12 aa, Homo sapiens
  CDR3 for beta chain variable domain of TCR clone 61966 (TRBV2, TRBJ2-1)
CAYGPPGNEQFF

SEQ ID NO: 123933 - protein, 18 aa, Homo sapiens
  CDR3 for alpha chain variable domain of TCR clone 61967 (TRAV12-3, TRAJ52)
CAMSVGGDGGTSYGKLTF

SEQ ID NO: 123934 - protein, 15 aa, Homo sapiens
  CDR3 for beta chain variable domain of TCR clone 61967 (TRBV27, TRBJ1-6)
CASSFDRGLGSPLHF

SEQ ID NO: 123935 - protein, 15 aa, Homo sapiens
  CDR3 for alpha chain variable domain of TCR clone 61968 (TRAV13-1, TRAJ11)
CAASNRNSGYSTLTF

SEQ ID NO: 123936 - protein, 13 aa, Homo sapiens
  CDR3 for beta chain variable domain of TCR clone 61968 (TRBV10-3, TRBJ2-7)
CASKLAVNYEQYF

SEQ ID NO: 123937 - protein, 14 aa, Homo sapiens
  CDR3 for alpha chain variable domain of TCR clone 61969 (TRAV1-2, TRAJ16)
CAVNRFSDGQKLLF

SEQ ID NO: 123938 - protein, 13 aa, Homo sapiens
  CDR3 for beta chain variable domain of TCR clone 61969 (TRBV10-3, TRBJ1-2)
CATSERDSYGYTF

SEQ ID NO: 123939 - protein, 12 aa, Homo sapiens
  CDR3 for alpha chain variable domain of TCR clone 61970 (TRAV16, TRAJ13)
CITLRGYQKVTF

SEQ ID NO: 123940 - protein, 17 aa, Homo sapiens
  CDR3 for beta chain variable domain of TCR clone 61970 (TRBV28, TRBJ2-5)
CASSRQEGLAGAETQYF

SEQ ID NO: 123941 - protein, 14 aa, Homo sapiens
  CDR3 for alpha chain variable domain of TCR clone 61971 (TRAV14/DV4, TRAJ41)
CARGGPDSGYALNF

SEQ ID NO: 123942 - protein, 19 aa, Homo sapiens
  CDR3 for beta chain variable domain of TCR clone 61971 (TRBV25-1, TRBJ2-2)
CAILVYRVDRGRKTGELFF

SEQ ID NO: 123943 - protein, 14 aa, Homo sapiens
  CDR3 for alpha chain variable domain of TCR clone 61972 (TRAV12-3, TRAJ10)
SHLPLTGGGNKLTF

SEQ ID NO: 123944 - protein, 12 aa, Homo sapiens
  CDR3 for beta chain variable domain of TCR clone 61972 (TRBV7-9, TRBJ2-7)
CATRTDAYKQYF

SEQ ID NO: 123945 - protein, 13 aa, Homo sapiens
  CDR3 for alpha chain variable domain of TCR clone 61973 (TRAV2, TRAJ21)
CAVEDLNFNKFYF

SEQ ID NO: 123946 - protein, 14 aa, Homo sapiens
  CDR3 for beta chain variable domain of TCR clone 61973 (TRBV19, TRBJ2-1)
CASPTFVLSGEQFF

SEQ ID NO: 123947 - protein, 13 aa, Homo sapiens
  CDR3 for alpha chain variable domain of TCR clone 61974 (TRAV8-3, TRAJ43)
CAVVPSNNNDMRF

SEQ ID NO: 123948 - protein, 16 aa, Homo sapiens
  CDR3 for beta chain variable domain of TCR clone 61974 (TRBV7-2, TRBJ2-5)
CASSPFPTGGEETQYF

SEQ ID NO: 123949 - protein, 15 aa, Homo sapiens
  CDR3 for alpha chain variable domain of TCR clone 61975 (TRAV21, TRAJ53)
CATLNSGGSNYKLTF

SEQ ID NO: 123950 - protein, 14 aa, Homo sapiens
  CDR3 for beta chain variable domain of TCR clone 61975 (TRBV19, TRBJ2-2)
CASSTLHRSGELFF

SEQ ID NO: 123951 - protein, 11 aa, Homo sapiens
  CDR3 for alpha chain variable domain of TCR clone 61976 (TRAV8-6, TRAJ42)
CAVRGRKPRQS

SEQ ID NO: 123952 - protein, 13 aa, Homo sapiens
  CDR3 for beta chain variable domain of TCR clone 61976 (TRBV7-3, TRBJ1-1)
CASSQDWGAEAFF

SEQ ID NO: 123953 - protein, 13 aa, Homo sapiens
  CDR3 for alpha chain variable domain of TCR clone 61977 (TRAV8-4, TRAJ54)
CAVTGGGAQKLVF

SEQ ID NO: 123954 - protein, 16 aa, Homo sapiens
  CDR3 for beta chain variable domain of TCR clone 61977 (TRBV2, TRBJ2-6)
CASSEVGGAGANVLNF

SEQ ID NO: 123955 - protein, 11 aa, Homo sapiens
  CDR3 for alpha chain variable domain of TCR clone 61978 (TRAV16, TRAJ49)
CALRSGNQFYF

SEQ ID NO: 123956 - protein, 18 aa, Homo sapiens
  CDR3 for beta chain variable domain of TCR clone 61978 (TRBV28, TRBJ2-7)
CASSLGLAGVGTSSTSGR

SEQ ID NO: 123957 - protein, 12 aa, Homo sapiens
  CDR3 for alpha chain variable domain of TCR clone 61979 (TRAV13-1, TRAJ15)
CAASQAGTALIF

SEQ ID NO: 123958 - protein, 14 aa, Homo sapiens
  CDR3 for beta chain variable domain of TCR clone 61979 (TRBV19, TRBJ2-2)
CASSTLHRLGELFF

SEQ ID NO: 123959 - protein, 14 aa, Homo sapiens
  CDR3 for alpha chain variable domain of TCR clone 61980 (TRAV17, TRAJ22)
CTTVLSGSARQLTF

SEQ ID NO: 123960 - protein, 14 aa, Homo sapiens
  CDR3 for beta chain variable domain of TCR clone 61980 (TRBV12-4, TRBJ2-3)
CASSGQGSTDTQYF

SEQ ID NO: 123961 - protein, 13 aa, Homo sapiens
  CDR3 for alpha chain variable domain of TCR clone 61981 (TRAV1-2, TRAJ9)
CAALNTGGFKTIF

SEQ ID NO: 123962 - protein, 14 aa, Homo sapiens
  CDR3 for beta chain variable domain of TCR clone 61981 (TRBV12-4, TRBJ2-2)
CASNQGANTGELFF

SEQ ID NO: 123963 - protein, 14 aa, Homo sapiens
  CDR3 for alpha chain variable domain of TCR clone 61982 (TRAV3, TRAJ16)
CCERLTSDGQKLLF

SEQ ID NO: 123964 - protein, 15 aa, Homo sapiens
  CDR3 for beta chain variable domain of TCR clone 61982 (TRBV28, TRBJ2-7)
CASSPGGRGFYEQYF

SEQ ID NO: 123965 - protein, 13 aa, Homo sapiens
  CDR3 for alpha chain variable domain of TCR clone 61983 (TRAV1-2, TRAJ9)
CAALNTGGFKTIF

SEQ ID NO: 123966 - protein, 17 aa, Homo sapiens
  CDR3 for beta chain variable domain of TCR clone 61983 (TRBV18, TRBJ1-5)
CASSPTMGQGTNQPQHF

SEQ ID NO: 123967 - protein, 11 aa, Homo sapiens
  CDR3 for alpha chain variable domain of TCR clone 61984 (TRAV16, TRAJ49)
CSLNTGNQSYF

SEQ ID NO: 123968 - protein, 12 aa, Homo sapiens
  CDR3 for beta chain variable domain of TCR clone 61984 (TRBV7-9, TRBJ1-4)
CASSTDREKLFF

SEQ ID NO: 123969 - protein, 12 aa, Homo sapiens
  CDR3 for alpha chain variable domain of TCR clone 61985 (TRAV2, TRAJ33)
CAVEDSNYQLIW

SEQ ID NO: 123970 - protein, 14 aa, Homo sapiens
  CDR3 for beta chain variable domain of TCR clone 61985 (TRBV19, TRBJ1-4)
CASSISRGGEKLFF

SEQ ID NO: 123971 - protein, 14 aa, Homo sapiens
  CDR3 for alpha chain variable domain of TCR clone 61986 (TRAV12-1, TRAJ38)
CVVNNAGNNRKLIW

SEQ ID NO: 123972 - protein, 13 aa, Homo sapiens
  CDR3 for beta chain variable domain of TCR clone 61986 (TRBV20-1, TRBJ1-1)
CSARVGGNTEAFF

SEQ ID NO: 123973 - protein, 16 aa, Homo sapiens
  CDR3 for alpha chain variable domain of TCR clone 61987 (TRAV30, TRAJ24)
CGTEIVDADSWGKFRF

SEQ ID NO: 123974 - protein, 14 aa, Homo sapiens
  CDR3 for beta chain variable domain of TCR clone 61987 (TRBV19, TRBJ2-1)
CASPTFVLSGEQFF

SEQ ID NO: 123975 - protein, 15 aa, Homo sapiens
  CDR3 for alpha chain variable domain of TCR clone 61988 (TRAV12-1, TRAJ44)
CVADLPTGTASKLTF

SEQ ID NO: 123976 - protein, 13 aa, Homo sapiens
  CDR3 for beta chain variable domain of TCR clone 61988 (TRBV6-5, TRBJ2-5)
CASSPQGGETQSF

SEQ ID NO: 123977 - protein, 13 aa, Homo sapiens
  CDR3 for alpha chain variable domain of TCR clone 61989 (TRAV26-2, TRAJ43)
CILRAVNNNDMRF

SEQ ID NO: 123978 - protein, 14 aa, Homo sapiens
  CDR3 for beta chain variable domain of TCR clone 61989 (TRBV7-9, TRBJ2-2)
CASSGLADTGELFF

SEQ ID NO: 123979 - protein, 18 aa, Homo sapiens
  CDR3 for alpha chain variable domain of TCR clone 61990 (TRAV12-3, TRAJ52)
CAMSVGGAGGTSYGKLTF

SEQ ID NO: 123980 - protein, 17 aa, Homo sapiens
  CDR3 for beta chain variable domain of TCR clone 61990 (TRBV7-8, TRBJ2-6)
CASSAGTGGAGANVLTF

SEQ ID NO: 123981 - protein, 15 aa, Homo sapiens
  CDR3 for alpha chain variable domain of TCR clone 61991 (TRAV26-2, TRAJ21)
CILSNTTSTNFTLDL

SEQ ID NO: 123982 - protein, 16 aa, Homo sapiens
  CDR3 for beta chain variable domain of TCR clone 61991 (TRBV4-2, TRBJ2-6)
CASSQARSSGANDLTF

SEQ ID NO: 123983 - protein, 16 aa, Homo sapiens
  CDR3 for alpha chain variable domain of TCR clone 61992 (TRAV3, TRAJ37)
CAVRGKGSGNTGKLIF

SEQ ID NO: 123984 - protein, 15 aa, Homo sapiens
  CDR3 for beta chain variable domain of TCR clone 61992 (TRBV5-1, TRBJ1-1)
CASSLNDFKNTEAFF

SEQ ID NO: 123985 - protein, 14 aa, Homo sapiens
  CDR3 for alpha chain variable domain of TCR clone 61993 (TRAV1-2, TRAJ8)
CAVREDTGFQKLVF

SEQ ID NO: 123986 - protein, 15 aa, Homo sapiens
  CDR3 for beta chain variable domain of TCR clone 61993 (TRBV7-9, TRBJ2-7)
CASSLRTSGSYEQYF

SEQ ID NO: 123987 - protein, 16 aa, Homo sapiens
  CDR3 for alpha chain variable domain of TCR clone 61994 (TRAV30, TRAJ24)
CGTEIVDAESWGKFQF

SEQ ID NO: 123988 - protein, 15 aa, Homo sapiens
  CDR3 for beta chain variable domain of TCR clone 61994 (TRBV15, TRBJ1-5)
CATSRDPVSNQPQHF

SEQ ID NO: 123989 - protein, 13 aa, Homo sapiens
  CDR3 for alpha chain variable domain of TCR clone 61995 (TRAV8-6, TRAJ49)
CAVITNTGNQFYF

SEQ ID NO: 123990 - protein, 14 aa, Homo sapiens
  CDR3 for beta chain variable domain of TCR clone 61995 (TRBV19, TRBJ2-1)
CASKDPGLANKQFF

SEQ ID NO: 123991 - protein, 13 aa, Homo sapiens
  CDR3 for alpha chain variable domain of TCR clone 61996 (TRAV4, TRAJ21)
CLVGAYNFNKFYF

SEQ ID NO: 123992 - protein, 12 aa, Homo sapiens
  CDR3 for beta chain variable domain of TCR clone 61996 (TRBV20-1, TRBJ2-5)
CSAPRSQETQYF

SEQ ID NO: 123993 - protein, 14 aa, Homo sapiens
  CDR3 for alpha chain variable domain of TCR clone 61997 (TRAV12-2, TRAJ40)
CAVKSPSGTYKYIF

SEQ ID NO: 123994 - protein, 17 aa, Homo sapiens
  CDR3 for beta chain variable domain of TCR clone 61997 (TRBV19, TRBJ2-7)
CASSISFYDSYPYEQYF

SEQ ID NO: 123995 - protein, 10 aa, Homo sapiens
  CDR3 for alpha chain variable domain of TCR clone 61998 (TRAV12-3, TRAJ49)
CAMNDDQFYF

SEQ ID NO: 123996 - protein, 14 aa, Homo sapiens
  CDR3 for beta chain variable domain of TCR clone 61998 (TRBV7-8, TRBJ2-3)
CASSLEAGTDTQYF

SEQ ID NO: 123997 - protein, 14 aa, Homo sapiens
  CDR3 for alpha chain variable domain of TCR clone 61999 (TRAV1-2, TRAJ8)
CAVREDTGFQKLVF

SEQ ID NO: 123998 - protein, 15 aa, Homo sapiens
  CDR3 for beta chain variable domain of TCR clone 61999 (TRBV7-3, TRBJ2-2)
CASSETGQGTGGLFF

SEQ ID NO: 123999 - protein, 15 aa, Homo sapiens
  CDR3 for alpha chain variable domain of TCR clone 62000 (TRAV12-1, TRAJ50)
CVVNILKTSYDKVIF

SEQ ID NO: 124000 - protein, 17 aa, Homo sapiens
  CDR3 for beta chain variable domain of TCR clone 62000 (TRBV19, TRBJ1-5)
CASSRDRILSRFQPQHF

SEQ ID NO: 124001 - protein, 12 aa, Homo sapiens
  CDR3 for alpha chain variable domain of TCR clone 62001 (TRAV36/DV7, TRAJ54)
CAVVRGSQKLVF

SEQ ID NO: 124002 - protein, 14 aa, Homo sapiens
  CDR3 for beta chain variable domain of TCR clone 62001 (TRBV7-3, TRBJ1-1)
CASSLKGGNTEAFF

SEQ ID NO: 124003 - protein, 15 aa, Homo sapiens
  CDR3 for alpha chain variable domain of TCR clone 62002 (TRAV3, TRAJ4)
CAQNMFSGGYNKLIF

SEQ ID NO: 124004 - protein, 13 aa, Homo sapiens
  CDR3 for beta chain variable domain of TCR clone 62002 (TRBV2, TRBJ2-5)
CASGTPYQETQYF

SEQ ID NO: 124005 - protein, 12 aa, Homo sapiens
  CDR3 for alpha chain variable domain of TCR clone 62003 (TRAV21, TRAJ33)
CAKMDSNYQLIW

SEQ ID NO: 124006 - protein, 14 aa, Homo sapiens
  CDR3 for beta chain variable domain of TCR clone 62003 (TRBV28, TRBJ1-1)
CASKTGILNTEAFF

SEQ ID NO: 124007 - protein, 14 aa, Homo sapiens
  CDR3 for alpha chain variable domain of TCR clone 62004 (TRAV12-3, TRAJ21)
RAATDLYNFNKFYF

SEQ ID NO: 124008 - protein, 13 aa, Homo sapiens
  CDR3 for beta chain variable domain of TCR clone 62004 (TRBV19, TRBJ2-2)
CASSSKNTGELFF

SEQ ID NO: 124009 - protein, 12 aa, Homo sapiens
  CDR3 for alpha chain variable domain of TCR clone 62005 (TRAV14/DV4, TRAJ9)
CAMNPGGFKTIF

SEQ ID NO: 124010 - protein, 16 aa, Homo sapiens
  CDR3 for beta chain variable domain of TCR clone 62005 (TRBV28, TRBJ2-5)
CASSFSPAGGWETRYF

SEQ ID NO: 124011 - protein, 19 aa, Homo sapiens
  CDR3 for alpha chain variable domain of TCR clone 62006 (TRAV16, )
CALSGDIQNPDPAVYQLRD

SEQ ID NO: 124012 - protein, 16 aa, Homo sapiens
  CDR3 for beta chain variable domain of TCR clone 62006 (TRBV12-5, TRBJ2-5)
CASGPRTSGSQETQYF

SEQ ID NO: 124013 - protein, 12 aa, Homo sapiens
  CDR3 for alpha chain variable domain of TCR clone 62007 (TRAV27, TRAJ13)
CAGAGGYQKVTF

SEQ ID NO: 124014 - protein, 15 aa, Homo sapiens
  CDR3 for beta chain variable domain of TCR clone 62007 (TRBV20-1, TRBJ2-6)
CSARDRGPGANGLTF

SEQ ID NO: 124015 - protein, 14 aa, Homo sapiens
  CDR3 for alpha chain variable domain of TCR clone 62008 (TRAV16, TRAJ54)
CALSLIQGAQKLVS

SEQ ID NO: 124016 - protein, 15 aa, Homo sapiens
  CDR3 for beta chain variable domain of TCR clone 62008 (TRBV20-1, TRBJ2-7)
CSARDLVSGMDEQYF

SEQ ID NO: 124017 - protein, 14 aa, Homo sapiens
  CDR3 for alpha chain variable domain of TCR clone 62009 (TRAV27, TRAJ13)
CRSSNSGGYQKVTF

SEQ ID NO: 124018 - protein, 16 aa, Homo sapiens
  CDR3 for beta chain variable domain of TCR clone 62009 (TRBV7-6, TRBJ2-1)
CASSLGGGQMSSSSGQ

SEQ ID NO: 124019 - protein, 15 aa, Homo sapiens
  CDR3 for alpha chain variable domain of TCR clone 62010 (TRAV26-1, TRAJ22)
CIVRVSFWFCKATDL

SEQ ID NO: 124020 - protein, 17 aa, Homo sapiens
  CDR3 for beta chain variable domain of TCR clone 62010 (TRBV7-9, TRBJ1-4)
CASSSGQLGGRSEKLFF

SEQ ID NO: 124021 - protein, 16 aa, Homo sapiens
  CDR3 for alpha chain variable domain of TCR clone 62011 (TRAV30, TRAJ24)
CGTEIVGADSCGKFQF

SEQ ID NO: 124022 - protein, 15 aa, Homo sapiens
  CDR3 for beta chain variable domain of TCR clone 62011 (TRBV7-9, TRBJ1-4)
CASSARTGGNEKLFF

SEQ ID NO: 124023 - protein, 16 aa, Homo sapiens
  CDR3 for alpha chain variable domain of TCR clone 62012 (TRAV12-3, TRAJ53)
CAMSPGSGGSNYKLTF

SEQ ID NO: 124024 - protein, 16 aa, Homo sapiens
  CDR3 for beta chain variable domain of TCR clone 62012 (TRBV4-2, TRBJ1-1)
CASSQVGFGMNTEASF

SEQ ID NO: 124025 - protein, 15 aa, Homo sapiens
  CDR3 for alpha chain variable domain of TCR clone 62013 (TRAV38-1, TRAJ58)
CAFMKQETSGSRLTF

SEQ ID NO: 124026 - protein, 14 aa, Homo sapiens
  CDR3 for beta chain variable domain of TCR clone 62013 (TRBV19, TRBJ2-1)
CASPTFVLSGEQFF

SEQ ID NO: 124027 - protein, 15 aa, Homo sapiens
  CDR3 for alpha chain variable domain of TCR clone 62014 (TRAV12-3, TRAJ49)
CAMAVTPNTGNQFYF

SEQ ID NO: 124028 - protein, 14 aa, Homo sapiens
  CDR3 for beta chain variable domain of TCR clone 62014 (TRBV7-8, TRBJ2-3)
CASSLEAGTDAQYF

SEQ ID NO: 124029 - protein, 16 aa, Homo sapiens
  CDR3 for alpha chain variable domain of TCR clone 62015 (TRAV12-2, TRAJ18)
CAVTTDRGSTLGRLYF

SEQ ID NO: 124030 - protein, 14 aa, Homo sapiens
  CDR3 for beta chain variable domain of TCR clone 62015 (TRBV5-7, TRBJ1-2)
CASSLVRGDYGYTF

SEQ ID NO: 124031 - protein, 12 aa, Homo sapiens
  CDR3 for alpha chain variable domain of TCR clone 62016 (TRAV13-2, TRAJ23)
CAERHRGGKLIF

SEQ ID NO: 124032 - protein, 16 aa, Homo sapiens
  CDR3 for beta chain variable domain of TCR clone 62016 (TRBV7-2, TRBJ2-6)
CAIFSGVSSGANVLTF

SEQ ID NO: 124033 - protein, 14 aa, Homo sapiens
  CDR3 for alpha chain variable domain of TCR clone 62017 (TRAV3, TRAJ20)
CAVPPAPNDYKPSF

SEQ ID NO: 124034 - protein, 13 aa, Homo sapiens
  CDR3 for beta chain variable domain of TCR clone 62017 (TRBV15, TRBJ1-2)
CATSRVDARSPVF

SEQ ID NO: 124035 - protein, 12 aa, Homo sapiens
  CDR3 for alpha chain variable domain of TCR clone 62018 (TRAV13-2, TRAJ23)
CAERHRGGKLIF

SEQ ID NO: 124036 - protein, 16 aa, Homo sapiens
  CDR3 for beta chain variable domain of TCR clone 62018 (TRBV7-9, TRBJ1-2)
CASRLGFSSGEDGYTF

SEQ ID NO: 124037 - protein, 13 aa, Homo sapiens
  CDR3 for alpha chain variable domain of TCR clone 62019 (TRAV8-3, TRAJ21)
CAVGLDNFNKFYF

SEQ ID NO: 124038 - protein, 13 aa, Homo sapiens
  CDR3 for beta chain variable domain of TCR clone 62019 (TRBV10-3, TRBJ2-7)
CASKLAVNYEQYF

SEQ ID NO: 124039 - protein, 15 aa, Homo sapiens
  CDR3 for alpha chain variable domain of TCR clone 62020 (TRAV1-2, TRAJ28)
CAVPYSGAGSYQLTF

SEQ ID NO: 124040 - protein, 13 aa, Homo sapiens
  CDR3 for beta chain variable domain of TCR clone 62020 (TRBV20-1, TRBJ2-7)
CSATHTSGYEQYF

SEQ ID NO: 124041 - protein, 15 aa, Homo sapiens
  CDR3 for alpha chain variable domain of TCR clone 62021 (TRAV8-3, TRAJ45)
CASSYSGGGADGLTF

SEQ ID NO: 124042 - protein, 13 aa, Homo sapiens
  CDR3 for beta chain variable domain of TCR clone 62021 (TRBV20-1, TRBJ1-1)
CSAFDRENTEAFF

SEQ ID NO: 124043 - protein, 16 aa, Homo sapiens
  CDR3 for alpha chain variable domain of TCR clone 62022 (TRAV12-2, TRAJ43)
CAGDDMRFGAGTRLTV

SEQ ID NO: 124044 - protein, 16 aa, Homo sapiens
  CDR3 for beta chain variable domain of TCR clone 62022 (TRBV2, TRBJ2-4)
CASSEAPGGEQNNQYF

SEQ ID NO: 124045 - protein, 14 aa, Homo sapiens
  CDR3 for alpha chain variable domain of TCR clone 62023 (TRAV17, TRAJ34)
CATDSLEGTDKLIF

SEQ ID NO: 124046 - protein, 13 aa, Homo sapiens
  CDR3 for beta chain variable domain of TCR clone 62023 (TRBV11-2, TRBJ2-7)
CASSGTRPYEHYF

SEQ ID NO: 124047 - protein, 13 aa, Homo sapiens
  CDR3 for alpha chain variable domain of TCR clone 62024 (TRAV22, TRAJ29)
CVVGGSGNTPLVF

SEQ ID NO: 124048 - protein, 18 aa, Homo sapiens
  CDR3 for beta chain variable domain of TCR clone 62024 (TRBV20-1, TRBJ2-6)
CSAETTPTHGSGANVLTF

SEQ ID NO: 124049 - protein, 10 aa, Homo sapiens
  CDR3 for alpha chain variable domain of TCR clone 62025 (TRAV21, TRAJ31)
CAVDNARLMF

SEQ ID NO: 124050 - protein, 14 aa, Homo sapiens
  CDR3 for beta chain variable domain of TCR clone 62025 (TRBV4-1, TRBJ2-2)
CASSQAVNTGELFF

SEQ ID NO: 124051 - protein, 19 aa, Homo sapiens
  CDR3 for alpha chain variable domain of TCR clone 62026 (TRAV29/DV5, TRAJ49)
CSVLLCSKLTVDTGNQFYF

SEQ ID NO: 124052 - protein, 17 aa, Homo sapiens
  CDR3 for beta chain variable domain of TCR clone 62026 (TRBV13, TRBJ2-3)
CASSLSRAAGGRNTQYF

SEQ ID NO: 124053 - protein, 14 aa, Homo sapiens
  CDR3 for alpha chain variable domain of TCR clone 62027 (TRAV1-2, TRAJ16)
CAVNRFSDGQKLLF

SEQ ID NO: 124054 - protein, 13 aa, Homo sapiens
  CDR3 for beta chain variable domain of TCR clone 62027 (TRBV4-2, TRBJ1-1)
CASSQAGNTEAFL

SEQ ID NO: 124055 - protein, 17 aa, Homo sapiens
  CDR3 for alpha chain variable domain of TCR clone 62028 (TRAV3, TRAJ42)
CAVRDRDYGGSQGNLIF

SEQ ID NO: 124056 - protein, 12 aa, Homo sapiens
  CDR3 for beta chain variable domain of TCR clone 62028 (TRBV29-1, TRBJ2-2)
CSVYKYTGELFF

SEQ ID NO: 124057 - protein, 17 aa, Homo sapiens
  CDR3 for alpha chain variable domain of TCR clone 62029 (TRAV4, TRAJ13)
CIVDVQGSSGGYQKVTF

SEQ ID NO: 124058 - protein, 18 aa, Homo sapiens
  CDR3 for beta chain variable domain of TCR clone 62029 (TRBV15, TRBJ2-3)
CATSRDGARSWDTDTQYF

SEQ ID NO: 124059 - protein, 13 aa, Homo sapiens
  CDR3 for alpha chain variable domain of TCR clone 62030 (TRAV2, TRAJ20)
CAVDDPSEYKLSF

SEQ ID NO: 124060 - protein, 16 aa, Homo sapiens
  CDR3 for beta chain variable domain of TCR clone 62030 (TRBV25-1, TRBJ2-7)
CASSELTGGGIYEQYF

SEQ ID NO: 124061 - protein, 13 aa, Homo sapiens
  CDR3 for alpha chain variable domain of TCR clone 62031 (TRAV12-2, TRAJ39)
CAVNNNADNMLTF

SEQ ID NO: 124062 - protein, 14 aa, Homo sapiens
  CDR3 for beta chain variable domain of TCR clone 62031 (TRBV7-3, TRBJ2-1)
CASSPEGGGNEQFF

SEQ ID NO: 124063 - protein, 18 aa, Homo sapiens
  CDR3 for alpha chain variable domain of TCR clone 62032 (TRAV13-1, TRAJ52)
CAAKNPNAGGTSYGKLTF

SEQ ID NO: 124064 - protein, 15 aa, Homo sapiens
  CDR3 for beta chain variable domain of TCR clone 62032 (TRBV6-1, TRBJ2-3)
CASSERCGITDTQYF

SEQ ID NO: 124065 - protein, 13 aa, Homo sapiens
  CDR3 for alpha chain variable domain of TCR clone 62033 (TRAV8-1, TRAJ30)
CAVIMKRDDKIIF

SEQ ID NO: 124066 - protein, 14 aa, Homo sapiens
  CDR3 for beta chain variable domain of TCR clone 62033 (TRBV7-2, TRBJ1-6)
CASSLQGANSPLHF

SEQ ID NO: 124067 - protein, 12 aa, Homo sapiens
  CDR3 for alpha chain variable domain of TCR clone 62034 (TRAV8-4, TRAJ49)
CAVSLTGNQFYF

SEQ ID NO: 124068 - protein, 17 aa, Homo sapiens
  CDR3 for beta chain variable domain of TCR clone 62034 (TRBV12-4, TRBJ2-5)
CASSPPGTSGGLGTQYF

SEQ ID NO: 124069 - protein, 13 aa, Homo sapiens
  CDR3 for alpha chain variable domain of TCR clone 62035 (TRAV2, TRAJ40)
CAVVTSGTYRYIF

SEQ ID NO: 124070 - protein, 14 aa, Homo sapiens
  CDR3 for beta chain variable domain of TCR clone 62035 (TRBV19, TRBJ2-1)
CASPTFVLSGEHFF

SEQ ID NO: 124071 - protein, 18 aa, Homo sapiens
  CDR3 for alpha chain variable domain of TCR clone 62036 (TRAV13-1, TRAJ52)
CAASKRSAGGTSYGKLTF

SEQ ID NO: 124072 - protein, 15 aa, Homo sapiens
  CDR3 for beta chain variable domain of TCR clone 62036 (TRBV7-9, TRBJ1-6)
CASSSPGRGNSPLHF

SEQ ID NO: 124073 - protein, 21 aa, Homo sapiens
  CDR3 for alpha chain variable domain of TCR clone 62037 (TRAV16, TRAJ22)
HLKKPFAQEEDSDMYLRQLTF

SEQ ID NO: 124074 - protein, 15 aa, Homo sapiens
  CDR3 for beta chain variable domain of TCR clone 62037 (TRBV7-9, TRBJ1-6)
CASSSPGRGNSPLHF

SEQ ID NO: 124075 - protein, 12 aa, Homo sapiens
  CDR3 for alpha chain variable domain of TCR clone 62038 (TRAV12-3, TRAJ20)
CAMVRGDYKLSF

SEQ ID NO: 124076 - protein, 12 aa, Homo sapiens
  CDR3 for beta chain variable domain of TCR clone 62038 (TRBV7-8, TRBJ2-7)
CASSLGDREQYF

SEQ ID NO: 124077 - protein, 14 aa, Homo sapiens
  CDR3 for alpha chain variable domain of TCR clone 62039 (TRAV13-1, TRAJ40)
CAASMTSGTYKYIF

SEQ ID NO: 124078 - protein, 16 aa, Homo sapiens
  CDR3 for beta chain variable domain of TCR clone 62039 (TRBV10-3, TRBJ2-7)
CAISADFADRPYEQYF

SEQ ID NO: 124079 - protein, 13 aa, Homo sapiens
  CDR3 for alpha chain variable domain of TCR clone 62040 (TRAV27, TRAJ3)
ASLRGSSASKIIF

SEQ ID NO: 124080 - protein, 15 aa, Homo sapiens
  CDR3 for beta chain variable domain of TCR clone 62040 (TRBV28, TRBJ1-3)
CASSVGWASGNTIYF

SEQ ID NO: 124081 - protein, 15 aa, Homo sapiens
  CDR3 for alpha chain variable domain of TCR clone 62041 (TRAV25, TRAJ33)
TDVGTSRGSNYQLIW

SEQ ID NO: 124082 - protein, 14 aa, Homo sapiens
  CDR3 for beta chain variable domain of TCR clone 62041 (TRBV7-2, TRBJ2-5)
CASSTGGELKTQYF

SEQ ID NO: 124083 - protein, 15 aa, Homo sapiens
  CDR3 for alpha chain variable domain of TCR clone 62042 (TRAV21, TRAJ24)
CAARSSTDSWGKLQF

SEQ ID NO: 124084 - protein, 16 aa, Homo sapiens
  CDR3 for beta chain variable domain of TCR clone 62042 (TRBV19, TRBJ2-1)
CASSKAGPSSYNEQFF

SEQ ID NO: 124085 - protein, 13 aa, Homo sapiens
  CDR3 for alpha chain variable domain of TCR clone 62043 (TRAV17, TRAJ26)
CATVDNYGQNFVF

SEQ ID NO: 124086 - protein, 16 aa, Homo sapiens
  CDR3 for beta chain variable domain of TCR clone 62043 (TRBV2, TRBJ2-1)
CASSVGGSLSCNEQFF

SEQ ID NO: 124087 - protein, 11 aa, Homo sapiens
  CDR3 for alpha chain variable domain of TCR clone 62044 (TRAV2, TRAJ13)
CASGGYQKVTF

SEQ ID NO: 124088 - protein, 16 aa, Homo sapiens
  CDR3 for beta chain variable domain of TCR clone 62044 (TRBV15, TRBJ2-3)
CATSRDLGIVTDTQYF

SEQ ID NO: 124089 - protein, 14 aa, Homo sapiens
  CDR3 for alpha chain variable domain of TCR clone 62045 (TRAV20, TRAJ22)
CAVALGGSAGQLTF

SEQ ID NO: 124090 - protein, 17 aa, Homo sapiens
  CDR3 for beta chain variable domain of TCR clone 62045 (TRBV13, TRBJ2-3)
CASSLSRVAGGRNTQYF

SEQ ID NO: 124091 - protein, 12 aa, Homo sapiens
  CDR3 for alpha chain variable domain of TCR clone 62046 (TRAV21, TRAJ31)
CAVWGNNARLMF

SEQ ID NO: 124092 - protein, 15 aa, Homo sapiens
  CDR3 for beta chain variable domain of TCR clone 62046 (TRBV9, TRBJ2-1)
CASSLAGSSYNEQFF

SEQ ID NO: 124093 - protein, 15 aa, Homo sapiens
  CDR3 for alpha chain variable domain of TCR clone 62047 (TRAV8-2, TRAJ40)
CVVLGTPSGTYKYIF

SEQ ID NO: 124094 - protein, 16 aa, Homo sapiens
  CDR3 for beta chain variable domain of TCR clone 62047 (TRBV7-3, TRBJ2-1)
CASSLEGYRSYNEQFF

SEQ ID NO: 124095 - protein, 12 aa, Homo sapiens
  CDR3 for alpha chain variable domain of TCR clone 62048 (TRAV13-1, TRAJ15)
CAASRAGTALIF

SEQ ID NO: 124096 - protein, 14 aa, Homo sapiens
  CDR3 for beta chain variable domain of TCR clone 62048 (TRBV19, TRBJ2-2)
CASSTLNRSGELFF

SEQ ID NO: 124097 - protein, 12 aa, Homo sapiens
  CDR3 for alpha chain variable domain of TCR clone 62049 (TRAV13-1, TRAJ21)
CAAKEGFNKFYF

SEQ ID NO: 124098 - protein, 14 aa, Homo sapiens
  CDR3 for beta chain variable domain of TCR clone 62049 (TRBV5-4, TRBJ1-1)
CASSLDSRRGEAFF

SEQ ID NO: 124099 - protein, 14 aa, Homo sapiens
  CDR3 for alpha chain variable domain of TCR clone 62050 (TRAV12-2, TRAJ53)
CAVKGGGSNYNLTF

SEQ ID NO: 124100 - protein, 14 aa, Homo sapiens
  CDR3 for beta chain variable domain of TCR clone 62050 (TRBV7-7, TRBJ2-2)
CATRQDSDTGELFF

SEQ ID NO: 124101 - protein, 12 aa, Homo sapiens
  CDR3 for alpha chain variable domain of TCR clone 62051 (TRAV13-1, TRAJ15)
CAASQAGTALIF

SEQ ID NO: 124102 - protein, 18 aa, Homo sapiens
  CDR3 for beta chain variable domain of TCR clone 62051 (TRBV7-9, TRBJ2-3)
CASSFPINGQISTDTQYF

SEQ ID NO: 124103 - protein, 11 aa, Homo sapiens
  CDR3 for alpha chain variable domain of TCR clone 62052 (TRAV35, TRAJ30)
CAGERDNKIIF

SEQ ID NO: 124104 - protein, 14 aa, Homo sapiens
  CDR3 for beta chain variable domain of TCR clone 62052 (TRBV15, TRBJ2-5)
CATSGDRGQETQYF

SEQ ID NO: 124105 - protein, 16 aa, Homo sapiens
  CDR3 for alpha chain variable domain of TCR clone 62053 (TRAV30, TRAJ24)
CGTEIVDADSWWKFQF

SEQ ID NO: 124106 - protein, 13 aa, Homo sapiens
  CDR3 for beta chain variable domain of TCR clone 62053 (TRBV10-3, TRBJ2-7)
CASKLAVNYEQYF

SEQ ID NO: 124107 - protein, 15 aa, Homo sapiens
  CDR3 for alpha chain variable domain of TCR clone 62054 (TRAV34, TRAJ38)
CGADFTPGNNRKLIW

SEQ ID NO: 124108 - protein, 14 aa, Homo sapiens
  CDR3 for beta chain variable domain of TCR clone 62054 (TRBV19, TRBJ2-5)
CASSMTGQQETQYF

SEQ ID NO: 124109 - protein, 12 aa, Homo sapiens
  CDR3 for alpha chain variable domain of TCR clone 62055 (TRAV13-1, TRAJ21)
CAAKEGFNKFYF

SEQ ID NO: 124110 - protein, 16 aa, Homo sapiens
  CDR3 for beta chain variable domain of TCR clone 62055 (TRBV24-1, TRBJ2-3)
CATSDPGTGATDTQYF

SEQ ID NO: 124111 - protein, 16 aa, Homo sapiens
  CDR3 for alpha chain variable domain of TCR clone 62056 (TRAV26-1, TRAJ23)
CIVRVHPYNQGGKLIF

SEQ ID NO: 124112 - protein, 15 aa, Homo sapiens
  CDR3 for beta chain variable domain of TCR clone 62056 (TRBV9, TRBJ1-6)
CASSVAGTGDSPLHF

SEQ ID NO: 124113 - protein, 15 aa, Homo sapiens
  CDR3 for alpha chain variable domain of TCR clone 62057 (TRAV26-1, TRAJ56)
CIVRVDNGANSKLTF

SEQ ID NO: 124114 - protein, 15 aa, Homo sapiens
  CDR3 for beta chain variable domain of TCR clone 62057 (TRBV20-1, TRBJ2-7)
RSARGPTEVGHEQYF

SEQ ID NO: 124115 - protein, 16 aa, Homo sapiens
  CDR3 for alpha chain variable domain of TCR clone 62058 (TRAV30, TRAJ24)
CGTEIVDADSWGKFQF

SEQ ID NO: 124116 - protein, 13 aa, Homo sapiens
  CDR3 for beta chain variable domain of TCR clone 62058 (TRBV20-1, TRBJ1-1)
CSTRGGGNTEAFF

SEQ ID NO: 124117 - protein, 14 aa, Homo sapiens
  CDR3 for alpha chain variable domain of TCR clone 62059 (TRAV1-2, TRAJ16)
CAVNRFSDGEKLLF

SEQ ID NO: 124118 - protein, 16 aa, Homo sapiens
  CDR3 for beta chain variable domain of TCR clone 62059 (TRBV12-5, TRBJ2-5)
CASGPRTSGNQETQYF

SEQ ID NO: 124119 - protein, 16 aa, Homo sapiens
  CDR3 for alpha chain variable domain of TCR clone 62060 (TRAV35, TRAJ28)
CAGQRYSGAGRYQLTF

SEQ ID NO: 124120 - protein, 13 aa, Homo sapiens
  CDR3 for beta chain variable domain of TCR clone 62060 (TRBV19, TRBJ1-2)
CASSQGQVYGYTF

SEQ ID NO: 124121 - protein, 18 aa, Homo sapiens
  CDR3 for alpha chain variable domain of TCR clone 62061 (TRAV8-4, TRAJ52)
CAVTRANAGGTSYGKLTF

SEQ ID NO: 124122 - protein, 20 aa, Homo sapiens
  CDR3 for beta chain variable domain of TCR clone 62061 (TRBV19, TRBJ2-1)
CASSISRTVTSTRLDNEQFF

SEQ ID NO: 124123 - protein, 13 aa, Homo sapiens
  CDR3 for alpha chain variable domain of TCR clone 62062 (TRAV2, TRAJ29)
CAVYSSGNTPLVF

SEQ ID NO: 124124 - protein, 17 aa, Homo sapiens
  CDR3 for beta chain variable domain of TCR clone 62062 (TRBV13, TRBJ2-3)
CASSLSRVAGGRNTQYF

SEQ ID NO: 124125 - protein, 14 aa, Homo sapiens
  CDR3 for alpha chain variable domain of TCR clone 62063 (TRAV12-3, TRAJ6)
CAMSATGGSYLPTF

SEQ ID NO: 124126 - protein, 16 aa, Homo sapiens
  CDR3 for beta chain variable domain of TCR clone 62063 (TRBV4-2, TRBJ2-1)
CASSPRAGQGANEQFF

SEQ ID NO: 124127 - protein, 14 aa, Homo sapiens
  CDR3 for alpha chain variable domain of TCR clone 62064 (TRAV1-2, TRAJ8)
CAVREDTGFQKLVF

SEQ ID NO: 124128 - protein, 15 aa, Homo sapiens
  CDR3 for beta chain variable domain of TCR clone 62064 (TRBV2, TRBJ2-3)
CASSGEGTGTDTQYF

SEQ ID NO: 124129 - protein, 17 aa, Homo sapiens
  CDR3 for alpha chain variable domain of TCR clone 62065 (TRAV4, TRAJ18)
CLVGERSVGSTLGRLYF

SEQ ID NO: 124130 - protein, 14 aa, Homo sapiens
  CDR3 for beta chain variable domain of TCR clone 62065 (TRBV6-5, TRBJ1-2)
CASSYDGTGGGYTF

SEQ ID NO: 124131 - protein, 13 aa, Homo sapiens
  CDR3 for alpha chain variable domain of TCR clone 62066 (TRAV12-3, TRAJ7)
CSMSASGNNRLAF

SEQ ID NO: 124132 - protein, 14 aa, Homo sapiens
  CDR3 for beta chain variable domain of TCR clone 62066 (TRBV13, TRBJ2-5)
CASSLGPRGETQYF

SEQ ID NO: 124133 - protein, 17 aa, Homo sapiens
  CDR3 for alpha chain variable domain of TCR clone 62067 (TRAV3, TRAJ42)
CAVKDRDYGGSQGNLIF

SEQ ID NO: 124134 - protein, 15 aa, Homo sapiens
  CDR3 for beta chain variable domain of TCR clone 62067 (TRBV6-6, TRBJ2-7)
CASSYSYGGSYEQYF

SEQ ID NO: 124135 - protein, 10 aa, Homo sapiens
  CDR3 for alpha chain variable domain of TCR clone 62068 (TRAV12-3, TRAJ56)
CAMSVTGANS

SEQ ID NO: 124136 - protein, 17 aa, Homo sapiens
  CDR3 for beta chain variable domain of TCR clone 62068 (TRBV20-1, TRBJ2-3)
CSASLLGRGGSADTQYF

SEQ ID NO: 124137 - protein, 14 aa, Homo sapiens
  CDR3 for alpha chain variable domain of TCR clone 62069 (TRAV12-3, TRAJ10)
SYLPLTGGGNKLTF

SEQ ID NO: 124138 - protein, 16 aa, Homo sapiens
  CDR3 for beta chain variable domain of TCR clone 62069 (TRBV10-3, TRBJ2-1)
CAISGVGDGGGGEQFF

SEQ ID NO: 124139 - protein, 12 aa, Homo sapiens
  CDR3 for alpha chain variable domain of TCR clone 62070 (TRAV12-3, TRAJ40)
CAMSSGTYKYIF

SEQ ID NO: 124140 - protein, 12 aa, Homo sapiens
  CDR3 for beta chain variable domain of TCR clone 62070 (TRBV7-8, TRBJ2-1)
CASSLGHNEQFF

SEQ ID NO: 124141 - protein, 15 aa, Homo sapiens
  CDR3 for alpha chain variable domain of TCR clone 62071 (TRAV26-1, TRAJ22)
CIVRVSFWFRKATDL

SEQ ID NO: 124142 - protein, 20 aa, Homo sapiens
  CDR3 for beta chain variable domain of TCR clone 62071 (TRBV28, TRBJ2-1)
CASTPIGRSPGLAGGNEQFF

SEQ ID NO: 124143 - protein, 14 aa, Homo sapiens
  CDR3 for alpha chain variable domain of TCR clone 62072 (TRAV13-1, TRAJ44)
CAAKATGTASKLTF

SEQ ID NO: 124144 - protein, 13 aa, Homo sapiens
  CDR3 for beta chain variable domain of TCR clone 62072 (TRBV20-1, TRBJ1-1)
CSARGGGNTEAFF

SEQ ID NO: 124145 - protein, 15 aa, Homo sapiens
  CDR3 for alpha chain variable domain of TCR clone 62073 (TRAV3, TRAJ4)
CAVRDGTGGYNKLIS

SEQ ID NO: 124146 - protein, 15 aa, Homo sapiens
  CDR3 for beta chain variable domain of TCR clone 62073 (TRBV11-2, TRBJ2-1)
CASSLGPDSYNEQFF

SEQ ID NO: 124147 - protein, 12 aa, Homo sapiens
  CDR3 for alpha chain variable domain of TCR clone 62074 (TRAV17, TRAJ57)
CATDGGSEKLVF

SEQ ID NO: 124148 - protein, 14 aa, Homo sapiens
  CDR3 for beta chain variable domain of TCR clone 62074 (TRBV19, TRBJ2-1)
CASPTFVLSGEQFF

SEQ ID NO: 124149 - protein, 13 aa, Homo sapiens
  CDR3 for alpha chain variable domain of TCR clone 62075 (TRAV24, TRAJ44)
CALLTGTASKLTF

SEQ ID NO: 124150 - protein, 16 aa, Homo sapiens
  CDR3 for beta chain variable domain of TCR clone 62075 (TRBV11-2, TRBJ1-1)
CASSLRQGGEHSKAFF

SEQ ID NO: 124151 - protein, 15 aa, Homo sapiens
  CDR3 for alpha chain variable domain of TCR clone 62076 (TRAV12-2, TRAJ43)
CAFDMRFGAGTRLTV

SEQ ID NO: 124152 - protein, 18 aa, Homo sapiens
  CDR3 for beta chain variable domain of TCR clone 62076 (TRBV20-1, TRBJ2-3)
CSTSGLAGGPGTTDTQYF

SEQ ID NO: 124153 - protein, 14 aa, Homo sapiens
  CDR3 for alpha chain variable domain of TCR clone 62077 (TRAV8-6, TRAJ56)
CAVSEAGANSKLTF

SEQ ID NO: 124154 - protein, 17 aa, Homo sapiens
  CDR3 for beta chain variable domain of TCR clone 62077 (TRBV28, TRBJ2-3)
CASSPTPAGGRVDTQYF

SEQ ID NO: 124155 - protein, 11 aa, Homo sapiens
  CDR3 for alpha chain variable domain of TCR clone 62078 (TRAV1-2, TRAJ31)
CAVNNNARLMF

SEQ ID NO: 124156 - protein, 15 aa, Homo sapiens
  CDR3 for beta chain variable domain of TCR clone 62078 (TRBV28, TRBJ2-1)
CASSIIAGSRSEQFF

SEQ ID NO: 124157 - protein, 16 aa, Homo sapiens
  CDR3 for alpha chain variable domain of TCR clone 62079 (TRAV20, TRAJ28)
CAVRDPSGAGSYQLTF

SEQ ID NO: 124158 - protein, 15 aa, Homo sapiens
  CDR3 for beta chain variable domain of TCR clone 62079 (TRBV11-3, TRBJ2-3)
CASLKDGREGDTQYF

SEQ ID NO: 124159 - protein, 13 aa, Homo sapiens
  CDR3 for alpha chain variable domain of TCR clone 62080 (TRAV12-2, TRAJ42)
CAVKRGSQGNLIF

SEQ ID NO: 124160 - protein, 13 aa, Homo sapiens
  CDR3 for beta chain variable domain of TCR clone 62080 (TRBV7-9, TRBJ1-2)
CASSLKQNYGYTF

SEQ ID NO: 124161 - protein, 14 aa, Homo sapiens
  CDR3 for alpha chain variable domain of TCR clone 62081 (TRAV1-2, TRAJ16)
CAVNRFSDGQKLLF

SEQ ID NO: 124162 - protein, 11 aa, Homo sapiens
  CDR3 for beta chain variable domain of TCR clone 62081 (TRBV4-1, TRBJ2-2)
CASEHTGELLF

SEQ ID NO: 124163 - protein, 15 aa, Homo sapiens
  CDR3 for alpha chain variable domain of TCR clone 62082 (TRAV17, TRAJ16)
CATALRFSDGQKLLF

SEQ ID NO: 124164 - protein, 16 aa, Homo sapiens
  CDR3 for beta chain variable domain of TCR clone 62082 (TRBV12-5, TRBJ2-5)
CASGPRTSGNQETQYF

SEQ ID NO: 124165 - protein, 16 aa, Homo sapiens
  CDR3 for alpha chain variable domain of TCR clone 62083 (TRAV12-2, TRAJ32)
CAVNLGQGGATNKLIF

SEQ ID NO: 124166 - protein, 15 aa, Homo sapiens
  CDR3 for beta chain variable domain of TCR clone 62083 (TRBV20-1, TRBJ2-7)
CSARGPLAGGRGQYF

SEQ ID NO: 124167 - protein, 15 aa, Homo sapiens
  CDR3 for alpha chain variable domain of TCR clone 62084 (TRAV21, TRAJ53)
CATLNSGGSNYKLTF

SEQ ID NO: 124168 - protein, 16 aa, Homo sapiens
  CDR3 for beta chain variable domain of TCR clone 62084 (TRBV20-1, TRBJ1-2)
CSASMGQGVANYGDTF

SEQ ID NO: 124169 - protein, 15 aa, Homo sapiens
  CDR3 for alpha chain variable domain of TCR clone 62085 (TRAV21, TRAJ24)
CAARSSTDSWGKLQF

SEQ ID NO: 124170 - protein, 15 aa, Homo sapiens
  CDR3 for beta chain variable domain of TCR clone 62085 (TRBV4-1, TRBJ2-7)
CASSQDTGRLYEQYF

SEQ ID NO: 124171 - protein, 17 aa, Homo sapiens
  CDR3 for alpha chain variable domain of TCR clone 62086 (TRAV3, TRAJ42)
CAVRDREYGGSQGNLIF

SEQ ID NO: 124172 - protein, 15 aa, Homo sapiens
  CDR3 for beta chain variable domain of TCR clone 62086 (TRBV2, TRBJ2-7)
CASSEGLARSYEQYF

SEQ ID NO: 124173 - protein, 18 aa, Homo sapiens
  CDR3 for alpha chain variable domain of TCR clone 62087 (TRAV21, TRAJ52)
CAVRPSPAGGTSYGKLTF

SEQ ID NO: 124174 - protein, 15 aa, Homo sapiens
  CDR3 for beta chain variable domain of TCR clone 62087 (TRBV7-9, TRBJ2-7)
FASSSSGLAVYEQYF

SEQ ID NO: 124175 - protein, 12 aa, Homo sapiens
  CDR3 for alpha chain variable domain of TCR clone 62088 (TRAV12-3, TRAJ40)
CSMSSGTYKYIF

SEQ ID NO: 124176 - protein, 15 aa, Homo sapiens
  CDR3 for beta chain variable domain of TCR clone 62088 (TRBV7-3, TRBJ2-2)
CASSETGQGTGELFF

SEQ ID NO: 124177 - protein, 18 aa, Homo sapiens
  CDR3 for alpha chain variable domain of TCR clone 62089 (TRAV12-3, TRAJ52)
CAMTRTNAGGTSYGKLTF

SEQ ID NO: 124178 - protein, 17 aa, Homo sapiens
  CDR3 for beta chain variable domain of TCR clone 62089 (TRBV7-3, TRBJ2-3)
CASSLMKRMRGADTQYF

SEQ ID NO: 124179 - protein, 12 aa, Homo sapiens
  CDR3 for alpha chain variable domain of TCR clone 62090 (TRAV8-3, TRAJ26)
CAGDNYGQNFVF

SEQ ID NO: 124180 - protein, 14 aa, Homo sapiens
  CDR3 for beta chain variable domain of TCR clone 62090 (TRBV9, TRBJ2-1)
CQQPRGGSYNEQFF

SEQ ID NO: 124181 - protein, 12 aa, Homo sapiens
  CDR3 for alpha chain variable domain of TCR clone 62091 (TRAV27, TRAJ22)
CAGDGAGVEIWF

SEQ ID NO: 124182 - protein, 17 aa, Homo sapiens
  CDR3 for beta chain variable domain of TCR clone 62091 (TRBV5-5, TRBJ1-1)
CASSLRSRGLMNTEAFF

SEQ ID NO: 124183 - protein, 11 aa, Homo sapiens
  CDR3 for alpha chain variable domain of TCR clone 62092 (TRAV12-2, TRAJ31)
CAVTRWARLRF

SEQ ID NO: 124184 - protein, 15 aa, Homo sapiens
  CDR3 for beta chain variable domain of TCR clone 62092 (TRBV19, TRBJ2-7)
CASSIGGGLVNEQYF

SEQ ID NO: 124185 - protein, 13 aa, Homo sapiens
  CDR3 for alpha chain variable domain of TCR clone 62093 (TRAV3, TRAJ30)
CAVRDRGDDKIIL

SEQ ID NO: 124186 - protein, 15 aa, Homo sapiens
  CDR3 for beta chain variable domain of TCR clone 62093 (TRBV7-3, TRBJ2-2)
CQQLKAGDLVRGAVF

SEQ ID NO: 124187 - protein, 13 aa, Homo sapiens
  CDR3 for alpha chain variable domain of TCR clone 62094 (TRAV2, TRAJ40)
CAVVTSGTYKYTF

SEQ ID NO: 124188 - protein, 13 aa, Homo sapiens
  CDR3 for beta chain variable domain of TCR clone 62094 (TRBV4-1, TRBJ2-1)
CASSQEVQYEQFF

SEQ ID NO: 124189 - protein, 14 aa, Homo sapiens
  CDR3 for alpha chain variable domain of TCR clone 62095 (TRAV1-2, TRAJ8)
CAVREDTGFQKLVF

SEQ ID NO: 124190 - protein, 13 aa, Homo sapiens
  CDR3 for beta chain variable domain of TCR clone 62095 (TRBV6-6, TRBJ1-2)
CASSYGWGDDGDF

SEQ ID NO: 124191 - protein, 13 aa, Homo sapiens
  CDR3 for alpha chain variable domain of TCR clone 62096 (TRAV12-1, TRAJ40)
CVVPNSGTYKYIF

SEQ ID NO: 124192 - protein, 16 aa, Homo sapiens
  CDR3 for beta chain variable domain of TCR clone 62096 (TRBV7-9, TRBJ1-2)
CASSLGFSSGEDGYTF

SEQ ID NO: 124193 - protein, 18 aa, Homo sapiens
  CDR3 for alpha chain variable domain of TCR clone 62097 (TRAV12-3, TRAJ52)
CAMSVGGAGGTSYGKLTF

SEQ ID NO: 124194 - protein, 15 aa, Homo sapiens
  CDR3 for beta chain variable domain of TCR clone 62097 (TRBV27, TRBJ1-6)
CASSFDRELGSPLHF

SEQ ID NO: 124195 - protein, 13 aa, Homo sapiens
  CDR3 for alpha chain variable domain of TCR clone 62098 (TRAV2, TRAJ21)
CAVEDLNFNKFYF

SEQ ID NO: 124196 - protein, 15 aa, Homo sapiens
  CDR3 for beta chain variable domain of TCR clone 62098 (TRBV2, TRBJ2-3)
CASSDFEKATDTQYF

SEQ ID NO: 124197 - protein, 12 aa, Homo sapiens
  CDR3 for alpha chain variable domain of TCR clone 62099 (TRAV8-3, TRAJ27)
CAVGAEAGKSTF

SEQ ID NO: 124198 - protein, 14 aa, Homo sapiens
  CDR3 for beta chain variable domain of TCR clone 62099 (TRBV2, TRBJ2-1)
CASRLIVGHDEQFS

SEQ ID NO: 124199 - protein, 15 aa, Homo sapiens
  CDR3 for alpha chain variable domain of TCR clone 62100 (TRAV38-1, TRAJ37)
CAFIHGSGNTGKLIF

SEQ ID NO: 124200 - protein, 12 aa, Homo sapiens
  CDR3 for beta chain variable domain of TCR clone 62100 (TRBV7-9, TRBJ2-7)
CASSFGSYEHYF

SEQ ID NO: 124201 - protein, 19 aa, Homo sapiens
  CDR3 for alpha chain variable domain of TCR clone 62101 (TRAV1-2, TRAJ26)
CLLPLCCERPDNCGQNFVF

SEQ ID NO: 124202 - protein, 15 aa, Homo sapiens
  CDR3 for beta chain variable domain of TCR clone 62101 (TRBV9, TRBJ1-6)
CASSVAGTGDSPLHF

SEQ ID NO: 124203 - protein, 15 aa, Homo sapiens
  CDR3 for alpha chain variable domain of TCR clone 62102 (TRAV20, TRAJ54)
CAVQARIQGAQKLVF

SEQ ID NO: 124204 - protein, 17 aa, Homo sapiens
  CDR3 for beta chain variable domain of TCR clone 62102 (TRBV4-2, TRBJ2-1)
CASSQVSGLAMNNEQFF

SEQ ID NO: 124205 - protein, 14 aa, Homo sapiens
  CDR3 for alpha chain variable domain of TCR clone 62103 (TRAV13-1, TRAJ9)
CAASALTGGFKTIF

SEQ ID NO: 124206 - protein, 16 aa, Homo sapiens
  CDR3 for beta chain variable domain of TCR clone 62103 (TRBV7-8, TRBJ2-4)
CASSVERTLAKNIQYF

SEQ ID NO: 124207 - protein, 13 aa, Homo sapiens
  CDR3 for alpha chain variable domain of TCR clone 62104 (TRAV27, TRAJ23)
CAGAGNQGGKLIF

SEQ ID NO: 124208 - protein, 13 aa, Homo sapiens
  CDR3 for beta chain variable domain of TCR clone 62104 (TRBV10-3, TRBJ2-7)
CASKLAVNYEQYF

SEQ ID NO: 124209 - protein, 15 aa, Homo sapiens
  CDR3 for alpha chain variable domain of TCR clone 62105 (TRAV27, TRAJ38)
CAGRFNAGNDRKLIW

SEQ ID NO: 124210 - protein, 13 aa, Homo sapiens
  CDR3 for beta chain variable domain of TCR clone 62105 (TRBV12-5, TRBJ2-3)
CASQNRGTDTQYF

SEQ ID NO: 124211 - protein, 15 aa, Homo sapiens
  CDR3 for alpha chain variable domain of TCR clone 62106 (TRAV21, TRAJ24)
CAARSSTDSWVKLQF

SEQ ID NO: 124212 - protein, 15 aa, Homo sapiens
  CDR3 for beta chain variable domain of TCR clone 62106 (TRBV5-1, TRBJ2-1)
CASSPPRAPYNEQFF

SEQ ID NO: 124213 - protein, 12 aa, Homo sapiens
  CDR3 for alpha chain variable domain of TCR clone 62107 (TRAV16, TRAJ10)
CSRTGGGNKLTF

SEQ ID NO: 124214 - protein, 14 aa, Homo sapiens
  CDR3 for beta chain variable domain of TCR clone 62107 (TRBV7-8, TRBJ2-3)
CASSLEAGTDTQYF

SEQ ID NO: 124215 - protein, 14 aa, Homo sapiens
  CDR3 for alpha chain variable domain of TCR clone 62108 (TRAV3, TRAJ40)
CAVRDRRGTYKYIF

SEQ ID NO: 124216 - protein, 15 aa, Homo sapiens
  CDR3 for beta chain variable domain of TCR clone 62108 (TRBV11-1, TRBJ1-3)
CASTDPRAFGKTIYF

SEQ ID NO: 124217 - protein, 17 aa, Homo sapiens
  CDR3 for alpha chain variable domain of TCR clone 62109 (TRAV3, TRAJ6)
CAVRDSPRAGGSYIPTF

SEQ ID NO: 124218 - protein, 20 aa, Homo sapiens
  CDR3 for beta chain variable domain of TCR clone 62109 (TRBV28, TRBJ2-1)
CASTPTGRSPGLAGGNEQFF

SEQ ID NO: 124219 - protein, 11 aa, Homo sapiens
  CDR3 for alpha chain variable domain of TCR clone 62110 (TRAV17, TRAJ9)
CATTGGFKTIF

SEQ ID NO: 124220 - protein, 13 aa, Homo sapiens
  CDR3 for beta chain variable domain of TCR clone 62110 (TRBV5-1, TRBJ1-2)
CASSFQDGYGYTF

SEQ ID NO: 124221 - protein, 16 aa, Homo sapiens
  CDR3 for alpha chain variable domain of TCR clone 62111 (TRAV35, TRAJ37)
CWAFLRDSSNTGKLIF

SEQ ID NO: 124222 - protein, 13 aa, Homo sapiens
  CDR3 for beta chain variable domain of TCR clone 62111 (TRBV2, TRBJ1-2)
CASSVRGNYGYTF

SEQ ID NO: 124223 - protein, 14 aa, Homo sapiens
  CDR3 for alpha chain variable domain of TCR clone 62112 (TRAV12-1, TRAJ30)
CAPTGTNRDDKIIF

SEQ ID NO: 124224 - protein, 11 aa, Homo sapiens
  CDR3 for beta chain variable domain of TCR clone 62112 (TRBV4-1, TRBJ2-2)
CASEHTGELFF

SEQ ID NO: 124225 - protein, 11 aa, Homo sapiens
  CDR3 for alpha chain variable domain of TCR clone 62113 (TRAV1-2, TRAJ31)
CAVNNNARLMF

SEQ ID NO: 124226 - protein, 15 aa, Homo sapiens
  CDR3 for beta chain variable domain of TCR clone 62113 (TRBV28, TRBJ2-1)
CASSIIAGVRSEQFF

SEQ ID NO: 124227 - protein, 16 aa, Homo sapiens
  CDR3 for alpha chain variable domain of TCR clone 62114 (TRAV16, TRAJ42)
CARKMNYGGSQGNLIF

SEQ ID NO: 124228 - protein, 16 aa, Homo sapiens
  CDR3 for beta chain variable domain of TCR clone 62114 (TRBV11-2, TRBJ2-3)
CASSSRTSGGAGTQYF

SEQ ID NO: 124229 - protein, 14 aa, Homo sapiens
  CDR3 for alpha chain variable domain of TCR clone 62115 (TRAV8-4, TRAJ9)
CAVRINTEGFKTIF

SEQ ID NO: 124230 - protein, 15 aa, Homo sapiens
  CDR3 for beta chain variable domain of TCR clone 62115 (TRBV10-2, TRBJ2-6)
CASSEQGTGANVLTF

SEQ ID NO: 124231 - protein, 12 aa, Homo sapiens
  CDR3 for alpha chain variable domain of TCR clone 62116 (TRAV13-2, TRAJ23)
FAERHRGGKLIF

SEQ ID NO: 124232 - protein, 15 aa, Homo sapiens
  CDR3 for beta chain variable domain of TCR clone 62116 (TRBV19, TRBJ1-2)
CASSVGQVLNYGYTF

SEQ ID NO: 124233 - protein, 13 aa, Homo sapiens
  CDR3 for alpha chain variable domain of TCR clone 62117 (TRAV8-6, TRAJ9)
CAVWDTGGFKTIF

SEQ ID NO: 124234 - protein, 11 aa, Homo sapiens
  CDR3 for beta chain variable domain of TCR clone 62117 (TRBV19, TRBJ1-1)
CASSIGSEAFF

SEQ ID NO: 124235 - protein, 16 aa, Homo sapiens
  CDR3 for alpha chain variable domain of TCR clone 62118 (TRAV13-1, TRAJ22)
YAAKGGRSGSARQLTF

SEQ ID NO: 124236 - protein, 15 aa, Homo sapiens
  CDR3 for beta chain variable domain of TCR clone 62118 (TRBV9, TRBJ1-6)
CASSVAGTGDSPLHF

SEQ ID NO: 124237 - protein, 13 aa, Homo sapiens
  CDR3 for alpha chain variable domain of TCR clone 62119 (TRAV8-3, TRAJ4)
WVFYSGGYNKLIF

SEQ ID NO: 124238 - protein, 14 aa, Homo sapiens
  CDR3 for beta chain variable domain of TCR clone 62119 (TRBV7-9, TRBJ2-3)
CASSLEDGTDTQYS

SEQ ID NO: 124239 - protein, 13 aa, Homo sapiens
  CDR3 for alpha chain variable domain of TCR clone 62120 (TRAV21, TRAJ57)
CAVIEGGSEKLVF

SEQ ID NO: 124240 - protein, 15 aa, Homo sapiens
  CDR3 for beta chain variable domain of TCR clone 62120 (TRBV10-3, TRBJ2-5)
CAISEFSRGQETQYF

SEQ ID NO: 124241 - protein, 13 aa, Homo sapiens
  CDR3 for alpha chain variable domain of TCR clone 62121 (TRAV21, TRAJ20)
CAVGLRVDYKLSF

SEQ ID NO: 124242 - protein, 14 aa, Homo sapiens
  CDR3 for beta chain variable domain of TCR clone 62121 (TRBV2, TRBJ1-1)
CASRSGTMNTEAFF

SEQ ID NO: 124243 - protein, 16 aa, Homo sapiens
  CDR3 for alpha chain variable domain of TCR clone 62122 (TRAV30, TRAJ24)
CGTEIVDADSWGKFQF

SEQ ID NO: 124244 - protein, 16 aa, Homo sapiens
  CDR3 for beta chain variable domain of TCR clone 62122 (TRBV12-4, TRBJ2-1)
CASTLRLTRSYNEQFF

SEQ ID NO: 124245 - protein, 14 aa, Homo sapiens
  CDR3 for alpha chain variable domain of TCR clone 62123 (TRAV12-1, TRAJ12)
CVVTRMDSSYKLIF

SEQ ID NO: 124246 - protein, 14 aa, Homo sapiens
  CDR3 for beta chain variable domain of TCR clone 62123 (TRBV2, TRBJ2-7)
CASSLTSGGYEQYF

SEQ ID NO: 124247 - protein, 16 aa, Homo sapiens
  CDR3 for alpha chain variable domain of TCR clone 62124 (TRAV8-3, TRAJ44)
CAVGASNTGTASKLTF

SEQ ID NO: 124248 - protein, 16 aa, Homo sapiens
  CDR3 for beta chain variable domain of TCR clone 62124 (TRBV12-5, TRBJ2-5)
CASGPRTSGNQETQYF

SEQ ID NO: 124249 - protein, 14 aa, Homo sapiens
  CDR3 for alpha chain variable domain of TCR clone 62125 (TRAV12-2, TRAJ13)
CAVKKTGGYQKVTF

SEQ ID NO: 124250 - protein, 10 aa, Homo sapiens
  CDR3 for beta chain variable domain of TCR clone 62125 (TRBV28, TRBJ1-2)
CASSQFGYTF

SEQ ID NO: 124251 - protein, 17 aa, Homo sapiens
  CDR3 for alpha chain variable domain of TCR clone 62126 (TRAV3, TRAJ6)
CAVRDGPRAGGRYIPTF

SEQ ID NO: 124252 - protein, 19 aa, Homo sapiens
  CDR3 for beta chain variable domain of TCR clone 62126 (TRBV25-1, TRBJ2-2)
CAILVYRVDRGRKTGELFF

SEQ ID NO: 124253 - protein, 14 aa, Homo sapiens
  CDR3 for alpha chain variable domain of TCR clone 62127 (TRAV26-1, TRAJ21)
CIVRPPYNFNKFYF

SEQ ID NO: 124254 - protein, 14 aa, Homo sapiens
  CDR3 for beta chain variable domain of TCR clone 62127 (TRBV5-1, TRBJ2-7)
CASSRGESLYEQYF

SEQ ID NO: 124255 - protein, 16 aa, Homo sapiens
  CDR3 for alpha chain variable domain of TCR clone 62128 (TRAV8-3, TRAJ13)
CAVGAEVSGGYQNVTF

SEQ ID NO: 124256 - protein, 13 aa, Homo sapiens
  CDR3 for beta chain variable domain of TCR clone 62128 (TRBV7-2, TRBJ2-2)
CASSLAVTGELFF

SEQ ID NO: 124257 - protein, 18 aa, Homo sapiens
  CDR3 for alpha chain variable domain of TCR clone 62129 (TRAV26-2, TRAJ45)
CILRLWGYSGGGADGLTF

SEQ ID NO: 124258 - protein, 17 aa, Homo sapiens
  CDR3 for beta chain variable domain of TCR clone 62129 (TRBV28, TRBJ2-3)
CASSPTPAGVRVDTQYF

SEQ ID NO: 124259 - protein, 13 aa, Homo sapiens
  CDR3 for alpha chain variable domain of TCR clone 62130 (TRAV17, TRAJ40)
CAGALGGTYKYIF

SEQ ID NO: 124260 - protein, 16 aa, Homo sapiens
  CDR3 for beta chain variable domain of TCR clone 62130 (TRBV7-2, TRBJ1-4)
CACSLAPGRRDEKLFF

SEQ ID NO: 124261 - protein, 14 aa, Homo sapiens
  CDR3 for alpha chain variable domain of TCR clone 62131 (TRAV38-1, TRAJ40)
CALRPTSGTYKYIL

SEQ ID NO: 124262 - protein, 14 aa, Homo sapiens
  CDR3 for beta chain variable domain of TCR clone 62131 (TRBV7-2, TRBJ2-5)
CASSTGGELKTQYF

SEQ ID NO: 124263 - protein, 13 aa, Homo sapiens
  CDR3 for alpha chain variable domain of TCR clone 62132 (TRAV12-3, TRAJ13)
CAMGTGGYQKVTF

SEQ ID NO: 124264 - protein, 14 aa, Homo sapiens
  CDR3 for beta chain variable domain of TCR clone 62132 (TRBV7-2, TRBJ2-5)
CASSTGGELKTQYL

SEQ ID NO: 124265 - protein, 14 aa, Homo sapiens
  CDR3 for alpha chain variable domain of TCR clone 62133 (TRAV3, TRAJ20)
CCERHKLSDYKLSF

SEQ ID NO: 124266 - protein, 15 aa, Homo sapiens
  CDR3 for beta chain variable domain of TCR clone 62133 (TRBV7-9, TRBJ1-6)
CASSSPGRGNSPLHF

SEQ ID NO: 124267 - protein, 17 aa, Homo sapiens
  CDR3 for alpha chain variable domain of TCR clone 62134 (TRAV8-4, TRAJ53)
CAVSGPRREGSNYKLTF

SEQ ID NO: 124268 - protein, 14 aa, Homo sapiens
  CDR3 for beta chain variable domain of TCR clone 62134 (TRBV7-3, TRBJ2-1)
CASSALAGGPEQFF

SEQ ID NO: 124269 - protein, 15 aa, Homo sapiens
  CDR3 for alpha chain variable domain of TCR clone 62135 (TRAV8-2, TRAJ13)
CVVSDLSGGYQKVTF

SEQ ID NO: 124270 - protein, 14 aa, Homo sapiens
  CDR3 for beta chain variable domain of TCR clone 62135 (TRBV7-6, TRBJ2-3)
CASNSGGDANTQYF

SEQ ID NO: 124271 - protein, 13 aa, Homo sapiens
  CDR3 for alpha chain variable domain of TCR clone 62136 (TRAV4, TRAJ33)
CLVGDMNNYQLIW

SEQ ID NO: 124272 - protein, 13 aa, Homo sapiens
  CDR3 for beta chain variable domain of TCR clone 62136 (TRBV4-2, TRBJ1-1)
CASSQAGNTEAFF

SEQ ID NO: 124273 - protein, 20 aa, Homo sapiens
  CDR3 for alpha chain variable domain of TCR clone 62137 (TRAV26-1, TRAJ42)
CCVLLHRQTYYGGSQGNLIF

SEQ ID NO: 124274 - protein, 16 aa, Homo sapiens
  CDR3 for beta chain variable domain of TCR clone 62137 (TRBV7-3, TRBJ2-2)
CASSLKRGNLSGELFF

SEQ ID NO: 124275 - protein, 11 aa, Homo sapiens
  CDR3 for alpha chain variable domain of TCR clone 62138 (TRAV1-1, TRAJ23)
CAVRQGGKLIF

SEQ ID NO: 124276 - protein, 20 aa, Homo sapiens
  CDR3 for beta chain variable domain of TCR clone 62138 (TRBV7-8, TRBJ2-2)
CASSHLFPGPTIHMTGELFF

SEQ ID NO: 124277 - protein, 14 aa, Homo sapiens
  CDR3 for alpha chain variable domain of TCR clone 62139 (TRAV13-1, TRAJ9)
CAASALTGGFKTIF

SEQ ID NO: 124278 - protein, 13 aa, Homo sapiens
  CDR3 for beta chain variable domain of TCR clone 62139 (TRBV20-1, TRBJ1-1)
CSAGTVGNNEAFF

SEQ ID NO: 124279 - protein, 14 aa, Homo sapiens
  CDR3 for alpha chain variable domain of TCR clone 62140 (TRAV2, TRAJ9)
CAVEDRSGGFKTIF

SEQ ID NO: 124280 - protein, 16 aa, Homo sapiens
  CDR3 for beta chain variable domain of TCR clone 62140 (TRBV2, TRBJ2-3)
CASSTSVEGVTDTQYF

SEQ ID NO: 124281 - protein, 12 aa, Homo sapiens
  CDR3 for alpha chain variable domain of TCR clone 62141 (TRAV13-1, TRAJ49)
CAASPMGNQFYF

SEQ ID NO: 124282 - protein, 18 aa, Homo sapiens
  CDR3 for beta chain variable domain of TCR clone 62141 (TRBV25-1, TRBJ1-2)
CASSGLQNGQGLIFGYTF

SEQ ID NO: 124283 - protein, 10 aa, Homo sapiens
  CDR3 for alpha chain variable domain of TCR clone 62142 (TRAV27, TRAJ37)
CAGGVGRLIF

SEQ ID NO: 124284 - protein, 13 aa, Homo sapiens
  CDR3 for beta chain variable domain of TCR clone 62142 (TRBV27, TRBJ1-2)
CASSRGLVYGYTF

SEQ ID NO: 124285 - protein, 15 aa, Homo sapiens
  CDR3 for alpha chain variable domain of TCR clone 62143 (TRAV12-1, TRAJ44)
CVVFVNAGTASKLTF

SEQ ID NO: 124286 - protein, 17 aa, Homo sapiens
  CDR3 for beta chain variable domain of TCR clone 62143 (TRBV7-8, TRBJ2-6)
CANSAGTGGAGANVLTF

SEQ ID NO: 124287 - protein, 15 aa, Homo sapiens
  CDR3 for alpha chain variable domain of TCR clone 62144 (TRAV12-1, TRAJ44)
CVVFVNTGTDSKLTF

SEQ ID NO: 124288 - protein, 17 aa, Homo sapiens
  CDR3 for beta chain variable domain of TCR clone 62144 (TRBV7-8, TRBJ2-6)
CASSAGTGGAGANVLTF

SEQ ID NO: 124289 - protein, 14 aa, Homo sapiens
  CDR3 for alpha chain variable domain of TCR clone 62145 (TRAV26-1, TRAJ38)
CIADNAGNNRKLIW

SEQ ID NO: 124290 - protein, 13 aa, Homo sapiens
  CDR3 for beta chain variable domain of TCR clone 62145 (TRBV28, TRBJ2-5)
CASSFAGGETQYF

SEQ ID NO: 124291 - protein, 14 aa, Homo sapiens
  CDR3 for alpha chain variable domain of TCR clone 62146 (TRAV13-1, TRAJ44)
CAAKATGTASKLTF

SEQ ID NO: 124292 - protein, 16 aa, Homo sapiens
  CDR3 for beta chain variable domain of TCR clone 62146 (TRBV15, TRBJ1-2)
CATSRGPRTGVGGYTF

SEQ ID NO: 124293 - protein, 14 aa, Homo sapiens
  CDR3 for alpha chain variable domain of TCR clone 62147 (TRAV12-2, TRAJ9)
CSVNMEGGGFKTIF

SEQ ID NO: 124294 - protein, 14 aa, Homo sapiens
  CDR3 for beta chain variable domain of TCR clone 62147 (TRBV2, TRBJ2-5)
CASSEVLAQETQYF

SEQ ID NO: 124295 - protein, 15 aa, Homo sapiens
  CDR3 for alpha chain variable domain of TCR clone 62148 (TRAV35, TRAJ58)
CAGRRQEASGSRLTF

SEQ ID NO: 124296 - protein, 16 aa, Homo sapiens
  CDR3 for beta chain variable domain of TCR clone 62148 (TRBV2, TRBJ2-1)
CASSVGGSLSYNEQFF

SEQ ID NO: 124297 - protein, 15 aa, Homo sapiens
  CDR3 for alpha chain variable domain of TCR clone 62149 (TRAV17, TRAJ20)
CATDGGGSNDYKLSF

SEQ ID NO: 124298 - protein, 17 aa, Homo sapiens
  CDR3 for beta chain variable domain of TCR clone 62149 (TRBV13, TRBJ2-3)
CASSLSRVAGGRNTQYF

SEQ ID NO: 124299 - protein, 16 aa, Homo sapiens
  CDR3 for alpha chain variable domain of TCR clone 62150 (TRAV3, TRAJ21)
CAVRDIERGNFTKFYF

SEQ ID NO: 124300 - protein, 13 aa, Homo sapiens
  CDR3 for beta chain variable domain of TCR clone 62150 (TRBV27, TRBJ2-7)
CASSLTTGYEQYF

SEQ ID NO: 124301 - protein, 12 aa, Homo sapiens
  CDR3 for alpha chain variable domain of TCR clone 62151 (TRAV25, TRAJ48)
CAGAFGNEKLTF

SEQ ID NO: 124302 - protein, 12 aa, Homo sapiens
  CDR3 for beta chain variable domain of TCR clone 62151 (TRBV2, TRBJ2-5)
CASKEYGETQYF

SEQ ID NO: 124303 - protein, 13 aa, Homo sapiens
  CDR3 for alpha chain variable domain of TCR clone 62152 (TRAV13-1, TRAJ37)
CAARSGNTGKLIF

SEQ ID NO: 124304 - protein, 14 aa, Homo sapiens
  CDR3 for beta chain variable domain of TCR clone 62152 (TRBV12-4, TRBJ2-3)
FASSLGQGTDTQYF

SEQ ID NO: 124305 - protein, 13 aa, Homo sapiens
  CDR3 for alpha chain variable domain of TCR clone 62153 (TRAV22, TRAJ29)
CAVGGSGNTPLVF

SEQ ID NO: 124306 - protein, 13 aa, Homo sapiens
  CDR3 for beta chain variable domain of TCR clone 62153 (TRBV4-2, TRBJ1-1)
CASSQAGNTEDFF

SEQ ID NO: 124307 - protein, 12 aa, Homo sapiens
  CDR3 for alpha chain variable domain of TCR clone 62154 (TRAV13-1, TRAJ48)
CAANFGNEKLTF

SEQ ID NO: 124308 - protein, 13 aa, Homo sapiens
  CDR3 for beta chain variable domain of TCR clone 62154 (TRBV7-3, TRBJ1-1)
CASSLDWGAEAFF

SEQ ID NO: 124309 - protein, 14 aa, Homo sapiens
  CDR3 for alpha chain variable domain of TCR clone 62155 (TRAV1-2, TRAJ16)
CAVNRFSDGQKLLF

SEQ ID NO: 124310 - protein, 14 aa, Homo sapiens
  CDR3 for beta chain variable domain of TCR clone 62155 (TRBV7-6, TRBJ1-6)
CASSQAGGGSPLHF

SEQ ID NO: 124311 - protein, 14 aa, Homo sapiens
  CDR3 for alpha chain variable domain of TCR clone 62156 (TRAV1-2, TRAJ17)
CAPLPRAAGNKLTF

SEQ ID NO: 124312 - protein, 13 aa, Homo sapiens
  CDR3 for beta chain variable domain of TCR clone 62156 (TRBV20-1, TRBJ2-1)
CSASGPTYSEQFS

SEQ ID NO: 124313 - protein, 15 aa, Homo sapiens
  CDR3 for alpha chain variable domain of TCR clone 62157 (TRAV8-2, TRAJ40)
CVVLGTTSGTYKYIF

SEQ ID NO: 124314 - protein, 16 aa, Homo sapiens
  CDR3 for beta chain variable domain of TCR clone 62157 (TRBV7-3, TRBJ2-1)
CASSLEGYRSYNEQFL

SEQ ID NO: 124315 - protein, 17 aa, Homo sapiens
  CDR3 for alpha chain variable domain of TCR clone 62158 (TRAV3, TRAJ12)
CAVRDGGRMDSSYKLIF

SEQ ID NO: 124316 - protein, 16 aa, Homo sapiens
  CDR3 for beta chain variable domain of TCR clone 62158 (TRBV13, TRBJ2-2)
CASSPRTGEHTGELFF

SEQ ID NO: 124317 - protein, 12 aa, Homo sapiens
  CDR3 for alpha chain variable domain of TCR clone 62159 (TRAV27, TRAJ13)
CAGAGGYQEVTF

SEQ ID NO: 124318 - protein, 15 aa, Homo sapiens
  CDR3 for beta chain variable domain of TCR clone 62159 (TRBV20-1, TRBJ2-6)
CSARDRGPGANVLTF

SEQ ID NO: 124319 - protein, 11 aa, Homo sapiens
  CDR3 for alpha chain variable domain of TCR clone 62160 (TRAV3, TRAJ21)
CAVGNFNKFYS

SEQ ID NO: 124320 - protein, 16 aa, Homo sapiens
  CDR3 for beta chain variable domain of TCR clone 62160 (TRBV19, TRBJ2-1)
CANSKAGPSSYNEQFF

SEQ ID NO: 124321 - protein, 14 aa, Homo sapiens
  CDR3 for alpha chain variable domain of TCR clone 62161 (TRAV38-1, TRAJ57)
CAFMNTGGSEKLGF

SEQ ID NO: 124322 - protein, 12 aa, Homo sapiens
  CDR3 for beta chain variable domain of TCR clone 62161 (TRBV20-1, TRBJ1-5)
CSTSQGNQPQHF

SEQ ID NO: 124323 - protein, 14 aa, Homo sapiens
  CDR3 for alpha chain variable domain of TCR clone 62162 (TRAV23/DV6, TRAJ22)
CAARVSGSARQLTF

SEQ ID NO: 124324 - protein, 16 aa, Homo sapiens
  CDR3 for beta chain variable domain of TCR clone 62162 (TRBV19, TRBJ2-2)
CASSFPGQGLAGELFF

SEQ ID NO: 124325 - protein, 14 aa, Homo sapiens
  CDR3 for alpha chain variable domain of TCR clone 62163 (TRAV2, TRAJ11)
CAVVPNSGYSTLTF

SEQ ID NO: 124326 - protein, 15 aa, Homo sapiens
  CDR3 for beta chain variable domain of TCR clone 62163 (TRBV4-1, TRBJ1-3)
CASSQDLRVGNTIYS

SEQ ID NO: 124327 - protein, 12 aa, Homo sapiens
  CDR3 for alpha chain variable domain of TCR clone 62164 (TRAV21, TRAJ58)
CALSASGSRLTF

SEQ ID NO: 124328 - protein, 13 aa, Homo sapiens
  CDR3 for beta chain variable domain of TCR clone 62164 (TRBV5-7, TRBJ1-2)
CASSLGVFNGYAF

SEQ ID NO: 124329 - protein, 13 aa, Homo sapiens
  CDR3 for alpha chain variable domain of TCR clone 62165 (TRAV23/DV6, TRAJ22)
CAPYSGSARQLTF

SEQ ID NO: 124330 - protein, 15 aa, Homo sapiens
  CDR3 for beta chain variable domain of TCR clone 62165 (TRBV11-2, TRBJ1-6)
CASSLDPWAVSPHHF

SEQ ID NO: 124331 - protein, 14 aa, Homo sapiens
  CDR3 for alpha chain variable domain of TCR clone 62166 (TRAV12-2, TRAJ44)
CAVNPAGTASKLTC

SEQ ID NO: 124332 - protein, 13 aa, Homo sapiens
  CDR3 for beta chain variable domain of TCR clone 62166 (TRBV20-1, TRBJ1-6)
CSAPLGVGSPLHF

SEQ ID NO: 124333 - protein, 14 aa, Homo sapiens
  CDR3 for alpha chain variable domain of TCR clone 62167 (TRAV12-3, TRAJ10)
SHLPLTGGGNKLTF

SEQ ID NO: 124334 - protein, 16 aa, Homo sapiens
  CDR3 for beta chain variable domain of TCR clone 62167 (TRBV19, TRBJ1-1)
CASSPTRFWPGTEAFF

SEQ ID NO: 124335 - protein, 12 aa, Homo sapiens
  CDR3 for alpha chain variable domain of TCR clone 62168 (TRAV29/DV5, TRAJ41)
CAAISSGYALNF

SEQ ID NO: 124336 - protein, 17 aa, Homo sapiens
  CDR3 for beta chain variable domain of TCR clone 62168 (TRBV18, TRBJ2-1)
CANSKGLSGGADNEQFF

SEQ ID NO: 124337 - protein, 13 aa, Homo sapiens
  CDR3 for alpha chain variable domain of TCR clone 62169 (TRAV13-1, TRAJ21)
CAASLYNFNKFYF

SEQ ID NO: 124338 - protein, 13 aa, Homo sapiens
  CDR3 for beta chain variable domain of TCR clone 62169 (TRBV27, TRBJ1-4)
CASSLMGDEKLFF

SEQ ID NO: 124339 - protein, 14 aa, Homo sapiens
  CDR3 for alpha chain variable domain of TCR clone 62170 (TRAV12-2, TRAJ44)
CAVNPAGTASKLTF

SEQ ID NO: 124340 - protein, 13 aa, Homo sapiens
  CDR3 for beta chain variable domain of TCR clone 62170 (TRBV20-1, TRBJ1-6)
CSAPLGVGSLLHF

SEQ ID NO: 124341 - protein, 16 aa, Homo sapiens
  CDR3 for alpha chain variable domain of TCR clone 62171 (TRAV12-2, TRAJ52)
CRLANAGGTSYGKLTF

SEQ ID NO: 124342 - protein, 17 aa, Homo sapiens
  CDR3 for beta chain variable domain of TCR clone 62171 (TRBV11-2, TRBJ2-1)
CASSLYPPGVEYNEQFF

SEQ ID NO: 124343 - protein, 13 aa, Homo sapiens
  CDR3 for alpha chain variable domain of TCR clone 62172 (TRAV13-2, TRAJ57)
CAESEGGSEKLVF

SEQ ID NO: 124344 - protein, 14 aa, Homo sapiens
  CDR3 for beta chain variable domain of TCR clone 62172 (TRBV20-1, TRBJ1-2)
CSANPPPGRYGYTF

SEQ ID NO: 124345 - protein, 14 aa, Homo sapiens
  CDR3 for alpha chain variable domain of TCR clone 62173 (TRAV12-2, TRAJ6)
CASKWGGGSYIPTF

SEQ ID NO: 124346 - protein, 15 aa, Homo sapiens
  CDR3 for beta chain variable domain of TCR clone 62173 (TRBV19, TRBJ1-6)
CASSTQGAVGSPLHF

SEQ ID NO: 124347 - protein, 14 aa, Homo sapiens
  CDR3 for alpha chain variable domain of TCR clone 62174 (TRAV38-1, TRAJ45)
CAYYSGGGADGLTF

SEQ ID NO: 124348 - protein, 13 aa, Homo sapiens
  CDR3 for beta chain variable domain of TCR clone 62174 (TRBV7-3, TRBJ1-1)
CASSQDWGAEAFF

SEQ ID NO: 124349 - protein, 14 aa, Homo sapiens
  CDR3 for alpha chain variable domain of TCR clone 62175 (TRAV8-6, TRAJ9)
CAVSSYTGGFKTIF

SEQ ID NO: 124350 - protein, 19 aa, Homo sapiens
  CDR3 for beta chain variable domain of TCR clone 62175 (TRBV28, TRBJ2-1)
CASSFSIRGSGRTRYEQFF

SEQ ID NO: 124351 - protein, 15 aa, Homo sapiens
  CDR3 for alpha chain variable domain of TCR clone 62176 (TRAV8-2, TRAJ40)
CVVLGTTSGTYKYVF

SEQ ID NO: 124352 - protein, 16 aa, Homo sapiens
  CDR3 for beta chain variable domain of TCR clone 62176 (TRBV7-3, TRBJ2-1)
CASSLEGYRSYNEQFF

SEQ ID NO: 124353 - protein, 21 aa, Homo sapiens
  CDR3 for alpha chain variable domain of TCR clone 62177 (TRAV8-3, TRAJ10)
CAVGHTHGRRKQTRLWDRHSA

SEQ ID NO: 124354 - protein, 10 aa, Homo sapiens
  CDR3 for beta chain variable domain of TCR clone 62177 (TRBV20-1, TRBJ2-5)
CSARFETQYF

SEQ ID NO: 124355 - protein, 12 aa, Homo sapiens
  CDR3 for alpha chain variable domain of TCR clone 62178 (TRAV12-3, TRAJ17)
CAMTLTGNKLTF

SEQ ID NO: 124356 - protein, 15 aa, Homo sapiens
  CDR3 for beta chain variable domain of TCR clone 62178 (TRBV20-1, TRBJ2-7)
CSARDWVSGTDEQYF

SEQ ID NO: 124357 - protein, 16 aa, Homo sapiens
  CDR3 for alpha chain variable domain of TCR clone 62179 (TRAV27, TRAJ52)
CAGTPAGGTSYGKLTF

SEQ ID NO: 124358 - protein, 12 aa, Homo sapiens
  CDR3 for beta chain variable domain of TCR clone 62179 (TRBV27, TRBJ2-1)
CASRGFYNEQFF

SEQ ID NO: 124359 - protein, 18 aa, Homo sapiens
  CDR3 for alpha chain variable domain of TCR clone 62180 (TRAV9-2, TRAJ52)
CALSRHNAGGTSYGKLTF

SEQ ID NO: 124360 - protein, 15 aa, Homo sapiens
  CDR3 for beta chain variable domain of TCR clone 62180 (TRBV2, TRBJ2-5)
CASRIAGVGGETQYF

SEQ ID NO: 124361 - protein, 17 aa, Homo sapiens
  CDR3 for alpha chain variable domain of TCR clone 62181 (TRAV26-1, TRAJ28)
CIVRLAYSGAGSYQLTF

SEQ ID NO: 124362 - protein, 15 aa, Homo sapiens
  CDR3 for beta chain variable domain of TCR clone 62181 (TRBV9, TRBJ1-6)
CASSVAGTGDSPLHF

SEQ ID NO: 124363 - protein, 13 aa, Homo sapiens
  CDR3 for alpha chain variable domain of TCR clone 62182 (TRAV8-3, TRAJ44)
CAVVPGAASKLTF

SEQ ID NO: 124364 - protein, 14 aa, Homo sapiens
  CDR3 for beta chain variable domain of TCR clone 62182 (TRBV11-2, TRBJ2-3)
CASSRLARTDTQYF

SEQ ID NO: 124365 - protein, 14 aa, Homo sapiens
  CDR3 for alpha chain variable domain of TCR clone 62183 (TRAV12-3, TRAJ10)
SHLPLTGGGNKLTF

SEQ ID NO: 124366 - protein, 15 aa, Homo sapiens
  CDR3 for beta chain variable domain of TCR clone 62183 (TRBV13, TRBJ2-1)
CASSLLSGLSNEQFF

SEQ ID NO: 124367 - protein, 14 aa, Homo sapiens
  CDR3 for alpha chain variable domain of TCR clone 62184 (TRAV12-2, TRAJ13)
CAVKKTGGYQKVTF

SEQ ID NO: 124368 - protein, 15 aa, Homo sapiens
  CDR3 for beta chain variable domain of TCR clone 62184 (TRBV4-3, TRBJ2-1)
CASSQTGGALNEQFF

SEQ ID NO: 124369 - protein, 15 aa, Homo sapiens
  CDR3 for alpha chain variable domain of TCR clone 62185 (TRAV3, TRAJ22)
CAVRDRGGSARQLTF

SEQ ID NO: 124370 - protein, 12 aa, Homo sapiens
  CDR3 for beta chain variable domain of TCR clone 62185 (TRBV12-4, TRBJ1-2)
CASSFIWLDLRF

SEQ ID NO: 124371 - protein, 14 aa, Homo sapiens
  CDR3 for alpha chain variable domain of TCR clone 62186 (TRAV1-2, TRAJ16)
CAVNRFSDGQKLLF

SEQ ID NO: 124372 - protein, 15 aa, Homo sapiens
  CDR3 for beta chain variable domain of TCR clone 62186 (TRBV29-1, TRBJ2-7)
RSVEFFDRGSYEQYF

SEQ ID NO: 124373 - protein, 13 aa, Homo sapiens
  CDR3 for alpha chain variable domain of TCR clone 62187 (TRAV12-1, TRAJ43)
CVVSHHNNNDIRF

SEQ ID NO: 124374 - protein, 14 aa, Homo sapiens
  CDR3 for beta chain variable domain of TCR clone 62187 (TRBV5-5, TRBJ2-2)
CASSLLGDTGELFF

SEQ ID NO: 124375 - protein, 13 aa, Homo sapiens
  CDR3 for alpha chain variable domain of TCR clone 62188 (TRAV3, TRAJ30)
CAVRDRGDDKIIF

SEQ ID NO: 124376 - protein, 13 aa, Homo sapiens
  CDR3 for beta chain variable domain of TCR clone 62188 (TRBV19, TRBJ1-2)
CASSVPGQDGYTF

SEQ ID NO: 124377 - protein, 13 aa, Homo sapiens
  CDR3 for alpha chain variable domain of TCR clone 62189 (TRAV12-1, TRAJ29)
CVVRNSGNTPLVF

SEQ ID NO: 124378 - protein, 14 aa, Homo sapiens
  CDR3 for beta chain variable domain of TCR clone 62189 (TRBV7-2, TRBJ2-7)
CASRPQGAAYEQYF

SEQ ID NO: 124379 - protein, 12 aa, Homo sapiens
  CDR3 for alpha chain variable domain of TCR clone 62190 (TRAV2, TRAJ37)
CAVTMNTGKLIF

SEQ ID NO: 124380 - protein, 15 aa, Homo sapiens
  CDR3 for beta chain variable domain of TCR clone 62190 (TRBV5-1, TRBJ2-5)
CASSFGGPPQETQCF

SEQ ID NO: 124381 - protein, 13 aa, Homo sapiens
  CDR3 for alpha chain variable domain of TCR clone 62191 (TRAV13-1, TRAJ11)
CAAVLAGYSTLTF

SEQ ID NO: 124382 - protein, 17 aa, Homo sapiens
  CDR3 for beta chain variable domain of TCR clone 62191 (TRBV25-1, TRBJ2-7)
CASSDARVVFSSHEQYF

SEQ ID NO: 124383 - protein, 11 aa, Homo sapiens
  CDR3 for alpha chain variable domain of TCR clone 62192 (TRAV3, TRAJ21)
CAVGNFNKFYF

SEQ ID NO: 124384 - protein, 16 aa, Homo sapiens
  CDR3 for beta chain variable domain of TCR clone 62192 (TRBV4-1, TRBJ2-3)
CASSQSTSGAEDTQYF

SEQ ID NO: 124385 - protein, 12 aa, Homo sapiens
  CDR3 for alpha chain variable domain of TCR clone 62193 (TRAV17, TRAJ57)
CATDGGSEKLVF

SEQ ID NO: 124386 - protein, 15 aa, Homo sapiens
  CDR3 for beta chain variable domain of TCR clone 62193 (TRBV9, TRBJ1-6)
CASSVAGTGDSPLHF

SEQ ID NO: 124387 - protein, 12 aa, Homo sapiens
  CDR3 for alpha chain variable domain of TCR clone 62194 (TRAV12-3, TRAJ3)
CAIDSSASKIIF

SEQ ID NO: 124388 - protein, 17 aa, Homo sapiens
  CDR3 for beta chain variable domain of TCR clone 62194 (TRBV7-9, TRBJ2-3)
CASSLEEAGAYPDTHYF

SEQ ID NO: 124389 - protein, 14 aa, Homo sapiens
  CDR3 for alpha chain variable domain of TCR clone 62195 (TRAV1-2, TRAJ16)
CAVNRFSDGQKLLF

SEQ ID NO: 124390 - protein, 13 aa, Homo sapiens
  CDR3 for beta chain variable domain of TCR clone 62195 (TRBV12-4, TRBJ1-4)
CASAMGHNEKLFF

SEQ ID NO: 124391 - protein, 14 aa, Homo sapiens
  CDR3 for alpha chain variable domain of TCR clone 62196 (TRAV13-1, TRAJ40)
CAASMTSGTYNYIF

SEQ ID NO: 124392 - protein, 15 aa, Homo sapiens
  CDR3 for beta chain variable domain of TCR clone 62196 (TRBV7-3, TRBJ2-1)
CASSPTGGGEVEQFF

SEQ ID NO: 124393 - protein, 14 aa, Homo sapiens
  CDR3 for alpha chain variable domain of TCR clone 62197 (TRAV8-3, TRAJ4)
CAVGAAGGYNKLIF

SEQ ID NO: 124394 - protein, 15 aa, Homo sapiens
  CDR3 for beta chain variable domain of TCR clone 62197 (TRBV6-5, TRBJ2-1)
CASSYDAGADNEQFF

SEQ ID NO: 124395 - protein, 14 aa, Homo sapiens
  CDR3 for alpha chain variable domain of TCR clone 62198 (TRAV27, TRAJ36)
CAGPPKRGANNLFF

SEQ ID NO: 124396 - protein, 15 aa, Homo sapiens
  CDR3 for beta chain variable domain of TCR clone 62198 (TRBV18, TRBJ2-7)
CASSPASTLNYEQYF

SEQ ID NO: 124397 - protein, 13 aa, Homo sapiens
  CDR3 for alpha chain variable domain of TCR clone 62199 (TRAV36/DV7, TRAJ53)
CALSGGSNYKLKF

SEQ ID NO: 124398 - protein, 13 aa, Homo sapiens
  CDR3 for beta chain variable domain of TCR clone 62199 (TRBV28, TRBJ2-7)
CASSLPSRYEQYF

SEQ ID NO: 124399 - protein, 14 aa, Homo sapiens
  CDR3 for alpha chain variable domain of TCR clone 62200 (TRAV26-1, TRAJ21)
CIVRPQYNFNKFYF

SEQ ID NO: 124400 - protein, 14 aa, Homo sapiens
  CDR3 for beta chain variable domain of TCR clone 62200 (TRBV11-3, TRBJ2-1)
CASSATTSGSIQFF

SEQ ID NO: 124401 - protein, 12 aa, Homo sapiens
  CDR3 for alpha chain variable domain of TCR clone 62201 (TRAV25, TRAJ53)
CQSGGSNYKLTF

SEQ ID NO: 124402 - protein, 15 aa, Homo sapiens
  CDR3 for beta chain variable domain of TCR clone 62201 (TRBV5-1, TRBJ2-2)
CAISWTSPNTGELFF

SEQ ID NO: 124403 - protein, 14 aa, Homo sapiens
  CDR3 for alpha chain variable domain of TCR clone 62202 (TRAV4, TRAJ32)
CLVNYGGATNKLIF

SEQ ID NO: 124404 - protein, 14 aa, Homo sapiens
  CDR3 for beta chain variable domain of TCR clone 62202 (TRBV15, TRBJ2-5)
CATSGGTRTGTQYF

SEQ ID NO: 124405 - protein, 16 aa, Homo sapiens
  CDR3 for alpha chain variable domain of TCR clone 62203 (TRAV3, TRAJ37)
CAVRGKGSGNTGKLIF

SEQ ID NO: 124406 - protein, 16 aa, Homo sapiens
  CDR3 for beta chain variable domain of TCR clone 62203 (TRBV12-4, TRBJ1-5)
CASSRPVGGYNQPQHF

SEQ ID NO: 124407 - protein, 14 aa, Homo sapiens
  CDR3 for alpha chain variable domain of TCR clone 62204 (TRAV13-1, TRAJ44)
CAAKATGTASKLTF

SEQ ID NO: 124408 - protein, 16 aa, Homo sapiens
  CDR3 for beta chain variable domain of TCR clone 62204 (TRBV28, TRBJ1-5)
CASSLTGQGWNQPQHF

SEQ ID NO: 124409 - protein, 13 aa, Homo sapiens
  CDR3 for alpha chain variable domain of TCR clone 62205 (TRAV12-2, TRAJ20)
CAVYPSNYYKLSF

SEQ ID NO: 124410 - protein, 15 aa, Homo sapiens
  CDR3 for beta chain variable domain of TCR clone 62205 (TRBV27, TRBJ2-5)
CASSLYPRGGETQYF

SEQ ID NO: 124411 - protein, 12 aa, Homo sapiens
  CDR3 for alpha chain variable domain of TCR clone 62206 (TRAV4, TRAJ26)
CLVGDYGQNFVF

SEQ ID NO: 124412 - protein, 16 aa, Homo sapiens
  CDR3 for beta chain variable domain of TCR clone 62206 (TRBV7-2, TRBJ1-2)
CANSSNQDRRGHGYTF

SEQ ID NO: 124413 - protein, 14 aa, Homo sapiens
  CDR3 for alpha chain variable domain of TCR clone 62207 (TRAV26-2, TRAJ32)
CCVGYGGATNKLIF

SEQ ID NO: 124414 - protein, 14 aa, Homo sapiens
  CDR3 for beta chain variable domain of TCR clone 62207 (TRBV7-9, TRBJ2-1)
CASSPRDSLYEQFF

SEQ ID NO: 124415 - protein, 15 aa, Homo sapiens
  CDR3 for alpha chain variable domain of TCR clone 62208 (TRAV26-1, TRAJ3)
CIVRSGYSSASKIIF

SEQ ID NO: 124416 - protein, 14 aa, Homo sapiens
  CDR3 for beta chain variable domain of TCR clone 62208 (TRBV20-1, TRBJ1-3)
CSASPTGAGNTIYF

SEQ ID NO: 124417 - protein, 11 aa, Homo sapiens
  CDR3 for alpha chain variable domain of TCR clone 62209 (TRAV8-3, TRAJ4)
GAAGGYNKLIF

SEQ ID NO: 124418 - protein, 15 aa, Homo sapiens
  CDR3 for beta chain variable domain of TCR clone 62209 (TRBV6-5, TRBJ2-1)
CASSYDAGAGNEQFF

SEQ ID NO: 124419 - protein, 14 aa, Homo sapiens
  CDR3 for alpha chain variable domain of TCR clone 62210 (TRAV4, TRAJ26)
CLVGPHNYGQSFVF

SEQ ID NO: 124420 - protein, 17 aa, Homo sapiens
  CDR3 for beta chain variable domain of TCR clone 62210 (TRBV20-1, TRBJ2-1)
CSASSSGLAGSYNEQFF

SEQ ID NO: 124421 - protein, 12 aa, Homo sapiens
  CDR3 for alpha chain variable domain of TCR clone 62211 (TRAV25, TRAJ30)
CAGKNRDDKIIF

SEQ ID NO: 124422 - protein, 14 aa, Homo sapiens
  CDR3 for beta chain variable domain of TCR clone 62211 (TRBV7-2, TRBJ2-7)
CASSLPPGQGPQYF

SEQ ID NO: 124423 - protein, 16 aa, Homo sapiens
  CDR3 for alpha chain variable domain of TCR clone 62212 (TRAV35, TRAJ28)
CAGQRYSGAGSYQLTF

SEQ ID NO: 124424 - protein, 14 aa, Homo sapiens
  CDR3 for beta chain variable domain of TCR clone 62212 (TRBV19, TRBJ2-1)
CASSMGSGRRSSSS

SEQ ID NO: 124425 - protein, 13 aa, Homo sapiens
  CDR3 for alpha chain variable domain of TCR clone 62213 (TRAV3, TRAJ21)
CAVRAPDFNKFYF

SEQ ID NO: 124426 - protein, 14 aa, Homo sapiens
  CDR3 for beta chain variable domain of TCR clone 62213 (TRBV4-1, TRBJ2-2)
CASSQAVNTGELFF

SEQ ID NO: 124427 - protein, 15 aa, Homo sapiens
  CDR3 for alpha chain variable domain of TCR clone 62214 (TRAV12-3, TRAJ10)
CASYILTGGGNKLTF

SEQ ID NO: 124428 - protein, 15 aa, Homo sapiens
  CDR3 for beta chain variable domain of TCR clone 62214 (TRBV7-2, TRBJ1-6)
CAISLGPDRGMPLHF

SEQ ID NO: 124429 - protein, 12 aa, Homo sapiens
  CDR3 for alpha chain variable domain of TCR clone 62215 (TRAV13-1, TRAJ21)
CAAEEGFNKFYF

SEQ ID NO: 124430 - protein, 14 aa, Homo sapiens
  CDR3 for beta chain variable domain of TCR clone 62215 (TRBV5-4, TRBJ1-1)
CASSLDSRRDEAFF

SEQ ID NO: 124431 - protein, 17 aa, Homo sapiens
  CDR3 for alpha chain variable domain of TCR clone 62216 (TRAV3, TRAJ38)
CAVRDCLNAGNNRKLIW

SEQ ID NO: 124432 - protein, 16 aa, Homo sapiens
  CDR3 for beta chain variable domain of TCR clone 62216 (TRBV2, TRBJ2-3)
CASSTSVEGVTDTQYF

SEQ ID NO: 124433 - protein, 15 aa, Homo sapiens
  CDR3 for alpha chain variable domain of TCR clone 62217 (TRAV26-1, TRAJ22)
CIVTVSFWFCKATDL

SEQ ID NO: 124434 - protein, 13 aa, Homo sapiens
  CDR3 for beta chain variable domain of TCR clone 62217 (TRBV7-9, TRBJ1-2)
CASSLKQNYGYTF

SEQ ID NO: 124435 - protein, 14 aa, Homo sapiens
  CDR3 for alpha chain variable domain of TCR clone 62218 (TRAV13-1, TRAJ20)
CAARPGSNDYKLSF

SEQ ID NO: 124436 - protein, 13 aa, Homo sapiens
  CDR3 for beta chain variable domain of TCR clone 62218 (TRBV20-1, TRBJ1-1)
CSAPPGGHTEAVF

SEQ ID NO: 124437 - protein, 14 aa, Homo sapiens
  CDR3 for alpha chain variable domain of TCR clone 62219 (TRAV12-2, TRAJ40)
CAVKIPSGTYKYIF

SEQ ID NO: 124438 - protein, 13 aa, Homo sapiens
  CDR3 for beta chain variable domain of TCR clone 62219 (TRBV19, TRBJ2-7)
CASSAGHGYEQYF

SEQ ID NO: 124439 - protein, 14 aa, Homo sapiens
  CDR3 for alpha chain variable domain of TCR clone 62220 (TRAV1-2, TRAJ8)
RAVREDTGFQKLVF

SEQ ID NO: 124440 - protein, 14 aa, Homo sapiens
  CDR3 for beta chain variable domain of TCR clone 62220 (TRBV29-1, TRBJ2-3)
CSAGAGVGADTQYF

SEQ ID NO: 124441 - protein, 12 aa, Homo sapiens
  CDR3 for alpha chain variable domain of TCR clone 62221 (TRAV35, TRAJ39)
LAPNTAGNMLTF

SEQ ID NO: 124442 - protein, 16 aa, Homo sapiens
  CDR3 for beta chain variable domain of TCR clone 62221 (TRBV2, TRBJ2-3)
CASSTSVEGVTDTQYF

SEQ ID NO: 124443 - protein, 17 aa, Homo sapiens
  CDR3 for alpha chain variable domain of TCR clone 62222 (TRAV26-1, TRAJ27)
CIVSTPWINTNEGKSTF

SEQ ID NO: 124444 - protein, 16 aa, Homo sapiens
  CDR3 for beta chain variable domain of TCR clone 62222 (TRBV7-9, TRBJ2-1)
CASSLDPGLAIDEQFF

SEQ ID NO: 124445 - protein, 15 aa, Homo sapiens
  CDR3 for alpha chain variable domain of TCR clone 62223 (TRAV8-3, TRAJ6)
CAVGPLGGGSYIHTF

SEQ ID NO: 124446 - protein, 14 aa, Homo sapiens
  CDR3 for beta chain variable domain of TCR clone 62223 (TRBV19, TRBJ2-2)
CASSTGQGAGELFF

SEQ ID NO: 124447 - protein, 15 aa, Homo sapiens
  CDR3 for alpha chain variable domain of TCR clone 62224 (TRAV12-1, TRAJ5)
CVVNIDPTGRRALTF

SEQ ID NO: 124448 - protein, 15 aa, Homo sapiens
  CDR3 for beta chain variable domain of TCR clone 62224 (TRBV20-1, TRBJ2-7)
CSARDRVSGMDEQYF

SEQ ID NO: 124449 - protein, 12 aa, Homo sapiens
  CDR3 for alpha chain variable domain of TCR clone 62225 (TRAV12-3, TRAJ17)
CAMTLIGNKLTF

SEQ ID NO: 124450 - protein, 14 aa, Homo sapiens
  CDR3 for beta chain variable domain of TCR clone 62225 (TRBV7-6, TRBJ2-3)
CASSLGTVTDTQYF

SEQ ID NO: 124451 - protein, 18 aa, Homo sapiens
  CDR3 for alpha chain variable domain of TCR clone 62226 (TRAV12-3, TRAJ52)
CAMSRTNAGGTSYGKLTS

SEQ ID NO: 124452 - protein, 17 aa, Homo sapiens
  CDR3 for beta chain variable domain of TCR clone 62226 (TRBV13, TRBJ2-3)
CASSLSRVAGGRNTQYF

SEQ ID NO: 124453 - protein, 13 aa, Homo sapiens
  CDR3 for alpha chain variable domain of TCR clone 62227 (TRAV2, TRAJ29)
CAAQNSGNTPLVF

SEQ ID NO: 124454 - protein, 16 aa, Homo sapiens
  CDR3 for beta chain variable domain of TCR clone 62227 (TRBV7-9, TRBJ2-4)
CASSLAMGVTFSTSAP

SEQ ID NO: 124455 - protein, 17 aa, Homo sapiens
  CDR3 for alpha chain variable domain of TCR clone 62228 (TRAV3, TRAJ6)
CAVRDGPRAGGSYIPTF

SEQ ID NO: 124456 - protein, 13 aa, Homo sapiens
  CDR3 for beta chain variable domain of TCR clone 62228 (TRBV2, TRBJ2-5)
CASGTPYQETQYF

SEQ ID NO: 124457 - protein, 16 aa, Homo sapiens
  CDR3 for alpha chain variable domain of TCR clone 62229 (TRAV12-2, TRAJ18)
CAVTTDRGSTLGRLYF

SEQ ID NO: 124458 - protein, 14 aa, Homo sapiens
  CDR3 for beta chain variable domain of TCR clone 62229 (TRBV5-1, TRBJ1-2)
CASSPMTENYGYTF

SEQ ID NO: 124459 - protein, 14 aa, Homo sapiens
  CDR3 for alpha chain variable domain of TCR clone 62230 (TRAV26-1, TRAJ58)
CIVRVETSGSRLTF

SEQ ID NO: 124460 - protein, 13 aa, Homo sapiens
  CDR3 for beta chain variable domain of TCR clone 62230 (TRBV4-2, TRBJ1-1)
CASSQAGNTEAFF

SEQ ID NO: 124461 - protein, 12 aa, Homo sapiens
  CDR3 for alpha chain variable domain of TCR clone 62231 (TRAV1-2, TRAJ29)
CAVPSGNTPLVF

SEQ ID NO: 124462 - protein, 17 aa, Homo sapiens
  CDR3 for beta chain variable domain of TCR clone 62231 (TRBV11-2, TRBJ2-1)
CASSLYPPGVEYNEQFF

SEQ ID NO: 124463 - protein, 12 aa, Homo sapiens
  CDR3 for alpha chain variable domain of TCR clone 62232 (TRAV12-3, TRAJ17)
CAMTLTGNKLTF

SEQ ID NO: 124464 - protein, 14 aa, Homo sapiens
  CDR3 for beta chain variable domain of TCR clone 62232 (TRBV7-2, TRBJ2-5)
CASSTGGELKTQYF

SEQ ID NO: 124465 - protein, 12 aa, Homo sapiens
  CDR3 for alpha chain variable domain of TCR clone 62233 (TRAV3, TRAJ20)
CAVRDGDYKLSF

SEQ ID NO: 124466 - protein, 16 aa, Homo sapiens
  CDR3 for beta chain variable domain of TCR clone 62233 (TRBV12-4, TRBJ2-5)
CASSFFVRGRQETQYF

SEQ ID NO: 124467 - protein, 13 aa, Homo sapiens
  CDR3 for alpha chain variable domain of TCR clone 62234 (TRAV1-2, TRAJ9)
CAALNTGGFKTIF

SEQ ID NO: 124468 - protein, 15 aa, Homo sapiens
  CDR3 for beta chain variable domain of TCR clone 62234 (TRBV6-3, TRBJ2-2)
CASSFLATLTGELFF

SEQ ID NO: 124469 - protein, 15 aa, Homo sapiens
  CDR3 for alpha chain variable domain of TCR clone 62235 (TRAV17, TRAJ28)
CATVDSGAGSYQLTF

SEQ ID NO: 124470 - protein, 13 aa, Homo sapiens
  CDR3 for beta chain variable domain of TCR clone 62235 (TRBV5-4, TRBJ2-5)
CASSRQEGETQHF

SEQ ID NO: 124471 - protein, 13 aa, Homo sapiens
  CDR3 for alpha chain variable domain of TCR clone 62236 (TRAV21, TRAJ20)
CAVGLRVDYKLSF

SEQ ID NO: 124472 - protein, 15 aa, Homo sapiens
  CDR3 for beta chain variable domain of TCR clone 62236 (TRBV19, TRBJ1-1)
CASSIRSGGRTEAFF

SEQ ID NO: 124473 - protein, 16 aa, Homo sapiens
  CDR3 for alpha chain variable domain of TCR clone 62237 (TRAV30, TRAJ24)
CGTEIVDADSWGKFRF

SEQ ID NO: 124474 - protein, 15 aa, Homo sapiens
  CDR3 for beta chain variable domain of TCR clone 62237 (TRBV20-1, TRBJ2-7)
CSARDRVSGMDEQYF

SEQ ID NO: 124475 - protein, 18 aa, Homo sapiens
  CDR3 for alpha chain variable domain of TCR clone 62238 (TRAV21, TRAJ52)
CAVRPSPAGGTSYGKLTF

SEQ ID NO: 124476 - protein, 12 aa, Homo sapiens
  CDR3 for beta chain variable domain of TCR clone 62238 (TRBV25-1, TRBJ1-1)
CASRHMNTEAFF

SEQ ID NO: 124477 - protein, 12 aa, Homo sapiens
  CDR3 for alpha chain variable domain of TCR clone 62239 (TRAV21, TRAJ56)
CAVGVNRSKLTF

SEQ ID NO: 124478 - protein, 20 aa, Homo sapiens
  CDR3 for beta chain variable domain of TCR clone 62239 (TRBV7-8, TRBJ2-2)
CASSHLFPGPTIHITGELFF

SEQ ID NO: 124479 - protein, 14 aa, Homo sapiens
  CDR3 for alpha chain variable domain of TCR clone 62240 (TRAV13-1, TRAJ35)
CAASKGGFGNVLHC

SEQ ID NO: 124480 - protein, 13 aa, Homo sapiens
  CDR3 for beta chain variable domain of TCR clone 62240 (TRBV7-3, TRBJ1-1)
CASSQDWGAKAFF

SEQ ID NO: 124481 - protein, 13 aa, Homo sapiens
  CDR3 for alpha chain variable domain of TCR clone 62241 (TRAV27, TRAJ45)
CRSSGGGADGLTF

SEQ ID NO: 124482 - protein, 12 aa, Homo sapiens
  CDR3 for beta chain variable domain of TCR clone 62241 (TRBV7-9, TRBJ1-5)
CASSPQGQPQHF

SEQ ID NO: 124483 - protein, 15 aa, Homo sapiens
  CDR3 for alpha chain variable domain of TCR clone 62242 (TRAV8-3, TRAJ41)
CAVGSNSNFGYALNF

SEQ ID NO: 124484 - protein, 17 aa, Homo sapiens
  CDR3 for beta chain variable domain of TCR clone 62242 (TRBV25-1, TRBJ2-1)
CASSAYGQGRGVYEQFF

SEQ ID NO: 124485 - protein, 15 aa, Homo sapiens
  CDR3 for alpha chain variable domain of TCR clone 62243 (TRAV26-1, TRAJ17)
CIVSSFKAAGNKLTF

SEQ ID NO: 124486 - protein, 16 aa, Homo sapiens
  CDR3 for beta chain variable domain of TCR clone 62243 (TRBV19, TRBJ2-1)
CASSMGGGSSYNEQFF

SEQ ID NO: 124487 - protein, 16 aa, Homo sapiens
  CDR3 for alpha chain variable domain of TCR clone 62244 (TRAV8-3, TRAJ18)
CAVGARRGSTLGRLYF

SEQ ID NO: 124488 - protein, 14 aa, Homo sapiens
  CDR3 for beta chain variable domain of TCR clone 62244 (TRBV5-4, TRBJ1-3)
CASSSQSAGNTMYF

SEQ ID NO: 124489 - protein, 14 aa, Homo sapiens
  CDR3 for alpha chain variable domain of TCR clone 62245 (TRAV26-1, TRAJ54)
CIVRRTQGAQKLVF

SEQ ID NO: 124490 - protein, 13 aa, Homo sapiens
  CDR3 for beta chain variable domain of TCR clone 62245 (TRBV7-3, TRBJ1-1)
CASSQDWGAEAFF

SEQ ID NO: 124491 - protein, 15 aa, Homo sapiens
  CDR3 for alpha chain variable domain of TCR clone 62246 (TRAV8-3, TRAJ40)
CDAPSLGSGTYKYIF

SEQ ID NO: 124492 - protein, 16 aa, Homo sapiens
  CDR3 for beta chain variable domain of TCR clone 62246 (TRBV7-3, TRBJ2-3)
CASSLSGYRPEDTQYF

SEQ ID NO: 124493 - protein, 15 aa, Homo sapiens
  CDR3 for alpha chain variable domain of TCR clone 62247 (TRAV10, TRAJ6)
CVVSGGSGGSYIPTF

SEQ ID NO: 124494 - protein, 15 aa, Homo sapiens
  CDR3 for beta chain variable domain of TCR clone 62247 (TRBV6-3, TRBJ2-7)
CASSSPGTVFYEQYF

SEQ ID NO: 124495 - protein, 16 aa, Homo sapiens
  CDR3 for alpha chain variable domain of TCR clone 62248 (TRAV12-3, TRAJ53)
CAMSPGSGGSNNKLTF

SEQ ID NO: 124496 - protein, 16 aa, Homo sapiens
  CDR3 for beta chain variable domain of TCR clone 62248 (TRBV4-2, TRBJ1-1)
CASSQAGFGMNTEAFF

SEQ ID NO: 124497 - protein, 16 aa, Homo sapiens
  CDR3 for alpha chain variable domain of TCR clone 62249 (TRAV16, TRAJ4)
CALSRMFSGGYNKLIF

SEQ ID NO: 124498 - protein, 16 aa, Homo sapiens
  CDR3 for beta chain variable domain of TCR clone 62249 (TRBV24-1, TRBJ2-3)
CATSDPGTGSTDTQYF

SEQ ID NO: 124499 - protein, 12 aa, Homo sapiens
  CDR3 for alpha chain variable domain of TCR clone 62250 (TRAV8-3, TRAJ20)
CAVSANDYKLSF

SEQ ID NO: 124500 - protein, 16 aa, Homo sapiens
  CDR3 for beta chain variable domain of TCR clone 62250 (TRBV19, TRBJ2-2)
CASRSPGTGATGELFF

SEQ ID NO: 124501 - protein, 11 aa, Homo sapiens
  CDR3 for alpha chain variable domain of TCR clone 62251 (TRAV2, TRAJ21)
CAVFNFNKLYS

SEQ ID NO: 124502 - protein, 14 aa, Homo sapiens
  CDR3 for beta chain variable domain of TCR clone 62251 (TRBV15, TRBJ2-3)
CATRSGTSTDTQYF

SEQ ID NO: 124503 - protein, 13 aa, Homo sapiens
  CDR3 for alpha chain variable domain of TCR clone 62252 (TRAV36/DV7, TRAJ54)
CAVLIQGAQKLVF

SEQ ID NO: 124504 - protein, 13 aa, Homo sapiens
  CDR3 for beta chain variable domain of TCR clone 62252 (TRBV29-1, TRBJ2-4)
CSVGEGTKNNQYF

SEQ ID NO: 124505 - protein, 12 aa, Homo sapiens
  CDR3 for alpha chain variable domain of TCR clone 62253 (TRAV21, TRAJ3)
CCFYSSASKIIF

SEQ ID NO: 124506 - protein, 16 aa, Homo sapiens
  CDR3 for beta chain variable domain of TCR clone 62253 (TRBV19, TRBJ2-1)
CASSKAGPSSHNEQFF

SEQ ID NO: 124507 - protein, 12 aa, Homo sapiens
  CDR3 for alpha chain variable domain of TCR clone 62254 (TRAV13-2, TRAJ23)
CAERHRGGKLIF

SEQ ID NO: 124508 - protein, 14 aa, Homo sapiens
  CDR3 for beta chain variable domain of TCR clone 62254 (TRBV7-2, TRBJ2-7)
CASRSQGAAYEQYF

SEQ ID NO: 124509 - protein, 13 aa, Homo sapiens
  CDR3 for alpha chain variable domain of TCR clone 62255 (TRAV21, TRAJ27)
CAARPGNAGKSTF

SEQ ID NO: 124510 - protein, 17 aa, Homo sapiens
  CDR3 for beta chain variable domain of TCR clone 62255 (TRBV7-8, TRBJ2-1)
CASSPPTGTLAYNEQFF

SEQ ID NO: 124511 - protein, 16 aa, Homo sapiens
  CDR3 for alpha chain variable domain of TCR clone 62256 (TRAV30, TRAJ24)
CGTEIVDADSWGKFQF

SEQ ID NO: 124512 - protein, 16 aa, Homo sapiens
  CDR3 for beta chain variable domain of TCR clone 62256 (TRBV9, TRBJ2-3)
CASSGTSGKDTDTQYF

SEQ ID NO: 124513 - protein, 12 aa, Homo sapiens
  CDR3 for alpha chain variable domain of TCR clone 62257 (TRAV12-3, TRAJ40)
CAMTSGTYKYIF

SEQ ID NO: 124514 - protein, 15 aa, Homo sapiens
  CDR3 for beta chain variable domain of TCR clone 62257 (TRBV20-1, TRBJ2-5)
CSARDPRGSQETQYF

SEQ ID NO: 124515 - protein, 14 aa, Homo sapiens
  CDR3 for alpha chain variable domain of TCR clone 62258 (TRAV35, TRAJ22)
CAGLRPGSARQLTF

SEQ ID NO: 124516 - protein, 14 aa, Homo sapiens
  CDR3 for beta chain variable domain of TCR clone 62258 (TRBV4-1, TRBJ2-7)
CASSPVAGGYEQYF

SEQ ID NO: 124517 - protein, 11 aa, Homo sapiens
  CDR3 for alpha chain variable domain of TCR clone 62259 (TRAV12-1, TRAJ43)
CVEYDNNDMRF

SEQ ID NO: 124518 - protein, 14 aa, Homo sapiens
  CDR3 for beta chain variable domain of TCR clone 62259 (TRBV7-2, TRBJ2-7)
CASRSQGAAYEQYF

SEQ ID NO: 124519 - protein, 14 aa, Homo sapiens
  CDR3 for alpha chain variable domain of TCR clone 62260 (TRAV12-3, TRAJ56)
CAMSVTGANSKLTL

SEQ ID NO: 124520 - protein, 17 aa, Homo sapiens
  CDR3 for beta chain variable domain of TCR clone 62260 (TRBV20-1, TRBJ2-3)
CSASLLGRGGSADAQYF

SEQ ID NO: 124521 - protein, 15 aa, Homo sapiens
  CDR3 for alpha chain variable domain of TCR clone 62261 (TRAV12-2, TRAJ53)
CAVNGGGGSNYKLTF

SEQ ID NO: 124522 - protein, 17 aa, Homo sapiens
  CDR3 for beta chain variable domain of TCR clone 62261 (TRBV7-3, TRBJ2-3)
CASGLMKRMRGADTQYF

SEQ ID NO: 124523 - protein, 15 aa, Homo sapiens
  CDR3 for alpha chain variable domain of TCR clone 62262 (TRAV12-2, TRAJ53)
CAVNGGGVSNYKLTF

SEQ ID NO: 124524 - protein, 17 aa, Homo sapiens
  CDR3 for beta chain variable domain of TCR clone 62262 (TRBV7-3, TRBJ2-3)
CASSLMKRMRGADTQYF

SEQ ID NO: 124525 - protein, 14 aa, Homo sapiens
  CDR3 for alpha chain variable domain of TCR clone 62263 (TRAV12-3, TRAJ10)
SHLPLTGGGNKLTF

SEQ ID NO: 124526 - protein, 13 aa, Homo sapiens
  CDR3 for beta chain variable domain of TCR clone 62263 (TRBV27, TRBJ1-4)
CASRLMGDEKLFF

SEQ ID NO: 124527 - protein, 17 aa, Homo sapiens
  CDR3 for alpha chain variable domain of TCR clone 62264 (TRAV3, TRAJ6)
CAVRDGPRAGGSYIPTF

SEQ ID NO: 124528 - protein, 20 aa, Homo sapiens
  CDR3 for beta chain variable domain of TCR clone 62264 (TRBV28, TRBJ2-1)
CASTAIGRSPGLAGGNEQFF

SEQ ID NO: 124529 - protein, 12 aa, Homo sapiens
  CDR3 for alpha chain variable domain of TCR clone 62265 (TRAV20, TRAJ17)
CAMTLTGNKLTF

SEQ ID NO: 124530 - protein, 15 aa, Homo sapiens
  CDR3 for beta chain variable domain of TCR clone 62265 (TRBV20-1, TRBJ2-7)
CSARDRVSGMDEQYF

SEQ ID NO: 124531 - protein, 12 aa, Homo sapiens
  CDR3 for alpha chain variable domain of TCR clone 62266 (TRAV1-1, TRAJ39)
CAVPVVGNMLTF

SEQ ID NO: 124532 - protein, 12 aa, Homo sapiens
  CDR3 for beta chain variable domain of TCR clone 62266 (TRBV7-9, TRBJ2-7)
CASSIKREEQYF

SEQ ID NO: 124533 - protein, 13 aa, Homo sapiens
  CDR3 for alpha chain variable domain of TCR clone 62267 (TRAV27, TRAJ8)
CAGGPPGFQKLVF

SEQ ID NO: 124534 - protein, 15 aa, Homo sapiens
  CDR3 for beta chain variable domain of TCR clone 62267 (TRBV6-1, TRBJ2-7)
CASSESMGDFYEQYF

SEQ ID NO: 124535 - protein, 13 aa, Homo sapiens
  CDR3 for alpha chain variable domain of TCR clone 62268 (TRAV29/DV5, TRAJ31)
CAASRNNNARLMF

SEQ ID NO: 124536 - protein, 14 aa, Homo sapiens
  CDR3 for beta chain variable domain of TCR clone 62268 (TRBV6-1, TRBJ1-3)
CASVQGGGGNTIYF

SEQ ID NO: 124537 - protein, 14 aa, Homo sapiens
  CDR3 for alpha chain variable domain of TCR clone 62269 (TRAV16, TRAJ26)
CALSPANYGQNFVF

SEQ ID NO: 124538 - protein, 16 aa, Homo sapiens
  CDR3 for beta chain variable domain of TCR clone 62269 (TRBV20-1, TRBJ1-4)
CSAPGQGLLTNEKLFF

SEQ ID NO: 124539 - protein, 16 aa, Homo sapiens
  CDR3 for alpha chain variable domain of TCR clone 62270 (TRAV26-1, TRAJ6)
CIVRVPRTGGSYIPTF

SEQ ID NO: 124540 - protein, 15 aa, Homo sapiens
  CDR3 for beta chain variable domain of TCR clone 62270 (TRBV10-3, TRBJ2-7)
GAISDMTAPSYEQYF

SEQ ID NO: 124541 - protein, 14 aa, Homo sapiens
  CDR3 for alpha chain variable domain of TCR clone 62271 (TRAV2, TRAJ37)
CAVDFTSNTGKLIF

SEQ ID NO: 124542 - protein, 16 aa, Homo sapiens
  CDR3 for beta chain variable domain of TCR clone 62271 (TRBV19, TRBJ2-2)
CASRSPGTGATGELFF

SEQ ID NO: 124543 - protein, 13 aa, Homo sapiens
  CDR3 for alpha chain variable domain of TCR clone 62272 (TRAV13-2, TRAJ53)
CAENMGSHYKLTF

SEQ ID NO: 124544 - protein, 13 aa, Homo sapiens
  CDR3 for beta chain variable domain of TCR clone 62272 (TRBV4-1, TRBJ2-2)
CASSQENTGELFF

SEQ ID NO: 124545 - protein, 14 aa, Homo sapiens
  CDR3 for alpha chain variable domain of TCR clone 62273 (TRAV1-2, TRAJ8)
CAVREDTGFQKLVL

SEQ ID NO: 124546 - protein, 17 aa, Homo sapiens
  CDR3 for beta chain variable domain of TCR clone 62273 (TRBV20-1, TRBJ2-2)
CSASGSGQGGLTGELFF

SEQ ID NO: 124547 - protein, 17 aa, Homo sapiens
  CDR3 for alpha chain variable domain of TCR clone 62274 (TRAV4, TRAJ18)
CLVGERSVGSTLGRLCF

SEQ ID NO: 124548 - protein, 14 aa, Homo sapiens
  CDR3 for beta chain variable domain of TCR clone 62274 (TRBV6-5, TRBJ1-2)
CASSYDGTGGGYTF

SEQ ID NO: 124549 - protein, 11 aa, Homo sapiens
  CDR3 for alpha chain variable domain of TCR clone 62275 (TRAV21, TRAJ34)
CAVTNTDKLIF

SEQ ID NO: 124550 - protein, 16 aa, Homo sapiens
  CDR3 for beta chain variable domain of TCR clone 62275 (TRBV20-1, TRBJ1-4)
CSAPGQGLLTNEKLFF

SEQ ID NO: 124551 - protein, 14 aa, Homo sapiens
  CDR3 for alpha chain variable domain of TCR clone 62276 (TRAV26-1, TRAJ38)
CIADNACNNRKLIW

SEQ ID NO: 124552 - protein, 17 aa, Homo sapiens
  CDR3 for beta chain variable domain of TCR clone 62276 (TRBV7-9, TRBJ2-3)
CASSPTVAGDLTDTQYF

SEQ ID NO: 124553 - protein, 14 aa, Homo sapiens
  CDR3 for alpha chain variable domain of TCR clone 62277 (TRAV1-2, TRAJ16)
CAVNRFSDGQELLF

SEQ ID NO: 124554 - protein, 12 aa, Homo sapiens
  CDR3 for beta chain variable domain of TCR clone 62277 (TRBV11-2, TRBJ2-2)
CASSLGGGELFF

SEQ ID NO: 124555 - protein, 23 aa, Homo sapiens
  CDR3 for alpha chain variable domain of TCR clone 62278 (TRAV8-3, TRAJ38)
CAVGASNAGNNRIQNPDPAVYQL

SEQ ID NO: 124556 - protein, 15 aa, Homo sapiens
  CDR3 for beta chain variable domain of TCR clone 62278 (TRBV11-3, TRBJ1-3)
CASSLFGPSGNTIYF

SEQ ID NO: 124557 - protein, 15 aa, Homo sapiens
  CDR3 for alpha chain variable domain of TCR clone 62279 (TRAV29/DV5, TRAJ57)
CSASLLRGGSEKLVF

SEQ ID NO: 124558 - protein, 15 aa, Homo sapiens
  CDR3 for beta chain variable domain of TCR clone 62279 (TRBV5-1, TRBJ1-3)
CASSLEGGSGNTIYF

SEQ ID NO: 124559 - protein, 11 aa, Homo sapiens
  CDR3 for alpha chain variable domain of TCR clone 62280 (TRAV35, TRAJ30)
CAGPGDDKIIF

SEQ ID NO: 124560 - protein, 14 aa, Homo sapiens
  CDR3 for beta chain variable domain of TCR clone 62280 (TRBV7-8, TRBJ1-2)
CASSPDSLSYGYTF

SEQ ID NO: 124561 - protein, 15 aa, Homo sapiens
  CDR3 for alpha chain variable domain of TCR clone 62281 (TRAV3, TRAJ23)
CAVRDRGNQGGRLIF

SEQ ID NO: 124562 - protein, 13 aa, Homo sapiens
  CDR3 for beta chain variable domain of TCR clone 62281 (TRBV7-2, TRBJ2-7)
CASSSPSGSEQYF

SEQ ID NO: 124563 - protein, 12 aa, Homo sapiens
  CDR3 for alpha chain variable domain of TCR clone 62282 (TRAV20, TRAJ54)
CAVQEGAQKLVS

SEQ ID NO: 124564 - protein, 17 aa, Homo sapiens
  CDR3 for beta chain variable domain of TCR clone 62282 (TRBV13, TRBJ2-3)
CASSLSRVAGGRNTQYF

SEQ ID NO: 124565 - protein, 14 aa, Homo sapiens
  CDR3 for alpha chain variable domain of TCR clone 62283 (TRAV12-3, TRAJ12)
CAMSRMDSSYKLVF

SEQ ID NO: 124566 - protein, 14 aa, Homo sapiens
  CDR3 for beta chain variable domain of TCR clone 62283 (TRBV20-1, TRBJ1-4)
CSARSGQSNEKLFF

SEQ ID NO: 124567 - protein, 13 aa, Homo sapiens
  CDR3 for alpha chain variable domain of TCR clone 62284 (TRAV12-3, TRAJ43)
CAMRPYNNNDIRF

SEQ ID NO: 124568 - protein, 16 aa, Homo sapiens
  CDR3 for beta chain variable domain of TCR clone 62284 (TRBV11-2, TRBJ2-1)
CASSLLLLSSYNEQFF

SEQ ID NO: 124569 - protein, 13 aa, Homo sapiens
  CDR3 for alpha chain variable domain of TCR clone 62285 (TRAV36/DV7, TRAJ54)
CTVDIQGAQKLVF

SEQ ID NO: 124570 - protein, 14 aa, Homo sapiens
  CDR3 for beta chain variable domain of TCR clone 62285 (TRBV19, TRBJ2-7)
CASNFRDTFTGMYF

SEQ ID NO: 124571 - protein, 13 aa, Homo sapiens
  CDR3 for alpha chain variable domain of TCR clone 62286 (TRAV12-3, TRAJ53)
CAMRGGSNYKLTF

SEQ ID NO: 124572 - protein, 15 aa, Homo sapiens
  CDR3 for beta chain variable domain of TCR clone 62286 (TRBV2, TRBJ2-1)
CATPARLVMIGEQFF

SEQ ID NO: 124573 - protein, 13 aa, Homo sapiens
  CDR3 for alpha chain variable domain of TCR clone 62287 (TRAV12-1, TRAJ33)
CGDAPDSNYPLIW

SEQ ID NO: 124574 - protein, 15 aa, Homo sapiens
  CDR3 for beta chain variable domain of TCR clone 62287 (TRBV27, TRBJ2-1)
CASSNGGGSSNEQFF

SEQ ID NO: 124575 - protein, 14 aa, Homo sapiens
  CDR3 for alpha chain variable domain of TCR clone 62288 (TRAV38-1, TRAJ45)
CAYYSGGGADGLTF

SEQ ID NO: 124576 - protein, 14 aa, Homo sapiens
  CDR3 for beta chain variable domain of TCR clone 62288 (TRBV18, TRBJ2-7)
CASSPRGGAYEQYF

SEQ ID NO: 124577 - protein, 10 aa, Homo sapiens
  CDR3 for alpha chain variable domain of TCR clone 62289 (TRAV23/DV6, TRAJ57)
CAASSTLSQG

SEQ ID NO: 124578 - protein, 14 aa, Homo sapiens
  CDR3 for beta chain variable domain of TCR clone 62289 (TRBV25-1, TRBJ1-1)
GASTHLGGNTEAFF

SEQ ID NO: 124579 - protein, 14 aa, Homo sapiens
  CDR3 for alpha chain variable domain of TCR clone 62290 (TRAV2, TRAJ9)
CAVEDRSGGFKTIF

SEQ ID NO: 124580 - protein, 11 aa, Homo sapiens
  CDR3 for beta chain variable domain of TCR clone 62290 (TRBV11-2, TRBJ2-2)
CASSLPGELFF

SEQ ID NO: 124581 - protein, 13 aa, Homo sapiens
  CDR3 for alpha chain variable domain of TCR clone 62291 (TRAV5, TRAJ13)
CAESLGGYQKVTF

SEQ ID NO: 124582 - protein, 15 aa, Homo sapiens
  CDR3 for beta chain variable domain of TCR clone 62291 (TRBV7-9, TRBJ1-5)
CASSQGHQPNQPQHF

SEQ ID NO: 124583 - protein, 11 aa, Homo sapiens
  CDR3 for alpha chain variable domain of TCR clone 62292 (TRAV16, TRAJ33)
CALSAMDSTIS

SEQ ID NO: 124584 - protein, 12 aa, Homo sapiens
  CDR3 for beta chain variable domain of TCR clone 62292 (TRBV5-1, TRBJ1-2)
CASSQDTYGYTF

SEQ ID NO: 124585 - protein, 16 aa, Homo sapiens
  CDR3 for alpha chain variable domain of TCR clone 62293 (TRAV3, TRAJ37)
CAVRGKGSGNTGKLIF

SEQ ID NO: 124586 - protein, 20 aa, Homo sapiens
  CDR3 for beta chain variable domain of TCR clone 62293 (TRBV7-8, TRBJ2-2)
CASSHLFPGPTIHITGGLFF

SEQ ID NO: 124587 - protein, 13 aa, Homo sapiens
  CDR3 for alpha chain variable domain of TCR clone 62294 (TRAV2, TRAJ20)
CAAEDPSEYKLSF

SEQ ID NO: 124588 - protein, 16 aa, Homo sapiens
  CDR3 for beta chain variable domain of TCR clone 62294 (TRBV25-1, TRBJ2-7)
CASSELTGGGIYEQYF

SEQ ID NO: 124589 - protein, 14 aa, Homo sapiens
  CDR3 for alpha chain variable domain of TCR clone 62295 (TRAV1-2, TRAJ16)
CAVNWFSDGQKLLF

SEQ ID NO: 124590 - protein, 15 aa, Homo sapiens
  CDR3 for beta chain variable domain of TCR clone 62295 (TRBV7-9, TRBJ1-6)
CASSSPGRGNSPLHF

SEQ ID NO: 124591 - protein, 13 aa, Homo sapiens
  CDR3 for alpha chain variable domain of TCR clone 62296 (TRAV27, TRAJ41)
CAGEGNSGYARNF

SEQ ID NO: 124592 - protein, 14 aa, Homo sapiens
  CDR3 for beta chain variable domain of TCR clone 62296 (TRBV25-1, TRBJ1-1)
CASTHLGGNTEAFF

SEQ ID NO: 124593 - protein, 19 aa, Homo sapiens
  CDR3 for alpha chain variable domain of TCR clone 62297 (TRAV29/DV5, TRAJ49)
CSVLLCSKLTVDTGNQVYF

SEQ ID NO: 124594 - protein, 17 aa, Homo sapiens
  CDR3 for beta chain variable domain of TCR clone 62297 (TRBV13, TRBJ2-3)
CASSLSRVAGGRNTQYF

SEQ ID NO: 124595 - protein, 10 aa, Homo sapiens
  CDR3 for alpha chain variable domain of TCR clone 62298 (TRAV8-4, TRAJ43)
CAVSADDMRF

SEQ ID NO: 124596 - protein, 16 aa, Homo sapiens
  CDR3 for beta chain variable domain of TCR clone 62298 (TRBV12-5, TRBJ2-5)
CASGPRTSGKQETQYF

SEQ ID NO: 124597 - protein, 12 aa, Homo sapiens
  CDR3 for alpha chain variable domain of TCR clone 62299 (TRAV21, TRAJ13)
PGSSGGYQKVTF

SEQ ID NO: 124598 - protein, 13 aa, Homo sapiens
  CDR3 for beta chain variable domain of TCR clone 62299 (TRBV7-9, TRBJ1-2)
CASSLKQNYGYTF

SEQ ID NO: 124599 - protein, 12 aa, Homo sapiens
  CDR3 for alpha chain variable domain of TCR clone 62300 (TRAV13-1, TRAJ21)
CSAKEGFNKFYF

SEQ ID NO: 124600 - protein, 15 aa, Homo sapiens
  CDR3 for beta chain variable domain of TCR clone 62300 (TRBV25-1, TRBJ1-4)
CASSPGDSTNEKLFF

SEQ ID NO: 124601 - protein, 17 aa, Homo sapiens
  CDR3 for alpha chain variable domain of TCR clone 62301 (TRAV12-2, TRAJ52)
CAVNPYAGGTSYGKLTF

SEQ ID NO: 124602 - protein, 18 aa, Homo sapiens
  CDR3 for beta chain variable domain of TCR clone 62301 (TRBV11-2, TRBJ2-3)
CASSLGGASRGAPNTQYF

SEQ ID NO: 124603 - protein, 13 aa, Homo sapiens
  CDR3 for alpha chain variable domain of TCR clone 62302 (TRAV16, TRAJ54)
CALKVRGAKKLVF

SEQ ID NO: 124604 - protein, 13 aa, Homo sapiens
  CDR3 for beta chain variable domain of TCR clone 62302 (TRBV20-1, TRBJ1-1)
CSARGGGNTEAFF

SEQ ID NO: 124605 - protein, 14 aa, Homo sapiens
  CDR3 for alpha chain variable domain of TCR clone 62303 (TRAV38-1, TRAJ40)
CALRPTSGTYKYIL

SEQ ID NO: 124606 - protein, 14 aa, Homo sapiens
  CDR3 for beta chain variable domain of TCR clone 62303 (TRBV19, TRBJ2-1)
CASPTFVLSGEQFF

SEQ ID NO: 124607 - protein, 14 aa, Homo sapiens
  CDR3 for alpha chain variable domain of TCR clone 62304 (TRAV1-2, TRAJ16)
CSVNRFSDGQKLLF

SEQ ID NO: 124608 - protein, 13 aa, Homo sapiens
  CDR3 for beta chain variable domain of TCR clone 62304 (TRBV4-1, TRBJ2-1)
CASSQAGGDEQFF

SEQ ID NO: 124609 - protein, 15 aa, Homo sapiens
  CDR3 for alpha chain variable domain of TCR clone 62305 (TRAV34, TRAJ38)
CGADFTPGNNRKLIW

SEQ ID NO: 124610 - protein, 14 aa, Homo sapiens
  CDR3 for beta chain variable domain of TCR clone 62305 (TRBV12-4, TRBJ1-1)
CASSLGTGGTEAFF

SEQ ID NO: 124611 - protein, 18 aa, Homo sapiens
  CDR3 for alpha chain variable domain of TCR clone 62306 (TRAV26-1, TRAJ52)
CIVIVEGAGGTSYGKLTF

SEQ ID NO: 124612 - protein, 13 aa, Homo sapiens
  CDR3 for beta chain variable domain of TCR clone 62306 (TRBV7-3, TRBJ1-2)
CASSLKRGYGYTF

SEQ ID NO: 124613 - protein, 14 aa, Homo sapiens
  CDR3 for alpha chain variable domain of TCR clone 62307 (TRAV12-3, TRAJ10)
SHLPLTGGGNKLTF

SEQ ID NO: 124614 - protein, 17 aa, Homo sapiens
  CDR3 for beta chain variable domain of TCR clone 62307 (TRBV7-3, TRBJ2-3)
RASSLMKRMRGADTQYF

SEQ ID NO: 124615 - protein, 14 aa, Homo sapiens
  CDR3 for alpha chain variable domain of TCR clone 62308 (TRAV38-1, TRAJ29)
CAFITPSGNTPLVF

SEQ ID NO: 124616 - protein, 14 aa, Homo sapiens
  CDR3 for beta chain variable domain of TCR clone 62308 (TRBV18, TRBJ2-7)
CASSQRGGAYEQYF

SEQ ID NO: 124617 - protein, 14 aa, Homo sapiens
  CDR3 for alpha chain variable domain of TCR clone 62309 (TRAV12-1, TRAJ17)
CVVYYKAAGNKLTF

SEQ ID NO: 124618 - protein, 14 aa, Homo sapiens
  CDR3 for beta chain variable domain of TCR clone 62309 (TRBV7-8, TRBJ2-3)
CASSLEAGTDTQYF

SEQ ID NO: 124619 - protein, 12 aa, Homo sapiens
  CDR3 for alpha chain variable domain of TCR clone 62310 (TRAV12-3, TRAJ42)
RAPGGSQGNLIF

SEQ ID NO: 124620 - protein, 13 aa, Homo sapiens
  CDR3 for beta chain variable domain of TCR clone 62310 (TRBV5-7, TRBJ2-6)
CASTSSGANVLTF

SEQ ID NO: 124621 - protein, 18 aa, Homo sapiens
  CDR3 for alpha chain variable domain of TCR clone 62311 (TRAV12-3, TRAJ52)
CAMSVGGAGGTSYGKLTF

SEQ ID NO: 124622 - protein, 15 aa, Homo sapiens
  CDR3 for beta chain variable domain of TCR clone 62311 (TRBV19, TRBJ1-1)
CASTSGQIQNTEAFF

SEQ ID NO: 124623 - protein, 15 aa, Homo sapiens
  CDR3 for alpha chain variable domain of TCR clone 62312 (TRAV3, TRAJ20)
CAVRDIKLSDYKLSL

SEQ ID NO: 124624 - protein, 18 aa, Homo sapiens
  CDR3 for beta chain variable domain of TCR clone 62312 (TRBV20-1, TRBJ2-5)
CSQTGDSGRLGGKETQYF

SEQ ID NO: 124625 - protein, 14 aa, Homo sapiens
  CDR3 for alpha chain variable domain of TCR clone 62313 (TRAV8-3, TRAJ17)
CAVGAQTAVNKLTF

SEQ ID NO: 124626 - protein, 11 aa, Homo sapiens
  CDR3 for beta chain variable domain of TCR clone 62313 (TRBV29-1, TRBJ1-4)
CSVSSGEKLFF

SEQ ID NO: 124627 - protein, 14 aa, Homo sapiens
  CDR3 for alpha chain variable domain of TCR clone 62314 (TRAV38-1, TRAJ29)
CAFITPSGNTPIVF

SEQ ID NO: 124628 - protein, 14 aa, Homo sapiens
  CDR3 for beta chain variable domain of TCR clone 62314 (TRBV18, TRBJ2-7)
CASSPRGGAYEQYF

SEQ ID NO: 124629 - protein, 15 aa, Homo sapiens
  CDR3 for alpha chain variable domain of TCR clone 62315 (TRAV8-3, TRAJ40)
CAAPSLDSGTYRYIF

SEQ ID NO: 124630 - protein, 12 aa, Homo sapiens
  CDR3 for beta chain variable domain of TCR clone 62315 (TRBV11-2, TRBJ2-2)
CASSLGGGELFF

SEQ ID NO: 124631 - protein, 13 aa, Homo sapiens
  CDR3 for alpha chain variable domain of TCR clone 62316 (TRAV21, TRAJ57)
CAATQGGSEKLVF

SEQ ID NO: 124632 - protein, 11 aa, Homo sapiens
  CDR3 for beta chain variable domain of TCR clone 62316 (TRBV11-2, TRBJ2-2)
CASSLPGELFF

SEQ ID NO: 124633 - protein, 15 aa, Homo sapiens
  CDR3 for alpha chain variable domain of TCR clone 62317 (TRAV12-2, TRAJ43)
CAFDMRFGAGTRLTV

SEQ ID NO: 124634 - protein, 13 aa, Homo sapiens
  CDR3 for beta chain variable domain of TCR clone 62317 (TRBV4-2, TRBJ1-1)
CASGQAGNTEAFF

SEQ ID NO: 124635 - protein, 13 aa, Homo sapiens
  CDR3 for alpha chain variable domain of TCR clone 62318 (TRAV1-1, TRAJ38)
CASNAGNNRRLIW

SEQ ID NO: 124636 - protein, 14 aa, Homo sapiens
  CDR3 for beta chain variable domain of TCR clone 62318 (TRBV15, TRBJ2-1)
CATSGVEDYNEQFF

SEQ ID NO: 124637 - protein, 15 aa, Homo sapiens
  CDR3 for alpha chain variable domain of TCR clone 62319 (TRAV21, TRAJ24)
CAARSSTDSWGKLQF

SEQ ID NO: 124638 - protein, 16 aa, Homo sapiens
  CDR3 for beta chain variable domain of TCR clone 62319 (TRBV10-3, TRBJ2-1)
CAISGVGDGGGGEQFF

SEQ ID NO: 124639 - protein, 18 aa, Homo sapiens
  CDR3 for alpha chain variable domain of TCR clone 62320 (TRAV12-3, TRAJ52)
CAMSVGGAGGTSYGKLTF

SEQ ID NO: 124640 - protein, 15 aa, Homo sapiens
  CDR3 for beta chain variable domain of TCR clone 62320 (TRBV28, TRBJ1-4)
CASSVSGSGLEKLFF

SEQ ID NO: 124641 - protein, 16 aa, Homo sapiens
  CDR3 for alpha chain variable domain of TCR clone 62321 (TRAV3, TRAJ5)
CAVRNLMDTGRRSLTF

SEQ ID NO: 124642 - protein, 16 aa, Homo sapiens
  CDR3 for beta chain variable domain of TCR clone 62321 (TRBV4-2, TRBJ2-7)
CASSQEGLANSYEQYF

SEQ ID NO: 124643 - protein, 13 aa, Homo sapiens
  CDR3 for alpha chain variable domain of TCR clone 62322 (TRAV29/DV5, TRAJ44)
CAASTGTASKITF

SEQ ID NO: 124644 - protein, 13 aa, Homo sapiens
  CDR3 for beta chain variable domain of TCR clone 62322 (TRBV19, TRBJ2-7)
CASRKAGGSEQYF

SEQ ID NO: 124645 - protein, 12 aa, Homo sapiens
  CDR3 for alpha chain variable domain of TCR clone 62323 (TRAV21, TRAJ31)
CVLAGNNARLMF

SEQ ID NO: 124646 - protein, 16 aa, Homo sapiens
  CDR3 for beta chain variable domain of TCR clone 62323 (TRBV27, TRBJ2-5)
CASSFGPGGTKETQDF

SEQ ID NO: 124647 - protein, 13 aa, Homo sapiens
  CDR3 for alpha chain variable domain of TCR clone 62324 (TRAV12-3, TRAJ7)
CAMTPHGNNRLAF

SEQ ID NO: 124648 - protein, 16 aa, Homo sapiens
  CDR3 for beta chain variable domain of TCR clone 62324 (TRBV20-1, TRBJ1-4)
CSARPYGGELNEKLFF

SEQ ID NO: 124649 - protein, 11 aa, Homo sapiens
  CDR3 for alpha chain variable domain of TCR clone 62325 (TRAV21, TRAJ34)
CAVTNTDKLIF

SEQ ID NO: 124650 - protein, 15 aa, Homo sapiens
  CDR3 for beta chain variable domain of TCR clone 62325 (TRBV27, TRBJ2-1)
CASSNGGGSSNEQFF

SEQ ID NO: 124651 - protein, 16 aa, Homo sapiens
  CDR3 for alpha chain variable domain of TCR clone 62326 (TRAV38-2/DV8, TRAJ45)
CAYTTTSGGGADGLTF

SEQ ID NO: 124652 - protein, 13 aa, Homo sapiens
  CDR3 for beta chain variable domain of TCR clone 62326 (TRBV7-9, TRBJ1-2)
CASSLKQNYGYTF

SEQ ID NO: 124653 - protein, 12 aa, Homo sapiens
  CDR3 for alpha chain variable domain of TCR clone 62327 (TRAV8-3, TRAJ48)
CCGAFWNEKLTF

SEQ ID NO: 124654 - protein, 15 aa, Homo sapiens
  CDR3 for beta chain variable domain of TCR clone 62327 (TRBV11-2, TRBJ2-1)
CASSSPSTRYNEQFF

SEQ ID NO: 124655 - protein, 14 aa, Homo sapiens
  CDR3 for alpha chain variable domain of TCR clone 62328 (TRAV12-3, TRAJ22)
CVMSLFGSARQLTF

SEQ ID NO: 124656 - protein, 11 aa, Homo sapiens
  CDR3 for beta chain variable domain of TCR clone 62328 (TRBV12-4, TRBJ2-2)
CASSSAGELFF

SEQ ID NO: 124657 - protein, 12 aa, Homo sapiens
  CDR3 for alpha chain variable domain of TCR clone 62329 (TRAV12-2, TRAJ10)
WGVTGGGKKLTF

SEQ ID NO: 124658 - protein, 16 aa, Homo sapiens
  CDR3 for beta chain variable domain of TCR clone 62329 (TRBV6-4, TRBJ1-2)
CASSEAVGDPNYGYTF

SEQ ID NO: 124659 - protein, 13 aa, Homo sapiens
  CDR3 for alpha chain variable domain of TCR clone 62330 (TRAV29/DV5, TRAJ31)
CAASRNNNARLMF

SEQ ID NO: 124660 - protein, 15 aa, Homo sapiens
  CDR3 for beta chain variable domain of TCR clone 62330 (TRBV29-1, TRBJ2-1)
CSVPTGLALYNEQFF

SEQ ID NO: 124661 - protein, 16 aa, Homo sapiens
  CDR3 for alpha chain variable domain of TCR clone 62331 (TRAV21, TRAJ37)
CAVRTAGSSNTGKLIF

SEQ ID NO: 124662 - protein, 12 aa, Homo sapiens
  CDR3 for beta chain variable domain of TCR clone 62331 (TRBV11-2, TRBJ2-2)
CASSLGGGELFF

SEQ ID NO: 124663 - protein, 13 aa, Homo sapiens
  CDR3 for alpha chain variable domain of TCR clone 62332 (TRAV13-2, TRAJ22)
CRDPSGSARQLTF

SEQ ID NO: 124664 - protein, 20 aa, Homo sapiens
  CDR3 for beta chain variable domain of TCR clone 62332 (TRBV7-8, TRBJ2-2)
CASSHLFPGPTIHITGELFF

SEQ ID NO: 124665 - protein, 14 aa, Homo sapiens
  CDR3 for alpha chain variable domain of TCR clone 62333 (TRAV12-2, TRAJ13)
CAVKKTGGYQKVTF

SEQ ID NO: 124666 - protein, 16 aa, Homo sapiens
  CDR3 for beta chain variable domain of TCR clone 62333 (TRBV5-1, TRBJ2-2)
CASSSRTGGRTGELFF

SEQ ID NO: 124667 - protein, 14 aa, Homo sapiens
  CDR3 for alpha chain variable domain of TCR clone 62334 (TRAV13-1, TRAJ44)
CAAKATGTASKLTF

SEQ ID NO: 124668 - protein, 17 aa, Homo sapiens
  CDR3 for beta chain variable domain of TCR clone 62334 (TRBV7-3, TRBJ2-3)
RASSLMKRMRGADTQYF

SEQ ID NO: 124669 - protein, 15 aa, Homo sapiens
  CDR3 for alpha chain variable domain of TCR clone 62335 (TRAV23/DV6, TRAJ44)
CAARTLTGTASKLTL

SEQ ID NO: 124670 - protein, 17 aa, Homo sapiens
  CDR3 for beta chain variable domain of TCR clone 62335 (TRBV24-1, TRBJ2-1)
CATSDVSTSGTYNEQFF

SEQ ID NO: 124671 - protein, 13 aa, Homo sapiens
  CDR3 for alpha chain variable domain of TCR clone 62336 (TRAV21, TRAJ20)
CAVGLRVDYKLSF

SEQ ID NO: 124672 - protein, 16 aa, Homo sapiens
  CDR3 for beta chain variable domain of TCR clone 62336 (TRBV28, TRBJ2-2)
CASSLEGGSNTGELFF

SEQ ID NO: 124673 - protein, 15 aa, Homo sapiens
  CDR3 for alpha chain variable domain of TCR clone 62337 (TRAV3, TRAJ27)
CAVRDPLTNAGKSTC

SEQ ID NO: 124674 - protein, 15 aa, Homo sapiens
  CDR3 for beta chain variable domain of TCR clone 62337 (TRBV28, TRBJ2-1)
CASSIIAGGRSEQFF

SEQ ID NO: 124675 - protein, 16 aa, Homo sapiens
  CDR3 for alpha chain variable domain of TCR clone 62338 (TRAV21, TRAJ17)
CAVRPVEEAAGNKLTF

SEQ ID NO: 124676 - protein, 16 aa, Homo sapiens
  CDR3 for beta chain variable domain of TCR clone 62338 (TRBV2, TRBJ2-7)
CASSEPWTGPSYEQYF

SEQ ID NO: 124677 - protein, 13 aa, Homo sapiens
  CDR3 for alpha chain variable domain of TCR clone 62339 (TRAV12-2, TRAJ18)
CAVRGSTLGRLYF

SEQ ID NO: 124678 - protein, 14 aa, Homo sapiens
  CDR3 for beta chain variable domain of TCR clone 62339 (TRBV7-2, TRBJ2-7)
CASRSQGAAYEQYF

SEQ ID NO: 124679 - protein, 15 aa, Homo sapiens
  CDR3 for alpha chain variable domain of TCR clone 62340 (TRAV14/DV4, TRAJ26)
CAMREGQNHGQNFVS

SEQ ID NO: 124680 - protein, 15 aa, Homo sapiens
  CDR3 for beta chain variable domain of TCR clone 62340 (TRBV6-3, TRBJ2-7)
CASSSPGTVFYEQYF

SEQ ID NO: 124681 - protein, 13 aa, Homo sapiens
  CDR3 for alpha chain variable domain of TCR clone 62341 (TRAV3, TRAJ21)
CAVREPDFNKFYF

SEQ ID NO: 124682 - protein, 18 aa, Homo sapiens
  CDR3 for beta chain variable domain of TCR clone 62341 (TRBV11-2, TRBJ2-3)
CASSLGGAARGAPNTQYF

SEQ ID NO: 124683 - protein, 14 aa, Homo sapiens
  CDR3 for alpha chain variable domain of TCR clone 62342 (TRAV1-2, TRAJ16)
CAVNRFSDGQKLLL

SEQ ID NO: 124684 - protein, 14 aa, Homo sapiens
  CDR3 for beta chain variable domain of TCR clone 62342 (TRBV7-9, TRBJ2-1)
CASSPRDSLYEQFF

SEQ ID NO: 124685 - protein, 12 aa, Homo sapiens
  CDR3 for alpha chain variable domain of TCR clone 62343 (TRAV13-2, TRAJ23)
CAERHRGGKLIF

SEQ ID NO: 124686 - protein, 13 aa, Homo sapiens
  CDR3 for beta chain variable domain of TCR clone 62343 (TRBV12-4, TRBJ1-1)
CASSPGTGFEAFF

SEQ ID NO: 124687 - protein, 16 aa, Homo sapiens
  CDR3 for alpha chain variable domain of TCR clone 62344 (TRAV38-1, TRAJ39)
CAFMKHYLGAGNMLTF

SEQ ID NO: 124688 - protein, 14 aa, Homo sapiens
  CDR3 for beta chain variable domain of TCR clone 62344 (TRBV2, TRBJ2-1)
CASSEALDGNEQFF

SEQ ID NO: 124689 - protein, 13 aa, Homo sapiens
  CDR3 for alpha chain variable domain of TCR clone 62345 (TRAV26-1, TRAJ29)
CIVRRSGNTPLVL

SEQ ID NO: 124690 - protein, 16 aa, Homo sapiens
  CDR3 for beta chain variable domain of TCR clone 62345 (TRBV11-2, TRBJ2-7)
CASSLAPTGVNYEQYF

SEQ ID NO: 124691 - protein, 12 aa, Homo sapiens
  CDR3 for alpha chain variable domain of TCR clone 62346 (TRAV12-3, TRAJ20)
CAMVRGDYKLSF

SEQ ID NO: 124692 - protein, 14 aa, Homo sapiens
  CDR3 for beta chain variable domain of TCR clone 62346 (TRBV5-5, TRBJ1-5)
CGSSGQGVDQPQHF

SEQ ID NO: 124693 - protein, 17 aa, Homo sapiens
  CDR3 for alpha chain variable domain of TCR clone 62347 (TRAV13-1, TRAJ23)
CAASKRFHRLRKAYLRT

SEQ ID NO: 124694 - protein, 13 aa, Homo sapiens
  CDR3 for beta chain variable domain of TCR clone 62347 (TRBV11-2, TRBJ2-7)
CASSGTRPYEQYF

SEQ ID NO: 124695 - protein, 14 aa, Homo sapiens
  CDR3 for alpha chain variable domain of TCR clone 62348 (TRAV9-2, TRAJ38)
CALSNAGNNRKLIW

SEQ ID NO: 124696 - protein, 15 aa, Homo sapiens
  CDR3 for beta chain variable domain of TCR clone 62348 (TRBV7-9, TRBJ1-4)
CASSATGGNNEKLFF

SEQ ID NO: 124697 - protein, 15 aa, Homo sapiens
  CDR3 for alpha chain variable domain of TCR clone 62349 (TRAV8-3, TRAJ45)
CASSYSGGGDDGLTF

SEQ ID NO: 124698 - protein, 17 aa, Homo sapiens
  CDR3 for beta chain variable domain of TCR clone 62349 (TRBV7-8, TRBJ1-2)
CASSLRPLQGHLYGYTF

SEQ ID NO: 124699 - protein, 11 aa, Homo sapiens
  CDR3 for alpha chain variable domain of TCR clone 62350 (TRAV17, TRAJ21)
CATGNFNKFYF

SEQ ID NO: 124700 - protein, 11 aa, Homo sapiens
  CDR3 for beta chain variable domain of TCR clone 62350 (TRBV28, TRBJ2-7)
CASSTQGGKSF

SEQ ID NO: 124701 - protein, 17 aa, Homo sapiens
  CDR3 for alpha chain variable domain of TCR clone 62351 (TRAV20, TRAJ53)
RAVQAQGSGGSNYKLTF

SEQ ID NO: 124702 - protein, 11 aa, Homo sapiens
  CDR3 for beta chain variable domain of TCR clone 62351 (TRBV18, TRBJ2-5)
CASSPRETQYF

SEQ ID NO: 124703 - protein, 16 aa, Homo sapiens
  CDR3 for alpha chain variable domain of TCR clone 62352 (TRAV4, TRAJ22)
CLVGDLYSGSARQLTF

SEQ ID NO: 124704 - protein, 11 aa, Homo sapiens
  CDR3 for beta chain variable domain of TCR clone 62352 (TRBV12-4, TRBJ2-3)
CASTATDTQYF

SEQ ID NO: 124705 - protein, 13 aa, Homo sapiens
  CDR3 for alpha chain variable domain of TCR clone 62353 (TRAV4, TRAJ15)
CLVGPEAGTAMIF

SEQ ID NO: 124706 - protein, 15 aa, Homo sapiens
  CDR3 for beta chain variable domain of TCR clone 62353 (TRBV7-2, TRBJ2-1)
CASSFDPGRRNEQFF

SEQ ID NO: 124707 - protein, 15 aa, Homo sapiens
  CDR3 for alpha chain variable domain of TCR clone 62354 (TRAV2, TRAJ9)
CTVEDRGTGGFKTIF

SEQ ID NO: 124708 - protein, 14 aa, Homo sapiens
  CDR3 for beta chain variable domain of TCR clone 62354 (TRBV4-1, TRBJ2-2)
CASSQAVNTGELFF

SEQ ID NO: 124709 - protein, 23 aa, Homo sapiens
  CDR3 for alpha chain variable domain of TCR clone 62355 (TRAV26-1, )
CIADNTGNNHIQNPDPAVYQLRD

SEQ ID NO: 124710 - protein, 13 aa, Homo sapiens
  CDR3 for beta chain variable domain of TCR clone 62355 (TRBV20-1, TRBJ1-1)
CSARGGGNTEAFF

SEQ ID NO: 124711 - protein, 13 aa, Homo sapiens
  CDR3 for alpha chain variable domain of TCR clone 62356 (TRAV1-1, TRAJ31)
CASYLNNNARLMF

SEQ ID NO: 124712 - protein, 14 aa, Homo sapiens
  CDR3 for beta chain variable domain of TCR clone 62356 (TRBV5-7, TRBJ2-3)
CASSYFGQVHTQYF

SEQ ID NO: 124713 - protein, 12 aa, Homo sapiens
  CDR3 for alpha chain variable domain of TCR clone 62357 (TRAV13-2, TRAJ23)
CAERHRGGKLIF

SEQ ID NO: 124714 - protein, 10 aa, Homo sapiens
  CDR3 for beta chain variable domain of TCR clone 62357 (TRBV12-4, TRBJ1-2)
CASSFIWLHL

SEQ ID NO: 124715 - protein, 16 aa, Homo sapiens
  CDR3 for alpha chain variable domain of TCR clone 62358 (TRAV21, TRAJ52)
CSVTNAGGTSYGKLTF

SEQ ID NO: 124716 - protein, 13 aa, Homo sapiens
  CDR3 for beta chain variable domain of TCR clone 62358 (TRBV20-1, TRBJ2-3)
CSARLAGTDTQYF

SEQ ID NO: 124717 - protein, 16 aa, Homo sapiens
  CDR3 for alpha chain variable domain of TCR clone 62359 (TRAV30, TRAJ24)
CGTEIVDADSWRKFQF

SEQ ID NO: 124718 - protein, 16 aa, Homo sapiens
  CDR3 for beta chain variable domain of TCR clone 62359 (TRBV12-5, TRBJ2-5)
CASGPRTSGNQETQYF

SEQ ID NO: 124719 - protein, 14 aa, Homo sapiens
  CDR3 for alpha chain variable domain of TCR clone 62360 (TRAV12-3, TRAJ56)
CAMSVTGANSKLTF

SEQ ID NO: 124720 - protein, 17 aa, Homo sapiens
  CDR3 for beta chain variable domain of TCR clone 62360 (TRBV20-1, TRBJ2-3)
CSASLLGRGGNADTQYF

SEQ ID NO: 124721 - protein, 14 aa, Homo sapiens
  CDR3 for alpha chain variable domain of TCR clone 62361 (TRAV12-2, TRAJ40)
CAVKIPSGTYKYIF

SEQ ID NO: 124722 - protein, 12 aa, Homo sapiens
  CDR3 for beta chain variable domain of TCR clone 62361 (TRBV11-2, TRBJ2-1)
CASSPGNNEQFL

SEQ ID NO: 124723 - protein, 16 aa, Homo sapiens
  CDR3 for alpha chain variable domain of TCR clone 62362 (TRAV3, TRAJ6)
CAVRDGIGRRKLHTYI

SEQ ID NO: 124724 - protein, 15 aa, Homo sapiens
  CDR3 for beta chain variable domain of TCR clone 62362 (TRBV5-1, TRBJ2-7)
CASSLGDFTTYEQYF

SEQ ID NO: 124725 - protein, 17 aa, Homo sapiens
  CDR3 for alpha chain variable domain of TCR clone 62363 (TRAV27, TRAJ42)
CAERVIYYGGSQGNLIF

SEQ ID NO: 124726 - protein, 15 aa, Homo sapiens
  CDR3 for beta chain variable domain of TCR clone 62363 (TRBV20-1, TRBJ2-7)
CSARDRVSGMDEQYF

SEQ ID NO: 124727 - protein, 15 aa, Homo sapiens
  CDR3 for alpha chain variable domain of TCR clone 62364 (TRAV13-1, TRAJ32)
CAASNGWWCYKQAHL

SEQ ID NO: 124728 - protein, 15 aa, Homo sapiens
  CDR3 for beta chain variable domain of TCR clone 62364 (TRBV6-1, TRBJ2-3)
CASSERGGITDTQYF

SEQ ID NO: 124729 - protein, 12 aa, Homo sapiens
  CDR3 for alpha chain variable domain of TCR clone 62365 (TRAV2, TRAJ5)
CALDTGRRALTF

SEQ ID NO: 124730 - protein, 13 aa, Homo sapiens
  CDR3 for beta chain variable domain of TCR clone 62365 (TRBV7-9, TRBJ2-2)
CASSLDPTGELFF

SEQ ID NO: 124731 - protein, 13 aa, Homo sapiens
  CDR3 for alpha chain variable domain of TCR clone 62366 (TRAV12-3, TRAJ7)
CTMTPYGNNRLAF

SEQ ID NO: 124732 - protein, 13 aa, Homo sapiens
  CDR3 for beta chain variable domain of TCR clone 62366 (TRBV28, TRBJ1-5)
CASRMTGDQPQHF

SEQ ID NO: 124733 - protein, 15 aa, Homo sapiens
  CDR3 for alpha chain variable domain of TCR clone 62367 (TRAV8-3, TRAJ45)
CASSYSGGGADGLTF

SEQ ID NO: 124734 - protein, 18 aa, Homo sapiens
  CDR3 for beta chain variable domain of TCR clone 62367 (TRBV18, TRBJ1-3)
CAISPRGGAGPSGNTIYF

SEQ ID NO: 124735 - protein, 17 aa, Homo sapiens
  CDR3 for alpha chain variable domain of TCR clone 62368 (TRAV3, TRAJ6)
CAVRDGPRAGGSYIPTF

SEQ ID NO: 124736 - protein, 15 aa, Homo sapiens
  CDR3 for beta chain variable domain of TCR clone 62368 (TRBV28, TRBJ2-5)
CASSFRQGALETQYF

SEQ ID NO: 124737 - protein, 14 aa, Homo sapiens
  CDR3 for alpha chain variable domain of TCR clone 62369 (TRAV12-1, TRAJ6)
CVVKRSGGSYIPTF

SEQ ID NO: 124738 - protein, 16 aa, Homo sapiens
  CDR3 for beta chain variable domain of TCR clone 62369 (TRBV24-1, TRBJ2-3)
CATSDPGTGATDTQYF

SEQ ID NO: 124739 - protein, 12 aa, Homo sapiens
  CDR3 for alpha chain variable domain of TCR clone 62370 (TRAV12-1, TRAJ40)
CVVYSGTYKYIF

SEQ ID NO: 124740 - protein, 18 aa, Homo sapiens
  CDR3 for beta chain variable domain of TCR clone 62370 (TRBV11-3, TRBJ2-3)
CASSLGGAARGAPNTQYF

SEQ ID NO: 124741 - protein, 12 aa, Homo sapiens
  CDR3 for alpha chain variable domain of TCR clone 62371 (TRAV21, TRAJ33)
CAKVDSNYQLIW

SEQ ID NO: 124742 - protein, 18 aa, Homo sapiens
  CDR3 for beta chain variable domain of TCR clone 62371 (TRBV15, TRBJ2-3)
CATSRDGARSWDTDTQHF

SEQ ID NO: 124743 - protein, 15 aa, Homo sapiens
  CDR3 for alpha chain variable domain of TCR clone 62372 (TRAV8-3, TRAJ41)
CAVGSNSNPGYALNF

SEQ ID NO: 124744 - protein, 17 aa, Homo sapiens
  CDR3 for beta chain variable domain of TCR clone 62372 (TRBV25-1, TRBJ2-1)
CASSAYGQGRGVYEQFF

SEQ ID NO: 124745 - protein, 12 aa, Homo sapiens
  CDR3 for alpha chain variable domain of TCR clone 62373 (TRAV8-3, TRAJ43)
CAVGRTDNDMRF

SEQ ID NO: 124746 - protein, 16 aa, Homo sapiens
  CDR3 for beta chain variable domain of TCR clone 62373 (TRBV20-1, TRBJ1-4)
CSAPGQGLLTNEKLFF

SEQ ID NO: 124747 - protein, 16 aa, Homo sapiens
  CDR3 for alpha chain variable domain of TCR clone 62374 (TRAV16, TRAJ4)
CALSRMFSGGYNKLIC

SEQ ID NO: 124748 - protein, 16 aa, Homo sapiens
  CDR3 for beta chain variable domain of TCR clone 62374 (TRBV24-1, TRBJ2-3)
CATSDPGTGATDTQYF

SEQ ID NO: 124749 - protein, 13 aa, Homo sapiens
  CDR3 for alpha chain variable domain of TCR clone 62375 (TRAV8-3, TRAJ43)
CAVVPDNNNDMRF

SEQ ID NO: 124750 - protein, 16 aa, Homo sapiens
  CDR3 for beta chain variable domain of TCR clone 62375 (TRBV7-2, TRBJ2-5)
CASSPFPTGGEETQYF

SEQ ID NO: 124751 - protein, 19 aa, Homo sapiens
  CDR3 for alpha chain variable domain of TCR clone 62376 (TRAV26-1, TRAJ29)
CCVLCIVRVEGSGNTPLVF

SEQ ID NO: 124752 - protein, 15 aa, Homo sapiens
  CDR3 for beta chain variable domain of TCR clone 62376 (TRBV7-9, TRBJ1-5)
CASSQGHQPNQPQHF

SEQ ID NO: 124753 - protein, 12 aa, Homo sapiens
  CDR3 for alpha chain variable domain of TCR clone 62377 (TRAV12-3, TRAJ20)
CAMVRGDCKLSF

SEQ ID NO: 124754 - protein, 17 aa, Homo sapiens
  CDR3 for beta chain variable domain of TCR clone 62377 (TRBV28, TRBJ2-5)
CASSTPEGDALQETQYF

SEQ ID NO: 124755 - protein, 15 aa, Homo sapiens
  CDR3 for alpha chain variable domain of TCR clone 62378 (TRAV38-1, TRAJ26)
CAFMKHDGNGQNFVF

SEQ ID NO: 124756 - protein, 16 aa, Homo sapiens
  CDR3 for beta chain variable domain of TCR clone 62378 (TRBV18, TRBJ1-1)
CASSPGVGGRGGEAFF

SEQ ID NO: 124757 - protein, 17 aa, Homo sapiens
  CDR3 for alpha chain variable domain of TCR clone 62379 (TRAV3, TRAJ42)
CAVRDRDYGGSQGNLIF

SEQ ID NO: 124758 - protein, 13 aa, Homo sapiens
  CDR3 for beta chain variable domain of TCR clone 62379 (TRBV15, TRBJ1-6)
CATSGGLNSPLHF

SEQ ID NO: 124759 - protein, 13 aa, Homo sapiens
  CDR3 for alpha chain variable domain of TCR clone 62380 (TRAV26-1, TRAJ48)
CIVRVVGDEKLNF

SEQ ID NO: 124760 - protein, 19 aa, Homo sapiens
  CDR3 for beta chain variable domain of TCR clone 62380 (TRBV11-3, TRBJ2-2)
CASSTRPGAKTTNTGELFF

SEQ ID NO: 124761 - protein, 16 aa, Homo sapiens
  CDR3 for alpha chain variable domain of TCR clone 62381 (TRAV35, TRAJ28)
CAVQRYSGAGSYQLTF

SEQ ID NO: 124762 - protein, 13 aa, Homo sapiens
  CDR3 for beta chain variable domain of TCR clone 62381 (TRBV19, TRBJ1-2)
CASSQGQVYGYTF

SEQ ID NO: 124763 - protein, 18 aa, Homo sapiens
  CDR3 for alpha chain variable domain of TCR clone 62382 (TRAV12-3, TRAJ52)
CAMSRTNAGGTSYGKLTF

SEQ ID NO: 124764 - protein, 17 aa, Homo sapiens
  CDR3 for beta chain variable domain of TCR clone 62382 (TRBV7-3, TRBJ2-3)
CASSLMKRMRRADTQYF

SEQ ID NO: 124765 - protein, 11 aa, Homo sapiens
  CDR3 for alpha chain variable domain of TCR clone 62383 (TRAV13-1, TRAJ39)
CASHAGNMLTF

SEQ ID NO: 124766 - protein, 15 aa, Homo sapiens
  CDR3 for beta chain variable domain of TCR clone 62383 (TRBV20-1, TRBJ2-7)
CSAKDRVSGMDEQYF

SEQ ID NO: 124767 - protein, 15 aa, Homo sapiens
  CDR3 for alpha chain variable domain of TCR clone 62384 (TRAV12-1, TRAJ44)
CVVDTPQGTASKLTF

SEQ ID NO: 124768 - protein, 14 aa, Homo sapiens
  CDR3 for beta chain variable domain of TCR clone 62384 (TRBV5-1, TRBJ2-7)
CASSRGESLYEQYF

SEQ ID NO: 124769 - protein, 15 aa, Homo sapiens
  CDR3 for alpha chain variable domain of TCR clone 62385 (TRAV12-3, TRAJ6)
CAMSPASGGSYIPTF

SEQ ID NO: 124770 - protein, 15 aa, Homo sapiens
  CDR3 for beta chain variable domain of TCR clone 62385 (TRBV4-1, TRBJ1-4)
CASSDTGGTNEKLFF

SEQ ID NO: 124771 - protein, 14 aa, Homo sapiens
  CDR3 for alpha chain variable domain of TCR clone 62386 (TRAV26-1, TRAJ26)
CTVRATFLGQNFVF

SEQ ID NO: 124772 - protein, 16 aa, Homo sapiens
  CDR3 for beta chain variable domain of TCR clone 62386 (TRBV12-4, TRBJ2-7)
CASRSTGTGPSYEQYF

SEQ ID NO: 124773 - protein, 18 aa, Homo sapiens
  CDR3 for alpha chain variable domain of TCR clone 62387 (TRAV21, TRAJ52)
CAVRPSPAGGTSYGKLTF

SEQ ID NO: 124774 - protein, 15 aa, Homo sapiens
  CDR3 for beta chain variable domain of TCR clone 62387 (TRBV27, TRBJ2-1)
CASSNGGGSSNEQLF

SEQ ID NO: 124775 - protein, 14 aa, Homo sapiens
  CDR3 for alpha chain variable domain of TCR clone 62388 (TRAV13-1, TRAJ44)
CAAKATGTASNLTF

SEQ ID NO: 124776 - protein, 17 aa, Homo sapiens
  CDR3 for beta chain variable domain of TCR clone 62388 (TRBV7-3, TRBJ2-3)
RASSLMKRMRGADTQYF

SEQ ID NO: 124777 - protein, 13 aa, Homo sapiens
  CDR3 for alpha chain variable domain of TCR clone 62389 (TRAV8-3, TRAJ28)
CAVGAVGSFQLTF

SEQ ID NO: 124778 - protein, 15 aa, Homo sapiens
  CDR3 for beta chain variable domain of TCR clone 62389 (TRBV7-9, TRBJ1-5)
CASSQGHQPNQPQHF

SEQ ID NO: 124779 - protein, 13 aa, Homo sapiens
  CDR3 for alpha chain variable domain of TCR clone 62390 (TRAV21, TRAJ57)
CAVTQGGSEKLVF

SEQ ID NO: 124780 - protein, 16 aa, Homo sapiens
  CDR3 for beta chain variable domain of TCR clone 62390 (TRBV29-1, TRBJ2-7)
CSVEVAEDGTAYEQYF

SEQ ID NO: 124781 - protein, 14 aa, Homo sapiens
  CDR3 for alpha chain variable domain of TCR clone 62391 (TRAV16, TRAJ10)
CSKKHTGGGNKLTF

SEQ ID NO: 124782 - protein, 12 aa, Homo sapiens
  CDR3 for beta chain variable domain of TCR clone 62391 (TRBV7-2, TRBJ1-5)
CASSLWSQPQHF

SEQ ID NO: 124783 - protein, 12 aa, Homo sapiens
  CDR3 for alpha chain variable domain of TCR clone 62392 (TRAV12-1, TRAJ6)
CVVNFRSYIPTF

SEQ ID NO: 124784 - protein, 17 aa, Homo sapiens
  CDR3 for beta chain variable domain of TCR clone 62392 (TRBV24-1, TRBJ2-1)
CATSDVSTSGTYNEQFF

SEQ ID NO: 124785 - protein, 14 aa, Homo sapiens
  CDR3 for alpha chain variable domain of TCR clone 62393 (TRAV12-2, TRAJ40)
CAVKIPSGTYKYIF

SEQ ID NO: 124786 - protein, 20 aa, Homo sapiens
  CDR3 for beta chain variable domain of TCR clone 62393 (TRBV28, TRBJ2-1)
WASTPIGRSPGLAGGNEQFF

SEQ ID NO: 124787 - protein, 15 aa, Homo sapiens
  CDR3 for alpha chain variable domain of TCR clone 62394 (TRAV17, TRAJ57)
CATGPSQGGSEKLVF

SEQ ID NO: 124788 - protein, 13 aa, Homo sapiens
  CDR3 for beta chain variable domain of TCR clone 62394 (TRBV19, TRBJ1-2)
CASSQGQVYGYTF

SEQ ID NO: 124789 - protein, 23 aa, Homo sapiens
  CDR3 for alpha chain variable domain of TCR clone 62395 (TRAV8-4, TRAJ26)
CAGGKVRILSLVPEPDCPCCPIS

SEQ ID NO: 124790 - protein, 17 aa, Homo sapiens
  CDR3 for beta chain variable domain of TCR clone 62395 (TRBV7-9, TRBJ2-3)
CASSPTVAGDLTDTQYF

SEQ ID NO: 124791 - protein, 14 aa, Homo sapiens
  CDR3 for alpha chain variable domain of TCR clone 62396 (TRAV38-2/DV8, TRAJ30)
CAYMDGLGGDKIIF

SEQ ID NO: 124792 - protein, 15 aa, Homo sapiens
  CDR3 for beta chain variable domain of TCR clone 62396 (TRBV7-9, TRBJ2-2)
CASRPADRDTGEMFF

SEQ ID NO: 124793 - protein, 12 aa, Homo sapiens
  CDR3 for alpha chain variable domain of TCR clone 62397 (TRAV12-3, TRAJ20)
CAMVRGDYKLSF

SEQ ID NO: 124794 - protein, 14 aa, Homo sapiens
  CDR3 for beta chain variable domain of TCR clone 62397 (TRBV25-1, TRBJ1-1)
CASTHLGGNTEAFF

SEQ ID NO: 124795 - protein, 13 aa, Homo sapiens
  CDR3 for alpha chain variable domain of TCR clone 62398 (TRAV12-1, TRAJ26)
SATYLYYGQNFVF

SEQ ID NO: 124796 - protein, 15 aa, Homo sapiens
  CDR3 for beta chain variable domain of TCR clone 62398 (TRBV5-1, TRBJ2-6)
CASSLDPAGANVLTF

SEQ ID NO: 124797 - protein, 18 aa, Homo sapiens
  CDR3 for alpha chain variable domain of TCR clone 62399 (TRAV26-2, TRAJ54)
CILRDVEVGTQGAQKLVF

SEQ ID NO: 124798 - protein, 16 aa, Homo sapiens
  CDR3 for beta chain variable domain of TCR clone 62399 (TRBV6-1, TRBJ2-5)
CASSETLDRGAETQYF

SEQ ID NO: 124799 - protein, 13 aa, Homo sapiens
  CDR3 for alpha chain variable domain of TCR clone 62400 (TRAV8-3, TRAJ48)
SAVVPFGNEKLTF

SEQ ID NO: 124800 - protein, 15 aa, Homo sapiens
  CDR3 for beta chain variable domain of TCR clone 62400 (TRBV11-2, TRBJ2-1)
CASSSPSTRYNEQFF

SEQ ID NO: 124801 - protein, 14 aa, Homo sapiens
  CDR3 for alpha chain variable domain of TCR clone 62401 (TRAV12-3, TRAJ9)
CAMSPNTGGFKTIF

SEQ ID NO: 124802 - protein, 14 aa, Homo sapiens
  CDR3 for beta chain variable domain of TCR clone 62401 (TRBV19, TRBJ2-7)
CASSIFAGTYEQYF

SEQ ID NO: 124803 - protein, 15 aa, Homo sapiens
  CDR3 for alpha chain variable domain of TCR clone 62402 (TRAV17, TRAJ57)
FATGPSQGGSKKLVF

SEQ ID NO: 124804 - protein, 16 aa, Homo sapiens
  CDR3 for beta chain variable domain of TCR clone 62402 (TRBV12-4, TRBJ1-5)
CASSRPVGGSNQPQHF

SEQ ID NO: 124805 - protein, 13 aa, Homo sapiens
  CDR3 for alpha chain variable domain of TCR clone 62403 (TRAV8-3, TRAJ48)
CCGCNFGNEKLTF

SEQ ID NO: 124806 - protein, 13 aa, Homo sapiens
  CDR3 for beta chain variable domain of TCR clone 62403 (TRBV4-2, TRBJ1-1)
CASSQAGNTEAFF

SEQ ID NO: 124807 - protein, 15 aa, Homo sapiens
  CDR3 for alpha chain variable domain of TCR clone 62404 (TRAV21, TRAJ53)
CAVRQSGGSNYKLTF

SEQ ID NO: 124808 - protein, 13 aa, Homo sapiens
  CDR3 for beta chain variable domain of TCR clone 62404 (TRBV19, TRBJ2-5)
CASSIPYGETQYF

SEQ ID NO: 124809 - protein, 15 aa, Homo sapiens
  CDR3 for alpha chain variable domain of TCR clone 62405 (TRAV3, TRAJ29)
CAVRAPLSGNTSLVF

SEQ ID NO: 124810 - protein, 15 aa, Homo sapiens
  CDR3 for beta chain variable domain of TCR clone 62405 (TRBV28, TRBJ1-1)
CASRIKGGLNTEAFF

SEQ ID NO: 124811 - protein, 14 aa, Homo sapiens
  CDR3 for alpha chain variable domain of TCR clone 62406 (TRAV12-3, TRAJ10)
SHLPLTGGGNKLTF

SEQ ID NO: 124812 - protein, 15 aa, Homo sapiens
  CDR3 for beta chain variable domain of TCR clone 62406 (TRBV6-1, TRBJ2-3)
CAARRRGGITDTQYF

SEQ ID NO: 124813 - protein, 13 aa, Homo sapiens
  CDR3 for alpha chain variable domain of TCR clone 62407 (TRAV8-3, TRAJ48)
CTVVPFGNEKLTF

SEQ ID NO: 124814 - protein, 15 aa, Homo sapiens
  CDR3 for beta chain variable domain of TCR clone 62407 (TRBV11-2, TRBJ2-1)
CASSSPSTRYNEQFF

SEQ ID NO: 124815 - protein, 12 aa, Homo sapiens
  CDR3 for alpha chain variable domain of TCR clone 62408 (TRAV13-1, TRAJ9)
CASHTGGFQTIF

SEQ ID NO: 124816 - protein, 13 aa, Homo sapiens
  CDR3 for beta chain variable domain of TCR clone 62408 (TRBV12-4, TRBJ1-2)
CASSSGSKDGYTF

SEQ ID NO: 124817 - protein, 11 aa, Homo sapiens
  CDR3 for alpha chain variable domain of TCR clone 62409 (TRAV30, TRAJ24)
WMLTAGGKFQF

SEQ ID NO: 124818 - protein, 14 aa, Homo sapiens
  CDR3 for beta chain variable domain of TCR clone 62409 (TRBV19, TRBJ2-1)
CASPTFVLSGEQFF

SEQ ID NO: 124819 - protein, 14 aa, Homo sapiens
  CDR3 for alpha chain variable domain of TCR clone 62410 (TRAV13-1, TRAJ12)
CAASYMDSSYKLIF

SEQ ID NO: 124820 - protein, 13 aa, Homo sapiens
  CDR3 for beta chain variable domain of TCR clone 62410 (TRBV2, TRBJ2-5)
CACSDGIQETQYF

SEQ ID NO: 124821 - protein, 11 aa, Homo sapiens
  CDR3 for alpha chain variable domain of TCR clone 62411 (TRAV2, TRAJ13)
CASGGYQKVTF

SEQ ID NO: 124822 - protein, 15 aa, Homo sapiens
  CDR3 for beta chain variable domain of TCR clone 62411 (TRBV7-2, TRBJ2-1)
CASSLVGSSYNEQFF

SEQ ID NO: 124823 - protein, 12 aa, Homo sapiens
  CDR3 for alpha chain variable domain of TCR clone 62412 (TRAV13-1, TRAJ21)
CAAFFNFNKFYF

SEQ ID NO: 124824 - protein, 14 aa, Homo sapiens
  CDR3 for beta chain variable domain of TCR clone 62412 (TRBV4-1, TRBJ2-7)
CASRLTGGSYEQYF

SEQ ID NO: 124825 - protein, 10 aa, Homo sapiens
  CDR3 for alpha chain variable domain of TCR clone 62413 (TRAV30, TRAJ32)
CGTEKEMVVL

SEQ ID NO: 124826 - protein, 13 aa, Homo sapiens
  CDR3 for beta chain variable domain of TCR clone 62413 (TRBV10-3, TRBJ2-7)
CASKLAVNYEQYF

SEQ ID NO: 124827 - protein, 15 aa, Homo sapiens
  CDR3 for alpha chain variable domain of TCR clone 62414 (TRAV4, TRAJ4)
CLVGPLSGGYNKLIL

SEQ ID NO: 124828 - protein, 16 aa, Homo sapiens
  CDR3 for beta chain variable domain of TCR clone 62414 (TRBV7-8, TRBJ1-4)
CASSLGVGTSNEKLFF

SEQ ID NO: 124829 - protein, 18 aa, Homo sapiens
  CDR3 for alpha chain variable domain of TCR clone 62415 (TRAV21, TRAJ52)
CAVRPSPAGGTSYGKLTF

SEQ ID NO: 124830 - protein, 14 aa, Homo sapiens
  CDR3 for beta chain variable domain of TCR clone 62415 (TRBV11-2, TRBJ1-2)
CASSLGTANYGYTF

SEQ ID NO: 124831 - protein, 17 aa, Homo sapiens
  CDR3 for alpha chain variable domain of TCR clone 62416 (TRAV3, TRAJ6)
CAVRDGPRAGGSYIPTF

SEQ ID NO: 124832 - protein, 14 aa, Homo sapiens
  CDR3 for beta chain variable domain of TCR clone 62416 (TRBV3-1, TRBJ2-5)
CASSQGPDQETQYF

SEQ ID NO: 124833 - protein, 12 aa, Homo sapiens
  CDR3 for alpha chain variable domain of TCR clone 62417 (TRAV27, TRAJ13)
CAGVRGYQKVTF

SEQ ID NO: 124834 - protein, 16 aa, Homo sapiens
  CDR3 for beta chain variable domain of TCR clone 62417 (TRBV4-2, TRBJ2-7)
CASSQDGGSLRGEQYF

SEQ ID NO: 124835 - protein, 13 aa, Homo sapiens
  CDR3 for alpha chain variable domain of TCR clone 62418 (TRAV1-2, TRAJ9)
CAALNTGGFKTIF

SEQ ID NO: 124836 - protein, 12 aa, Homo sapiens
  CDR3 for beta chain variable domain of TCR clone 62418 (TRBV6-3, TRBJ2-7)
CASSLTPYEQYF

SEQ ID NO: 124837 - protein, 13 aa, Homo sapiens
  CDR3 for alpha chain variable domain of TCR clone 62419 (TRAV8-3, TRAJ28)
CAVGAVGSYQLTF

SEQ ID NO: 124838 - protein, 15 aa, Homo sapiens
  CDR3 for beta chain variable domain of TCR clone 62419 (TRBV7-9, TRBJ1-5)
CASSQGHQPNQLQHF

SEQ ID NO: 124839 - protein, 16 aa, Homo sapiens
  CDR3 for alpha chain variable domain of TCR clone 62420 (TRAV8-3, TRAJ13)
CAVGAYLSGGYQKVTF

SEQ ID NO: 124840 - protein, 15 aa, Homo sapiens
  CDR3 for beta chain variable domain of TCR clone 62420 (TRBV19, TRBJ2-1)
CASSSPGVPLDEQFF

SEQ ID NO: 124841 - protein, 13 aa, Homo sapiens
  CDR3 for alpha chain variable domain of TCR clone 62421 (TRAV2, TRAJ36)
CAVDQTGANNLSF

SEQ ID NO: 124842 - protein, 12 aa, Homo sapiens
  CDR3 for beta chain variable domain of TCR clone 62421 (TRBV19, TRBJ1-1)
CASMNRYTEAFF

SEQ ID NO: 124843 - protein, 14 aa, Homo sapiens
  CDR3 for alpha chain variable domain of TCR clone 62422 (TRAV3, TRAJ21)
CAVYTTSTNFTLDL

SEQ ID NO: 124844 - protein, 14 aa, Homo sapiens
  CDR3 for beta chain variable domain of TCR clone 62422 (TRBV7-8, TRBJ2-3)
CASSLEAGTDTQYF

SEQ ID NO: 124845 - protein, 15 aa, Homo sapiens
  CDR3 for alpha chain variable domain of TCR clone 62423 (TRAV13-1, TRAJ17)
CAASIERAAGNELTF

SEQ ID NO: 124846 - protein, 13 aa, Homo sapiens
  CDR3 for beta chain variable domain of TCR clone 62423 (TRBV7-7, TRBJ2-3)
CASSLSRADTQYF

SEQ ID NO: 124847 - protein, 16 aa, Homo sapiens
  CDR3 for alpha chain variable domain of TCR clone 62424 (TRAV12-2, TRAJ40)
CAVIRGGTSGTYKYIL

SEQ ID NO: 124848 - protein, 14 aa, Homo sapiens
  CDR3 for beta chain variable domain of TCR clone 62424 (TRBV20-1, TRBJ2-5)
CSARDGRAGETQYF

SEQ ID NO: 124849 - protein, 15 aa, Homo sapiens
  CDR3 for alpha chain variable domain of TCR clone 62425 (TRAV12-1, TRAJ44)
CVVFVNTGTASKLTF

SEQ ID NO: 124850 - protein, 14 aa, Homo sapiens
  CDR3 for beta chain variable domain of TCR clone 62425 (TRBV7-2, TRBJ2-7)
CASRSQGAAYEQYF

SEQ ID NO: 124851 - protein, 15 aa, Homo sapiens
  CDR3 for alpha chain variable domain of TCR clone 62426 (TRAV26-1, TRAJ29)
CIVRVEGSGNTPLVF

SEQ ID NO: 124852 - protein, 15 aa, Homo sapiens
  CDR3 for beta chain variable domain of TCR clone 62426 (TRBV2, TRBJ2-7)
CASSEGLARSYEQYF

SEQ ID NO: 124853 - protein, 15 aa, Homo sapiens
  CDR3 for alpha chain variable domain of TCR clone 62427 (TRAV26-1, TRAJ40)
CIVRVTTSGTYKYIF

SEQ ID NO: 124854 - protein, 12 aa, Homo sapiens
  CDR3 for beta chain variable domain of TCR clone 62427 (TRBV11-2, TRBJ2-2)
CASSLGGGELFF

SEQ ID NO: 124855 - protein, 12 aa, Homo sapiens
  CDR3 for alpha chain variable domain of TCR clone 62428 (TRAV13-2, TRAJ23)
CAERHRGGKLIF

SEQ ID NO: 124856 - protein, 11 aa, Homo sapiens
  CDR3 for beta chain variable domain of TCR clone 62428 (TRBV11-2, TRBJ2-2)
CASSLPGELFF

SEQ ID NO: 124857 - protein, 15 aa, Homo sapiens
  CDR3 for alpha chain variable domain of TCR clone 62429 (TRAV12-1, TRAJ44)
YVADLPTGTASKLTF

SEQ ID NO: 124858 - protein, 16 aa, Homo sapiens
  CDR3 for beta chain variable domain of TCR clone 62429 (TRBV12-5, TRBJ2-5)
CASGPRTSGNQETQYF

SEQ ID NO: 124859 - protein, 13 aa, Homo sapiens
  CDR3 for alpha chain variable domain of TCR clone 62430 (TRAV8-6, TRAJ49)
CAVITNTGNQFYF

SEQ ID NO: 124860 - protein, 19 aa, Homo sapiens
  CDR3 for beta chain variable domain of TCR clone 62430 (TRBV25-1, TRBJ2-2)
CAILVYRVDRGRKTGELFF

SEQ ID NO: 124861 - protein, 13 aa, Homo sapiens
  CDR3 for alpha chain variable domain of TCR clone 62431 (TRAV21, TRAJ20)
CAVGLRVGYKLSF

SEQ ID NO: 124862 - protein, 21 aa, Homo sapiens
  CDR3 for beta chain variable domain of TCR clone 62431 (TRBV15, TRBJ2-1)
AWGTQPCTCVPPAEVDTARFF

SEQ ID NO: 124863 - protein, 14 aa, Homo sapiens
  CDR3 for alpha chain variable domain of TCR clone 62432 (TRAV13-1, TRAJ39)
CAASYNNAGNMLTF

SEQ ID NO: 124864 - protein, 14 aa, Homo sapiens
  CDR3 for beta chain variable domain of TCR clone 62432 (TRBV19, TRBJ2-1)
CASPTFVLSGEQFF

SEQ ID NO: 124865 - protein, 14 aa, Homo sapiens
  CDR3 for alpha chain variable domain of TCR clone 62433 (TRAV17, TRAJ54)
CATDANQGAPKLVF

SEQ ID NO: 124866 - protein, 12 aa, Homo sapiens
  CDR3 for beta chain variable domain of TCR clone 62433 (TRBV6-3, TRBJ2-1)
CASSGSYNEQFF

SEQ ID NO: 124867 - protein, 12 aa, Homo sapiens
  CDR3 for alpha chain variable domain of TCR clone 62434 (TRAV13-1, TRAJ53)
AASGGSNYKLTF

SEQ ID NO: 124868 - protein, 13 aa, Homo sapiens
  CDR3 for beta chain variable domain of TCR clone 62434 (TRBV7-2, TRBJ2-2)
CASSSARAGELFF

SEQ ID NO: 124869 - protein, 16 aa, Homo sapiens
  CDR3 for alpha chain variable domain of TCR clone 62435 (TRAV3, TRAJ10)
CAVRDMRAGGGNKLTF

SEQ ID NO: 124870 - protein, 17 aa, Homo sapiens
  CDR3 for beta chain variable domain of TCR clone 62435 (TRBV20-1, TRBJ1-5)
CSASLSPGQGGNQPQHF

SEQ ID NO: 124871 - protein, 11 aa, Homo sapiens
  CDR3 for alpha chain variable domain of TCR clone 62436 (TRAV3, TRAJ21)
CAVGNFNKFYF

SEQ ID NO: 124872 - protein, 19 aa, Homo sapiens
  CDR3 for beta chain variable domain of TCR clone 62436 (TRBV19, TRBJ2-5)
CASSIGQVTDFFLGETQYF

SEQ ID NO: 124873 - protein, 12 aa, Homo sapiens
  CDR3 for alpha chain variable domain of TCR clone 62437 (TRAV16, TRAJ10)
CSRTGGGNKFTF

SEQ ID NO: 124874 - protein, 14 aa, Homo sapiens
  CDR3 for beta chain variable domain of TCR clone 62437 (TRBV7-2, TRBJ2-1)
CASSLGVGYNEQFF

SEQ ID NO: 124875 - protein, 17 aa, Homo sapiens
  CDR3 for alpha chain variable domain of TCR clone 62438 (TRAV3, TRAJ12)
CAVRDGGRMDSSYKLIF

SEQ ID NO: 124876 - protein, 14 aa, Homo sapiens
  CDR3 for beta chain variable domain of TCR clone 62438 (TRBV25-1, TRBJ1-1)
CASTHLGGNTEAFF

SEQ ID NO: 124877 - protein, 11 aa, Homo sapiens
  CDR3 for alpha chain variable domain of TCR clone 62439 (TRAV2, TRAJ33)
CAVDSNYQLIW

SEQ ID NO: 124878 - protein, 14 aa, Homo sapiens
  CDR3 for beta chain variable domain of TCR clone 62439 (TRBV12-5, TRBJ2-5)
CASGSRTHQETQYF

SEQ ID NO: 124879 - protein, 13 aa, Homo sapiens
  CDR3 for alpha chain variable domain of TCR clone 62440 (TRAV27, TRAJ49)
CAPRPYTGNRFYF

SEQ ID NO: 124880 - protein, 16 aa, Homo sapiens
  CDR3 for beta chain variable domain of TCR clone 62440 (TRBV4-1, TRBJ1-2)
CASSQDAGQVLYGYTF

SEQ ID NO: 124881 - protein, 13 aa, Homo sapiens
  CDR3 for alpha chain variable domain of TCR clone 62441 (TRAV4, TRAJ9)
CLVAEGGGFKTIF

SEQ ID NO: 124882 - protein, 11 aa, Homo sapiens
  CDR3 for beta chain variable domain of TCR clone 62441 (TRBV6-1, TRBJ2-1)
CASISSNEQFF

SEQ ID NO: 124883 - protein, 15 aa, Homo sapiens
  CDR3 for alpha chain variable domain of TCR clone 62442 (TRAV35, TRAJ23)
CAGPLGNNQGGQLIF

SEQ ID NO: 124884 - protein, 14 aa, Homo sapiens
  CDR3 for beta chain variable domain of TCR clone 62442 (TRBV7-9, TRBJ1-1)
CASTPLQSYTEAFF

SEQ ID NO: 124885 - protein, 13 aa, Homo sapiens
  CDR3 for alpha chain variable domain of TCR clone 62443 (TRAV2, TRAJ40)
CAVVTSGTYKYIF

SEQ ID NO: 124886 - protein, 15 aa, Homo sapiens
  CDR3 for beta chain variable domain of TCR clone 62443 (TRBV28, TRBJ2-1)
CASRVGLDEYNEQFF

SEQ ID NO: 124887 - protein, 12 aa, Homo sapiens
  CDR3 for alpha chain variable domain of TCR clone 62444 (TRAV13-2, TRAJ23)
CAERHRGGKLIF

SEQ ID NO: 124888 - protein, 16 aa, Homo sapiens
  CDR3 for beta chain variable domain of TCR clone 62444 (TRBV7-9, TRBJ2-1)
CASSDVAGGSYNEQFF

SEQ ID NO: 124889 - protein, 14 aa, Homo sapiens
  CDR3 for alpha chain variable domain of TCR clone 62445 (TRAV8-1, TRAJ49)
CASSIANTGNQFYF

SEQ ID NO: 124890 - protein, 13 aa, Homo sapiens
  CDR3 for beta chain variable domain of TCR clone 62445 (TRBV12-4, TRBJ1-1)
CASSPGTGFEAFF

SEQ ID NO: 124891 - protein, 11 aa, Homo sapiens
  CDR3 for alpha chain variable domain of TCR clone 62446 (TRAV8-6, TRAJ42)
CAVRGRKPRTS

SEQ ID NO: 124892 - protein, 13 aa, Homo sapiens
  CDR3 for beta chain variable domain of TCR clone 62446 (TRBV7-3, TRBJ1-1)
CASSQDWGAEAFF

SEQ ID NO: 124893 - protein, 14 aa, Homo sapiens
  CDR3 for alpha chain variable domain of TCR clone 62447 (TRAV26-1, TRAJ48)
CIVRVPFGNEKLTF

SEQ ID NO: 124894 - protein, 16 aa, Homo sapiens
  CDR3 for beta chain variable domain of TCR clone 62447 (TRBV18, TRBJ2-1)
CASSPYRSIRGDEQFF

SEQ ID NO: 124895 - protein, 14 aa, Homo sapiens
  CDR3 for alpha chain variable domain of TCR clone 62448 (TRAV13-1, TRAJ35)
CAASKGGFGNVLHC

SEQ ID NO: 124896 - protein, 11 aa, Homo sapiens
  CDR3 for beta chain variable domain of TCR clone 62448 (TRBV11-2, TRBJ1-1)
CASSINTEAFF

SEQ ID NO: 124897 - protein, 17 aa, Homo sapiens
  CDR3 for alpha chain variable domain of TCR clone 62449 (TRAV8-6, TRAJ58)
CAVSSWVGETSGSRLTF

SEQ ID NO: 124898 - protein, 14 aa, Homo sapiens
  CDR3 for beta chain variable domain of TCR clone 62449 (TRBV7-2, TRBJ2-5)
CASSPRGSSETQYF

SEQ ID NO: 124899 - protein, 15 aa, Homo sapiens
  CDR3 for alpha chain variable domain of TCR clone 62450 (TRAV21, TRAJ53)
CATLNSGGRNYKLTF

SEQ ID NO: 124900 - protein, 15 aa, Homo sapiens
  CDR3 for beta chain variable domain of TCR clone 62450 (TRBV18, TRBJ2-1)
CASSPPSASYNEQFF

SEQ ID NO: 124901 - protein, 12 aa, Homo sapiens
  CDR3 for alpha chain variable domain of TCR clone 62451 (TRAV13-1, TRAJ48)
CAANFGNEKLTF

SEQ ID NO: 124902 - protein, 13 aa, Homo sapiens
  CDR3 for beta chain variable domain of TCR clone 62451 (TRBV7-2, TRBJ1-1)
CASNLKGAKVAFF

SEQ ID NO: 124903 - protein, 15 aa, Homo sapiens
  CDR3 for alpha chain variable domain of TCR clone 62452 (TRAV26-2, TRAJ13)
CILRDLSGGYQKVTF

SEQ ID NO: 124904 - protein, 11 aa, Homo sapiens
  CDR3 for beta chain variable domain of TCR clone 62452 (TRBV7-9, TRBJ2-3)
CVSSYTDTQYF

SEQ ID NO: 124905 - protein, 13 aa, Homo sapiens
  CDR3 for alpha chain variable domain of TCR clone 62453 (TRAV3, TRAJ27)
CAVTPLGAGKSTF

SEQ ID NO: 124906 - protein, 13 aa, Homo sapiens
  CDR3 for beta chain variable domain of TCR clone 62453 (TRBV7-9, TRBJ2-3)
CASSPGSTDTQYF

SEQ ID NO: 124907 - protein, 11 aa, Homo sapiens
  CDR3 for alpha chain variable domain of TCR clone 62454 (TRAV4, TRAJ31)
CLVCDNARLMF

SEQ ID NO: 124908 - protein, 16 aa, Homo sapiens
  CDR3 for beta chain variable domain of TCR clone 62454 (TRBV7-2, TRBJ2-5)
CASSSKWLSGQETQYF

SEQ ID NO: 124909 - protein, 15 aa, Homo sapiens
  CDR3 for alpha chain variable domain of TCR clone 62455 (TRAV27, TRAJ38)
CAARRDAGNNRKLIW

SEQ ID NO: 124910 - protein, 13 aa, Homo sapiens
  CDR3 for beta chain variable domain of TCR clone 62455 (TRBV12-5, TRBJ2-3)
CASGDRQSDTQYF

SEQ ID NO: 124911 - protein, 14 aa, Homo sapiens
  CDR3 for alpha chain variable domain of TCR clone 62456 (TRAV35, TRAJ22)
CAGLRPGSARQLTF

SEQ ID NO: 124912 - protein, 19 aa, Homo sapiens
  CDR3 for beta chain variable domain of TCR clone 62456 (TRBV19, TRBJ2-5)
CASSIGQVTDFFLGETQYF

SEQ ID NO: 124913 - protein, 12 aa, Homo sapiens
  CDR3 for alpha chain variable domain of TCR clone 62457 (TRAV35, TRAJ49)
CAGWNTGNQFYF

SEQ ID NO: 124914 - protein, 16 aa, Homo sapiens
  CDR3 for beta chain variable domain of TCR clone 62457 (TRBV5-1, TRBJ2-2)
CASSLWDTTSTGELFF

SEQ ID NO: 124915 - protein, 14 aa, Homo sapiens
  CDR3 for alpha chain variable domain of TCR clone 62458 (TRAV3, TRAJ36)
YAVRDGTGANNLFF

SEQ ID NO: 124916 - protein, 16 aa, Homo sapiens
  CDR3 for beta chain variable domain of TCR clone 62458 (TRBV20-1, TRBJ2-6)
CSAREGPGVGANVLTF

SEQ ID NO: 124917 - protein, 18 aa, Homo sapiens
  CDR3 for alpha chain variable domain of TCR clone 62459 (TRAV21, TRAJ52)
CAVRPSPAGGTSYGKLTF

SEQ ID NO: 124918 - protein, 15 aa, Homo sapiens
  CDR3 for beta chain variable domain of TCR clone 62459 (TRBV7-2, TRBJ2-7)
CASSWGQGAIYEQYF

SEQ ID NO: 124919 - protein, 13 aa, Homo sapiens
  CDR3 for alpha chain variable domain of TCR clone 62460 (TRAV17, TRAJ22)
CAGRRGSARQLTF

SEQ ID NO: 124920 - protein, 14 aa, Homo sapiens
  CDR3 for beta chain variable domain of TCR clone 62460 (TRBV19, TRBJ1-1)
CAGSITGWETEAFF

SEQ ID NO: 124921 - protein, 17 aa, Homo sapiens
  CDR3 for alpha chain variable domain of TCR clone 62461 (TRAV13-2, TRAJ31)
CAENARLMFGDGTQLVV

SEQ ID NO: 124922 - protein, 14 aa, Homo sapiens
  CDR3 for beta chain variable domain of TCR clone 62461 (TRBV7-9, TRBJ2-1)
CSSSLGVADNEQFF

SEQ ID NO: 124923 - protein, 12 aa, Homo sapiens
  CDR3 for alpha chain variable domain of TCR clone 62462 (TRAV21, TRAJ13)
PGPSGGYQEVTF

SEQ ID NO: 124924 - protein, 15 aa, Homo sapiens
  CDR3 for beta chain variable domain of TCR clone 62462 (TRBV7-9, TRBJ1-6)
CASSSSGRGNSPLHF

SEQ ID NO: 124925 - protein, 14 aa, Homo sapiens
  CDR3 for alpha chain variable domain of TCR clone 62463 (TRAV12-3, TRAJ57)
CAMSAWGESEKLVF

SEQ ID NO: 124926 - protein, 14 aa, Homo sapiens
  CDR3 for beta chain variable domain of TCR clone 62463 (TRBV18, TRBJ2-5)
CASSPGVSQETQYF

SEQ ID NO: 124927 - protein, 12 aa, Homo sapiens
  CDR3 for alpha chain variable domain of TCR clone 62464 (TRAV8-3, TRAJ27)
CAVGAEAGKSTF

SEQ ID NO: 124928 - protein, 14 aa, Homo sapiens
  CDR3 for beta chain variable domain of TCR clone 62464 (TRBV2, TRBJ2-1)
CASRLMVGHDEQFF

SEQ ID NO: 124929 - protein, 14 aa, Homo sapiens
  CDR3 for alpha chain variable domain of TCR clone 62465 (TRAV1-2, TRAJ10)
CAGRVTGGGNKLTF

SEQ ID NO: 124930 - protein, 12 aa, Homo sapiens
  CDR3 for beta chain variable domain of TCR clone 62465 (TRBV5-4, TRBJ1-1)
CASSFGQTEAFF

SEQ ID NO: 124931 - protein, 13 aa, Homo sapiens
  CDR3 for alpha chain variable domain of TCR clone 62466 (TRAV12-3, TRAJ43)
CAMIRPNNNDMRF

SEQ ID NO: 124932 - protein, 12 aa, Homo sapiens
  CDR3 for beta chain variable domain of TCR clone 62466 (TRBV11-2, TRBJ2-5)
CASSLGQETQCF

SEQ ID NO: 124933 - protein, 14 aa, Homo sapiens
  CDR3 for alpha chain variable domain of TCR clone 62467 (TRAV36/DV7, TRAJ40)
CAVETTSGTYRYIF

SEQ ID NO: 124934 - protein, 13 aa, Homo sapiens
  CDR3 for beta chain variable domain of TCR clone 62467 (TRBV10-3, TRBJ2-5)
CAMTSGAGETQYF

SEQ ID NO: 124935 - protein, 12 aa, Homo sapiens
  CDR3 for alpha chain variable domain of TCR clone 62468 (TRAV2, TRAJ33)
CAVPDSNYQLIW

SEQ ID NO: 124936 - protein, 14 aa, Homo sapiens
  CDR3 for beta chain variable domain of TCR clone 62468 (TRBV19, TRBJ2-1)
CASPTFVLSGEQFF

SEQ ID NO: 124937 - protein, 14 aa, Homo sapiens
  CDR3 for alpha chain variable domain of TCR clone 62469 (TRAV1-2, TRAJ8)
CAVREDTGFQKLVF

SEQ ID NO: 124938 - protein, 14 aa, Homo sapiens
  CDR3 for beta chain variable domain of TCR clone 62469 (TRBV12-4, TRBJ2-3)
CASSGQGSTDTQYF

SEQ ID NO: 124939 - protein, 12 aa, Homo sapiens
  CDR3 for alpha chain variable domain of TCR clone 62470 (TRAV3, TRAJ20)
CAVRDHDYKLSF

SEQ ID NO: 124940 - protein, 12 aa, Homo sapiens
  CDR3 for beta chain variable domain of TCR clone 62470 (TRBV11-2, TRBJ2-2)
CASSLGGGELFF

SEQ ID NO: 124941 - protein, 11 aa, Homo sapiens
  CDR3 for alpha chain variable domain of TCR clone 62471 (TRAV2, TRAJ33)
CALDSNYQLIW

SEQ ID NO: 124942 - protein, 14 aa, Homo sapiens
  CDR3 for beta chain variable domain of TCR clone 62471 (TRBV11-2, TRBJ2-3)
CASSRLARTDTQYF

SEQ ID NO: 124943 - protein, 14 aa, Homo sapiens
  CDR3 for alpha chain variable domain of TCR clone 62472 (TRAV13-1, TRAJ36)
CAAIYQTGANNLFF

SEQ ID NO: 124944 - protein, 15 aa, Homo sapiens
  CDR3 for beta chain variable domain of TCR clone 62472 (TRBV5-1, TRBJ1-1)
CASSPLGGSNTEAFL

SEQ ID NO: 124945 - protein, 14 aa, Homo sapiens
  CDR3 for alpha chain variable domain of TCR clone 62473 (TRAV12-3, TRAJ10)
SHLPLTGGGNKLNF

SEQ ID NO: 124946 - protein, 15 aa, Homo sapiens
  CDR3 for beta chain variable domain of TCR clone 62473 (TRBV11-2, TRBJ1-3)
CASSLDGTVGNTIYF

SEQ ID NO: 124947 - protein, 12 aa, Homo sapiens
  CDR3 for alpha chain variable domain of TCR clone 62474 (TRAV1-2, TRAJ33)
CAALDSNYQLIW

SEQ ID NO: 124948 - protein, 16 aa, Homo sapiens
  CDR3 for beta chain variable domain of TCR clone 62474 (TRBV6-4, TRBJ1-2)
CAGSEAVGDPNYGYTF

SEQ ID NO: 124949 - protein, 15 aa, Homo sapiens
  CDR3 for alpha chain variable domain of TCR clone 62475 (TRAV12-1, TRAJ44)
CVADLPTGTASKLTF

SEQ ID NO: 124950 - protein, 13 aa, Homo sapiens
  CDR3 for beta chain variable domain of TCR clone 62475 (TRBV6-5, TRBJ2-5)
CGSSPQGGETQYF

SEQ ID NO: 124951 - protein, 13 aa, Homo sapiens
  CDR3 for alpha chain variable domain of TCR clone 62476 (TRAV38-1, TRAJ42)
CARWGGSQGNLIF

SEQ ID NO: 124952 - protein, 17 aa, Homo sapiens
  CDR3 for beta chain variable domain of TCR clone 62476 (TRBV20-1, TRBJ2-1)
CSATDPLAGVWDNEQFF

SEQ ID NO: 124953 - protein, 12 aa, Homo sapiens
  CDR3 for alpha chain variable domain of TCR clone 62477 (TRAV36/DV7, TRAJ43)
CAVEAENNDMRF

SEQ ID NO: 124954 - protein, 16 aa, Homo sapiens
  CDR3 for beta chain variable domain of TCR clone 62477 (TRBV7-2, TRBJ2-5)
CASSPFPTGGEETQYF

SEQ ID NO: 124955 - protein, 12 aa, Homo sapiens
  CDR3 for alpha chain variable domain of TCR clone 62478 (TRAV21, TRAJ37)
CAVLSNTGKLIF

SEQ ID NO: 124956 - protein, 14 aa, Homo sapiens
  CDR3 for beta chain variable domain of TCR clone 62478 (TRBV20-1, TRBJ2-5)
CSASDSGSGETQYF

SEQ ID NO: 124957 - protein, 14 aa, Homo sapiens
  CDR3 for alpha chain variable domain of TCR clone 62479 (TRAV2, TRAJ37)
CAVDFTSNTGKLIF

SEQ ID NO: 124958 - protein, 15 aa, Homo sapiens
  CDR3 for beta chain variable domain of TCR clone 62479 (TRBV20-1, TRBJ1-1)
CSASRGVTGNTEAYF

SEQ ID NO: 124959 - protein, 17 aa, Homo sapiens
  CDR3 for alpha chain variable domain of TCR clone 62480 (TRAV13-1, TRAJ31)
CAPRDRLMFGDRTQLVV

SEQ ID NO: 124960 - protein, 12 aa, Homo sapiens
  CDR3 for beta chain variable domain of TCR clone 62480 (TRBV7-9, TRBJ2-7)
CASSLEGYEQYF

SEQ ID NO: 124961 - protein, 16 aa, Homo sapiens
  CDR3 for alpha chain variable domain of TCR clone 62481 (TRAV13-1, TRAJ18)
CAASRMRGSNLGKLYF

SEQ ID NO: 124962 - protein, 16 aa, Homo sapiens
  CDR3 for beta chain variable domain of TCR clone 62481 (TRBV27, TRBJ1-1)
CASSSRGRTGYTEAFF

SEQ ID NO: 124963 - protein, 14 aa, Homo sapiens
  CDR3 for alpha chain variable domain of TCR clone 62482 (TRAV12-3, TRAJ30)
CAMSLLNRDDKIIF

SEQ ID NO: 124964 - protein, 15 aa, Homo sapiens
  CDR3 for beta chain variable domain of TCR clone 62482 (TRBV20-1, TRBJ2-7)
CSARDRVSGMDEQYF

SEQ ID NO: 124965 - protein, 14 aa, Homo sapiens
  CDR3 for alpha chain variable domain of TCR clone 62483 (TRAV12-1, TRAJ27)
CGEHIRTNAGKSTF

SEQ ID NO: 124966 - protein, 15 aa, Homo sapiens
  CDR3 for beta chain variable domain of TCR clone 62483 (TRBV19, TRBJ1-1)
CASTSGQIQNTGAFF

SEQ ID NO: 124967 - protein, 11 aa, Homo sapiens
  CDR3 for alpha chain variable domain of TCR clone 62484 (TRAV21, TRAJ31)
CAVRNNARLMC

SEQ ID NO: 124968 - protein, 15 aa, Homo sapiens
  CDR3 for beta chain variable domain of TCR clone 62484 (TRBV20-1, TRBJ2-7)
CSARDRVSGMDEQYF

SEQ ID NO: 124969 - protein, 15 aa, Homo sapiens
  CDR3 for alpha chain variable domain of TCR clone 62485 (TRAV12-1, TRAJ44)
CVDDLPTGTASKLTF

SEQ ID NO: 124970 - protein, 16 aa, Homo sapiens
  CDR3 for beta chain variable domain of TCR clone 62485 (TRBV12-5, TRBJ2-5)
CASGPRTSGNQETQYF

SEQ ID NO: 124971 - protein, 15 aa, Homo sapiens
  CDR3 for alpha chain variable domain of TCR clone 62486 (TRAV21, TRAJ32)
CAVNSYGGATNKLIF

SEQ ID NO: 124972 - protein, 19 aa, Homo sapiens
  CDR3 for beta chain variable domain of TCR clone 62486 (TRBV25-1, TRBJ2-2)
CAILVYRVDRGRKTGELFF

SEQ ID NO: 124973 - protein, 18 aa, Homo sapiens
  CDR3 for alpha chain variable domain of TCR clone 62487 (TRAV16, TRAJ10)
CAPAREEETNSPLGRHSA

SEQ ID NO: 124974 - protein, 16 aa, Homo sapiens
  CDR3 for beta chain variable domain of TCR clone 62487 (TRBV7-3, TRBJ2-2)
CASSLKRGTLSGELFF

SEQ ID NO: 124975 - protein, 12 aa, Homo sapiens
  CDR3 for alpha chain variable domain of TCR clone 62488 (TRAV27, TRAJ35)
CAGADFGNVLHF

SEQ ID NO: 124976 - protein, 16 aa, Homo sapiens
  CDR3 for beta chain variable domain of TCR clone 62488 (TRBV6-1, TRBJ2-1)
CASISRQGSSYNEQFF

SEQ ID NO: 124977 - protein, 14 aa, Homo sapiens
  CDR3 for alpha chain variable domain of TCR clone 62489 (TRAV8-3, TRAJ20)
CAVGPRGNDYKLSL

SEQ ID NO: 124978 - protein, 11 aa, Homo sapiens
  CDR3 for beta chain variable domain of TCR clone 62489 (TRBV10-3, TRBJ2-2)
CATKGTGELFF

SEQ ID NO: 124979 - protein, 15 aa, Homo sapiens
  CDR3 for alpha chain variable domain of TCR clone 62490 (TRAV12-3, TRAJ6)
CAMSATTGGSYIPTF

SEQ ID NO: 124980 - protein, 16 aa, Homo sapiens
  CDR3 for beta chain variable domain of TCR clone 62490 (TRBV13, TRBJ2-2)
CASSPSTGEHTGELFF

SEQ ID NO: 124981 - protein, 13 aa, Homo sapiens
  CDR3 for alpha chain variable domain of TCR clone 62491 (TRAV13-1, TRAJ39)
CSKYSNAGNMLTF

SEQ ID NO: 124982 - protein, 16 aa, Homo sapiens
  CDR3 for beta chain variable domain of TCR clone 62491 (TRBV7-2, TRBJ2-3)
CASSWVALYSTDTQYF

SEQ ID NO: 124983 - protein, 15 aa, Homo sapiens
  CDR3 for alpha chain variable domain of TCR clone 62492 (TRAV26-1, TRAJ44)
CIVRANTGTASKLTF

SEQ ID NO: 124984 - protein, 16 aa, Homo sapiens
  CDR3 for beta chain variable domain of TCR clone 62492 (TRBV7-7, TRBJ2-1)
CASSLASGTSYKEQFF

SEQ ID NO: 124985 - protein, 13 aa, Homo sapiens
  CDR3 for alpha chain variable domain of TCR clone 62493 (TRAV30, TRAJ29)
CGTEDSGNTPLVS

SEQ ID NO: 124986 - protein, 15 aa, Homo sapiens
  CDR3 for beta chain variable domain of TCR clone 62493 (TRBV6-1, TRBJ2-3)
CASSERGGITDTQYF

SEQ ID NO: 124987 - protein, 14 aa, Homo sapiens
  CDR3 for alpha chain variable domain of TCR clone 62494 (TRAV8-6, TRAJ36)
CAVSEKDGANNLFF

SEQ ID NO: 124988 - protein, 13 aa, Homo sapiens
  CDR3 for beta chain variable domain of TCR clone 62494 (TRBV7-7, TRBJ2-3)
CASSLSRADTQYF

SEQ ID NO: 124989 - protein, 14 aa, Homo sapiens
  CDR3 for alpha chain variable domain of TCR clone 62495 (TRAV3, TRAJ21)
CAGESQANFNKFYF

SEQ ID NO: 124990 - protein, 18 aa, Homo sapiens
  CDR3 for beta chain variable domain of TCR clone 62495 (TRBV7-9, TRBJ2-1)
CASSLAVSGTSGRNEQFF

SEQ ID NO: 124991 - protein, 12 aa, Homo sapiens
  CDR3 for alpha chain variable domain of TCR clone 62496 (TRAV16, TRAJ27)
CALNTNAGKSTF

SEQ ID NO: 124992 - protein, 14 aa, Homo sapiens
  CDR3 for beta chain variable domain of TCR clone 62496 (TRBV5-1, TRBJ2-7)
CASSLGVSAYEQYF

SEQ ID NO: 124993 - protein, 11 aa, Homo sapiens
  CDR3 for alpha chain variable domain of TCR clone 62497 (TRAV12-1, TRAJ34)
CVVNKGRELIF

SEQ ID NO: 124994 - protein, 14 aa, Homo sapiens
  CDR3 for beta chain variable domain of TCR clone 62497 (TRBV25-1, TRBJ1-1)
CASTHLGGNTEAFF

SEQ ID NO: 124995 - protein, 23 aa, Homo sapiens
  CDR3 for alpha chain variable domain of TCR clone 62498 (TRAV26-1, )
CIADNAGNSHIQNPDPAVYQLRD

SEQ ID NO: 124996 - protein, 15 aa, Homo sapiens
  CDR3 for beta chain variable domain of TCR clone 62498 (TRBV20-1, TRBJ1-1)
CSARGGGTLKLSLDK

SEQ ID NO: 124997 - protein, 13 aa, Homo sapiens
  CDR3 for alpha chain variable domain of TCR clone 62499 (TRAV14/DV4, TRAJ23)
CAMREVKGGKLIF

SEQ ID NO: 124998 - protein, 15 aa, Homo sapiens
  CDR3 for beta chain variable domain of TCR clone 62499 (TRBV6-3, TRBJ2-1)
CASSYASDSYNERFF

SEQ ID NO: 124999 - protein, 12 aa, Homo sapiens
  CDR3 for alpha chain variable domain of TCR clone 62500 (TRAV3, TRAJ39)
CAVIEWSNMLTF

SEQ ID NO: 125000 - protein, 14 aa, Homo sapiens
  CDR3 for beta chain variable domain of TCR clone 62500 (TRBV7-8, TRBJ2-3)
CASSVPDGQDTQYF

SEQ ID NO: 125001 - protein, 13 aa, Homo sapiens
  CDR3 for alpha chain variable domain of TCR clone 62501 (TRAV12-1, TRAJ26)
FVVRRNYGQNFVF

SEQ ID NO: 125002 - protein, 14 aa, Homo sapiens
  CDR3 for beta chain variable domain of TCR clone 62501 (TRBV4-2, TRBJ2-1)
CASGLDRAYNEQFF

SEQ ID NO: 125003 - protein, 12 aa, Homo sapiens
  CDR3 for alpha chain variable domain of TCR clone 62502 (TRAV12-3, TRAJ17)
CAMTLTGNKLTF

SEQ ID NO: 125004 - protein, 14 aa, Homo sapiens
  CDR3 for beta chain variable domain of TCR clone 62502 (TRBV4-1, TRBJ2-7)
CASSPVAGGDEQYF

SEQ ID NO: 125005 - protein, 12 aa, Homo sapiens
  CDR3 for alpha chain variable domain of TCR clone 62503 (TRAV20, TRAJ57)
CAVGGGSEKLVF

SEQ ID NO: 125006 - protein, 16 aa, Homo sapiens
  CDR3 for beta chain variable domain of TCR clone 62503 (TRBV2, TRBJ2-3)
CASSTSVEGVTDTQYF

SEQ ID NO: 125007 - protein, 14 aa, Homo sapiens
  CDR3 for alpha chain variable domain of TCR clone 62504 (TRAV9-2, TRAJ39)
CALYIYNAGNMLTF

SEQ ID NO: 125008 - protein, 15 aa, Homo sapiens
  CDR3 for beta chain variable domain of TCR clone 62504 (TRBV4-1, TRBJ2-7)
CASSQQGQGFDEQYF

SEQ ID NO: 125009 - protein, 12 aa, Homo sapiens
  CDR3 for alpha chain variable domain of TCR clone 62505 (TRAV35, TRAJ49)
CAGGTPVTSSIL

SEQ ID NO: 125010 - protein, 15 aa, Homo sapiens
  CDR3 for beta chain variable domain of TCR clone 62505 (TRBV27, TRBJ1-5)
CASSLGTGFDQPQHF

SEQ ID NO: 125011 - protein, 16 aa, Homo sapiens
  CDR3 for alpha chain variable domain of TCR clone 62506 (TRAV30, TRAJ24)
CGPEIVDADSWGKFKF

SEQ ID NO: 125012 - protein, 14 aa, Homo sapiens
  CDR3 for beta chain variable domain of TCR clone 62506 (TRBV12-5, TRBJ2-5)
CASGSRTHQETQYF

SEQ ID NO: 125013 - protein, 16 aa, Homo sapiens
  CDR3 for alpha chain variable domain of TCR clone 62507 (TRAV26-1, TRAJ11)
CIVRVAKNSGYSTLTF

SEQ ID NO: 125014 - protein, 11 aa, Homo sapiens
  CDR3 for beta chain variable domain of TCR clone 62507 (TRBV11-2, TRBJ1-1)
CASSINTEAFF

SEQ ID NO: 125015 - protein, 16 aa, Homo sapiens
  CDR3 for alpha chain variable domain of TCR clone 62508 (TRAV27, TRAJ53)
CAAPEGSGGSNYKLPF

SEQ ID NO: 125016 - protein, 14 aa, Homo sapiens
  CDR3 for beta chain variable domain of TCR clone 62508 (TRBV4-3, TRBJ1-5)
CASSQGGQGWPQHF

SEQ ID NO: 125017 - protein, 13 aa, Homo sapiens
  CDR3 for alpha chain variable domain of TCR clone 62509 (TRAV21, TRAJ27)
CAALNTNAGKSTF

SEQ ID NO: 125018 - protein, 15 aa, Homo sapiens
  CDR3 for beta chain variable domain of TCR clone 62509 (TRBV10-3, TRBJ2-1)
CATNGGPGQGDEQFF

SEQ ID NO: 125019 - protein, 13 aa, Homo sapiens
  CDR3 for alpha chain variable domain of TCR clone 62510 (TRAV21, TRAJ32)
CAVSGGATNKLIL

SEQ ID NO: 125020 - protein, 15 aa, Homo sapiens
  CDR3 for beta chain variable domain of TCR clone 62510 (TRBV23-1, TRBJ2-1)
CASSQWPQLTMSSSS

SEQ ID NO: 125021 - protein, 13 aa, Homo sapiens
  CDR3 for alpha chain variable domain of TCR clone 62511 (TRAV20, TRAJ21)
CAVEGYNFNKFYF

SEQ ID NO: 125022 - protein, 20 aa, Homo sapiens
  CDR3 for beta chain variable domain of TCR clone 62511 (TRBV7-8, TRBJ2-2)
CASSHLFPGPTIHITGELFF

SEQ ID NO: 125023 - protein, 16 aa, Homo sapiens
  CDR3 for alpha chain variable domain of TCR clone 62512 (TRAV30, TRAJ24)
CGAEIVDADSWGKFQF

SEQ ID NO: 125024 - protein, 13 aa, Homo sapiens
  CDR3 for beta chain variable domain of TCR clone 62512 (TRBV18, TRBJ1-2)
CASSASATEGYTF

SEQ ID NO: 125025 - protein, 17 aa, Homo sapiens
  CDR3 for alpha chain variable domain of TCR clone 62513 (TRAV3, TRAJ42)
CAVRDRDYGGSQGNLIF

SEQ ID NO: 125026 - protein, 18 aa, Homo sapiens
  CDR3 for beta chain variable domain of TCR clone 62513 (TRBV13, TRBJ2-4)
CAIIDQKHSVLRRRDPAL

SEQ ID NO: 125027 - protein, 14 aa, Homo sapiens
  CDR3 for alpha chain variable domain of TCR clone 62514 (TRAV17, TRAJ42)
CATDNGGSQGNLIF

SEQ ID NO: 125028 - protein, 18 aa, Homo sapiens
  CDR3 for beta chain variable domain of TCR clone 62514 (TRBV24-1, TRBJ2-1)
CATSDLMFLGRGVHEQFF

SEQ ID NO: 125029 - protein, 13 aa, Homo sapiens
  CDR3 for alpha chain variable domain of TCR clone 62515 (TRAV2, TRAJ21)
CVVEDLNFNKFYF

SEQ ID NO: 125030 - protein, 15 aa, Homo sapiens
  CDR3 for beta chain variable domain of TCR clone 62515 (TRBV28, TRBJ2-5)
CASSPGQGSIETQYF

SEQ ID NO: 125031 - protein, 14 aa, Homo sapiens
  CDR3 for alpha chain variable domain of TCR clone 62516 (TRAV17, TRAJ45)
CATDSGGGADGLTF

SEQ ID NO: 125032 - protein, 15 aa, Homo sapiens
  CDR3 for beta chain variable domain of TCR clone 62516 (TRBV11-2, TRBJ2-1)
CASSRNRGLMYEQFF

SEQ ID NO: 125033 - protein, 15 aa, Homo sapiens
  CDR3 for alpha chain variable domain of TCR clone 62517 (TRAV26-1, TRAJ44)
CIVRANTGTASKLTF

SEQ ID NO: 125034 - protein, 16 aa, Homo sapiens
  CDR3 for beta chain variable domain of TCR clone 62517 (TRBV7-3, TRBJ2-2)
CASSLKRGTLSGELFF

SEQ ID NO: 125035 - protein, 13 aa, Homo sapiens
  CDR3 for alpha chain variable domain of TCR clone 62518 (TRAV12-2, TRAJ20)
CAVNRFDDYKLSF

SEQ ID NO: 125036 - protein, 12 aa, Homo sapiens
  CDR3 for beta chain variable domain of TCR clone 62518 (TRBV19, TRBJ2-1)
CASSQISNGQFF

SEQ ID NO: 125037 - protein, 14 aa, Homo sapiens
  CDR3 for alpha chain variable domain of TCR clone 62519 (TRAV13-1, TRAJ44)
CAAKATCTASKLTF

SEQ ID NO: 125038 - protein, 14 aa, Homo sapiens
  CDR3 for beta chain variable domain of TCR clone 62519 (TRBV19, TRBJ2-2)
CASSTLHRSGELFF

SEQ ID NO: 125039 - protein, 15 aa, Homo sapiens
  CDR3 for alpha chain variable domain of TCR clone 62520 (TRAV26-1, TRAJ29)
CIVRVEGSGNTPLVF

SEQ ID NO: 125040 - protein, 15 aa, Homo sapiens
  CDR3 for beta chain variable domain of TCR clone 62520 (TRBV7-9, TRBJ1-5)
CASSQGHQPKQTQHF

SEQ ID NO: 125041 - protein, 12 aa, Homo sapiens
  CDR3 for alpha chain variable domain of TCR clone 62521 (TRAV26-1, TRAJ17)
CIVRSAGNKLTF

SEQ ID NO: 125042 - protein, 12 aa, Homo sapiens
  CDR3 for beta chain variable domain of TCR clone 62521 (TRBV14, TRBJ1-1)
CASSQLKGLAFF

SEQ ID NO: 125043 - protein, 10 aa, Homo sapiens
  CDR3 for alpha chain variable domain of TCR clone 62522 (TRAV1-2, TRAJ31)
CVSEDARLMF

SEQ ID NO: 125044 - protein, 14 aa, Homo sapiens
  CDR3 for beta chain variable domain of TCR clone 62522 (TRBV19, TRBJ2-1)
CASPTFVWSGEQFF

SEQ ID NO: 125045 - protein, 14 aa, Homo sapiens
  CDR3 for alpha chain variable domain of TCR clone 62523 (TRAV1-2, TRAJ16)
CAANRFSDGQKLLF

SEQ ID NO: 125046 - protein, 12 aa, Homo sapiens
  CDR3 for beta chain variable domain of TCR clone 62523 (TRBV7-9, TRBJ2-7)
CASSLEGYEQYF

SEQ ID NO: 125047 - protein, 20 aa, Homo sapiens
  CDR3 for alpha chain variable domain of TCR clone 62524 (TRAV23/DV6, TRAJ30)
CAASKGDDKIILEKGHDFIF

SEQ ID NO: 125048 - protein, 18 aa, Homo sapiens
  CDR3 for beta chain variable domain of TCR clone 62524 (TRBV10-3, TRBJ2-3)
CAISESRVGPMRGDTQYF

SEQ ID NO: 125049 - protein, 11 aa, Homo sapiens
  CDR3 for alpha chain variable domain of TCR clone 62525 (TRAV2, TRAJ13)
CASVGYQKVTF

SEQ ID NO: 125050 - protein, 13 aa, Homo sapiens
  CDR3 for beta chain variable domain of TCR clone 62525 (TRBV20-1, TRBJ2-2)
CSASAAGTGELFF

SEQ ID NO: 125051 - protein, 13 aa, Homo sapiens
  CDR3 for alpha chain variable domain of TCR clone 62526 (TRAV13-1, TRAJ5)
CAASDTGRRALTF

SEQ ID NO: 125052 - protein, 15 aa, Homo sapiens
  CDR3 for beta chain variable domain of TCR clone 62526 (TRBV7-9, TRBJ1-5)
CASSQGHQPNQPQHF

SEQ ID NO: 125053 - protein, 13 aa, Homo sapiens
  CDR3 for alpha chain variable domain of TCR clone 62527 (TRAV25, TRAJ10)
CAGRTGGGNKLTF

SEQ ID NO: 125054 - protein, 15 aa, Homo sapiens
  CDR3 for beta chain variable domain of TCR clone 62527 (TRBV19, TRBJ2-1)
CASSPPGVPLDEQFF

SEQ ID NO: 125055 - protein, 16 aa, Homo sapiens
  CDR3 for alpha chain variable domain of TCR clone 62528 (TRAV30, TRAJ24)
CGTEIVDAGSWGKFQF

SEQ ID NO: 125056 - protein, 14 aa, Homo sapiens
  CDR3 for beta chain variable domain of TCR clone 62528 (TRBV5-5, TRBJ1-2)
CASSLDPYNYGYTF

SEQ ID NO: 125057 - protein, 15 aa, Homo sapiens
  CDR3 for alpha chain variable domain of TCR clone 62529 (TRAV2, TRAJ44)
CAVEAYTGTASKLTF

SEQ ID NO: 125058 - protein, 14 aa, Homo sapiens
  CDR3 for beta chain variable domain of TCR clone 62529 (TRBV11-3, TRBJ2-1)
CASSPGSRDNEQFF

SEQ ID NO: 125059 - protein, 13 aa, Homo sapiens
  CDR3 for alpha chain variable domain of TCR clone 62530 (TRAV13-1, TRAJ9)
CAASGTGGFKTIL

SEQ ID NO: 125060 - protein, 13 aa, Homo sapiens
  CDR3 for beta chain variable domain of TCR clone 62530 (TRBV12-4, TRBJ2-7)
CASSLERVREQYF

SEQ ID NO: 125061 - protein, 12 aa, Homo sapiens
  CDR3 for alpha chain variable domain of TCR clone 62531 (TRAV30, TRAJ43)
RGTEERGNDMRF

SEQ ID NO: 125062 - protein, 13 aa, Homo sapiens
  CDR3 for beta chain variable domain of TCR clone 62531 (TRBV27, TRBJ2-7)
CASSFSQGYEQYF

SEQ ID NO: 125063 - protein, 10 aa, Homo sapiens
  CDR3 for alpha chain variable domain of TCR clone 62532 (TRAV21, TRAJ20)
CAVNVGRLQA

SEQ ID NO: 125064 - protein, 15 aa, Homo sapiens
  CDR3 for beta chain variable domain of TCR clone 62532 (TRBV6-1, TRBJ2-5)
CASSEFPLMGETQYV

SEQ ID NO: 125065 - protein, 16 aa, Homo sapiens
  CDR3 for alpha chain variable domain of TCR clone 62533 (TRAV1-2, TRAJ6)
CAVRDQGTGGSYIPKF

SEQ ID NO: 125066 - protein, 13 aa, Homo sapiens
  CDR3 for beta chain variable domain of TCR clone 62533 (TRBV28, TRBJ2-7)
CASTPGLAGEQYF

SEQ ID NO: 125067 - protein, 11 aa, Homo sapiens
  CDR3 for alpha chain variable domain of TCR clone 62534 (TRAV2, TRAJ13)
CASGGYQTVTF

SEQ ID NO: 125068 - protein, 16 aa, Homo sapiens
  CDR3 for beta chain variable domain of TCR clone 62534 (TRBV19, TRBJ2-1)
CASSKAGPSSYNEQFF

SEQ ID NO: 125069 - protein, 13 aa, Homo sapiens
  CDR3 for alpha chain variable domain of TCR clone 62535 (TRAV2, TRAJ29)
CAAQNSGNTPLVF

SEQ ID NO: 125070 - protein, 16 aa, Homo sapiens
  CDR3 for beta chain variable domain of TCR clone 62535 (TRBV19, TRBJ2-2)
CASRSPGTGATGELFF

SEQ ID NO: 125071 - protein, 16 aa, Homo sapiens
  CDR3 for alpha chain variable domain of TCR clone 62536 (TRAV26-1, TRAJ44)
IASSESRTGTASKPTF

SEQ ID NO: 125072 - protein, 13 aa, Homo sapiens
  CDR3 for beta chain variable domain of TCR clone 62536 (TRBV7-2, TRBJ1-5)
CASSFARNQPQHF

SEQ ID NO: 125073 - protein, 14 aa, Homo sapiens
  CDR3 for alpha chain variable domain of TCR clone 62537 (TRAV2, TRAJ9)
CAVEDRSGGFKTIF

SEQ ID NO: 125074 - protein, 15 aa, Homo sapiens
  CDR3 for beta chain variable domain of TCR clone 62537 (TRBV5-1, TRBJ2-1)
RASSPPRAPYNEQFF

SEQ ID NO: 125075 - protein, 16 aa, Homo sapiens
  CDR3 for alpha chain variable domain of TCR clone 62538 (TRAV30, TRAJ24)
CGTEIVNADSWGKFQF

SEQ ID NO: 125076 - protein, 15 aa, Homo sapiens
  CDR3 for beta chain variable domain of TCR clone 62538 (TRBV20-1, TRBJ2-4)
CSARDLTGGPNIQYF

SEQ ID NO: 125077 - protein, 15 aa, Homo sapiens
  CDR3 for alpha chain variable domain of TCR clone 62539 (TRAV2, TRAJ9)
CAVEDRGTGGFKTIF

SEQ ID NO: 125078 - protein, 14 aa, Homo sapiens
  CDR3 for beta chain variable domain of TCR clone 62539 (TRBV4-1, TRBJ2-2)
CDSSQAVNTGELFF

SEQ ID NO: 125079 - protein, 16 aa, Homo sapiens
  CDR3 for alpha chain variable domain of TCR clone 62540 (TRAV3, TRAJ27)
CAVRDPQGTNAGKSTF

SEQ ID NO: 125080 - protein, 17 aa, Homo sapiens
  CDR3 for beta chain variable domain of TCR clone 62540 (TRBV4-1, TRBJ2-7)
CASSHGRGLQTSYEQYF

SEQ ID NO: 125081 - protein, 15 aa, Homo sapiens
  CDR3 for alpha chain variable domain of TCR clone 62541 (TRAV35, TRAJ42)
CAGQLRGGSQGNLIF

SEQ ID NO: 125082 - protein, 13 aa, Homo sapiens
  CDR3 for beta chain variable domain of TCR clone 62541 (TRBV4-1, TRBJ2-5)
CASSLTRGETQYF

SEQ ID NO: 125083 - protein, 12 aa, Homo sapiens
  CDR3 for alpha chain variable domain of TCR clone 62542 (TRAV2, TRAJ33)
CAVPDSNYQLIW

SEQ ID NO: 125084 - protein, 13 aa, Homo sapiens
  CDR3 for beta chain variable domain of TCR clone 62542 (TRBV7-3, TRBJ1-1)
CASSQDWGAEAFF

SEQ ID NO: 125085 - protein, 21 aa, Homo sapiens
  CDR3 for alpha chain variable domain of TCR clone 62543 (TRAV1-1, TRAJ6)
CLLLLRCERLERTGGSYIPTF

SEQ ID NO: 125086 - protein, 13 aa, Homo sapiens
  CDR3 for beta chain variable domain of TCR clone 62543 (TRBV10-2, TRBJ2-7)
CASGASGGYEQYL

SEQ ID NO: 125087 - protein, 15 aa, Homo sapiens
  CDR3 for alpha chain variable domain of TCR clone 62544 (TRAV12-1, TRAJ44)
CVVFVNTGTASKLTF

SEQ ID NO: 125088 - protein, 17 aa, Homo sapiens
  CDR3 for beta chain variable domain of TCR clone 62544 (TRBV7-8, TRBJ2-6)
CASSAGTGGAGANVPTF

SEQ ID NO: 125089 - protein, 13 aa, Homo sapiens
  CDR3 for alpha chain variable domain of TCR clone 62545 (TRAV17, TRAJ39)
CAISTNAGNMLTF

SEQ ID NO: 125090 - protein, 15 aa, Homo sapiens
  CDR3 for beta chain variable domain of TCR clone 62545 (TRBV5-4, TRBJ1-2)
CASSLATRGHYGYTF

SEQ ID NO: 125091 - protein, 12 aa, Homo sapiens
  CDR3 for alpha chain variable domain of TCR clone 62546 (TRAV12-3, TRAJ4)
CAMTGAGTRLAV

SEQ ID NO: 125092 - protein, 14 aa, Homo sapiens
  CDR3 for beta chain variable domain of TCR clone 62546 (TRBV10-3, TRBJ1-1)
CAISDTDRGVKAFF

SEQ ID NO: 125093 - protein, 12 aa, Homo sapiens
  CDR3 for alpha chain variable domain of TCR clone 62547 (TRAV23/DV6, TRAJ34)
CAMGYNTDKLIF

SEQ ID NO: 125094 - protein, 14 aa, Homo sapiens
  CDR3 for beta chain variable domain of TCR clone 62547 (TRBV4-1, TRBJ2-2)
CASSQAVNTGELFF

SEQ ID NO: 125095 - protein, 15 aa, Homo sapiens
  CDR3 for alpha chain variable domain of TCR clone 62548 (TRAV26-1, TRAJ42)
HRQTYYGGSQGNLIF

SEQ ID NO: 125096 - protein, 16 aa, Homo sapiens
  CDR3 for beta chain variable domain of TCR clone 62548 (TRBV7-3, TRBJ2-2)
CASSLKRGTLSGELFF

SEQ ID NO: 125097 - protein, 17 aa, Homo sapiens
  CDR3 for alpha chain variable domain of TCR clone 62549 (TRAV14/DV4, TRAJ4)
CAMREASGRGGDNKLIF

SEQ ID NO: 125098 - protein, 14 aa, Homo sapiens
  CDR3 for beta chain variable domain of TCR clone 62549 (TRBV19, TRBJ2-7)
CASSMGQGAIEQYF

SEQ ID NO: 125099 - protein, 15 aa, Homo sapiens
  CDR3 for alpha chain variable domain of TCR clone 62550 (TRAV4, TRAJ39)
CLVGPNNNAGNMLTF

SEQ ID NO: 125100 - protein, 13 aa, Homo sapiens
  CDR3 for beta chain variable domain of TCR clone 62550 (TRBV11-3, TRBJ2-3)
CAISHDTKDTQYF

SEQ ID NO: 125101 - protein, 17 aa, Homo sapiens
  CDR3 for alpha chain variable domain of TCR clone 62551 (TRAV17, TRAJ28)
CATDPRRGGAGSYQITF

SEQ ID NO: 125102 - protein, 16 aa, Homo sapiens
  CDR3 for beta chain variable domain of TCR clone 62551 (TRBV25-1, TRBJ1-1)
CASSGDRDRGRIEAFF

SEQ ID NO: 125103 - protein, 13 aa, Homo sapiens
  CDR3 for alpha chain variable domain of TCR clone 62552 (TRAV38-1, TRAJ42)
CARWGGNQGNLIF

SEQ ID NO: 125104 - protein, 17 aa, Homo sapiens
  CDR3 for beta chain variable domain of TCR clone 62552 (TRBV20-1, TRBJ2-1)
CSARDPLAGVWDNEQFF

SEQ ID NO: 125105 - protein, 12 aa, Homo sapiens
  CDR3 for alpha chain variable domain of TCR clone 62553 (TRAV21, TRAJ33)
CAKMDSNYQLIW

SEQ ID NO: 125106 - protein, 15 aa, Homo sapiens
  CDR3 for beta chain variable domain of TCR clone 62553 (TRBV7-2, TRBJ1-5)
CASSLDRGQDQPQHF

SEQ ID NO: 125107 - protein, 13 aa, Homo sapiens
  CDR3 for alpha chain variable domain of TCR clone 62554 (TRAV2, TRAJ40)
CAVVTSGTYKYIF

SEQ ID NO: 125108 - protein, 15 aa, Homo sapiens
  CDR3 for beta chain variable domain of TCR clone 62554 (TRBV2, TRBJ2-5)
CASSEQGLIGETQCF

SEQ ID NO: 125109 - protein, 12 aa, Homo sapiens
  CDR3 for alpha chain variable domain of TCR clone 62555 (TRAV27, TRAJ37)
CADSGSTGKLIF

SEQ ID NO: 125110 - protein, 18 aa, Homo sapiens
  CDR3 for beta chain variable domain of TCR clone 62555 (TRBV7-9, TRBJ1-1)
CASSNPWDTMGMNTEAFF

SEQ ID NO: 125111 - protein, 15 aa, Homo sapiens
  CDR3 for alpha chain variable domain of TCR clone 62556 (TRAV21, TRAJ53)
CDTLNSGGSNYKLTF

SEQ ID NO: 125112 - protein, 16 aa, Homo sapiens
  CDR3 for beta chain variable domain of TCR clone 62556 (TRBV9, TRBJ2-1)
CASSVGGGGNYNEQFF

SEQ ID NO: 125113 - protein, 14 aa, Homo sapiens
  CDR3 for alpha chain variable domain of TCR clone 62557 (TRAV1-2, TRAJ16)
CAVNRFSDGQKLLF

SEQ ID NO: 125114 - protein, 15 aa, Homo sapiens
  CDR3 for beta chain variable domain of TCR clone 62557 (TRBV7-9, TRBJ1-6)
CASSSPVRGNSPLHF

SEQ ID NO: 125115 - protein, 12 aa, Homo sapiens
  CDR3 for alpha chain variable domain of TCR clone 62558 (TRAV12-3, TRAJ41)
CAMNYSGYALNF

SEQ ID NO: 125116 - protein, 13 aa, Homo sapiens
  CDR3 for beta chain variable domain of TCR clone 62558 (TRBV7-3, TRBJ2-1)
CASSLDSYNEQFF

SEQ ID NO: 125117 - protein, 15 aa, Homo sapiens
  CDR3 for alpha chain variable domain of TCR clone 62559 (TRAV4, TRAJ39)
CLVGPNNNAGNMLTF

SEQ ID NO: 125118 - protein, 13 aa, Homo sapiens
  CDR3 for beta chain variable domain of TCR clone 62559 (TRBV11-2, TRBJ2-5)
CANSSTGEETQYF

SEQ ID NO: 125119 - protein, 15 aa, Homo sapiens
  CDR3 for alpha chain variable domain of TCR clone 62560 (TRAV12-3, TRAJ49)
CAMAVTPNTGNQFHF

SEQ ID NO: 125120 - protein, 18 aa, Homo sapiens
  CDR3 for beta chain variable domain of TCR clone 62560 (TRBV4-1, TRBJ1-5)
CASSQDPRGQGLNQPQHF

SEQ ID NO: 125121 - protein, 13 aa, Homo sapiens
  CDR3 for alpha chain variable domain of TCR clone 62561 (TRAV12-2, TRAJ4)
CAGFSGGSNKLIF

SEQ ID NO: 125122 - protein, 14 aa, Homo sapiens
  CDR3 for beta chain variable domain of TCR clone 62561 (TRBV24-1, TRBJ1-1)
CATSIPRGDTEAFF

SEQ ID NO: 125123 - protein, 16 aa, Homo sapiens
  CDR3 for alpha chain variable domain of TCR clone 62562 (TRAV17, TRAJ35)
CATAEGGIGFGSVLHC

SEQ ID NO: 125124 - protein, 12 aa, Homo sapiens
  CDR3 for beta chain variable domain of TCR clone 62562 (TRBV11-2, TRBJ2-2)
CASSLGGGELFF

SEQ ID NO: 125125 - protein, 15 aa, Homo sapiens
  CDR3 for alpha chain variable domain of TCR clone 62563 (TRAV26-1, TRAJ29)
CIVRDEGSGNTPLVF

SEQ ID NO: 125126 - protein, 14 aa, Homo sapiens
  CDR3 for beta chain variable domain of TCR clone 62563 (TRBV18, TRBJ2-5)
CASSPGVSQETQYF

SEQ ID NO: 125127 - protein, 14 aa, Homo sapiens
  CDR3 for alpha chain variable domain of TCR clone 62564 (TRAV9-2, TRAJ39)
CALYICNAGNMLTF

SEQ ID NO: 125128 - protein, 13 aa, Homo sapiens
  CDR3 for beta chain variable domain of TCR clone 62564 (TRBV7-9, TRBJ1-2)
CASSLKQNYGYTF

SEQ ID NO: 125129 - protein, 15 aa, Homo sapiens
  CDR3 for alpha chain variable domain of TCR clone 62565 (TRAV17, TRAJ16)
CATALRFSDVQKLLF

SEQ ID NO: 125130 - protein, 15 aa, Homo sapiens
  CDR3 for beta chain variable domain of TCR clone 62565 (TRBV20-1, TRBJ1-1)
CSASRGVTGNTEAFF

SEQ ID NO: 125131 - protein, 14 aa, Homo sapiens
  CDR3 for alpha chain variable domain of TCR clone 62566 (TRAV1-2, TRAJ16)
CAVNRFSDGQKLPF

SEQ ID NO: 125132 - protein, 20 aa, Homo sapiens
  CDR3 for beta chain variable domain of TCR clone 62566 (TRBV28, TRBJ2-1)
CASTPIGRSPGLAGGNEQFF

SEQ ID NO: 125133 - protein, 15 aa, Homo sapiens
  CDR3 for alpha chain variable domain of TCR clone 62567 (TRAV1-1, TRAJ23)
CAVSEGPGRKAYLRT

SEQ ID NO: 125134 - protein, 14 aa, Homo sapiens
  CDR3 for beta chain variable domain of TCR clone 62567 (TRBV10-2, TRBJ2-1)
RASSEGTSEDEQFF

SEQ ID NO: 125135 - protein, 12 aa, Homo sapiens
  CDR3 for alpha chain variable domain of TCR clone 62568 (TRAV13-2, TRAJ23)
CAERHRGGKLIF

SEQ ID NO: 125136 - protein, 16 aa, Homo sapiens
  CDR3 for beta chain variable domain of TCR clone 62568 (TRBV20-1, TRBJ1-4)
CSASGQGLLTNEKLFF

SEQ ID NO: 125137 - protein, 14 aa, Homo sapiens
  CDR3 for alpha chain variable domain of TCR clone 62569 (TRAV3, TRAJ9)
CAVRLNTGGFKTIF

SEQ ID NO: 125138 - protein, 15 aa, Homo sapiens
  CDR3 for beta chain variable domain of TCR clone 62569 (TRBV4-1, TRBJ1-4)
CASSDTGGTNEKLFF

SEQ ID NO: 125139 - protein, 16 aa, Homo sapiens
  CDR3 for alpha chain variable domain of TCR clone 62570 (TRAV30, TRAJ24)
CGTEIVDADCWGKFQF

SEQ ID NO: 125140 - protein, 16 aa, Homo sapiens
  CDR3 for beta chain variable domain of TCR clone 62570 (TRBV28, TRBJ2-7)
CASSLFFETGGPEQYF

SEQ ID NO: 125141 - protein, 16 aa, Homo sapiens
  CDR3 for alpha chain variable domain of TCR clone 62571 (TRAV13-1, TRAJ48)
CAASIFGNFGNEKLTF

SEQ ID NO: 125142 - protein, 14 aa, Homo sapiens
  CDR3 for beta chain variable domain of TCR clone 62571 (TRBV14, TRBJ2-4)
CASSNLKAFSTSAP

SEQ ID NO: 125143 - protein, 14 aa, Homo sapiens
  CDR3 for alpha chain variable domain of TCR clone 62572 (TRAV3, TRAJ21)
CAVESQSNFNKFYF

SEQ ID NO: 125144 - protein, 12 aa, Homo sapiens
  CDR3 for beta chain variable domain of TCR clone 62572 (TRBV6-3, TRBJ2-7)
CASSLTPYEQYF

SEQ ID NO: 125145 - protein, 18 aa, Homo sapiens
  CDR3 for alpha chain variable domain of TCR clone 62573 (TRAV21, TRAJ52)
CAVRPSPAGGTSYGKLTF

SEQ ID NO: 125146 - protein, 14 aa, Homo sapiens
  CDR3 for beta chain variable domain of TCR clone 62573 (TRBV4-1, TRBJ2-2)
CASSQAVNAGELFF

SEQ ID NO: 125147 - protein, 16 aa, Homo sapiens
  CDR3 for alpha chain variable domain of TCR clone 62574 (TRAV1-2, TRAJ10)
CAAGGVLTGGGNKLTF

SEQ ID NO: 125148 - protein, 12 aa, Homo sapiens
  CDR3 for beta chain variable domain of TCR clone 62574 (TRBV7-8, TRBJ2-7)
CASSLGDREQYF

SEQ ID NO: 125149 - protein, 15 aa, Homo sapiens
  CDR3 for alpha chain variable domain of TCR clone 62575 (TRAV27, TRAJ53)
CRAINSGGSNYKLTF

SEQ ID NO: 125150 - protein, 14 aa, Homo sapiens
  CDR3 for beta chain variable domain of TCR clone 62575 (TRBV11-2, TRBJ1-2)
CASSLGTANYGYTF

SEQ ID NO: 125151 - protein, 19 aa, Homo sapiens
  CDR3 for alpha chain variable domain of TCR clone 62576 (TRAV3, TRAJ6)
CAVRDRNPIRSGGSYIPTF

SEQ ID NO: 125152 - protein, 15 aa, Homo sapiens
  CDR3 for beta chain variable domain of TCR clone 62576 (TRBV18, TRBJ2-7)
CASSPTFMDSYEQYF

SEQ ID NO: 125153 - protein, 13 aa, Homo sapiens
  CDR3 for alpha chain variable domain of TCR clone 62577 (TRAV3, TRAJ27)
CAVRPLGAGKATF

SEQ ID NO: 125154 - protein, 13 aa, Homo sapiens
  CDR3 for beta chain variable domain of TCR clone 62577 (TRBV7-9, TRBJ2-3)
CASSPGSTDTQYF

SEQ ID NO: 125155 - protein, 13 aa, Homo sapiens
  CDR3 for alpha chain variable domain of TCR clone 62578 (TRAV21, TRAJ27)
CAALNTNAGKSTF

SEQ ID NO: 125156 - protein, 17 aa, Homo sapiens
  CDR3 for beta chain variable domain of TCR clone 62578 (TRBV20-1, TRBJ2-1)
CSAPPRLAGTRYNEQFF

SEQ ID NO: 125157 - protein, 14 aa, Homo sapiens
  CDR3 for alpha chain variable domain of TCR clone 62579 (TRAV12-2, TRAJ40)
CAVKIPSGTYKYIF

SEQ ID NO: 125158 - protein, 14 aa, Homo sapiens
  CDR3 for beta chain variable domain of TCR clone 62579 (TRBV7-9, TRBJ1-2)
CASSRQGANYGYTV

SEQ ID NO: 125159 - protein, 16 aa, Homo sapiens
  CDR3 for alpha chain variable domain of TCR clone 62580 (TRAV16, TRAJ52)
CALSAAGGTSYGKLTF

SEQ ID NO: 125160 - protein, 19 aa, Homo sapiens
  CDR3 for beta chain variable domain of TCR clone 62580 (TRBV19, TRBJ2-5)
CASSIGQVTDFSLGETQYF

SEQ ID NO: 125161 - protein, 17 aa, Homo sapiens
  CDR3 for alpha chain variable domain of TCR clone 62581 (TRAV3, TRAJ6)
CAVRDGPRAGGSYIPTF

SEQ ID NO: 125162 - protein, 16 aa, Homo sapiens
  CDR3 for beta chain variable domain of TCR clone 62581 (TRBV7-9, TRBJ2-3)
CASSPWREVGTDTQYF

SEQ ID NO: 125163 - protein, 14 aa, Homo sapiens
  CDR3 for alpha chain variable domain of TCR clone 62582 (TRAV12-1, TRAJ8)
CVVNSNTGFQKLVF

SEQ ID NO: 125164 - protein, 17 aa, Homo sapiens
  CDR3 for beta chain variable domain of TCR clone 62582 (TRBV7-8, TRBJ2-6)
CASSAGTGGAGANVLSF

SEQ ID NO: 125165 - protein, 18 aa, Homo sapiens
  CDR3 for alpha chain variable domain of TCR clone 62583 (TRAV26-2, TRAJ54)
CILRDVEVGIQGAQKLVF

SEQ ID NO: 125166 - protein, 15 aa, Homo sapiens
  CDR3 for beta chain variable domain of TCR clone 62583 (TRBV7-2, TRBJ2-1)
CASSFQADEYNEQFF

SEQ ID NO: 125167 - protein, 13 aa, Homo sapiens
  CDR3 for alpha chain variable domain of TCR clone 62584 (TRAV22, TRAJ29)
CAVGGSGNTPLVF

SEQ ID NO: 125168 - protein, 17 aa, Homo sapiens
  CDR3 for beta chain variable domain of TCR clone 62584 (TRBV20-1, TRBJ2-1)
CSASSSGLAGSYNEQFF

SEQ ID NO: 125169 - protein, 11 aa, Homo sapiens
  CDR3 for alpha chain variable domain of TCR clone 62585 (TRAV1-2, TRAJ20)
CAVANDYKLSF

SEQ ID NO: 125170 - protein, 14 aa, Homo sapiens
  CDR3 for beta chain variable domain of TCR clone 62585 (TRBV20-1, TRBJ2-1)
CSAQIGGSANEQFF

SEQ ID NO: 125171 - protein, 16 aa, Homo sapiens
  CDR3 for alpha chain variable domain of TCR clone 62586 (TRAV16, TRAJ4)
CALSRMFSGGYNKLIF

SEQ ID NO: 125172 - protein, 16 aa, Homo sapiens
  CDR3 for beta chain variable domain of TCR clone 62586 (TRBV24-1, TRBJ2-3)
CATSDPGTGATDTKYF

SEQ ID NO: 125173 - protein, 12 aa, Homo sapiens
  CDR3 for alpha chain variable domain of TCR clone 62587 (TRAV12-3, TRAJ17)
CAMTLTGNKLTF

SEQ ID NO: 125174 - protein, 13 aa, Homo sapiens
  CDR3 for beta chain variable domain of TCR clone 62587 (TRBV12-4, TRBJ1-1)
CQQSRDRGTEAFF

SEQ ID NO: 125175 - protein, 15 aa, Homo sapiens
  CDR3 for alpha chain variable domain of TCR clone 62588 (TRAV38-2/DV8, TRAJ48)
CSYRSGGFGNEKLTF

SEQ ID NO: 125176 - protein, 16 aa, Homo sapiens
  CDR3 for beta chain variable domain of TCR clone 62588 (TRBV28, TRBJ2-7)
CASSPWVATGDLSQYF

SEQ ID NO: 125177 - protein, 13 aa, Homo sapiens
  CDR3 for alpha chain variable domain of TCR clone 62589 (TRAV23/DV6, TRAJ24)
CAASEDSWGKLQF

SEQ ID NO: 125178 - protein, 12 aa, Homo sapiens
  CDR3 for beta chain variable domain of TCR clone 62589 (TRBV5-1, TRBJ2-7)
CASSGSTYEQYF

SEQ ID NO: 125179 - protein, 11 aa, Homo sapiens
  CDR3 for alpha chain variable domain of TCR clone 62590 (TRAV3, TRAJ21)
CALGNFNKFYF

SEQ ID NO: 125180 - protein, 13 aa, Homo sapiens
  CDR3 for beta chain variable domain of TCR clone 62590 (TRBV12-5, TRBJ2-3)
CASGDRQSDTQYF

SEQ ID NO: 125181 - protein, 14 aa, Homo sapiens
  CDR3 for alpha chain variable domain of TCR clone 62591 (TRAV12-3, TRAJ10)
SHLPLTGGGNKLTF

SEQ ID NO: 125182 - protein, 14 aa, Homo sapiens
  CDR3 for beta chain variable domain of TCR clone 62591 (TRBV12-4, TRBJ2-5)
CASSLWQKQETQYF

SEQ ID NO: 125183 - protein, 17 aa, Homo sapiens
  CDR3 for alpha chain variable domain of TCR clone 62592 (TRAV3, TRAJ6)
CAVRDGPRAGGSYIPTF

SEQ ID NO: 125184 - protein, 14 aa, Homo sapiens
  CDR3 for beta chain variable domain of TCR clone 62592 (TRBV18, TRBJ2-3)
CASSRDRGTDTQYF

SEQ ID NO: 125185 - protein, 16 aa, Homo sapiens
  CDR3 for alpha chain variable domain of TCR clone 62593 (TRAV3, TRAJ37)
CAVRPHGSGNTGKLIF

SEQ ID NO: 125186 - protein, 13 aa, Homo sapiens
  CDR3 for beta chain variable domain of TCR clone 62593 (TRBV24-1, TRBJ2-2)
CATSDWSTGELFF

SEQ ID NO: 125187 - protein, 14 aa, Homo sapiens
  CDR3 for alpha chain variable domain of TCR clone 62594 (TRAV1-2, TRAJ16)
CAVNRFSDGQRLLF

SEQ ID NO: 125188 - protein, 12 aa, Homo sapiens
  CDR3 for beta chain variable domain of TCR clone 62594 (TRBV7-6, TRBJ2-3)
CASSTGTDTQYF

SEQ ID NO: 125189 - protein, 14 aa, Homo sapiens
  CDR3 for alpha chain variable domain of TCR clone 62595 (TRAV38-1, TRAJ45)
CASHSGGGADGLTF

SEQ ID NO: 125190 - protein, 13 aa, Homo sapiens
  CDR3 for beta chain variable domain of TCR clone 62595 (TRBV10-3, TRBJ1-2)
CDISERDSYGYTF

SEQ ID NO: 125191 - protein, 18 aa, Homo sapiens
  CDR3 for alpha chain variable domain of TCR clone 62596 (TRAV13-1, TRAJ52)
CAAKNPNAGGTSYVKLTF

SEQ ID NO: 125192 - protein, 18 aa, Homo sapiens
  CDR3 for beta chain variable domain of TCR clone 62596 (TRBV4-1, TRBJ1-4)
CASSPRTGGAWTNEKLFF

SEQ ID NO: 125193 - protein, 16 aa, Homo sapiens
  CDR3 for alpha chain variable domain of TCR clone 62597 (TRAV26-2, TRAJ48)
CILRPPFNFGNEKLTF

SEQ ID NO: 125194 - protein, 13 aa, Homo sapiens
  CDR3 for beta chain variable domain of TCR clone 62597 (TRBV7-9, TRBJ1-2)
CASSLKQNYGYTF

SEQ ID NO: 125195 - protein, 15 aa, Homo sapiens
  CDR3 for alpha chain variable domain of TCR clone 62598 (TRAV12-1, TRAJ4)
CVVNPFSGGYNKLIF

SEQ ID NO: 125196 - protein, 16 aa, Homo sapiens
  CDR3 for beta chain variable domain of TCR clone 62598 (TRBV5-1, TRBJ1-1)
CASSKTGTEVGAEAFF

SEQ ID NO: 125197 - protein, 12 aa, Homo sapiens
  CDR3 for alpha chain variable domain of TCR clone 62599 (TRAV8-3, TRAJ41)
CAVALSWYALNF

SEQ ID NO: 125198 - protein, 18 aa, Homo sapiens
  CDR3 for beta chain variable domain of TCR clone 62599 (TRBV20-1, TRBJ2-6)
CSAETTPTHGSGANVLTF

SEQ ID NO: 125199 - protein, 13 aa, Homo sapiens
  CDR3 for alpha chain variable domain of TCR clone 62600 (TRAV12-3, TRAJ33)
CAMSVNSNYHLIW

SEQ ID NO: 125200 - protein, 13 aa, Homo sapiens
  CDR3 for beta chain variable domain of TCR clone 62600 (TRBV7-2, TRBJ2-2)
CASSLAVTGELFF

SEQ ID NO: 125201 - protein, 14 aa, Homo sapiens
  CDR3 for alpha chain variable domain of TCR clone 62601 (TRAV12-3, TRAJ10)
SHLPLTGGGNKLTF

SEQ ID NO: 125202 - protein, 15 aa, Homo sapiens
  CDR3 for beta chain variable domain of TCR clone 62601 (TRBV7-2, TRBJ1-2)
CASSPRAGWNYGYTF

SEQ ID NO: 125203 - protein, 12 aa, Homo sapiens
  CDR3 for alpha chain variable domain of TCR clone 62602 (TRAV12-3, TRAJ40)
CAMTSGTCKYIF

SEQ ID NO: 125204 - protein, 15 aa, Homo sapiens
  CDR3 for beta chain variable domain of TCR clone 62602 (TRBV7-3, TRBJ2-2)
CASSLTGQGTGELFF

SEQ ID NO: 125205 - protein, 14 aa, Homo sapiens
  CDR3 for alpha chain variable domain of TCR clone 62603 (TRAV12-2, TRAJ9)
CAVNALDGGFKTIF

SEQ ID NO: 125206 - protein, 16 aa, Homo sapiens
  CDR3 for beta chain variable domain of TCR clone 62603 (TRBV19, TRBJ1-6)
CASSVAPVAGNSPLHF

SEQ ID NO: 125207 - protein, 14 aa, Homo sapiens
  CDR3 for alpha chain variable domain of TCR clone 62604 (TRAV38-1, TRAJ45)
CASHSGGGADGLTF

SEQ ID NO: 125208 - protein, 13 aa, Homo sapiens
  CDR3 for beta chain variable domain of TCR clone 62604 (TRBV10-3, TRBJ1-2)
CAISERDSHGYTF

SEQ ID NO: 125209 - protein, 16 aa, Homo sapiens
  CDR3 for alpha chain variable domain of TCR clone 62605 (TRAV12-3, TRAJ53)
CAMSPGSGGSNYKLTF

SEQ ID NO: 125210 - protein, 14 aa, Homo sapiens
  CDR3 for beta chain variable domain of TCR clone 62605 (TRBV4-2, TRBJ2-1)
CVSGLDRAYNEQFF

SEQ ID NO: 125211 - protein, 15 aa, Homo sapiens
  CDR3 for alpha chain variable domain of TCR clone 62606 (TRAV8-2, TRAJ24)
CVVSDRTDSRGKLQF

SEQ ID NO: 125212 - protein, 11 aa, Homo sapiens
  CDR3 for beta chain variable domain of TCR clone 62606 (TRBV20-1, TRBJ1-2)
CSVQGAGGYTF

SEQ ID NO: 125213 - protein, 14 aa, Homo sapiens
  CDR3 for alpha chain variable domain of TCR clone 62607 (TRAV23/DV6, TRAJ4)
CAAPSSGGYNKLLF

SEQ ID NO: 125214 - protein, 16 aa, Homo sapiens
  CDR3 for beta chain variable domain of TCR clone 62607 (TRBV19, TRBJ1-1)
CASRFGGPVTGTEAFF

SEQ ID NO: 125215 - protein, 11 aa, Homo sapiens
  CDR3 for alpha chain variable domain of TCR clone 62608 (TRAV12-3, TRAJ27)
CAMANAGKSTF

SEQ ID NO: 125216 - protein, 12 aa, Homo sapiens
  CDR3 for beta chain variable domain of TCR clone 62608 (TRBV19, TRBJ1-5)
CASSIAQQPQHF

SEQ ID NO: 125217 - protein, 12 aa, Homo sapiens
  CDR3 for alpha chain variable domain of TCR clone 62609 (TRAV1-1, TRAJ24)
CAATDSWGKLQF

SEQ ID NO: 125218 - protein, 14 aa, Homo sapiens
  CDR3 for beta chain variable domain of TCR clone 62609 (TRBV7-3, TRBJ1-1)
CASSLGTGYTEAFF

SEQ ID NO: 125219 - protein, 11 aa, Homo sapiens
  CDR3 for alpha chain variable domain of TCR clone 62610 (TRAV12-3, TRAJ43)
CAMCVSNDMRF

SEQ ID NO: 125220 - protein, 13 aa, Homo sapiens
  CDR3 for beta chain variable domain of TCR clone 62610 (TRBV20-1, TRBJ1-1)
CSAPLGGGTEAFF

SEQ ID NO: 125221 - protein, 15 aa, Homo sapiens
  CDR3 for alpha chain variable domain of TCR clone 62611 (TRAV26-1, TRAJ44)
CIVRANTGTASKLTF

SEQ ID NO: 125222 - protein, 11 aa, Homo sapiens
  CDR3 for beta chain variable domain of TCR clone 62611 (TRBV29-1, TRBJ2-5)
CSEDRTGTQYF

SEQ ID NO: 125223 - protein, 14 aa, Homo sapiens
  CDR3 for alpha chain variable domain of TCR clone 62612 (TRAV1-2, TRAJ16)
CAVNRFSDGQKLLF

SEQ ID NO: 125224 - protein, 16 aa, Homo sapiens
  CDR3 for beta chain variable domain of TCR clone 62612 (TRBV7-3, TRBJ2-1)
CASSKPLAGGYNEQFF

SEQ ID NO: 125225 - protein, 16 aa, Homo sapiens
  CDR3 for alpha chain variable domain of TCR clone 62613 (TRAV14/DV4, TRAJ15)
CAMREGPTQAGTALIF

SEQ ID NO: 125226 - protein, 12 aa, Homo sapiens
  CDR3 for beta chain variable domain of TCR clone 62613 (TRBV28, TRBJ2-6)
CAIQAGANVLTF

SEQ ID NO: 125227 - protein, 14 aa, Homo sapiens
  CDR3 for alpha chain variable domain of TCR clone 62614 (TRAV27, TRAJ17)
CRSTIRAAGNKLTF

SEQ ID NO: 125228 - protein, 15 aa, Homo sapiens
  CDR3 for beta chain variable domain of TCR clone 62614 (TRBV4-3, TRBJ2-7)
CASSQGGRGIYEQYF

SEQ ID NO: 125229 - protein, 15 aa, Homo sapiens
  CDR3 for alpha chain variable domain of TCR clone 62615 (TRAV8-3, TRAJ20)
CAVEAKGSNDYKLSF

SEQ ID NO: 125230 - protein, 12 aa, Homo sapiens
  CDR3 for beta chain variable domain of TCR clone 62615 (TRBV18, TRBJ2-7)
CASSLDSYEQYF

SEQ ID NO: 125231 - protein, 14 aa, Homo sapiens
  CDR3 for alpha chain variable domain of TCR clone 62616 (TRAV13-1, TRAJ44)
CAEEATGTASKLTF

SEQ ID NO: 125232 - protein, 14 aa, Homo sapiens
  CDR3 for beta chain variable domain of TCR clone 62616 (TRBV19, TRBJ2-2)
CASSTLHRSGELFF

SEQ ID NO: 125233 - protein, 14 aa, Homo sapiens
  CDR3 for alpha chain variable domain of TCR clone 62617 (TRAV13-1, TRAJ31)
CAASSRPNNARLMF

SEQ ID NO: 125234 - protein, 15 aa, Homo sapiens
  CDR3 for beta chain variable domain of TCR clone 62617 (TRBV4-2, TRBJ2-4)
CASSPLGATKNIQYF

SEQ ID NO: 125235 - protein, 16 aa, Homo sapiens
  CDR3 for alpha chain variable domain of TCR clone 62618 (TRAV38-1, TRAJ37)
CAFKGDGSSNTGKLIF

SEQ ID NO: 125236 - protein, 13 aa, Homo sapiens
  CDR3 for beta chain variable domain of TCR clone 62618 (TRBV12-4, TRBJ2-5)
CASSLFRRETQYV

SEQ ID NO: 125237 - protein, 15 aa, Homo sapiens
  CDR3 for alpha chain variable domain of TCR clone 62619 (TRAV3, TRAJ5)
CAVRDLDTGRRALTF

SEQ ID NO: 125238 - protein, 16 aa, Homo sapiens
  CDR3 for beta chain variable domain of TCR clone 62619 (TRBV4-3, TRBJ2-1)
CASSPALDRGVNEQFF

SEQ ID NO: 125239 - protein, 14 aa, Homo sapiens
  CDR3 for alpha chain variable domain of TCR clone 62620 (TRAV13-1, TRAJ10)
CAASSTGGGNKLTF

SEQ ID NO: 125240 - protein, 15 aa, Homo sapiens
  CDR3 for beta chain variable domain of TCR clone 62620 (TRBV11-3, TRBJ1-3)
CASSLFGPSGNTIYS

SEQ ID NO: 125241 - protein, 13 aa, Homo sapiens
  CDR3 for alpha chain variable domain of TCR clone 62621 (TRAV13-1, TRAJ5)
CAARVTGRRALTF

SEQ ID NO: 125242 - protein, 15 aa, Homo sapiens
  CDR3 for beta chain variable domain of TCR clone 62621 (TRBV7-9, TRBJ2-7)
CASSPGGRGFYEQYF

SEQ ID NO: 125243 - protein, 13 aa, Homo sapiens
  CDR3 for alpha chain variable domain of TCR clone 62622 (TRAV12-1, TRAJ26)
CVVRRNYGQNFVF

SEQ ID NO: 125244 - protein, 14 aa, Homo sapiens
  CDR3 for beta chain variable domain of TCR clone 62622 (TRBV4-2, TRBJ2-1)
CANGLDRAYNEQFF

SEQ ID NO: 125245 - protein, 15 aa, Homo sapiens
  CDR3 for alpha chain variable domain of TCR clone 62623 (TRAV26-1, TRAJ29)
CIVRVEGSGNTPLVF

SEQ ID NO: 125246 - protein, 14 aa, Homo sapiens
  CDR3 for beta chain variable domain of TCR clone 62623 (TRBV7-9, TRBJ1-5)
CQQQGHQPNQPQHF

SEQ ID NO: 125247 - protein, 18 aa, Homo sapiens
  CDR3 for alpha chain variable domain of TCR clone 62624 (TRAV26-2, TRAJ45)
CILRLWGYSGGGAYGLTF

SEQ ID NO: 125248 - protein, 17 aa, Homo sapiens
  CDR3 for beta chain variable domain of TCR clone 62624 (TRBV28, TRBJ2-3)
CASSPTPAGGRVDTQYF

SEQ ID NO: 125249 - protein, 20 aa, Homo sapiens
  CDR3 for alpha chain variable domain of TCR clone 62625 (TRAV27, TRAJ30)
CAGEGEMTRSSLEKGHDFIF

SEQ ID NO: 125250 - protein, 14 aa, Homo sapiens
  CDR3 for beta chain variable domain of TCR clone 62625 (TRBV2, TRBJ1-6)
CASSEAYTYWALHF

SEQ ID NO: 125251 - protein, 14 aa, Homo sapiens
  CDR3 for alpha chain variable domain of TCR clone 62626 (TRAV12-1, TRAJ43)
CVVNGRSNNNDMRF

SEQ ID NO: 125252 - protein, 13 aa, Homo sapiens
  CDR3 for beta chain variable domain of TCR clone 62626 (TRBV10-3, TRBJ2-7)
CASKLAVNYEKYF

SEQ ID NO: 125253 - protein, 10 aa, Homo sapiens
  CDR3 for alpha chain variable domain of TCR clone 62627 (TRAV12-3, TRAJ18)
CAMSAEAQPW

SEQ ID NO: 125254 - protein, 13 aa, Homo sapiens
  CDR3 for beta chain variable domain of TCR clone 62627 (TRBV12-4, TRBJ1-2)
CASSLRQGKGYTF

SEQ ID NO: 125255 - protein, 15 aa, Homo sapiens
  CDR3 for alpha chain variable domain of TCR clone 62628 (TRAV3, TRAJ5)
CAVRDRKTGRRALTF

SEQ ID NO: 125256 - protein, 12 aa, Homo sapiens
  CDR3 for beta chain variable domain of TCR clone 62628 (TRBV11-2, TRBJ2-2)
CASSLGGGELFF

SEQ ID NO: 125257 - protein, 15 aa, Homo sapiens
  CDR3 for alpha chain variable domain of TCR clone 62629 (TRAV3, TRAJ13)
CAVRVYSGGYQKVTF

SEQ ID NO: 125258 - protein, 14 aa, Homo sapiens
  CDR3 for beta chain variable domain of TCR clone 62629 (TRBV25-1, TRBJ1-1)
CASTHLGGNTEAFF

SEQ ID NO: 125259 - protein, 13 aa, Homo sapiens
  CDR3 for alpha chain variable domain of TCR clone 62630 (TRAV35, TRAJ44)
CAGLSGTASKLTF

SEQ ID NO: 125260 - protein, 16 aa, Homo sapiens
  CDR3 for beta chain variable domain of TCR clone 62630 (TRBV12-5, TRBJ2-5)
CASGPRTSGNQETQYF

SEQ ID NO: 125261 - protein, 14 aa, Homo sapiens
  CDR3 for alpha chain variable domain of TCR clone 62631 (TRAV14/DV4, TRAJ49)
CAMREGVNGNQFYF

SEQ ID NO: 125262 - protein, 16 aa, Homo sapiens
  CDR3 for beta chain variable domain of TCR clone 62631 (TRBV7-2, TRBJ1-2)
CASSSNQDRRGHGYTF

SEQ ID NO: 125263 - protein, 15 aa, Homo sapiens
  CDR3 for alpha chain variable domain of TCR clone 62632 (TRAV3, TRAJ5)
CAVRDRKTGRRALTF

SEQ ID NO: 125264 - protein, 15 aa, Homo sapiens
  CDR3 for beta chain variable domain of TCR clone 62632 (TRBV7-8, TRBJ2-1)
CASSLANSLYNEQFF

SEQ ID NO: 125265 - protein, 13 aa, Homo sapiens
  CDR3 for alpha chain variable domain of TCR clone 62633 (TRAV17, TRAJ5)
CATGDTGRRALTF

SEQ ID NO: 125266 - protein, 13 aa, Homo sapiens
  CDR3 for beta chain variable domain of TCR clone 62633 (TRBV19, TRBJ1-2)
CASSVPGQDGYTF

SEQ ID NO: 125267 - protein, 14 aa, Homo sapiens
  CDR3 for alpha chain variable domain of TCR clone 62634 (TRAV8-2, TRAJ4)
CVVSPSGGYNKLIF

SEQ ID NO: 125268 - protein, 16 aa, Homo sapiens
  CDR3 for beta chain variable domain of TCR clone 62634 (TRBV5-1, TRBJ2-7)
CASSLEGLAGLYEQYF

SEQ ID NO: 125269 - protein, 15 aa, Homo sapiens
  CDR3 for alpha chain variable domain of TCR clone 62635 (TRAV8-4, TRAJ3)
CAVTGENLGQQCFQD

SEQ ID NO: 125270 - protein, 16 aa, Homo sapiens
  CDR3 for beta chain variable domain of TCR clone 62635 (TRBV4-2, TRBJ1-1)
CASSQAGFGMNTEAFF

SEQ ID NO: 125271 - protein, 16 aa, Homo sapiens
  CDR3 for alpha chain variable domain of TCR clone 62636 (TRAV3, TRAJ10)
CAVRDMNAGGGNKLTF

SEQ ID NO: 125272 - protein, 13 aa, Homo sapiens
  CDR3 for beta chain variable domain of TCR clone 62636 (TRBV7-9, TRBJ1-2)
CASSLKQNYGYTF

SEQ ID NO: 125273 - protein, 14 aa, Homo sapiens
  CDR3 for alpha chain variable domain of TCR clone 62637 (TRAV12-1, TRAJ12)
CVVTRMDSSYKLIF

SEQ ID NO: 125274 - protein, 13 aa, Homo sapiens
  CDR3 for beta chain variable domain of TCR clone 62637 (TRBV20-1, TRBJ1-1)
CSARGGGNTEDFF

SEQ ID NO: 125275 - protein, 14 aa, Homo sapiens
  CDR3 for alpha chain variable domain of TCR clone 62638 (TRAV12-2, TRAJ13)
CDVKKTGGYQKVTF

SEQ ID NO: 125276 - protein, 15 aa, Homo sapiens
  CDR3 for beta chain variable domain of TCR clone 62638 (TRBV6-3, TRBJ2-7)
CASSSPGTVFYEQYF

SEQ ID NO: 125277 - protein, 14 aa, Homo sapiens
  CDR3 for alpha chain variable domain of TCR clone 62639 (TRAV2, TRAJ9)
CAVEDRSGGFKTIF

SEQ ID NO: 125278 - protein, 15 aa, Homo sapiens
  CDR3 for beta chain variable domain of TCR clone 62639 (TRBV5-1, TRBJ1-1)
CASSLDTVRDTEASF

SEQ ID NO: 125279 - protein, 15 aa, Homo sapiens
  CDR3 for alpha chain variable domain of TCR clone 62640 (TRAV27, TRAJ38)
CAARRNAGNNRKLIW

SEQ ID NO: 125280 - protein, 15 aa, Homo sapiens
  CDR3 for beta chain variable domain of TCR clone 62640 (TRBV7-2, TRBJ1-2)
CASSLVSGGDYGYTF

SEQ ID NO: 125281 - protein, 12 aa, Homo sapiens
  CDR3 for alpha chain variable domain of TCR clone 62641 (TRAV12-3, TRAJ17)
CAMTLTGNELTF

SEQ ID NO: 125282 - protein, 11 aa, Homo sapiens
  CDR3 for beta chain variable domain of TCR clone 62641 (TRBV6-3, TRBJ2-3)
CATGQADTQYF

SEQ ID NO: 125283 - protein, 16 aa, Homo sapiens
  CDR3 for alpha chain variable domain of TCR clone 62642 (TRAV30, TRAJ24)
CGTEIVDADSWGKFQF

SEQ ID NO: 125284 - protein, 14 aa, Homo sapiens
  CDR3 for beta chain variable domain of TCR clone 62642 (TRBV12-5, TRBJ2-5)
CASGSRTHQETQYS

SEQ ID NO: 125285 - protein, 15 aa, Homo sapiens
  CDR3 for alpha chain variable domain of TCR clone 62643 (TRAV4, TRAJ39)
CLVGPNNNADNMLTF

SEQ ID NO: 125286 - protein, 14 aa, Homo sapiens
  CDR3 for beta chain variable domain of TCR clone 62643 (TRBV19, TRBJ2-1)
CASPTFVLSGEQFF

SEQ ID NO: 125287 - protein, 19 aa, Homo sapiens
  CDR3 for alpha chain variable domain of TCR clone 62644 (TRAV26-1, TRAJ52)
CIVRAHRNAVGTSYGKLTF

SEQ ID NO: 125288 - protein, 15 aa, Homo sapiens
  CDR3 for beta chain variable domain of TCR clone 62644 (TRBV29-1, TRBJ2-1)
CSGRDRKSSYNEQFF

SEQ ID NO: 125289 - protein, 14 aa, Homo sapiens
  CDR3 for alpha chain variable domain of TCR clone 62645 (TRAV8-4, TRAJ54)
CAVSEVLGAQKLVF

SEQ ID NO: 125290 - protein, 15 aa, Homo sapiens
  CDR3 for beta chain variable domain of TCR clone 62645 (TRBV6-1, TRBJ2-6)
CASSSRPSGTNVLTF

SEQ ID NO: 125291 - protein, 14 aa, Homo sapiens
  CDR3 for alpha chain variable domain of TCR clone 62646 (TRAV8-4, TRAJ38)
CARLHAGNNRKLIW

SEQ ID NO: 125292 - protein, 12 aa, Homo sapiens
  CDR3 for beta chain variable domain of TCR clone 62646 (TRBV6-1, TRBJ2-7)
CASSEPLYEQYF

SEQ ID NO: 125293 - protein, 13 aa, Homo sapiens
  CDR3 for alpha chain variable domain of TCR clone 62647 (TRAV27, TRAJ53)
CAGQGGSNYKLTF

SEQ ID NO: 125294 - protein, 15 aa, Homo sapiens
  CDR3 for beta chain variable domain of TCR clone 62647 (TRBV10-2, TRBJ2-6)
CASSEQGTGANVLTF

SEQ ID NO: 125295 - protein, 14 aa, Homo sapiens
  CDR3 for alpha chain variable domain of TCR clone 62648 (TRAV8-4, TRAJ15)
CAVTIREAGTALIF

SEQ ID NO: 125296 - protein, 13 aa, Homo sapiens
  CDR3 for beta chain variable domain of TCR clone 62648 (TRBV29-1, TRBJ1-3)
RSADVDSGNTIYF

SEQ ID NO: 125297 - protein, 12 aa, Homo sapiens
  CDR3 for alpha chain variable domain of TCR clone 62649 (TRAV20, TRAJ20)
CAVRFNDYKLSF

SEQ ID NO: 125298 - protein, 14 aa, Homo sapiens
  CDR3 for beta chain variable domain of TCR clone 62649 (TRBV7-6, TRBJ2-3)
CASSLGTVTDTQYF

SEQ ID NO: 125299 - protein, 16 aa, Homo sapiens
  CDR3 for alpha chain variable domain of TCR clone 62650 (TRAV16, TRAJ4)
CALSRMFSGGYNKLSF

SEQ ID NO: 125300 - protein, 16 aa, Homo sapiens
  CDR3 for beta chain variable domain of TCR clone 62650 (TRBV24-1, TRBJ2-3)
CATSDPGTGATDTQYF

SEQ ID NO: 125301 - protein, 13 aa, Homo sapiens
  CDR3 for alpha chain variable domain of TCR clone 62651 (TRAV13-1, TRAJ4)
CAASIGGYNKLIF

SEQ ID NO: 125302 - protein, 16 aa, Homo sapiens
  CDR3 for beta chain variable domain of TCR clone 62651 (TRBV20-1, TRBJ2-1)
CGAPGLAGSYSDEQFF

SEQ ID NO: 125303 - protein, 12 aa, Homo sapiens
  CDR3 for alpha chain variable domain of TCR clone 62652 (TRAV20, TRAJ54)
CAVQEGAQKLVF

SEQ ID NO: 125304 - protein, 17 aa, Homo sapiens
  CDR3 for beta chain variable domain of TCR clone 62652 (TRBV13, TRBJ2-3)
CASSLSRVAGGRNTQYS

SEQ ID NO: 125305 - protein, 18 aa, Homo sapiens
  CDR3 for alpha chain variable domain of TCR clone 62653 (TRAV21, TRAJ52)
CAVRPSPAGGTSYGKLTF

SEQ ID NO: 125306 - protein, 15 aa, Homo sapiens
  CDR3 for beta chain variable domain of TCR clone 62653 (TRBV25-1, TRBJ1-4)
CASSKRIATNEKLFF

SEQ ID NO: 125307 - protein, 14 aa, Homo sapiens
  CDR3 for alpha chain variable domain of TCR clone 62654 (TRAV13-1, TRAJ44)
CAAKATGTASKLTF

SEQ ID NO: 125308 - protein, 15 aa, Homo sapiens
  CDR3 for beta chain variable domain of TCR clone 62654 (TRBV28, TRBJ1-2)
CASTRPGIMAYGYTF

SEQ ID NO: 125309 - protein, 17 aa, Homo sapiens
  CDR3 for alpha chain variable domain of TCR clone 62655 (TRAV13-1, TRAJ52)
CAASSGAGGTSYGKLTF

SEQ ID NO: 125310 - protein, 15 aa, Homo sapiens
  CDR3 for beta chain variable domain of TCR clone 62655 (TRBV7-3, TRBJ2-1)
CASSPTGGGEVEQFF

SEQ ID NO: 125311 - protein, 14 aa, Homo sapiens
  CDR3 for alpha chain variable domain of TCR clone 62656 (TRAV1-2, TRAJ29)
CAVRELTSATPLVF

SEQ ID NO: 125312 - protein, 14 aa, Homo sapiens
  CDR3 for beta chain variable domain of TCR clone 62656 (TRBV25-1, TRBJ1-1)
CASTHLGGNTEAFF

SEQ ID NO: 125313 - protein, 13 aa, Homo sapiens
  CDR3 for alpha chain variable domain of TCR clone 62657 (TRAV3, TRAJ15)
CAVRDQAGTALIF

SEQ ID NO: 125314 - protein, 15 aa, Homo sapiens
  CDR3 for beta chain variable domain of TCR clone 62657 (TRBV11-1, TRBJ2-7)
CASSLNYGASCEQYF

SEQ ID NO: 125315 - protein, 16 aa, Homo sapiens
  CDR3 for alpha chain variable domain of TCR clone 62658 (TRAV12-1, TRAJ32)
PPTSMNYGGATNKLIF

SEQ ID NO: 125316 - protein, 18 aa, Homo sapiens
  CDR3 for beta chain variable domain of TCR clone 62658 (TRBV20-1, TRBJ2-3)
CSASGLAGGPGTTDTQYF

SEQ ID NO: 125317 - protein, 16 aa, Homo sapiens
  CDR3 for alpha chain variable domain of TCR clone 62659 (TRAV16, TRAJ52)
CALSAAGGTSYGKLTF

SEQ ID NO: 125318 - protein, 16 aa, Homo sapiens
  CDR3 for beta chain variable domain of TCR clone 62659 (TRBV24-1, TRBJ2-3)
CATSGYRDRDTDTQYF

SEQ ID NO: 125319 - protein, 18 aa, Homo sapiens
  CDR3 for alpha chain variable domain of TCR clone 62660 (TRAV23/DV6, )
CAATALIPDIQNPDPAVY

SEQ ID NO: 125320 - protein, 16 aa, Homo sapiens
  CDR3 for beta chain variable domain of TCR clone 62660 (TRBV10-3, TRBJ2-7)
CAISSRGQEQTYEQYF

SEQ ID NO: 125321 - protein, 12 aa, Homo sapiens
  CDR3 for alpha chain variable domain of TCR clone 62661 (TRAV12-3, TRAJ34)
CAMGYNTDKLIF

SEQ ID NO: 125322 - protein, 15 aa, Homo sapiens
  CDR3 for beta chain variable domain of TCR clone 62661 (TRBV4-2, TRBJ1-1)
CASSQQGAGDTEAFF

SEQ ID NO: 125323 - protein, 14 aa, Homo sapiens
  CDR3 for alpha chain variable domain of TCR clone 62662 (TRAV8-3, TRAJ36)
CAVGPITGANNLFF

SEQ ID NO: 125324 - protein, 15 aa, Homo sapiens
  CDR3 for beta chain variable domain of TCR clone 62662 (TRBV4-1, TRBJ2-1)
CASRQDPGNYNEQFF

SEQ ID NO: 125325 - protein, 12 aa, Homo sapiens
  CDR3 for alpha chain variable domain of TCR clone 62663 (TRAV13-1, TRAJ27)
CAAHTNAGKSTF

SEQ ID NO: 125326 - protein, 14 aa, Homo sapiens
  CDR3 for beta chain variable domain of TCR clone 62663 (TRBV19, TRBJ2-2)
CASSGQGSAGELFF

SEQ ID NO: 125327 - protein, 12 aa, Homo sapiens
  CDR3 for alpha chain variable domain of TCR clone 62664 (TRAV1-2, TRAJ17)
CAVRAAGNKLTF

SEQ ID NO: 125328 - protein, 12 aa, Homo sapiens
  CDR3 for beta chain variable domain of TCR clone 62664 (TRBV3-1, TRBJ2-1)
CASSQGSSGQFF

SEQ ID NO: 125329 - protein, 15 aa, Homo sapiens
  CDR3 for alpha chain variable domain of TCR clone 62665 (TRAV21, TRAJ53)
CATLNSGGSNSKLTF

SEQ ID NO: 125330 - protein, 14 aa, Homo sapiens
  CDR3 for beta chain variable domain of TCR clone 62665 (TRBV7-2, TRBJ2-7)
CASRSQGAAYEQYF

SEQ ID NO: 125331 - protein, 13 aa, Homo sapiens
  CDR3 for alpha chain variable domain of TCR clone 62666 (TRAV8-4, TRAJ29)
CAVSATGNTPLVF

SEQ ID NO: 125332 - protein, 14 aa, Homo sapiens
  CDR3 for beta chain variable domain of TCR clone 62666 (TRBV19, TRBJ2-1)
CASPTFVLSGEQFF

SEQ ID NO: 125333 - protein, 14 aa, Homo sapiens
  CDR3 for alpha chain variable domain of TCR clone 62667 (TRAV26-1, TRAJ22)
CIVRVYGSARQLTF

SEQ ID NO: 125334 - protein, 17 aa, Homo sapiens
  CDR3 for beta chain variable domain of TCR clone 62667 (TRBV7-3, TRBJ2-3)
CASSPGGLEGFGDTQYF

SEQ ID NO: 125335 - protein, 14 aa, Homo sapiens
  CDR3 for alpha chain variable domain of TCR clone 62668 (TRAV8-4, TRAJ34)
CAVSDPGDTDKLIF

SEQ ID NO: 125336 - protein, 13 aa, Homo sapiens
  CDR3 for beta chain variable domain of TCR clone 62668 (TRBV4-1, TRBJ2-1)
CASSQEVQYEQFF

SEQ ID NO: 125337 - protein, 11 aa, Homo sapiens
  CDR3 for alpha chain variable domain of TCR clone 62669 (TRAV12-1, TRAJ34)
CVVNKGRELIF

SEQ ID NO: 125338 - protein, 12 aa, Homo sapiens
  CDR3 for beta chain variable domain of TCR clone 62669 (TRBV2, TRBJ2-1)
CAYGPPGNEQSF

SEQ ID NO: 125339 - protein, 15 aa, Homo sapiens
  CDR3 for alpha chain variable domain of TCR clone 62670 (TRAV3, TRAJ13)
CAVRVYSGGYQKVTF

SEQ ID NO: 125340 - protein, 15 aa, Homo sapiens
  CDR3 for beta chain variable domain of TCR clone 62670 (TRBV4-1, TRBJ1-4)
CASSDTGGTNEKLFF

SEQ ID NO: 125341 - protein, 13 aa, Homo sapiens
  CDR3 for alpha chain variable domain of TCR clone 62671 (TRAV27, TRAJ17)
CAGAATAGNKLPF

SEQ ID NO: 125342 - protein, 15 aa, Homo sapiens
  CDR3 for beta chain variable domain of TCR clone 62671 (TRBV5-1, TRBJ2-3)
CASRNQAGSTDTQYF

SEQ ID NO: 125343 - protein, 15 aa, Homo sapiens
  CDR3 for alpha chain variable domain of TCR clone 62672 (TRAV13-2, TRAJ5)
CAENPHWTGRRALTF

SEQ ID NO: 125344 - protein, 16 aa, Homo sapiens
  CDR3 for beta chain variable domain of TCR clone 62672 (TRBV7-9, TRBJ1-3)
CASSQTSGLRMGTMYF

SEQ ID NO: 125345 - protein, 14 aa, Homo sapiens
  CDR3 for alpha chain variable domain of TCR clone 62673 (TRAV27, TRAJ15)
CAGFDNQAGTALVF

SEQ ID NO: 125346 - protein, 11 aa, Homo sapiens
  CDR3 for beta chain variable domain of TCR clone 62673 (TRBV29-1, TRBJ1-1)
CSVEVGTRTFF

SEQ ID NO: 125347 - protein, 10 aa, Homo sapiens
  CDR3 for alpha chain variable domain of TCR clone 62674 (TRAV23/DV6, TRAJ57)
CAASSTLSQA

SEQ ID NO: 125348 - protein, 14 aa, Homo sapiens
  CDR3 for beta chain variable domain of TCR clone 62674 (TRBV19, TRBJ2-1)
CASSKDRGQDEQFF

SEQ ID NO: 125349 - protein, 13 aa, Homo sapiens
  CDR3 for alpha chain variable domain of TCR clone 62675 (TRAV30, TRAJ16)
CGTFGGDGQKLLF

SEQ ID NO: 125350 - protein, 11 aa, Homo sapiens
  CDR3 for beta chain variable domain of TCR clone 62675 (TRBV20-1, TRBJ2-1)
CSLSSGSEQFF

SEQ ID NO: 125351 - protein, 14 aa, Homo sapiens
  CDR3 for alpha chain variable domain of TCR clone 62676 (TRAV17, TRAJ54)
CATDANQGAQKLAF

SEQ ID NO: 125352 - protein, 12 aa, Homo sapiens
  CDR3 for beta chain variable domain of TCR clone 62676 (TRBV6-3, TRBJ2-1)
CASSGSYNEQFF

SEQ ID NO: 125353 - protein, 14 aa, Homo sapiens
  CDR3 for alpha chain variable domain of TCR clone 62677 (TRAV2, TRAJ9)
CAVEDRSGGFKTIF

SEQ ID NO: 125354 - protein, 17 aa, Homo sapiens
  CDR3 for beta chain variable domain of TCR clone 62677 (TRBV18, TRBJ2-1)
CASSSGTSSRHRNEQFF

SEQ ID NO: 125355 - protein, 13 aa, Homo sapiens
  CDR3 for alpha chain variable domain of TCR clone 62678 (TRAV36/DV7, TRAJ49)
CAGDSNTGNQFYF

SEQ ID NO: 125356 - protein, 14 aa, Homo sapiens
  CDR3 for beta chain variable domain of TCR clone 62678 (TRBV25-1, TRBJ1-1)
CASTHLGGNTEAFF

SEQ ID NO: 125357 - protein, 11 aa, Homo sapiens
  CDR3 for alpha chain variable domain of TCR clone 62679 (TRAV13-1, TRAJ30)
CAASRDDKTIF

SEQ ID NO: 125358 - protein, 15 aa, Homo sapiens
  CDR3 for beta chain variable domain of TCR clone 62679 (TRBV18, TRBJ1-1)
CASSPSSWVNTEAFF

SEQ ID NO: 125359 - protein, 16 aa, Homo sapiens
  CDR3 for alpha chain variable domain of TCR clone 62680 (TRAV29/DV5, TRAJ52)
CSKREAGGTSYGKLTF

SEQ ID NO: 125360 - protein, 15 aa, Homo sapiens
  CDR3 for beta chain variable domain of TCR clone 62680 (TRBV6-1, TRBJ2-1)
CASSELRGQYNEQFF

SEQ ID NO: 125361 - protein, 13 aa, Homo sapiens
  CDR3 for alpha chain variable domain of TCR clone 62681 (TRAV21, TRAJ27)
CAARPGNAGKSTF

SEQ ID NO: 125362 - protein, 12 aa, Homo sapiens
  CDR3 for beta chain variable domain of TCR clone 62681 (TRBV6-3, TRBJ2-7)
CASSLAPYEQYF

SEQ ID NO: 125363 - protein, 14 aa, Homo sapiens
  CDR3 for alpha chain variable domain of TCR clone 62682 (TRAV1-2, TRAJ16)
CAVNRFSDSQKLLF

SEQ ID NO: 125364 - protein, 17 aa, Homo sapiens
  CDR3 for beta chain variable domain of TCR clone 62682 (TRBV15, TRBJ1-2)
CATSGREIDVVNYGYTF

SEQ ID NO: 125365 - protein, 12 aa, Homo sapiens
  CDR3 for alpha chain variable domain of TCR clone 62683 (TRAV36/DV7, TRAJ54)
CAVVRGAQKLVF

SEQ ID NO: 125366 - protein, 14 aa, Homo sapiens
  CDR3 for beta chain variable domain of TCR clone 62683 (TRBV7-3, TRBJ1-1)
CASSLKGGNTEAFI

SEQ ID NO: 125367 - protein, 15 aa, Homo sapiens
  CDR3 for alpha chain variable domain of TCR clone 62684 (TRAV17, TRAJ56)
CATDANTGANSKPTF

SEQ ID NO: 125368 - protein, 14 aa, Homo sapiens
  CDR3 for beta chain variable domain of TCR clone 62684 (TRBV19, TRBJ1-5)
CASSLGTGGQPQHF

SEQ ID NO: 125369 - protein, 13 aa, Homo sapiens
  CDR3 for alpha chain variable domain of TCR clone 62685 (TRAV1-2, TRAJ13)
CAVNSGGYQKVAF

SEQ ID NO: 125370 - protein, 14 aa, Homo sapiens
  CDR3 for beta chain variable domain of TCR clone 62685 (TRBV4-1, TRBJ1-5)
CASSPKGDNQPQHF

SEQ ID NO: 125371 - protein, 14 aa, Homo sapiens
  CDR3 for alpha chain variable domain of TCR clone 62686 (TRAV8-3, TRAJ21)
CAVGLNPRSDKFYF

SEQ ID NO: 125372 - protein, 16 aa, Homo sapiens
  CDR3 for beta chain variable domain of TCR clone 62686 (TRBV7-9, TRBJ2-7)
CASSSPSANTVNEQYF

SEQ ID NO: 125373 - protein, 12 aa, Homo sapiens
  CDR3 for alpha chain variable domain of TCR clone 62687 (TRAV21, TRAJ33)
CAKMDSNYQLIW

SEQ ID NO: 125374 - protein, 14 aa, Homo sapiens
  CDR3 for beta chain variable domain of TCR clone 62687 (TRBV2, TRBJ2-7)
CAISLTSGGYEQYF

SEQ ID NO: 125375 - protein, 15 aa, Homo sapiens
  CDR3 for alpha chain variable domain of TCR clone 62688 (TRAV29/DV5, TRAJ29)
CAASEGSSGNTPLVF

SEQ ID NO: 125376 - protein, 12 aa, Homo sapiens
  CDR3 for beta chain variable domain of TCR clone 62688 (TRBV7-9, TRBJ1-4)
CASSTDREKLFF

SEQ ID NO: 125377 - protein, 13 aa, Homo sapiens
  CDR3 for alpha chain variable domain of TCR clone 62689 (TRAV12-1, TRAJ40)
CVVPTSGTCKYIF

SEQ ID NO: 125378 - protein, 18 aa, Homo sapiens
  CDR3 for beta chain variable domain of TCR clone 62689 (TRBV7-6, TRBJ2-1)
CASSPRTSGMSSYNEQFF

SEQ ID NO: 125379 - protein, 14 aa, Homo sapiens
  CDR3 for alpha chain variable domain of TCR clone 62690 (TRAV26-1, TRAJ38)
CIADNAGNNRKLIW

SEQ ID NO: 125380 - protein, 12 aa, Homo sapiens
  CDR3 for beta chain variable domain of TCR clone 62690 (TRBV14, TRBJ2-5)
CASSHLKETQYF

SEQ ID NO: 125381 - protein, 12 aa, Homo sapiens
  CDR3 for alpha chain variable domain of TCR clone 62691 (TRAV13-1, TRAJ27)
CAAHSNAGKSTF

SEQ ID NO: 125382 - protein, 14 aa, Homo sapiens
  CDR3 for beta chain variable domain of TCR clone 62691 (TRBV19, TRBJ2-2)
CASSGQGIAGELFF

SEQ ID NO: 125383 - protein, 13 aa, Homo sapiens
  CDR3 for alpha chain variable domain of TCR clone 62692 (TRAV1-1, TRAJ15)
CAVVDQAGTALIF

SEQ ID NO: 125384 - protein, 14 aa, Homo sapiens
  CDR3 for beta chain variable domain of TCR clone 62692 (TRBV5-4, TRBJ1-6)
CASSLWSDNSPLHV

SEQ ID NO: 125385 - protein, 15 aa, Homo sapiens
  CDR3 for alpha chain variable domain of TCR clone 62693 (TRAV38-1, TRAJ57)
CAFMDSQGGSEKLVF

SEQ ID NO: 125386 - protein, 12 aa, Homo sapiens
  CDR3 for beta chain variable domain of TCR clone 62693 (TRBV7-8, TRBJ2-7)
CASSLGDREQYF

SEQ ID NO: 125387 - protein, 12 aa, Homo sapiens
  CDR3 for alpha chain variable domain of TCR clone 62694 (TRAV20, TRAJ39)
CAVGNAGNMLTF

SEQ ID NO: 125388 - protein, 16 aa, Homo sapiens
  CDR3 for beta chain variable domain of TCR clone 62694 (TRBV7-3, TRBJ2-2)
CASSLKRGTLSGELFF

SEQ ID NO: 125389 - protein, 16 aa, Homo sapiens
  CDR3 for alpha chain variable domain of TCR clone 62695 (TRAV21, TRAJ52)
CAVSDDGGTSYGKLTF

SEQ ID NO: 125390 - protein, 13 aa, Homo sapiens
  CDR3 for beta chain variable domain of TCR clone 62695 (TRBV7-3, TRBJ2-5)
CASSFRGSQTQYF

SEQ ID NO: 125391 - protein, 15 aa, Homo sapiens
  CDR3 for alpha chain variable domain of TCR clone 62696 (TRAV21, TRAJ53)
CATLNSGGSNYKLTF

SEQ ID NO: 125392 - protein, 19 aa, Homo sapiens
  CDR3 for beta chain variable domain of TCR clone 62696 (TRBV4-1, TRBJ2-3)
CISAPAAGYVSGGTDTQYF

SEQ ID NO: 125393 - protein, 12 aa, Homo sapiens
  CDR3 for alpha chain variable domain of TCR clone 62697 (TRAV26-1, TRAJ17)
CIVRSAGNKLTF

SEQ ID NO: 125394 - protein, 15 aa, Homo sapiens
  CDR3 for beta chain variable domain of TCR clone 62697 (TRBV20-1, TRBJ2-7)
CSARDRVSGMDEQYF

SEQ ID NO: 125395 - protein, 14 aa, Homo sapiens
  CDR3 for alpha chain variable domain of TCR clone 62698 (TRAV2, TRAJ9)
CAVEDRSGGFKTIF

SEQ ID NO: 125396 - protein, 13 aa, Homo sapiens
  CDR3 for beta chain variable domain of TCR clone 62698 (TRBV5-5, TRBJ1-2)
CASSFWRGEDYTF

SEQ ID NO: 125397 - protein, 13 aa, Homo sapiens
  CDR3 for alpha chain variable domain of TCR clone 62699 (TRAV1-2, TRAJ9)
CAALNTGGFKTIF

SEQ ID NO: 125398 - protein, 13 aa, Homo sapiens
  CDR3 for beta chain variable domain of TCR clone 62699 (TRBV19, TRBJ1-2)
CASSVPGQHGYTF

SEQ ID NO: 125399 - protein, 15 aa, Homo sapiens
  CDR3 for alpha chain variable domain of TCR clone 62700 (TRAV8-4, TRAJ3)
CAVTGVNLVQQCFQD

SEQ ID NO: 125400 - protein, 16 aa, Homo sapiens
  CDR3 for beta chain variable domain of TCR clone 62700 (TRBV4-2, TRBJ1-1)
CASSQSGFGMNTEAFF

SEQ ID NO: 125401 - protein, 12 aa, Homo sapiens
  CDR3 for alpha chain variable domain of TCR clone 62701 (TRAV1-1, TRAJ8)
CAGGTGFQKLVF

SEQ ID NO: 125402 - protein, 15 aa, Homo sapiens
  CDR3 for beta chain variable domain of TCR clone 62701 (TRBV7-9, TRBJ2-2)
CASGPLDTFPGELFF

SEQ ID NO: 125403 - protein, 13 aa, Homo sapiens
  CDR3 for alpha chain variable domain of TCR clone 62702 (TRAV5, TRAJ30)
CAEIANRGDKIIF

SEQ ID NO: 125404 - protein, 16 aa, Homo sapiens
  CDR3 for beta chain variable domain of TCR clone 62702 (TRBV7-2, TRBJ2-6)
CASSLAGRSGANVLTF

SEQ ID NO: 125405 - protein, 12 aa, Homo sapiens
  CDR3 for alpha chain variable domain of TCR clone 62703 (TRAV12-1, TRAJ40)
CVVYSGTYKYIF

SEQ ID NO: 125406 - protein, 14 aa, Homo sapiens
  CDR3 for beta chain variable domain of TCR clone 62703 (TRBV7-9, TRBJ2-5)
RASSLDTAQETQYF

SEQ ID NO: 125407 - protein, 18 aa, Homo sapiens
  CDR3 for alpha chain variable domain of TCR clone 62704 (TRAV21, TRAJ52)
CAVRPSPAGGTSYGKLTF

SEQ ID NO: 125408 - protein, 16 aa, Homo sapiens
  CDR3 for beta chain variable domain of TCR clone 62704 (TRBV4-3, TRBJ2-2)
CASSHLQGSGTGELFL

SEQ ID NO: 125409 - protein, 12 aa, Homo sapiens
  CDR3 for alpha chain variable domain of TCR clone 62705 (TRAV20, TRAJ39)
CAVGNAGNMLTF

SEQ ID NO: 125410 - protein, 18 aa, Homo sapiens
  CDR3 for beta chain variable domain of TCR clone 62705 (TRBV4-1, TRBJ2-1)
CASSLVGGELAGFNEQFF

SEQ ID NO: 125411 - protein, 16 aa, Homo sapiens
  CDR3 for alpha chain variable domain of TCR clone 62706 (TRAV17, TRAJ52)
CATGIIGGTSYGKLTF

SEQ ID NO: 125412 - protein, 12 aa, Homo sapiens
  CDR3 for beta chain variable domain of TCR clone 62706 (TRBV9, TRBJ2-2)
CASSLVTGELFF

SEQ ID NO: 125413 - protein, 13 aa, Homo sapiens
  CDR3 for alpha chain variable domain of TCR clone 62707 (TRAV1-2, TRAJ9)
CAALNTGGFKTIF

SEQ ID NO: 125414 - protein, 13 aa, Homo sapiens
  CDR3 for beta chain variable domain of TCR clone 62707 (TRBV19, TRBJ2-7)
CASSMRGSYEQYF

SEQ ID NO: 125415 - protein, 12 aa, Homo sapiens
  CDR3 for alpha chain variable domain of TCR clone 62708 (TRAV8-3, TRAJ26)
CAGDNYGQNFVF

SEQ ID NO: 125416 - protein, 12 aa, Homo sapiens
  CDR3 for beta chain variable domain of TCR clone 62708 (TRBV11-2, TRBJ2-1)
CASSPGNNEQLF

SEQ ID NO: 125417 - protein, 14 aa, Homo sapiens
  CDR3 for alpha chain variable domain of TCR clone 62709 (TRAV38-1, TRAJ29)
CAFITPSGNTPLVF

SEQ ID NO: 125418 - protein, 14 aa, Homo sapiens
  CDR3 for beta chain variable domain of TCR clone 62709 (TRBV18, TRBJ2-7)
CASSPRGGAYEKYF

SEQ ID NO: 125419 - protein, 16 aa, Homo sapiens
  CDR3 for alpha chain variable domain of TCR clone 62710 (TRAV17, TRAJ9)
CATGEWGGIGGFKTIF

SEQ ID NO: 125420 - protein, 15 aa, Homo sapiens
  CDR3 for beta chain variable domain of TCR clone 62710 (TRBV20-1, TRBJ1-2)
CSARDSRGRNYGYTF

SEQ ID NO: 125421 - protein, 13 aa, Homo sapiens
  CDR3 for alpha chain variable domain of TCR clone 62711 (TRAV29/DV5, TRAJ31)
CAASRNNNARLMF

SEQ ID NO: 125422 - protein, 13 aa, Homo sapiens
  CDR3 for beta chain variable domain of TCR clone 62711 (TRBV7-2, TRBJ2-4)
CASSREHANIQYF

SEQ ID NO: 125423 - protein, 14 aa, Homo sapiens
  CDR3 for alpha chain variable domain of TCR clone 62712 (TRAV12-2, TRAJ17)
YAVLFKAAGNKLTF

SEQ ID NO: 125424 - protein, 17 aa, Homo sapiens
  CDR3 for beta chain variable domain of TCR clone 62712 (TRBV20-1, TRBJ2-2)
CSASGSGQGGLTGELFF

SEQ ID NO: 125425 - protein, 18 aa, Homo sapiens
  CDR3 for alpha chain variable domain of TCR clone 62713 (TRAV12-3, TRAJ52)
CAMSVGGAGGTSYGKLTF

SEQ ID NO: 125426 - protein, 15 aa, Homo sapiens
  CDR3 for beta chain variable domain of TCR clone 62713 (TRBV27, TRBJ1-6)
CTSSFDRGLGSPLHF

SEQ ID NO: 125427 - protein, 13 aa, Homo sapiens
  CDR3 for alpha chain variable domain of TCR clone 62714 (TRAV12-3, TRAJ53)
CAMRGGSNYKMTF

SEQ ID NO: 125428 - protein, 15 aa, Homo sapiens
  CDR3 for beta chain variable domain of TCR clone 62714 (TRBV2, TRBJ2-1)
CATQARLVMIGEQFF

SEQ ID NO: 125429 - protein, 15 aa, Homo sapiens
  CDR3 for alpha chain variable domain of TCR clone 62715 (TRAV3, TRAJ5)
CAVRDLDTGRRALTF

SEQ ID NO: 125430 - protein, 14 aa, Homo sapiens
  CDR3 for beta chain variable domain of TCR clone 62715 (TRBV25-1, TRBJ1-1)
CASTHLGGNTEALF

SEQ ID NO: 125431 - protein, 15 aa, Homo sapiens
  CDR3 for alpha chain variable domain of TCR clone 62716 (TRAV8-3, TRAJ45)
CASSYSGGVADGLTF

SEQ ID NO: 125432 - protein, 15 aa, Homo sapiens
  CDR3 for beta chain variable domain of TCR clone 62716 (TRBV18, TRBJ1-1)
CASSPRQGENTEAFF

SEQ ID NO: 125433 - protein, 14 aa, Homo sapiens
  CDR3 for alpha chain variable domain of TCR clone 62717 (TRAV12-1, TRAJ17)
CVVNYKAAGNKLTF

SEQ ID NO: 125434 - protein, 15 aa, Homo sapiens
  CDR3 for beta chain variable domain of TCR clone 62717 (TRBV20-1, TRBJ2-7)
CSARDRVYGMDEQYF

SEQ ID NO: 125435 - protein, 17 aa, Homo sapiens
  CDR3 for alpha chain variable domain of TCR clone 62718 (TRAV12-3, TRAJ6)
CAMSARGGEGGSYIPTF

SEQ ID NO: 125436 - protein, 12 aa, Homo sapiens
  CDR3 for beta chain variable domain of TCR clone 62718 (TRBV12-4, TRBJ2-3)
CASSTLPDTQYF

SEQ ID NO: 125437 - protein, 14 aa, Homo sapiens
  CDR3 for alpha chain variable domain of TCR clone 62719 (TRAV13-1, TRAJ40)
CAASMNSGTYKYIF

SEQ ID NO: 125438 - protein, 15 aa, Homo sapiens
  CDR3 for beta chain variable domain of TCR clone 62719 (TRBV7-3, TRBJ2-1)
CASSPTGGGEVEQFF

SEQ ID NO: 125439 - protein, 12 aa, Homo sapiens
  CDR3 for alpha chain variable domain of TCR clone 62720 (TRAV17, TRAJ49)
CATVTTGNQLYF

SEQ ID NO: 125440 - protein, 18 aa, Homo sapiens
  CDR3 for beta chain variable domain of TCR clone 62720 (TRBV11-2, TRBJ2-6)
CASSLNPFLGTGADVLTF

SEQ ID NO: 125441 - protein, 17 aa, Homo sapiens
  CDR3 for alpha chain variable domain of TCR clone 62721 (TRAV4, TRAJ13)
CLVVVQGSSGGYQKVTF

SEQ ID NO: 125442 - protein, 18 aa, Homo sapiens
  CDR3 for beta chain variable domain of TCR clone 62721 (TRBV15, TRBJ2-3)
CATSRDGARSWDTDTQYF

SEQ ID NO: 125443 - protein, 14 aa, Homo sapiens
  CDR3 for alpha chain variable domain of TCR clone 62722 (TRAV12-2, TRAJ13)
CAVKKTGGYQKVTF

SEQ ID NO: 125444 - protein, 15 aa, Homo sapiens
  CDR3 for beta chain variable domain of TCR clone 62722 (TRBV9, TRBJ1-6)
CASSVAGTGDSTLHF

SEQ ID NO: 125445 - protein, 14 aa, Homo sapiens
  CDR3 for alpha chain variable domain of TCR clone 62723 (TRAV12-3, TRAJ9)
CAMSPNTGGFKTIF

SEQ ID NO: 125446 - protein, 11 aa, Homo sapiens
  CDR3 for beta chain variable domain of TCR clone 62723 (TRBV29-1, TRBJ2-5)
CSEDRTGSQYF

SEQ ID NO: 125447 - protein, 14 aa, Homo sapiens
  CDR3 for alpha chain variable domain of TCR clone 62724 (TRAV29/DV5, TRAJ45)
CAASFRGGADGLTF

SEQ ID NO: 125448 - protein, 12 aa, Homo sapiens
  CDR3 for beta chain variable domain of TCR clone 62724 (TRBV29-1, TRBJ2-3)
CSVTGGADTQYF

SEQ ID NO: 125449 - protein, 12 aa, Homo sapiens
  CDR3 for alpha chain variable domain of TCR clone 62725 (TRAV21, TRAJ11)
CAATSGYSTLTF

SEQ ID NO: 125450 - protein, 16 aa, Homo sapiens
  CDR3 for beta chain variable domain of TCR clone 62725 (TRBV11-2, TRBJ1-2)
CASSPSGREANYGYTF

SEQ ID NO: 125451 - protein, 11 aa, Homo sapiens
  CDR3 for alpha chain variable domain of TCR clone 62726 (TRAV3, TRAJ17)
PKGAAGNKLTF

SEQ ID NO: 125452 - protein, 16 aa, Homo sapiens
  CDR3 for beta chain variable domain of TCR clone 62726 (TRBV7-6, TRBJ2-1)
CASSAPGPSSYNEQFF

SEQ ID NO: 125453 - protein, 16 aa, Homo sapiens
  CDR3 for alpha chain variable domain of TCR clone 62727 (TRAV12-3, TRAJ20)
CAMDKLSFGAGTTVTV

SEQ ID NO: 125454 - protein, 11 aa, Homo sapiens
  CDR3 for beta chain variable domain of TCR clone 62727 (TRBV11-2, TRBJ2-2)
CASSLPGELFF

SEQ ID NO: 125455 - protein, 13 aa, Homo sapiens
  CDR3 for alpha chain variable domain of TCR clone 62728 (TRAV27, TRAJ45)
CRSSGEGADGLTF

SEQ ID NO: 125456 - protein, 17 aa, Homo sapiens
  CDR3 for beta chain variable domain of TCR clone 62728 (TRBV11-2, TRBJ2-1)
CASSLYPPGVEYNEQFF

SEQ ID NO: 125457 - protein, 15 aa, Homo sapiens
  CDR3 for alpha chain variable domain of TCR clone 62729 (TRAV20, TRAJ4)
CSVEGSSGGYNKLIF

SEQ ID NO: 125458 - protein, 14 aa, Homo sapiens
  CDR3 for beta chain variable domain of TCR clone 62729 (TRBV7-8, TRBJ2-7)
CASTLGGALGEQYF

SEQ ID NO: 125459 - protein, 13 aa, Homo sapiens
  CDR3 for alpha chain variable domain of TCR clone 62730 (TRAV12-3, TRAJ7)
CAMTPYGNNRLAF

SEQ ID NO: 125460 - protein, 14 aa, Homo sapiens
  CDR3 for beta chain variable domain of TCR clone 62730 (TRBV7-6, TRBJ2-3)
CASSLGTVTDTQYF

SEQ ID NO: 125461 - protein, 14 aa, Homo sapiens
  CDR3 for alpha chain variable domain of TCR clone 62731 (TRAV26-1, TRAJ34)
CIVRVAYNTDKLIF

SEQ ID NO: 125462 - protein, 15 aa, Homo sapiens
  CDR3 for beta chain variable domain of TCR clone 62731 (TRBV20-1, TRBJ2-7)
CSARDPAAYFYEQYF

SEQ ID NO: 125463 - protein, 12 aa, Homo sapiens
  CDR3 for alpha chain variable domain of TCR clone 62732 (TRAV1-2, TRAJ7)
CAVAYGNNGLAF

SEQ ID NO: 125464 - protein, 16 aa, Homo sapiens
  CDR3 for beta chain variable domain of TCR clone 62732 (TRBV5-1, TRBJ2-7)
CASSPMTGALSYEQYF

SEQ ID NO: 125465 - protein, 11 aa, Homo sapiens
  CDR3 for alpha chain variable domain of TCR clone 62733 (TRAV1-1, TRAJ23)
CAVRQGGKLIF

SEQ ID NO: 125466 - protein, 16 aa, Homo sapiens
  CDR3 for beta chain variable domain of TCR clone 62733 (TRBV5-1, TRBJ2-2)
CASSLWDTTNTGELFF

SEQ ID NO: 125467 - protein, 14 aa, Homo sapiens
  CDR3 for alpha chain variable domain of TCR clone 62734 (TRAV1-2, TRAJ16)
CAVNRFSDGKKLLF

SEQ ID NO: 125468 - protein, 16 aa, Homo sapiens
  CDR3 for beta chain variable domain of TCR clone 62734 (TRBV20-1, TRBJ1-4)
CSAPGQGLLTNEKLFF

SEQ ID NO: 125469 - protein, 10 aa, Homo sapiens
  CDR3 for alpha chain variable domain of TCR clone 62735 (TRAV30, TRAJ48)
CGIGNENLTF

SEQ ID NO: 125470 - protein, 14 aa, Homo sapiens
  CDR3 for beta chain variable domain of TCR clone 62735 (TRBV7-6, TRBJ2-3)
CASSVAGGTDTQYF

SEQ ID NO: 125471 - protein, 16 aa, Homo sapiens
  CDR3 for alpha chain variable domain of TCR clone 62736 (TRAV16, TRAJ21)
CACGWATTSTNFTLDL

SEQ ID NO: 125472 - protein, 13 aa, Homo sapiens
  CDR3 for beta chain variable domain of TCR clone 62736 (TRBV2, TRBJ2-5)
CASGTPYQETQYF

SEQ ID NO: 125473 - protein, 11 aa, Homo sapiens
  CDR3 for alpha chain variable domain of TCR clone 62737 (TRAV2, TRAJ33)
CAVDSNYQLIW

SEQ ID NO: 125474 - protein, 14 aa, Homo sapiens
  CDR3 for beta chain variable domain of TCR clone 62737 (TRBV11-2, TRBJ2-3)
CASSRLARTDTQHF

SEQ ID NO: 125475 - protein, 14 aa, Homo sapiens
  CDR3 for alpha chain variable domain of TCR clone 62738 (TRAV34, TRAJ44)
CGADGTGTASKLTF

SEQ ID NO: 125476 - protein, 15 aa, Homo sapiens
  CDR3 for beta chain variable domain of TCR clone 62738 (TRBV5-1, TRBJ2-1)
CASSPPRAAYNEQFF

SEQ ID NO: 125477 - protein, 15 aa, Homo sapiens
  CDR3 for alpha chain variable domain of TCR clone 62739 (TRAV25, TRAJ52)
CAGRPGGTSYGKLTF

SEQ ID NO: 125478 - protein, 17 aa, Homo sapiens
  CDR3 for beta chain variable domain of TCR clone 62739 (TRBV7-3, TRBJ2-3)
CASSLMKRMRGADTQYF

SEQ ID NO: 125479 - protein, 14 aa, Homo sapiens
  CDR3 for alpha chain variable domain of TCR clone 62740 (TRAV12-2, TRAJ13)
CAVKKTGGYQKVTF

SEQ ID NO: 125480 - protein, 13 aa, Homo sapiens
  CDR3 for beta chain variable domain of TCR clone 62740 (TRBV4-1, TRBJ2-7)
CASSQGQAYEQYF

SEQ ID NO: 125481 - protein, 16 aa, Homo sapiens
  CDR3 for alpha chain variable domain of TCR clone 62741 (TRAV3, TRAJ37)
CAVRGEGSGNTGKLIF

SEQ ID NO: 125482 - protein, 13 aa, Homo sapiens
  CDR3 for beta chain variable domain of TCR clone 62741 (TRBV14, TRBJ2-7)
SASSQDRRYEQYF

SEQ ID NO: 125483 - protein, 13 aa, Homo sapiens
  CDR3 for alpha chain variable domain of TCR clone 62742 (TRAV2, TRAJ40)
CAVVTSGTYKYIF

SEQ ID NO: 125484 - protein, 14 aa, Homo sapiens
  CDR3 for beta chain variable domain of TCR clone 62742 (TRBV19, TRBJ2-1)
CASPTGVLSGEQFF

SEQ ID NO: 125485 - protein, 13 aa, Homo sapiens
  CDR3 for alpha chain variable domain of TCR clone 62743 (TRAV1-2, TRAJ9)
CAALNTGGFKTTF

SEQ ID NO: 125486 - protein, 19 aa, Homo sapiens
  CDR3 for beta chain variable domain of TCR clone 62743 (TRBV25-1, TRBJ2-2)
CAILVYRVDRGRKTGELFF

SEQ ID NO: 125487 - protein, 14 aa, Homo sapiens
  CDR3 for alpha chain variable domain of TCR clone 62744 (TRAV17, TRAJ54)
CATDANQGAQKLVF

SEQ ID NO: 125488 - protein, 16 aa, Homo sapiens
  CDR3 for beta chain variable domain of TCR clone 62744 (TRBV7-6, TRBJ2-1)
CASSAPGPSSYNEQFF

SEQ ID NO: 125489 - protein, 14 aa, Homo sapiens
  CDR3 for alpha chain variable domain of TCR clone 62745 (TRAV12-1, TRAJ30)
CVPTGTNRDGKIIF

SEQ ID NO: 125490 - protein, 11 aa, Homo sapiens
  CDR3 for beta chain variable domain of TCR clone 62745 (TRBV4-1, TRBJ2-2)
CASEHTGELFF

SEQ ID NO: 125491 - protein, 13 aa, Homo sapiens
  CDR3 for alpha chain variable domain of TCR clone 62746 (TRAV1-2, TRAJ9)
CAALNTGGFKTIF

SEQ ID NO: 125492 - protein, 12 aa, Homo sapiens
  CDR3 for beta chain variable domain of TCR clone 62746 (TRBV7-8, TRBJ2-7)
CASSLGDREQYF

SEQ ID NO: 125493 - protein, 10 aa, Homo sapiens
  CDR3 for alpha chain variable domain of TCR clone 62747 (TRAV23/DV6, TRAJ57)
CAASSTLSQV

SEQ ID NO: 125494 - protein, 14 aa, Homo sapiens
  CDR3 for beta chain variable domain of TCR clone 62747 (TRBV25-1, TRBJ1-1)
CASTHLGGNTEAVF

SEQ ID NO: 125495 - protein, 13 aa, Homo sapiens
  CDR3 for alpha chain variable domain of TCR clone 62748 (TRAV1-1, TRAJ13)
CAVTSGGYQKVTF

SEQ ID NO: 125496 - protein, 12 aa, Homo sapiens
  CDR3 for beta chain variable domain of TCR clone 62748 (TRBV28, TRBJ2-1)
CASSVQINEQFF

SEQ ID NO: 125497 - protein, 15 aa, Homo sapiens
  CDR3 for alpha chain variable domain of TCR clone 62749 (TRAV17, TRAJ57)
CATGPSQGGSEKLVF

SEQ ID NO: 125498 - protein, 17 aa, Homo sapiens
  CDR3 for beta chain variable domain of TCR clone 62749 (TRBV28, TRBJ2-5)
CASSRQGGLAGAETQYF

SEQ ID NO: 125499 - protein, 16 aa, Homo sapiens
  CDR3 for alpha chain variable domain of TCR clone 62750 (TRAV8-3, TRAJ13)
CAVGAYPPGGYQKVTF

SEQ ID NO: 125500 - protein, 14 aa, Homo sapiens
  CDR3 for beta chain variable domain of TCR clone 62750 (TRBV18, TRBJ2-5)
CASSPRASSETQYF

SEQ ID NO: 125501 - protein, 13 aa, Homo sapiens
  CDR3 for alpha chain variable domain of TCR clone 62751 (TRAV3, TRAJ21)
CAVREPDFNKFYF

SEQ ID NO: 125502 - protein, 17 aa, Homo sapiens
  CDR3 for beta chain variable domain of TCR clone 62751 (TRBV7-8, TRBJ2-6)
CASSAGTGGAGANGLTF

SEQ ID NO: 125503 - protein, 13 aa, Homo sapiens
  CDR3 for alpha chain variable domain of TCR clone 62752 (TRAV8-3, TRAJ44)
CAVVPGTASKLTF

SEQ ID NO: 125504 - protein, 14 aa, Homo sapiens
  CDR3 for beta chain variable domain of TCR clone 62752 (TRBV19, TRBJ2-1)
CASPTFVLSGEQFF

SEQ ID NO: 125505 - protein, 11 aa, Homo sapiens
  CDR3 for alpha chain variable domain of TCR clone 62753 (TRAV2, TRAJ13)
CASGGYQKVTF

SEQ ID NO: 125506 - protein, 15 aa, Homo sapiens
  CDR3 for beta chain variable domain of TCR clone 62753 (TRBV7-9, TRBJ1-4)
CASSARTGGNEKLFF

SEQ ID NO: 125507 - protein, 13 aa, Homo sapiens
  CDR3 for alpha chain variable domain of TCR clone 62754 (TRAV27, TRAJ6)
CAGGTRGSYIPTF

SEQ ID NO: 125508 - protein, 14 aa, Homo sapiens
  CDR3 for beta chain variable domain of TCR clone 62754 (TRBV7-2, TRBJ2-7)
CASSPKTSFYEQYF

SEQ ID NO: 125509 - protein, 13 aa, Homo sapiens
  CDR3 for alpha chain variable domain of TCR clone 62755 (TRAV8-3, TRAJ43)
CAVGIYNNNYMRF

SEQ ID NO: 125510 - protein, 16 aa, Homo sapiens
  CDR3 for beta chain variable domain of TCR clone 62755 (TRBV7-2, TRBJ2-5)
CASSLVLWTKQETQYF

SEQ ID NO: 125511 - protein, 16 aa, Homo sapiens
  CDR3 for alpha chain variable domain of TCR clone 62756 (TRAV4, TRAJ18)
CCVLLIGGSTPGRLYF

SEQ ID NO: 125512 - protein, 12 aa, Homo sapiens
  CDR3 for beta chain variable domain of TCR clone 62756 (TRBV6-3, TRBJ2-7)
CASSLTPYEQYF

SEQ ID NO: 125513 - protein, 15 aa, Homo sapiens
  CDR3 for alpha chain variable domain of TCR clone 62757 (TRAV12-3, TRAJ49)
CAMAVTPNTGNQIYF

SEQ ID NO: 125514 - protein, 18 aa, Homo sapiens
  CDR3 for beta chain variable domain of TCR clone 62757 (TRBV4-1, TRBJ1-5)
CASSQDPRGQGLNQPQHF

SEQ ID NO: 125515 - protein, 11 aa, Homo sapiens
  CDR3 for alpha chain variable domain of TCR clone 62758 (TRAV17, TRAJ31)
CATSNNARLMF

SEQ ID NO: 125516 - protein, 16 aa, Homo sapiens
  CDR3 for beta chain variable domain of TCR clone 62758 (TRBV15, TRBJ2-1)
CHQQRLGLAGNNEQFF

SEQ ID NO: 125517 - protein, 13 aa, Homo sapiens
  CDR3 for alpha chain variable domain of TCR clone 62759 (TRAV21, TRAJ27)
CAARPGNAGKSTF

SEQ ID NO: 125518 - protein, 14 aa, Homo sapiens
  CDR3 for beta chain variable domain of TCR clone 62759 (TRBV11-2, TRBJ2-7)
CASSIGAGAYEQYF

SEQ ID NO: 125519 - protein, 11 aa, Homo sapiens
  CDR3 for alpha chain variable domain of TCR clone 62760 (TRAV21, TRAJ9)
CAVPGGFKTIF

SEQ ID NO: 125520 - protein, 17 aa, Homo sapiens
  CDR3 for beta chain variable domain of TCR clone 62760 (TRBV7-9, TRBJ2-5)
CATSGGARDPVPRARHA

SEQ ID NO: 125521 - protein, 14 aa, Homo sapiens
  CDR3 for alpha chain variable domain of TCR clone 62761 (TRAV16, TRAJ54)
CALSGVQGAQKLVF

SEQ ID NO: 125522 - protein, 10 aa, Homo sapiens
  CDR3 for beta chain variable domain of TCR clone 62761 (TRBV18, TRBJ2-2)
CASSTSGLHT

SEQ ID NO: 125523 - protein, 12 aa, Homo sapiens
  CDR3 for alpha chain variable domain of TCR clone 62762 (TRAV38-1, TRAJ47)
CAFETYGNRLVF

SEQ ID NO: 125524 - protein, 14 aa, Homo sapiens
  CDR3 for beta chain variable domain of TCR clone 62762 (TRBV12-5, TRBJ2-5)
CASGSRTHQETQYF

SEQ ID NO: 125525 - protein, 14 aa, Homo sapiens
  CDR3 for alpha chain variable domain of TCR clone 62763 (TRAV12-2, TRAJ13)
CAVKKTGGYQKVTF

SEQ ID NO: 125526 - protein, 13 aa, Homo sapiens
  CDR3 for beta chain variable domain of TCR clone 62763 (TRBV12-4, TRBJ2-2)
CASGITGSGELFF

SEQ ID NO: 125527 - protein, 11 aa, Homo sapiens
  CDR3 for alpha chain variable domain of TCR clone 62764 (TRAV17, TRAJ49)
CATDAGNQFYF

SEQ ID NO: 125528 - protein, 15 aa, Homo sapiens
  CDR3 for beta chain variable domain of TCR clone 62764 (TRBV11-2, TRBJ1-2)
CASSLEGVQRNGYTF

SEQ ID NO: 125529 - protein, 22 aa, Homo sapiens
  CDR3 for alpha chain variable domain of TCR clone 62765 (TRAV3, TRAJ38)
CAVRDCLNAGNNHIQNPDPAVY

SEQ ID NO: 125530 - protein, 13 aa, Homo sapiens
  CDR3 for beta chain variable domain of TCR clone 62765 (TRBV12-4, TRBJ1-2)
CASSLRQVKGYTF

SEQ ID NO: 125531 - protein, 13 aa, Homo sapiens
  CDR3 for alpha chain variable domain of TCR clone 62766 (TRAV35, TRAJ57)
CAGSQGGSEKLVF

SEQ ID NO: 125532 - protein, 14 aa, Homo sapiens
  CDR3 for beta chain variable domain of TCR clone 62766 (TRBV25-1, TRBJ1-1)
CASTHLGGNTEASF

SEQ ID NO: 125533 - protein, 16 aa, Homo sapiens
  CDR3 for alpha chain variable domain of TCR clone 62767 (TRAV26-1, TRAJ53)
CIVRVAMGGSNYKLTF

SEQ ID NO: 125534 - protein, 12 aa, Homo sapiens
  CDR3 for beta chain variable domain of TCR clone 62767 (TRBV7-9, TRBJ1-5)
CASSPQEQPQHF

SEQ ID NO: 125535 - protein, 11 aa, Homo sapiens
  CDR3 for alpha chain variable domain of TCR clone 62768 (TRAV21, TRAJ31)
CAVRNNARLTF

SEQ ID NO: 125536 - protein, 13 aa, Homo sapiens
  CDR3 for beta chain variable domain of TCR clone 62768 (TRBV11-2, TRBJ2-5)
CASSSTGEETQYF

SEQ ID NO: 125537 - protein, 14 aa, Homo sapiens
  CDR3 for alpha chain variable domain of TCR clone 62769 (TRAV3, TRAJ9)
YAVRLNTGGFKTIF

SEQ ID NO: 125538 - protein, 15 aa, Homo sapiens
  CDR3 for beta chain variable domain of TCR clone 62769 (TRBV7-2, TRBJ2-1)
CASSLASGRVNEQFF

SEQ ID NO: 125539 - protein, 13 aa, Homo sapiens
  CDR3 for alpha chain variable domain of TCR clone 62770 (TRAV13-2, TRAJ13)
CAERPGGYQKVTF

SEQ ID NO: 125540 - protein, 18 aa, Homo sapiens
  CDR3 for beta chain variable domain of TCR clone 62770 (TRBV7-6, TRBJ2-1)
CASSPRTSGMSSYNEQFL

SEQ ID NO: 125541 - protein, 14 aa, Homo sapiens
  CDR3 for alpha chain variable domain of TCR clone 62771 (TRAV26-1, TRAJ54)
CIVRRTQGAQKLVF

SEQ ID NO: 125542 - protein, 13 aa, Homo sapiens
  CDR3 for beta chain variable domain of TCR clone 62771 (TRBV15, TRBJ1-6)
CATSGGLNSPLHF

SEQ ID NO: 125543 - protein, 16 aa, Homo sapiens
  CDR3 for alpha chain variable domain of TCR clone 62772 (TRAV21, TRAJ52)
CAVSDAGGTSYGKLTF

SEQ ID NO: 125544 - protein, 13 aa, Homo sapiens
  CDR3 for beta chain variable domain of TCR clone 62772 (TRBV7-3, TRBJ2-5)
CASSVRGSQTQYF

SEQ ID NO: 125545 - protein, 14 aa, Homo sapiens
  CDR3 for alpha chain variable domain of TCR clone 62773 (TRAV17, TRAJ57)
CATDPQGGSEKLVF

SEQ ID NO: 125546 - protein, 18 aa, Homo sapiens
  CDR3 for beta chain variable domain of TCR clone 62773 (TRBV6-6, TRBJ1-3)
CASSYSRWDSISGNTIYF

SEQ ID NO: 125547 - protein, 16 aa, Homo sapiens
  CDR3 for alpha chain variable domain of TCR clone 62774 (TRAV4, TRAJ22)
CLVGDLYSGSARQLTF

SEQ ID NO: 125548 - protein, 13 aa, Homo sapiens
  CDR3 for beta chain variable domain of TCR clone 62774 (TRBV4-1, TRBJ1-1)
CASSRKMNTEAFF

SEQ ID NO: 125549 - protein, 12 aa, Homo sapiens
  CDR3 for alpha chain variable domain of TCR clone 62775 (TRAV13-1, TRAJ15)
CAASQAGTALIF

SEQ ID NO: 125550 - protein, 15 aa, Homo sapiens
  CDR3 for beta chain variable domain of TCR clone 62775 (TRBV19, TRBJ2-1)
CASSGGGTLYNEQFF

SEQ ID NO: 125551 - protein, 16 aa, Homo sapiens
  CDR3 for alpha chain variable domain of TCR clone 62776 (TRAV12-3, TRAJ53)
CAMSPGSGGSNYKLTF

SEQ ID NO: 125552 - protein, 16 aa, Homo sapiens
  CDR3 for beta chain variable domain of TCR clone 62776 (TRBV4-2, TRBJ1-1)
CASSQAGFGMNTEDFF

SEQ ID NO: 125553 - protein, 12 aa, Homo sapiens
  CDR3 for alpha chain variable domain of TCR clone 62777 (TRAV12-1, TRAJ23)
CVVNNQGGKLIF

SEQ ID NO: 125554 - protein, 16 aa, Homo sapiens
  CDR3 for beta chain variable domain of TCR clone 62777 (TRBV11-1, TRBJ2-7)
CASNAQTGTLSYEQYF

SEQ ID NO: 125555 - protein, 13 aa, Homo sapiens
  CDR3 for alpha chain variable domain of TCR clone 62778 (TRAV2, TRAJ40)
CAVVTSGTYKYIF

SEQ ID NO: 125556 - protein, 15 aa, Homo sapiens
  CDR3 for beta chain variable domain of TCR clone 62778 (TRBV7-2, TRBJ2-1)
CASSLVLAGGNEQFF

SEQ ID NO: 125557 - protein, 13 aa, Homo sapiens
  CDR3 for alpha chain variable domain of TCR clone 62779 (TRAV12-2, TRAJ20)
CAVYPSNDYKLSS

SEQ ID NO: 125558 - protein, 15 aa, Homo sapiens
  CDR3 for beta chain variable domain of TCR clone 62779 (TRBV27, TRBJ2-5)
CASSLYPRGGETQYF

SEQ ID NO: 125559 - protein, 12 aa, Homo sapiens
  CDR3 for alpha chain variable domain of TCR clone 62780 (TRAV20, TRAJ20)
CAVRFNDYKLSF

SEQ ID NO: 125560 - protein, 14 aa, Homo sapiens
  CDR3 for beta chain variable domain of TCR clone 62780 (TRBV20-1, TRBJ2-1)
CSAQIGGAANEQFF

SEQ ID NO: 125561 - protein, 14 aa, Homo sapiens
  CDR3 for alpha chain variable domain of TCR clone 62781 (TRAV16, TRAJ44)
FALSTTGTASKLTF

SEQ ID NO: 125562 - protein, 14 aa, Homo sapiens
  CDR3 for beta chain variable domain of TCR clone 62781 (TRBV20-1, TRBJ2-7)
CSAISREASYEQYF

SEQ ID NO: 125563 - protein, 13 aa, Homo sapiens
  CDR3 for alpha chain variable domain of TCR clone 62782 (TRAV3, TRAJ29)
CAVRDIIDTPLVF

SEQ ID NO: 125564 - protein, 14 aa, Homo sapiens
  CDR3 for beta chain variable domain of TCR clone 62782 (TRBV27, TRBJ2-1)
CASSAAGGYNEQFF

SEQ ID NO: 125565 - protein, 17 aa, Homo sapiens
  CDR3 for alpha chain variable domain of TCR clone 62783 (TRAV3, TRAJ42)
CAVRDREYGGSQGNLIF

SEQ ID NO: 125566 - protein, 17 aa, Homo sapiens
  CDR3 for beta chain variable domain of TCR clone 62783 (TRBV7-9, TRBJ2-3)
CASSPTVAGDLTDTQYF

SEQ ID NO: 125567 - protein, 15 aa, Homo sapiens
  CDR3 for alpha chain variable domain of TCR clone 62784 (TRAV21, TRAJ53)
CATLNSGGSNYKLTF

SEQ ID NO: 125568 - protein, 13 aa, Homo sapiens
  CDR3 for beta chain variable domain of TCR clone 62784 (TRBV12-5, TRBJ2-1)
CASGLGRGNEQSF

SEQ ID NO: 125569 - protein, 14 aa, Homo sapiens
  CDR3 for alpha chain variable domain of TCR clone 62785 (TRAV12-3, TRAJ33)
CAMSVPGSNYQLIW

SEQ ID NO: 125570 - protein, 12 aa, Homo sapiens
  CDR3 for beta chain variable domain of TCR clone 62785 (TRBV7-8, TRBJ2-7)
CASSLGDREQFF

SEQ ID NO: 125571 - protein, 15 aa, Homo sapiens
  CDR3 for alpha chain variable domain of TCR clone 62786 (TRAV12-1, TRAJ44)
CVVFVNTGTASKLTF

SEQ ID NO: 125572 - protein, 12 aa, Homo sapiens
  CDR3 for beta chain variable domain of TCR clone 62786 (TRBV7-9, TRBJ2-7)
CASSLEGYEQYF

SEQ ID NO: 125573 - protein, 14 aa, Homo sapiens
  CDR3 for alpha chain variable domain of TCR clone 62787 (TRAV1-2, TRAJ6)
CAVSLSGVSYIPTF

SEQ ID NO: 125574 - protein, 15 aa, Homo sapiens
  CDR3 for beta chain variable domain of TCR clone 62787 (TRBV28, TRBJ2-7)
CASSPGGRGFYEQYF

SEQ ID NO: 125575 - protein, 15 aa, Homo sapiens
  CDR3 for alpha chain variable domain of TCR clone 62788 (TRAV2, TRAJ9)
CAVEDRGTGDFKTIF

SEQ ID NO: 125576 - protein, 16 aa, Homo sapiens
  CDR3 for beta chain variable domain of TCR clone 62788 (TRBV24-1, TRBJ2-3)
CATSDPGTGATDTQYF

SEQ ID NO: 125577 - protein, 15 aa, Homo sapiens
  CDR3 for alpha chain variable domain of TCR clone 62789 (TRAV17, TRAJ10)
CATVLLTGGGNKLTF

SEQ ID NO: 125578 - protein, 16 aa, Homo sapiens
  CDR3 for beta chain variable domain of TCR clone 62789 (TRBV7-9, TRBJ2-3)
CASSAWREVGTDTQYF

SEQ ID NO: 125579 - protein, 15 aa, Homo sapiens
  CDR3 for alpha chain variable domain of TCR clone 62790 (TRAV8-3, TRAJ11)
CAEGLLNSGYSTLTF

SEQ ID NO: 125580 - protein, 16 aa, Homo sapiens
  CDR3 for beta chain variable domain of TCR clone 62790 (TRBV7-9, TRBJ1-2)
CASSLGFSSGEDGYTF

SEQ ID NO: 125581 - protein, 18 aa, Homo sapiens
  CDR3 for alpha chain variable domain of TCR clone 62791 (TRAV26-2, TRAJ45)
CILRVDKYSGGGADGLTF

SEQ ID NO: 125582 - protein, 12 aa, Homo sapiens
  CDR3 for beta chain variable domain of TCR clone 62791 (TRBV29-1, TRBJ2-3)
CSVTGEADTQYF

SEQ ID NO: 125583 - protein, 18 aa, Homo sapiens
  CDR3 for alpha chain variable domain of TCR clone 62792 (TRAV13-1, TRAJ52)
CAAKNPNAGGTSYGKLTF

SEQ ID NO: 125584 - protein, 18 aa, Homo sapiens
  CDR3 for beta chain variable domain of TCR clone 62792 (TRBV18, TRBJ2-3)
CASSYTSGAAGGTDTQYF

SEQ ID NO: 125585 - protein, 18 aa, Homo sapiens
  CDR3 for alpha chain variable domain of TCR clone 62793 (TRAV12-3, TRAJ52)
CAMSVGGAGGTSYGKLTF

SEQ ID NO: 125586 - protein, 18 aa, Homo sapiens
  CDR3 for beta chain variable domain of TCR clone 62793 (TRBV15, TRBJ2-3)
CATSRDGARSWDTDTQYF

SEQ ID NO: 125587 - protein, 14 aa, Homo sapiens
  CDR3 for alpha chain variable domain of TCR clone 62794 (TRAV12-3, TRAJ58)
CAMSTETSGSRLTF

SEQ ID NO: 125588 - protein, 15 aa, Homo sapiens
  CDR3 for beta chain variable domain of TCR clone 62794 (TRBV4-1, TRBJ1-4)
CASRDTGGTNEKLFF

SEQ ID NO: 125589 - protein, 16 aa, Homo sapiens
  CDR3 for alpha chain variable domain of TCR clone 62795 (TRAV3, TRAJ37)
CALRVRGSGNTGKLIF

SEQ ID NO: 125590 - protein, 11 aa, Homo sapiens
  CDR3 for beta chain variable domain of TCR clone 62795 (TRBV11-2, TRBJ2-2)
CASSLPGELFF

SEQ ID NO: 125591 - protein, 16 aa, Homo sapiens
  CDR3 for alpha chain variable domain of TCR clone 62796 (TRAV26-1, TRAJ37)
CIVRGDGSGNTGKLIF

SEQ ID NO: 125592 - protein, 17 aa, Homo sapiens
  CDR3 for beta chain variable domain of TCR clone 62796 (TRBV4-1, TRBJ2-7)
CASNRDPLGVRGGEQYF

SEQ ID NO: 125593 - protein, 14 aa, Homo sapiens
  CDR3 for alpha chain variable domain of TCR clone 62797 (TRAV12-3, TRAJ9)
CAMSPNTGGFRTIF

SEQ ID NO: 125594 - protein, 12 aa, Homo sapiens
  CDR3 for beta chain variable domain of TCR clone 62797 (TRBV19, TRBJ1-5)
CASSIAQQPQHF

SEQ ID NO: 125595 - protein, 14 aa, Homo sapiens
  CDR3 for alpha chain variable domain of TCR clone 62798 (TRAV13-1, TRAJ20)
CAARPGSNDYKLSF

SEQ ID NO: 125596 - protein, 13 aa, Homo sapiens
  CDR3 for beta chain variable domain of TCR clone 62798 (TRBV20-1, TRBJ1-1)
CSAPPVGHTEAFF

SEQ ID NO: 125597 - protein, 11 aa, Homo sapiens
  CDR3 for alpha chain variable domain of TCR clone 62799 (TRAV3, TRAJ21)
CAVSNFNKFYF

SEQ ID NO: 125598 - protein, 15 aa, Homo sapiens
  CDR3 for beta chain variable domain of TCR clone 62799 (TRBV29-1, TRBJ2-1)
CSVEGGPASYNEQFF

SEQ ID NO: 125599 - protein, 14 aa, Homo sapiens
  CDR3 for alpha chain variable domain of TCR clone 62800 (TRAV13-2, TRAJ43)
CAEIPTYNNNNMRF

SEQ ID NO: 125600 - protein, 15 aa, Homo sapiens
  CDR3 for beta chain variable domain of TCR clone 62800 (TRBV7-9, TRBJ2-2)
CASGPLDTFPGELFF

SEQ ID NO: 125601 - protein, 14 aa, Homo sapiens
  CDR3 for alpha chain variable domain of TCR clone 62801 (TRAV13-1, TRAJ26)
CAASSAHYGQNFVF

SEQ ID NO: 125602 - protein, 17 aa, Homo sapiens
  CDR3 for beta chain variable domain of TCR clone 62801 (TRBV25-1, TRBJ2-5)
CASSRRGGRGGQGTQYF

SEQ ID NO: 125603 - protein, 10 aa, Homo sapiens
  CDR3 for alpha chain variable domain of TCR clone 62802 (TRAV1-2, TRAJ20)
CALNDYKLIF

SEQ ID NO: 125604 - protein, 16 aa, Homo sapiens
  CDR3 for beta chain variable domain of TCR clone 62802 (TRBV20-1, TRBJ1-1)
CSARALTQGMNTEAFF

SEQ ID NO: 125605 - protein, 14 aa, Homo sapiens
  CDR3 for alpha chain variable domain of TCR clone 62803 (TRAV1-2, TRAJ8)
CAVREDTGFQKLVF

SEQ ID NO: 125606 - protein, 16 aa, Homo sapiens
  CDR3 for beta chain variable domain of TCR clone 62803 (TRBV2, TRBJ2-4)
CASSEAPGGEQNIQYF

SEQ ID NO: 125607 - protein, 13 aa, Homo sapiens
  CDR3 for alpha chain variable domain of TCR clone 62804 (TRAV17, TRAJ33)
CATDADSNYQLIW

SEQ ID NO: 125608 - protein, 17 aa, Homo sapiens
  CDR3 for beta chain variable domain of TCR clone 62804 (TRBV20-1, TRBJ2-3)
CSAVSPGLAGGRDTQYF

SEQ ID NO: 125609 - protein, 15 aa, Homo sapiens
  CDR3 for alpha chain variable domain of TCR clone 62805 (TRAV34, TRAJ36)
CGAPSRLGGANNLFF

SEQ ID NO: 125610 - protein, 16 aa, Homo sapiens
  CDR3 for beta chain variable domain of TCR clone 62805 (TRBV4-3, TRBJ2-1)
CASSCRRLGSWDEQFF

SEQ ID NO: 125611 - protein, 15 aa, Homo sapiens
  CDR3 for alpha chain variable domain of TCR clone 62806 (TRAV35, TRAJ40)
CAGQLGTSGTYKYIF

SEQ ID NO: 125612 - protein, 11 aa, Homo sapiens
  CDR3 for beta chain variable domain of TCR clone 62806 (TRBV23-1, TRBJ2-7)
SSSGTGREQYF

SEQ ID NO: 125613 - protein, 12 aa, Homo sapiens
  CDR3 for alpha chain variable domain of TCR clone 62807 (TRAV8-4, TRAJ43)
CAVSVNNNEMRF

SEQ ID NO: 125614 - protein, 14 aa, Homo sapiens
  CDR3 for beta chain variable domain of TCR clone 62807 (TRBV11-2, TRBJ1-2)
CASSLGTANYGYTF

SEQ ID NO: 125615 - protein, 13 aa, Homo sapiens
  CDR3 for alpha chain variable domain of TCR clone 62808 (TRAV2, TRAJ40)
GAVVTSGTYKYIF

SEQ ID NO: 125616 - protein, 15 aa, Homo sapiens
  CDR3 for beta chain variable domain of TCR clone 62808 (TRBV18, TRBJ2-1)
CASSPPSASYNEQFF

SEQ ID NO: 125617 - protein, 15 aa, Homo sapiens
  CDR3 for alpha chain variable domain of TCR clone 62809 (TRAV3, TRAJ15)
CAVRDGPRAGTALIF

SEQ ID NO: 125618 - protein, 14 aa, Homo sapiens
  CDR3 for beta chain variable domain of TCR clone 62809 (TRBV7-9, TRBJ1-2)
CASSRQGANYGYTF

SEQ ID NO: 125619 - protein, 12 aa, Homo sapiens
  CDR3 for alpha chain variable domain of TCR clone 62810 (TRAV12-3, TRAJ47)
CNEKEYGNKLVF

SEQ ID NO: 125620 - protein, 17 aa, Homo sapiens
  CDR3 for beta chain variable domain of TCR clone 62810 (TRBV11-2, TRBJ2-1)
CASSLYPPGVEYNEQFF

SEQ ID NO: 125621 - protein, 14 aa, Homo sapiens
  CDR3 for alpha chain variable domain of TCR clone 62811 (TRAV29/DV5, TRAJ36)
CAARRKTGANNLFF

SEQ ID NO: 125622 - protein, 17 aa, Homo sapiens
  CDR3 for beta chain variable domain of TCR clone 62811 (TRBV20-1, TRBJ2-1)
CSASSSGLAGSYNEQFF

SEQ ID NO: 125623 - protein, 14 aa, Homo sapiens
  CDR3 for alpha chain variable domain of TCR clone 62812 (TRAV12-2, TRAJ40)
CAVKIPSGTYKYIF

SEQ ID NO: 125624 - protein, 19 aa, Homo sapiens
  CDR3 for beta chain variable domain of TCR clone 62812 (TRBV19, TRBJ2-5)
CASSIGQVTDFFLGETQYF

SEQ ID NO: 125625 - protein, 14 aa, Homo sapiens
  CDR3 for alpha chain variable domain of TCR clone 62813 (TRAV17, TRAJ23)
CATALGGQGGKLIF

SEQ ID NO: 125626 - protein, 14 aa, Homo sapiens
  CDR3 for beta chain variable domain of TCR clone 62813 (TRBV7-8, TRBJ2-3)
CASSLEAGTDTQYF

SEQ ID NO: 125627 - protein, 13 aa, Homo sapiens
  CDR3 for alpha chain variable domain of TCR clone 62814 (TRAV35, TRAJ37)
CAGCSSNTGKLIF

SEQ ID NO: 125628 - protein, 11 aa, Homo sapiens
  CDR3 for beta chain variable domain of TCR clone 62814 (TRBV12-4, TRBJ2-3)
CASTATDTQYF

SEQ ID NO: 125629 - protein, 16 aa, Homo sapiens
  CDR3 for alpha chain variable domain of TCR clone 62815 (TRAV30, TRAJ24)
CGTEIVDADSWGKFQF

SEQ ID NO: 125630 - protein, 14 aa, Homo sapiens
  CDR3 for beta chain variable domain of TCR clone 62815 (TRBV5-4, TRBJ1-3)
CASSPQSAGNTIYF

SEQ ID NO: 125631 - protein, 13 aa, Homo sapiens
  CDR3 for alpha chain variable domain of TCR clone 62816 (TRAV2, TRAJ40)
CAVVTPGTYKYIF

SEQ ID NO: 125632 - protein, 14 aa, Homo sapiens
  CDR3 for beta chain variable domain of TCR clone 62816 (TRBV19, TRBJ2-1)
CASPTFVLSGERFF

SEQ ID NO: 125633 - protein, 15 aa, Homo sapiens
  CDR3 for alpha chain variable domain of TCR clone 62817 (TRAV12-1, TRAJ42)
CVVTRDGGSQGNLIF

SEQ ID NO: 125634 - protein, 14 aa, Homo sapiens
  CDR3 for beta chain variable domain of TCR clone 62817 (TRBV11-2, TRBJ2-3)
CASSLGGGANKQYF

SEQ ID NO: 125635 - protein, 12 aa, Homo sapiens
  CDR3 for alpha chain variable domain of TCR clone 62818 (TRAV13-2, TRAJ23)
CAERHRGGKLIF

SEQ ID NO: 125636 - protein, 14 aa, Homo sapiens
  CDR3 for beta chain variable domain of TCR clone 62818 (TRBV7-2, TRBJ2-2)
CASRGQGAAGELFF

SEQ ID NO: 125637 - protein, 12 aa, Homo sapiens
  CDR3 for alpha chain variable domain of TCR clone 62819 (TRAV16, TRAJ10)
CSRTGGGNKLTF

SEQ ID NO: 125638 - protein, 16 aa, Homo sapiens
  CDR3 for beta chain variable domain of TCR clone 62819 (TRBV11-2, TRBJ2-7)
CASSLAPTGVNYEQYF

SEQ ID NO: 125639 - protein, 16 aa, Homo sapiens
  CDR3 for alpha chain variable domain of TCR clone 62820 (TRAV26-1, TRAJ32)
CIVRTNYGCATNKLIF

SEQ ID NO: 125640 - protein, 14 aa, Homo sapiens
  CDR3 for beta chain variable domain of TCR clone 62820 (TRBV27, TRBJ1-1)
CASSLLSGLSEAFF

SEQ ID NO: 125641 - protein, 11 aa, Homo sapiens
  CDR3 for alpha chain variable domain of TCR clone 62821 (TRAV39, TRAJ49)
CAVDISTQFYF

SEQ ID NO: 125642 - protein, 11 aa, Homo sapiens
  CDR3 for beta chain variable domain of TCR clone 62821 (TRBV7-8, TRBJ2-7)
CASSPSLEQYF

SEQ ID NO: 125643 - protein, 10 aa, Homo sapiens
  CDR3 for alpha chain variable domain of TCR clone 62822 (TRAV23/DV6, TRAJ3)
CAATTFALGG

SEQ ID NO: 125644 - protein, 14 aa, Homo sapiens
  CDR3 for beta chain variable domain of TCR clone 62822 (TRBV27, TRBJ2-5)
CASSSLKGWETQYF

SEQ ID NO: 125645 - protein, 17 aa, Homo sapiens
  CDR3 for alpha chain variable domain of TCR clone 62823 (TRAV3, TRAJ6)
CAVRDGPRAGGSYIPTF

SEQ ID NO: 125646 - protein, 16 aa, Homo sapiens
  CDR3 for beta chain variable domain of TCR clone 62823 (TRBV7-8, TRBJ2-4)
CASSAERTLAKNIQCF

SEQ ID NO: 125647 - protein, 17 aa, Homo sapiens
  CDR3 for alpha chain variable domain of TCR clone 62824 (TRAV4, )
CLVDIQNPDPAMYQLRD

SEQ ID NO: 125648 - protein, 15 aa, Homo sapiens
  CDR3 for beta chain variable domain of TCR clone 62824 (TRBV20-1, TRBJ1-5)
CSARVGRVVSQPQHF

SEQ ID NO: 125649 - protein, 11 aa, Homo sapiens
  CDR3 for alpha chain variable domain of TCR clone 62825 (TRAV12-1, TRAJ21)
CVVNNFNKFYF

SEQ ID NO: 125650 - protein, 14 aa, Homo sapiens
  CDR3 for beta chain variable domain of TCR clone 62825 (TRBV19, TRBJ2-1)
CASPTFVLSGEQFF

SEQ ID NO: 125651 - protein, 14 aa, Homo sapiens
  CDR3 for alpha chain variable domain of TCR clone 62826 (TRAV12-2, TRAJ39)
SATYLCDVNNMLTF

SEQ ID NO: 125652 - protein, 16 aa, Homo sapiens
  CDR3 for beta chain variable domain of TCR clone 62826 (TRBV5-3, TRBJ2-2)
CARSFGTGTNTGELFF

SEQ ID NO: 125653 - protein, 17 aa, Homo sapiens
  CDR3 for alpha chain variable domain of TCR clone 62827 (TRAV2, TRAJ22)
ILQVREADAAEQRQLPF

SEQ ID NO: 125654 - protein, 16 aa, Homo sapiens
  CDR3 for beta chain variable domain of TCR clone 62827 (TRBV2, TRBJ2-5)
CASSETQGVGEETQYF

SEQ ID NO: 125655 - protein, 14 aa, Homo sapiens
  CDR3 for alpha chain variable domain of TCR clone 62828 (TRAV12-2, TRAJ13)
CAVKKTGGYQKVTF

SEQ ID NO: 125656 - protein, 15 aa, Homo sapiens
  CDR3 for beta chain variable domain of TCR clone 62828 (TRBV9, TRBJ1-6)
CASSVAVTGDSPLHF

SEQ ID NO: 125657 - protein, 12 aa, Homo sapiens
  CDR3 for alpha chain variable domain of TCR clone 62829 (TRAV1-1, TRAJ8)
CAGGTGFQKLVF

SEQ ID NO: 125658 - protein, 13 aa, Homo sapiens
  CDR3 for beta chain variable domain of TCR clone 62829 (TRBV27, TRBJ1-1)
CASSLSIGAEAFF

SEQ ID NO: 125659 - protein, 15 aa, Homo sapiens
  CDR3 for alpha chain variable domain of TCR clone 62830 (TRAV26-1, TRAJ29)
CIVRVEGSGNTPLVF

SEQ ID NO: 125660 - protein, 14 aa, Homo sapiens
  CDR3 for beta chain variable domain of TCR clone 62830 (TRBV25-1, TRBJ1-1)
CASTRLGGNTEAFF

SEQ ID NO: 125661 - protein, 12 aa, Homo sapiens
  CDR3 for alpha chain variable domain of TCR clone 62831 (TRAV12-3, TRAJ17)
CAVTPTGNKLTF

SEQ ID NO: 125662 - protein, 15 aa, Homo sapiens
  CDR3 for beta chain variable domain of TCR clone 62831 (TRBV20-1, TRBJ2-7)
CSARDRVSGMDEQYF

SEQ ID NO: 125663 - protein, 12 aa, Homo sapiens
  CDR3 for alpha chain variable domain of TCR clone 62832 (TRAV6, TRAJ9)
CALNTGGFKTIF

SEQ ID NO: 125664 - protein, 16 aa, Homo sapiens
  CDR3 for beta chain variable domain of TCR clone 62832 (TRBV9, TRBJ2-2)
CASSAMGKGNTGELFF

SEQ ID NO: 125665 - protein, 14 aa, Homo sapiens
  CDR3 for alpha chain variable domain of TCR clone 62833 (TRAV26-1, TRAJ38)
CIADNAGNNRKLIW

SEQ ID NO: 125666 - protein, 14 aa, Homo sapiens
  CDR3 for beta chain variable domain of TCR clone 62833 (TRBV4-1, TRBJ2-2)
CTSSQAVNTGELFF

SEQ ID NO: 125667 - protein, 11 aa, Homo sapiens
  CDR3 for alpha chain variable domain of TCR clone 62834 (TRAV35, TRAJ30)
CAGPGDDKIIF

SEQ ID NO: 125668 - protein, 14 aa, Homo sapiens
  CDR3 for beta chain variable domain of TCR clone 62834 (TRBV7-6, TRBJ1-6)
CASSQAGGGSPLHC

SEQ ID NO: 125669 - protein, 17 aa, Homo sapiens
  CDR3 for alpha chain variable domain of TCR clone 62835 (TRAV8-6, TRAJ58)
CAVSSWVGETSGSRLTF

SEQ ID NO: 125670 - protein, 16 aa, Homo sapiens
  CDR3 for beta chain variable domain of TCR clone 62835 (TRBV12-5, TRBJ2-5)
CASGPRTSGNQETQYF

SEQ ID NO: 125671 - protein, 13 aa, Homo sapiens
  CDR3 for alpha chain variable domain of TCR clone 62836 (TRAV8-1, TRAJ30)
CAVIMNRDDKIIF

SEQ ID NO: 125672 - protein, 17 aa, Homo sapiens
  CDR3 for beta chain variable domain of TCR clone 62836 (TRBV14, TRBJ2-1)
CASSQDRRDSIYNEQFF

SEQ ID NO: 125673 - protein, 15 aa, Homo sapiens
  CDR3 for alpha chain variable domain of TCR clone 62837 (TRAV20, TRAJ52)
CAVQAGGTSYGKLTF

SEQ ID NO: 125674 - protein, 12 aa, Homo sapiens
  CDR3 for beta chain variable domain of TCR clone 62837 (TRBV11-2, TRBJ2-2)
CASSLGGGELFF

SEQ ID NO: 125675 - protein, 13 aa, Homo sapiens
  CDR3 for alpha chain variable domain of TCR clone 62838 (TRAV27, TRAJ49)
CAPRPYTGNQFYF

SEQ ID NO: 125676 - protein, 16 aa, Homo sapiens
  CDR3 for beta chain variable domain of TCR clone 62838 (TRBV4-1, TRBJ1-2)
CASSQDAGQVLYGYTS

SEQ ID NO: 125677 - protein, 14 aa, Homo sapiens
  CDR3 for alpha chain variable domain of TCR clone 62839 (TRAV1-2, TRAJ16)
CAVNRFSDVQKLLF

SEQ ID NO: 125678 - protein, 16 aa, Homo sapiens
  CDR3 for beta chain variable domain of TCR clone 62839 (TRBV12-4, TRBJ1-5)
CASSRPVGGSNQPQHF

SEQ ID NO: 125679 - protein, 18 aa, Homo sapiens
  CDR3 for alpha chain variable domain of TCR clone 62840 (TRAV21, TRAJ52)
CAVRPSPAGGTSYGKLTF

SEQ ID NO: 125680 - protein, 17 aa, Homo sapiens
  CDR3 for beta chain variable domain of TCR clone 62840 (TRBV25-1, TRBJ2-1)
CASSAYGRGRGVYEQFF

SEQ ID NO: 125681 - protein, 14 aa, Homo sapiens
  CDR3 for alpha chain variable domain of TCR clone 62841 (TRAV13-1, TRAJ13)
CAASRVGGYQKVTF

SEQ ID NO: 125682 - protein, 17 aa, Homo sapiens
  CDR3 for beta chain variable domain of TCR clone 62841 (TRBV15, TRBJ1-5)
CTTSRAPPGTRNQPQHF

SEQ ID NO: 125683 - protein, 12 aa, Homo sapiens
  CDR3 for alpha chain variable domain of TCR clone 62842 (TRAV27, TRAJ52)
WAGGTSYGKLTF

SEQ ID NO: 125684 - protein, 12 aa, Homo sapiens
  CDR3 for beta chain variable domain of TCR clone 62842 (TRBV12-4, TRBJ2-7)
CASSLGGYEQYF

SEQ ID NO: 125685 - protein, 10 aa, Homo sapiens
  CDR3 for alpha chain variable domain of TCR clone 62843 (TRAV16, TRAJ22)
SAVYLRQLTF

SEQ ID NO: 125686 - protein, 15 aa, Homo sapiens
  CDR3 for beta chain variable domain of TCR clone 62843 (TRBV7-9, TRBJ1-6)
CASSSPGRGNSPLHF

SEQ ID NO: 125687 - protein, 14 aa, Homo sapiens
  CDR3 for alpha chain variable domain of TCR clone 62844 (TRAV1-2, TRAJ8)
CAVREDTGFQKLVF

SEQ ID NO: 125688 - protein, 16 aa, Homo sapiens
  CDR3 for beta chain variable domain of TCR clone 62844 (TRBV19, TRBJ2-1)
CASSKAGLGSYNEQFF

SEQ ID NO: 125689 - protein, 12 aa, Homo sapiens
  CDR3 for alpha chain variable domain of TCR clone 62845 (TRAV12-3, TRAJ20)
CAMVRGDYKLSF

SEQ ID NO: 125690 - protein, 14 aa, Homo sapiens
  CDR3 for beta chain variable domain of TCR clone 62845 (TRBV7-2, TRBJ2-7)
CASRSQGAAYEQYF

SEQ ID NO: 125691 - protein, 15 aa, Homo sapiens
  CDR3 for alpha chain variable domain of TCR clone 62846 (TRAV2, TRAJ24)
CAVVRLQNSWGKLQF

SEQ ID NO: 125692 - protein, 16 aa, Homo sapiens
  CDR3 for beta chain variable domain of TCR clone 62846 (TRBV7-7, TRBJ2-3)
CASSPGTSGSTDTQYF

SEQ ID NO: 125693 - protein, 20 aa, Homo sapiens
  CDR3 for alpha chain variable domain of TCR clone 62847 (TRAV12-1, TRAJ42)
SSVTQPPTSVKGGSQGNLIF

SEQ ID NO: 125694 - protein, 15 aa, Homo sapiens
  CDR3 for beta chain variable domain of TCR clone 62847 (TRBV4-1, TRBJ2-7)
CASSQNTGRLYEQYF

SEQ ID NO: 125695 - protein, 14 aa, Homo sapiens
  CDR3 for alpha chain variable domain of TCR clone 62848 (TRAV35, TRAJ50)
CAGHWKTSYDKVIF

SEQ ID NO: 125696 - protein, 13 aa, Homo sapiens
  CDR3 for beta chain variable domain of TCR clone 62848 (TRBV7-7, TRBJ2-3)
CASSLSRADTQYF

SEQ ID NO: 125697 - protein, 14 aa, Homo sapiens
  CDR3 for alpha chain variable domain of TCR clone 62849 (TRAV1-2, TRAJ16)
CAVNRFSDGQKLLF

SEQ ID NO: 125698 - protein, 15 aa, Homo sapiens
  CDR3 for beta chain variable domain of TCR clone 62849 (TRBV7-9, TRBJ2-1)
CASSLGWGRANEQFF

SEQ ID NO: 125699 - protein, 14 aa, Homo sapiens
  CDR3 for alpha chain variable domain of TCR clone 62850 (TRAV8-4, TRAJ5)
CAVSTDTGRRALTF

SEQ ID NO: 125700 - protein, 15 aa, Homo sapiens
  CDR3 for beta chain variable domain of TCR clone 62850 (TRBV18, TRBJ1-1)
CASSPSSWVNTEAFF

SEQ ID NO: 125701 - protein, 15 aa, Homo sapiens
  CDR3 for alpha chain variable domain of TCR clone 62851 (TRAV3, TRAJ5)
CAVRDLDTGRRALTF

SEQ ID NO: 125702 - protein, 13 aa, Homo sapiens
  CDR3 for beta chain variable domain of TCR clone 62851 (TRBV19, TRBJ2-3)
CASASGSTDTQYF

SEQ ID NO: 125703 - protein, 19 aa, Homo sapiens
  CDR3 for alpha chain variable domain of TCR clone 62852 (TRAV26-1, TRAJ52)
CIVRAHRTAGGTSYGKLTF

SEQ ID NO: 125704 - protein, 15 aa, Homo sapiens
  CDR3 for beta chain variable domain of TCR clone 62852 (TRBV29-1, TRBJ2-1)
CSGRDRKSSYNEQFF

SEQ ID NO: 125705 - protein, 11 aa, Homo sapiens
  CDR3 for alpha chain variable domain of TCR clone 62853 (TRAV12-3, TRAJ27)
CAMANAGKSTF

SEQ ID NO: 125706 - protein, 13 aa, Homo sapiens
  CDR3 for beta chain variable domain of TCR clone 62853 (TRBV20-1, TRBJ1-1)
CSARVGGNTEACF

SEQ ID NO: 125707 - protein, 14 aa, Homo sapiens
  CDR3 for alpha chain variable domain of TCR clone 62854 (TRAV9-2, TRAJ39)
CALYIYNAGNMLTF

SEQ ID NO: 125708 - protein, 14 aa, Homo sapiens
  CDR3 for beta chain variable domain of TCR clone 62854 (TRBV24-1, TRBJ1-1)
CATSIPRGDTEAFF

SEQ ID NO: 125709 - protein, 13 aa, Homo sapiens
  CDR3 for alpha chain variable domain of TCR clone 62855 (TRAV26-1, TRAJ40)
CIVRVEGTYKYIF

SEQ ID NO: 125710 - protein, 15 aa, Homo sapiens
  CDR3 for beta chain variable domain of TCR clone 62855 (TRBV12-4, TRBJ1-2)
CASSLAHRDGQAYSF

SEQ ID NO: 125711 - protein, 15 aa, Homo sapiens
  CDR3 for alpha chain variable domain of TCR clone 62856 (TRAV3, TRAJ3)
CAVRDGHSSASKIIF

SEQ ID NO: 125712 - protein, 14 aa, Homo sapiens
  CDR3 for beta chain variable domain of TCR clone 62856 (TRBV28, TRBJ1-4)
CASSFGTSDEKLFF

SEQ ID NO: 125713 - protein, 14 aa, Homo sapiens
  CDR3 for alpha chain variable domain of TCR clone 62857 (TRAV38-1, TRAJ45)
CASHSGGGADGLTF

SEQ ID NO: 125714 - protein, 15 aa, Homo sapiens
  CDR3 for beta chain variable domain of TCR clone 62857 (TRBV27, TRBJ2-2)
CQQFSGTSSHRGAVF

SEQ ID NO: 125715 - protein, 15 aa, Homo sapiens
  CDR3 for alpha chain variable domain of TCR clone 62858 (TRAV29/DV5, TRAJ29)
CAASERSSGNTPLVF

SEQ ID NO: 125716 - protein, 14 aa, Homo sapiens
  CDR3 for beta chain variable domain of TCR clone 62858 (TRBV7-2, TRBJ2-2)
CASRGQGAAGELFF

SEQ ID NO: 125717 - protein, 20 aa, Homo sapiens
  CDR3 for alpha chain variable domain of TCR clone 62859 (TRAV26-1, TRAJ42)
CCVLLHRQTYYGGSQGNLIF

SEQ ID NO: 125718 - protein, 16 aa, Homo sapiens
  CDR3 for beta chain variable domain of TCR clone 62859 (TRBV7-3, TRBJ2-2)
CVSSLKRGTLSGELFF

SEQ ID NO: 125719 - protein, 14 aa, Homo sapiens
  CDR3 for alpha chain variable domain of TCR clone 62860 (TRAV1-1, TRAJ30)
CAVRSLNRDDKIIF

SEQ ID NO: 125720 - protein, 13 aa, Homo sapiens
  CDR3 for beta chain variable domain of TCR clone 62860 (TRBV19, TRBJ2-1)
CATSRGVYNEQFF

SEQ ID NO: 125721 - protein, 11 aa, Homo sapiens
  CDR3 for alpha chain variable domain of TCR clone 62861 (TRAV26-1, )
CIADNAATTIS

SEQ ID NO: 125722 - protein, 13 aa, Homo sapiens
  CDR3 for beta chain variable domain of TCR clone 62861 (TRBV20-1, TRBJ1-1)
CSARGGGNTEAFF

SEQ ID NO: 125723 - protein, 15 aa, Homo sapiens
  CDR3 for alpha chain variable domain of TCR clone 62862 (TRAV13-2, TRAJ45)
CAESDSGGGADGLTF

SEQ ID NO: 125724 - protein, 15 aa, Homo sapiens
  CDR3 for beta chain variable domain of TCR clone 62862 (TRBV19, TRBJ1-1)
CASTSGQIQNTEAFF

SEQ ID NO: 125725 - protein, 17 aa, Homo sapiens
  CDR3 for alpha chain variable domain of TCR clone 62863 (TRAV26-1, TRAJ37)
CIVRVITVSSNTGKLIF

SEQ ID NO: 125726 - protein, 13 aa, Homo sapiens
  CDR3 for beta chain variable domain of TCR clone 62863 (TRBV7-2, TRBJ1-1)
CASNLKGAKVAFF

SEQ ID NO: 125727 - protein, 14 aa, Homo sapiens
  CDR3 for alpha chain variable domain of TCR clone 62864 (TRAV1-2, TRAJ16)
CAVSRFSDGQKLLF

SEQ ID NO: 125728 - protein, 14 aa, Homo sapiens
  CDR3 for beta chain variable domain of TCR clone 62864 (TRBV25-1, TRBJ1-1)
CASTHLGGNTEAFF

SEQ ID NO: 125729 - protein, 16 aa, Homo sapiens
  CDR3 for alpha chain variable domain of TCR clone 62865 (TRAV1-1, TRAJ6)
CAVRDREDRRKLHTYI

SEQ ID NO: 125730 - protein, 13 aa, Homo sapiens
  CDR3 for beta chain variable domain of TCR clone 62865 (TRBV10-2, TRBJ2-7)
CASGASGGYEQYF

SEQ ID NO: 125731 - protein, 14 aa, Homo sapiens
  CDR3 for alpha chain variable domain of TCR clone 62866 (TRAV29/DV5, TRAJ45)
CAASFRGGADGLTF

SEQ ID NO: 125732 - protein, 14 aa, Homo sapiens
  CDR3 for beta chain variable domain of TCR clone 62866 (TRBV7-2, TRBJ2-7)
CASSPKTSFYEQYF

SEQ ID NO: 125733 - protein, 13 aa, Homo sapiens
  CDR3 for alpha chain variable domain of TCR clone 62867 (TRAV35, TRAJ48)
CAGHEFGNEKLTF

SEQ ID NO: 125734 - protein, 14 aa, Homo sapiens
  CDR3 for beta chain variable domain of TCR clone 62867 (TRBV12-5, TRBJ2-5)
CASGSRTHQETQYF

SEQ ID NO: 125735 - protein, 18 aa, Homo sapiens
  CDR3 for alpha chain variable domain of TCR clone 62868 (TRAV12-3, TRAJ52)
CAMSVGGAGRTSYGKLTF

SEQ ID NO: 125736 - protein, 15 aa, Homo sapiens
  CDR3 for beta chain variable domain of TCR clone 62868 (TRBV27, TRBJ1-6)
CASSFDRGLGSPLHF

SEQ ID NO: 125737 - protein, 14 aa, Homo sapiens
  CDR3 for alpha chain variable domain of TCR clone 62869 (TRAV8-3, TRAJ4)
CAVGASGGYNKLIF

SEQ ID NO: 125738 - protein, 16 aa, Homo sapiens
  CDR3 for beta chain variable domain of TCR clone 62869 (TRBV4-1, TRBJ1-3)
CASSQDELLAGNTIYF

SEQ ID NO: 125739 - protein, 13 aa, Homo sapiens
  CDR3 for alpha chain variable domain of TCR clone 62870 (TRAV26-2, TRAJ45)
CIPIGGGADGLTF

SEQ ID NO: 125740 - protein, 20 aa, Homo sapiens
  CDR3 for beta chain variable domain of TCR clone 62870 (TRBV28, TRBJ2-1)
CASTPIGRSPGLAGGNEQFF

SEQ ID NO: 125741 - protein, 13 aa, Homo sapiens
  CDR3 for alpha chain variable domain of TCR clone 62871 (TRAV8-6, TRAJ40)
CAVSGTGTYKYIF

SEQ ID NO: 125742 - protein, 15 aa, Homo sapiens
  CDR3 for beta chain variable domain of TCR clone 62871 (TRBV4-1, TRBJ2-3)
CASSRGQGIPDTQYF

SEQ ID NO: 125743 - protein, 15 aa, Homo sapiens
  CDR3 for alpha chain variable domain of TCR clone 62872 (TRAV17, TRAJ56)
CATDANTGANSKLTF

SEQ ID NO: 125744 - protein, 14 aa, Homo sapiens
  CDR3 for beta chain variable domain of TCR clone 62872 (TRBV19, TRBJ1-5)
CAGSLGTGGQPQHF

SEQ ID NO: 125745 - protein, 15 aa, Homo sapiens
  CDR3 for alpha chain variable domain of TCR clone 62873 (TRAV35, TRAJ41)
CAGQPFSNSGYALNF

SEQ ID NO: 125746 - protein, 14 aa, Homo sapiens
  CDR3 for beta chain variable domain of TCR clone 62873 (TRBV7-2, TRBJ1-2)
CASSRGGTNYGYTF

SEQ ID NO: 125747 - protein, 18 aa, Homo sapiens
  CDR3 for alpha chain variable domain of TCR clone 62874 (TRAV13-1, TRAJ52)
CAASKRSAGGTSYGKLTF

SEQ ID NO: 125748 - protein, 17 aa, Homo sapiens
  CDR3 for beta chain variable domain of TCR clone 62874 (TRBV19, TRBJ2-6)
CASSTGQVFSGANVLTF

SEQ ID NO: 125749 - protein, 14 aa, Homo sapiens
  CDR3 for alpha chain variable domain of TCR clone 62875 (TRAV29/DV5, TRAJ36)
CAARRKTGANNLFF

SEQ ID NO: 125750 - protein, 20 aa, Homo sapiens
  CDR3 for beta chain variable domain of TCR clone 62875 (TRBV19, TRBJ2-1)
CASSISRTVTSTRLNNEQFF

SEQ ID NO: 125751 - protein, 14 aa, Homo sapiens
  CDR3 for alpha chain variable domain of TCR clone 62876 (TRAV12-2, TRAJ13)
CAVKKTGGYQKVTF

SEQ ID NO: 125752 - protein, 13 aa, Homo sapiens
  CDR3 for beta chain variable domain of TCR clone 62876 (TRBV10-2, TRBJ2-3)
CASSESGDHTQYF

SEQ ID NO: 125753 - protein, 13 aa, Homo sapiens
  CDR3 for alpha chain variable domain of TCR clone 62877 (TRAV36/DV7, TRAJ49)
CAVEANTGNQFYF

SEQ ID NO: 125754 - protein, 13 aa, Homo sapiens
  CDR3 for beta chain variable domain of TCR clone 62877 (TRBV10-3, TRBJ2-7)
CAAKLAVNYEQYF

SEQ ID NO: 125755 - protein, 10 aa, Homo sapiens
  CDR3 for alpha chain variable domain of TCR clone 62878 (TRAV23/DV6, TRAJ31)
CARGGARLMF

SEQ ID NO: 125756 - protein, 14 aa, Homo sapiens
  CDR3 for beta chain variable domain of TCR clone 62878 (TRBV7-8, TRBJ1-2)
CASSPDSLSYGYTI

SEQ ID NO: 125757 - protein, 15 aa, Homo sapiens
  CDR3 for alpha chain variable domain of TCR clone 62879 (TRAV12-1, TRAJ44)
CVVFVNTGTASKLTF

SEQ ID NO: 125758 - protein, 17 aa, Homo sapiens
  CDR3 for beta chain variable domain of TCR clone 62879 (TRBV4-2, TRBJ1-1)
CASTQFGGGSGNTEAFF

SEQ ID NO: 125759 - protein, 13 aa, Homo sapiens
  CDR3 for alpha chain variable domain of TCR clone 62880 (TRAV13-2, TRAJ13)
CAERPGGYQKVTL

SEQ ID NO: 125760 - protein, 15 aa, Homo sapiens
  CDR3 for beta chain variable domain of TCR clone 62880 (TRBV11-3, TRBJ2-7)
CASSPGPASSYEQYF

SEQ ID NO: 125761 - protein, 10 aa, Homo sapiens
  CDR3 for alpha chain variable domain of TCR clone 62881 (TRAV12-3, TRAJ18)
CAMSAEAQPW

SEQ ID NO: 125762 - protein, 13 aa, Homo sapiens
  CDR3 for beta chain variable domain of TCR clone 62881 (TRBV7-3, TRBJ1-1)
CASSQDWGAEAFF

SEQ ID NO: 125763 - protein, 16 aa, Homo sapiens
  CDR3 for alpha chain variable domain of TCR clone 62882 (TRAV1-2, TRAJ10)
CAVRGVLTGGGNKLTF

SEQ ID NO: 125764 - protein, 12 aa, Homo sapiens
  CDR3 for beta chain variable domain of TCR clone 62882 (TRBV7-8, TRBJ2-7)
FASSLGDREQYF

SEQ ID NO: 125765 - protein, 15 aa, Homo sapiens
  CDR3 for alpha chain variable domain of TCR clone 62883 (TRAV8-4, TRAJ9)
CAVTFNTGGFKNYIW

SEQ ID NO: 125766 - protein, 15 aa, Homo sapiens
  CDR3 for beta chain variable domain of TCR clone 62883 (TRBV7-9, TRBJ2-2)
CASSPETGAGGELFF

SEQ ID NO: 125767 - protein, 13 aa, Homo sapiens
  CDR3 for alpha chain variable domain of TCR clone 62884 (TRAV8-6, TRAJ49)
CAVITNTGNQFFF

SEQ ID NO: 125768 - protein, 14 aa, Homo sapiens
  CDR3 for beta chain variable domain of TCR clone 62884 (TRBV5-1, TRBJ2-7)
CASSRGESLYEQYF

SEQ ID NO: 125769 - protein, 12 aa, Homo sapiens
  CDR3 for alpha chain variable domain of TCR clone 62885 (TRAV12-3, TRAJ17)
CAMTLTGTKLTF

SEQ ID NO: 125770 - protein, 15 aa, Homo sapiens
  CDR3 for beta chain variable domain of TCR clone 62885 (TRBV20-1, TRBJ2-7)
CSARDWVSGMDEQYF

SEQ ID NO: 125771 - protein, 14 aa, Homo sapiens
  CDR3 for alpha chain variable domain of TCR clone 62886 (TRAV2, TRAJ9)
CAVEYRSGGFKTIF

SEQ ID NO: 125772 - protein, 15 aa, Homo sapiens
  CDR3 for beta chain variable domain of TCR clone 62886 (TRBV10-2, TRBJ2-6)
CASSEQGTGANVLTF

SEQ ID NO: 125773 - protein, 15 aa, Homo sapiens
  CDR3 for alpha chain variable domain of TCR clone 62887 (TRAV38-1, TRAJ45)
CAFMKGGGGADGLTF

SEQ ID NO: 125774 - protein, 13 aa, Homo sapiens
  CDR3 for beta chain variable domain of TCR clone 62887 (TRBV7-9, TRBJ1-2)
CASSLKQSYGYTF

SEQ ID NO: 125775 - protein, 17 aa, Homo sapiens
  CDR3 for alpha chain variable domain of TCR clone 62888 (TRAV13-1, TRAJ31)
CAPRDRLMFGDGTQLVV

SEQ ID NO: 125776 - protein, 14 aa, Homo sapiens
  CDR3 for beta chain variable domain of TCR clone 62888 (TRBV12-5, TRBJ2-5)
CASGSRTHQETQYF

SEQ ID NO: 125777 - protein, 10 aa, Homo sapiens
  CDR3 for alpha chain variable domain of TCR clone 62889 (TRAV35, TRAJ34)
WARNTDKLIF

SEQ ID NO: 125778 - protein, 14 aa, Homo sapiens
  CDR3 for beta chain variable domain of TCR clone 62889 (TRBV5-1, TRBJ2-7)
CASSRGESLYEQYF

SEQ ID NO: 125779 - protein, 13 aa, Homo sapiens
  CDR3 for alpha chain variable domain of TCR clone 62890 (TRAV16, TRAJ31)
CALSAHNNARLMF

SEQ ID NO: 125780 - protein, 17 aa, Homo sapiens
  CDR3 for beta chain variable domain of TCR clone 62890 (TRBV12-4, TRBJ2-1)
CARSPGLAGGRINEQFF

SEQ ID NO: 125781 - protein, 14 aa, Homo sapiens
  CDR3 for alpha chain variable domain of TCR clone 62891 (TRAV26-1, TRAJ34)
CIVRVAYNTDKLIF

SEQ ID NO: 125782 - protein, 15 aa, Homo sapiens
  CDR3 for beta chain variable domain of TCR clone 62891 (TRBV20-1, TRBJ2-7)
CSARVPAEYFYEQYF

SEQ ID NO: 125783 - protein, 15 aa, Homo sapiens
  CDR3 for alpha chain variable domain of TCR clone 62892 (TRAV12-1, TRAJ9)
CVVSFGDTGGFKTIF

SEQ ID NO: 125784 - protein, 13 aa, Homo sapiens
  CDR3 for beta chain variable domain of TCR clone 62892 (TRBV2, TRBJ1-4)
CASSERAGEKLFS

SEQ ID NO: 125785 - protein, 13 aa, Homo sapiens
  CDR3 for alpha chain variable domain of TCR clone 62893 (TRAV20, TRAJ48)
CAVHLFGNEKLTF

SEQ ID NO: 125786 - protein, 15 aa, Homo sapiens
  CDR3 for beta chain variable domain of TCR clone 62893 (TRBV6-5, TRBJ2-6)
CASSQWEAGANVLTV

SEQ ID NO: 125787 - protein, 14 aa, Homo sapiens
  CDR3 for alpha chain variable domain of TCR clone 62894 (TRAV17, TRAJ39)
CATDPVLAGNMLTF

SEQ ID NO: 125788 - protein, 15 aa, Homo sapiens
  CDR3 for beta chain variable domain of TCR clone 62894 (TRBV13, TRBJ1-5)
CASSFGQGGVQPQHF

SEQ ID NO: 125789 - protein, 10 aa, Homo sapiens
  CDR3 for alpha chain variable domain of TCR clone 62895 (TRAV3, TRAJ30)
CAVSEIEIIF

SEQ ID NO: 125790 - protein, 14 aa, Homo sapiens
  CDR3 for beta chain variable domain of TCR clone 62895 (TRBV15, TRBJ2-3)
CATRSGTSTDTQYF

SEQ ID NO: 125791 - protein, 12 aa, Homo sapiens
  CDR3 for alpha chain variable domain of TCR clone 62896 (TRAV13-1, TRAJ27)
CEAHTNAGKSTF

SEQ ID NO: 125792 - protein, 14 aa, Homo sapiens
  CDR3 for beta chain variable domain of TCR clone 62896 (TRBV19, TRBJ2-2)
CASSGQGIAGELFF

SEQ ID NO: 125793 - protein, 14 aa, Homo sapiens
  CDR3 for alpha chain variable domain of TCR clone 62897 (TRAV26-1, TRAJ44)
CIVRPTGTASKLTF

SEQ ID NO: 125794 - protein, 15 aa, Homo sapiens
  CDR3 for beta chain variable domain of TCR clone 62897 (TRBV10-3, TRBJ2-2)
CAISEGRVDTGELFF

SEQ ID NO: 125795 - protein, 14 aa, Homo sapiens
  CDR3 for alpha chain variable domain of TCR clone 62898 (TRAV1-2, TRAJ8)
CAVREDTGFQRLVF

SEQ ID NO: 125796 - protein, 17 aa, Homo sapiens
  CDR3 for beta chain variable domain of TCR clone 62898 (TRBV11-2, TRBJ2-1)
CASSLYPPGVEYNEQFF

SEQ ID NO: 125797 - protein, 12 aa, Homo sapiens
  CDR3 for alpha chain variable domain of TCR clone 62899 (TRAV1-1, TRAJ9)
CAVDTGGFKTIF

SEQ ID NO: 125798 - protein, 17 aa, Homo sapiens
  CDR3 for beta chain variable domain of TCR clone 62899 (TRBV7-3, TRBJ2-3)
CASSLMKRMRGADTQYF

SEQ ID NO: 125799 - protein, 18 aa, Homo sapiens
  CDR3 for alpha chain variable domain of TCR clone 62900 (TRAV26-1, TRAJ56)
CIVRVASRGTGANSKLTF

SEQ ID NO: 125800 - protein, 15 aa, Homo sapiens
  CDR3 for beta chain variable domain of TCR clone 62900 (TRBV7-9, TRBJ2-5)
CASSDTGRGRETQYF

SEQ ID NO: 125801 - protein, 13 aa, Homo sapiens
  CDR3 for alpha chain variable domain of TCR clone 62901 (TRAV9-2, TRAJ53)
CALSGGSNYKLTF

SEQ ID NO: 125802 - protein, 15 aa, Homo sapiens
  CDR3 for beta chain variable domain of TCR clone 62901 (TRBV20-1, TRBJ2-7)
CSARDRVSGMDEQYF

SEQ ID NO: 125803 - protein, 14 aa, Homo sapiens
  CDR3 for alpha chain variable domain of TCR clone 62902 (TRAV1-2, TRAJ16)
CAVNRFSDGQKLLF

SEQ ID NO: 125804 - protein, 16 aa, Homo sapiens
  CDR3 for beta chain variable domain of TCR clone 62902 (TRBV19, TRBJ2-1)
CASSKAGPSAYNEQFF

SEQ ID NO: 125805 - protein, 14 aa, Homo sapiens
  CDR3 for alpha chain variable domain of TCR clone 62903 (TRAV12-2, TRAJ44)
CAVNKAGTASKLTL

SEQ ID NO: 125806 - protein, 12 aa, Homo sapiens
  CDR3 for beta chain variable domain of TCR clone 62903 (TRBV19, TRBJ1-4)
CASKDWPGGLFF

SEQ ID NO: 125807 - protein, 12 aa, Homo sapiens
  CDR3 for alpha chain variable domain of TCR clone 62904 (TRAV2, TRAJ32)
CAVGGAPNKLIF

SEQ ID NO: 125808 - protein, 15 aa, Homo sapiens
  CDR3 for beta chain variable domain of TCR clone 62904 (TRBV7-2, TRBJ2-1)
CASSSRTSREDEQFF

SEQ ID NO: 125809 - protein, 15 aa, Homo sapiens
  CDR3 for alpha chain variable domain of TCR clone 62905 (TRAV12-1, TRAJ48)
CVVNKVNFGNEKLTF

SEQ ID NO: 125810 - protein, 15 aa, Homo sapiens
  CDR3 for beta chain variable domain of TCR clone 62905 (TRBV20-1, TRBJ2-7)
CSARDRVSGMDEQYF

SEQ ID NO: 125811 - protein, 17 aa, Homo sapiens
  CDR3 for alpha chain variable domain of TCR clone 62906 (TRAV3, TRAJ42)
CAVRDRDYGGSQGNLIF

SEQ ID NO: 125812 - protein, 15 aa, Homo sapiens
  CDR3 for beta chain variable domain of TCR clone 62906 (TRBV6-6, TRBJ2-7)
CASSYSYGGSYEKYF

SEQ ID NO: 125813 - protein, 14 aa, Homo sapiens
  CDR3 for alpha chain variable domain of TCR clone 62907 (TRAV1-2, TRAJ16)
CAVNRFSDGQKPLF

SEQ ID NO: 125814 - protein, 14 aa, Homo sapiens
  CDR3 for beta chain variable domain of TCR clone 62907 (TRBV25-1, TRBJ1-1)
CASTHLGGNTEAFF

SEQ ID NO: 125815 - protein, 10 aa, Homo sapiens
  CDR3 for alpha chain variable domain of TCR clone 62908 (TRAV30, TRAJ48)
CGIGNEKLTF

SEQ ID NO: 125816 - protein, 14 aa, Homo sapiens
  CDR3 for beta chain variable domain of TCR clone 62908 (TRBV7-6, TRBJ2-3)
CASSVAGGTDTHYF

SEQ ID NO: 125817 - protein, 15 aa, Homo sapiens
  CDR3 for alpha chain variable domain of TCR clone 62909 (TRAV3, TRAJ4)
CAVRDGTVGYNKLIF

SEQ ID NO: 125818 - protein, 16 aa, Homo sapiens
  CDR3 for beta chain variable domain of TCR clone 62909 (TRBV27, TRBJ2-2)
CASSSSGVSNTGELFF

SEQ ID NO: 125819 - protein, 12 aa, Homo sapiens
  CDR3 for alpha chain variable domain of TCR clone 62910 (TRAV35, TRAJ39)
LAPNNAGNMLTF

SEQ ID NO: 125820 - protein, 16 aa, Homo sapiens
  CDR3 for beta chain variable domain of TCR clone 62910 (TRBV2, TRBJ2-3)
CASSTSVEGVTYTQYF

SEQ ID NO: 125821 - protein, 11 aa, Homo sapiens
  CDR3 for alpha chain variable domain of TCR clone 62911 (TRAV35, TRAJ30)
CAPGGDDKIIF

SEQ ID NO: 125822 - protein, 14 aa, Homo sapiens
  CDR3 for beta chain variable domain of TCR clone 62911 (TRBV7-6, TRBJ2-1)
CASSVGGGADEQFF

SEQ ID NO: 125823 - protein, 13 aa, Homo sapiens
  CDR3 for alpha chain variable domain of TCR clone 62912 (TRAV21, TRAJ57)
CGVTQGGSEKLVF

SEQ ID NO: 125824 - protein, 16 aa, Homo sapiens
  CDR3 for beta chain variable domain of TCR clone 62912 (TRBV29-1, TRBJ2-7)
CSVEDAEDGTAYEQYF

SEQ ID NO: 125825 - protein, 15 aa, Homo sapiens
  CDR3 for alpha chain variable domain of TCR clone 62913 (TRAV8-2, TRAJ15)
CVVTMGNQAGTALIF

SEQ ID NO: 125826 - protein, 16 aa, Homo sapiens
  CDR3 for beta chain variable domain of TCR clone 62913 (TRBV19, TRBJ2-1)
CASSKAGPSSYNEQSF

SEQ ID NO: 125827 - protein, 12 aa, Homo sapiens
  CDR3 for alpha chain variable domain of TCR clone 62914 (TRAV38-2/DV8, TRAJ47)
CVLMEYRNKLVF

SEQ ID NO: 125828 - protein, 14 aa, Homo sapiens
  CDR3 for beta chain variable domain of TCR clone 62914 (TRBV20-1, TRBJ1-5)
CSATDRGSNQPQHF

SEQ ID NO: 125829 - protein, 15 aa, Homo sapiens
  CDR3 for alpha chain variable domain of TCR clone 62915 (TRAV12-1, TRAJ44)
CVVFVNTGTASKLTF

SEQ ID NO: 125830 - protein, 17 aa, Homo sapiens
  CDR3 for beta chain variable domain of TCR clone 62915 (TRBV7-8, TRBJ2-6)
CASSARTGGAGANVLTF

SEQ ID NO: 125831 - protein, 18 aa, Homo sapiens
  CDR3 for alpha chain variable domain of TCR clone 62916 (TRAV13-1, TRAJ52)
WAASKRSAGGTSYGKLTF

SEQ ID NO: 125832 - protein, 13 aa, Homo sapiens
  CDR3 for beta chain variable domain of TCR clone 62916 (TRBV12-4, TRBJ1-2)
CASSLRQGKGYTF

SEQ ID NO: 125833 - protein, 12 aa, Homo sapiens
  CDR3 for alpha chain variable domain of TCR clone 62917 (TRAV13-1, TRAJ21)
CAAKEGFNKFYF

SEQ ID NO: 125834 - protein, 19 aa, Homo sapiens
  CDR3 for beta chain variable domain of TCR clone 62917 (TRBV2, TRBJ2-7)
CASSDDEASGRANDYEQYF

SEQ ID NO: 125835 - protein, 14 aa, Homo sapiens
  CDR3 for alpha chain variable domain of TCR clone 62918 (TRAV13-1, TRAJ44)
CAAKATGTASKLTF

SEQ ID NO: 125836 - protein, 14 aa, Homo sapiens
  CDR3 for beta chain variable domain of TCR clone 62918 (TRBV15, TRBJ2-5)
CATSIGGLGETQYF

SEQ ID NO: 125837 - protein, 13 aa, Homo sapiens
  CDR3 for alpha chain variable domain of TCR clone 62919 (TRAV3, TRAJ26)
CAVRGAEGQNFVF

SEQ ID NO: 125838 - protein, 15 aa, Homo sapiens
  CDR3 for beta chain variable domain of TCR clone 62919 (TRBV2, TRBJ1-5)
CASCPGPTGNQPQHF

SEQ ID NO: 125839 - protein, 12 aa, Homo sapiens
  CDR3 for alpha chain variable domain of TCR clone 62920 (TRAV29/DV5, TRAJ15)
CASNQAGTALIF

SEQ ID NO: 125840 - protein, 15 aa, Homo sapiens
  CDR3 for beta chain variable domain of TCR clone 62920 (TRBV11-2, TRBJ2-2)
CASSSNRVNAGELFF

SEQ ID NO: 125841 - protein, 16 aa, Homo sapiens
  CDR3 for alpha chain variable domain of TCR clone 62921 (TRAV26-1, TRAJ23)
CIVGVERYNQGGKLIF

SEQ ID NO: 125842 - protein, 15 aa, Homo sapiens
  CDR3 for beta chain variable domain of TCR clone 62921 (TRBV18, TRBJ2-7)
CASSPRGGKGYEQYF

SEQ ID NO: 125843 - protein, 11 aa, Homo sapiens
  CDR3 for alpha chain variable domain of TCR clone 62922 (TRAV17, TRAJ31)
CATDRAARLMF

SEQ ID NO: 125844 - protein, 14 aa, Homo sapiens
  CDR3 for beta chain variable domain of TCR clone 62922 (TRBV4-1, TRBJ2-2)
CASSQAVNTGELFF

SEQ ID NO: 125845 - protein, 16 aa, Homo sapiens
  CDR3 for alpha chain variable domain of TCR clone 62923 (TRAV30, TRAJ24)
CGTEIVDADSWGKFQF

SEQ ID NO: 125846 - protein, 15 aa, Homo sapiens
  CDR3 for beta chain variable domain of TCR clone 62923 (TRBV5-8, TRBJ2-3)
CASSPNFGGRDTQYF

SEQ ID NO: 125847 - protein, 12 aa, Homo sapiens
  CDR3 for alpha chain variable domain of TCR clone 62924 (TRAV17, TRAJ20)
CATDGDDYKLSF

SEQ ID NO: 125848 - protein, 15 aa, Homo sapiens
  CDR3 for beta chain variable domain of TCR clone 62924 (TRBV28, TRBJ2-5)
CASSPPWSYQETQYF

SEQ ID NO: 125849 - protein, 14 aa, Homo sapiens
  CDR3 for alpha chain variable domain of TCR clone 62925 (TRAV8-4, TRAJ48)
CAVSETFGSEKLTF

SEQ ID NO: 125850 - protein, 14 aa, Homo sapiens
  CDR3 for beta chain variable domain of TCR clone 62925 (TRBV13, TRBJ2-7)
CASSLKGASYEQYF

SEQ ID NO: 125851 - protein, 15 aa, Homo sapiens
  CDR3 for alpha chain variable domain of TCR clone 62926 (TRAV26-1, TRAJ44)
CIVRANTGTVSKLTF

SEQ ID NO: 125852 - protein, 16 aa, Homo sapiens
  CDR3 for beta chain variable domain of TCR clone 62926 (TRBV7-7, TRBJ2-1)
CASSLASGTSYNEQFF

SEQ ID NO: 125853 - protein, 12 aa, Homo sapiens
  CDR3 for alpha chain variable domain of TCR clone 62927 (TRAV8-4, TRAJ43)
CAASVNNNDMRF

SEQ ID NO: 125854 - protein, 14 aa, Homo sapiens
  CDR3 for beta chain variable domain of TCR clone 62927 (TRBV11-2, TRBJ1-2)
CASSLGTANYGYTF

SEQ ID NO: 125855 - protein, 14 aa, Homo sapiens
  CDR3 for alpha chain variable domain of TCR clone 62928 (TRAV26-1, TRAJ22)
CIVRVYGSARQLTF

SEQ ID NO: 125856 - protein, 17 aa, Homo sapiens
  CDR3 for beta chain variable domain of TCR clone 62928 (TRBV7-3, TRBJ2-3)
CASSPGGLAGCGDTQYF

SEQ ID NO: 125857 - protein, 14 aa, Homo sapiens
  CDR3 for alpha chain variable domain of TCR clone 62929 (TRAV1-2, TRAJ8)
CAVREDTGFQKLVF

SEQ ID NO: 125858 - protein, 15 aa, Homo sapiens
  CDR3 for beta chain variable domain of TCR clone 62929 (TRBV28, TRBJ2-4)
CAAGSGTLLMGSQYF

SEQ ID NO: 125859 - protein, 14 aa, Homo sapiens
  CDR3 for alpha chain variable domain of TCR clone 62930 (TRAV12-1, TRAJ15)
CLPPANQAGTALIF

SEQ ID NO: 125860 - protein, 13 aa, Homo sapiens
  CDR3 for beta chain variable domain of TCR clone 62930 (TRBV7-2, TRBJ2-4)
CASSREHANIQDF

SEQ ID NO: 125861 - protein, 13 aa, Homo sapiens
  CDR3 for alpha chain variable domain of TCR clone 62931 (TRAV13-1, TRAJ11)
CAASKEGYSILTF

SEQ ID NO: 125862 - protein, 21 aa, Homo sapiens
  CDR3 for beta chain variable domain of TCR clone 62931 (TRBV23-1, TRBJ2-5)
CASTPPGQGPGGDPVLRARHA

SEQ ID NO: 125863 - protein, 14 aa, Homo sapiens
  CDR3 for alpha chain variable domain of TCR clone 62932 (TRAV36/DV7, TRAJ21)
CAVYTTSTNFTLDL

SEQ ID NO: 125864 - protein, 15 aa, Homo sapiens
  CDR3 for beta chain variable domain of TCR clone 62932 (TRBV10-3, TRBJ2-3)
CAISLTSGGTDTQYF

SEQ ID NO: 125865 - protein, 16 aa, Homo sapiens
  CDR3 for alpha chain variable domain of TCR clone 62933 (TRAV12-3, TRAJ53)
CAMSPGSGGSNYKLTF

SEQ ID NO: 125866 - protein, 19 aa, Homo sapiens
  CDR3 for beta chain variable domain of TCR clone 62933 (TRBV27, TRBJ2-6)
CASSTLHWRGSSGANVLTF

SEQ ID NO: 125867 - protein, 13 aa, Homo sapiens
  CDR3 for alpha chain variable domain of TCR clone 62934 (TRAV38-2/DV8, TRAJ34)
CAYRTWNTDKLIF

SEQ ID NO: 125868 - protein, 13 aa, Homo sapiens
  CDR3 for beta chain variable domain of TCR clone 62934 (TRBV4-2, TRBJ1-1)
CASSQAGNTEAFF

SEQ ID NO: 125869 - protein, 13 aa, Homo sapiens
  CDR3 for alpha chain variable domain of TCR clone 62935 (TRAV38-1, TRAJ42)
CARWGGSQGNLIF

SEQ ID NO: 125870 - protein, 16 aa, Homo sapiens
  CDR3 for beta chain variable domain of TCR clone 62935 (TRBV11-2, TRBJ2-7)
CASSPTTGGVSYEQYF

SEQ ID NO: 125871 - protein, 12 aa, Homo sapiens
  CDR3 for alpha chain variable domain of TCR clone 62936 (TRAV30, TRAJ43)
CGTEERGNDMRF

SEQ ID NO: 125872 - protein, 14 aa, Homo sapiens
  CDR3 for beta chain variable domain of TCR clone 62936 (TRBV27, TRBJ2-2)
CASSLGAATGELFF

SEQ ID NO: 125873 - protein, 14 aa, Homo sapiens
  CDR3 for alpha chain variable domain of TCR clone 62937 (TRAV8-4, TRAJ9)
WAVRINTGGFKTIF

SEQ ID NO: 125874 - protein, 15 aa, Homo sapiens
  CDR3 for beta chain variable domain of TCR clone 62937 (TRBV10-2, TRBJ2-6)
CASSEQGTGANVLTF

SEQ ID NO: 125875 - protein, 11 aa, Homo sapiens
  CDR3 for alpha chain variable domain of TCR clone 62938 (TRAV1-1, TRAJ23)
CAVRQGGKLIF

SEQ ID NO: 125876 - protein, 15 aa, Homo sapiens
  CDR3 for beta chain variable domain of TCR clone 62938 (TRBV20-1, TRBJ2-1)
CSARGIGGTYNEQFF

SEQ ID NO: 125877 - protein, 13 aa, Homo sapiens
  CDR3 for alpha chain variable domain of TCR clone 62939 (TRAV8-3, TRAJ43)
CAVGIYNNNDMRF

SEQ ID NO: 125878 - protein, 14 aa, Homo sapiens
  CDR3 for beta chain variable domain of TCR clone 62939 (TRBV5-4, TRBJ1-1)
CASSLDSRRDEAFF

SEQ ID NO: 125879 - protein, 10 aa, Homo sapiens
  CDR3 for alpha chain variable domain of TCR clone 62940 (TRAV23/DV6, TRAJ57)
CAASSTLSQG

SEQ ID NO: 125880 - protein, 15 aa, Homo sapiens
  CDR3 for beta chain variable domain of TCR clone 62940 (TRBV28, TRBJ2-7)
CASSPGGRGFYEQYL

SEQ ID NO: 125881 - protein, 14 aa, Homo sapiens
  CDR3 for alpha chain variable domain of TCR clone 62941 (TRAV1-2, TRAJ16)
CAVNRFSDGQKLLF

SEQ ID NO: 125882 - protein, 12 aa, Homo sapiens
  CDR3 for beta chain variable domain of TCR clone 62941 (TRBV11-2, TRBJ2-2)
CASSLGGGKLFF

SEQ ID NO: 125883 - protein, 15 aa, Homo sapiens
  CDR3 for alpha chain variable domain of TCR clone 62942 (TRAV35, TRAJ50)
CAGQLRKTPYDKVIF

SEQ ID NO: 125884 - protein, 12 aa, Homo sapiens
  CDR3 for beta chain variable domain of TCR clone 62942 (TRBV5-1, TRBJ2-5)
CASSLGLETQYF

SEQ ID NO: 125885 - protein, 15 aa, Homo sapiens
  CDR3 for alpha chain variable domain of TCR clone 62943 (TRAV16, TRAJ16)
CALLGGGSDGQKLLF

SEQ ID NO: 125886 - protein, 15 aa, Homo sapiens
  CDR3 for beta chain variable domain of TCR clone 62943 (TRBV20-1, TRBJ2-7)
CSARDRVSGMDEQYF

SEQ ID NO: 125887 - protein, 17 aa, Homo sapiens
  CDR3 for alpha chain variable domain of TCR clone 62944 (TRAV26-1, TRAJ22)
CLVRVPSHSGSARQLTF

SEQ ID NO: 125888 - protein, 16 aa, Homo sapiens
  CDR3 for beta chain variable domain of TCR clone 62944 (TRBV28, TRBJ2-1)
CASRRSGRVVGNEQFF

SEQ ID NO: 125889 - protein, 12 aa, Homo sapiens
  CDR3 for alpha chain variable domain of TCR clone 62945 (TRAV21, TRAJ23)
CAVGPQGGRLIF

SEQ ID NO: 125890 - protein, 13 aa, Homo sapiens
  CDR3 for beta chain variable domain of TCR clone 62945 (TRBV20-1, TRBJ2-7)
CSARTGAGYEQYF

SEQ ID NO: 125891 - protein, 16 aa, Homo sapiens
  CDR3 for alpha chain variable domain of TCR clone 62946 (TRAV1-2, TRAJ10)
CAVRGVLTGGGNKLTF

SEQ ID NO: 125892 - protein, 13 aa, Homo sapiens
  CDR3 for beta chain variable domain of TCR clone 62946 (TRBV19, TRBJ2-7)
CASRKAGGSEQYF

SEQ ID NO: 125893 - protein, 15 aa, Homo sapiens
  CDR3 for alpha chain variable domain of TCR clone 62947 (TRAV3, TRAJ30)
CAVGDEYGRDDKIIF

SEQ ID NO: 125894 - protein, 16 aa, Homo sapiens
  CDR3 for beta chain variable domain of TCR clone 62947 (TRBV5-1, TRBJ2-5)
CASSLANHRGRETQYF

SEQ ID NO: 125895 - protein, 18 aa, Homo sapiens
  CDR3 for alpha chain variable domain of TCR clone 62948 (TRAV21, TRAJ52)
CAVRPSPAGGTSYGKLTF

SEQ ID NO: 125896 - protein, 14 aa, Homo sapiens
  CDR3 for beta chain variable domain of TCR clone 62948 (TRBV19, TRBJ2-1)
CASGKSTQYNEQFF

SEQ ID NO: 125897 - protein, 11 aa, Homo sapiens
  CDR3 for alpha chain variable domain of TCR clone 62949 (TRAV16, TRAJ33)
CALNSNYQLIW

SEQ ID NO: 125898 - protein, 15 aa, Homo sapiens
  CDR3 for beta chain variable domain of TCR clone 62949 (TRBV4-1, TRBJ2-7)
CASSQQGQGFDEQYF

SEQ ID NO: 125899 - protein, 16 aa, Homo sapiens
  CDR3 for alpha chain variable domain of TCR clone 62950 (TRAV26-1, TRAJ36)
CIVRVPDQTGANNLFF

SEQ ID NO: 125900 - protein, 15 aa, Homo sapiens
  CDR3 for beta chain variable domain of TCR clone 62950 (TRBV19, TRBJ2-4)
CASRGPRRGENMQYF

SEQ ID NO: 125901 - protein, 14 aa, Homo sapiens
  CDR3 for alpha chain variable domain of TCR clone 62951 (TRAV2, TRAJ39)
CAVEGDNAGNVLTF

SEQ ID NO: 125902 - protein, 14 aa, Homo sapiens
  CDR3 for beta chain variable domain of TCR clone 62951 (TRBV28, TRBJ2-7)
CASSLRARGNEQYF

SEQ ID NO: 125903 - protein, 12 aa, Homo sapiens
  CDR3 for alpha chain variable domain of TCR clone 62952 (TRAV8-1, TRAJ26)
CAVNNYGQNFFF

SEQ ID NO: 125904 - protein, 12 aa, Homo sapiens
  CDR3 for beta chain variable domain of TCR clone 62952 (TRBV5-5, TRBJ2-5)
CASSYFGETQYF

SEQ ID NO: 125905 - protein, 15 aa, Homo sapiens
  CDR3 for alpha chain variable domain of TCR clone 62953 (TRAV21, TRAJ53)
CATLNSGGSNYKLTF

SEQ ID NO: 125906 - protein, 12 aa, Homo sapiens
  CDR3 for beta chain variable domain of TCR clone 62953 (TRBV5-4, TRBJ2-7)
CAGSLEAYEQYF

SEQ ID NO: 125907 - protein, 11 aa, Homo sapiens
  CDR3 for alpha chain variable domain of TCR clone 62954 (TRAV12-3, TRAJ43)
CAMSVSNDMRF

SEQ ID NO: 125908 - protein, 15 aa, Homo sapiens
  CDR3 for beta chain variable domain of TCR clone 62954 (TRBV6-3, TRBJ2-7)
CASSSPGTVFYEQYF

SEQ ID NO: 125909 - protein, 15 aa, Homo sapiens
  CDR3 for alpha chain variable domain of TCR clone 62955 (TRAV12-1, TRAJ9)
CVVSFGDTGGFKTIF

SEQ ID NO: 125910 - protein, 16 aa, Homo sapiens
  CDR3 for beta chain variable domain of TCR clone 62955 (TRBV10-3, TRBJ2-1)
CAISGVGDGGGGEQFF

SEQ ID NO: 125911 - protein, 16 aa, Homo sapiens
  CDR3 for alpha chain variable domain of TCR clone 62956 (TRAV13-1, TRAJ48)
CAASIFGNFGNKKLTF

SEQ ID NO: 125912 - protein, 14 aa, Homo sapiens
  CDR3 for beta chain variable domain of TCR clone 62956 (TRBV24-1, TRBJ1-1)
CATSIPRGDTEAFF

SEQ ID NO: 125913 - protein, 16 aa, Homo sapiens
  CDR3 for alpha chain variable domain of TCR clone 62957 (TRAV30, TRAJ24)
CGTEIVDADSWGKFQF

SEQ ID NO: 125914 - protein, 14 aa, Homo sapiens
  CDR3 for beta chain variable domain of TCR clone 62957 (TRBV11-3, TRBJ2-1)
CASSATTSGSIQFF

SEQ ID NO: 125915 - protein, 11 aa, Homo sapiens
  CDR3 for alpha chain variable domain of TCR clone 62958 (TRAV2, TRAJ13)
CASGGYQKVTF

SEQ ID NO: 125916 - protein, 15 aa, Homo sapiens
  CDR3 for beta chain variable domain of TCR clone 62958 (TRBV19, TRBJ2-7)
CASSPAGSGEALRYF

SEQ ID NO: 125917 - protein, 13 aa, Homo sapiens
  CDR3 for alpha chain variable domain of TCR clone 62959 (TRAV8-6, TRAJ41)
CAVSENSGYELNF

SEQ ID NO: 125918 - protein, 17 aa, Homo sapiens
  CDR3 for beta chain variable domain of TCR clone 62959 (TRBV7-2, TRBJ2-3)
CASSLEARGTSTDTQYF

SEQ ID NO: 125919 - protein, 14 aa, Homo sapiens
  CDR3 for alpha chain variable domain of TCR clone 62960 (TRAV29/DV5, TRAJ36)
CAARRKTGANNLFC

SEQ ID NO: 125920 - protein, 14 aa, Homo sapiens
  CDR3 for beta chain variable domain of TCR clone 62960 (TRBV12-5, TRBJ2-5)
CASGSRTHQETQYF

SEQ ID NO: 125921 - protein, 16 aa, Homo sapiens
  CDR3 for alpha chain variable domain of TCR clone 62961 (TRAV3, TRAJ37)
CAVRPHVSGNTGKLIF

SEQ ID NO: 125922 - protein, 17 aa, Homo sapiens
  CDR3 for beta chain variable domain of TCR clone 62961 (TRBV5-1, TRBJ2-5)
CASSPVALGQNQETQYF

SEQ ID NO: 125923 - protein, 16 aa, Homo sapiens
  CDR3 for alpha chain variable domain of TCR clone 62962 (TRAV14/DV4, TRAJ53)
CAMREGGGGSNYKLTF

SEQ ID NO: 125924 - protein, 12 aa, Homo sapiens
  CDR3 for beta chain variable domain of TCR clone 62962 (TRBV7-9, TRBJ2-7)
CASSIKREEQYF

SEQ ID NO: 125925 - protein, 12 aa, Homo sapiens
  CDR3 for alpha chain variable domain of TCR clone 62963 (TRAV26-1, TRAJ36)
CIVRVRADNLFF

SEQ ID NO: 125926 - protein, 13 aa, Homo sapiens
  CDR3 for beta chain variable domain of TCR clone 62963 (TRBV4-1, TRBJ2-7)
CASSQGQAYEQYF

SEQ ID NO: 125927 - protein, 15 aa, Homo sapiens
  CDR3 for alpha chain variable domain of TCR clone 62964 (TRAV26-2, TRAJ57)
CILRDIRGGSETLVF

SEQ ID NO: 125928 - protein, 15 aa, Homo sapiens
  CDR3 for beta chain variable domain of TCR clone 62964 (TRBV2, TRBJ2-1)
CASDIGLAGEGEQFF

SEQ ID NO: 125929 - protein, 14 aa, Homo sapiens
  CDR3 for alpha chain variable domain of TCR clone 62965 (TRAV12-3, TRAJ10)
SHLPLTGGGNKLTF

SEQ ID NO: 125930 - protein, 13 aa, Homo sapiens
  CDR3 for beta chain variable domain of TCR clone 62965 (TRBV27, TRBJ2-1)
CASRTLGVGEQFF

SEQ ID NO: 125931 - protein, 16 aa, Homo sapiens
  CDR3 for alpha chain variable domain of TCR clone 62966 (TRAV3, TRAJ10)
CAVRDMRAGGGNKLTF

SEQ ID NO: 125932 - protein, 19 aa, Homo sapiens
  CDR3 for beta chain variable domain of TCR clone 62966 (TRBV6-3, TRBJ1-2)
CASSYSKGRTGPPNYGYIF

SEQ ID NO: 125933 - protein, 14 aa, Homo sapiens
  CDR3 for alpha chain variable domain of TCR clone 62967 (TRAV1-2, TRAJ16)
CAVNRFSDGQKLLL

SEQ ID NO: 125934 - protein, 13 aa, Homo sapiens
  CDR3 for beta chain variable domain of TCR clone 62967 (TRBV4-2, TRBJ1-1)
CASSQAGNTEAFF

SEQ ID NO: 125935 - protein, 13 aa, Homo sapiens
  CDR3 for alpha chain variable domain of TCR clone 62968 (TRAV1-1, TRAJ23)
CAVVANQGGKLIF

SEQ ID NO: 125936 - protein, 15 aa, Homo sapiens
  CDR3 for beta chain variable domain of TCR clone 62968 (TRBV2, TRBJ2-1)
CASSELAGSYNEQFF

SEQ ID NO: 125937 - protein, 12 aa, Homo sapiens
  CDR3 for alpha chain variable domain of TCR clone 62969 (TRAV13-2, TRAJ23)
CAERHRGGKLIF

SEQ ID NO: 125938 - protein, 13 aa, Homo sapiens
  CDR3 for beta chain variable domain of TCR clone 62969 (TRBV29-1, TRBJ2-7)
CSVGPSGGYEQYF

SEQ ID NO: 125939 - protein, 12 aa, Homo sapiens
  CDR3 for alpha chain variable domain of TCR clone 62970 (TRAV12-3, TRAJ17)
CAMTLTGNKLTF

SEQ ID NO: 125940 - protein, 17 aa, Homo sapiens
  CDR3 for beta chain variable domain of TCR clone 62970 (TRBV19, TRBJ2-6)
CASSTGQVFSGANVLTF

SEQ ID NO: 125941 - protein, 14 aa, Homo sapiens
  CDR3 for alpha chain variable domain of TCR clone 62971 (TRAV29/DV5, TRAJ36)
CAARRKTGANNLFF

SEQ ID NO: 125942 - protein, 15 aa, Homo sapiens
  CDR3 for beta chain variable domain of TCR clone 62971 (TRBV19, TRBJ1-1)
CASTSGQIQNTEAFF

SEQ ID NO: 125943 - protein, 13 aa, Homo sapiens
  CDR3 for alpha chain variable domain of TCR clone 62972 (TRAV8-3, TRAJ36)
CAVGAIGANNLFF

SEQ ID NO: 125944 - protein, 13 aa, Homo sapiens
  CDR3 for beta chain variable domain of TCR clone 62972 (TRBV12-4, TRBJ1-2)
CASSLRQGKGYTF

SEQ ID NO: 125945 - protein, 13 aa, Homo sapiens
  CDR3 for alpha chain variable domain of TCR clone 62973 (TRAV8-6, TRAJ13)
RAVSSGGYQKVTF

SEQ ID NO: 125946 - protein, 15 aa, Homo sapiens
  CDR3 for beta chain variable domain of TCR clone 62973 (TRBV7-9, TRBJ2-7)
CASSLPMGQANEQYF

SEQ ID NO: 125947 - protein, 17 aa, Homo sapiens
  CDR3 for alpha chain variable domain of TCR clone 62974 (TRAV38-2/DV8, TRAJ38)
CAYRSARGAGNNRKLIW

SEQ ID NO: 125948 - protein, 13 aa, Homo sapiens
  CDR3 for beta chain variable domain of TCR clone 62974 (TRBV6-5, TRBJ2-1)
CASRGRVGNEQSF

SEQ ID NO: 125949 - protein, 16 aa, Homo sapiens
  CDR3 for alpha chain variable domain of TCR clone 62975 (TRAV16, TRAJ52)
CALSAAGGTSYGKLTF

SEQ ID NO: 125950 - protein, 15 aa, Homo sapiens
  CDR3 for beta chain variable domain of TCR clone 62975 (TRBV2, TRBJ2-3)
CASSDFEKATDTQYF

SEQ ID NO: 125951 - protein, 16 aa, Homo sapiens
  CDR3 for alpha chain variable domain of TCR clone 62976 (TRAV12-3, TRAJ53)
CAMSPGSGGSNFKLTF

SEQ ID NO: 125952 - protein, 17 aa, Homo sapiens
  CDR3 for beta chain variable domain of TCR clone 62976 (TRBV28, TRBJ2-5)
CASSTPEGDALQETQYF

SEQ ID NO: 125953 - protein, 13 aa, Homo sapiens
  CDR3 for alpha chain variable domain of TCR clone 62977 (TRAV21, TRAJ27)
CAARPGNAGKSTF

SEQ ID NO: 125954 - protein, 14 aa, Homo sapiens
  CDR3 for beta chain variable domain of TCR clone 62977 (TRBV11-2, TRBJ2-7)
CSSSLGAGAYEQYF

SEQ ID NO: 125955 - protein, 16 aa, Homo sapiens
  CDR3 for alpha chain variable domain of TCR clone 62978 (TRAV14/DV4, TRAJ21)
CAMREGPENNFNKFYF

SEQ ID NO: 125956 - protein, 17 aa, Homo sapiens
  CDR3 for beta chain variable domain of TCR clone 62978 (TRBV13, TRBJ2-3)
CASSLSRVAGGRNTQYF

SEQ ID NO: 125957 - protein, 17 aa, Homo sapiens
  CDR3 for alpha chain variable domain of TCR clone 62979 (TRAV36/DV7, TRAJ52)
CAVAQRAGGTSYGRLTF

SEQ ID NO: 125958 - protein, 15 aa, Homo sapiens
  CDR3 for beta chain variable domain of TCR clone 62979 (TRBV6-5, TRBJ1-2)
CASSYSQAFNYGYTF

SEQ ID NO: 125959 - protein, 14 aa, Homo sapiens
  CDR3 for alpha chain variable domain of TCR clone 62980 (TRAV1-2, TRAJ8)
CAVREDTGFQKLVF

SEQ ID NO: 125960 - protein, 16 aa, Homo sapiens
  CDR3 for beta chain variable domain of TCR clone 62980 (TRBV9, TRBJ2-7)
CASSAGPDRSPYEQYF

SEQ ID NO: 125961 - protein, 14 aa, Homo sapiens
  CDR3 for alpha chain variable domain of TCR clone 62981 (TRAV12-2, TRAJ17)
CAVLFKAAGNKLTF

SEQ ID NO: 125962 - protein, 15 aa, Homo sapiens
  CDR3 for beta chain variable domain of TCR clone 62981 (TRBV10-2, TRBJ2-6)
CASSEQGTGANVLTF

SEQ ID NO: 125963 - protein, 11 aa, Homo sapiens
  CDR3 for alpha chain variable domain of TCR clone 62982 (TRAV8-3, TRAJ15)
CAVGPGTALIF

SEQ ID NO: 125964 - protein, 18 aa, Homo sapiens
  CDR3 for beta chain variable domain of TCR clone 62982 (TRBV18, TRBJ2-3)
CASSYTSGAAGDTDTQYF

SEQ ID NO: 125965 - protein, 12 aa, Homo sapiens
  CDR3 for alpha chain variable domain of TCR clone 62983 (TRAV21, TRAJ11)
CAATSGYSTLTF

SEQ ID NO: 125966 - protein, 15 aa, Homo sapiens
  CDR3 for beta chain variable domain of TCR clone 62983 (TRBV25-1, TRBJ1-4)
CTSSPGDSTNEKLFF

SEQ ID NO: 125967 - protein, 15 aa, Homo sapiens
  CDR3 for alpha chain variable domain of TCR clone 62984 (TRAV13-1, TRAJ5)
CAASPRGHGQESTYF

SEQ ID NO: 125968 - protein, 17 aa, Homo sapiens
  CDR3 for beta chain variable domain of TCR clone 62984 (TRBV3-1, TRBJ2-2)
CASSQCRDKVDTGELFF

SEQ ID NO: 125969 - protein, 18 aa, Homo sapiens
  CDR3 for alpha chain variable domain of TCR clone 62985 (TRAV26-2, TRAJ45)
CILGVDKYSGGGADGLTF

SEQ ID NO: 125970 - protein, 16 aa, Homo sapiens
  CDR3 for beta chain variable domain of TCR clone 62985 (TRBV2, TRBJ1-4)
CASNLLQGATNEKLFF

SEQ ID NO: 125971 - protein, 13 aa, Homo sapiens
  CDR3 for alpha chain variable domain of TCR clone 62986 (TRAV8-6, TRAJ49)
CAVITNTGNQFYF

SEQ ID NO: 125972 - protein, 12 aa, Homo sapiens
  CDR3 for beta chain variable domain of TCR clone 62986 (TRBV11-2, TRBJ2-1)
CASSPGNNEQFF

SEQ ID NO: 125973 - protein, 14 aa, Homo sapiens
  CDR3 for alpha chain variable domain of TCR clone 62987 (TRAV12-2, TRAJ13)
CAVKKTGGYQKVTF

SEQ ID NO: 125974 - protein, 14 aa, Homo sapiens
  CDR3 for beta chain variable domain of TCR clone 62987 (TRBV20-1, TRBJ2-5)
CSALVPGYQETQYF

SEQ ID NO: 125975 - protein, 11 aa, Homo sapiens
  CDR3 for alpha chain variable domain of TCR clone 62988 (TRAV3, TRAJ21)
CSVGNFNKFYF

SEQ ID NO: 125976 - protein, 16 aa, Homo sapiens
  CDR3 for beta chain variable domain of TCR clone 62988 (TRBV19, TRBJ2-1)
CASSKAGPSSYNEQFF

SEQ ID NO: 125977 - protein, 14 aa, Homo sapiens
  CDR3 for alpha chain variable domain of TCR clone 62989 (TRAV12-2, TRAJ24)
YAVTPADSWGKLQF

SEQ ID NO: 125978 - protein, 13 aa, Homo sapiens
  CDR3 for beta chain variable domain of TCR clone 62989 (TRBV6-4, TRBJ1-5)
CASSADLNQPQHF

SEQ ID NO: 125979 - protein, 13 aa, Homo sapiens
  CDR3 for alpha chain variable domain of TCR clone 62990 (TRAV12-2, TRAJ17)
CRAFQSCSNKLTF

SEQ ID NO: 125980 - protein, 17 aa, Homo sapiens
  CDR3 for beta chain variable domain of TCR clone 62990 (TRBV20-1, TRBJ2-2)
CSASGSGQGGLTGELFF

SEQ ID NO: 125981 - protein, 15 aa, Homo sapiens
  CDR3 for alpha chain variable domain of TCR clone 62991 (TRAV35, TRAJ40)
CAGQPWDSGTYKYIF

SEQ ID NO: 125982 - protein, 12 aa, Homo sapiens
  CDR3 for beta chain variable domain of TCR clone 62991 (TRBV7-8, TRBJ2-7)
CASSLAGYEQYF

SEQ ID NO: 125983 - protein, 14 aa, Homo sapiens
  CDR3 for alpha chain variable domain of TCR clone 62992 (TRAV13-1, TRAJ44)
CAAKATGTASKLTF

SEQ ID NO: 125984 - protein, 17 aa, Homo sapiens
  CDR3 for beta chain variable domain of TCR clone 62992 (TRBV4-1, TRBJ2-7)
CASSRDPLGVRGGEQYF

SEQ ID NO: 125985 - protein, 14 aa, Homo sapiens
  CDR3 for alpha chain variable domain of TCR clone 62993 (TRAV17, TRAJ39)
CATDPVRAGNMLTF

SEQ ID NO: 125986 - protein, 15 aa, Homo sapiens
  CDR3 for beta chain variable domain of TCR clone 62993 (TRBV13, TRBJ1-5)
CASSFGQGGVKPQHF

SEQ ID NO: 125987 - protein, 12 aa, Homo sapiens
  CDR3 for alpha chain variable domain of TCR clone 62994 (TRAV17, TRAJ57)
CATAGGSEKLVF

SEQ ID NO: 125988 - protein, 12 aa, Homo sapiens
  CDR3 for beta chain variable domain of TCR clone 62994 (TRBV29-1, TRBJ2-2)
CSVDKYTGELFF

SEQ ID NO: 125989 - protein, 18 aa, Homo sapiens
  CDR3 for alpha chain variable domain of TCR clone 62995 (TRAV3, TRAJ42)
CAVRDEGTGGGSQGNLIL

SEQ ID NO: 125990 - protein, 16 aa, Homo sapiens
  CDR3 for beta chain variable domain of TCR clone 62995 (TRBV9, TRBJ1-2)
CASSVAKGRVDYGYTF

SEQ ID NO: 125991 - protein, 15 aa, Homo sapiens
  CDR3 for alpha chain variable domain of TCR clone 62996 (TRAV20, TRAJ50)
CAVRQMKTSYDKVVF

SEQ ID NO: 125992 - protein, 16 aa, Homo sapiens
  CDR3 for beta chain variable domain of TCR clone 62996 (TRBV15, TRBJ1-2)
CATSRGPRTGGGGYTF

SEQ ID NO: 125993 - protein, 13 aa, Homo sapiens
  CDR3 for alpha chain variable domain of TCR clone 62997 (TRAV9-2, TRAJ39)
CALQNNAGNMLIF

SEQ ID NO: 125994 - protein, 13 aa, Homo sapiens
  CDR3 for beta chain variable domain of TCR clone 62997 (TRBV3-1, TRBJ1-1)
CASSPGVITEAFF

SEQ ID NO: 125995 - protein, 13 aa, Homo sapiens
  CDR3 for alpha chain variable domain of TCR clone 62998 (TRAV13-2, TRAJ40)
CEEFTSGTYKYIF

SEQ ID NO: 125996 - protein, 14 aa, Homo sapiens
  CDR3 for beta chain variable domain of TCR clone 62998 (TRBV10-2, TRBJ1-5)
CASSSTGRNQPQHF

SEQ ID NO: 125997 - protein, 14 aa, Homo sapiens
  CDR3 for alpha chain variable domain of TCR clone 62999 (TRAV13-1, TRAJ44)
YAAKATGTASKLTF

SEQ ID NO: 125998 - protein, 14 aa, Homo sapiens
  CDR3 for beta chain variable domain of TCR clone 62999 (TRBV7-8, TRBJ2-3)
CASSLEAGTDTQYF

SEQ ID NO: 125999 - protein, 16 aa, Homo sapiens
  CDR3 for alpha chain variable domain of TCR clone 63000 (TRAV26-1, TRAJ53)
CIVRVAMGGSNYKLTF

SEQ ID NO: 126000 - protein, 16 aa, Homo sapiens
  CDR3 for beta chain variable domain of TCR clone 63000 (TRBV4-2, TRBJ2-3)
CASSQELAGDTDTQYF

SEQ ID NO: 126001 - protein, 17 aa, Homo sapiens
  CDR3 for alpha chain variable domain of TCR clone 63001 (TRAV13-1, TRAJ52)
CAASSGAGGTSYGKLTF

SEQ ID NO: 126002 - protein, 15 aa, Homo sapiens
  CDR3 for beta chain variable domain of TCR clone 63001 (TRBV2, TRBJ2-1)
CASSELAGSYNEQFC

SEQ ID NO: 126003 - protein, 12 aa, Homo sapiens
  CDR3 for alpha chain variable domain of TCR clone 63002 (TRAV13-1, TRAJ49)
CAARIRSNQFYF

SEQ ID NO: 126004 - protein, 14 aa, Homo sapiens
  CDR3 for beta chain variable domain of TCR clone 63002 (TRBV7-2, TRBJ2-1)
CASSPGLAGNEQFF

SEQ ID NO: 126005 - protein, 14 aa, Homo sapiens
  CDR3 for alpha chain variable domain of TCR clone 63003 (TRAV12-3, TRAJ12)
CAMSEVDGSYKLIF

SEQ ID NO: 126006 - protein, 12 aa, Homo sapiens
  CDR3 for beta chain variable domain of TCR clone 63003 (TRBV18, TRBJ1-4)
CASSPSREKLFF

SEQ ID NO: 126007 - protein, 15 aa, Homo sapiens
  CDR3 for alpha chain variable domain of TCR clone 63004 (TRAV20, TRAJ4)
CAVEGSSGGYNKLIF

SEQ ID NO: 126008 - protein, 14 aa, Homo sapiens
  CDR3 for beta chain variable domain of TCR clone 63004 (TRBV7-8, TRBJ2-7)
CASTLGGAIGEQYF

SEQ ID NO: 126009 - protein, 11 aa, Homo sapiens
  CDR3 for alpha chain variable domain of TCR clone 63005 (TRAV21, TRAJ48)
CAVDGNEKLTF

SEQ ID NO: 126010 - protein, 14 aa, Homo sapiens
  CDR3 for beta chain variable domain of TCR clone 63005 (TRBV6-6, TRBJ2-5)
CQQSRGGLEETQYF

SEQ ID NO: 126011 - protein, 15 aa, Homo sapiens
  CDR3 for alpha chain variable domain of TCR clone 63006 (TRAV8-3, TRAJ45)
CASSYSGGGADGLTF

SEQ ID NO: 126012 - protein, 13 aa, Homo sapiens
  CDR3 for beta chain variable domain of TCR clone 63006 (TRBV7-2, TRBJ2-5)
CASSQTSVETQYF

SEQ ID NO: 126013 - protein, 12 aa, Homo sapiens
  CDR3 for alpha chain variable domain of TCR clone 63007 (TRAV13-1, TRAJ21)
CAEKEGFNKFYF

SEQ ID NO: 126014 - protein, 14 aa, Homo sapiens
  CDR3 for beta chain variable domain of TCR clone 63007 (TRBV5-4, TRBJ1-1)
CASSLDSRRDEAFF

SEQ ID NO: 126015 - protein, 15 aa, Homo sapiens
  CDR3 for alpha chain variable domain of TCR clone 63008 (TRAV13-1, TRAJ32)
CAARIYGGATNKLIF

SEQ ID NO: 126016 - protein, 14 aa, Homo sapiens
  CDR3 for beta chain variable domain of TCR clone 63008 (TRBV7-9, TRBJ2-1)
CASSLASGSNEQFF

SEQ ID NO: 126017 - protein, 11 aa, Homo sapiens
  CDR3 for alpha chain variable domain of TCR clone 63009 (TRAV23/DV6, TRAJ49)
CAVAPVTGSIL

SEQ ID NO: 126018 - protein, 13 aa, Homo sapiens
  CDR3 for beta chain variable domain of TCR clone 63009 (TRBV6-1, TRBJ1-1)
CASSRQGNTEAFF

SEQ ID NO: 126019 - protein, 12 aa, Homo sapiens
  CDR3 for alpha chain variable domain of TCR clone 63010 (TRAV17, TRAJ39)
CATGAAGNMLTF

SEQ ID NO: 126020 - protein, 13 aa, Homo sapiens
  CDR3 for beta chain variable domain of TCR clone 63010 (TRBV7-9, TRBJ1-2)
CASSLKQNYGYTF

SEQ ID NO: 126021 - protein, 11 aa, Homo sapiens
  CDR3 for alpha chain variable domain of TCR clone 63011 (TRAV16, TRAJ20)
CALSEGFKAVL

SEQ ID NO: 126022 - protein, 13 aa, Homo sapiens
  CDR3 for beta chain variable domain of TCR clone 63011 (TRBV7-3, TRBJ2-1)
CASSLDSYNEQFF

SEQ ID NO: 126023 - protein, 13 aa, Homo sapiens
  CDR3 for alpha chain variable domain of TCR clone 63012 (TRAV8-6, TRAJ49)
CAVITNPGNQFYF

SEQ ID NO: 126024 - protein, 14 aa, Homo sapiens
  CDR3 for beta chain variable domain of TCR clone 63012 (TRBV5-1, TRBJ2-7)
CASSRGESLYEQYF

SEQ ID NO: 126025 - protein, 16 aa, Homo sapiens
  CDR3 for alpha chain variable domain of TCR clone 63013 (TRAV27, TRAJ13)
CAGAKSDSGGYQKVTF

SEQ ID NO: 126026 - protein, 15 aa, Homo sapiens
  CDR3 for beta chain variable domain of TCR clone 63013 (TRBV7-9, TRBJ1-5)
CASSQGHQPNQPQHF

SEQ ID NO: 126027 - protein, 14 aa, Homo sapiens
  CDR3 for alpha chain variable domain of TCR clone 63014 (TRAV13-2, TRAJ26)
CAENLGSYGQNFVF

SEQ ID NO: 126028 - protein, 16 aa, Homo sapiens
  CDR3 for beta chain variable domain of TCR clone 63014 (TRBV12-5, TRBJ2-5)
CASGPRTSGNQETQYF

SEQ ID NO: 126029 - protein, 16 aa, Homo sapiens
  CDR3 for alpha chain variable domain of TCR clone 63015 (TRAV30, TRAJ24)
CGTEIVDADSWGKFQF

SEQ ID NO: 126030 - protein, 16 aa, Homo sapiens
  CDR3 for beta chain variable domain of TCR clone 63015 (TRBV2, TRBJ2-5)
CASSETQGVGEETQYF

SEQ ID NO: 126031 - protein, 15 aa, Homo sapiens
  CDR3 for alpha chain variable domain of TCR clone 63016 (TRAV3, TRAJ4)
CAVRDGTGGYNKLIF

SEQ ID NO: 126032 - protein, 16 aa, Homo sapiens
  CDR3 for beta chain variable domain of TCR clone 63016 (TRBV27, TRBJ2-2)
CASSSSGVSNPGELFF

SEQ ID NO: 126033 - protein, 16 aa, Homo sapiens
  CDR3 for alpha chain variable domain of TCR clone 63017 (TRAV38-1, TRAJ45)
CAFMKGSGGGADGLTF

SEQ ID NO: 126034 - protein, 15 aa, Homo sapiens
  CDR3 for beta chain variable domain of TCR clone 63017 (TRBV20-1, TRBJ2-7)
RSAREGRDSLYEQYF

SEQ ID NO: 126035 - protein, 16 aa, Homo sapiens
  CDR3 for alpha chain variable domain of TCR clone 63018 (TRAV12-1, TRAJ43)
CVVNPHRFGAGTRLTV

SEQ ID NO: 126036 - protein, 13 aa, Homo sapiens
  CDR3 for beta chain variable domain of TCR clone 63018 (TRBV12-4, TRBJ1-2)
CASSSGPNYRYTF

SEQ ID NO: 126037 - protein, 13 aa, Homo sapiens
  CDR3 for alpha chain variable domain of TCR clone 63019 (TRAV21, TRAJ37)
CAVSSGKTGKLIF

SEQ ID NO: 126038 - protein, 17 aa, Homo sapiens
  CDR3 for beta chain variable domain of TCR clone 63019 (TRBV5-1, TRBJ2-5)
CASSLLGLAANQETQYF

SEQ ID NO: 126039 - protein, 13 aa, Homo sapiens
  CDR3 for alpha chain variable domain of TCR clone 63020 (TRAV13-2, TRAJ48)
CAEMDFGNEKLTF

SEQ ID NO: 126040 - protein, 15 aa, Homo sapiens
  CDR3 for beta chain variable domain of TCR clone 63020 (TRBV19, TRBJ2-7)
CASSPAGSGEALRYF

SEQ ID NO: 126041 - protein, 14 aa, Homo sapiens
  CDR3 for alpha chain variable domain of TCR clone 63021 (TRAV12-3, TRAJ10)
SHLPLTGGGNKLTF

SEQ ID NO: 126042 - protein, 16 aa, Homo sapiens
  CDR3 for beta chain variable domain of TCR clone 63021 (TRBV5-1, TRBJ2-1)
CASSLEGRGLYNEQFF

SEQ ID NO: 126043 - protein, 23 aa, Homo sapiens
  CDR3 for alpha chain variable domain of TCR clone 63022 (TRAV8-4, TRAJ38)
CARLNAGNNHIQNPDPAAYQLRD

SEQ ID NO: 126044 - protein, 14 aa, Homo sapiens
  CDR3 for beta chain variable domain of TCR clone 63022 (TRBV7-8, TRBJ2-3)
CASSLEAGTDTQYF

SEQ ID NO: 126045 - protein, 15 aa, Homo sapiens
  CDR3 for alpha chain variable domain of TCR clone 63023 (TRAV26-1, TRAJ29)
CIVRVEGSGNTPLVF

SEQ ID NO: 126046 - protein, 16 aa, Homo sapiens
  CDR3 for beta chain variable domain of TCR clone 63023 (TRBV2, TRBJ2-1)
CASSVGGSLSYNEQFF

SEQ ID NO: 126047 - protein, 19 aa, Homo sapiens
  CDR3 for alpha chain variable domain of TCR clone 63024 (TRAV26-1, TRAJ52)
CIVRAHRNAGGTSYVKLTF

SEQ ID NO: 126048 - protein, 15 aa, Homo sapiens
  CDR3 for beta chain variable domain of TCR clone 63024 (TRBV29-1, TRBJ2-1)
CSGRDRKSSYNEQFF

SEQ ID NO: 126049 - protein, 13 aa, Homo sapiens
  CDR3 for alpha chain variable domain of TCR clone 63025 (TRAV12-2, TRAJ20)
CAVYHSNDYKLSF

SEQ ID NO: 126050 - protein, 15 aa, Homo sapiens
  CDR3 for beta chain variable domain of TCR clone 63025 (TRBV18, TRBJ1-2)
CASSPGNGLGYGYTF

SEQ ID NO: 126051 - protein, 12 aa, Homo sapiens
  CDR3 for alpha chain variable domain of TCR clone 63026 (TRAV12-1, TRAJ40)
CVFYSGTYKSIF

SEQ ID NO: 126052 - protein, 18 aa, Homo sapiens
  CDR3 for beta chain variable domain of TCR clone 63026 (TRBV12-4, TRBJ2-2)
CASSLVAGTRGRTGELFF

SEQ ID NO: 126053 - protein, 16 aa, Homo sapiens
  CDR3 for alpha chain variable domain of TCR clone 63027 (TRAV8-3, TRAJ44)
CAVGASNTGTASELTF

SEQ ID NO: 126054 - protein, 15 aa, Homo sapiens
  CDR3 for beta chain variable domain of TCR clone 63027 (TRBV27, TRBJ1-5)
CASTFNRGSNQPQHF

SEQ ID NO: 126055 - protein, 13 aa, Homo sapiens
  CDR3 for alpha chain variable domain of TCR clone 63028 (TRAV8-6, TRAJ21)
CAVSPSSLNKFYF

SEQ ID NO: 126056 - protein, 14 aa, Homo sapiens
  CDR3 for beta chain variable domain of TCR clone 63028 (TRBV7-9, TRBJ2-5)
CASSLDTEQETQYF

SEQ ID NO: 126057 - protein, 15 aa, Homo sapiens
  CDR3 for alpha chain variable domain of TCR clone 63029 (TRAV12-2, TRAJ53)
CAVNGGGGSNYKLTF

SEQ ID NO: 126058 - protein, 17 aa, Homo sapiens
  CDR3 for beta chain variable domain of TCR clone 63029 (TRBV7-3, TRBJ2-3)
RASSFMKRMRGADTQYF

SEQ ID NO: 126059 - protein, 14 aa, Homo sapiens
  CDR3 for alpha chain variable domain of TCR clone 63030 (TRAV8-2, TRAJ4)
CVVSPYGGYNKLIF

SEQ ID NO: 126060 - protein, 15 aa, Homo sapiens
  CDR3 for beta chain variable domain of TCR clone 63030 (TRBV4-1, TRBJ1-4)
CASSDTGGTNEKLFF

SEQ ID NO: 126061 - protein, 17 aa, Homo sapiens
  CDR3 for alpha chain variable domain of TCR clone 63031 (TRAV23/DV6, TRAJ57)
CAASSTLSQGGSEKLVF

SEQ ID NO: 126062 - protein, 14 aa, Homo sapiens
  CDR3 for beta chain variable domain of TCR clone 63031 (TRBV25-1, TRBJ1-1)
CASTHLGGNTEAFF

SEQ ID NO: 126063 - protein, 16 aa, Homo sapiens
  CDR3 for alpha chain variable domain of TCR clone 63032 (TRAV35, TRAJ42)
GRMERYYGGSQGNLIF

SEQ ID NO: 126064 - protein, 15 aa, Homo sapiens
  CDR3 for beta chain variable domain of TCR clone 63032 (TRBV6-1, TRBJ2-7)
CVSSDWDKPNYEQYF

SEQ ID NO: 126065 - protein, 13 aa, Homo sapiens
  CDR3 for alpha chain variable domain of TCR clone 63033 (TRAV2, TRAJ40)
CAVVTSGTYKYIF

SEQ ID NO: 126066 - protein, 16 aa, Homo sapiens
  CDR3 for beta chain variable domain of TCR clone 63033 (TRBV7-3, TRBJ2-1)
CASSLEGYRYYNEQFF

SEQ ID NO: 126067 - protein, 14 aa, Homo sapiens
  CDR3 for alpha chain variable domain of TCR clone 63034 (TRAV19, TRAJ5)
CALKKDTGRRALTF

SEQ ID NO: 126068 - protein, 15 aa, Homo sapiens
  CDR3 for beta chain variable domain of TCR clone 63034 (TRBV2, TRBJ2-5)
CASSGAGTRQETQYF

SEQ ID NO: 126069 - protein, 14 aa, Homo sapiens
  CDR3 for alpha chain variable domain of TCR clone 63035 (TRAV12-2, TRAJ13)
CAVKKTGGYQKVTF

SEQ ID NO: 126070 - protein, 16 aa, Homo sapiens
  CDR3 for beta chain variable domain of TCR clone 63035 (TRBV13, TRBJ2-2)
CASSEVFGANTGELFF

SEQ ID NO: 126071 - protein, 16 aa, Homo sapiens
  CDR3 for alpha chain variable domain of TCR clone 63036 (TRAV14/DV4, TRAJ20)
CAMREGRSRDDYKLSF

SEQ ID NO: 126072 - protein, 12 aa, Homo sapiens
  CDR3 for beta chain variable domain of TCR clone 63036 (TRBV19, TRBJ2-7)
CASTSVGSEQYF

SEQ ID NO: 126073 - protein, 13 aa, Homo sapiens
  CDR3 for alpha chain variable domain of TCR clone 63037 (TRAV29/DV5, TRAJ31)
CAASQNNNARLMF

SEQ ID NO: 126074 - protein, 14 aa, Homo sapiens
  CDR3 for beta chain variable domain of TCR clone 63037 (TRBV25-1, TRBJ1-1)
CASTHLGGNTEAFF

SEQ ID NO: 126075 - protein, 11 aa, Homo sapiens
  CDR3 for alpha chain variable domain of TCR clone 63038 (TRAV16, TRAJ33)
CALHSNYQLIW

SEQ ID NO: 126076 - protein, 14 aa, Homo sapiens
  CDR3 for beta chain variable domain of TCR clone 63038 (TRBV12-5, TRBJ2-5)
CASGSRTHQETQYF

SEQ ID NO: 126077 - protein, 11 aa, Homo sapiens
  CDR3 for alpha chain variable domain of TCR clone 63039 (TRAV13-1, TRAJ6)
CATLGSYVPTF

SEQ ID NO: 126078 - protein, 13 aa, Homo sapiens
  CDR3 for beta chain variable domain of TCR clone 63039 (TRBV6-6, TRBJ2-1)
CASSLHQGDEQFF

SEQ ID NO: 126079 - protein, 15 aa, Homo sapiens
  CDR3 for alpha chain variable domain of TCR clone 63040 (TRAV17, TRAJ23)
CATDAEDNQGGKLIF

SEQ ID NO: 126080 - protein, 12 aa, Homo sapiens
  CDR3 for beta chain variable domain of TCR clone 63040 (TRBV2, TRBJ2-1)
CANREGYNEQFF

SEQ ID NO: 126081 - protein, 15 aa, Homo sapiens
  CDR3 for alpha chain variable domain of TCR clone 63041 (TRAV21, TRAJ53)
CATLDSGGSNYKLTF

SEQ ID NO: 126082 - protein, 15 aa, Homo sapiens
  CDR3 for beta chain variable domain of TCR clone 63041 (TRBV7-6, TRBJ1-5)
CASSQSSGINQPQHF

SEQ ID NO: 126083 - protein, 14 aa, Homo sapiens
  CDR3 for alpha chain variable domain of TCR clone 63042 (TRAV2, TRAJ37)
SAVDFTSNTGKLIF

SEQ ID NO: 126084 - protein, 15 aa, Homo sapiens
  CDR3 for beta chain variable domain of TCR clone 63042 (TRBV20-1, TRBJ1-1)
CSASRGVTGNTEAFF

SEQ ID NO: 126085 - protein, 16 aa, Homo sapiens
  CDR3 for alpha chain variable domain of TCR clone 63043 (TRAV3, TRAJ42)
CAVRDIEGGSQGNRIF

SEQ ID NO: 126086 - protein, 15 aa, Homo sapiens
  CDR3 for beta chain variable domain of TCR clone 63043 (TRBV9, TRBJ2-2)
CASSDFAGASGELFF

SEQ ID NO: 126087 - protein, 19 aa, Homo sapiens
  CDR3 for alpha chain variable domain of TCR clone 63044 (TRAV26-1, TRAJ52)
CIVIAHRNAGGTSYGKLTF

SEQ ID NO: 126088 - protein, 15 aa, Homo sapiens
  CDR3 for beta chain variable domain of TCR clone 63044 (TRBV12-4, TRBJ2-5)
CASSPPTGLQETQYF

SEQ ID NO: 126089 - protein, 15 aa, Homo sapiens
  CDR3 for alpha chain variable domain of TCR clone 63045 (TRAV17, TRAJ57)
CATGPSQGGSEKLVF

SEQ ID NO: 126090 - protein, 14 aa, Homo sapiens
  CDR3 for beta chain variable domain of TCR clone 63045 (TRBV28, TRBJ1-2)
CASRIQGANYGYTF

SEQ ID NO: 126091 - protein, 12 aa, Homo sapiens
  CDR3 for alpha chain variable domain of TCR clone 63046 (TRAV8-6, TRAJ36)
CAVSDWLGQTTS

SEQ ID NO: 126092 - protein, 14 aa, Homo sapiens
  CDR3 for beta chain variable domain of TCR clone 63046 (TRBV7-6, TRBJ2-3)
CASSLGTVTDTQYF

SEQ ID NO: 126093 - protein, 13 aa, Homo sapiens
  CDR3 for alpha chain variable domain of TCR clone 63047 (TRAV2, TRAJ21)
CAVEDLNFNKFYF

SEQ ID NO: 126094 - protein, 15 aa, Homo sapiens
  CDR3 for beta chain variable domain of TCR clone 63047 (TRBV28, TRBJ2-5)
CANSPGQGSIETQYF

SEQ ID NO: 126095 - protein, 12 aa, Homo sapiens
  CDR3 for alpha chain variable domain of TCR clone 63048 (TRAV8-3, TRAJ20)
CAVGANDYKLTF

SEQ ID NO: 126096 - protein, 16 aa, Homo sapiens
  CDR3 for beta chain variable domain of TCR clone 63048 (TRBV19, TRBJ2-2)
CASRSPGTGATGELFF

SEQ ID NO: 126097 - protein, 12 aa, Homo sapiens
  CDR3 for alpha chain variable domain of TCR clone 63049 (TRAV3, TRAJ20)
CAVRDGDYKLSF

SEQ ID NO: 126098 - protein, 15 aa, Homo sapiens
  CDR3 for beta chain variable domain of TCR clone 63049 (TRBV7-2, TRBJ2-7)
CASSLALGSAYEQYF

SEQ ID NO: 126099 - protein, 19 aa, Homo sapiens
  CDR3 for alpha chain variable domain of TCR clone 63050 (TRAV3, TRAJ6)
CAVRDRNPSRSGGSYLPTF

SEQ ID NO: 126100 - protein, 15 aa, Homo sapiens
  CDR3 for beta chain variable domain of TCR clone 63050 (TRBV18, TRBJ2-7)
CASSPTFMDSYEQYF

SEQ ID NO: 126101 - protein, 12 aa, Homo sapiens
  CDR3 for alpha chain variable domain of TCR clone 63051 (TRAV8-3, TRAJ26)
CAGANYGQNFVF

SEQ ID NO: 126102 - protein, 15 aa, Homo sapiens
  CDR3 for beta chain variable domain of TCR clone 63051 (TRBV9, TRBJ2-1)
CASSLAGSSYNEQFF

SEQ ID NO: 126103 - protein, 23 aa, Homo sapiens
  CDR3 for alpha chain variable domain of TCR clone 63052 (TRAV2, TRAJ38)
CAVEDFPNAGNNHIQNPDPAVYH

SEQ ID NO: 126104 - protein, 14 aa, Homo sapiens
  CDR3 for beta chain variable domain of TCR clone 63052 (TRBV29-1, TRBJ1-4)
CSVSGRQGGEKLFF

SEQ ID NO: 126105 - protein, 12 aa, Homo sapiens
  CDR3 for alpha chain variable domain of TCR clone 63053 (TRAV13-2, TRAJ23)
CAERHRGGKLIF

SEQ ID NO: 126106 - protein, 15 aa, Homo sapiens
  CDR3 for beta chain variable domain of TCR clone 63053 (TRBV20-1, TRBJ2-7)
CSARDRVFGMDEQYF

SEQ ID NO: 126107 - protein, 14 aa, Homo sapiens
  CDR3 for alpha chain variable domain of TCR clone 63054 (TRAV12-2, TRAJ13)
CAVKKTGGYQKVTF

SEQ ID NO: 126108 - protein, 18 aa, Homo sapiens
  CDR3 for beta chain variable domain of TCR clone 63054 (TRBV18, TRBJ1-3)
CASSPRGGAGPSGNTIYF

SEQ ID NO: 126109 - protein, 14 aa, Homo sapiens
  CDR3 for alpha chain variable domain of TCR clone 63055 (TRAV1-1, TRAJ34)
RAVSPSYNTDKLIF

SEQ ID NO: 126110 - protein, 15 aa, Homo sapiens
  CDR3 for beta chain variable domain of TCR clone 63055 (TRBV6-3, TRBJ2-7)
CASSSPGTVFYEQYF

SEQ ID NO: 126111 - protein, 16 aa, Homo sapiens
  CDR3 for alpha chain variable domain of TCR clone 63056 (TRAV16, TRAJ4)
CALSRMFSSGYNKLIF

SEQ ID NO: 126112 - protein, 16 aa, Homo sapiens
  CDR3 for beta chain variable domain of TCR clone 63056 (TRBV24-1, TRBJ2-3)
CATSDPGTGATDTQYF

SEQ ID NO: 126113 - protein, 12 aa, Homo sapiens
  CDR3 for alpha chain variable domain of TCR clone 63057 (TRAV23/DV6, TRAJ30)
CAASKGVDKIIF

SEQ ID NO: 126114 - protein, 15 aa, Homo sapiens
  CDR3 for beta chain variable domain of TCR clone 63057 (TRBV12-4, TRBJ2-1)
CASRPTRTGYNEQFF

SEQ ID NO: 126115 - protein, 16 aa, Homo sapiens
  CDR3 for alpha chain variable domain of TCR clone 63058 (TRAV3, TRAJ10)
CAVRDMRAGGGNKLTF

SEQ ID NO: 126116 - protein, 15 aa, Homo sapiens
  CDR3 for beta chain variable domain of TCR clone 63058 (TRBV4-1, TRBJ1-4)
CASSDTGGTNEKLFF

SEQ ID NO: 126117 - protein, 14 aa, Homo sapiens
  CDR3 for alpha chain variable domain of TCR clone 63059 (TRAV38-1, TRAJ45)
CASHSGGGADGLTF

SEQ ID NO: 126118 - protein, 13 aa, Homo sapiens
  CDR3 for beta chain variable domain of TCR clone 63059 (TRBV10-3, TRBJ1-2)
CAISERYSYGYTF

SEQ ID NO: 126119 - protein, 12 aa, Homo sapiens
  CDR3 for alpha chain variable domain of TCR clone 63060 (TRAV3, TRAJ7)
CADLLWEQQTRF

SEQ ID NO: 126120 - protein, 13 aa, Homo sapiens
  CDR3 for beta chain variable domain of TCR clone 63060 (TRBV7-3, TRBJ2-5)
CASSFRGGETQYC

SEQ ID NO: 126121 - protein, 13 aa, Homo sapiens
  CDR3 for alpha chain variable domain of TCR clone 63061 (TRAV21, TRAJ27)
CAARPGNAGKSTF

SEQ ID NO: 126122 - protein, 18 aa, Homo sapiens
  CDR3 for beta chain variable domain of TCR clone 63061 (TRBV6-5, TRBJ2-5)
CASSYSQAGGSYQETQYF

SEQ ID NO: 126123 - protein, 15 aa, Homo sapiens
  CDR3 for alpha chain variable domain of TCR clone 63062 (TRAV12-1, TRAJ44)
CVVFVNTGTASKLPF

SEQ ID NO: 126124 - protein, 17 aa, Homo sapiens
  CDR3 for beta chain variable domain of TCR clone 63062 (TRBV7-8, TRBJ2-6)
CASSAGTGGAGANVLTF

SEQ ID NO: 126125 - protein, 15 aa, Homo sapiens
  CDR3 for alpha chain variable domain of TCR clone 63063 (TRAV12-2, TRAJ53)
CAVNGGGGSNYKLTF

SEQ ID NO: 126126 - protein, 12 aa, Homo sapiens
  CDR3 for beta chain variable domain of TCR clone 63063 (TRBV27, TRBJ1-6)
CTIKLFQGPLHF

SEQ ID NO: 126127 - protein, 15 aa, Homo sapiens
  CDR3 for alpha chain variable domain of TCR clone 63064 (TRAV17, TRAJ10)
CATVLLTGGGNKLTF

SEQ ID NO: 126128 - protein, 17 aa, Homo sapiens
  CDR3 for beta chain variable domain of TCR clone 63064 (TRBV4-2, TRBJ1-1)
CASTQFGGGSGNTEAFF

SEQ ID NO: 126129 - protein, 15 aa, Homo sapiens
  CDR3 for alpha chain variable domain of TCR clone 63065 (TRAV3, TRAJ45)
CAVRTPWGCADGLTF

SEQ ID NO: 126130 - protein, 16 aa, Homo sapiens
  CDR3 for beta chain variable domain of TCR clone 63065 (TRBV6-1, TRBJ2-2)
CASSFGQGANTGELFF

SEQ ID NO: 126131 - protein, 13 aa, Homo sapiens
  CDR3 for alpha chain variable domain of TCR clone 63066 (TRAV20, TRAJ37)
CAECSSNTGKLIF

SEQ ID NO: 126132 - protein, 11 aa, Homo sapiens
  CDR3 for beta chain variable domain of TCR clone 63066 (TRBV12-4, TRBJ2-3)
CASTATDTQYF

SEQ ID NO: 126133 - protein, 16 aa, Homo sapiens
  CDR3 for alpha chain variable domain of TCR clone 63067 (TRAV30, TRAJ24)
CGTEIVDADSWGKFQF

SEQ ID NO: 126134 - protein, 14 aa, Homo sapiens
  CDR3 for beta chain variable domain of TCR clone 63067 (TRBV7-2, TRBJ2-7)
CAGSPKTSFYEQYF

SEQ ID NO: 126135 - protein, 16 aa, Homo sapiens
  CDR3 for alpha chain variable domain of TCR clone 63068 (TRAV3, TRAJ6)
CAVRRTPSGGSYIPTF

SEQ ID NO: 126136 - protein, 15 aa, Homo sapiens
  CDR3 for beta chain variable domain of TCR clone 63068 (TRBV20-1, TRBJ1-5)
CSARSGPSMNQPQHF

SEQ ID NO: 126137 - protein, 13 aa, Homo sapiens
  CDR3 for alpha chain variable domain of TCR clone 63069 (TRAV21, TRAJ57)
CAVIEGGSEKLVF

SEQ ID NO: 126138 - protein, 15 aa, Homo sapiens
  CDR3 for beta chain variable domain of TCR clone 63069 (TRBV7-9, TRBJ1-6)
CASSSPGRGNSPLHF

SEQ ID NO: 126139 - protein, 16 aa, Homo sapiens
  CDR3 for alpha chain variable domain of TCR clone 63070 (TRAV16, TRAJ42)
CARKMNYGGSQGKLIF

SEQ ID NO: 126140 - protein, 13 aa, Homo sapiens
  CDR3 for beta chain variable domain of TCR clone 63070 (TRBV20-1, TRBJ2-7)
CSASPPSSYEQYF

SEQ ID NO: 126141 - protein, 19 aa, Homo sapiens
  CDR3 for alpha chain variable domain of TCR clone 63071 (TRAV2, TRAJ20)
ILQVREADAAVYRDCKLRF

SEQ ID NO: 126142 - protein, 12 aa, Homo sapiens
  CDR3 for beta chain variable domain of TCR clone 63071 (TRBV11-2, TRBJ2-2)
CASSLGGGELFF

SEQ ID NO: 126143 - protein, 18 aa, Homo sapiens
  CDR3 for alpha chain variable domain of TCR clone 63072 (TRAV21, TRAJ52)
FAVRPSPAGGTSYGKLTF

SEQ ID NO: 126144 - protein, 14 aa, Homo sapiens
  CDR3 for beta chain variable domain of TCR clone 63072 (TRBV4-1, TRBJ2-2)
CASSQAVNTGELFF

SEQ ID NO: 126145 - protein, 17 aa, Homo sapiens
  CDR3 for alpha chain variable domain of TCR clone 63073 (TRAV8-3, TRAJ34)
CAIPGRLIFGTGTRLQV

SEQ ID NO: 126146 - protein, 12 aa, Homo sapiens
  CDR3 for beta chain variable domain of TCR clone 63073 (TRBV11-2, TRBJ2-2)
CASSLGGGELFF

SEQ ID NO: 126147 - protein, 11 aa, Homo sapiens
  CDR3 for alpha chain variable domain of TCR clone 63074 (TRAV12-2, TRAJ23)
RAYNQGGKLIF

SEQ ID NO: 126148 - protein, 14 aa, Homo sapiens
  CDR3 for beta chain variable domain of TCR clone 63074 (TRBV18, TRBJ2-5)
CASSPGVSQETQYF

SEQ ID NO: 126149 - protein, 15 aa, Homo sapiens
  CDR3 for alpha chain variable domain of TCR clone 63075 (TRAV2, TRAJ24)
CAVEALTDSWGKFQF

SEQ ID NO: 126150 - protein, 14 aa, Homo sapiens
  CDR3 for beta chain variable domain of TCR clone 63075 (TRBV19, TRBJ2-1)
CASSMGSGRRSSSS

SEQ ID NO: 126151 - protein, 12 aa, Homo sapiens
  CDR3 for alpha chain variable domain of TCR clone 63076 (TRAV1-2, TRAJ17)
CAVRAAGNKLTF

SEQ ID NO: 126152 - protein, 16 aa, Homo sapiens
  CDR3 for beta chain variable domain of TCR clone 63076 (TRBV20-1, TRBJ2-1)
CSASGLAGSYSDEQFF

SEQ ID NO: 126153 - protein, 13 aa, Homo sapiens
  CDR3 for alpha chain variable domain of TCR clone 63077 (TRAV8-1, TRAJ15)
CAVENQAGTALIF

SEQ ID NO: 126154 - protein, 15 aa, Homo sapiens
  CDR3 for beta chain variable domain of TCR clone 63077 (TRBV7-3, TRBJ2-7)
CASSLTPTGYDEQYF

SEQ ID NO: 126155 - protein, 16 aa, Homo sapiens
  CDR3 for alpha chain variable domain of TCR clone 63078 (TRAV12-2, TRAJ32)
CAANLGQGGATNKLIF

SEQ ID NO: 126156 - protein, 13 aa, Homo sapiens
  CDR3 for beta chain variable domain of TCR clone 63078 (TRBV9, TRBJ2-2)
CASSPRPAGELFF

SEQ ID NO: 126157 - protein, 14 aa, Homo sapiens
  CDR3 for alpha chain variable domain of TCR clone 63079 (TRAV1-2, TRAJ8)
CAVREDTDFQKLVF

SEQ ID NO: 126158 - protein, 14 aa, Homo sapiens
  CDR3 for beta chain variable domain of TCR clone 63079 (TRBV7-2, TRBJ2-7)
CASSPKTSFYEQYF

SEQ ID NO: 126159 - protein, 14 aa, Homo sapiens
  CDR3 for alpha chain variable domain of TCR clone 63080 (TRAV1-2, TRAJ8)
CAVREDTGFQKLVF

SEQ ID NO: 126160 - protein, 13 aa, Homo sapiens
  CDR3 for beta chain variable domain of TCR clone 63080 (TRBV27, TRBJ2-7)
CTSSLTTGYEQYF

SEQ ID NO: 126161 - protein, 12 aa, Homo sapiens
  CDR3 for alpha chain variable domain of TCR clone 63081 (TRAV1-1, TRAJ8)
CAGGTGFQKLVF

SEQ ID NO: 126162 - protein, 15 aa, Homo sapiens
  CDR3 for beta chain variable domain of TCR clone 63081 (TRBV7-9, TRBJ1-4)
CASSRTGGFNEKMFF

SEQ ID NO: 126163 - protein, 15 aa, Homo sapiens
  CDR3 for alpha chain variable domain of TCR clone 63082 (TRAV27, TRAJ50)
CAGRERGTSYDKVIF

SEQ ID NO: 126164 - protein, 16 aa, Homo sapiens
  CDR3 for beta chain variable domain of TCR clone 63082 (TRBV10-3, TRBJ1-5)
CAISDQVGAPNQPQHL

SEQ ID NO: 126165 - protein, 10 aa, Homo sapiens
  CDR3 for alpha chain variable domain of TCR clone 63083 (TRAV1-2, TRAJ20)
CVPNDHKLSF

SEQ ID NO: 126166 - protein, 14 aa, Homo sapiens
  CDR3 for beta chain variable domain of TCR clone 63083 (TRBV12-5, TRBJ2-5)
CASGSRTHQETQYF

SEQ ID NO: 126167 - protein, 13 aa, Homo sapiens
  CDR3 for alpha chain variable domain of TCR clone 63084 (TRAV8-3, TRAJ44)
CAVVPGTASKLTF

SEQ ID NO: 126168 - protein, 13 aa, Homo sapiens
  CDR3 for beta chain variable domain of TCR clone 63084 (TRBV10-3, TRBJ1-2)
CAISERDSHGYTF

SEQ ID NO: 126169 - protein, 12 aa, Homo sapiens
  CDR3 for alpha chain variable domain of TCR clone 63085 (TRAV12-1, TRAJ40)
CVVYSGTYKYIF

SEQ ID NO: 126170 - protein, 14 aa, Homo sapiens
  CDR3 for beta chain variable domain of TCR clone 63085 (TRBV7-9, TRBJ2-5)
CASSVDTAQETQYF

SEQ ID NO: 126171 - protein, 11 aa, Homo sapiens
  CDR3 for alpha chain variable domain of TCR clone 63086 (TRAV13-1, TRAJ23)
QGYNQGGKLIF

SEQ ID NO: 126172 - protein, 15 aa, Homo sapiens
  CDR3 for beta chain variable domain of TCR clone 63086 (TRBV2, TRBJ2-1)
CASSDRSSGAREQFF

SEQ ID NO: 126173 - protein, 14 aa, Homo sapiens
  CDR3 for alpha chain variable domain of TCR clone 63087 (TRAV12-3, TRAJ12)
CAMSALDSSYKLIF

SEQ ID NO: 126174 - protein, 15 aa, Homo sapiens
  CDR3 for beta chain variable domain of TCR clone 63087 (TRBV7-9, TRBJ1-5)
CASSQGHQPNQPQHF

SEQ ID NO: 126175 - protein, 16 aa, Homo sapiens
  CDR3 for alpha chain variable domain of TCR clone 63088 (TRAV16, TRAJ21)
CVCGWATTSTNFTLDL

SEQ ID NO: 126176 - protein, 15 aa, Homo sapiens
  CDR3 for beta chain variable domain of TCR clone 63088 (TRBV19, TRBJ2-1)
CASSIQATSYNEQFF

SEQ ID NO: 126177 - protein, 16 aa, Homo sapiens
  CDR3 for alpha chain variable domain of TCR clone 63089 (TRAV16, TRAJ52)
CALSAAGGTSYGKRTF

SEQ ID NO: 126178 - protein, 12 aa, Homo sapiens
  CDR3 for beta chain variable domain of TCR clone 63089 (TRBV12-4, TRBJ1-3)
CASSFSGNTIYF

SEQ ID NO: 126179 - protein, 14 aa, Homo sapiens
  CDR3 for alpha chain variable domain of TCR clone 63090 (TRAV38-1, TRAJ45)
CAYYSGGGADGLTF

SEQ ID NO: 126180 - protein, 20 aa, Homo sapiens
  CDR3 for beta chain variable domain of TCR clone 63090 (TRBV28, TRBJ2-1)
CASTPIGRSPGLSGGNEQFF

SEQ ID NO: 126181 - protein, 13 aa, Homo sapiens
  CDR3 for alpha chain variable domain of TCR clone 63091 (TRAV13-1, TRAJ43)
CAASLSNNNDMRF

SEQ ID NO: 126182 - protein, 14 aa, Homo sapiens
  CDR3 for beta chain variable domain of TCR clone 63091 (TRBV5-1, TRBJ2-5)
CANSLAGKQETQYF

SEQ ID NO: 126183 - protein, 15 aa, Homo sapiens
  CDR3 for alpha chain variable domain of TCR clone 63092 (TRAV26-1, TRAJ44)
CIARVPFGTASKLTF

SEQ ID NO: 126184 - protein, 17 aa, Homo sapiens
  CDR3 for beta chain variable domain of TCR clone 63092 (TRBV24-1, TRBJ2-4)
CATSDAEARGVRNIQYL

SEQ ID NO: 126185 - protein, 16 aa, Homo sapiens
  CDR3 for alpha chain variable domain of TCR clone 63093 (TRAV12-3, TRAJ53)
CAMSPGSGGSNYKLIF

SEQ ID NO: 126186 - protein, 15 aa, Homo sapiens
  CDR3 for beta chain variable domain of TCR clone 63093 (TRBV10-3, TRBJ1-1)
CAISDRGGMNTEAFF

SEQ ID NO: 126187 - protein, 15 aa, Homo sapiens
  CDR3 for alpha chain variable domain of TCR clone 63094 (TRAV38-1, TRAJ57)
CAFMDSQGGSEKLAF

SEQ ID NO: 126188 - protein, 16 aa, Homo sapiens
  CDR3 for beta chain variable domain of TCR clone 63094 (TRBV10-3, TRBJ2-1)
CAIRGGGRGDYNEQFF

SEQ ID NO: 126189 - protein, 14 aa, Homo sapiens
  CDR3 for alpha chain variable domain of TCR clone 63095 (TRAV12-1, TRAJ26)
CVVKGSNYGQNFVF

SEQ ID NO: 126190 - protein, 14 aa, Homo sapiens
  CDR3 for beta chain variable domain of TCR clone 63095 (TRBV7-9, TRBJ2-2)
CASSGLADTGELFF

SEQ ID NO: 126191 - protein, 12 aa, Homo sapiens
  CDR3 for alpha chain variable domain of TCR clone 63096 (TRAV29/DV5, TRAJ49)
CAATDPGNQFYF

SEQ ID NO: 126192 - protein, 19 aa, Homo sapiens
  CDR3 for beta chain variable domain of TCR clone 63096 (TRBV25-1, TRBJ2-2)
CAILVYRVDRGRKTGELFF

SEQ ID NO: 126193 - protein, 15 aa, Homo sapiens
  CDR3 for alpha chain variable domain of TCR clone 63097 (TRAV3, TRAJ20)
CAVRDIKLSDYKLSF

SEQ ID NO: 126194 - protein, 15 aa, Homo sapiens
  CDR3 for beta chain variable domain of TCR clone 63097 (TRBV7-9, TRBJ1-6)
CASSSPGRGNSPHHF

SEQ ID NO: 126195 - protein, 12 aa, Homo sapiens
  CDR3 for alpha chain variable domain of TCR clone 63098 (TRAV12-2, TRAJ10)
WGVTGGGNKLTF

SEQ ID NO: 126196 - protein, 14 aa, Homo sapiens
  CDR3 for beta chain variable domain of TCR clone 63098 (TRBV7-3, TRBJ1-1)
CASSLGTGYTEAFF

SEQ ID NO: 126197 - protein, 15 aa, Homo sapiens
  CDR3 for alpha chain variable domain of TCR clone 63099 (TRAV4, TRAJ39)
RLVGPNNNAGNMLTF

SEQ ID NO: 126198 - protein, 13 aa, Homo sapiens
  CDR3 for beta chain variable domain of TCR clone 63099 (TRBV11-2, TRBJ2-5)
CASSSTGEETQYF

SEQ ID NO: 126199 - protein, 11 aa, Homo sapiens
  CDR3 for alpha chain variable domain of TCR clone 63100 (TRAV21, TRAJ34)
CAHYNTDKLIF

SEQ ID NO: 126200 - protein, 15 aa, Homo sapiens
  CDR3 for beta chain variable domain of TCR clone 63100 (TRBV20-1, TRBJ2-7)
CSARDRVSGMDEQYF

SEQ ID NO: 126201 - protein, 14 aa, Homo sapiens
  CDR3 for alpha chain variable domain of TCR clone 63101 (TRAV1-2, TRAJ8)
CAVREDTGFQKLVF

SEQ ID NO: 126202 - protein, 13 aa, Homo sapiens
  CDR3 for beta chain variable domain of TCR clone 63101 (TRBV7-6, TRBJ2-3)
CASSLRSDNTQYF

SEQ ID NO: 126203 - protein, 15 aa, Homo sapiens
  CDR3 for alpha chain variable domain of TCR clone 63102 (TRAV8-2, TRAJ16)
CGVSDGFSDGQKLLF

SEQ ID NO: 126204 - protein, 14 aa, Homo sapiens
  CDR3 for beta chain variable domain of TCR clone 63102 (TRBV7-3, TRBJ1-1)
CASSLGTGYTEAFF

SEQ ID NO: 126205 - protein, 21 aa, Homo sapiens
  CDR3 for alpha chain variable domain of TCR clone 63103 (TRAV1-1, TRAJ6)
CLLLPRCERLERTGGSYIPTF

SEQ ID NO: 126206 - protein, 13 aa, Homo sapiens
  CDR3 for beta chain variable domain of TCR clone 63103 (TRBV10-2, TRBJ2-7)
CASGASGGYEQYF

SEQ ID NO: 126207 - protein, 10 aa, Homo sapiens
  CDR3 for alpha chain variable domain of TCR clone 63104 (TRAV23/DV6, TRAJ57)
CAASSTVSQG

SEQ ID NO: 126208 - protein, 14 aa, Homo sapiens
  CDR3 for beta chain variable domain of TCR clone 63104 (TRBV25-1, TRBJ1-1)
CASTHLGGNTEAFF

SEQ ID NO: 126209 - protein, 15 aa, Homo sapiens
  CDR3 for alpha chain variable domain of TCR clone 63105 (TRAV26-1, TRAJ29)
CIFRVEGSGNTPLVF

SEQ ID NO: 126210 - protein, 15 aa, Homo sapiens
  CDR3 for beta chain variable domain of TCR clone 63105 (TRBV7-9, TRBJ1-5)
CASSQGHQPNPPQHF

SEQ ID NO: 126211 - protein, 13 aa, Homo sapiens
  CDR3 for alpha chain variable domain of TCR clone 63106 (TRAV13-2, TRAJ16)
CADARTDGQKLLF

SEQ ID NO: 126212 - protein, 19 aa, Homo sapiens
  CDR3 for beta chain variable domain of TCR clone 63106 (TRBV5-5, TRBJ2-5)
CANSIGGGWGDPVLRARHA

SEQ ID NO: 126213 - protein, 14 aa, Homo sapiens
  CDR3 for alpha chain variable domain of TCR clone 63107 (TRAV20, TRAJ32)
CCGRYGGAKNKLIF

SEQ ID NO: 126214 - protein, 16 aa, Homo sapiens
  CDR3 for beta chain variable domain of TCR clone 63107 (TRBV19, TRBJ2-2)
CASRSPGTGATGELFF

SEQ ID NO: 126215 - protein, 14 aa, Homo sapiens
  CDR3 for alpha chain variable domain of TCR clone 63108 (TRAV26-1, TRAJ38)
CIADNAGNNRKLIW

SEQ ID NO: 126216 - protein, 15 aa, Homo sapiens
  CDR3 for beta chain variable domain of TCR clone 63108 (TRBV4-1, TRBJ1-1)
CASSQEWGHYNEAFF

SEQ ID NO: 126217 - protein, 15 aa, Homo sapiens
  CDR3 for alpha chain variable domain of TCR clone 63109 (TRAV12-3, TRAJ42)
CAMSGHGGSQGNLIF

SEQ ID NO: 126218 - protein, 13 aa, Homo sapiens
  CDR3 for beta chain variable domain of TCR clone 63109 (TRBV10-3, TRBJ2-7)
CASKLAVNYEQYF

SEQ ID NO: 126219 - protein, 18 aa, Homo sapiens
  CDR3 for alpha chain variable domain of TCR clone 63110 (TRAV1-2, TRAJ18)
CAVRDMGDRGSTLGRLYF

SEQ ID NO: 126220 - protein, 16 aa, Homo sapiens
  CDR3 for beta chain variable domain of TCR clone 63110 (TRBV29-1, TRBJ1-2)
CSVEANRNVANYGYTF

SEQ ID NO: 126221 - protein, 12 aa, Homo sapiens
  CDR3 for alpha chain variable domain of TCR clone 63111 (TRAV36/DV7, TRAJ54)
CAVVRGAKKLVF

SEQ ID NO: 126222 - protein, 14 aa, Homo sapiens
  CDR3 for beta chain variable domain of TCR clone 63111 (TRBV7-3, TRBJ1-1)
CASSLKGGNTEAFF

SEQ ID NO: 126223 - protein, 13 aa, Homo sapiens
  CDR3 for alpha chain variable domain of TCR clone 63112 (TRAV35, TRAJ48)
CAGHEVGNEKLTF

SEQ ID NO: 126224 - protein, 14 aa, Homo sapiens
  CDR3 for beta chain variable domain of TCR clone 63112 (TRBV19, TRBJ2-1)
CASPTFVLSGEQFF

SEQ ID NO: 126225 - protein, 14 aa, Homo sapiens
  CDR3 for alpha chain variable domain of TCR clone 63113 (TRAV9-2, TRAJ39)
CALYIYNAGNMLTF

SEQ ID NO: 126226 - protein, 16 aa, Homo sapiens
  CDR3 for beta chain variable domain of TCR clone 63113 (TRBV7-9, TRBJ2-1)
CASSDVAGGSYNEQFF

SEQ ID NO: 126227 - protein, 15 aa, Homo sapiens
  CDR3 for alpha chain variable domain of TCR clone 63114 (TRAV26-2, TRAJ26)
YILRDFDNYGQNFVF

SEQ ID NO: 126228 - protein, 14 aa, Homo sapiens
  CDR3 for beta chain variable domain of TCR clone 63114 (TRBV29-1, TRBJ2-5)
CSFWTPYAGETQYF

SEQ ID NO: 126229 - protein, 15 aa, Homo sapiens
  CDR3 for alpha chain variable domain of TCR clone 63115 (TRAV8-3, TRAJ45)
CASSYSGGGADGLTF

SEQ ID NO: 126230 - protein, 17 aa, Homo sapiens
  CDR3 for beta chain variable domain of TCR clone 63115 (TRBV7-8, TRBJ1-2)
CASSLRPLHGHLYGYTF

SEQ ID NO: 126231 - protein, 15 aa, Homo sapiens
  CDR3 for alpha chain variable domain of TCR clone 63116 (TRAV17, TRAJ35)
CATAFVIGFGNVLHC

SEQ ID NO: 126232 - protein, 15 aa, Homo sapiens
  CDR3 for beta chain variable domain of TCR clone 63116 (TRBV7-9, TRBJ2-7)
YASSLALAEAYEQYF

SEQ ID NO: 126233 - protein, 14 aa, Homo sapiens
  CDR3 for alpha chain variable domain of TCR clone 63117 (TRAV8-1, TRAJ5)
CAVRTDTGRRALTF

SEQ ID NO: 126234 - protein, 14 aa, Homo sapiens
  CDR3 for beta chain variable domain of TCR clone 63117 (TRBV7-8, TRBJ2-3)
CAGSFPDGQDTQYF

SEQ ID NO: 126235 - protein, 13 aa, Homo sapiens
  CDR3 for alpha chain variable domain of TCR clone 63118 (TRAV35, TRAJ42)
CAGFPGSQGNLIF

SEQ ID NO: 126236 - protein, 15 aa, Homo sapiens
  CDR3 for beta chain variable domain of TCR clone 63118 (TRBV2, TRBJ2-2)
CASSRQGPNTGELFF

SEQ ID NO: 126237 - protein, 18 aa, Homo sapiens
  CDR3 for alpha chain variable domain of TCR clone 63119 (TRAV21, TRAJ52)
CAVRPSPAGGTSYGKLTF

SEQ ID NO: 126238 - protein, 15 aa, Homo sapiens
  CDR3 for beta chain variable domain of TCR clone 63119 (TRBV7-9, TRBJ2-7)
CASRSSGLAVYEQYF

SEQ ID NO: 126239 - protein, 13 aa, Homo sapiens
  CDR3 for alpha chain variable domain of TCR clone 63120 (TRAV38-1, TRAJ42)
CARWGGSEGNLIF

SEQ ID NO: 126240 - protein, 17 aa, Homo sapiens
  CDR3 for beta chain variable domain of TCR clone 63120 (TRBV20-1, TRBJ2-1)
CSARDPLAGVWDNEQFF

SEQ ID NO: 126241 - protein, 14 aa, Homo sapiens
  CDR3 for alpha chain variable domain of TCR clone 63121 (TRAV1-2, TRAJ16)
CAVNLFSDGQKLLF

SEQ ID NO: 126242 - protein, 16 aa, Homo sapiens
  CDR3 for beta chain variable domain of TCR clone 63121 (TRBV20-1, TRBJ1-4)
CSAPGQGLLTNEKLFF

SEQ ID NO: 126243 - protein, 15 aa, Homo sapiens
  CDR3 for alpha chain variable domain of TCR clone 63122 (TRAV29/DV5, TRAJ24)
CAASGANDSWGKFQF

SEQ ID NO: 126244 - protein, 12 aa, Homo sapiens
  CDR3 for beta chain variable domain of TCR clone 63122 (TRBV11-2, TRBJ2-2)
CASSLPTGELFF

SEQ ID NO: 126245 - protein, 15 aa, Homo sapiens
  CDR3 for alpha chain variable domain of TCR clone 63123 (TRAV12-3, TRAJ6)
CAMSASTGGSYIPTF

SEQ ID NO: 126246 - protein, 16 aa, Homo sapiens
  CDR3 for beta chain variable domain of TCR clone 63123 (TRBV20-1, TRBJ1-2)
CSASMGQGVANYGDTF

SEQ ID NO: 126247 - protein, 15 aa, Homo sapiens
  CDR3 for alpha chain variable domain of TCR clone 63124 (TRAV8-3, TRAJ37)
CAVGARASNTGKLLF

SEQ ID NO: 126248 - protein, 15 aa, Homo sapiens
  CDR3 for beta chain variable domain of TCR clone 63124 (TRBV5-4, TRBJ2-3)
CASSLAGRVTDTQYF

SEQ ID NO: 126249 - protein, 13 aa, Homo sapiens
  CDR3 for alpha chain variable domain of TCR clone 63125 (TRAV12-3, TRAJ29)
CAMTLSGNTPLVF

SEQ ID NO: 126250 - protein, 14 aa, Homo sapiens
  CDR3 for beta chain variable domain of TCR clone 63125 (TRBV28, TRBJ1-5)
CASSGQALYQPQHF

SEQ ID NO: 126251 - protein, 15 aa, Homo sapiens
  CDR3 for alpha chain variable domain of TCR clone 63126 (TRAV17, TRAJ57)
CATGPSQGGSEKLVF

SEQ ID NO: 126252 - protein, 17 aa, Homo sapiens
  CDR3 for beta chain variable domain of TCR clone 63126 (TRBV20-1, TRBJ2-2)
CSASGSGQGGLTGELFF

SEQ ID NO: 126253 - protein, 14 aa, Homo sapiens
  CDR3 for alpha chain variable domain of TCR clone 63127 (TRAV1-2, TRAJ16)
CAVNRFSDGQNLLF

SEQ ID NO: 126254 - protein, 17 aa, Homo sapiens
  CDR3 for beta chain variable domain of TCR clone 63127 (TRBV7-8, TRBJ2-6)
CASSAGTGGAGANVLTF

SEQ ID NO: 126255 - protein, 14 aa, Homo sapiens
  CDR3 for alpha chain variable domain of TCR clone 63128 (TRAV1-2, TRAJ8)
CAVREDTGFQKLVF

SEQ ID NO: 126256 - protein, 15 aa, Homo sapiens
  CDR3 for beta chain variable domain of TCR clone 63128 (TRBV20-1, TRBJ2-7)
CSARARVSGMDEQYF

SEQ ID NO: 126257 - protein, 10 aa, Homo sapiens
  CDR3 for alpha chain variable domain of TCR clone 63129 (TRAV8-4, TRAJ43)
CAVSADDMRF

SEQ ID NO: 126258 - protein, 16 aa, Homo sapiens
  CDR3 for beta chain variable domain of TCR clone 63129 (TRBV12-5, TRBJ2-5)
CASGPRNSGNQETQYF

SEQ ID NO: 126259 - protein, 13 aa, Homo sapiens
  CDR3 for alpha chain variable domain of TCR clone 63130 (TRAV26-2, TRAJ54)
CIPRVGGAQKLAF

SEQ ID NO: 126260 - protein, 16 aa, Homo sapiens
  CDR3 for beta chain variable domain of TCR clone 63130 (TRBV4-1, TRBJ1-1)
CASSSMSERPNTEAFF

SEQ ID NO: 126261 - protein, 12 aa, Homo sapiens
  CDR3 for alpha chain variable domain of TCR clone 63131 (TRAV3, TRAJ43)
CAVRDPNNDMRF

SEQ ID NO: 126262 - protein, 12 aa, Homo sapiens
  CDR3 for beta chain variable domain of TCR clone 63131 (TRBV5-1, TRBJ2-7)
CASSFRGYEQYF

SEQ ID NO: 126263 - protein, 14 aa, Homo sapiens
  CDR3 for alpha chain variable domain of TCR clone 63132 (TRAV13-2, TRAJ43)
CAEIPTYNNNDMRF

SEQ ID NO: 126264 - protein, 15 aa, Homo sapiens
  CDR3 for beta chain variable domain of TCR clone 63132 (TRBV7-9, TRBJ2-2)
CASGPLDNFPGELFF

SEQ ID NO: 126265 - protein, 14 aa, Homo sapiens
  CDR3 for alpha chain variable domain of TCR clone 63133 (TRAV1-2, TRAJ16)
CAVNRFSDGQKLLF

SEQ ID NO: 126266 - protein, 13 aa, Homo sapiens
  CDR3 for beta chain variable domain of TCR clone 63133 (TRBV12-4, TRBJ2-5)
CASSVGGSRTQYF

SEQ ID NO: 126267 - protein, 15 aa, Homo sapiens
  CDR3 for alpha chain variable domain of TCR clone 63134 (TRAV3, TRAJ36)
CAVRASQTGANNLFF

SEQ ID NO: 126268 - protein, 15 aa, Homo sapiens
  CDR3 for beta chain variable domain of TCR clone 63134 (TRBV19, TRBJ1-5)
CASSDSGPRNQPQHF

SEQ ID NO: 126269 - protein, 10 aa, Homo sapiens
  CDR3 for alpha chain variable domain of TCR clone 63135 (TRAV5, TRAJ34)
CAEATDKLIF

SEQ ID NO: 126270 - protein, 12 aa, Homo sapiens
  CDR3 for beta chain variable domain of TCR clone 63135 (TRBV11-2, TRBJ2-2)
CASSLGGGELFF

SEQ ID NO: 126271 - protein, 11 aa, Homo sapiens
  CDR3 for alpha chain variable domain of TCR clone 63136 (TRAV1-1, TRAJ23)
CAVRQGGKLIF

SEQ ID NO: 126272 - protein, 14 aa, Homo sapiens
  CDR3 for beta chain variable domain of TCR clone 63136 (TRBV20-1, TRBJ2-3)
CSARGGTSTDTQYF

SEQ ID NO: 126273 - protein, 14 aa, Homo sapiens
  CDR3 for alpha chain variable domain of TCR clone 63137 (TRAV1-2, TRAJ16)
CAVNRFSDGQKLLF

SEQ ID NO: 126274 - protein, 12 aa, Homo sapiens
  CDR3 for beta chain variable domain of TCR clone 63137 (TRBV5-1, TRBJ2-5)
CASSFSWETQYF

SEQ ID NO: 126275 - protein, 15 aa, Homo sapiens
  CDR3 for alpha chain variable domain of TCR clone 63138 (TRAV29/DV5, TRAJ24)
CAASGSTDSWGKFQF

SEQ ID NO: 126276 - protein, 12 aa, Homo sapiens
  CDR3 for beta chain variable domain of TCR clone 63138 (TRBV11-2, TRBJ2-2)
CASSLPTGELFF

SEQ ID NO: 126277 - protein, 13 aa, Homo sapiens
  CDR3 for alpha chain variable domain of TCR clone 63139 (TRAV27, TRAJ3)
ASLRGSSASKIIF

SEQ ID NO: 126278 - protein, 15 aa, Homo sapiens
  CDR3 for beta chain variable domain of TCR clone 63139 (TRBV28, TRBJ1-3)
CASSMGLASGNTIYF

SEQ ID NO: 126279 - protein, 11 aa, Homo sapiens
  CDR3 for alpha chain variable domain of TCR clone 63140 (TRAV20, TRAJ31)
CAVQMRARLMF

SEQ ID NO: 126280 - protein, 14 aa, Homo sapiens
  CDR3 for beta chain variable domain of TCR clone 63140 (TRBV11-2, TRBJ1-4)
RASSLGGLGEKLFF

SEQ ID NO: 126281 - protein, 14 aa, Homo sapiens
  CDR3 for alpha chain variable domain of TCR clone 63141 (TRAV12-3, TRAJ10)
SHLPLTGGGNKLTF

SEQ ID NO: 126282 - protein, 16 aa, Homo sapiens
  CDR3 for beta chain variable domain of TCR clone 63141 (TRBV18, TRBJ1-1)
CASSPGVGGRGGEAFF

SEQ ID NO: 126283 - protein, 14 aa, Homo sapiens
  CDR3 for alpha chain variable domain of TCR clone 63142 (TRAV16, TRAJ33)
CALSAMDSNYQLIG

SEQ ID NO: 126284 - protein, 12 aa, Homo sapiens
  CDR3 for beta chain variable domain of TCR clone 63142 (TRBV5-1, TRBJ1-2)
CASSQDTYGYTF

SEQ ID NO: 126285 - protein, 13 aa, Homo sapiens
  CDR3 for alpha chain variable domain of TCR clone 63143 (TRAV17, TRAJ9)
CATDYTGGFKTIL

SEQ ID NO: 126286 - protein, 16 aa, Homo sapiens
  CDR3 for beta chain variable domain of TCR clone 63143 (TRBV7-7, TRBJ2-1)
CASSLASGASYNEQFF

SEQ ID NO: 126287 - protein, 15 aa, Homo sapiens
  CDR3 for alpha chain variable domain of TCR clone 63144 (TRAV12-2, TRAJ53)
CAVNGGGGSNYKLTF

SEQ ID NO: 126288 - protein, 12 aa, Homo sapiens
  CDR3 for beta chain variable domain of TCR clone 63144 (TRBV12-4, TRBJ1-2)
CASSFIWLHLRF

SEQ ID NO: 126289 - protein, 12 aa, Homo sapiens
  CDR3 for alpha chain variable domain of TCR clone 63145 (TRAV21, TRAJ49)
CAVRNTGNQFYF

SEQ ID NO: 126290 - protein, 12 aa, Homo sapiens
  CDR3 for beta chain variable domain of TCR clone 63145 (TRBV7-9, TRBJ2-7)
CATRTGAYEQYF

SEQ ID NO: 126291 - protein, 12 aa, Homo sapiens
  CDR3 for alpha chain variable domain of TCR clone 63146 (TRAV12-3, TRAJ17)
CAMTLTGNKLTF

SEQ ID NO: 126292 - protein, 14 aa, Homo sapiens
  CDR3 for beta chain variable domain of TCR clone 63146 (TRBV7-8, TRBJ1-2)
CASSPDSLSYGYTF

SEQ ID NO: 126293 - protein, 12 aa, Homo sapiens
  CDR3 for alpha chain variable domain of TCR clone 63147 (TRAV17, TRAJ21)
CALRYNFNKFYF

SEQ ID NO: 126294 - protein, 14 aa, Homo sapiens
  CDR3 for beta chain variable domain of TCR clone 63147 (TRBV7-9, TRBJ2-2)
CASSLGHRTGELFF

SEQ ID NO: 126295 - protein, 14 aa, Homo sapiens
  CDR3 for alpha chain variable domain of TCR clone 63148 (TRAV12-2, TRAJ17)
CAVNIKAAGNKLTL

SEQ ID NO: 126296 - protein, 16 aa, Homo sapiens
  CDR3 for beta chain variable domain of TCR clone 63148 (TRBV20-1, TRBJ2-6)
CSASSQGYDGANVLTF

SEQ ID NO: 126297 - protein, 14 aa, Homo sapiens
  CDR3 for alpha chain variable domain of TCR clone 63149 (TRAV1-2, TRAJ13)
CAVKHSGGYQKVTF

SEQ ID NO: 126298 - protein, 12 aa, Homo sapiens
  CDR3 for beta chain variable domain of TCR clone 63149 (TRBV7-3, TRBJ2-5)
CSSSSPGGTQYF

SEQ ID NO: 126299 - protein, 15 aa, Homo sapiens
  CDR3 for alpha chain variable domain of TCR clone 63150 (TRAV26-1, TRAJ22)
CIVRVSFWFCRATDL

SEQ ID NO: 126300 - protein, 14 aa, Homo sapiens
  CDR3 for beta chain variable domain of TCR clone 63150 (TRBV4-1, TRBJ2-2)
CASSQAVNTGELFF

SEQ ID NO: 126301 - protein, 15 aa, Homo sapiens
  CDR3 for alpha chain variable domain of TCR clone 63151 (TRAV21, TRAJ53)
CATLNSGGSNYKLTF

SEQ ID NO: 126302 - protein, 17 aa, Homo sapiens
  CDR3 for beta chain variable domain of TCR clone 63151 (TRBV20-1, TRBJ2-1)
CSAPPRLAGTRYNEQFF

SEQ ID NO: 126303 - protein, 13 aa, Homo sapiens
  CDR3 for alpha chain variable domain of TCR clone 63152 (TRAV2, TRAJ40)
CAVVTSGTYKYIF

SEQ ID NO: 126304 - protein, 17 aa, Homo sapiens
  CDR3 for beta chain variable domain of TCR clone 63152 (TRBV4-1, TRBJ1-4)
CASSQEGPRGVEEKLFF

SEQ ID NO: 126305 - protein, 16 aa, Homo sapiens
  CDR3 for alpha chain variable domain of TCR clone 63153 (TRAV8-3, TRAJ10)
CAVGPILPGGGNKLTF

SEQ ID NO: 126306 - protein, 16 aa, Homo sapiens
  CDR3 for beta chain variable domain of TCR clone 63153 (TRBV7-2, TRBJ2-5)
CASSSKWLSGQETQYF

SEQ ID NO: 126307 - protein, 13 aa, Homo sapiens
  CDR3 for alpha chain variable domain of TCR clone 63154 (TRAV2, TRAJ24)
CAVSTDSWGKLQF

SEQ ID NO: 126308 - protein, 14 aa, Homo sapiens
  CDR3 for beta chain variable domain of TCR clone 63154 (TRBV13, TRBJ2-5)
CASSLGTTQETQYF

SEQ ID NO: 126309 - protein, 16 aa, Homo sapiens
  CDR3 for alpha chain variable domain of TCR clone 63155 (TRAV12-2, TRAJ32)
CAVNLGQGGATKKLIF

SEQ ID NO: 126310 - protein, 15 aa, Homo sapiens
  CDR3 for beta chain variable domain of TCR clone 63155 (TRBV20-1, TRBJ2-7)
CSARGPLAGGREQYF

SEQ ID NO: 126311 - protein, 12 aa, Homo sapiens
  CDR3 for alpha chain variable domain of TCR clone 63156 (TRAV12-3, TRAJ40)
CAMSSVTYKYIF

SEQ ID NO: 126312 - protein, 15 aa, Homo sapiens
  CDR3 for beta chain variable domain of TCR clone 63156 (TRBV7-3, TRBJ2-2)
CASSETGQGTGELFF

SEQ ID NO: 126313 - protein, 13 aa, Homo sapiens
  CDR3 for alpha chain variable domain of TCR clone 63157 (TRAV24, TRAJ44)
CALLTGTASKLTF

SEQ ID NO: 126314 - protein, 14 aa, Homo sapiens
  CDR3 for beta chain variable domain of TCR clone 63157 (TRBV25-1, TRBJ1-1)
CASTHLGGNTEAFF

SEQ ID NO: 126315 - protein, 13 aa, Homo sapiens
  CDR3 for alpha chain variable domain of TCR clone 63158 (TRAV26-1, TRAJ40)
CIVRGTGTYKYIF

SEQ ID NO: 126316 - protein, 16 aa, Homo sapiens
  CDR3 for beta chain variable domain of TCR clone 63158 (TRBV20-1, TRBJ1-1)
CSASDRTLSMNTEAFF

SEQ ID NO: 126317 - protein, 18 aa, Homo sapiens
  CDR3 for alpha chain variable domain of TCR clone 63159 (TRAV13-1, TRAJ45)
CAASIGVYSGGGADGLTF

SEQ ID NO: 126318 - protein, 13 aa, Homo sapiens
  CDR3 for beta chain variable domain of TCR clone 63159 (TRBV5-4, TRBJ2-5)
CASSPVSQETQYF

SEQ ID NO: 126319 - protein, 13 aa, Homo sapiens
  CDR3 for alpha chain variable domain of TCR clone 63160 (TRAV21, TRAJ32)
CGDYGGATNKLIF

SEQ ID NO: 126320 - protein, 13 aa, Homo sapiens
  CDR3 for beta chain variable domain of TCR clone 63160 (TRBV2, TRBJ1-6)
CASGRGGISPLHF

SEQ ID NO: 126321 - protein, 17 aa, Homo sapiens
  CDR3 for alpha chain variable domain of TCR clone 63161 (TRAV3, TRAJ12)
CAVRDGGRMVSSYKLIF

SEQ ID NO: 126322 - protein, 14 aa, Homo sapiens
  CDR3 for beta chain variable domain of TCR clone 63161 (TRBV7-9, TRBJ1-2)
CASSRQGANYGYTF

SEQ ID NO: 126323 - protein, 16 aa, Homo sapiens
  CDR3 for alpha chain variable domain of TCR clone 63162 (TRAV23/DV6, TRAJ9)
CAASIGGNTGGFKTIF

SEQ ID NO: 126324 - protein, 16 aa, Homo sapiens
  CDR3 for beta chain variable domain of TCR clone 63162 (TRBV7-3, TRBJ2-2)
CASSLKRGTLSGELFF

SEQ ID NO: 126325 - protein, 13 aa, Homo sapiens
  CDR3 for alpha chain variable domain of TCR clone 63163 (TRAV3, TRAJ21)
CAVREPDFNKFYF

SEQ ID NO: 126326 - protein, 12 aa, Homo sapiens
  CDR3 for beta chain variable domain of TCR clone 63163 (TRBV12-4, TRBJ2-7)
CASSLGGYEQYF

SEQ ID NO: 126327 - protein, 14 aa, Homo sapiens
  CDR3 for alpha chain variable domain of TCR clone 63164 (TRAV8-3, TRAJ4)
CAVGAAGGYNKLIF

SEQ ID NO: 126328 - protein, 15 aa, Homo sapiens
  CDR3 for beta chain variable domain of TCR clone 63164 (TRBV9, TRBJ1-6)
CDSSVAGTGDSPLHF

SEQ ID NO: 126329 - protein, 13 aa, Homo sapiens
  CDR3 for alpha chain variable domain of TCR clone 63165 (TRAV22, TRAJ29)
CAVGGSGNTPPVF

SEQ ID NO: 126330 - protein, 13 aa, Homo sapiens
  CDR3 for beta chain variable domain of TCR clone 63165 (TRBV4-2, TRBJ1-1)
CASSQAGNTEAFF

SEQ ID NO: 126331 - protein, 14 aa, Homo sapiens
  CDR3 for alpha chain variable domain of TCR clone 63166 (TRAV13-2, TRAJ17)
CAENSKAAVNKLTF

SEQ ID NO: 126332 - protein, 11 aa, Homo sapiens
  CDR3 for beta chain variable domain of TCR clone 63166 (TRBV6-3, TRBJ2-3)
CATGQADTQYF

SEQ ID NO: 126333 - protein, 17 aa, Homo sapiens
  CDR3 for alpha chain variable domain of TCR clone 63167 (TRAV3, TRAJ38)
CAVRDCLNAGNNRKLIW

SEQ ID NO: 126334 - protein, 19 aa, Homo sapiens
  CDR3 for beta chain variable domain of TCR clone 63167 (TRBV25-1, TRBJ2-2)
CAILVYRVDRGRKTGELFF

SEQ ID NO: 126335 - protein, 14 aa, Homo sapiens
  CDR3 for alpha chain variable domain of TCR clone 63168 (TRAV26-1, TRAJ38)
CIADNAGNNRKLIL

SEQ ID NO: 126336 - protein, 13 aa, Homo sapiens
  CDR3 for beta chain variable domain of TCR clone 63168 (TRBV19, TRBJ1-2)
CASSVPGQDGYTF

SEQ ID NO: 126337 - protein, 12 aa, Homo sapiens
  CDR3 for alpha chain variable domain of TCR clone 63169 (TRAV26-1, TRAJ13)
CIVSRGYQKVTF

SEQ ID NO: 126338 - protein, 14 aa, Homo sapiens
  CDR3 for beta chain variable domain of TCR clone 63169 (TRBV7-2, TRBJ2-7)
CASSPKTSFYEQYS

SEQ ID NO: 126339 - protein, 12 aa, Homo sapiens
  CDR3 for alpha chain variable domain of TCR clone 63170 (TRAV12-3, TRAJ17)
CAMTLTGNKLTF

SEQ ID NO: 126340 - protein, 11 aa, Homo sapiens
  CDR3 for beta chain variable domain of TCR clone 63170 (TRBV7-6, TRBJ2-5)
CASSSQETQYF

SEQ ID NO: 126341 - protein, 16 aa, Homo sapiens
  CDR3 for alpha chain variable domain of TCR clone 63171 (TRAV16, TRAJ57)
CAPYLITQGGYEKLVF

SEQ ID NO: 126342 - protein, 17 aa, Homo sapiens
  CDR3 for beta chain variable domain of TCR clone 63171 (TRBV24-1, TRBJ2-4)
CATSDAEARGVRNIQYF

SEQ ID NO: 126343 - protein, 11 aa, Homo sapiens
  CDR3 for alpha chain variable domain of TCR clone 63172 (TRAV2, TRAJ13)
CASGGYQKVTF

SEQ ID NO: 126344 - protein, 13 aa, Homo sapiens
  CDR3 for beta chain variable domain of TCR clone 63172 (TRBV7-3, TRBJ2-1)
CASSLDSYNEQFF

SEQ ID NO: 126345 - protein, 14 aa, Homo sapiens
  CDR3 for alpha chain variable domain of TCR clone 63173 (TRAV26-1, TRAJ38)
CMADNAGNNRKLIW

SEQ ID NO: 126346 - protein, 13 aa, Homo sapiens
  CDR3 for beta chain variable domain of TCR clone 63173 (TRBV20-1, TRBJ1-1)
CSARGGGNTEAFF

SEQ ID NO: 126347 - protein, 14 aa, Homo sapiens
  CDR3 for alpha chain variable domain of TCR clone 63174 (TRAV12-3, TRAJ10)
SHLPLTGGGNKLTF

SEQ ID NO: 126348 - protein, 17 aa, Homo sapiens
  CDR3 for beta chain variable domain of TCR clone 63174 (TRBV28, TRBJ2-5)
CANSTPEGDALQETQYF

SEQ ID NO: 126349 - protein, 18 aa, Homo sapiens
  CDR3 for alpha chain variable domain of TCR clone 63175 (TRAV12-2, )
CAVEDIQNPDPAVYQLRD

SEQ ID NO: 126350 - protein, 14 aa, Homo sapiens
  CDR3 for beta chain variable domain of TCR clone 63175 (TRBV11-2, TRBJ2-5)
CASSLDLGRETQYF

SEQ ID NO: 126351 - protein, 16 aa, Homo sapiens
  CDR3 for alpha chain variable domain of TCR clone 63176 (TRAV38-2/DV8, TRAJ46)
CAYRSAGKSSGDKLTF

SEQ ID NO: 126352 - protein, 14 aa, Homo sapiens
  CDR3 for beta chain variable domain of TCR clone 63176 (TRBV13, TRBJ2-3)
CASSLGARTDTQYF

SEQ ID NO: 126353 - protein, 12 aa, Homo sapiens
  CDR3 for alpha chain variable domain of TCR clone 63177 (TRAV17, TRAJ20)
CATQSNDYKLSF

SEQ ID NO: 126354 - protein, 13 aa, Homo sapiens
  CDR3 for beta chain variable domain of TCR clone 63177 (TRBV10-3, TRBJ1-1)
CAIIPEGGTEAFL

SEQ ID NO: 126355 - protein, 12 aa, Homo sapiens
  CDR3 for alpha chain variable domain of TCR clone 63178 (TRAV21, TRAJ13)
PCPSGGYQKVTF

SEQ ID NO: 126356 - protein, 15 aa, Homo sapiens
  CDR3 for beta chain variable domain of TCR clone 63178 (TRBV7-9, TRBJ1-6)
CASSSPGRGNSPLHF

SEQ ID NO: 126357 - protein, 14 aa, Homo sapiens
  CDR3 for alpha chain variable domain of TCR clone 63179 (TRAV12-2, TRAJ40)
RAVKIPSGTYKYIF

SEQ ID NO: 126358 - protein, 20 aa, Homo sapiens
  CDR3 for beta chain variable domain of TCR clone 63179 (TRBV28, TRBJ2-1)
CASTPIGRSPGLAGGNEQFF

SEQ ID NO: 126359 - protein, 12 aa, Homo sapiens
  CDR3 for alpha chain variable domain of TCR clone 63180 (TRAV3, TRAJ39)
CAVIEWSNMLTF

SEQ ID NO: 126360 - protein, 14 aa, Homo sapiens
  CDR3 for beta chain variable domain of TCR clone 63180 (TRBV7-8, TRBJ2-3)
CASSFPDGQDTQYL

SEQ ID NO: 126361 - protein, 11 aa, Homo sapiens
  CDR3 for alpha chain variable domain of TCR clone 63181 (TRAV26-1, TRAJ37)
CIVRVGRKLIF

SEQ ID NO: 126362 - protein, 11 aa, Homo sapiens
  CDR3 for beta chain variable domain of TCR clone 63181 (TRBV29-1, TRBJ2-5)
CSEDRTGTQYF

SEQ ID NO: 126363 - protein, 14 aa, Homo sapiens
  CDR3 for alpha chain variable domain of TCR clone 63182 (TRAV12-2, TRAJ45)
CALPERGGADGLTF

SEQ ID NO: 126364 - protein, 14 aa, Homo sapiens
  CDR3 for beta chain variable domain of TCR clone 63182 (TRBV18, TRBJ1-5)
CASSPGDSNQPQHF

SEQ ID NO: 126365 - protein, 14 aa, Homo sapiens
  CDR3 for alpha chain variable domain of TCR clone 63183 (TRAV38-2/DV8, TRAJ54)
AAMYQIQGAQKLVF

SEQ ID NO: 126366 - protein, 17 aa, Homo sapiens
  CDR3 for beta chain variable domain of TCR clone 63183 (TRBV6-1, TRBJ2-3)
CASSEALRLISTDTQYL

SEQ ID NO: 126367 - protein, 15 aa, Homo sapiens
  CDR3 for alpha chain variable domain of TCR clone 63184 (TRAV26-1, TRAJ29)
CIVRVEGSGNTPLVF

SEQ ID NO: 126368 - protein, 15 aa, Homo sapiens
  CDR3 for beta chain variable domain of TCR clone 63184 (TRBV7-9, TRBJ1-5)
CASSQGHQPDQTQHF

SEQ ID NO: 126369 - protein, 14 aa, Homo sapiens
  CDR3 for alpha chain variable domain of TCR clone 63185 (TRAV9-2, TRAJ39)
CALYIYNAGNMLTL

SEQ ID NO: 126370 - protein, 13 aa, Homo sapiens
  CDR3 for beta chain variable domain of TCR clone 63185 (TRBV29-1, TRBJ2-1)
CSVEGGRVNEQFF

SEQ ID NO: 126371 - protein, 12 aa, Homo sapiens
  CDR3 for alpha chain variable domain of TCR clone 63186 (TRAV13-2, TRAJ54)
CGAHEGAQKLVF

SEQ ID NO: 126372 - protein, 16 aa, Homo sapiens
  CDR3 for beta chain variable domain of TCR clone 63186 (TRBV12-5, TRBJ2-5)
CASGPRTSGNQETQYS

SEQ ID NO: 126373 - protein, 13 aa, Homo sapiens
  CDR3 for alpha chain variable domain of TCR clone 63187 (TRAV17, TRAJ26)
CATVDNYGQNFVF

SEQ ID NO: 126374 - protein, 16 aa, Homo sapiens
  CDR3 for beta chain variable domain of TCR clone 63187 (TRBV2, TRBJ2-1)
CASSVGGSLSYSEQFF

SEQ ID NO: 126375 - protein, 16 aa, Homo sapiens
  CDR3 for alpha chain variable domain of TCR clone 63188 (TRAV30, TRAJ24)
CGTEIVDADSWGKFQF

SEQ ID NO: 126376 - protein, 16 aa, Homo sapiens
  CDR3 for beta chain variable domain of TCR clone 63188 (TRBV28, TRBJ2-7)
CASSLSFETGGPEQYF

SEQ ID NO: 126377 - protein, 14 aa, Homo sapiens
  CDR3 for alpha chain variable domain of TCR clone 63189 (TRAV17, TRAJ57)
CATDPQGGSEKLVF

SEQ ID NO: 126378 - protein, 14 aa, Homo sapiens
  CDR3 for beta chain variable domain of TCR clone 63189 (TRBV7-9, TRBJ1-2)
CASSRQGANYGYTF

SEQ ID NO: 126379 - protein, 15 aa, Homo sapiens
  CDR3 for alpha chain variable domain of TCR clone 63190 (TRAV17, TRAJ57)
CATGPSQGGSEKLGF

SEQ ID NO: 126380 - protein, 11 aa, Homo sapiens
  CDR3 for beta chain variable domain of TCR clone 63190 (TRBV29-1, TRBJ2-5)
CSEDRTGTQYF

SEQ ID NO: 126381 - protein, 15 aa, Homo sapiens
  CDR3 for alpha chain variable domain of TCR clone 63191 (TRAV3, TRAJ5)
CAVRDRKTGRRALTF

SEQ ID NO: 126382 - protein, 15 aa, Homo sapiens
  CDR3 for beta chain variable domain of TCR clone 63191 (TRBV7-9, TRBJ2-2)
CASGPLDSFPGELFF

SEQ ID NO: 126383 - protein, 14 aa, Homo sapiens
  CDR3 for alpha chain variable domain of TCR clone 63192 (TRAV20, TRAJ56)
CAVQFGGANSKLTF

SEQ ID NO: 126384 - protein, 14 aa, Homo sapiens
  CDR3 for beta chain variable domain of TCR clone 63192 (TRBV20-1, TRBJ2-7)
CSAKRGRSSYAQYF

SEQ ID NO: 126385 - protein, 16 aa, Homo sapiens
  CDR3 for alpha chain variable domain of TCR clone 63193 (TRAV3, TRAJ32)
CAVRDMGGGATNKPIF

SEQ ID NO: 126386 - protein, 11 aa, Homo sapiens
  CDR3 for beta chain variable domain of TCR clone 63193 (TRBV12-4, TRBJ2-1)
CASSRLNGQFF

SEQ ID NO: 126387 - protein, 18 aa, Homo sapiens
  CDR3 for alpha chain variable domain of TCR clone 63194 (TRAV13-1, TRAJ52)
CAAKNPNAGGTSYGKLTF

SEQ ID NO: 126388 - protein, 15 aa, Homo sapiens
  CDR3 for beta chain variable domain of TCR clone 63194 (TRBV7-3, TRBJ2-1)
CASSLDGNSYNEQFF

SEQ ID NO: 126389 - protein, 11 aa, Homo sapiens
  CDR3 for alpha chain variable domain of TCR clone 63195 (TRAV13-1, TRAJ39)
CASHAGNMLTF

SEQ ID NO: 126390 - protein, 15 aa, Homo sapiens
  CDR3 for beta chain variable domain of TCR clone 63195 (TRBV28, TRBJ2-1)
CASSGLAEVDNEQFF

SEQ ID NO: 126391 - protein, 14 aa, Homo sapiens
  CDR3 for alpha chain variable domain of TCR clone 63196 (TRAV12-3, TRAJ9)
CAMSPNTGGFKTIF

SEQ ID NO: 126392 - protein, 15 aa, Homo sapiens
  CDR3 for beta chain variable domain of TCR clone 63196 (TRBV9, TRBJ1-6)
CASSVAGTGDSPLHF

SEQ ID NO: 126393 - protein, 14 aa, Homo sapiens
  CDR3 for alpha chain variable domain of TCR clone 63197 (TRAV3, TRAJ7)
CVVREEEREQQTRF

SEQ ID NO: 126394 - protein, 12 aa, Homo sapiens
  CDR3 for beta chain variable domain of TCR clone 63197 (TRBV7-8, TRBJ2-7)
CASSLGDREQYF

SEQ ID NO: 126395 - protein, 13 aa, Homo sapiens
  CDR3 for alpha chain variable domain of TCR clone 63198 (TRAV27, TRAJ17)
CAGAATAGNNLTF

SEQ ID NO: 126396 - protein, 15 aa, Homo sapiens
  CDR3 for beta chain variable domain of TCR clone 63198 (TRBV5-1, TRBJ2-3)
CASRNQAGSTDTQYF

SEQ ID NO: 126397 - protein, 14 aa, Homo sapiens
  CDR3 for alpha chain variable domain of TCR clone 63199 (TRAV12-3, TRAJ10)
SHLPLTGGGNKLTF

SEQ ID NO: 126398 - protein, 13 aa, Homo sapiens
  CDR3 for beta chain variable domain of TCR clone 63199 (TRBV9, TRBJ2-1)
CTSSPSGGNEQFF

SEQ ID NO: 126399 - protein, 15 aa, Homo sapiens
  CDR3 for alpha chain variable domain of TCR clone 63200 (TRAV3, TRAJ32)
CAVSSYGGATNKLIF

SEQ ID NO: 126400 - protein, 17 aa, Homo sapiens
  CDR3 for beta chain variable domain of TCR clone 63200 (TRBV13, TRBJ2-3)
CASSLSRVAGGRNTQYF

SEQ ID NO: 126401 - protein, 15 aa, Homo sapiens
  CDR3 for alpha chain variable domain of TCR clone 63201 (TRAV2, TRAJ37)
CAVEDGSSNTGKLIF

SEQ ID NO: 126402 - protein, 13 aa, Homo sapiens
  CDR3 for beta chain variable domain of TCR clone 63201 (TRBV10-2, TRBJ2-7)
CASGASGGYEQYF

SEQ ID NO: 126403 - protein, 14 aa, Homo sapiens
  CDR3 for alpha chain variable domain of TCR clone 63202 (TRAV8-6, TRAJ52)
CAVVGGTSYGKLTF

SEQ ID NO: 126404 - protein, 15 aa, Homo sapiens
  CDR3 for beta chain variable domain of TCR clone 63202 (TRBV11-2, TRBJ2-5)
CASSLGAGGVETQYF

SEQ ID NO: 126405 - protein, 16 aa, Homo sapiens
  CDR3 for alpha chain variable domain of TCR clone 63203 (TRAV3, TRAJ10)
CAVRDMRAGGGNKLTF

SEQ ID NO: 126406 - protein, 13 aa, Homo sapiens
  CDR3 for beta chain variable domain of TCR clone 63203 (TRBV18, TRBJ1-1)
CASSGGRNTEAFF

SEQ ID NO: 126407 - protein, 11 aa, Homo sapiens
  CDR3 for alpha chain variable domain of TCR clone 63204 (TRAV2, TRAJ23)
CAVETRGKLIF

SEQ ID NO: 126408 - protein, 14 aa, Homo sapiens
  CDR3 for beta chain variable domain of TCR clone 63204 (TRBV7-9, TRBJ2-1)
CASSPRDSLYEQFF

SEQ ID NO: 126409 - protein, 14 aa, Homo sapiens
  CDR3 for alpha chain variable domain of TCR clone 63205 (TRAV38-1, TRAJ57)
CAFMNTGGSEKLVF

SEQ ID NO: 126410 - protein, 12 aa, Homo sapiens
  CDR3 for beta chain variable domain of TCR clone 63205 (TRBV20-1, TRBJ1-5)
CSTSQGNQTQHF

SEQ ID NO: 126411 - protein, 16 aa, Homo sapiens
  CDR3 for alpha chain variable domain of TCR clone 63206 (TRAV2, TRAJ13)
CAVGAYPSGGYQKVTF

SEQ ID NO: 126412 - protein, 15 aa, Homo sapiens
  CDR3 for beta chain variable domain of TCR clone 63206 (TRBV19, TRBJ1-5)
CASGIVWADNQPQHF

SEQ ID NO: 126413 - protein, 17 aa, Homo sapiens
  CDR3 for alpha chain variable domain of TCR clone 63207 (TRAV13-1, TRAJ52)
CAASSGAGGTSYGKLTF

SEQ ID NO: 126414 - protein, 12 aa, Homo sapiens
  CDR3 for beta chain variable domain of TCR clone 63207 (TRBV7-8, TRBJ2-7)
CASSLGDREQYL

SEQ ID NO: 126415 - protein, 15 aa, Homo sapiens
  CDR3 for alpha chain variable domain of TCR clone 63208 (TRAV27, TRAJ38)
CAARRNAGNNRKLIW

SEQ ID NO: 126416 - protein, 17 aa, Homo sapiens
  CDR3 for beta chain variable domain of TCR clone 63208 (TRBV7-3, TRBJ2-3)
CASSLMKRMRGADTQYF

SEQ ID NO: 126417 - protein, 11 aa, Homo sapiens
  CDR3 for alpha chain variable domain of TCR clone 63209 (TRAV13-1, TRAJ15)
CAATPGTALIF

SEQ ID NO: 126418 - protein, 15 aa, Homo sapiens
  CDR3 for beta chain variable domain of TCR clone 63209 (TRBV28, TRBJ2-5)
CASSPPWSYQENQYF

SEQ ID NO: 126419 - protein, 13 aa, Homo sapiens
  CDR3 for alpha chain variable domain of TCR clone 63210 (TRAV26-1, TRAJ33)
FIVRVEGNYQLIW

SEQ ID NO: 126420 - protein, 16 aa, Homo sapiens
  CDR3 for beta chain variable domain of TCR clone 63210 (TRBV15, TRBJ2-7)
CATSRDRGRRRGEQYF

SEQ ID NO: 126421 - protein, 14 aa, Homo sapiens
  CDR3 for alpha chain variable domain of TCR clone 63211 (TRAV1-2, TRAJ16)
CAVNRFSDGQKLLF

SEQ ID NO: 126422 - protein, 17 aa, Homo sapiens
  CDR3 for beta chain variable domain of TCR clone 63211 (TRBV9, TRBJ1-6)
CASSVAGTGDSPLHLGT

SEQ ID NO: 126423 - protein, 18 aa, Homo sapiens
  CDR3 for alpha chain variable domain of TCR clone 63212 (TRAV21, TRAJ52)
CAVRPSPAGGTSYGKLTF

SEQ ID NO: 126424 - protein, 17 aa, Homo sapiens
  CDR3 for beta chain variable domain of TCR clone 63212 (TRBV13, TRBJ2-3)
CASSLSRAVGGRNTQYF

SEQ ID NO: 126425 - protein, 11 aa, Homo sapiens
  CDR3 for alpha chain variable domain of TCR clone 63213 (TRAV29/DV5, TRAJ49)
CAAVPGNQFYF

SEQ ID NO: 126426 - protein, 15 aa, Homo sapiens
  CDR3 for beta chain variable domain of TCR clone 63213 (TRBV20-1, TRBJ2-7)
CSARDRVSGMDEQYF

SEQ ID NO: 126427 - protein, 12 aa, Homo sapiens
  CDR3 for alpha chain variable domain of TCR clone 63214 (TRAV13-1, TRAJ21)
CAAKEGLNKFYF

SEQ ID NO: 126428 - protein, 15 aa, Homo sapiens
  CDR3 for beta chain variable domain of TCR clone 63214 (TRBV7-9, TRBJ1-6)
CASSSPGRGNSPLHF

SEQ ID NO: 126429 - protein, 14 aa, Homo sapiens
  CDR3 for alpha chain variable domain of TCR clone 63215 (TRAV12-3, TRAJ42)
CAMNYGGSQGNLIF

SEQ ID NO: 126430 - protein, 16 aa, Homo sapiens
  CDR3 for beta chain variable domain of TCR clone 63215 (TRBV9, TRBJ2-1)
CASSVGGGGNYNEQFF

SEQ ID NO: 126431 - protein, 16 aa, Homo sapiens
  CDR3 for alpha chain variable domain of TCR clone 63216 (TRAV16, TRAJ4)
CITVLPFSGGHNKLIF

SEQ ID NO: 126432 - protein, 14 aa, Homo sapiens
  CDR3 for beta chain variable domain of TCR clone 63216 (TRBV19, TRBJ2-7)
CASSMGQGAIEQYF

SEQ ID NO: 126433 - protein, 13 aa, Homo sapiens
  CDR3 for alpha chain variable domain of TCR clone 63217 (TRAV27, TRAJ29)
CAGAHSGNTPLVF

SEQ ID NO: 126434 - protein, 14 aa, Homo sapiens
  CDR3 for beta chain variable domain of TCR clone 63217 (TRBV7-2, TRBJ1-1)
CASSFLTGTTEAFF

SEQ ID NO: 126435 - protein, 14 aa, Homo sapiens
  CDR3 for alpha chain variable domain of TCR clone 63218 (TRAV8-1, TRAJ27)
CAVNVGTNAGKSTF

SEQ ID NO: 126436 - protein, 17 aa, Homo sapiens
  CDR3 for beta chain variable domain of TCR clone 63218 (TRBV11-2, TRBJ2-1)
CASSLYPPRVEYNEQFF

SEQ ID NO: 126437 - protein, 14 aa, Homo sapiens
  CDR3 for alpha chain variable domain of TCR clone 63219 (TRAV16, TRAJ44)
CALSTTGTASKLTF

SEQ ID NO: 126438 - protein, 15 aa, Homo sapiens
  CDR3 for beta chain variable domain of TCR clone 63219 (TRBV20-1, TRBJ2-7)
CSARDRVSGMDEQYF

SEQ ID NO: 126439 - protein, 12 aa, Homo sapiens
  CDR3 for alpha chain variable domain of TCR clone 63220 (TRAV29/DV5, TRAJ15)
CASNQAGTALIS

SEQ ID NO: 126440 - protein, 15 aa, Homo sapiens
  CDR3 for beta chain variable domain of TCR clone 63220 (TRBV11-2, TRBJ2-2)
CASSSDRVNAGELFF

SEQ ID NO: 126441 - protein, 14 aa, Homo sapiens
  CDR3 for alpha chain variable domain of TCR clone 63221 (TRAV27, TRAJ23)
CAGAFDNQGGKLIF

SEQ ID NO: 126442 - protein, 15 aa, Homo sapiens
  CDR3 for beta chain variable domain of TCR clone 63221 (TRBV7-3, TRBJ2-7)
CASSLTGQGKYGQYF

SEQ ID NO: 126443 - protein, 14 aa, Homo sapiens
  CDR3 for alpha chain variable domain of TCR clone 63222 (TRAV12-1, TRAJ12)
CVVTRMDSSYKLIF

SEQ ID NO: 126444 - protein, 13 aa, Homo sapiens
  CDR3 for beta chain variable domain of TCR clone 63222 (TRBV20-1, TRBJ1-1)
CSARGWGNTEAFF

SEQ ID NO: 126445 - protein, 12 aa, Homo sapiens
  CDR3 for alpha chain variable domain of TCR clone 63223 (TRAV17, TRAJ57)
RAPQGGSEKLVF

SEQ ID NO: 126446 - protein, 16 aa, Homo sapiens
  CDR3 for beta chain variable domain of TCR clone 63223 (TRBV12-4, TRBJ1-5)
CASSRPVGGSNQPQHF

SEQ ID NO: 126447 - protein, 16 aa, Homo sapiens
  CDR3 for alpha chain variable domain of TCR clone 63224 (TRAV12-2, TRAJ40)
CAVIRGGTSGTYKYIF

SEQ ID NO: 126448 - protein, 13 aa, Homo sapiens
  CDR3 for beta chain variable domain of TCR clone 63224 (TRBV7-9, TRBJ1-2)
CASSLKQNYGYAF

SEQ ID NO: 126449 - protein, 14 aa, Homo sapiens
  CDR3 for alpha chain variable domain of TCR clone 63225 (TRAV12-2, TRAJ13)
CAVKKTGGHQKVTF

SEQ ID NO: 126450 - protein, 14 aa, Homo sapiens
  CDR3 for beta chain variable domain of TCR clone 63225 (TRBV7-2, TRBJ2-7)
CASSPKTSFYEQYF

SEQ ID NO: 126451 - protein, 16 aa, Homo sapiens
  CDR3 for alpha chain variable domain of TCR clone 63226 (TRAV12-3, TRAJ53)
CAMSPGSGGSNYKLTF

SEQ ID NO: 126452 - protein, 13 aa, Homo sapiens
  CDR3 for beta chain variable domain of TCR clone 63226 (TRBV12-4, TRBJ1-1)
CASSPGTGFEAFF

SEQ ID NO: 126453 - protein, 13 aa, Homo sapiens
  CDR3 for alpha chain variable domain of TCR clone 63227 (TRAV8-3, TRAJ43)
CAVVPYNNNDMRF

SEQ ID NO: 126454 - protein, 17 aa, Homo sapiens
  CDR3 for beta chain variable domain of TCR clone 63227 (TRBV7-7, TRBJ1-1)
CASIGYRPNLGVTEAFF

SEQ ID NO: 126455 - protein, 15 aa, Homo sapiens
  CDR3 for alpha chain variable domain of TCR clone 63228 (TRAV3, TRAJ22)
CAVRDRGGSARQLTF

SEQ ID NO: 126456 - protein, 15 aa, Homo sapiens
  CDR3 for beta chain variable domain of TCR clone 63228 (TRBV7-2, TRBJ2-3)
CASSLNLRDTDTQYF

SEQ ID NO: 126457 - protein, 12 aa, Homo sapiens
  CDR3 for alpha chain variable domain of TCR clone 63229 (TRAV9-2, TRAJ36)
CALKKGANNLFF

SEQ ID NO: 126458 - protein, 16 aa, Homo sapiens
  CDR3 for beta chain variable domain of TCR clone 63229 (TRBV20-1, TRBJ1-4)
CSAPGQGLLTNEKLFS

SEQ ID NO: 126459 - protein, 14 aa, Homo sapiens
  CDR3 for alpha chain variable domain of TCR clone 63230 (TRAV1-2, TRAJ16)
CAVNRFSDGQKLLL

SEQ ID NO: 126460 - protein, 15 aa, Homo sapiens
  CDR3 for beta chain variable domain of TCR clone 63230 (TRBV7-9, TRBJ1-6)
CASSSPGRGNSPLHF

SEQ ID NO: 126461 - protein, 13 aa, Homo sapiens
  CDR3 for alpha chain variable domain of TCR clone 63231 (TRAV23/DV6, TRAJ35)
RAAQLGFGNVLHC

SEQ ID NO: 126462 - protein, 15 aa, Homo sapiens
  CDR3 for beta chain variable domain of TCR clone 63231 (TRBV27, TRBJ2-2)
CASSKQGASTGELFF

SEQ ID NO: 126463 - protein, 11 aa, Homo sapiens
  CDR3 for alpha chain variable domain of TCR clone 63232 (TRAV8-3, TRAJ3)
CAATLKQCFQD

SEQ ID NO: 126464 - protein, 12 aa, Homo sapiens
  CDR3 for beta chain variable domain of TCR clone 63232 (TRBV5-1, TRBJ1-2)
CASSQDTYGYTF

SEQ ID NO: 126465 - protein, 13 aa, Homo sapiens
  CDR3 for alpha chain variable domain of TCR clone 63233 (TRAV2, TRAJ15)
CAVDSQAGTALIF

SEQ ID NO: 126466 - protein, 14 aa, Homo sapiens
  CDR3 for beta chain variable domain of TCR clone 63233 (TRBV20-1, TRBJ1-1)
CSAQTRIGGTEAFF

SEQ ID NO: 126467 - protein, 15 aa, Homo sapiens
  CDR3 for alpha chain variable domain of TCR clone 63234 (TRAV25, TRAJ52)
CAGRPGGTSYGKLTF

SEQ ID NO: 126468 - protein, 15 aa, Homo sapiens
  CDR3 for beta chain variable domain of TCR clone 63234 (TRBV7-2, TRBJ2-3)
CASSLAGAFIDTQYF

SEQ ID NO: 126469 - protein, 13 aa, Homo sapiens
  CDR3 for alpha chain variable domain of TCR clone 63235 (TRAV1-2, TRAJ9)
YAALNTGGFKTIF

SEQ ID NO: 126470 - protein, 13 aa, Homo sapiens
  CDR3 for beta chain variable domain of TCR clone 63235 (TRBV19, TRBJ1-2)
CAISVPGQDGYTF

SEQ ID NO: 126471 - protein, 14 aa, Homo sapiens
  CDR3 for alpha chain variable domain of TCR clone 63236 (TRAV6, TRAJ37)
CALGSQCNTGKLIF

SEQ ID NO: 126472 - protein, 15 aa, Homo sapiens
  CDR3 for beta chain variable domain of TCR clone 63236 (TRBV2, TRBJ2-1)
CASSEEREGDNEQFF

SEQ ID NO: 126473 - protein, 15 aa, Homo sapiens
  CDR3 for alpha chain variable domain of TCR clone 63237 (TRAV3, TRAJ22)
CAVRDRGGFARQLTF

SEQ ID NO: 126474 - protein, 14 aa, Homo sapiens
  CDR3 for beta chain variable domain of TCR clone 63237 (TRBV19, TRBJ1-5)
CASSLGLIGQPQHF

SEQ ID NO: 126475 - protein, 10 aa, Homo sapiens
  CDR3 for alpha chain variable domain of TCR clone 63238 (TRAV12-3, TRAJ49)
CAMNDDQFYF

SEQ ID NO: 126476 - protein, 16 aa, Homo sapiens
  CDR3 for beta chain variable domain of TCR clone 63238 (TRBV6-1, TRBJ2-1)
CASILRQGSSYNEQFF

SEQ ID NO: 126477 - protein, 13 aa, Homo sapiens
  CDR3 for alpha chain variable domain of TCR clone 63239 (TRAV20, TRAJ54)
CAVQAGGAQKPVF

SEQ ID NO: 126478 - protein, 14 aa, Homo sapiens
  CDR3 for beta chain variable domain of TCR clone 63239 (TRBV20-1, TRBJ2-7)
CSAKTGTGGYEQYF

SEQ ID NO: 126479 - protein, 16 aa, Homo sapiens
  CDR3 for alpha chain variable domain of TCR clone 63240 (TRAV16, TRAJ4)
CALSRMFSGGYNKLIF

SEQ ID NO: 126480 - protein, 13 aa, Homo sapiens
  CDR3 for beta chain variable domain of TCR clone 63240 (TRBV7-6, TRBJ1-2)
CASSLVADYGYTF

SEQ ID NO: 126481 - protein, 18 aa, Homo sapiens
  CDR3 for alpha chain variable domain of TCR clone 63241 (TRAV21, TRAJ52)
RAVRPSPAGGTSYGKLTF

SEQ ID NO: 126482 - protein, 14 aa, Homo sapiens
  CDR3 for beta chain variable domain of TCR clone 63241 (TRBV7-2, TRBJ2-1)
CASSPGTFYNEQFF

SEQ ID NO: 126483 - protein, 13 aa, Homo sapiens
  CDR3 for alpha chain variable domain of TCR clone 63242 (TRAV27, TRAJ41)
CAGEGNSGYALNF

SEQ ID NO: 126484 - protein, 15 aa, Homo sapiens
  CDR3 for beta chain variable domain of TCR clone 63242 (TRBV11-2, TRBJ1-3)
CASSLDGTVGNTIYF

SEQ ID NO: 126485 - protein, 14 aa, Homo sapiens
  CDR3 for alpha chain variable domain of TCR clone 63243 (TRAV8-2, TRAJ4)
CVVSPSGGYNKLIF

SEQ ID NO: 126486 - protein, 15 aa, Homo sapiens
  CDR3 for beta chain variable domain of TCR clone 63243 (TRBV4-1, TRBJ1-4)
CTSSDTGGTNEKLFF

SEQ ID NO: 126487 - protein, 16 aa, Homo sapiens
  CDR3 for alpha chain variable domain of TCR clone 63244 (TRAV27, TRAJ13)
CAGAKSDSGGYQKVTF

SEQ ID NO: 126488 - protein, 14 aa, Homo sapiens
  CDR3 for beta chain variable domain of TCR clone 63244 (TRBV7-2, TRBJ1-2)
CASSQTGSTYGYTF

SEQ ID NO: 126489 - protein, 13 aa, Homo sapiens
  CDR3 for alpha chain variable domain of TCR clone 63245 (TRAV8-3, TRAJ28)
CAVGAVGSYQLTY

SEQ ID NO: 126490 - protein, 15 aa, Homo sapiens
  CDR3 for beta chain variable domain of TCR clone 63245 (TRBV7-9, TRBJ1-5)
CASSQGHQPNQPQHF

SEQ ID NO: 126491 - protein, 16 aa, Homo sapiens
  CDR3 for alpha chain variable domain of TCR clone 63246 (TRAV30, TRAJ24)
CGTEIVDADSWGKFPF

SEQ ID NO: 126492 - protein, 14 aa, Homo sapiens
  CDR3 for beta chain variable domain of TCR clone 63246 (TRBV12-5, TRBJ2-5)
CASGSRTHQETQYV

SEQ ID NO: 126493 - protein, 14 aa, Homo sapiens
  CDR3 for alpha chain variable domain of TCR clone 63247 (TRAV12-3, TRAJ13)
CAMRNSGGYQKVTF

SEQ ID NO: 126494 - protein, 12 aa, Homo sapiens
  CDR3 for beta chain variable domain of TCR clone 63247 (TRBV29-1, TRBJ2-3)
CSVTGGADTQYF

SEQ ID NO: 126495 - protein, 18 aa, Homo sapiens
  CDR3 for alpha chain variable domain of TCR clone 63248 (TRAV1-2, TRAJ18)
CAVRDMGDRGSTLGRLDF

SEQ ID NO: 126496 - protein, 16 aa, Homo sapiens
  CDR3 for beta chain variable domain of TCR clone 63248 (TRBV29-1, TRBJ1-2)
CSVEANRDIANYGYTF

SEQ ID NO: 126497 - protein, 18 aa, Homo sapiens
  CDR3 for alpha chain variable domain of TCR clone 63249 (TRAV26-1, TRAJ52)
CIVRVEGAGGTSYGKLTF

SEQ ID NO: 126498 - protein, 15 aa, Homo sapiens
  CDR3 for beta chain variable domain of TCR clone 63249 (TRBV20-1, TRBJ2-7)
CSARDRVSGMDEQYF

SEQ ID NO: 126499 - protein, 14 aa, Homo sapiens
  CDR3 for alpha chain variable domain of TCR clone 63250 (TRAV38-1, TRAJ45)
CASHSGGGADGLTF

SEQ ID NO: 126500 - protein, 16 aa, Homo sapiens
  CDR3 for beta chain variable domain of TCR clone 63250 (TRBV19, TRBJ2-1)
CASSKAGPSSYNEQFF

SEQ ID NO: 126501 - protein, 13 aa, Homo sapiens
  CDR3 for alpha chain variable domain of TCR clone 63251 (TRAV3, TRAJ16)
CAVRDRNGQKLLF

SEQ ID NO: 126502 - protein, 15 aa, Homo sapiens
  CDR3 for beta chain variable domain of TCR clone 63251 (TRBV5-1, TRBJ2-1)
CASSPPRAPYNKQFF

SEQ ID NO: 126503 - protein, 14 aa, Homo sapiens
  CDR3 for alpha chain variable domain of TCR clone 63252 (TRAV12-3, TRAJ58)
CSMSTETSGSRLTF

SEQ ID NO: 126504 - protein, 13 aa, Homo sapiens
  CDR3 for beta chain variable domain of TCR clone 63252 (TRBV27, TRBJ2-3)
CASSWGRTDTQYF

SEQ ID NO: 126505 - protein, 14 aa, Homo sapiens
  CDR3 for alpha chain variable domain of TCR clone 63253 (TRAV8-2, TRAJ11)
CVVSERSGYSTLTF

SEQ ID NO: 126506 - protein, 16 aa, Homo sapiens
  CDR3 for beta chain variable domain of TCR clone 63253 (TRBV28, TRBJ2-1)
CASSSPEYPRDNEQFF

SEQ ID NO: 126507 - protein, 13 aa, Homo sapiens
  CDR3 for alpha chain variable domain of TCR clone 63254 (TRAV20, TRAJ34)
RAVSSYNTDKLIF

SEQ ID NO: 126508 - protein, 13 aa, Homo sapiens
  CDR3 for beta chain variable domain of TCR clone 63254 (TRBV7-9, TRBJ1-2)
CASSLKQNYGYTF

SEQ ID NO: 126509 - protein, 14 aa, Homo sapiens
  CDR3 for alpha chain variable domain of TCR clone 63255 (TRAV12-2, TRAJ9)
CAVNMEGGGFKAIF

SEQ ID NO: 126510 - protein, 14 aa, Homo sapiens
  CDR3 for beta chain variable domain of TCR clone 63255 (TRBV5-1, TRBJ1-1)
CASSLAVGSGEAFF

SEQ ID NO: 126511 - protein, 18 aa, Homo sapiens
  CDR3 for alpha chain variable domain of TCR clone 63256 (TRAV13-1, TRAJ52)
CAAKNPNAGGTSYGKLTF

SEQ ID NO: 126512 - protein, 13 aa, Homo sapiens
  CDR3 for beta chain variable domain of TCR clone 63256 (TRBV2, TRBJ1-1)
CASSEGGNTEAFF

SEQ ID NO: 126513 - protein, 14 aa, Homo sapiens
  CDR3 for alpha chain variable domain of TCR clone 63257 (TRAV1-2, TRAJ8)
CAVREDTGFQKLVF

SEQ ID NO: 126514 - protein, 17 aa, Homo sapiens
  CDR3 for beta chain variable domain of TCR clone 63257 (TRBV13, TRBJ2-3)
CASSRSRVAGGRNTQYF

SEQ ID NO: 126515 - protein, 17 aa, Homo sapiens
  CDR3 for alpha chain variable domain of TCR clone 63258 (TRAV3, TRAJ6)
CAVRDGPRAGGSYIPTF

SEQ ID NO: 126516 - protein, 14 aa, Homo sapiens
  CDR3 for beta chain variable domain of TCR clone 63258 (TRBV5-1, TRBJ2-7)
CASSLWGAQDEQYF

SEQ ID NO: 126517 - protein, 14 aa, Homo sapiens
  CDR3 for alpha chain variable domain of TCR clone 63259 (TRAV1-2, TRAJ16)
CAVNRFSDVQKLLF

SEQ ID NO: 126518 - protein, 11 aa, Homo sapiens
  CDR3 for beta chain variable domain of TCR clone 63259 (TRBV4-1, TRBJ2-2)
CASEHTGELFF

SEQ ID NO: 126519 - protein, 14 aa, Homo sapiens
  CDR3 for alpha chain variable domain of TCR clone 63260 (TRAV1-2, TRAJ16)
CAVNRFSDGQKLLF

SEQ ID NO: 126520 - protein, 14 aa, Homo sapiens
  CDR3 for beta chain variable domain of TCR clone 63260 (TRBV13, TRBJ2-5)
CASSLGRGQETRYF

SEQ ID NO: 126521 - protein, 13 aa, Homo sapiens
  CDR3 for alpha chain variable domain of TCR clone 63261 (TRAV8-3, TRAJ44)
CAVVPGTASKLTL

SEQ ID NO: 126522 - protein, 14 aa, Homo sapiens
  CDR3 for beta chain variable domain of TCR clone 63261 (TRBV11-2, TRBJ2-3)
CASSRLARTDTQYF

SEQ ID NO: 126523 - protein, 13 aa, Homo sapiens
  CDR3 for alpha chain variable domain of TCR clone 63262 (TRAV3, TRAJ16)
CAVRDRNGKKLLF

SEQ ID NO: 126524 - protein, 15 aa, Homo sapiens
  CDR3 for beta chain variable domain of TCR clone 63262 (TRBV5-1, TRBJ2-1)
CASSPPRAPYNKQFF

SEQ ID NO: 126525 - protein, 11 aa, Homo sapiens
  CDR3 for alpha chain variable domain of TCR clone 63263 (TRAV21, TRAJ31)
CAVRNNARLMF

SEQ ID NO: 126526 - protein, 17 aa, Homo sapiens
  CDR3 for beta chain variable domain of TCR clone 63263 (TRBV28, TRBJ2-2)
CASSLATGMGDAGELFF

SEQ ID NO: 126527 - protein, 13 aa, Homo sapiens
  CDR3 for alpha chain variable domain of TCR clone 63264 (TRAV2, TRAJ40)
CAVVTSGTYKYIF

SEQ ID NO: 126528 - protein, 16 aa, Homo sapiens
  CDR3 for beta chain variable domain of TCR clone 63264 (TRBV2, TRBJ1-5)
CASSEGGFYSNQPQHF

SEQ ID NO: 126529 - protein, 12 aa, Homo sapiens
  CDR3 for alpha chain variable domain of TCR clone 63265 (TRAV17, TRAJ20)
CATYSNDYMLSF

SEQ ID NO: 126530 - protein, 11 aa, Homo sapiens
  CDR3 for beta chain variable domain of TCR clone 63265 (TRBV4-1, TRBJ2-2)
CASEHTGELFF

SEQ ID NO: 126531 - protein, 11 aa, Homo sapiens
  CDR3 for alpha chain variable domain of TCR clone 63266 (TRAV12-3, TRAJ33)
CAMSVNSNYQL

SEQ ID NO: 126532 - protein, 11 aa, Homo sapiens
  CDR3 for beta chain variable domain of TCR clone 63266 (TRBV7-3, TRBJ2-5)
CASSLSETQYF

SEQ ID NO: 126533 - protein, 12 aa, Homo sapiens
  CDR3 for alpha chain variable domain of TCR clone 63267 (TRAV3, TRAJ20)
CAVRDPDYKLSF

SEQ ID NO: 126534 - protein, 14 aa, Homo sapiens
  CDR3 for beta chain variable domain of TCR clone 63267 (TRBV19, TRBJ2-7)
CASSTTRSSYEQYF

SEQ ID NO: 126535 - protein, 16 aa, Homo sapiens
  CDR3 for alpha chain variable domain of TCR clone 63268 (TRAV12-2, TRAJ40)
CAVIRGGTSGTYKYIF

SEQ ID NO: 126536 - protein, 16 aa, Homo sapiens
  CDR3 for beta chain variable domain of TCR clone 63268 (TRBV7-9, TRBJ2-1)
CASSDVAGGAYNEQFF

SEQ ID NO: 126537 - protein, 15 aa, Homo sapiens
  CDR3 for alpha chain variable domain of TCR clone 63269 (TRAV27, TRAJ38)
CAARRNAGNNRKLIW

SEQ ID NO: 126538 - protein, 13 aa, Homo sapiens
  CDR3 for beta chain variable domain of TCR clone 63269 (TRBV12-5, TRBJ2-3)
CASGDRQSDTRYL

SEQ ID NO: 126539 - protein, 13 aa, Homo sapiens
  CDR3 for alpha chain variable domain of TCR clone 63270 (TRAV17, TRAJ26)
CATVDNYGQHFVF

SEQ ID NO: 126540 - protein, 16 aa, Homo sapiens
  CDR3 for beta chain variable domain of TCR clone 63270 (TRBV2, TRBJ2-1)
CASSVGGSLSYNEQFF

SEQ ID NO: 126541 - protein, 13 aa, Homo sapiens
  CDR3 for alpha chain variable domain of TCR clone 63271 (TRAV13-1, TRAJ21)
CAASIYNFNKFYF

SEQ ID NO: 126542 - protein, 13 aa, Homo sapiens
  CDR3 for beta chain variable domain of TCR clone 63271 (TRBV27, TRBJ1-4)
CASSLMGDETLFF

SEQ ID NO: 126543 - protein, 16 aa, Homo sapiens
  CDR3 for alpha chain variable domain of TCR clone 63272 (TRAV26-1, TRAJ53)
CIVRVAMGGSNYKLTF

SEQ ID NO: 126544 - protein, 17 aa, Homo sapiens
  CDR3 for beta chain variable domain of TCR clone 63272 (TRBV11-2, TRBJ2-1)
CASSLYPPGVEYNEQFF

SEQ ID NO: 126545 - protein, 10 aa, Homo sapiens
  CDR3 for alpha chain variable domain of TCR clone 63273 (TRAV12-3, TRAJ49)
CAMNDDQFYF

SEQ ID NO: 126546 - protein, 14 aa, Homo sapiens
  CDR3 for beta chain variable domain of TCR clone 63273 (TRBV18, TRBJ2-7)
CASSPRGGAYEQYF

SEQ ID NO: 126547 - protein, 14 aa, Homo sapiens
  CDR3 for alpha chain variable domain of TCR clone 63274 (TRAV12-3, TRAJ10)
SHLPLTGGGNKLTF

SEQ ID NO: 126548 - protein, 17 aa, Homo sapiens
  CDR3 for beta chain variable domain of TCR clone 63274 (TRBV6-5, TRBJ2-7)
CASSPSGAVYGWGEQYF

SEQ ID NO: 126549 - protein, 14 aa, Homo sapiens
  CDR3 for alpha chain variable domain of TCR clone 63275 (TRAV8-2, TRAJ4)
FVVSPSGGYNKLIF

SEQ ID NO: 126550 - protein, 15 aa, Homo sapiens
  CDR3 for beta chain variable domain of TCR clone 63275 (TRBV4-1, TRBJ1-4)
CASSDTGGTNEKLFF

SEQ ID NO: 126551 - protein, 14 aa, Homo sapiens
  CDR3 for alpha chain variable domain of TCR clone 63276 (TRAV16, TRAJ42)
CALSGMGSQGNLIF

SEQ ID NO: 126552 - protein, 13 aa, Homo sapiens
  CDR3 for beta chain variable domain of TCR clone 63276 (TRBV20-1, TRBJ1-1)
CSAPLGGGTEAFF

SEQ ID NO: 126553 - protein, 13 aa, Homo sapiens
  CDR3 for alpha chain variable domain of TCR clone 63277 (TRAV21, TRAJ27)
CAARPGNAGKSTF

SEQ ID NO: 126554 - protein, 14 aa, Homo sapiens
  CDR3 for beta chain variable domain of TCR clone 63277 (TRBV7-9, TRBJ2-5)
RASSLDTAQETQYF

SEQ ID NO: 126555 - protein, 17 aa, Homo sapiens
  CDR3 for alpha chain variable domain of TCR clone 63278 (TRAV3, TRAJ6)
CAVRDGPRAGGSYIPTF

SEQ ID NO: 126556 - protein, 14 aa, Homo sapiens
  CDR3 for beta chain variable domain of TCR clone 63278 (TRBV4-1, TRBJ2-2)
CASSLTENTGELFF

SEQ ID NO: 126557 - protein, 15 aa, Homo sapiens
  CDR3 for alpha chain variable domain of TCR clone 63279 (TRAV26-1, TRAJ29)
CIVRVEGSGNTPLVF

SEQ ID NO: 126558 - protein, 13 aa, Homo sapiens
  CDR3 for beta chain variable domain of TCR clone 63279 (TRBV4-2, TRBJ1-1)
CASSQAGNTEAFF

SEQ ID NO: 126559 - protein, 14 aa, Homo sapiens
  CDR3 for alpha chain variable domain of TCR clone 63280 (TRAV12-2, TRAJ11)
CAVEGGSGYSTLTF

SEQ ID NO: 126560 - protein, 14 aa, Homo sapiens
  CDR3 for beta chain variable domain of TCR clone 63280 (TRBV6-1, TRBJ1-3)
CASVQGGGGNTIYF

SEQ ID NO: 126561 - protein, 13 aa, Homo sapiens
  CDR3 for alpha chain variable domain of TCR clone 63281 (TRAV12-1, TRAJ6)
CVVFPGGSYIPPF

SEQ ID NO: 126562 - protein, 14 aa, Homo sapiens
  CDR3 for beta chain variable domain of TCR clone 63281 (TRBV20-1, TRBJ1-3)
CSASPTGAGNTIYF

SEQ ID NO: 126563 - protein, 13 aa, Homo sapiens
  CDR3 for alpha chain variable domain of TCR clone 63282 (TRAV20, TRAJ42)
CAVQGGSQGNLIF

SEQ ID NO: 126564 - protein, 13 aa, Homo sapiens
  CDR3 for beta chain variable domain of TCR clone 63282 (TRBV12-4, TRBJ2-5)
CASSQTRGETQYF

SEQ ID NO: 126565 - protein, 14 aa, Homo sapiens
  CDR3 for alpha chain variable domain of TCR clone 63283 (TRAV2, TRAJ37)
CAVDFTSNTGKLIF

SEQ ID NO: 126566 - protein, 15 aa, Homo sapiens
  CDR3 for beta chain variable domain of TCR clone 63283 (TRBV28, TRBJ2-3)
CASSPDRRGANTQYF

SEQ ID NO: 126567 - protein, 16 aa, Homo sapiens
  CDR3 for alpha chain variable domain of TCR clone 63284 (TRAV17, TRAJ28)
CASYAYSGAGSYQLTF

SEQ ID NO: 126568 - protein, 15 aa, Homo sapiens
  CDR3 for beta chain variable domain of TCR clone 63284 (TRBV4-2, TRBJ2-1)
RASSPSGGLYNEQFF

SEQ ID NO: 126569 - protein, 14 aa, Homo sapiens
  CDR3 for alpha chain variable domain of TCR clone 63285 (TRAV12-3, TRAJ10)
SHLPLTGGGNKLTF

SEQ ID NO: 126570 - protein, 14 aa, Homo sapiens
  CDR3 for beta chain variable domain of TCR clone 63285 (TRBV19, TRBJ1-2)
CASSRQGSSIGYTF

SEQ ID NO: 126571 - protein, 19 aa, Homo sapiens
  CDR3 for alpha chain variable domain of TCR clone 63286 (TRAV1-2, TRAJ26)
CLLPLCCERPDNYGQNFVF

SEQ ID NO: 126572 - protein, 19 aa, Homo sapiens
  CDR3 for beta chain variable domain of TCR clone 63286 (TRBV25-1, TRBJ2-2)
CAILVYRVDRGRKTGELFF

SEQ ID NO: 126573 - protein, 11 aa, Homo sapiens
  CDR3 for alpha chain variable domain of TCR clone 63287 (TRAV1-2, TRAJ40)
CAVPGTYKYIF

SEQ ID NO: 126574 - protein, 15 aa, Homo sapiens
  CDR3 for beta chain variable domain of TCR clone 63287 (TRBV19, TRBJ1-1)
CASTSGQIQNTEAFF

SEQ ID NO: 126575 - protein, 17 aa, Homo sapiens
  CDR3 for alpha chain variable domain of TCR clone 63288 (TRAV12-3, TRAJ6)
CAMGARGGAGGSYIPTF

SEQ ID NO: 126576 - protein, 15 aa, Homo sapiens
  CDR3 for beta chain variable domain of TCR clone 63288 (TRBV9, TRBJ1-6)
CASSVAGTGDSPLHF

SEQ ID NO: 126577 - protein, 17 aa, Homo sapiens
  CDR3 for alpha chain variable domain of TCR clone 63289 (TRAV13-1, TRAJ28)
CAASPPYSGAGSYKLTF

SEQ ID NO: 126578 - protein, 12 aa, Homo sapiens
  CDR3 for beta chain variable domain of TCR clone 63289 (TRBV11-2, TRBJ2-2)
CASSLPTGELFF

SEQ ID NO: 126579 - protein, 13 aa, Homo sapiens
  CDR3 for alpha chain variable domain of TCR clone 63290 (TRAV30, TRAJ24)
CGTVTDSWGKLQF

SEQ ID NO: 126580 - protein, 14 aa, Homo sapiens
  CDR3 for beta chain variable domain of TCR clone 63290 (TRBV5-1, TRBJ2-7)
CASSRGESLYEQYF

SEQ ID NO: 126581 - protein, 15 aa, Homo sapiens
  CDR3 for alpha chain variable domain of TCR clone 63291 (TRAV8-2, TRAJ40)
CVVLGTTSETYKYIF

SEQ ID NO: 126582 - protein, 16 aa, Homo sapiens
  CDR3 for beta chain variable domain of TCR clone 63291 (TRBV7-3, TRBJ2-1)
CASSLEGYRSYNEQFF

SEQ ID NO: 126583 - protein, 12 aa, Homo sapiens
  CDR3 for alpha chain variable domain of TCR clone 63292 (TRAV3, TRAJ31)
CAVSDGNARLMF

SEQ ID NO: 126584 - protein, 18 aa, Homo sapiens
  CDR3 for beta chain variable domain of TCR clone 63292 (TRBV7-2, TRBJ2-3)
CASSLKREGSGITDTQYF

SEQ ID NO: 126585 - protein, 16 aa, Homo sapiens
  CDR3 for alpha chain variable domain of TCR clone 63293 (TRAV3, TRAJ23)
CAVKIGIYNQGGKLIF

SEQ ID NO: 126586 - protein, 17 aa, Homo sapiens
  CDR3 for beta chain variable domain of TCR clone 63293 (TRBV10-3, TRBJ2-6)
CAISESTAPSGANVLTF

SEQ ID NO: 126587 - protein, 12 aa, Homo sapiens
  CDR3 for alpha chain variable domain of TCR clone 63294 (TRAV21, TRAJ27)
CAPPGNAGKSTF

SEQ ID NO: 126588 - protein, 13 aa, Homo sapiens
  CDR3 for beta chain variable domain of TCR clone 63294 (TRBV2, TRBJ1-1)
CARNPTGGFHAFS

SEQ ID NO: 126589 - protein, 15 aa, Homo sapiens
  CDR3 for alpha chain variable domain of TCR clone 63295 (TRAV12-2, TRAJ53)
CAVNGGGGSNYKLTS

SEQ ID NO: 126590 - protein, 14 aa, Homo sapiens
  CDR3 for beta chain variable domain of TCR clone 63295 (TRBV19, TRBJ2-2)
CASSTLHRSGELFF

SEQ ID NO: 126591 - protein, 14 aa, Homo sapiens
  CDR3 for alpha chain variable domain of TCR clone 63296 (TRAV12-3, TRAJ10)
SHLPLTGGGNKLTF

SEQ ID NO: 126592 - protein, 13 aa, Homo sapiens
  CDR3 for beta chain variable domain of TCR clone 63296 (TRBV10-3, TRBJ1-1)
CATWTGGFAEAFF

SEQ ID NO: 126593 - protein, 13 aa, Homo sapiens
  CDR3 for alpha chain variable domain of TCR clone 63297 (TRAV17, TRAJ9)
CATDYTGGFKTIF

SEQ ID NO: 126594 - protein, 16 aa, Homo sapiens
  CDR3 for beta chain variable domain of TCR clone 63297 (TRBV7-7, TRBJ2-1)
CASSLASGTSYNKQFF

SEQ ID NO: 126595 - protein, 14 aa, Homo sapiens
  CDR3 for alpha chain variable domain of TCR clone 63298 (TRAV1-1, TRAJ23)
CAVSIYNQGGKLIF

SEQ ID NO: 126596 - protein, 15 aa, Homo sapiens
  CDR3 for beta chain variable domain of TCR clone 63298 (TRBV5-8, TRBJ2-2)
CASSLDRGATGGLFF

SEQ ID NO: 126597 - protein, 14 aa, Homo sapiens
  CDR3 for alpha chain variable domain of TCR clone 63299 (TRAV27, TRAJ17)
CRSTIRAAGNKLTF

SEQ ID NO: 126598 - protein, 16 aa, Homo sapiens
  CDR3 for beta chain variable domain of TCR clone 63299 (TRBV12-5, TRBJ2-5)
CASGPRTSGNQETQYF

SEQ ID NO: 126599 - protein, 13 aa, Homo sapiens
  CDR3 for alpha chain variable domain of TCR clone 63300 (TRAV8-3, TRAJ4)
WVFYSGGHNKLIF

SEQ ID NO: 126600 - protein, 14 aa, Homo sapiens
  CDR3 for beta chain variable domain of TCR clone 63300 (TRBV7-9, TRBJ2-3)
CASSLEDGTDTLYF

SEQ ID NO: 126601 - protein, 13 aa, Homo sapiens
  CDR3 for alpha chain variable domain of TCR clone 63301 (TRAV1-2, TRAJ9)
CAALNTGGFKTIF

SEQ ID NO: 126602 - protein, 16 aa, Homo sapiens
  CDR3 for beta chain variable domain of TCR clone 63301 (TRBV7-2, TRBJ2-5)
CASSSKWLSGQETQYF

SEQ ID NO: 126603 - protein, 12 aa, Homo sapiens
  CDR3 for alpha chain variable domain of TCR clone 63302 (TRAV12-3, TRAJ17)
CAMTLTCNKLTF

SEQ ID NO: 126604 - protein, 17 aa, Homo sapiens
  CDR3 for beta chain variable domain of TCR clone 63302 (TRBV7-8, TRBJ2-6)
CASSAGTGGAGANVLTF

SEQ ID NO: 126605 - protein, 15 aa, Homo sapiens
  CDR3 for alpha chain variable domain of TCR clone 63303 (TRAV12-2, TRAJ53)
CAVNGGGGSNYKLTF

SEQ ID NO: 126606 - protein, 13 aa, Homo sapiens
  CDR3 for beta chain variable domain of TCR clone 63303 (TRBV3-1, TRBJ1-1)
CASSPGVITDAFF

SEQ ID NO: 126607 - protein, 15 aa, Homo sapiens
  CDR3 for alpha chain variable domain of TCR clone 63304 (TRAV8-3, TRAJ45)
CASSYSGGGADGLTF

SEQ ID NO: 126608 - protein, 16 aa, Homo sapiens
  CDR3 for beta chain variable domain of TCR clone 63304 (TRBV19, TRBJ2-2)
CASRSPGTGATGELFF

SEQ ID NO: 126609 - protein, 15 aa, Homo sapiens
  CDR3 for alpha chain variable domain of TCR clone 63305 (TRAV3, TRAJ22)
CAVRDRGGSARQLTF

SEQ ID NO: 126610 - protein, 14 aa, Homo sapiens
  CDR3 for beta chain variable domain of TCR clone 63305 (TRBV19, TRBJ2-1)
RASSRLASINEQFF

SEQ ID NO: 126611 - protein, 11 aa, Homo sapiens
  CDR3 for alpha chain variable domain of TCR clone 63306 (TRAV8-3, TRAJ20)
CCGCNDYKLSF

SEQ ID NO: 126612 - protein, 16 aa, Homo sapiens
  CDR3 for beta chain variable domain of TCR clone 63306 (TRBV19, TRBJ2-2)
CASRSPGTGATGELFF

SEQ ID NO: 126613 - protein, 12 aa, Homo sapiens
  CDR3 for alpha chain variable domain of TCR clone 63307 (TRAV3, TRAJ43)
CAVRDPNNDMRF

SEQ ID NO: 126614 - protein, 15 aa, Homo sapiens
  CDR3 for beta chain variable domain of TCR clone 63307 (TRBV28, TRBJ1-1)
CASTSTRGLNTEAFF

SEQ ID NO: 126615 - protein, 13 aa, Homo sapiens
  CDR3 for alpha chain variable domain of TCR clone 63308 (TRAV8-3, TRAJ21)
CAVGAYNFNKFYF

SEQ ID NO: 126616 - protein, 16 aa, Homo sapiens
  CDR3 for beta chain variable domain of TCR clone 63308 (TRBV7-9, TRBJ2-3)
CASSPWREVGTDTQCF

SEQ ID NO: 126617 - protein, 17 aa, Homo sapiens
  CDR3 for alpha chain variable domain of TCR clone 63309 (TRAV17, TRAJ7)
CATLGRLAFGKGNQVVV

SEQ ID NO: 126618 - protein, 13 aa, Homo sapiens
  CDR3 for beta chain variable domain of TCR clone 63309 (TRBV7-3, TRBJ1-1)
CASSQDWGAEAFF

SEQ ID NO: 126619 - protein, 15 aa, Homo sapiens
  CDR3 for alpha chain variable domain of TCR clone 63310 (TRAV13-1, TRAJ27)
CAARELNTNAGKSTF

SEQ ID NO: 126620 - protein, 14 aa, Homo sapiens
  CDR3 for beta chain variable domain of TCR clone 63310 (TRBV19, TRBJ2-1)
CARGARSFQWEQFF

SEQ ID NO: 126621 - protein, 12 aa, Homo sapiens
  CDR3 for alpha chain variable domain of TCR clone 63311 (TRAV21, TRAJ11)
CAVRGGNSTLTF

SEQ ID NO: 126622 - protein, 15 aa, Homo sapiens
  CDR3 for beta chain variable domain of TCR clone 63311 (TRBV6-1, TRBJ2-7)
CASSEPIAATTEQHF

SEQ ID NO: 126623 - protein, 12 aa, Homo sapiens
  CDR3 for alpha chain variable domain of TCR clone 63312 (TRAV13-1, TRAJ49)
CAAPNTGNQFYF

SEQ ID NO: 126624 - protein, 12 aa, Homo sapiens
  CDR3 for beta chain variable domain of TCR clone 63312 (TRBV12-4, TRBJ2-7)
CASSLGGYEQYF

SEQ ID NO: 126625 - protein, 17 aa, Homo sapiens
  CDR3 for alpha chain variable domain of TCR clone 63313 (TRAV3, TRAJ28)
CAAREAYSGAGSYQLTF

SEQ ID NO: 126626 - protein, 18 aa, Homo sapiens
  CDR3 for beta chain variable domain of TCR clone 63313 (TRBV27, TRBJ2-1)
CASGNRAVGVGSKNEQFF

SEQ ID NO: 126627 - protein, 16 aa, Homo sapiens
  CDR3 for alpha chain variable domain of TCR clone 63314 (TRAV12-1, TRAJ53)
CVVTSVAGGSNYKLTF

SEQ ID NO: 126628 - protein, 14 aa, Homo sapiens
  CDR3 for beta chain variable domain of TCR clone 63314 (TRBV19, TRBJ1-5)
CASRAPDSFLSQHF

SEQ ID NO: 126629 - protein, 14 aa, Homo sapiens
  CDR3 for alpha chain variable domain of TCR clone 63315 (TRAV13-1, TRAJ4)
CSATLPSGYNKLIF

SEQ ID NO: 126630 - protein, 14 aa, Homo sapiens
  CDR3 for beta chain variable domain of TCR clone 63315 (TRBV19, TRBJ2-1)
CASPTFVLSGEQFF

SEQ ID NO: 126631 - protein, 12 aa, Homo sapiens
  CDR3 for alpha chain variable domain of TCR clone 63316 (TRAV17, TRAJ43)
CATDAFPADIRF

SEQ ID NO: 126632 - protein, 14 aa, Homo sapiens
  CDR3 for beta chain variable domain of TCR clone 63316 (TRBV20-1, TRBJ2-3)
CSARDGGSTDTQYF

SEQ ID NO: 126633 - protein, 14 aa, Homo sapiens
  CDR3 for alpha chain variable domain of TCR clone 63317 (TRAV12-3, TRAJ22)
CAMSLFGSARQLTF

SEQ ID NO: 126634 - protein, 12 aa, Homo sapiens
  CDR3 for beta chain variable domain of TCR clone 63317 (TRBV29-1, TRBJ2-3)
CSVTGGADTQYF

SEQ ID NO: 126635 - protein, 17 aa, Homo sapiens
  CDR3 for alpha chain variable domain of TCR clone 63318 (TRAV3, TRAJ6)
CAVRDGPRAGGSYIPTF

SEQ ID NO: 126636 - protein, 13 aa, Homo sapiens
  CDR3 for beta chain variable domain of TCR clone 63318 (TRBV12-5, TRBJ2-3)
CASGERQSDTQYF

SEQ ID NO: 126637 - protein, 15 aa, Homo sapiens
  CDR3 for alpha chain variable domain of TCR clone 63319 (TRAV25, TRAJ52)
CAGTSGGTSYGKLAF

SEQ ID NO: 126638 - protein, 16 aa, Homo sapiens
  CDR3 for beta chain variable domain of TCR clone 63319 (TRBV15, TRBJ1-2)
CATSRGPRTGGGGYTF

SEQ ID NO: 126639 - protein, 16 aa, Homo sapiens
  CDR3 for alpha chain variable domain of TCR clone 63320 (TRAV3, TRAJ23)
CAVKVGIYNQGGKLIF

SEQ ID NO: 126640 - protein, 17 aa, Homo sapiens
  CDR3 for beta chain variable domain of TCR clone 63320 (TRBV10-3, TRBJ2-6)
CAISESTAPSGANVLTF

SEQ ID NO: 126641 - protein, 13 aa, Homo sapiens
  CDR3 for alpha chain variable domain of TCR clone 63321 (TRAV13-2, TRAJ40)
CAEFTSGTYKYIF

SEQ ID NO: 126642 - protein, 11 aa, Homo sapiens
  CDR3 for beta chain variable domain of TCR clone 63321 (TRBV11-2, TRBJ2-2)
CASSLPGELFF

SEQ ID NO: 126643 - protein, 10 aa, Homo sapiens
  CDR3 for alpha chain variable domain of TCR clone 63322 (TRAV17, TRAJ36)
CATVAGNLFF

SEQ ID NO: 126644 - protein, 16 aa, Homo sapiens
  CDR3 for beta chain variable domain of TCR clone 63322 (TRBV13, TRBJ2-2)
CASSPRTGEHTGELFF

SEQ ID NO: 126645 - protein, 21 aa, Homo sapiens
  CDR3 for alpha chain variable domain of TCR clone 63323 (TRAV12-1, TRAJ32)
SSVIQPPTSMNYGGATNNLIF

SEQ ID NO: 126646 - protein, 15 aa, Homo sapiens
  CDR3 for beta chain variable domain of TCR clone 63323 (TRBV7-9, TRBJ2-2)
CASGPLDTFPGELFF

SEQ ID NO: 126647 - protein, 15 aa, Homo sapiens
  CDR3 for alpha chain variable domain of TCR clone 63324 (TRAV26-1, TRAJ40)
CIVRAVPSGTYKYIF

SEQ ID NO: 126648 - protein, 14 aa, Homo sapiens
  CDR3 for beta chain variable domain of TCR clone 63324 (TRBV19, TRBJ2-1)
CASKDPGLTNEQFF

SEQ ID NO: 126649 - protein, 14 aa, Homo sapiens
  CDR3 for alpha chain variable domain of TCR clone 63325 (TRAV38-2/DV8, TRAJ30)
CAYMDGLGGDKIIF

SEQ ID NO: 126650 - protein, 15 aa, Homo sapiens
  CDR3 for beta chain variable domain of TCR clone 63325 (TRBV7-9, TRBJ2-2)
CASRPAYRDTGELFF

SEQ ID NO: 126651 - protein, 13 aa, Homo sapiens
  CDR3 for alpha chain variable domain of TCR clone 63326 (TRAV26-1, TRAJ40)
CIVRVEGTYKYIF

SEQ ID NO: 126652 - protein, 15 aa, Homo sapiens
  CDR3 for beta chain variable domain of TCR clone 63326 (TRBV12-4, TRBJ1-2)
CAGSLAHRDGQAYTF

SEQ ID NO: 126653 - protein, 12 aa, Homo sapiens
  CDR3 for alpha chain variable domain of TCR clone 63327 (TRAV8-3, TRAJ20)
CAVGANDYKLSF

SEQ ID NO: 126654 - protein, 16 aa, Homo sapiens
  CDR3 for beta chain variable domain of TCR clone 63327 (TRBV19, TRBJ2-2)
CASRSPGTGATGELCF

SEQ ID NO: 126655 - protein, 14 aa, Homo sapiens
  CDR3 for alpha chain variable domain of TCR clone 63328 (TRAV9-2, TRAJ39)
CALYIYNAGNMLTF

SEQ ID NO: 126656 - protein, 14 aa, Homo sapiens
  CDR3 for beta chain variable domain of TCR clone 63328 (TRBV2, TRBJ2-3)
CASSDWREKDTQYF

SEQ ID NO: 126657 - protein, 13 aa, Homo sapiens
  CDR3 for alpha chain variable domain of TCR clone 63329 (TRAV14/DV4, TRAJ4)
CAMKAGGYNKLIF

SEQ ID NO: 126658 - protein, 16 aa, Homo sapiens
  CDR3 for beta chain variable domain of TCR clone 63329 (TRBV10-3, TRBJ1-6)
CAISERRGQGNSPLHF

SEQ ID NO: 126659 - protein, 14 aa, Homo sapiens
  CDR3 for alpha chain variable domain of TCR clone 63330 (TRAV2, TRAJ9)
CAVEDRSGGFKTIF

SEQ ID NO: 126660 - protein, 16 aa, Homo sapiens
  CDR3 for beta chain variable domain of TCR clone 63330 (TRBV19, TRBJ1-1)
CASRFGGPVTGTEAFF

SEQ ID NO: 126661 - protein, 13 aa, Homo sapiens
  CDR3 for alpha chain variable domain of TCR clone 63331 (TRAV21, TRAJ57)
CAVTQGGSEKLVF

SEQ ID NO: 126662 - protein, 14 aa, Homo sapiens
  CDR3 for beta chain variable domain of TCR clone 63331 (TRBV4-2, TRBJ2-1)
CASGLDRAYNEQFF

SEQ ID NO: 126663 - protein, 15 aa, Homo sapiens
  CDR3 for alpha chain variable domain of TCR clone 63332 (TRAV2, TRAJ9)
CAVEDRGTGGFKTIF

SEQ ID NO: 126664 - protein, 14 aa, Homo sapiens
  CDR3 for beta chain variable domain of TCR clone 63332 (TRBV7-8, TRBJ2-3)
CASSLEAGTDTQYF

SEQ ID NO: 126665 - protein, 20 aa, Homo sapiens
  CDR3 for alpha chain variable domain of TCR clone 63333 (TRAV8-3, TRAJ44)
LSTSVLWVRLYTGTASKLTF

SEQ ID NO: 126666 - protein, 16 aa, Homo sapiens
  CDR3 for beta chain variable domain of TCR clone 63333 (TRBV7-2, TRBJ2-1)
CASSYPSGGAGDEQFF

SEQ ID NO: 126667 - protein, 15 aa, Homo sapiens
  CDR3 for alpha chain variable domain of TCR clone 63334 (TRAV16, TRAJ12)
CSKWPLRDSSYKLIF

SEQ ID NO: 126668 - protein, 15 aa, Homo sapiens
  CDR3 for beta chain variable domain of TCR clone 63334 (TRBV11-2, TRBJ2-1)
CASSLAPRAHNEQFF

SEQ ID NO: 126669 - protein, 15 aa, Homo sapiens
  CDR3 for alpha chain variable domain of TCR clone 63335 (TRAV12-1, TRAJ9)
CVVSFGDAGGFKTIF

SEQ ID NO: 126670 - protein, 13 aa, Homo sapiens
  CDR3 for beta chain variable domain of TCR clone 63335 (TRBV2, TRBJ1-4)
CASSERAGEKMFF

SEQ ID NO: 126671 - protein, 13 aa, Homo sapiens
  CDR3 for alpha chain variable domain of TCR clone 63336 (TRAV27, TRAJ3)
ASLRGSSASKIIF

SEQ ID NO: 126672 - protein, 17 aa, Homo sapiens
  CDR3 for beta chain variable domain of TCR clone 63336 (TRBV28, TRBJ1-3)
CASSMGWASGNTIYLER

SEQ ID NO: 126673 - protein, 17 aa, Homo sapiens
  CDR3 for alpha chain variable domain of TCR clone 63337 (TRAV26-1, TRAJ10)
CIVSFRGLTGGGNKLTF

SEQ ID NO: 126674 - protein, 13 aa, Homo sapiens
  CDR3 for beta chain variable domain of TCR clone 63337 (TRBV20-1, TRBJ2-3)
CGASRQAADTQYF

SEQ ID NO: 126675 - protein, 18 aa, Homo sapiens
  CDR3 for alpha chain variable domain of TCR clone 63338 (TRAV12-3, TRAJ52)
CAMSVGGAGGTSYGKLTF

SEQ ID NO: 126676 - protein, 12 aa, Homo sapiens
  CDR3 for beta chain variable domain of TCR clone 63338 (TRBV11-3, TRBJ1-1)
CASSHRQGEAFF

SEQ ID NO: 126677 - protein, 11 aa, Homo sapiens
  CDR3 for alpha chain variable domain of TCR clone 63339 (TRAV2, TRAJ21)
CAVFNFNKFYF

SEQ ID NO: 126678 - protein, 15 aa, Homo sapiens
  CDR3 for beta chain variable domain of TCR clone 63339 (TRBV19, TRBJ2-1)
CASSSPGVPLDEQFF

SEQ ID NO: 126679 - protein, 14 aa, Homo sapiens
  CDR3 for alpha chain variable domain of TCR clone 63340 (TRAV12-3, TRAJ3)
CNERGNSSASKIIF

SEQ ID NO: 126680 - protein, 16 aa, Homo sapiens
  CDR3 for beta chain variable domain of TCR clone 63340 (TRBV6-5, TRBJ2-1)
CASSYSLSGGYNEQFF

SEQ ID NO: 126681 - protein, 14 aa, Homo sapiens
  CDR3 for alpha chain variable domain of TCR clone 63341 (TRAV12-1, TRAJ12)
CVVNGRDSSDKLIF

SEQ ID NO: 126682 - protein, 13 aa, Homo sapiens
  CDR3 for beta chain variable domain of TCR clone 63341 (TRBV28, TRBJ2-2)
CASIRESTGELFF

SEQ ID NO: 126683 - protein, 13 aa, Homo sapiens
  CDR3 for alpha chain variable domain of TCR clone 63342 (TRAV26-1, TRAJ34)
CVVRGHNTDKLIF

SEQ ID NO: 126684 - protein, 15 aa, Homo sapiens
  CDR3 for beta chain variable domain of TCR clone 63342 (TRBV4-1, TRBJ2-7)
CASSQEWGPSYEQYF

SEQ ID NO: 126685 - protein, 14 aa, Homo sapiens
  CDR3 for alpha chain variable domain of TCR clone 63343 (TRAV12-2, TRAJ13)
CAVKKTGGYQKVTF

SEQ ID NO: 126686 - protein, 16 aa, Homo sapiens
  CDR3 for beta chain variable domain of TCR clone 63343 (TRBV12-5, TRBJ2-5)
CASGPRTSGNQGTQYF

SEQ ID NO: 126687 - protein, 16 aa, Homo sapiens
  CDR3 for alpha chain variable domain of TCR clone 63344 (TRAV3, TRAJ37)
CAVRPHGSGNTCKLIF

SEQ ID NO: 126688 - protein, 13 aa, Homo sapiens
  CDR3 for beta chain variable domain of TCR clone 63344 (TRBV2, TRBJ1-5)
CASGTGGYQPQHF

SEQ ID NO: 126689 - protein, 14 aa, Homo sapiens
  CDR3 for alpha chain variable domain of TCR clone 63345 (TRAV12-3, TRAJ9)
CAMSPNTGGFKTIF

SEQ ID NO: 126690 - protein, 13 aa, Homo sapiens
  CDR3 for beta chain variable domain of TCR clone 63345 (TRBV12-4, TRBJ1-2)
CASSLRQGEGYTF

SEQ ID NO: 126691 - protein, 14 aa, Homo sapiens
  CDR3 for alpha chain variable domain of TCR clone 63346 (TRAV12-2, TRAJ17)
CAVLFKAAGNKLTF

SEQ ID NO: 126692 - protein, 16 aa, Homo sapiens
  CDR3 for beta chain variable domain of TCR clone 63346 (TRBV7-9, TRBJ2-7)
CASSSPSANTVNEQYF

SEQ ID NO: 126693 - protein, 14 aa, Homo sapiens
  CDR3 for alpha chain variable domain of TCR clone 63347 (TRAV13-2, TRAJ17)
CAEDSKAAGNKLTS

SEQ ID NO: 126694 - protein, 11 aa, Homo sapiens
  CDR3 for beta chain variable domain of TCR clone 63347 (TRBV6-3, TRBJ2-3)
CATGQADTQYF

SEQ ID NO: 126695 - protein, 13 aa, Homo sapiens
  CDR3 for alpha chain variable domain of TCR clone 63348 (TRAV27, TRAJ45)
CRSSGGGADGLTF

SEQ ID NO: 126696 - protein, 14 aa, Homo sapiens
  CDR3 for beta chain variable domain of TCR clone 63348 (TRBV7-3, TRBJ2-1)
CASSLGTSANEQFF

SEQ ID NO: 126697 - protein, 14 aa, Homo sapiens
  CDR3 for alpha chain variable domain of TCR clone 63349 (TRAV1-2, TRAJ8)
CAVREDTGFQKLVF

SEQ ID NO: 126698 - protein, 14 aa, Homo sapiens
  CDR3 for beta chain variable domain of TCR clone 63349 (TRBV2, TRBJ2-1)
CASRTGSSYNEQFF

SEQ ID NO: 126699 - protein, 20 aa, Homo sapiens
  CDR3 for alpha chain variable domain of TCR clone 63350 (TRAV12-1, TRAJ42)
SSVIQPPTSVKGGSQGNLTF

SEQ ID NO: 126700 - protein, 18 aa, Homo sapiens
  CDR3 for beta chain variable domain of TCR clone 63350 (TRBV11-2, TRBJ2-3)
CAGSLGGASRGAPNTQYF

SEQ ID NO: 126701 - protein, 14 aa, Homo sapiens
  CDR3 for alpha chain variable domain of TCR clone 63351 (TRAV12-2, TRAJ5)
CAVNRSTGRRGLTF

SEQ ID NO: 126702 - protein, 12 aa, Homo sapiens
  CDR3 for beta chain variable domain of TCR clone 63351 (TRBV19, TRBJ1-5)
CASSIAQQPQHF

SEQ ID NO: 126703 - protein, 14 aa, Homo sapiens
  CDR3 for alpha chain variable domain of TCR clone 63352 (TRAV12-1, TRAJ17)
CVVNYKAAGNKLTF

SEQ ID NO: 126704 - protein, 17 aa, Homo sapiens
  CDR3 for beta chain variable domain of TCR clone 63352 (TRBV20-1, TRBJ2-1)
CSASSTGLAGSYNEQFF

SEQ ID NO: 126705 - protein, 15 aa, Homo sapiens
  CDR3 for alpha chain variable domain of TCR clone 63353 (TRAV17, TRAJ57)
CTTGPSQGGSEKLVF

SEQ ID NO: 126706 - protein, 16 aa, Homo sapiens
  CDR3 for beta chain variable domain of TCR clone 63353 (TRBV12-4, TRBJ1-5)
CASSRPVGGSNQPQHF

SEQ ID NO: 126707 - protein, 10 aa, Homo sapiens
  CDR3 for alpha chain variable domain of TCR clone 63354 (TRAV12-3, TRAJ49)
CAMNDDQFYF

SEQ ID NO: 126708 - protein, 15 aa, Homo sapiens
  CDR3 for beta chain variable domain of TCR clone 63354 (TRBV6-3, TRBJ2-7)
CASSSPGTVFYEQYF

SEQ ID NO: 126709 - protein, 15 aa, Homo sapiens
  CDR3 for alpha chain variable domain of TCR clone 63355 (TRAV21, TRAJ53)
CATLNSGGSNYKLTF

SEQ ID NO: 126710 - protein, 15 aa, Homo sapiens
  CDR3 for beta chain variable domain of TCR clone 63355 (TRBV20-1, TRBJ2-7)
CSARDRVSGMDGQYF

SEQ ID NO: 126711 - protein, 12 aa, Homo sapiens
  CDR3 for alpha chain variable domain of TCR clone 63356 (TRAV13-2, TRAJ23)
CAERHRGGKLIF

SEQ ID NO: 126712 - protein, 15 aa, Homo sapiens
  CDR3 for beta chain variable domain of TCR clone 63356 (TRBV13, TRBJ1-2)
CAGSLGRQPGYGYTF

SEQ ID NO: 126713 - protein, 11 aa, Homo sapiens
  CDR3 for alpha chain variable domain of TCR clone 63357 (TRAV12-3, TRAJ27)
CAMANAGKSTF

SEQ ID NO: 126714 - protein, 15 aa, Homo sapiens
  CDR3 for beta chain variable domain of TCR clone 63357 (TRBV3-1, TRBJ1-2)
CASSHPGTPGYGYTF

SEQ ID NO: 126715 - protein, 14 aa, Homo sapiens
  CDR3 for alpha chain variable domain of TCR clone 63358 (TRAV26-2, TRAJ32)
CCVGYGGATNKLIF

SEQ ID NO: 126716 - protein, 14 aa, Homo sapiens
  CDR3 for beta chain variable domain of TCR clone 63358 (TRBV27, TRBJ2-5)
CQQFIPAGGETQYF

SEQ ID NO: 126717 - protein, 13 aa, Homo sapiens
  CDR3 for alpha chain variable domain of TCR clone 63359 (TRAV21, TRAJ20)
CAVGLRVDYKLSF

SEQ ID NO: 126718 - protein, 13 aa, Homo sapiens
  CDR3 for beta chain variable domain of TCR clone 63359 (TRBV10-3, TRBJ1-2)
CAISERDSYGYTF

SEQ ID NO: 126719 - protein, 15 aa, Homo sapiens
  CDR3 for alpha chain variable domain of TCR clone 63360 (TRAV38-1, TRAJ37)
CAFIHGSGNTGKLIF

SEQ ID NO: 126720 - protein, 16 aa, Homo sapiens
  CDR3 for beta chain variable domain of TCR clone 63360 (TRBV7-9, TRBJ2-1)
CASSDVAGGSYNEQFF

SEQ ID NO: 126721 - protein, 14 aa, Homo sapiens
  CDR3 for alpha chain variable domain of TCR clone 63361 (TRAV12-1, TRAJ17)
CVVNYKAAGNKLTF

SEQ ID NO: 126722 - protein, 16 aa, Homo sapiens
  CDR3 for beta chain variable domain of TCR clone 63361 (TRBV20-1, TRBJ2-7)
CSASTSGRLSSYEQYF

SEQ ID NO: 126723 - protein, 14 aa, Homo sapiens
  CDR3 for alpha chain variable domain of TCR clone 63362 (TRAV12-2, TRAJ5)
CAVNRSTGRRALTF

SEQ ID NO: 126724 - protein, 12 aa, Homo sapiens
  CDR3 for beta chain variable domain of TCR clone 63362 (TRBV19, TRBJ1-5)
CASRIAQQPQHF

SEQ ID NO: 126725 - protein, 13 aa, Homo sapiens
  CDR3 for alpha chain variable domain of TCR clone 63363 (TRAV35, TRAJ42)
CAGFPGSPGNLIF

SEQ ID NO: 126726 - protein, 13 aa, Homo sapiens
  CDR3 for beta chain variable domain of TCR clone 63363 (TRBV29-1, TRBJ2-1)
CSVEGGRVNEQFF

SEQ ID NO: 126727 - protein, 13 aa, Homo sapiens
  CDR3 for alpha chain variable domain of TCR clone 63364 (TRAV23/DV6, TRAJ15)
CAALPAGRNCSDL

SEQ ID NO: 126728 - protein, 14 aa, Homo sapiens
  CDR3 for beta chain variable domain of TCR clone 63364 (TRBV7-9, TRBJ1-2)
CARSRQGANYGYTF

SEQ ID NO: 126729 - protein, 13 aa, Homo sapiens
  CDR3 for alpha chain variable domain of TCR clone 63365 (TRAV21, TRAJ47)
CAVSGLYGNKLVF

SEQ ID NO: 126730 - protein, 12 aa, Homo sapiens
  CDR3 for beta chain variable domain of TCR clone 63365 (TRBV7-9, TRBJ2-7)
CASSIKREEQYF

SEQ ID NO: 126731 - protein, 13 aa, Homo sapiens
  CDR3 for alpha chain variable domain of TCR clone 63366 (TRAV12-1, TRAJ39)
CVALNNAGNMLTF

SEQ ID NO: 126732 - protein, 16 aa, Homo sapiens
  CDR3 for beta chain variable domain of TCR clone 63366 (TRBV7-3, TRBJ2-3)
CASSPRTFPSTDTQYF

SEQ ID NO: 126733 - protein, 11 aa, Homo sapiens
  CDR3 for alpha chain variable domain of TCR clone 63367 (TRAV21, TRAJ31)
CPCGNNARLMF

SEQ ID NO: 126734 - protein, 16 aa, Homo sapiens
  CDR3 for beta chain variable domain of TCR clone 63367 (TRBV27, TRBJ2-5)
CASSFGPGGTKETQYF

SEQ ID NO: 126735 - protein, 13 aa, Homo sapiens
  CDR3 for alpha chain variable domain of TCR clone 63368 (TRAV12-3, TRAJ13)
CAMTSGGYQKVTF

SEQ ID NO: 126736 - protein, 10 aa, Homo sapiens
  CDR3 for beta chain variable domain of TCR clone 63368 (TRBV28, TRBJ1-2)
CASSSDRAVF

SEQ ID NO: 126737 - protein, 12 aa, Homo sapiens
  CDR3 for alpha chain variable domain of TCR clone 63369 (TRAV35, TRAJ30)
CAGLNSDDKIIF

SEQ ID NO: 126738 - protein, 15 aa, Homo sapiens
  CDR3 for beta chain variable domain of TCR clone 63369 (TRBV9, TRBJ1-6)
CASSVAGTGDSPLHF

SEQ ID NO: 126739 - protein, 12 aa, Homo sapiens
  CDR3 for alpha chain variable domain of TCR clone 63370 (TRAV13-1, TRAJ53)
AASGGSNYKLTF

SEQ ID NO: 126740 - protein, 15 aa, Homo sapiens
  CDR3 for beta chain variable domain of TCR clone 63370 (TRBV5-1, TRBJ2-1)
CASSPPRAPYNKQFF

SEQ ID NO: 126741 - protein, 18 aa, Homo sapiens
  CDR3 for alpha chain variable domain of TCR clone 63371 (TRAV9-2, TRAJ52)
CALSRHNAGGTSFGKLTF

SEQ ID NO: 126742 - protein, 13 aa, Homo sapiens
  CDR3 for beta chain variable domain of TCR clone 63371 (TRBV7-9, TRBJ1-2)
CASSLKQNYGYTF

SEQ ID NO: 126743 - protein, 13 aa, Homo sapiens
  CDR3 for alpha chain variable domain of TCR clone 63372 (TRAV8-6, TRAJ49)
CAVITNTGNQFYF

SEQ ID NO: 126744 - protein, 16 aa, Homo sapiens
  CDR3 for beta chain variable domain of TCR clone 63372 (TRBV2, TRBJ1-1)
CASSPPNRGMNTEAFF

SEQ ID NO: 126745 - protein, 14 aa, Homo sapiens
  CDR3 for alpha chain variable domain of TCR clone 63373 (TRAV26-1, TRAJ26)
CIVRATFIGQNFVF

SEQ ID NO: 126746 - protein, 16 aa, Homo sapiens
  CDR3 for beta chain variable domain of TCR clone 63373 (TRBV12-4, TRBJ2-7)
CASRSTGTGPSYEQYF

SEQ ID NO: 126747 - protein, 14 aa, Homo sapiens
  CDR3 for alpha chain variable domain of TCR clone 63374 (TRAV26-1, TRAJ38)
CIADNAGNNRKLIW

SEQ ID NO: 126748 - protein, 15 aa, Homo sapiens
  CDR3 for beta chain variable domain of TCR clone 63374 (TRBV27, TRBJ2-1)
CASSNGGGSSNEQFS

SEQ ID NO: 126749 - protein, 16 aa, Homo sapiens
  CDR3 for alpha chain variable domain of TCR clone 63375 (TRAV8-3, TRAJ8)
CAVPRDGNTGFQKLVV

SEQ ID NO: 126750 - protein, 14 aa, Homo sapiens
  CDR3 for beta chain variable domain of TCR clone 63375 (TRBV28, TRBJ1-1)
CASSESGRGTEAFF

SEQ ID NO: 126751 - protein, 16 aa, Homo sapiens
  CDR3 for alpha chain variable domain of TCR clone 63376 (TRAV17, TRAJ35)
CATAEGGIGFGNVLHF

SEQ ID NO: 126752 - protein, 19 aa, Homo sapiens
  CDR3 for beta chain variable domain of TCR clone 63376 (TRBV19, TRBJ2-5)
CASSIGQVTDFFLGETQYF

SEQ ID NO: 126753 - protein, 13 aa, Homo sapiens
  CDR3 for alpha chain variable domain of TCR clone 63377 (TRAV29/DV5, TRAJ44)
CAASTGTASKLTF

SEQ ID NO: 126754 - protein, 14 aa, Homo sapiens
  CDR3 for beta chain variable domain of TCR clone 63377 (TRBV12-5, TRBJ2-5)
CASGSRTHQETQYF

SEQ ID NO: 126755 - protein, 14 aa, Homo sapiens
  CDR3 for alpha chain variable domain of TCR clone 63378 (TRAV12-1, TRAJ17)
CVVNYKAAGNKLTF

SEQ ID NO: 126756 - protein, 17 aa, Homo sapiens
  CDR3 for beta chain variable domain of TCR clone 63378 (TRBV20-1, TRBJ2-1)
CSASSSGLAGSNNEQFF

SEQ ID NO: 126757 - protein, 16 aa, Homo sapiens
  CDR3 for alpha chain variable domain of TCR clone 63379 (TRAV3, TRAJ21)
CAVRDIERGNFNKFYF

SEQ ID NO: 126758 - protein, 13 aa, Homo sapiens
  CDR3 for beta chain variable domain of TCR clone 63379 (TRBV27, TRBJ2-7)
CASSLTIGYEQYF

SEQ ID NO: 126759 - protein, 14 aa, Homo sapiens
  CDR3 for alpha chain variable domain of TCR clone 63380 (TRAV9-2, TRAJ39)
CALYIYNAGNMLTF

SEQ ID NO: 126760 - protein, 14 aa, Homo sapiens
  CDR3 for beta chain variable domain of TCR clone 63380 (TRBV20-1, TRBJ2-7)
CSAKTGTGGYEQYF

SEQ ID NO: 126761 - protein, 13 aa, Homo sapiens
  CDR3 for alpha chain variable domain of TCR clone 63381 (TRAV12-3, TRAJ33)
CAMSVNSNYQLIW

SEQ ID NO: 126762 - protein, 14 aa, Homo sapiens
  CDR3 for beta chain variable domain of TCR clone 63381 (TRBV9, TRBJ2-7)
CASSVGVGSYEQYF

SEQ ID NO: 126763 - protein, 11 aa, Homo sapiens
  CDR3 for alpha chain variable domain of TCR clone 63382 (TRAV12-1, TRAJ15)
CVVNAGTALIF

SEQ ID NO: 126764 - protein, 14 aa, Homo sapiens
  CDR3 for beta chain variable domain of TCR clone 63382 (TRBV13, TRBJ2-5)
CASSLGPRGETQYF

SEQ ID NO: 126765 - protein, 11 aa, Homo sapiens
  CDR3 for alpha chain variable domain of TCR clone 63383 (TRAV12-1, TRAJ21)
CVVYNFNKFYF

SEQ ID NO: 126766 - protein, 16 aa, Homo sapiens
  CDR3 for beta chain variable domain of TCR clone 63383 (TRBV9, TRBJ2-2)
CASSAMGKGNTGELFF

SEQ ID NO: 126767 - protein, 14 aa, Homo sapiens
  CDR3 for alpha chain variable domain of TCR clone 63384 (TRAV2, TRAJ9)
CAVEDRSGGFKTIF

SEQ ID NO: 126768 - protein, 17 aa, Homo sapiens
  CDR3 for beta chain variable domain of TCR clone 63384 (TRBV7-8, TRBJ2-6)
CASSAGTGGAGANVLTL

SEQ ID NO: 126769 - protein, 13 aa, Homo sapiens
  CDR3 for alpha chain variable domain of TCR clone 63385 (TRAV8-3, TRAJ28)
CAVGAVGGYQLTF

SEQ ID NO: 126770 - protein, 17 aa, Homo sapiens
  CDR3 for beta chain variable domain of TCR clone 63385 (TRBV11-2, TRBJ2-1)
CASSLYPPGVEYNEQFF

SEQ ID NO: 126771 - protein, 12 aa, Homo sapiens
  CDR3 for alpha chain variable domain of TCR clone 63386 (TRAV12-3, TRAJ17)
CAMTLTGNKLTF

SEQ ID NO: 126772 - protein, 13 aa, Homo sapiens
  CDR3 for beta chain variable domain of TCR clone 63386 (TRBV12-4, TRBJ1-4)
CASAMGHNEKLFF

SEQ ID NO: 126773 - protein, 13 aa, Homo sapiens
  CDR3 for alpha chain variable domain of TCR clone 63387 (TRAV12-2, TRAJ6)
CAVNVSRKLHTYI

SEQ ID NO: 126774 - protein, 12 aa, Homo sapiens
  CDR3 for beta chain variable domain of TCR clone 63387 (TRBV6-3, TRBJ2-7)
CASSLTPYEQYF

SEQ ID NO: 126775 - protein, 12 aa, Homo sapiens
  CDR3 for alpha chain variable domain of TCR clone 63388 (TRAV8-3, TRAJ26)
CAGDNYGQNFVF

SEQ ID NO: 126776 - protein, 16 aa, Homo sapiens
  CDR3 for beta chain variable domain of TCR clone 63388 (TRBV7-9, TRBJ1-2)
CASSLGFSSGEDGYTF

SEQ ID NO: 126777 - protein, 16 aa, Homo sapiens
  CDR3 for alpha chain variable domain of TCR clone 63389 (TRAV3, TRAJ37)
CAVRGKGSGNTGKLIF

SEQ ID NO: 126778 - protein, 13 aa, Homo sapiens
  CDR3 for beta chain variable domain of TCR clone 63389 (TRBV19, TRBJ1-2)
RASSVPGQDGYTF

SEQ ID NO: 126779 - protein, 12 aa, Homo sapiens
  CDR3 for alpha chain variable domain of TCR clone 63390 (TRAV3, TRAJ43)
CALRDPNNDMRF

SEQ ID NO: 126780 - protein, 15 aa, Homo sapiens
  CDR3 for beta chain variable domain of TCR clone 63390 (TRBV27, TRBJ1-5)
CASSLGTGFDQPQHF

SEQ ID NO: 126781 - protein, 15 aa, Homo sapiens
  CDR3 for alpha chain variable domain of TCR clone 63391 (TRAV8-3, TRAJ45)
CASSYSGGGADGLTF

SEQ ID NO: 126782 - protein, 15 aa, Homo sapiens
  CDR3 for beta chain variable domain of TCR clone 63391 (TRBV20-1, TRBJ2-7)
CSARDRFSGMDEQYF

SEQ ID NO: 126783 - protein, 18 aa, Homo sapiens
  CDR3 for alpha chain variable domain of TCR clone 63392 (TRAV21, TRAJ52)
CAVRPSPAGGTSYGKLTF

SEQ ID NO: 126784 - protein, 18 aa, Homo sapiens
  CDR3 for beta chain variable domain of TCR clone 63392 (TRBV18, TRBJ2-3)
CASSYTSGAAGGTDTQYF

SEQ ID NO: 126785 - protein, 12 aa, Homo sapiens
  CDR3 for alpha chain variable domain of TCR clone 63393 (TRAV8-3, TRAJ15)
CAVGAPLSALIF

SEQ ID NO: 126786 - protein, 16 aa, Homo sapiens
  CDR3 for beta chain variable domain of TCR clone 63393 (TRBV5-1, TRBJ2-7)
CASSYASTSSGGEQYF

SEQ ID NO: 126787 - protein, 12 aa, Homo sapiens
  CDR3 for alpha chain variable domain of TCR clone 63394 (TRAV12-2, TRAJ47)
CAVAGYGNKLVF

SEQ ID NO: 126788 - protein, 14 aa, Homo sapiens
  CDR3 for beta chain variable domain of TCR clone 63394 (TRBV20-1, TRBJ1-1)
CSAMGGTANTEAFF

SEQ ID NO: 126789 - protein, 16 aa, Homo sapiens
  CDR3 for alpha chain variable domain of TCR clone 63395 (TRAV2, TRAJ4)
CDVEDRFSGGYNKLIF

SEQ ID NO: 126790 - protein, 13 aa, Homo sapiens
  CDR3 for beta chain variable domain of TCR clone 63395 (TRBV12-4, TRBJ2-1)
CASSFHSGSEQFF

SEQ ID NO: 126791 - protein, 16 aa, Homo sapiens
  CDR3 for alpha chain variable domain of TCR clone 63396 (TRAV12-3, TRAJ10)
CAMKKGITGGGNKLTF

SEQ ID NO: 126792 - protein, 12 aa, Homo sapiens
  CDR3 for beta chain variable domain of TCR clone 63396 (TRBV20-1, TRBJ2-7)
CSAMTPTKEQYF

SEQ ID NO: 126793 - protein, 14 aa, Homo sapiens
  CDR3 for alpha chain variable domain of TCR clone 63397 (TRAV12-3, TRAJ9)
CAMSPNTGGCKTIF

SEQ ID NO: 126794 - protein, 12 aa, Homo sapiens
  CDR3 for beta chain variable domain of TCR clone 63397 (TRBV19, TRBJ1-5)
CASSIAQQPQHF

SEQ ID NO: 126795 - protein, 13 aa, Homo sapiens
  CDR3 for alpha chain variable domain of TCR clone 63398 (TRAV23/DV6, TRAJ47)
CAASMTRGNKLVS

SEQ ID NO: 126796 - protein, 14 aa, Homo sapiens
  CDR3 for beta chain variable domain of TCR clone 63398 (TRBV7-3, TRBJ1-1)
CASSLKGGNTEAFF

SEQ ID NO: 126797 - protein, 16 aa, Homo sapiens
  CDR3 for alpha chain variable domain of TCR clone 63399 (TRAV26-1, TRAJ38)
CIVRVELGGNNRKLIW

SEQ ID NO: 126798 - protein, 14 aa, Homo sapiens
  CDR3 for beta chain variable domain of TCR clone 63399 (TRBV5-1, TRBJ2-3)
CASSPGLAADTQHF

SEQ ID NO: 126799 - protein, 15 aa, Homo sapiens
  CDR3 for alpha chain variable domain of TCR clone 63400 (TRAV2, TRAJ3)
CAVPPGYSSASKIIF

SEQ ID NO: 126800 - protein, 14 aa, Homo sapiens
  CDR3 for beta chain variable domain of TCR clone 63400 (TRBV4-1, TRBJ2-2)
CASSQAVNTGELFF

SEQ ID NO: 126801 - protein, 15 aa, Homo sapiens
  CDR3 for alpha chain variable domain of TCR clone 63401 (TRAV3, TRAJ47)
CAVRDIGEYGNKLVF

SEQ ID NO: 126802 - protein, 14 aa, Homo sapiens
  CDR3 for beta chain variable domain of TCR clone 63401 (TRBV13, TRBJ2-5)
CASSLERIGETQYF

SEQ ID NO: 126803 - protein, 17 aa, Homo sapiens
  CDR3 for alpha chain variable domain of TCR clone 63402 (TRAV16, TRAJ58)
CITVLSNGETSGSRLTF

SEQ ID NO: 126804 - protein, 16 aa, Homo sapiens
  CDR3 for beta chain variable domain of TCR clone 63402 (TRBV12-5, TRBJ2-5)
CASGPRTSGNQETQYF

SEQ ID NO: 126805 - protein, 14 aa, Homo sapiens
  CDR3 for alpha chain variable domain of TCR clone 63403 (TRAV12-2, TRAJ45)
CAVNKGGGADGLTF

SEQ ID NO: 126806 - protein, 14 aa, Homo sapiens
  CDR3 for beta chain variable domain of TCR clone 63403 (TRBV19, TRBJ2-1)
CASPTFVLSGEQFF

SEQ ID NO: 126807 - protein, 12 aa, Homo sapiens
  CDR3 for alpha chain variable domain of TCR clone 63404 (TRAV22, TRAJ29)
CAPPSGNTPLVF

SEQ ID NO: 126808 - protein, 14 aa, Homo sapiens
  CDR3 for beta chain variable domain of TCR clone 63404 (TRBV11-2, TRBJ2-7)
CASSLGAGACEQYF

SEQ ID NO: 126809 - protein, 15 aa, Homo sapiens
  CDR3 for alpha chain variable domain of TCR clone 63405 (TRAV14/DV4, TRAJ12)
CAMREERDSSYKLIF

SEQ ID NO: 126810 - protein, 13 aa, Homo sapiens
  CDR3 for beta chain variable domain of TCR clone 63405 (TRBV7-9, TRBJ1-2)
CASSLKQNYGYTF

SEQ ID NO: 126811 - protein, 19 aa, Homo sapiens
  CDR3 for alpha chain variable domain of TCR clone 63406 (TRAV27, TRAJ53)
ASTSVQSRNSGGSKYKLTF

SEQ ID NO: 126812 - protein, 14 aa, Homo sapiens
  CDR3 for beta chain variable domain of TCR clone 63406 (TRBV11-1, TRBJ2-7)
CASTFAVPSYEQYF

SEQ ID NO: 126813 - protein, 16 aa, Homo sapiens
  CDR3 for alpha chain variable domain of TCR clone 63407 (TRAV17, TRAJ52)
RATGIIGGTSYGKLTF

SEQ ID NO: 126814 - protein, 14 aa, Homo sapiens
  CDR3 for beta chain variable domain of TCR clone 63407 (TRBV7-3, TRBJ2-2)
CASSSGGYTGELFF

SEQ ID NO: 126815 - protein, 16 aa, Homo sapiens
  CDR3 for alpha chain variable domain of TCR clone 63408 (TRAV12-3, TRAJ53)
CAMSPGRGGSNYKLKF

SEQ ID NO: 126816 - protein, 11 aa, Homo sapiens
  CDR3 for beta chain variable domain of TCR clone 63408 (TRBV29-1, TRBJ2-5)
CSEDRTGTQYF

SEQ ID NO: 126817 - protein, 15 aa, Homo sapiens
  CDR3 for alpha chain variable domain of TCR clone 63409 (TRAV17, TRAJ40)
CATVSSTSGTYKYIF

SEQ ID NO: 126818 - protein, 17 aa, Homo sapiens
  CDR3 for beta chain variable domain of TCR clone 63409 (TRBV28, TRBJ2-5)
CASSTPEGDALQETQYF

SEQ ID NO: 126819 - protein, 15 aa, Homo sapiens
  CDR3 for alpha chain variable domain of TCR clone 63410 (TRAV8-4, TRAJ47)
CAVSDLEEYGNKLVF

SEQ ID NO: 126820 - protein, 15 aa, Homo sapiens
  CDR3 for beta chain variable domain of TCR clone 63410 (TRBV11-2, TRBJ2-1)
CASSLGPDSYNEQFF

SEQ ID NO: 126821 - protein, 14 aa, Homo sapiens
  CDR3 for alpha chain variable domain of TCR clone 63411 (TRAV20, TRAJ29)
CAVQAWVGNTPLVF

SEQ ID NO: 126822 - protein, 15 aa, Homo sapiens
  CDR3 for beta chain variable domain of TCR clone 63411 (TRBV29-1, TRBJ2-7)
CSVEFVDRGSYEQYF

SEQ ID NO: 126823 - protein, 13 aa, Homo sapiens
  CDR3 for alpha chain variable domain of TCR clone 63412 (TRAV12-3, TRAJ47)
CAMKKEYGNKLVF

SEQ ID NO: 126824 - protein, 16 aa, Homo sapiens
  CDR3 for beta chain variable domain of TCR clone 63412 (TRBV3-1, TRBJ2-6)
CASSLTWVSGANGLTF

SEQ ID NO: 126825 - protein, 16 aa, Homo sapiens
  CDR3 for alpha chain variable domain of TCR clone 63413 (TRAV3, TRAJ37)
CAVRPHGSGNTGTLIF

SEQ ID NO: 126826 - protein, 13 aa, Homo sapiens
  CDR3 for beta chain variable domain of TCR clone 63413 (TRBV2, TRBJ1-5)
CASGTGGYQPQHF

SEQ ID NO: 126827 - protein, 16 aa, Homo sapiens
  CDR3 for alpha chain variable domain of TCR clone 63414 (TRAV3, TRAJ5)
CAVRNLMDTGRRALTF

SEQ ID NO: 126828 - protein, 16 aa, Homo sapiens
  CDR3 for beta chain variable domain of TCR clone 63414 (TRBV4-2, TRBJ2-7)
CASSQEDLANSYEQYF

SEQ ID NO: 126829 - protein, 13 aa, Homo sapiens
  CDR3 for alpha chain variable domain of TCR clone 63415 (TRAV21, TRAJ15)
CAVANQAGTALIF

SEQ ID NO: 126830 - protein, 13 aa, Homo sapiens
  CDR3 for beta chain variable domain of TCR clone 63415 (TRBV7-3, TRBJ1-1)
CASSQDWGAEAFF

SEQ ID NO: 126831 - protein, 14 aa, Homo sapiens
  CDR3 for alpha chain variable domain of TCR clone 63416 (TRAV2, TRAJ9)
CAVEDRSGGFKTIF

SEQ ID NO: 126832 - protein, 12 aa, Homo sapiens
  CDR3 for beta chain variable domain of TCR clone 63416 (TRBV12-4, TRBJ2-1)
CASSPGRNEQFF

SEQ ID NO: 126833 - protein, 14 aa, Homo sapiens
  CDR3 for alpha chain variable domain of TCR clone 63417 (TRAV1-2, TRAJ8)
CAVRENTGFQKLVF

SEQ ID NO: 126834 - protein, 16 aa, Homo sapiens
  CDR3 for beta chain variable domain of TCR clone 63417 (TRBV7-9, TRBJ2-1)
CASSDVAGGSYNEQFF

SEQ ID NO: 126835 - protein, 15 aa, Homo sapiens
  CDR3 for alpha chain variable domain of TCR clone 63418 (TRAV23/DV6, TRAJ18)
CAARYRGSTLGRLYF

SEQ ID NO: 126836 - protein, 15 aa, Homo sapiens
  CDR3 for beta chain variable domain of TCR clone 63418 (TRBV11-3, TRBJ2-3)
CASLKDGREGDTQYF

SEQ ID NO: 126837 - protein, 15 aa, Homo sapiens
  CDR3 for alpha chain variable domain of TCR clone 63419 (TRAV8-4, TRAJ47)
CAVSDPEEYGNKLAF

SEQ ID NO: 126838 - protein, 15 aa, Homo sapiens
  CDR3 for beta chain variable domain of TCR clone 63419 (TRBV11-2, TRBJ2-1)
CASSLGPDSYNEQFF

SEQ ID NO: 126839 - protein, 16 aa, Homo sapiens
  CDR3 for alpha chain variable domain of TCR clone 63420 (TRAV30, TRAJ24)
CGTEIVAADSWGKFQF

SEQ ID NO: 126840 - protein, 15 aa, Homo sapiens
  CDR3 for beta chain variable domain of TCR clone 63420 (TRBV7-9, TRBJ1-4)
CASSARTGGNEKLFF

SEQ ID NO: 126841 - protein, 14 aa, Homo sapiens
  CDR3 for alpha chain variable domain of TCR clone 63421 (TRAV27, TRAJ22)
CAGLPSGSARQLTF

SEQ ID NO: 126842 - protein, 13 aa, Homo sapiens
  CDR3 for beta chain variable domain of TCR clone 63421 (TRBV11-2, TRBJ1-2)
CASSLDSPSGYTF

SEQ ID NO: 126843 - protein, 15 aa, Homo sapiens
  CDR3 for alpha chain variable domain of TCR clone 63422 (TRAV17, TRAJ57)
CATGPSQGGSEKLVF

SEQ ID NO: 126844 - protein, 16 aa, Homo sapiens
  CDR3 for beta chain variable domain of TCR clone 63422 (TRBV7-9, TRBJ1-2)
CASSLGFSSGEDGYTF

SEQ ID NO: 126845 - protein, 20 aa, Homo sapiens
  CDR3 for alpha chain variable domain of TCR clone 63423 (TRAV13-1, )
CAASPMDIQNPDPAVYQLSD

SEQ ID NO: 126846 - protein, 13 aa, Homo sapiens
  CDR3 for beta chain variable domain of TCR clone 63423 (TRBV20-1, TRBJ2-2)
CSASAAGTGELFF

SEQ ID NO: 126847 - protein, 11 aa, Homo sapiens
  CDR3 for alpha chain variable domain of TCR clone 63424 (TRAV1-1, TRAJ23)
CAVRQGGKLIF

SEQ ID NO: 126848 - protein, 12 aa, Homo sapiens
  CDR3 for beta chain variable domain of TCR clone 63424 (TRBV12-5, TRBJ2-5)
CASGQGVETQYF

SEQ ID NO: 126849 - protein, 10 aa, Homo sapiens
  CDR3 for alpha chain variable domain of TCR clone 63425 (TRAV23/DV6, TRAJ22)
CAASSRGSRF

SEQ ID NO: 126850 - protein, 15 aa, Homo sapiens
  CDR3 for beta chain variable domain of TCR clone 63425 (TRBV10-3, TRBJ2-3)
CAIDASGRRTDTQYF

SEQ ID NO: 126851 - protein, 16 aa, Homo sapiens
  CDR3 for alpha chain variable domain of TCR clone 63426 (TRAV23/DV6, TRAJ9)
CAASIGGNTGGFKTIF

SEQ ID NO: 126852 - protein, 17 aa, Homo sapiens
  CDR3 for beta chain variable domain of TCR clone 63426 (TRBV28, TRBJ2-5)
CASSRQGGLAGAETQYF

SEQ ID NO: 126853 - protein, 14 aa, Homo sapiens
  CDR3 for alpha chain variable domain of TCR clone 63427 (TRAV8-3, TRAJ21)
CALDARDNFNKFYF

SEQ ID NO: 126854 - protein, 16 aa, Homo sapiens
  CDR3 for beta chain variable domain of TCR clone 63427 (TRBV20-1, TRBJ2-1)
CSARDLAGHSYNEQFF

SEQ ID NO: 126855 - protein, 15 aa, Homo sapiens
  CDR3 for alpha chain variable domain of TCR clone 63428 (TRAV17, TRAJ23)
CATDAEDNQVGKLIF

SEQ ID NO: 126856 - protein, 12 aa, Homo sapiens
  CDR3 for beta chain variable domain of TCR clone 63428 (TRBV2, TRBJ2-1)
CAKREGYNEQFF

SEQ ID NO: 126857 - protein, 17 aa, Homo sapiens
  CDR3 for alpha chain variable domain of TCR clone 63429 (TRAV3, TRAJ6)
CAVRDGPRAGGSCIPTF

SEQ ID NO: 126858 - protein, 20 aa, Homo sapiens
  CDR3 for beta chain variable domain of TCR clone 63429 (TRBV28, TRBJ2-1)
CASTPIGRSPGLAGGNEQLF

SEQ ID NO: 126859 - protein, 14 aa, Homo sapiens
  CDR3 for alpha chain variable domain of TCR clone 63430 (TRAV23/DV6, TRAJ22)
CSASVSGSARQLTF

SEQ ID NO: 126860 - protein, 16 aa, Homo sapiens
  CDR3 for beta chain variable domain of TCR clone 63430 (TRBV19, TRBJ2-2)
CASSFPGQGLAGELFF

SEQ ID NO: 126861 - protein, 14 aa, Homo sapiens
  CDR3 for alpha chain variable domain of TCR clone 63431 (TRAV12-1, TRAJ9)
CVVTGYTVGFKTIF

SEQ ID NO: 126862 - protein, 13 aa, Homo sapiens
  CDR3 for beta chain variable domain of TCR clone 63431 (TRBV20-1, TRBJ1-1)
CSARAGGNTEAFF

SEQ ID NO: 126863 - protein, 15 aa, Homo sapiens
  CDR3 for alpha chain variable domain of TCR clone 63432 (TRAV8-3, TRAJ40)
CAAPSLGSGPYKYIF

SEQ ID NO: 126864 - protein, 16 aa, Homo sapiens
  CDR3 for beta chain variable domain of TCR clone 63432 (TRBV7-3, TRBJ2-3)
CASSLSGYRPEDTQYF

SEQ ID NO: 126865 - protein, 12 aa, Homo sapiens
  CDR3 for alpha chain variable domain of TCR clone 63433 (TRAV27, TRAJ13)
CAGAGGYQKVTF

SEQ ID NO: 126866 - protein, 14 aa, Homo sapiens
  CDR3 for beta chain variable domain of TCR clone 63433 (TRBV20-1, TRBJ2-6)
QCSGQGAWANVLTF

SEQ ID NO: 126867 - protein, 14 aa, Homo sapiens
  CDR3 for alpha chain variable domain of TCR clone 63434 (TRAV8-3, TRAJ4)
CAVGASGGYNKLIF

SEQ ID NO: 126868 - protein, 16 aa, Homo sapiens
  CDR3 for beta chain variable domain of TCR clone 63434 (TRBV4-3, TRBJ2-2)
CASSHLQGPGTGELFF

SEQ ID NO: 126869 - protein, 11 aa, Homo sapiens
  CDR3 for alpha chain variable domain of TCR clone 63435 (TRAV3, TRAJ13)
CAVTSYQKVTF

SEQ ID NO: 126870 - protein, 15 aa, Homo sapiens
  CDR3 for beta chain variable domain of TCR clone 63435 (TRBV7-9, TRBJ2-7)
CASSNSGLAVYEQYF

SEQ ID NO: 126871 - protein, 15 aa, Homo sapiens
  CDR3 for alpha chain variable domain of TCR clone 63436 (TRAV17, TRAJ22)
CATAALLGSARQLTF

SEQ ID NO: 126872 - protein, 13 aa, Homo sapiens
  CDR3 for beta chain variable domain of TCR clone 63436 (TRBV29-1, TRBJ2-3)
CGVVPQGGDTQYF

SEQ ID NO: 126873 - protein, 15 aa, Homo sapiens
  CDR3 for alpha chain variable domain of TCR clone 63437 (TRAV2, TRAJ15)
CAVEDRNQAGTALIF

SEQ ID NO: 126874 - protein, 13 aa, Homo sapiens
  CDR3 for beta chain variable domain of TCR clone 63437 (TRBV10-2, TRBJ2-1)
CASGASGGAKQFF

SEQ ID NO: 126875 - protein, 15 aa, Homo sapiens
  CDR3 for alpha chain variable domain of TCR clone 63438 (TRAV29/DV5, TRAJ42)
CAAKTDGGSQGNLIF

SEQ ID NO: 126876 - protein, 15 aa, Homo sapiens
  CDR3 for beta chain variable domain of TCR clone 63438 (TRBV5-1, TRBJ2-2)
RASSSQGGNTGELFF

SEQ ID NO: 126877 - protein, 15 aa, Homo sapiens
  CDR3 for alpha chain variable domain of TCR clone 63439 (TRAV34, TRAJ38)
CGADFTPGNTRKLIW

SEQ ID NO: 126878 - protein, 15 aa, Homo sapiens
  CDR3 for beta chain variable domain of TCR clone 63439 (TRBV11-2, TRBJ2-1)
CASSLGPGSYNEQFF

SEQ ID NO: 126879 - protein, 15 aa, Homo sapiens
  CDR3 for alpha chain variable domain of TCR clone 63440 (TRAV3, TRAJ47)
CAVRDIGEYGNKLVF

SEQ ID NO: 126880 - protein, 14 aa, Homo sapiens
  CDR3 for beta chain variable domain of TCR clone 63440 (TRBV13, TRBJ2-5)
CASSLERVGETQYV

SEQ ID NO: 126881 - protein, 13 aa, Homo sapiens
  CDR3 for alpha chain variable domain of TCR clone 63441 (TRAV21, TRAJ27)
CAARPGNAGKSTF

SEQ ID NO: 126882 - protein, 13 aa, Homo sapiens
  CDR3 for beta chain variable domain of TCR clone 63441 (TRBV18, TRBJ2-7)
CAGQSGGGYEQYF

SEQ ID NO: 126883 - protein, 17 aa, Homo sapiens
  CDR3 for alpha chain variable domain of TCR clone 63442 (TRAV3, TRAJ6)
CAARDGPRAGGSYIPTS

SEQ ID NO: 126884 - protein, 14 aa, Homo sapiens
  CDR3 for beta chain variable domain of TCR clone 63442 (TRBV7-2, TRBJ2-7)
CASSPKTSFYEQYF

SEQ ID NO: 126885 - protein, 10 aa, Homo sapiens
  CDR3 for alpha chain variable domain of TCR clone 63443 (TRAV36/DV7, TRAJ48)
CAVGNEKLTF

SEQ ID NO: 126886 - protein, 13 aa, Homo sapiens
  CDR3 for beta chain variable domain of TCR clone 63443 (TRBV29-1, TRBJ2-1)
CSVEGGRVNEQFF

SEQ ID NO: 126887 - protein, 14 aa, Homo sapiens
  CDR3 for alpha chain variable domain of TCR clone 63444 (TRAV12-2, TRAJ36)
CAVNPPTGANNLSF

SEQ ID NO: 126888 - protein, 13 aa, Homo sapiens
  CDR3 for beta chain variable domain of TCR clone 63444 (TRBV20-1, TRBJ1-6)
CSAPTGLGSPLHF

SEQ ID NO: 126889 - protein, 15 aa, Homo sapiens
  CDR3 for alpha chain variable domain of TCR clone 63445 (TRAV14/DV4, TRAJ46)
CAMGEKKSSGDKLTF

SEQ ID NO: 126890 - protein, 13 aa, Homo sapiens
  CDR3 for beta chain variable domain of TCR clone 63445 (TRBV20-1, TRBJ2-5)
CSAREAFQETQYF

SEQ ID NO: 126891 - protein, 14 aa, Homo sapiens
  CDR3 for alpha chain variable domain of TCR clone 63446 (TRAV8-3, TRAJ10)
CAVGNAGGGNNLTF

SEQ ID NO: 126892 - protein, 16 aa, Homo sapiens
  CDR3 for beta chain variable domain of TCR clone 63446 (TRBV11-2, TRBJ1-2)
CASSLDTGGADYGYTF

SEQ ID NO: 126893 - protein, 14 aa, Homo sapiens
  CDR3 for alpha chain variable domain of TCR clone 63447 (TRAV16, TRAJ33)
CALSAMDSNYQLIW

SEQ ID NO: 126894 - protein, 15 aa, Homo sapiens
  CDR3 for beta chain variable domain of TCR clone 63447 (TRBV4-1, TRBJ2-2)
CASNLQGLHTGELFF

SEQ ID NO: 126895 - protein, 13 aa, Homo sapiens
  CDR3 for alpha chain variable domain of TCR clone 63448 (TRAV27, TRAJ6)
CAGGTRGSYIPTF

SEQ ID NO: 126896 - protein, 16 aa, Homo sapiens
  CDR3 for beta chain variable domain of TCR clone 63448 (TRBV12-5, TRBJ2-5)
CASGPRTSGNQETQYF

SEQ ID NO: 126897 - protein, 13 aa, Homo sapiens
  CDR3 for alpha chain variable domain of TCR clone 63449 (TRAV13-2, TRAJ13)
CAERPGGYQKVTF

SEQ ID NO: 126898 - protein, 20 aa, Homo sapiens
  CDR3 for beta chain variable domain of TCR clone 63449 (TRBV7-8, TRBJ2-2)
CASSHLFPGPTIHITGELFF

SEQ ID NO: 126899 - protein, 15 aa, Homo sapiens
  CDR3 for alpha chain variable domain of TCR clone 63450 (TRAV3, TRAJ12)
CAVRDIRDSSYKLIF

SEQ ID NO: 126900 - protein, 16 aa, Homo sapiens
  CDR3 for beta chain variable domain of TCR clone 63450 (TRBV12-5, TRBJ2-5)
CASGPRTSGNQETQYF

SEQ ID NO: 126901 - protein, 11 aa, Homo sapiens
  CDR3 for alpha chain variable domain of TCR clone 63451 (TRAV23/DV6, TRAJ4)
APAGGYNKLIF

SEQ ID NO: 126902 - protein, 15 aa, Homo sapiens
  CDR3 for beta chain variable domain of TCR clone 63451 (TRBV6-3, TRBJ2-7)
CASSSPGTVFYEQYF

SEQ ID NO: 126903 - protein, 17 aa, Homo sapiens
  CDR3 for alpha chain variable domain of TCR clone 63452 (TRAV3, TRAJ7)
CAVRDMSPLEGTKDSLL

SEQ ID NO: 126904 - protein, 17 aa, Homo sapiens
  CDR3 for beta chain variable domain of TCR clone 63452 (TRBV15, TRBJ1-2)
CATSGREIDVVNYGYTF

SEQ ID NO: 126905 - protein, 15 aa, Homo sapiens
  CDR3 for alpha chain variable domain of TCR clone 63453 (TRAV8-3, TRAJ27)
CAVGPSKTNAGKYTF

SEQ ID NO: 126906 - protein, 15 aa, Homo sapiens
  CDR3 for beta chain variable domain of TCR clone 63453 (TRBV7-2, TRBJ2-1)
CASSSGLAGGNEQFF

SEQ ID NO: 126907 - protein, 13 aa, Homo sapiens
  CDR3 for alpha chain variable domain of TCR clone 63454 (TRAV8-6, TRAJ49)
CAVITNTGNQFYF

SEQ ID NO: 126908 - protein, 16 aa, Homo sapiens
  CDR3 for beta chain variable domain of TCR clone 63454 (TRBV6-1, TRBJ2-5)
CASSETLDRGAETQYF

SEQ ID NO: 126909 - protein, 12 aa, Homo sapiens
  CDR3 for alpha chain variable domain of TCR clone 63455 (TRAV8-3, TRAJ41)
CAVALSGYALNF

SEQ ID NO: 126910 - protein, 16 aa, Homo sapiens
  CDR3 for beta chain variable domain of TCR clone 63455 (TRBV27, TRBJ2-7)
CASSSERRESAYEQYF

SEQ ID NO: 126911 - protein, 17 aa, Homo sapiens
  CDR3 for alpha chain variable domain of TCR clone 63456 (TRAV4, TRAJ13)
CLVGVQGSPGGYQKVTF

SEQ ID NO: 126912 - protein, 18 aa, Homo sapiens
  CDR3 for beta chain variable domain of TCR clone 63456 (TRBV15, TRBJ2-3)
CATSRDGARSWDTDTQYF

SEQ ID NO: 126913 - protein, 15 aa, Homo sapiens
  CDR3 for alpha chain variable domain of TCR clone 63457 (TRAV20, TRAJ53)
CAVQASGGSNYKLTF

SEQ ID NO: 126914 - protein, 15 aa, Homo sapiens
  CDR3 for beta chain variable domain of TCR clone 63457 (TRBV19, TRBJ2-1)
CASSIGLAGWDEQFF

SEQ ID NO: 126915 - protein, 18 aa, Homo sapiens
  CDR3 for alpha chain variable domain of TCR clone 63458 (TRAV3, TRAJ38)
CAVRDCLNAGNNHIQNPD

SEQ ID NO: 126916 - protein, 15 aa, Homo sapiens
  CDR3 for beta chain variable domain of TCR clone 63458 (TRBV6-5, TRBJ2-1)
CASSYDAGAGNEQFF

SEQ ID NO: 126917 - protein, 12 aa, Homo sapiens
  CDR3 for alpha chain variable domain of TCR clone 63459 (TRAV13-1, TRAJ48)
CAANFGNEKLTF

SEQ ID NO: 126918 - protein, 13 aa, Homo sapiens
  CDR3 for beta chain variable domain of TCR clone 63459 (TRBV12-4, TRBJ1-2)
CASSLRQGKGYTF

SEQ ID NO: 126919 - protein, 13 aa, Homo sapiens
  CDR3 for alpha chain variable domain of TCR clone 63460 (TRAV13-1, TRAJ21)
CAASIYKFNKFYF

SEQ ID NO: 126920 - protein, 12 aa, Homo sapiens
  CDR3 for beta chain variable domain of TCR clone 63460 (TRBV11-2, TRBJ2-1)
CASSPGNNEQFF

SEQ ID NO: 126921 - protein, 12 aa, Homo sapiens
  CDR3 for alpha chain variable domain of TCR clone 63461 (TRAV12-3, TRAJ17)
CAMTLTGNKLTF

SEQ ID NO: 126922 - protein, 17 aa, Homo sapiens
  CDR3 for beta chain variable domain of TCR clone 63461 (TRBV28, TRBJ2-1)
CASSAPWGTPSYNEQFF

SEQ ID NO: 126923 - protein, 15 aa, Homo sapiens
  CDR3 for alpha chain variable domain of TCR clone 63462 (TRAV21, TRAJ24)
CAARSSTDSWGKLQL

SEQ ID NO: 126924 - protein, 11 aa, Homo sapiens
  CDR3 for beta chain variable domain of TCR clone 63462 (TRBV11-2, TRBJ2-2)
CASSLPGELFF

SEQ ID NO: 126925 - protein, 14 aa, Homo sapiens
  CDR3 for alpha chain variable domain of TCR clone 63463 (TRAV29/DV5, TRAJ36)
YAARRKTGANNLFF

SEQ ID NO: 126926 - protein, 14 aa, Homo sapiens
  CDR3 for beta chain variable domain of TCR clone 63463 (TRBV12-5, TRBJ2-5)
CASGSRTHQETQYF

SEQ ID NO: 126927 - protein, 14 aa, Homo sapiens
  CDR3 for alpha chain variable domain of TCR clone 63464 (TRAV13-1, TRAJ35)
CAASKGGFGNVLHC

SEQ ID NO: 126928 - protein, 13 aa, Homo sapiens
  CDR3 for beta chain variable domain of TCR clone 63464 (TRBV20-1, TRBJ1-1)
CSAPLGGGTEAFF

SEQ ID NO: 126929 - protein, 15 aa, Homo sapiens
  CDR3 for alpha chain variable domain of TCR clone 63465 (TRAV12-3, TRAJ11)
CAMSEENSGYSTLTF

SEQ ID NO: 126930 - protein, 16 aa, Homo sapiens
  CDR3 for beta chain variable domain of TCR clone 63465 (TRBV5-1, TRBJ2-7)
CASSLEGLAGLYEQYV

SEQ ID NO: 126931 - protein, 13 aa, Homo sapiens
  CDR3 for alpha chain variable domain of TCR clone 63466 (TRAV20, TRAJ29)
CAVQAVGNTPLVF

SEQ ID NO: 126932 - protein, 15 aa, Homo sapiens
  CDR3 for beta chain variable domain of TCR clone 63466 (TRBV10-2, TRBJ2-5)
CASRGGGGPQETQYF

SEQ ID NO: 126933 - protein, 13 aa, Homo sapiens
  CDR3 for alpha chain variable domain of TCR clone 63467 (TRAV20, TRAJ34)
CAVSSYNTDKLIF

SEQ ID NO: 126934 - protein, 15 aa, Homo sapiens
  CDR3 for beta chain variable domain of TCR clone 63467 (TRBV20-1, TRBJ1-2)
CSAAGEGARIYGYAF

SEQ ID NO: 126935 - protein, 14 aa, Homo sapiens
  CDR3 for alpha chain variable domain of TCR clone 63468 (TRAV14/DV4, TRAJ32)
SNVLPLTPTNKLIF

SEQ ID NO: 126936 - protein, 14 aa, Homo sapiens
  CDR3 for beta chain variable domain of TCR clone 63468 (TRBV7-9, TRBJ1-2)
CASSRQGANYGYTF

SEQ ID NO: 126937 - protein, 13 aa, Homo sapiens
  CDR3 for alpha chain variable domain of TCR clone 63469 (TRAV20, TRAJ21)
CAVEGYNFNKFYF

SEQ ID NO: 126938 - protein, 20 aa, Homo sapiens
  CDR3 for beta chain variable domain of TCR clone 63469 (TRBV28, TRBJ2-1)
CASTPIGRSPGLAGGNEQFF

SEQ ID NO: 126939 - protein, 15 aa, Homo sapiens
  CDR3 for alpha chain variable domain of TCR clone 63470 (TRAV8-3, TRAJ6)
CAVGPLGGGSYIPTF

SEQ ID NO: 126940 - protein, 14 aa, Homo sapiens
  CDR3 for beta chain variable domain of TCR clone 63470 (TRBV19, TRBJ2-2)
RASSTGQGAGELFF

SEQ ID NO: 126941 - protein, 15 aa, Homo sapiens
  CDR3 for alpha chain variable domain of TCR clone 63471 (TRAV8-3, TRAJ45)
CASSYSGGGADGLTF

SEQ ID NO: 126942 - protein, 15 aa, Homo sapiens
  CDR3 for beta chain variable domain of TCR clone 63471 (TRBV19, TRBJ1-1)
CASTSGQIQNTEAFF

SEQ ID NO: 126943 - protein, 13 aa, Homo sapiens
  CDR3 for alpha chain variable domain of TCR clone 63472 (TRAV29/DV5, TRAJ47)
CAASAEYGNKLVF

SEQ ID NO: 126944 - protein, 13 aa, Homo sapiens
  CDR3 for beta chain variable domain of TCR clone 63472 (TRBV27, TRBJ1-4)
CASSLMGDEKLFF

SEQ ID NO: 126945 - protein, 14 aa, Homo sapiens
  CDR3 for alpha chain variable domain of TCR clone 63473 (TRAV1-2, TRAJ8)
CAVREDTGFQKLVF

SEQ ID NO: 126946 - protein, 14 aa, Homo sapiens
  CDR3 for beta chain variable domain of TCR clone 63473 (TRBV27, TRBJ2-3)
CASSSGTNTDTQYF

SEQ ID NO: 126947 - protein, 13 aa, Homo sapiens
  CDR3 for alpha chain variable domain of TCR clone 63474 (TRAV38-2/DV8, TRAJ34)
CAYRWGNTDKLIF

SEQ ID NO: 126948 - protein, 13 aa, Homo sapiens
  CDR3 for beta chain variable domain of TCR clone 63474 (TRBV7-9, TRBJ1-2)
CASSLKQNYGYTF

SEQ ID NO: 126949 - protein, 11 aa, Homo sapiens
  CDR3 for alpha chain variable domain of TCR clone 63475 (TRAV3, TRAJ21)
CAVGNFNKFYF

SEQ ID NO: 126950 - protein, 17 aa, Homo sapiens
  CDR3 for beta chain variable domain of TCR clone 63475 (TRBV24-1, TRBJ2-1)
CATSAVSTSGTYNEQFF

SEQ ID NO: 126951 - protein, 17 aa, Homo sapiens
  CDR3 for alpha chain variable domain of TCR clone 63476 (TRAV3, TRAJ12)
CAVGDGGRMDSSYKLIF

SEQ ID NO: 126952 - protein, 12 aa, Homo sapiens
  CDR3 for beta chain variable domain of TCR clone 63476 (TRBV7-9, TRBJ2-7)
CATRTDAYEQYF

SEQ ID NO: 126953 - protein, 12 aa, Homo sapiens
  CDR3 for alpha chain variable domain of TCR clone 63477 (TRAV8-3, TRAJ20)
CAVGANDYKLSF

SEQ ID NO: 126954 - protein, 15 aa, Homo sapiens
  CDR3 for beta chain variable domain of TCR clone 63477 (TRBV19, TRBJ1-1)
CASTSGQIQNTEAFF

SEQ ID NO: 126955 - protein, 10 aa, Homo sapiens
  CDR3 for alpha chain variable domain of TCR clone 63478 (TRAV5, TRAJ34)
CAEDTDKLIF

SEQ ID NO: 126956 - protein, 11 aa, Homo sapiens
  CDR3 for beta chain variable domain of TCR clone 63478 (TRBV11-2, TRBJ2-2)
CASSLPGELFF

SEQ ID NO: 126957 - protein, 16 aa, Homo sapiens
  CDR3 for alpha chain variable domain of TCR clone 63479 (TRAV30, TRAJ24)
CGTEIVDADSWGKFQF

SEQ ID NO: 126958 - protein, 14 aa, Homo sapiens
  CDR3 for beta chain variable domain of TCR clone 63479 (TRBV11-1, TRBJ2-7)
CASSFRQGSYEQYF

SEQ ID NO: 126959 - protein, 14 aa, Homo sapiens
  CDR3 for alpha chain variable domain of TCR clone 63480 (TRAV2, TRAJ9)
CAVDPDTGGFKTIF

SEQ ID NO: 126960 - protein, 13 aa, Homo sapiens
  CDR3 for beta chain variable domain of TCR clone 63480 (TRBV20-1, TRBJ2-1)
CSASTGTSNEQFF

SEQ ID NO: 126961 - protein, 12 aa, Homo sapiens
  CDR3 for alpha chain variable domain of TCR clone 63481 (TRAV23/DV6, TRAJ30)
CAASKGEDKIIF

SEQ ID NO: 126962 - protein, 13 aa, Homo sapiens
  CDR3 for beta chain variable domain of TCR clone 63481 (TRBV19, TRBJ1-2)
CASSVPGQDGYTF

SEQ ID NO: 126963 - protein, 13 aa, Homo sapiens
  CDR3 for alpha chain variable domain of TCR clone 63482 (TRAV21, TRAJ27)
CAACPGNAGKSTF

SEQ ID NO: 126964 - protein, 14 aa, Homo sapiens
  CDR3 for beta chain variable domain of TCR clone 63482 (TRBV7-6, TRBJ2-3)
CASSLGTVTDTRYF

SEQ ID NO: 126965 - protein, 14 aa, Homo sapiens
  CDR3 for alpha chain variable domain of TCR clone 63483 (TRAV12-3, TRAJ35)
CAMSLIGFGNVLHC

SEQ ID NO: 126966 - protein, 16 aa, Homo sapiens
  CDR3 for beta chain variable domain of TCR clone 63483 (TRBV7-6, TRBJ2-7)
CQQLSSASGNSYKQYF

SEQ ID NO: 126967 - protein, 12 aa, Homo sapiens
  CDR3 for alpha chain variable domain of TCR clone 63484 (TRAV21, TRAJ11)
CAATSGYSTITF

SEQ ID NO: 126968 - protein, 14 aa, Homo sapiens
  CDR3 for beta chain variable domain of TCR clone 63484 (TRBV20-1, TRBJ2-7)
CSAPELAGVGEQYF

SEQ ID NO: 126969 - protein, 15 aa, Homo sapiens
  CDR3 for alpha chain variable domain of TCR clone 63485 (TRAV21, TRAJ53)
CATLNSGGSNYKPTF

SEQ ID NO: 126970 - protein, 14 aa, Homo sapiens
  CDR3 for beta chain variable domain of TCR clone 63485 (TRBV7-2, TRBJ2-7)
CASSLPPGQGPQYF

SEQ ID NO: 126971 - protein, 18 aa, Homo sapiens
  CDR3 for alpha chain variable domain of TCR clone 63486 (TRAV14/DV4, TRAJ52)
CAMKGTFAGGTSYGKLTF

SEQ ID NO: 126972 - protein, 16 aa, Homo sapiens
  CDR3 for beta chain variable domain of TCR clone 63486 (TRBV2, TRBJ2-1)
CASRSPAGGKYNEQFF

SEQ ID NO: 126973 - protein, 11 aa, Homo sapiens
  CDR3 for alpha chain variable domain of TCR clone 63487 (TRAV12-3, TRAJ27)
CAMAYAGKSTF

SEQ ID NO: 126974 - protein, 13 aa, Homo sapiens
  CDR3 for beta chain variable domain of TCR clone 63487 (TRBV20-1, TRBJ1-1)
CSARVGGNTEAFF

SEQ ID NO: 126975 - protein, 14 aa, Homo sapiens
  CDR3 for alpha chain variable domain of TCR clone 63488 (TRAV12-3, TRAJ10)
SHLPLTGGGDKLTF

SEQ ID NO: 126976 - protein, 17 aa, Homo sapiens
  CDR3 for beta chain variable domain of TCR clone 63488 (TRBV28, TRBJ2-3)
CASSPTPAGGRVDTQYF

SEQ ID NO: 126977 - protein, 16 aa, Homo sapiens
  CDR3 for alpha chain variable domain of TCR clone 63489 (TRAV17, TRAJ52)
CATGIIGGTSYGKLTF

SEQ ID NO: 126978 - protein, 12 aa, Homo sapiens
  CDR3 for beta chain variable domain of TCR clone 63489 (TRBV7-3, TRBJ2-1)
CASSFINNEQFS

SEQ ID NO: 126979 - protein, 17 aa, Homo sapiens
  CDR3 for alpha chain variable domain of TCR clone 63490 (TRAV2, TRAJ22)
ILQVREADAAEQGQLTF

SEQ ID NO: 126980 - protein, 16 aa, Homo sapiens
  CDR3 for beta chain variable domain of TCR clone 63490 (TRBV2, TRBJ2-5)
CASSETQGVGEETQYF

SEQ ID NO: 126981 - protein, 17 aa, Homo sapiens
  CDR3 for alpha chain variable domain of TCR clone 63491 (TRAV3, TRAJ6)
CAVRDGPRAGGSYIPTF

SEQ ID NO: 126982 - protein, 13 aa, Homo sapiens
  CDR3 for beta chain variable domain of TCR clone 63491 (TRBV7-8, TRBJ2-1)
CASTRDAVDEQFF

SEQ ID NO: 126983 - protein, 13 aa, Homo sapiens
  CDR3 for alpha chain variable domain of TCR clone 63492 (TRAV21, TRAJ27)
CAARPGNAGKSTF

SEQ ID NO: 126984 - protein, 13 aa, Homo sapiens
  CDR3 for beta chain variable domain of TCR clone 63492 (TRBV11-2, TRBJ2-5)
CASSSTGEETQYF

SEQ ID NO: 126985 - protein, 14 aa, Homo sapiens
  CDR3 for alpha chain variable domain of TCR clone 63493 (TRAV1-2, TRAJ16)
CAVNRFSDGQKLLF

SEQ ID NO: 126986 - protein, 15 aa, Homo sapiens
  CDR3 for beta chain variable domain of TCR clone 63493 (TRBV19, TRBJ1-5)
CASSVVWADNQPQHF

SEQ ID NO: 126987 - protein, 12 aa, Homo sapiens
  CDR3 for alpha chain variable domain of TCR clone 63494 (TRAV21, TRAJ29)
CAVTSGNTPLVF

SEQ ID NO: 126988 - protein, 15 aa, Homo sapiens
  CDR3 for beta chain variable domain of TCR clone 63494 (TRBV10-2, TRBJ2-6)
CASSEQGTGANDLTF

SEQ ID NO: 126989 - protein, 14 aa, Homo sapiens
  CDR3 for alpha chain variable domain of TCR clone 63495 (TRAV21, TRAJ45)
CAVSSGGGADGLTF

SEQ ID NO: 126990 - protein, 15 aa, Homo sapiens
  CDR3 for beta chain variable domain of TCR clone 63495 (TRBV12-4, TRBJ1-5)
CASTRGSGFGQPQHF

SEQ ID NO: 126991 - protein, 12 aa, Homo sapiens
  CDR3 for alpha chain variable domain of TCR clone 63496 (TRAV3, TRAJ26)
CAVRDYGQNFVF

SEQ ID NO: 126992 - protein, 16 aa, Homo sapiens
  CDR3 for beta chain variable domain of TCR clone 63496 (TRBV11-2, TRBJ1-2)
CASSPSGSEANYGYTF

SEQ ID NO: 126993 - protein, 15 aa, Homo sapiens
  CDR3 for alpha chain variable domain of TCR clone 63497 (TRAV1-1, TRAJ23)
CAVREGDNQGGKLIF

SEQ ID NO: 126994 - protein, 20 aa, Homo sapiens
  CDR3 for beta chain variable domain of TCR clone 63497 (TRBV28, TRBJ2-1)
CASTPIGRSPGLAGGNEQFF

SEQ ID NO: 126995 - protein, 14 aa, Homo sapiens
  CDR3 for alpha chain variable domain of TCR clone 63498 (TRAV35, TRAJ22)
CAMLRPGSARQLTF

SEQ ID NO: 126996 - protein, 15 aa, Homo sapiens
  CDR3 for beta chain variable domain of TCR clone 63498 (TRBV12-4, TRBJ2-5)
CASSPPTGLQETQYF

SEQ ID NO: 126997 - protein, 12 aa, Homo sapiens
  CDR3 for alpha chain variable domain of TCR clone 63499 (TRAV17, TRAJ12)
CATLRSSYKLIF

SEQ ID NO: 126998 - protein, 14 aa, Homo sapiens
  CDR3 for beta chain variable domain of TCR clone 63499 (TRBV6-1, TRBJ1-1)
CASTPLQMNTEAFF

SEQ ID NO: 126999 - protein, 14 aa, Homo sapiens
  CDR3 for alpha chain variable domain of TCR clone 63500 (TRAV13-1, TRAJ10)
CAASSTGGGNRLTF

SEQ ID NO: 127000 - protein, 15 aa, Homo sapiens
  CDR3 for beta chain variable domain of TCR clone 63500 (TRBV11-3, TRBJ1-3)
CASSLFGPSGNTIYF

SEQ ID NO: 127001 - protein, 14 aa, Homo sapiens
  CDR3 for alpha chain variable domain of TCR clone 63501 (TRAV12-2, TRAJ33)
CAVKRARSNYQLIL

SEQ ID NO: 127002 - protein, 12 aa, Homo sapiens
  CDR3 for beta chain variable domain of TCR clone 63501 (TRBV24-1, TRBJ2-3)
CATSDSTDTQYF

SEQ ID NO: 127003 - protein, 14 aa, Homo sapiens
  CDR3 for alpha chain variable domain of TCR clone 63502 (TRAV12-3, TRAJ10)
SHLPLTGGGNKLTF

SEQ ID NO: 127004 - protein, 12 aa, Homo sapiens
  CDR3 for beta chain variable domain of TCR clone 63502 (TRBV7-2, TRBJ1-6)
CDSSLSSSPLHF

SEQ ID NO: 127005 - protein, 13 aa, Homo sapiens
  CDR3 for alpha chain variable domain of TCR clone 63503 (TRAV2, TRAJ40)
CAVVTSGTYKYIF

SEQ ID NO: 127006 - protein, 13 aa, Homo sapiens
  CDR3 for beta chain variable domain of TCR clone 63503 (TRBV25-1, TRBJ2-7)
CASSEDGDYEQYF

SEQ ID NO: 127007 - protein, 14 aa, Homo sapiens
  CDR3 for alpha chain variable domain of TCR clone 63504 (TRAV17, TRAJ57)
CATDPQGGSEKLVF

SEQ ID NO: 127008 - protein, 15 aa, Homo sapiens
  CDR3 for beta chain variable domain of TCR clone 63504 (TRBV7-8, TRBJ1-6)
CASSSRQGADSPLHF

SEQ ID NO: 127009 - protein, 19 aa, Homo sapiens
  CDR3 for alpha chain variable domain of TCR clone 63505 (TRAV26-1, TRAJ28)
CIVRVAHAYSGAGSYQLTF

SEQ ID NO: 127010 - protein, 17 aa, Homo sapiens
  CDR3 for beta chain variable domain of TCR clone 63505 (TRBV4-1, TRBJ1-4)
CASSQEGPRWVEEKLFF

SEQ ID NO: 127011 - protein, 10 aa, Homo sapiens
  CDR3 for alpha chain variable domain of TCR clone 63506 (TRAV1-2, TRAJ18)
CAVRGEAQPW

SEQ ID NO: 127012 - protein, 14 aa, Homo sapiens
  CDR3 for beta chain variable domain of TCR clone 63506 (TRBV7-2, TRBJ2-7)
CASSVKGQDHEQYF

SEQ ID NO: 127013 - protein, 14 aa, Homo sapiens
  CDR3 for alpha chain variable domain of TCR clone 63507 (TRAV35, TRAJ13)
CAGSPSGGYQKVTF

SEQ ID NO: 127014 - protein, 14 aa, Homo sapiens
  CDR3 for beta chain variable domain of TCR clone 63507 (TRBV18, TRBJ2-7)
CASSPRGGAYEQYF

SEQ ID NO: 127015 - protein, 14 aa, Homo sapiens
  CDR3 for alpha chain variable domain of TCR clone 63508 (TRAV20, TRAJ22)
CAVALGGSARQLTF

SEQ ID NO: 127016 - protein, 15 aa, Homo sapiens
  CDR3 for beta chain variable domain of TCR clone 63508 (TRBV7-2, TRBJ1-1)
CASSFAGDRDTGAFF

SEQ ID NO: 127017 - protein, 12 aa, Homo sapiens
  CDR3 for alpha chain variable domain of TCR clone 63509 (TRAV13-1, TRAJ15)
CAASQAGTALIF

SEQ ID NO: 127018 - protein, 14 aa, Homo sapiens
  CDR3 for beta chain variable domain of TCR clone 63509 (TRBV25-1, TRBJ1-1)
CASTHLGGDTEAFF

SEQ ID NO: 127019 - protein, 13 aa, Homo sapiens
  CDR3 for alpha chain variable domain of TCR clone 63510 (TRAV8-4, TRAJ27)
CAVSPRNAGKSTF

SEQ ID NO: 127020 - protein, 12 aa, Homo sapiens
  CDR3 for beta chain variable domain of TCR clone 63510 (TRBV11-2, TRBJ2-2)
CASSLGGGELFF

SEQ ID NO: 127021 - protein, 15 aa, Homo sapiens
  CDR3 for alpha chain variable domain of TCR clone 63511 (TRAV12-3, TRAJ27)
CAMRAYNTNAGKSTF

SEQ ID NO: 127022 - protein, 14 aa, Homo sapiens
  CDR3 for beta chain variable domain of TCR clone 63511 (TRBV12-5, TRBJ2-5)
CASGSRTHQETQYF

SEQ ID NO: 127023 - protein, 14 aa, Homo sapiens
  CDR3 for alpha chain variable domain of TCR clone 63512 (TRAV1-2, TRAJ8)
CAVREDTGFQKLVF

SEQ ID NO: 127024 - protein, 12 aa, Homo sapiens
  CDR3 for beta chain variable domain of TCR clone 63512 (TRBV2, TRBJ2-1)
CAYGPPGNEQLF

SEQ ID NO: 127025 - protein, 16 aa, Homo sapiens
  CDR3 for alpha chain variable domain of TCR clone 63513 (TRAV20, TRAJ10)
CAVLRGLTGGGNKLTL

SEQ ID NO: 127026 - protein, 14 aa, Homo sapiens
  CDR3 for beta chain variable domain of TCR clone 63513 (TRBV19, TRBJ1-5)
CASRAPDSFLSQHF

SEQ ID NO: 127027 - protein, 13 aa, Homo sapiens
  CDR3 for alpha chain variable domain of TCR clone 63514 (TRAV3, TRAJ36)
CAVRDTGANNLFF

SEQ ID NO: 127028 - protein, 15 aa, Homo sapiens
  CDR3 for beta chain variable domain of TCR clone 63514 (TRBV24-1, TRBJ2-1)
CATSGSGGFYNEQFL

SEQ ID NO: 127029 - protein, 14 aa, Homo sapiens
  CDR3 for alpha chain variable domain of TCR clone 63515 (TRAV1-2, TRAJ29)
CAVRELTSATPLVF

SEQ ID NO: 127030 - protein, 14 aa, Homo sapiens
  CDR3 for beta chain variable domain of TCR clone 63515 (TRBV3-1, TRBJ2-5)
CASSQGPDRETQYF

SEQ ID NO: 127031 - protein, 12 aa, Homo sapiens
  CDR3 for alpha chain variable domain of TCR clone 63516 (TRAV13-1, TRAJ21)
CAAKEGFNNFYF

SEQ ID NO: 127032 - protein, 18 aa, Homo sapiens
  CDR3 for beta chain variable domain of TCR clone 63516 (TRBV20-1, TRBJ2-6)
CSAETTPTHGSGANVLTF

SEQ ID NO: 127033 - protein, 15 aa, Homo sapiens
  CDR3 for alpha chain variable domain of TCR clone 63517 (TRAV8-6, TRAJ10)
CVVSDQAGGGNKLTF

SEQ ID NO: 127034 - protein, 15 aa, Homo sapiens
  CDR3 for beta chain variable domain of TCR clone 63517 (TRBV3-1, TRBJ2-5)
CASSANLGGPETQYF

SEQ ID NO: 127035 - protein, 17 aa, Homo sapiens
  CDR3 for alpha chain variable domain of TCR clone 63518 (TRAV26-1, TRAJ37)
CIVRVITVSSNTGKLIF

SEQ ID NO: 127036 - protein, 13 aa, Homo sapiens
  CDR3 for beta chain variable domain of TCR clone 63518 (TRBV4-2, TRBJ1-1)
CASSQAGNTEAFF

SEQ ID NO: 127037 - protein, 15 aa, Homo sapiens
  CDR3 for alpha chain variable domain of TCR clone 63519 (TRAV1-2, TRAJ12)
CAVIPEVDSSYKLIF

SEQ ID NO: 127038 - protein, 16 aa, Homo sapiens
  CDR3 for beta chain variable domain of TCR clone 63519 (TRBV19, TRBJ2-1)
CASSKAGPSSYNEQFF

SEQ ID NO: 127039 - protein, 16 aa, Homo sapiens
  CDR3 for alpha chain variable domain of TCR clone 63520 (TRAV3, TRAJ10)
CAVRDMRAGGGNKLNF

SEQ ID NO: 127040 - protein, 15 aa, Homo sapiens
  CDR3 for beta chain variable domain of TCR clone 63520 (TRBV9, TRBJ1-6)
CASSVAGTGDSPLHF

SEQ ID NO: 127041 - protein, 14 aa, Homo sapiens
  CDR3 for alpha chain variable domain of TCR clone 63521 (TRAV3, TRAJ9)
CAVRLNTGGFKSIF

SEQ ID NO: 127042 - protein, 15 aa, Homo sapiens
  CDR3 for beta chain variable domain of TCR clone 63521 (TRBV7-2, TRBJ2-1)
CASSLASGRVNEQFF

SEQ ID NO: 127043 - protein, 17 aa, Homo sapiens
  CDR3 for alpha chain variable domain of TCR clone 63522 (TRAV3, TRAJ42)
CAVTDRDYGGSQGNLIF

SEQ ID NO: 127044 - protein, 15 aa, Homo sapiens
  CDR3 for beta chain variable domain of TCR clone 63522 (TRBV6-6, TRBJ2-7)
CASSYSYGGSYEQYF

SEQ ID NO: 127045 - protein, 16 aa, Homo sapiens
  CDR3 for alpha chain variable domain of TCR clone 63523 (TRAV16, TRAJ4)
CALSRMFSGGYNKLIF

SEQ ID NO: 127046 - protein, 16 aa, Homo sapiens
  CDR3 for beta chain variable domain of TCR clone 63523 (TRBV24-1, TRBJ2-3)
CSTSDPGTGATDTQYF

SEQ ID NO: 127047 - protein, 14 aa, Homo sapiens
  CDR3 for alpha chain variable domain of TCR clone 63524 (TRAV13-2, TRAJ57)
YAESTQGGSEKLVF

SEQ ID NO: 127048 - protein, 14 aa, Homo sapiens
  CDR3 for beta chain variable domain of TCR clone 63524 (TRBV10-3, TRBJ2-2)
CAISEVSHSGELFF

SEQ ID NO: 127049 - protein, 11 aa, Homo sapiens
  CDR3 for alpha chain variable domain of TCR clone 63525 (TRAV21, TRAJ41)
CAVRSGYALNF

SEQ ID NO: 127050 - protein, 13 aa, Homo sapiens
  CDR3 for beta chain variable domain of TCR clone 63525 (TRBV7-2, TRBJ2-5)
CASGQTSVETQYF

SEQ ID NO: 127051 - protein, 17 aa, Homo sapiens
  CDR3 for alpha chain variable domain of TCR clone 63526 (TRAV3, TRAJ38)
CAVRDCLNAGNNRKLIW

SEQ ID NO: 127052 - protein, 16 aa, Homo sapiens
  CDR3 for beta chain variable domain of TCR clone 63526 (TRBV3-1, TRBJ2-5)
CASSQDWASGQETQYF

SEQ ID NO: 127053 - protein, 16 aa, Homo sapiens
  CDR3 for alpha chain variable domain of TCR clone 63527 (TRAV3, TRAJ10)
CAVRGMRAGGGNKLTF

SEQ ID NO: 127054 - protein, 16 aa, Homo sapiens
  CDR3 for beta chain variable domain of TCR clone 63527 (TRBV12-4, TRBJ1-5)
CASSRPVGGSNQPQHF

SEQ ID NO: 127055 - protein, 12 aa, Homo sapiens
  CDR3 for alpha chain variable domain of TCR clone 63528 (TRAV36/DV7, TRAJ54)
CAVVRGAQKLVF

SEQ ID NO: 127056 - protein, 13 aa, Homo sapiens
  CDR3 for beta chain variable domain of TCR clone 63528 (TRBV10-3, TRBJ2-7)
CASKLAVNYEQYF

SEQ ID NO: 127057 - protein, 15 aa, Homo sapiens
  CDR3 for alpha chain variable domain of TCR clone 63529 (TRAV12-3, TRAJ6)
YAMSATTGGSYIPTF

SEQ ID NO: 127058 - protein, 16 aa, Homo sapiens
  CDR3 for beta chain variable domain of TCR clone 63529 (TRBV20-1, TRBJ1-2)
CSASMGQGVANYGYTF

SEQ ID NO: 127059 - protein, 16 aa, Homo sapiens
  CDR3 for alpha chain variable domain of TCR clone 63530 (TRAV3, TRAJ21)
CAVRDIERGNFNKFYF

SEQ ID NO: 127060 - protein, 13 aa, Homo sapiens
  CDR3 for beta chain variable domain of TCR clone 63530 (TRBV27, TRBJ2-7)
CANSLTTGYEQYF

SEQ ID NO: 127061 - protein, 10 aa, Homo sapiens
  CDR3 for alpha chain variable domain of TCR clone 63531 (TRAV1-2, TRAJ23)
CAGQGGKLIF

SEQ ID NO: 127062 - protein, 18 aa, Homo sapiens
  CDR3 for beta chain variable domain of TCR clone 63531 (TRBV11-2, TRBJ2-3)
CASSLGGASRGAPNTQYF

SEQ ID NO: 127063 - protein, 12 aa, Homo sapiens
  CDR3 for alpha chain variable domain of TCR clone 63532 (TRAV12-3, TRAJ43)
CAISSNNNDMRF

SEQ ID NO: 127064 - protein, 13 aa, Homo sapiens
  CDR3 for beta chain variable domain of TCR clone 63532 (TRBV7-9, TRBJ1-2)
CASSLKQNYGYTF

SEQ ID NO: 127065 - protein, 18 aa, Homo sapiens
  CDR3 for alpha chain variable domain of TCR clone 63533 (TRAV3, TRAJ17)
CAVRARRGGRRCRQQANF

SEQ ID NO: 127066 - protein, 14 aa, Homo sapiens
  CDR3 for beta chain variable domain of TCR clone 63533 (TRBV4-1, TRBJ2-2)
CASSQAVNTGELFF

SEQ ID NO: 127067 - protein, 15 aa, Homo sapiens
  CDR3 for alpha chain variable domain of TCR clone 63534 (TRAV8-3, TRAJ45)
CASSYSGGGADGLTF

SEQ ID NO: 127068 - protein, 11 aa, Homo sapiens
  CDR3 for beta chain variable domain of TCR clone 63534 (TRBV19, TRBJ1-1)
CASSIGSEAFF

SEQ ID NO: 127069 - protein, 14 aa, Homo sapiens
  CDR3 for alpha chain variable domain of TCR clone 63535 (TRAV29/DV5, TRAJ32)
CAAAYGGATTKLIF

SEQ ID NO: 127070 - protein, 15 aa, Homo sapiens
  CDR3 for beta chain variable domain of TCR clone 63535 (TRBV27, TRBJ2-7)
CASSTAGTGSYEQYF

SEQ ID NO: 127071 - protein, 13 aa, Homo sapiens
  CDR3 for alpha chain variable domain of TCR clone 63536 (TRAV3, TRAJ36)
CAVRDTRANNLFF

SEQ ID NO: 127072 - protein, 15 aa, Homo sapiens
  CDR3 for beta chain variable domain of TCR clone 63536 (TRBV24-1, TRBJ2-1)
CATSGSGGFYNEQFF

SEQ ID NO: 127073 - protein, 13 aa, Homo sapiens
  CDR3 for alpha chain variable domain of TCR clone 63537 (TRAV17, TRAJ9)
CATGSTGGFKTIF

SEQ ID NO: 127074 - protein, 14 aa, Homo sapiens
  CDR3 for beta chain variable domain of TCR clone 63537 (TRBV7-8, TRBJ2-7)
CASTCRGGPNEQYF

SEQ ID NO: 127075 - protein, 15 aa, Homo sapiens
  CDR3 for alpha chain variable domain of TCR clone 63538 (TRAV1-2, TRAJ28)
CAVQYSGAGSYQLTF

SEQ ID NO: 127076 - protein, 13 aa, Homo sapiens
  CDR3 for beta chain variable domain of TCR clone 63538 (TRBV20-1, TRBJ2-7)
CSAIHTSGYEQYF

SEQ ID NO: 127077 - protein, 14 aa, Homo sapiens
  CDR3 for alpha chain variable domain of TCR clone 63539 (TRAV12-2, TRAJ9)
CAVNALEGGFKTIF

SEQ ID NO: 127078 - protein, 13 aa, Homo sapiens
  CDR3 for beta chain variable domain of TCR clone 63539 (TRBV28, TRBJ2-7)
CASKAGGVYEQYF

SEQ ID NO: 127079 - protein, 12 aa, Homo sapiens
  CDR3 for alpha chain variable domain of TCR clone 63540 (TRAV12-3, TRAJ41)
CAMSYSGYALNF

SEQ ID NO: 127080 - protein, 13 aa, Homo sapiens
  CDR3 for beta chain variable domain of TCR clone 63540 (TRBV7-3, TRBJ2-1)
CAGSLDSYNEQFF

SEQ ID NO: 127081 - protein, 14 aa, Homo sapiens
  CDR3 for alpha chain variable domain of TCR clone 63541 (TRAV20, TRAJ56)
CAVQFGGANSKLTF

SEQ ID NO: 127082 - protein, 17 aa, Homo sapiens
  CDR3 for beta chain variable domain of TCR clone 63541 (TRBV7-8, TRBJ2-6)
CASSAGTGGAGANVLTF

SEQ ID NO: 127083 - protein, 10 aa, Homo sapiens
  CDR3 for alpha chain variable domain of TCR clone 63542 (TRAV17, TRAJ36)
CAAVAGNLFF

SEQ ID NO: 127084 - protein, 12 aa, Homo sapiens
  CDR3 for beta chain variable domain of TCR clone 63542 (TRBV11-2, TRBJ2-4)
CASSSASVSEYF

SEQ ID NO: 127085 - protein, 12 aa, Homo sapiens
  CDR3 for alpha chain variable domain of TCR clone 63543 (TRAV13-1, TRAJ53)
AASGGSNYKLTF

SEQ ID NO: 127086 - protein, 16 aa, Homo sapiens
  CDR3 for beta chain variable domain of TCR clone 63543 (TRBV28, TRBJ2-6)
CASSNRRGSGANALTF

SEQ ID NO: 127087 - protein, 16 aa, Homo sapiens
  CDR3 for alpha chain variable domain of TCR clone 63544 (TRAV3, TRAJ5)
CAVRTLMDTGRRALTF

SEQ ID NO: 127088 - protein, 16 aa, Homo sapiens
  CDR3 for beta chain variable domain of TCR clone 63544 (TRBV4-2, TRBJ2-7)
CASSQEGLANSYEQYF

SEQ ID NO: 127089 - protein, 15 aa, Homo sapiens
  CDR3 for alpha chain variable domain of TCR clone 63545 (TRAV17, TRAJ56)
CATDANTGANSKLTF

SEQ ID NO: 127090 - protein, 14 aa, Homo sapiens
  CDR3 for beta chain variable domain of TCR clone 63545 (TRBV6-3, TRBJ1-1)
CASSYQRRDTEAFF

SEQ ID NO: 127091 - protein, 15 aa, Homo sapiens
  CDR3 for alpha chain variable domain of TCR clone 63546 (TRAV26-1, TRAJ44)
CIARVPFGTASKLTF

SEQ ID NO: 127092 - protein, 15 aa, Homo sapiens
  CDR3 for beta chain variable domain of TCR clone 63546 (TRBV20-1, TRBJ1-1)
CSASRGVTGNIEAFF

SEQ ID NO: 127093 - protein, 14 aa, Homo sapiens
  CDR3 for alpha chain variable domain of TCR clone 63547 (TRAV8-4, TRAJ16)
CAVSPIGRWPEAAL

SEQ ID NO: 127094 - protein, 17 aa, Homo sapiens
  CDR3 for beta chain variable domain of TCR clone 63547 (TRBV7-3, TRBJ1-6)
CASSLGRGPVHPSTLGM

SEQ ID NO: 127095 - protein, 13 aa, Homo sapiens
  CDR3 for alpha chain variable domain of TCR clone 63548 (TRAV38-1, TRAJ42)
CARWGESQGNLIF

SEQ ID NO: 127096 - protein, 17 aa, Homo sapiens
  CDR3 for beta chain variable domain of TCR clone 63548 (TRBV20-1, TRBJ2-1)
CSARDPLAGVWDNEQFF

SEQ ID NO: 127097 - protein, 16 aa, Homo sapiens
  CDR3 for alpha chain variable domain of TCR clone 63549 (TRAV17, TRAJ35)
CATAEGGIGFGNVLHC

SEQ ID NO: 127098 - protein, 13 aa, Homo sapiens
  CDR3 for beta chain variable domain of TCR clone 63549 (TRBV10-3, TRBJ1-2)
CAISERDSYGYTF

SEQ ID NO: 127099 - protein, 18 aa, Homo sapiens
  CDR3 for alpha chain variable domain of TCR clone 63550 (TRAV16, TRAJ16)
CALSGLVTGMARSCSLQG

SEQ ID NO: 127100 - protein, 14 aa, Homo sapiens
  CDR3 for beta chain variable domain of TCR clone 63550 (TRBV7-9, TRBJ2-4)
CASTTGGAKNIQYF

SEQ ID NO: 127101 - protein, 12 aa, Homo sapiens
  CDR3 for alpha chain variable domain of TCR clone 63551 (TRAV13-1, TRAJ21)
CAAKEGFNKFYF

SEQ ID NO: 127102 - protein, 16 aa, Homo sapiens
  CDR3 for beta chain variable domain of TCR clone 63551 (TRBV7-3, TRBJ2-1)
CASSLEGYRSYNEQFF

SEQ ID NO: 127103 - protein, 11 aa, Homo sapiens
  CDR3 for alpha chain variable domain of TCR clone 63552 (TRAV35, TRAJ30)
CAGLGDDKIIF

SEQ ID NO: 127104 - protein, 14 aa, Homo sapiens
  CDR3 for beta chain variable domain of TCR clone 63552 (TRBV7-6, TRBJ1-6)
CASSQAGGGSPLHF

SEQ ID NO: 127105 - protein, 11 aa, Homo sapiens
  CDR3 for alpha chain variable domain of TCR clone 63553 (TRAV2, TRAJ33)
CAVDSNYQLIR

SEQ ID NO: 127106 - protein, 14 aa, Homo sapiens
  CDR3 for beta chain variable domain of TCR clone 63553 (TRBV11-2, TRBJ2-3)
CASSRLARTDTQYF

SEQ ID NO: 127107 - protein, 14 aa, Homo sapiens
  CDR3 for alpha chain variable domain of TCR clone 63554 (TRAV13-1, TRAJ44)
CAAKATGIASKLTF

SEQ ID NO: 127108 - protein, 17 aa, Homo sapiens
  CDR3 for beta chain variable domain of TCR clone 63554 (TRBV7-3, TRBJ2-3)
CASSLMKRMRGADTQYF

SEQ ID NO: 127109 - protein, 11 aa, Homo sapiens
  CDR3 for alpha chain variable domain of TCR clone 63555 (TRAV21, TRAJ11)
CAVNGFSTLTF

SEQ ID NO: 127110 - protein, 11 aa, Homo sapiens
  CDR3 for beta chain variable domain of TCR clone 63555 (TRBV19, TRBJ1-1)
CASSIGSEAFF

SEQ ID NO: 127111 - protein, 14 aa, Homo sapiens
  CDR3 for alpha chain variable domain of TCR clone 63556 (TRAV12-2, TRAJ44)
CAVNPAGTASKLTF

SEQ ID NO: 127112 - protein, 14 aa, Homo sapiens
  CDR3 for beta chain variable domain of TCR clone 63556 (TRBV18, TRBJ2-5)
CASSPGVSQETQYF

SEQ ID NO: 127113 - protein, 18 aa, Homo sapiens
  CDR3 for alpha chain variable domain of TCR clone 63557 (TRAV13-1, TRAJ28)
CAASPVPILWGWELPTHF

SEQ ID NO: 127114 - protein, 15 aa, Homo sapiens
  CDR3 for beta chain variable domain of TCR clone 63557 (TRBV11-2, TRBJ2-1)
CASSRNRGLMYEQFF

SEQ ID NO: 127115 - protein, 14 aa, Homo sapiens
  CDR3 for alpha chain variable domain of TCR clone 63558 (TRAV13-2, TRAJ45)
CAEMSRGGADGLTF

SEQ ID NO: 127116 - protein, 11 aa, Homo sapiens
  CDR3 for beta chain variable domain of TCR clone 63558 (TRBV7-3, TRBJ2-5)
CVSSLSETQYF

SEQ ID NO: 127117 - protein, 16 aa, Homo sapiens
  CDR3 for alpha chain variable domain of TCR clone 63559 (TRAV3, TRAJ10)
CAVRDMRAGGGNKLTF

SEQ ID NO: 127118 - protein, 13 aa, Homo sapiens
  CDR3 for beta chain variable domain of TCR clone 63559 (TRBV7-3, TRBJ2-1)
CASSPVAYNEQFF

SEQ ID NO: 127119 - protein, 12 aa, Homo sapiens
  CDR3 for alpha chain variable domain of TCR clone 63560 (TRAV29/DV5, TRAJ10)
CAYTGGGNKLTF

SEQ ID NO: 127120 - protein, 14 aa, Homo sapiens
  CDR3 for beta chain variable domain of TCR clone 63560 (TRBV5-5, TRBJ1-5)
CASSGQGVDQPQHF

SEQ ID NO: 127121 - protein, 16 aa, Homo sapiens
  CDR3 for alpha chain variable domain of TCR clone 63561 (TRAV12-1, TRAJ42)
CVVTPYYGGSQGNLIF

SEQ ID NO: 127122 - protein, 12 aa, Homo sapiens
  CDR3 for beta chain variable domain of TCR clone 63561 (TRBV11-2, TRBJ2-2)
CASSLPTGELFF

SEQ ID NO: 127123 - protein, 13 aa, Homo sapiens
  CDR3 for alpha chain variable domain of TCR clone 63562 (TRAV8-3, TRAJ48)
CAMVPFGNEKLTF

SEQ ID NO: 127124 - protein, 19 aa, Homo sapiens
  CDR3 for beta chain variable domain of TCR clone 63562 (TRBV25-1, TRBJ2-2)
CAILVYRVDRGRKTGELFF

SEQ ID NO: 127125 - protein, 16 aa, Homo sapiens
  CDR3 for alpha chain variable domain of TCR clone 63563 (TRAV30, TRAJ24)
CGTEIVDADSWGKFQF

SEQ ID NO: 127126 - protein, 15 aa, Homo sapiens
  CDR3 for beta chain variable domain of TCR clone 63563 (TRBV7-9, TRBJ2-7)
CASSLALAEAYEQYF

SEQ ID NO: 127127 - protein, 11 aa, Homo sapiens
  CDR3 for alpha chain variable domain of TCR clone 63564 (TRAV21, TRAJ9)
YAVPGGFKTIF

SEQ ID NO: 127128 - protein, 17 aa, Homo sapiens
  CDR3 for beta chain variable domain of TCR clone 63564 (TRBV7-9, TRBJ2-5)
CATSGGARDPVLRARHA

SEQ ID NO: 127129 - protein, 14 aa, Homo sapiens
  CDR3 for alpha chain variable domain of TCR clone 63565 (TRAV12-2, TRAJ44)
CAVNIAGTASKLTF

SEQ ID NO: 127130 - protein, 17 aa, Homo sapiens
  CDR3 for beta chain variable domain of TCR clone 63565 (TRBV10-3, TRBJ1-2)
CAISESTTTLANYGYTF

SEQ ID NO: 127131 - protein, 15 aa, Homo sapiens
  CDR3 for alpha chain variable domain of TCR clone 63566 (TRAV27, TRAJ38)
CAARRNAGNNRRLIW

SEQ ID NO: 127132 - protein, 13 aa, Homo sapiens
  CDR3 for beta chain variable domain of TCR clone 63566 (TRBV19, TRBJ1-5)
CASSIGGNQPQHF

SEQ ID NO: 127133 - protein, 13 aa, Homo sapiens
  CDR3 for alpha chain variable domain of TCR clone 63567 (TRAV26-2, TRAJ43)
CILRAVNNNDMRF

SEQ ID NO: 127134 - protein, 16 aa, Homo sapiens
  CDR3 for beta chain variable domain of TCR clone 63567 (TRBV19, TRBJ2-1)
CASSKAGPSSYNEQFF

SEQ ID NO: 127135 - protein, 15 aa, Homo sapiens
  CDR3 for alpha chain variable domain of TCR clone 63568 (TRAV26-1, TRAJ9)
CIVRESNTGGFKTIF

SEQ ID NO: 127136 - protein, 11 aa, Homo sapiens
  CDR3 for beta chain variable domain of TCR clone 63568 (TRBV7-6, TRBJ2-5)
CASSFEETQYF

SEQ ID NO: 127137 - protein, 15 aa, Homo sapiens
  CDR3 for alpha chain variable domain of TCR clone 63569 (TRAV12-1, TRAJ6)
CVVNCPLRRKLHTYI

SEQ ID NO: 127138 - protein, 18 aa, Homo sapiens
  CDR3 for beta chain variable domain of TCR clone 63569 (TRBV7-9, TRBJ2-7)
CASSLTTSGSRTWYEQYF

SEQ ID NO: 127139 - protein, 14 aa, Homo sapiens
  CDR3 for alpha chain variable domain of TCR clone 63570 (TRAV16, TRAJ42)
CALLAGGSQGNLIF

SEQ ID NO: 127140 - protein, 15 aa, Homo sapiens
  CDR3 for beta chain variable domain of TCR clone 63570 (TRBV2, TRBJ2-7)
CASSEVLARSYEQYF

SEQ ID NO: 127141 - protein, 12 aa, Homo sapiens
  CDR3 for alpha chain variable domain of TCR clone 63571 (TRAV3, TRAJ43)
CAVKDPNNDMRF

SEQ ID NO: 127142 - protein, 15 aa, Homo sapiens
  CDR3 for beta chain variable domain of TCR clone 63571 (TRBV4-3, TRBJ2-7)
CASSQGDWGDYEQYF

SEQ ID NO: 127143 - protein, 14 aa, Homo sapiens
  CDR3 for alpha chain variable domain of TCR clone 63572 (TRAV8-6, TRAJ12)
CAVKAADSSYKLIF

SEQ ID NO: 127144 - protein, 16 aa, Homo sapiens
  CDR3 for beta chain variable domain of TCR clone 63572 (TRBV7-2, TRBJ1-2)
CASSPTSGTSLGGYTF

SEQ ID NO: 127145 - protein, 13 aa, Homo sapiens
  CDR3 for alpha chain variable domain of TCR clone 63573 (TRAV2, TRAJ24)
CAVSTASWGKLQF

SEQ ID NO: 127146 - protein, 14 aa, Homo sapiens
  CDR3 for beta chain variable domain of TCR clone 63573 (TRBV13, TRBJ2-5)
CASSLGTAQETQYF

SEQ ID NO: 127147 - protein, 15 aa, Homo sapiens
  CDR3 for alpha chain variable domain of TCR clone 63574 (TRAV3, TRAJ22)
CAVRDRGGSARQLSF

SEQ ID NO: 127148 - protein, 16 aa, Homo sapiens
  CDR3 for beta chain variable domain of TCR clone 63574 (TRBV5-4, TRBJ2-3)
CASQQPGAGGADTQYF

SEQ ID NO: 127149 - protein, 14 aa, Homo sapiens
  CDR3 for alpha chain variable domain of TCR clone 63575 (TRAV1-2, TRAJ8)
CAVREDTGFQKLVF

SEQ ID NO: 127150 - protein, 19 aa, Homo sapiens
  CDR3 for beta chain variable domain of TCR clone 63575 (TRBV14, TRBJ2-1)
CASSQEQLWEAPEYNEQFF

SEQ ID NO: 127151 - protein, 14 aa, Homo sapiens
  CDR3 for alpha chain variable domain of TCR clone 63576 (TRAV14/DV4, TRAJ9)
CAMRESTGGFKTIF

SEQ ID NO: 127152 - protein, 13 aa, Homo sapiens
  CDR3 for beta chain variable domain of TCR clone 63576 (TRBV7-6, TRBJ1-2)
CASSLVADYGYTF

SEQ ID NO: 127153 - protein, 12 aa, Homo sapiens
  CDR3 for alpha chain variable domain of TCR clone 63577 (TRAV3, TRAJ20)
CAVRDPDYKLSF

SEQ ID NO: 127154 - protein, 13 aa, Homo sapiens
  CDR3 for beta chain variable domain of TCR clone 63577 (TRBV11-2, TRBJ2-5)
CASGHGAKETQYF

SEQ ID NO: 127155 - protein, 14 aa, Homo sapiens
  CDR3 for alpha chain variable domain of TCR clone 63578 (TRAV8-4, TRAJ13)
CAVTLSGGYQKVTF

SEQ ID NO: 127156 - protein, 17 aa, Homo sapiens
  CDR3 for beta chain variable domain of TCR clone 63578 (TRBV20-1, TRBJ2-1)
CSASSSGLAGSYNEQFL

SEQ ID NO: 127157 - protein, 17 aa, Homo sapiens
  CDR3 for alpha chain variable domain of TCR clone 63579 (TRAV17, TRAJ28)
CATDPRRGGAGSYQRTF

SEQ ID NO: 127158 - protein, 16 aa, Homo sapiens
  CDR3 for beta chain variable domain of TCR clone 63579 (TRBV25-1, TRBJ1-1)
CASSGDRDRGRIEAFF

SEQ ID NO: 127159 - protein, 16 aa, Homo sapiens
  CDR3 for alpha chain variable domain of TCR clone 63580 (TRAV12-2, TRAJ43)
CAGDDMRFGAGTRLTV

SEQ ID NO: 127160 - protein, 16 aa, Homo sapiens
  CDR3 for beta chain variable domain of TCR clone 63580 (TRBV2, TRBJ2-4)
CASSEAPGVEQNIQYF

SEQ ID NO: 127161 - protein, 14 aa, Homo sapiens
  CDR3 for alpha chain variable domain of TCR clone 63581 (TRAV26-1, TRAJ34)
CIVRVAYNTDKLIF

SEQ ID NO: 127162 - protein, 15 aa, Homo sapiens
  CDR3 for beta chain variable domain of TCR clone 63581 (TRBV20-1, TRBJ2-7)
CSARVPAAYFYEQYC

SEQ ID NO: 127163 - protein, 11 aa, Homo sapiens
  CDR3 for alpha chain variable domain of TCR clone 63582 (TRAV2, TRAJ13)
CAYGGYQKVTF

SEQ ID NO: 127164 - protein, 16 aa, Homo sapiens
  CDR3 for beta chain variable domain of TCR clone 63582 (TRBV2, TRBJ2-1)
CASSVGGSLSYNEQFF

SEQ ID NO: 127165 - protein, 17 aa, Homo sapiens
  CDR3 for alpha chain variable domain of TCR clone 63583 (TRAV3, TRAJ42)
RAVRDRDYGGSQGNLIF

SEQ ID NO: 127166 - protein, 15 aa, Homo sapiens
  CDR3 for beta chain variable domain of TCR clone 63583 (TRBV2, TRBJ2-7)
CASSEGLARSYEQYF

SEQ ID NO: 127167 - protein, 17 aa, Homo sapiens
  CDR3 for alpha chain variable domain of TCR clone 63584 (TRAV4, TRAJ13)
CLVGVQGSSGGSQKVTF

SEQ ID NO: 127168 - protein, 18 aa, Homo sapiens
  CDR3 for beta chain variable domain of TCR clone 63584 (TRBV15, TRBJ2-3)
CATSRDGARSWDTDTQYF

SEQ ID NO: 127169 - protein, 13 aa, Homo sapiens
  CDR3 for alpha chain variable domain of TCR clone 63585 (TRAV12-1, TRAJ16)
CVVNGPDGQKLLF

SEQ ID NO: 127170 - protein, 13 aa, Homo sapiens
  CDR3 for beta chain variable domain of TCR clone 63585 (TRBV2, TRBJ1-1)
CARKPTGGFHAFF

SEQ ID NO: 127171 - protein, 13 aa, Homo sapiens
  CDR3 for alpha chain variable domain of TCR clone 63586 (TRAV38-1, TRAJ42)
CARWGGSQGNLIF

SEQ ID NO: 127172 - protein, 13 aa, Homo sapiens
  CDR3 for beta chain variable domain of TCR clone 63586 (TRBV12-4, TRBJ1-5)
CASSPDRAQPQHF

SEQ ID NO: 127173 - protein, 16 aa, Homo sapiens
  CDR3 for alpha chain variable domain of TCR clone 63587 (TRAV13-1, TRAJ48)
CAASIFGNFGNEKLTF

SEQ ID NO: 127174 - protein, 15 aa, Homo sapiens
  CDR3 for beta chain variable domain of TCR clone 63587 (TRBV6-5, TRBJ2-1)
CASSYDAGAGNEQFF

SEQ ID NO: 127175 - protein, 11 aa, Homo sapiens
  CDR3 for alpha chain variable domain of TCR clone 63588 (TRAV1-2, TRAJ40)
CAVPGTYKYTF

SEQ ID NO: 127176 - protein, 15 aa, Homo sapiens
  CDR3 for beta chain variable domain of TCR clone 63588 (TRBV5-7, TRBJ1-5)
CASSYGKLWDQPQHF

SEQ ID NO: 127177 - protein, 14 aa, Homo sapiens
  CDR3 for alpha chain variable domain of TCR clone 63589 (TRAV12-3, TRAJ10)
SHLPLTGGGNKLTF

SEQ ID NO: 127178 - protein, 13 aa, Homo sapiens
  CDR3 for beta chain variable domain of TCR clone 63589 (TRBV18, TRBJ2-7)
CASQSGGGYEQYF

SEQ ID NO: 127179 - protein, 15 aa, Homo sapiens
  CDR3 for alpha chain variable domain of TCR clone 63590 (TRAV21, TRAJ53)
CATLNSGGSNYKLTF

SEQ ID NO: 127180 - protein, 16 aa, Homo sapiens
  CDR3 for beta chain variable domain of TCR clone 63590 (TRBV12-4, TRBJ1-5)
CASSRTVGGSNQPQHF

SEQ ID NO: 127181 - protein, 12 aa, Homo sapiens
  CDR3 for alpha chain variable domain of TCR clone 63591 (TRAV3, TRAJ39)
SAVIEWSNMLTF

SEQ ID NO: 127182 - protein, 14 aa, Homo sapiens
  CDR3 for beta chain variable domain of TCR clone 63591 (TRBV7-8, TRBJ2-3)
CASSFPDGQDTQYF

SEQ ID NO: 127183 - protein, 14 aa, Homo sapiens
  CDR3 for alpha chain variable domain of TCR clone 63592 (TRAV1-2, TRAJ16)
CAVNRFSDGQKLLF

SEQ ID NO: 127184 - protein, 11 aa, Homo sapiens
  CDR3 for beta chain variable domain of TCR clone 63592 (TRBV7-8, TRBJ2-7)
CAGSLSLEQYF

SEQ ID NO: 127185 - protein, 14 aa, Homo sapiens
  CDR3 for alpha chain variable domain of TCR clone 63593 (TRAV8-4, TRAJ9)
CAVRINTGGFKTIF

SEQ ID NO: 127186 - protein, 15 aa, Homo sapiens
  CDR3 for beta chain variable domain of TCR clone 63593 (TRBV20-1, TRBJ2-7)
CSARDRVSGMDEHYF

SEQ ID NO: 127187 - protein, 12 aa, Homo sapiens
  CDR3 for alpha chain variable domain of TCR clone 63594 (TRAV2, TRAJ9)
CAVGAGGFKTIF

SEQ ID NO: 127188 - protein, 22 aa, Homo sapiens
  CDR3 for beta chain variable domain of TCR clone 63594 (TRBV6-1, TRBJ1-3)
CASVQGGGWKHHIFWRGKLAHC

SEQ ID NO: 127189 - protein, 13 aa, Homo sapiens
  CDR3 for alpha chain variable domain of TCR clone 63595 (TRAV3, TRAJ21)
CAVGNFNKFYFDL

SEQ ID NO: 127190 - protein, 17 aa, Homo sapiens
  CDR3 for beta chain variable domain of TCR clone 63595 (TRBV24-1, TRBJ2-1)
CATSDASTSGTYNEQFF

SEQ ID NO: 127191 - protein, 13 aa, Homo sapiens
  CDR3 for alpha chain variable domain of TCR clone 63596 (TRAV35, TRAJ42)
CAGFPGSQGNLIF

SEQ ID NO: 127192 - protein, 14 aa, Homo sapiens
  CDR3 for beta chain variable domain of TCR clone 63596 (TRBV19, TRBJ2-1)
CAGPTFVLSGEQFF

SEQ ID NO: 127193 - protein, 12 aa, Homo sapiens
  CDR3 for alpha chain variable domain of TCR clone 63597 (TRAV16, TRAJ10)
CSRTGGGNKLTF

SEQ ID NO: 127194 - protein, 15 aa, Homo sapiens
  CDR3 for beta chain variable domain of TCR clone 63597 (TRBV6-3, TRBJ2-7)
CTSSSPGTVFYEQYF

SEQ ID NO: 127195 - protein, 17 aa, Homo sapiens
  CDR3 for alpha chain variable domain of TCR clone 63598 (TRAV3, TRAJ42)
CAVRDRDNGGSQGNLIF

SEQ ID NO: 127196 - protein, 15 aa, Homo sapiens
  CDR3 for beta chain variable domain of TCR clone 63598 (TRBV6-6, TRBJ2-7)
CASSYSYGGSYEQYF

SEQ ID NO: 127197 - protein, 15 aa, Homo sapiens
  CDR3 for alpha chain variable domain of TCR clone 63599 (TRAV12-1, TRAJ44)
CVADLPAGTASKLTF

SEQ ID NO: 127198 - protein, 13 aa, Homo sapiens
  CDR3 for beta chain variable domain of TCR clone 63599 (TRBV6-5, TRBJ2-5)
CASSPQGGETQYF

SEQ ID NO: 127199 - protein, 17 aa, Homo sapiens
  CDR3 for alpha chain variable domain of TCR clone 63600 (TRAV12-1, TRAJ42)
CVVMRMNYGGSQGNIIF

SEQ ID NO: 127200 - protein, 13 aa, Homo sapiens
  CDR3 for beta chain variable domain of TCR clone 63600 (TRBV7-2, TRBJ1-1)
CASSLARPAEAFF

SEQ ID NO: 127201 - protein, 13 aa, Homo sapiens
  CDR3 for alpha chain variable domain of TCR clone 63601 (TRAV20, TRAJ49)
CAVQARTGNQFYF

SEQ ID NO: 127202 - protein, 12 aa, Homo sapiens
  CDR3 for beta chain variable domain of TCR clone 63601 (TRBV28, TRBJ2-3)
CASSLYRDTQYF

SEQ ID NO: 127203 - protein, 13 aa, Homo sapiens
  CDR3 for alpha chain variable domain of TCR clone 63602 (TRAV12-2, TRAJ20)
CAVYPSNDYKLSF

SEQ ID NO: 127204 - protein, 12 aa, Homo sapiens
  CDR3 for beta chain variable domain of TCR clone 63602 (TRBV6-3, TRBJ2-7)
CASSEPGFEQYF

SEQ ID NO: 127205 - protein, 12 aa, Homo sapiens
  CDR3 for alpha chain variable domain of TCR clone 63603 (TRAV3, TRAJ39)
CAVIEWSNLLTF

SEQ ID NO: 127206 - protein, 14 aa, Homo sapiens
  CDR3 for beta chain variable domain of TCR clone 63603 (TRBV7-8, TRBJ2-3)
CASSFPDGQDTQYF

SEQ ID NO: 127207 - protein, 17 aa, Homo sapiens
  CDR3 for alpha chain variable domain of TCR clone 63604 (TRAV3, TRAJ6)
CAVRDGPRAGGSYIPTL

SEQ ID NO: 127208 - protein, 20 aa, Homo sapiens
  CDR3 for beta chain variable domain of TCR clone 63604 (TRBV28, TRBJ2-1)
CASTPIGRSPGLAGGNEQFF

SEQ ID NO: 127209 - protein, 14 aa, Homo sapiens
  CDR3 for alpha chain variable domain of TCR clone 63605 (TRAV17, TRAJ4)
CATAPLGGYNKLIF

SEQ ID NO: 127210 - protein, 14 aa, Homo sapiens
  CDR3 for beta chain variable domain of TCR clone 63605 (TRBV18, TRBJ2-7)
CASSLDRAAYEQYF

SEQ ID NO: 127211 - protein, 16 aa, Homo sapiens
  CDR3 for alpha chain variable domain of TCR clone 63606 (TRAV30, TRAJ24)
CGTEIADADSWGKFQF

SEQ ID NO: 127212 - protein, 14 aa, Homo sapiens
  CDR3 for beta chain variable domain of TCR clone 63606 (TRBV7-8, TRBJ2-3)
CASSLEAGTDTQYF

SEQ ID NO: 127213 - protein, 15 aa, Homo sapiens
  CDR3 for alpha chain variable domain of TCR clone 63607 (TRAV36/DV7, TRAJ53)
CAVEGSRGSNYKLTF

SEQ ID NO: 127214 - protein, 16 aa, Homo sapiens
  CDR3 for beta chain variable domain of TCR clone 63607 (TRBV27, TRBJ2-2)
CASSLSGFWVTGELFF

SEQ ID NO: 127215 - protein, 12 aa, Homo sapiens
  CDR3 for alpha chain variable domain of TCR clone 63608 (TRAV12-2, TRAJ36)
CAAPRGANNPFF

SEQ ID NO: 127216 - protein, 15 aa, Homo sapiens
  CDR3 for beta chain variable domain of TCR clone 63608 (TRBV11-2, TRBJ1-3)
CASSLDGTVGNTIYF

SEQ ID NO: 127217 - protein, 16 aa, Homo sapiens
  CDR3 for alpha chain variable domain of TCR clone 63609 (TRAV4, TRAJ42)
CLVGDHYGGSQGNLIF

SEQ ID NO: 127218 - protein, 14 aa, Homo sapiens
  CDR3 for beta chain variable domain of TCR clone 63609 (TRBV7-3, TRBJ1-1)
CASSLKGGNTEAFF

SEQ ID NO: 127219 - protein, 16 aa, Homo sapiens
  CDR3 for alpha chain variable domain of TCR clone 63610 (TRAV20, TRAJ26)
CAVQHRRDNYGQNFVF

SEQ ID NO: 127220 - protein, 15 aa, Homo sapiens
  CDR3 for beta chain variable domain of TCR clone 63610 (TRBV19, TRBJ1-1)
CASTSGQIQNTEAFF

SEQ ID NO: 127221 - protein, 12 aa, Homo sapiens
  CDR3 for alpha chain variable domain of TCR clone 63611 (TRAV12-3, TRAJ17)
CAMTLTGNKLTF

SEQ ID NO: 127222 - protein, 15 aa, Homo sapiens
  CDR3 for beta chain variable domain of TCR clone 63611 (TRBV5-4, TRBJ1-1)
CASSSLGWANTEAFF

SEQ ID NO: 127223 - protein, 14 aa, Homo sapiens
  CDR3 for alpha chain variable domain of TCR clone 63612 (TRAV12-2, TRAJ13)
CAVKKTGGYQKVTL

SEQ ID NO: 127224 - protein, 15 aa, Homo sapiens
  CDR3 for beta chain variable domain of TCR clone 63612 (TRBV27, TRBJ2-1)
CASSNGGGSSSEQFF

SEQ ID NO: 127225 - protein, 14 aa, Homo sapiens
  CDR3 for alpha chain variable domain of TCR clone 63613 (TRAV12-1, TRAJ10)
CVVNSAGGGNKLTS

SEQ ID NO: 127226 - protein, 14 aa, Homo sapiens
  CDR3 for beta chain variable domain of TCR clone 63613 (TRBV12-4, TRBJ1-1)
CASSLGTGGTEAFF

SEQ ID NO: 127227 - protein, 11 aa, Homo sapiens
  CDR3 for alpha chain variable domain of TCR clone 63614 (TRAV12-2, TRAJ29)
CAVTLRSPLVF

SEQ ID NO: 127228 - protein, 16 aa, Homo sapiens
  CDR3 for beta chain variable domain of TCR clone 63614 (TRBV19, TRBJ1-5)
CASSIDRGGPKQPQHF

SEQ ID NO: 127229 - protein, 11 aa, Homo sapiens
  CDR3 for alpha chain variable domain of TCR clone 63615 (TRAV12-3, TRAJ43)
CAMSVSNGMRF

SEQ ID NO: 127230 - protein, 17 aa, Homo sapiens
  CDR3 for beta chain variable domain of TCR clone 63615 (TRBV20-1, TRBJ2-1)
CSASSSGLAGSYNEQFF

SEQ ID NO: 127231 - protein, 11 aa, Homo sapiens
  CDR3 for alpha chain variable domain of TCR clone 63616 (TRAV17, TRAJ21)
CATGNFNKFYF

SEQ ID NO: 127232 - protein, 16 aa, Homo sapiens
  CDR3 for beta chain variable domain of TCR clone 63616 (TRBV4-2, TRBJ2-5)
CASSQELVGSQETQYF

SEQ ID NO: 127233 - protein, 17 aa, Homo sapiens
  CDR3 for alpha chain variable domain of TCR clone 63617 (TRAV3, TRAJ42)
CAVRDRDYGGSQGNLIF

SEQ ID NO: 127234 - protein, 13 aa, Homo sapiens
  CDR3 for beta chain variable domain of TCR clone 63617 (TRBV5-8, TRBJ1-1)
CASSLGGGTEAFF

SEQ ID NO: 127235 - protein, 14 aa, Homo sapiens
  CDR3 for alpha chain variable domain of TCR clone 63618 (TRAV13-1, TRAJ35)
CAASKGGFGSVLHC

SEQ ID NO: 127236 - protein, 13 aa, Homo sapiens
  CDR3 for beta chain variable domain of TCR clone 63618 (TRBV7-3, TRBJ1-1)
CASSQDWRAEAFF

SEQ ID NO: 127237 - protein, 11 aa, Homo sapiens
  CDR3 for alpha chain variable domain of TCR clone 63619 (TRAV12-3, TRAJ49)
CAANTGNQVYF

SEQ ID NO: 127238 - protein, 15 aa, Homo sapiens
  CDR3 for beta chain variable domain of TCR clone 63619 (TRBV11-2, TRBJ2-1)
CASSLGTSGLNEQFF

SEQ ID NO: 127239 - protein, 13 aa, Homo sapiens
  CDR3 for alpha chain variable domain of TCR clone 63620 (TRAV29/DV5, TRAJ31)
CAASRNNNARLMF

SEQ ID NO: 127240 - protein, 15 aa, Homo sapiens
  CDR3 for beta chain variable domain of TCR clone 63620 (TRBV5-1, TRBJ2-3)
CASSVTSGSTDTQYF

SEQ ID NO: 127241 - protein, 15 aa, Homo sapiens
  CDR3 for alpha chain variable domain of TCR clone 63621 (TRAV8-3, TRAJ23)
CAVGDKYNQGGKLIF

SEQ ID NO: 127242 - protein, 22 aa, Homo sapiens
  CDR3 for beta chain variable domain of TCR clone 63621 (TRBV29-1, TRBJ2-5)
TVSNMSPEDSSIYLCSAGTQYF

SEQ ID NO: 127243 - protein, 12 aa, Homo sapiens
  CDR3 for alpha chain variable domain of TCR clone 63622 (TRAV36/DV7, TRAJ54)
CAVVRGAQKLVF

SEQ ID NO: 127244 - protein, 15 aa, Homo sapiens
  CDR3 for beta chain variable domain of TCR clone 63622 (TRBV20-1, TRBJ1-1)
CSASRGVTGNTEAFL

SEQ ID NO: 127245 - protein, 11 aa, Homo sapiens
  CDR3 for alpha chain variable domain of TCR clone 63623 (TRAV21, TRAJ34)
CAVDNTDKLIF

SEQ ID NO: 127246 - protein, 14 aa, Homo sapiens
  CDR3 for beta chain variable domain of TCR clone 63623 (TRBV11-2, TRBJ1-2)
CASSLGTANYGYTF

SEQ ID NO: 127247 - protein, 13 aa, Homo sapiens
  CDR3 for alpha chain variable domain of TCR clone 63624 (TRAV8-1, TRAJ15)
CAVKNQAGTALIF

SEQ ID NO: 127248 - protein, 12 aa, Homo sapiens
  CDR3 for beta chain variable domain of TCR clone 63624 (TRBV7-6, TRBJ2-7)
CASSLADSEQYF

SEQ ID NO: 127249 - protein, 17 aa, Homo sapiens
  CDR3 for alpha chain variable domain of TCR clone 63625 (TRAV4, TRAJ13)
CLVGVQGSSEGYQKVTF

SEQ ID NO: 127250 - protein, 18 aa, Homo sapiens
  CDR3 for beta chain variable domain of TCR clone 63625 (TRBV15, TRBJ2-3)
CATSRDGARSWDTDTQYF

SEQ ID NO: 127251 - protein, 14 aa, Homo sapiens
  CDR3 for alpha chain variable domain of TCR clone 63626 (TRAV8-1, TRAJ5)
CAVRTDTGRRALTF

SEQ ID NO: 127252 - protein, 15 aa, Homo sapiens
  CDR3 for beta chain variable domain of TCR clone 63626 (TRBV20-1, TRBJ2-2)
CSAIPGHSNTGELFF

SEQ ID NO: 127253 - protein, 14 aa, Homo sapiens
  CDR3 for alpha chain variable domain of TCR clone 63627 (TRAV1-2, TRAJ16)
CAVNRFSDGQKLLF

SEQ ID NO: 127254 - protein, 15 aa, Homo sapiens
  CDR3 for beta chain variable domain of TCR clone 63627 (TRBV6-3, TRBJ2-7)
CASSSPGTVFYEQYL

SEQ ID NO: 127255 - protein, 14 aa, Homo sapiens
  CDR3 for alpha chain variable domain of TCR clone 63628 (TRAV26-1, TRAJ22)
CIVRVYGSARQLTF

SEQ ID NO: 127256 - protein, 17 aa, Homo sapiens
  CDR3 for beta chain variable domain of TCR clone 63628 (TRBV7-3, TRBJ2-3)
CASSTGGLAGFGDTQYF

SEQ ID NO: 127257 - protein, 12 aa, Homo sapiens
  CDR3 for alpha chain variable domain of TCR clone 63629 (TRAV3, TRAJ43)
CAVRDPNNDMRF

SEQ ID NO: 127258 - protein, 15 aa, Homo sapiens
  CDR3 for beta chain variable domain of TCR clone 63629 (TRBV6-5, TRBJ2-1)
CASSYDAGAGNERFF

SEQ ID NO: 127259 - protein, 12 aa, Homo sapiens
  CDR3 for alpha chain variable domain of TCR clone 63630 (TRAV21, TRAJ3)
CCFYSSASKMIF

SEQ ID NO: 127260 - protein, 16 aa, Homo sapiens
  CDR3 for beta chain variable domain of TCR clone 63630 (TRBV19, TRBJ2-1)
CASSKAGPSSYNEQFF

SEQ ID NO: 127261 - protein, 14 aa, Homo sapiens
  CDR3 for alpha chain variable domain of TCR clone 63631 (TRAV12-1, TRAJ17)
CVVNYKAAGNKLTF

SEQ ID NO: 127262 - protein, 17 aa, Homo sapiens
  CDR3 for beta chain variable domain of TCR clone 63631 (TRBV20-1, TRBJ2-1)
CSASCSGLAGSYNEQFF

SEQ ID NO: 127263 - protein, 15 aa, Homo sapiens
  CDR3 for alpha chain variable domain of TCR clone 63632 (TRAV12-2, )
CAVASLATTKSRTLT

SEQ ID NO: 127264 - protein, 16 aa, Homo sapiens
  CDR3 for beta chain variable domain of TCR clone 63632 (TRBV5-1, TRBJ2-2)
CASSSRTGGRTGELFF

SEQ ID NO: 127265 - protein, 14 aa, Homo sapiens
  CDR3 for alpha chain variable domain of TCR clone 63633 (TRAV12-2, TRAJ13)
CAVKKTGGYQKVTF

SEQ ID NO: 127266 - protein, 14 aa, Homo sapiens
  CDR3 for beta chain variable domain of TCR clone 63633 (TRBV27, TRBJ2-5)
CASSSLKGWETQYF

SEQ ID NO: 127267 - protein, 16 aa, Homo sapiens
  CDR3 for alpha chain variable domain of TCR clone 63634 (TRAV30, TRAJ24)
CGTEIVDADSWGKFPF

SEQ ID NO: 127268 - protein, 14 aa, Homo sapiens
  CDR3 for beta chain variable domain of TCR clone 63634 (TRBV12-5, TRBJ2-5)
CASGARTHQETQYF

SEQ ID NO: 127269 - protein, 12 aa, Homo sapiens
  CDR3 for alpha chain variable domain of TCR clone 63635 (TRAV38-2/DV8, TRAJ48)
CALLSGNEKLTF

SEQ ID NO: 127270 - protein, 13 aa, Homo sapiens
  CDR3 for beta chain variable domain of TCR clone 63635 (TRBV7-9, TRBJ1-2)
CASSLKQNYGYTF

SEQ ID NO: 127271 - protein, 15 aa, Homo sapiens
  CDR3 for alpha chain variable domain of TCR clone 63636 (TRAV26-1, TRAJ58)
CIVKIQETSGSRLTF

SEQ ID NO: 127272 - protein, 13 aa, Homo sapiens
  CDR3 for beta chain variable domain of TCR clone 63636 (TRBV6-5, TRBJ2-1)
CASIGETSKREFF

SEQ ID NO: 127273 - protein, 15 aa, Homo sapiens
  CDR3 for alpha chain variable domain of TCR clone 63637 (TRAV21, TRAJ52)
CAVRGGGTSYGKLTF

SEQ ID NO: 127274 - protein, 13 aa, Homo sapiens
  CDR3 for beta chain variable domain of TCR clone 63637 (TRBV15, TRBJ1-6)
CATSGGLNSPLHF

SEQ ID NO: 127275 - protein, 12 aa, Homo sapiens
  CDR3 for alpha chain variable domain of TCR clone 63638 (TRAV21, TRAJ37)
CAGRGNTGKLIF

SEQ ID NO: 127276 - protein, 14 aa, Homo sapiens
  CDR3 for beta chain variable domain of TCR clone 63638 (TRBV19, TRBJ2-1)
CASEVTGARNEQFF

SEQ ID NO: 127277 - protein, 13 aa, Homo sapiens
  CDR3 for alpha chain variable domain of TCR clone 63639 (TRAV35, TRAJ36)
CAGPRIGANNLFF

SEQ ID NO: 127278 - protein, 14 aa, Homo sapiens
  CDR3 for beta chain variable domain of TCR clone 63639 (TRBV20-1, TRBJ1-1)
CSAQTRIGGTEAFF

SEQ ID NO: 127279 - protein, 17 aa, Homo sapiens
  CDR3 for alpha chain variable domain of TCR clone 63640 (TRAV3, TRAJ42)
CAVRNRDYGGSQGNLIF

SEQ ID NO: 127280 - protein, 14 aa, Homo sapiens
  CDR3 for beta chain variable domain of TCR clone 63640 (TRBV25-1, TRBJ1-1)
CASTHLGGNTEAFF

SEQ ID NO: 127281 - protein, 12 aa, Homo sapiens
  CDR3 for alpha chain variable domain of TCR clone 63641 (TRAV12-3, TRAJ17)
CAMTLTGNKLTF

SEQ ID NO: 127282 - protein, 16 aa, Homo sapiens
  CDR3 for beta chain variable domain of TCR clone 63641 (TRBV7-3, TRBJ2-1)
CASSKPLAGGYNEQFF

SEQ ID NO: 127283 - protein, 15 aa, Homo sapiens
  CDR3 for alpha chain variable domain of TCR clone 63642 (TRAV17, TRAJ54)
CATEKLGQGAQKLVF

SEQ ID NO: 127284 - protein, 14 aa, Homo sapiens
  CDR3 for beta chain variable domain of TCR clone 63642 (TRBV7-3, TRBJ1-1)
CQRLRGQMNTEAFF

SEQ ID NO: 127285 - protein, 14 aa, Homo sapiens
  CDR3 for alpha chain variable domain of TCR clone 63643 (TRAV3, TRAJ21)
CALGRGSTNFTLYL

SEQ ID NO: 127286 - protein, 14 aa, Homo sapiens
  CDR3 for beta chain variable domain of TCR clone 63643 (TRBV7-9, TRBJ2-4)
CASSLAMGGNIQYF

SEQ ID NO: 127287 - protein, 13 aa, Homo sapiens
  CDR3 for alpha chain variable domain of TCR clone 63644 (TRAV13-1, TRAJ10)
CAATAGGGNKLTF

SEQ ID NO: 127288 - protein, 14 aa, Homo sapiens
  CDR3 for beta chain variable domain of TCR clone 63644 (TRBV12-4, TRBJ2-7)
CASSPAGPKYEQYF

SEQ ID NO: 127289 - protein, 14 aa, Homo sapiens
  CDR3 for alpha chain variable domain of TCR clone 63645 (TRAV2, TRAJ9)
CAVEDRSGGFKTIF

SEQ ID NO: 127290 - protein, 11 aa, Homo sapiens
  CDR3 for beta chain variable domain of TCR clone 63645 (TRBV7-8, TRBJ2-7)
CASSLSLEQYF

SEQ ID NO: 127291 - protein, 15 aa, Homo sapiens
  CDR3 for alpha chain variable domain of TCR clone 63646 (TRAV17, TRAJ3)
CATDGPHSSASKIVF

SEQ ID NO: 127292 - protein, 14 aa, Homo sapiens
  CDR3 for beta chain variable domain of TCR clone 63646 (TRBV4-3, TRBJ1-4)
CASSQQPVGEKLFF

SEQ ID NO: 127293 - protein, 15 aa, Homo sapiens
  CDR3 for alpha chain variable domain of TCR clone 63647 (TRAV2, TRAJ38)
CAVEDRIGNNRKLIW

SEQ ID NO: 127294 - protein, 16 aa, Homo sapiens
  CDR3 for beta chain variable domain of TCR clone 63647 (TRBV7-8, TRBJ2-1)
CASSLAGTGRYNEQFF

SEQ ID NO: 127295 - protein, 14 aa, Homo sapiens
  CDR3 for alpha chain variable domain of TCR clone 63648 (TRAV12-2, TRAJ13)
CAVKKTGGYQKVTS

SEQ ID NO: 127296 - protein, 16 aa, Homo sapiens
  CDR3 for beta chain variable domain of TCR clone 63648 (TRBV10-3, TRBJ2-1)
CAISGVGDGGGGEQFF

SEQ ID NO: 127297 - protein, 13 aa, Homo sapiens
  CDR3 for alpha chain variable domain of TCR clone 63649 (TRAV21, TRAJ57)
CAVTQGGSEKLVF

SEQ ID NO: 127298 - protein, 16 aa, Homo sapiens
  CDR3 for beta chain variable domain of TCR clone 63649 (TRBV12-4, TRBJ2-2)
CASSSQVGGPGGELFF

SEQ ID NO: 127299 - protein, 13 aa, Homo sapiens
  CDR3 for alpha chain variable domain of TCR clone 63650 (TRAV20, TRAJ21)
CAVEVYNFNKFYF

SEQ ID NO: 127300 - protein, 14 aa, Homo sapiens
  CDR3 for beta chain variable domain of TCR clone 63650 (TRBV3-1, TRBJ2-5)
CASSQGPDQETQYF

SEQ ID NO: 127301 - protein, 12 aa, Homo sapiens
  CDR3 for alpha chain variable domain of TCR clone 63651 (TRAV21, TRAJ13)
PGPSGCYQKVTF

SEQ ID NO: 127302 - protein, 15 aa, Homo sapiens
  CDR3 for beta chain variable domain of TCR clone 63651 (TRBV7-9, TRBJ1-6)
CASSSPGRGNSPLHF

SEQ ID NO: 127303 - protein, 15 aa, Homo sapiens
  CDR3 for alpha chain variable domain of TCR clone 63652 (TRAV12-1, TRAJ44)
CVADLPTGTASKLTF

SEQ ID NO: 127304 - protein, 13 aa, Homo sapiens
  CDR3 for beta chain variable domain of TCR clone 63652 (TRBV6-5, TRBJ2-5)
CASSPQGGDTQYF

SEQ ID NO: 127305 - protein, 13 aa, Homo sapiens
  CDR3 for alpha chain variable domain of TCR clone 63653 (TRAV26-1, TRAJ31)
CIARVDGNARLMF

SEQ ID NO: 127306 - protein, 17 aa, Homo sapiens
  CDR3 for beta chain variable domain of TCR clone 63653 (TRBV11-2, TRBJ2-1)
CASSLYPPGVEYNEQFF

SEQ ID NO: 127307 - protein, 15 aa, Homo sapiens
  CDR3 for alpha chain variable domain of TCR clone 63654 (TRAV12-3, TRAJ49)
CAMAVTPNTGNLFYF

SEQ ID NO: 127308 - protein, 18 aa, Homo sapiens
  CDR3 for beta chain variable domain of TCR clone 63654 (TRBV4-1, TRBJ1-5)
CASSQDPRGQGLNQPQHF

SEQ ID NO: 127309 - protein, 15 aa, Homo sapiens
  CDR3 for alpha chain variable domain of TCR clone 63655 (TRAV8-3, TRAJ45)
CASSYSGGGAAGLTF

SEQ ID NO: 127310 - protein, 15 aa, Homo sapiens
  CDR3 for beta chain variable domain of TCR clone 63655 (TRBV18, TRBJ1-1)
CASSPRQGENTEAFF

SEQ ID NO: 127311 - protein, 12 aa, Homo sapiens
  CDR3 for alpha chain variable domain of TCR clone 63656 (TRAV12-3, TRAJ20)
CAMVRGDYKLSF

SEQ ID NO: 127312 - protein, 14 aa, Homo sapiens
  CDR3 for beta chain variable domain of TCR clone 63656 (TRBV5-5, TRBJ1-5)
CASNGQGVDQPQHF

SEQ ID NO: 127313 - protein, 14 aa, Homo sapiens
  CDR3 for alpha chain variable domain of TCR clone 63657 (TRAV8-3, TRAJ6)
RAVGASGGSYIPTF

SEQ ID NO: 127314 - protein, 17 aa, Homo sapiens
  CDR3 for beta chain variable domain of TCR clone 63657 (TRBV18, TRBJ2-2)
CASSPSDPWQNTGELFF

SEQ ID NO: 127315 - protein, 17 aa, Homo sapiens
  CDR3 for alpha chain variable domain of TCR clone 63658 (TRAV1-2, TRAJ8)
CAVRDPDENTGFQKLVF

SEQ ID NO: 127316 - protein, 13 aa, Homo sapiens
  CDR3 for beta chain variable domain of TCR clone 63658 (TRBV7-7, TRBJ1-1)
CASSLGANTEAFF

SEQ ID NO: 127317 - protein, 14 aa, Homo sapiens
  CDR3 for alpha chain variable domain of TCR clone 63659 (TRAV23/DV6, TRAJ4)
CSANLSGGYNKLIF

SEQ ID NO: 127318 - protein, 11 aa, Homo sapiens
  CDR3 for beta chain variable domain of TCR clone 63659 (TRBV7-9, TRBJ2-3)
CASSPTDTQYF

SEQ ID NO: 127319 - protein, 10 aa, Homo sapiens
  CDR3 for alpha chain variable domain of TCR clone 63660 (TRAV21, TRAJ31)
CAVDNARLMF

SEQ ID NO: 127320 - protein, 13 aa, Homo sapiens
  CDR3 for beta chain variable domain of TCR clone 63660 (TRBV4-1, TRBJ1-1)
CASSRKMYTEAFF

SEQ ID NO: 127321 - protein, 18 aa, Homo sapiens
  CDR3 for alpha chain variable domain of TCR clone 63661 (TRAV13-1, TRAJ52)
CAAKNPNAGGTSYGKLTF

SEQ ID NO: 127322 - protein, 20 aa, Homo sapiens
  CDR3 for beta chain variable domain of TCR clone 63661 (TRBV28, TRBJ2-1)
CASTPIGRSPGLAGGNEQFF

SEQ ID NO: 127323 - protein, 12 aa, Homo sapiens
  CDR3 for alpha chain variable domain of TCR clone 63662 (TRAV26-2, TRAJ21)
CILKGNFNKFYF

SEQ ID NO: 127324 - protein, 14 aa, Homo sapiens
  CDR3 for beta chain variable domain of TCR clone 63662 (TRBV7-9, TRBJ1-1)
CASTLLQSYTEAFF

SEQ ID NO: 127325 - protein, 11 aa, Homo sapiens
  CDR3 for alpha chain variable domain of TCR clone 63663 (TRAV13-1, TRAJ6)
CATLGSHIPTF

SEQ ID NO: 127326 - protein, 13 aa, Homo sapiens
  CDR3 for beta chain variable domain of TCR clone 63663 (TRBV6-6, TRBJ2-1)
CASSLHQGDEQFF

SEQ ID NO: 127327 - protein, 14 aa, Homo sapiens
  CDR3 for alpha chain variable domain of TCR clone 63664 (TRAV27, TRAJ23)
CAGLSYNQGGKLIF

SEQ ID NO: 127328 - protein, 14 aa, Homo sapiens
  CDR3 for beta chain variable domain of TCR clone 63664 (TRBV14, TRBJ2-1)
CASSRPGAGGEQFF

SEQ ID NO: 127329 - protein, 14 aa, Homo sapiens
  CDR3 for alpha chain variable domain of TCR clone 63665 (TRAV1-2, TRAJ8)
CAVREDIGFQKLVF

SEQ ID NO: 127330 - protein, 15 aa, Homo sapiens
  CDR3 for beta chain variable domain of TCR clone 63665 (TRBV12-4, TRBJ2-5)
CASSPPTGLQETQYF

SEQ ID NO: 127331 - protein, 12 aa, Homo sapiens
  CDR3 for alpha chain variable domain of TCR clone 63666 (TRAV27, TRAJ34)
CAEPYNTDKLIF

SEQ ID NO: 127332 - protein, 14 aa, Homo sapiens
  CDR3 for beta chain variable domain of TCR clone 63666 (TRBV2, TRBJ1-5)
CASSENRGGQPQHF

SEQ ID NO: 127333 - protein, 12 aa, Homo sapiens
  CDR3 for alpha chain variable domain of TCR clone 63667 (TRAV17, TRAJ29)
CATPHQETHLLS

SEQ ID NO: 127334 - protein, 17 aa, Homo sapiens
  CDR3 for beta chain variable domain of TCR clone 63667 (TRBV20-1, TRBJ2-2)
CSASGSGQGGLTGELFF

SEQ ID NO: 127335 - protein, 12 aa, Homo sapiens
  CDR3 for alpha chain variable domain of TCR clone 63668 (TRAV12-3, TRAJ40)
CAMSSGTYKYIF

SEQ ID NO: 127336 - protein, 15 aa, Homo sapiens
  CDR3 for beta chain variable domain of TCR clone 63668 (TRBV7-3, TRBJ2-2)
CASSEMGQGTGELFF

SEQ ID NO: 127337 - protein, 16 aa, Homo sapiens
  CDR3 for alpha chain variable domain of TCR clone 63669 (TRAV8-6, TRAJ28)
CAVTSKPGAGSYQLTF

SEQ ID NO: 127338 - protein, 15 aa, Homo sapiens
  CDR3 for beta chain variable domain of TCR clone 63669 (TRBV7-9, TRBJ2-1)
CASSLGLAGGTEQFF

SEQ ID NO: 127339 - protein, 13 aa, Homo sapiens
  CDR3 for alpha chain variable domain of TCR clone 63670 (TRAV13-1, TRAJ57)
PPLSQGGSEKLVF

SEQ ID NO: 127340 - protein, 17 aa, Homo sapiens
  CDR3 for beta chain variable domain of TCR clone 63670 (TRBV7-3, TRBJ2-3)
CASSLMKRMRGADTQYF

SEQ ID NO: 127341 - protein, 14 aa, Homo sapiens
  CDR3 for alpha chain variable domain of TCR clone 63671 (TRAV13-1, TRAJ9)
CAASALTGGFKTIF

SEQ ID NO: 127342 - protein, 16 aa, Homo sapiens
  CDR3 for beta chain variable domain of TCR clone 63671 (TRBV7-8, TRBJ2-4)
CASSAERTLAKNNQYF

SEQ ID NO: 127343 - protein, 13 aa, Homo sapiens
  CDR3 for alpha chain variable domain of TCR clone 63672 (TRAV39, TRAJ58)
CAGEETSGSRLTF

SEQ ID NO: 127344 - protein, 15 aa, Homo sapiens
  CDR3 for beta chain variable domain of TCR clone 63672 (TRBV4-1, TRBJ2-7)
CASSQNTGRLYEQYL

SEQ ID NO: 127345 - protein, 13 aa, Homo sapiens
  CDR3 for alpha chain variable domain of TCR clone 63673 (TRAV13-1, TRAJ12)
CAASPDSSYKLIF

SEQ ID NO: 127346 - protein, 16 aa, Homo sapiens
  CDR3 for beta chain variable domain of TCR clone 63673 (TRBV15, TRBJ2-1)
CATSRDRLAGAYEQFF

SEQ ID NO: 127347 - protein, 15 aa, Homo sapiens
  CDR3 for alpha chain variable domain of TCR clone 63674 (TRAV2, TRAJ9)
CAVEDRGTGGFKTIF

SEQ ID NO: 127348 - protein, 16 aa, Homo sapiens
  CDR3 for beta chain variable domain of TCR clone 63674 (TRBV24-1, TRBJ2-3)
CATSDPGTGATETQYF

SEQ ID NO: 127349 - protein, 13 aa, Homo sapiens
  CDR3 for alpha chain variable domain of TCR clone 63675 (TRAV8-4, TRAJ48)
CAVSLFGNGKLTF

SEQ ID NO: 127350 - protein, 15 aa, Homo sapiens
  CDR3 for beta chain variable domain of TCR clone 63675 (TRBV20-1, TRBJ2-7)
CSARKGLAESYEQYF

SEQ ID NO: 127351 - protein, 16 aa, Homo sapiens
  CDR3 for alpha chain variable domain of TCR clone 63676 (TRAV23/DV6, TRAJ9)
CAASIGGNTGGFKTIF

SEQ ID NO: 127352 - protein, 16 aa, Homo sapiens
  CDR3 for beta chain variable domain of TCR clone 63676 (TRBV4-2, TRBJ2-7)
CASSQDGGSLRGEQYF

SEQ ID NO: 127353 - protein, 13 aa, Homo sapiens
  CDR3 for alpha chain variable domain of TCR clone 63677 (TRAV20, TRAJ45)
CAVKKRRCRRTHL

SEQ ID NO: 127354 - protein, 20 aa, Homo sapiens
  CDR3 for beta chain variable domain of TCR clone 63677 (TRBV7-8, TRBJ2-2)
CASSHLFPGPTIHITGELFF

SEQ ID NO: 127355 - protein, 14 aa, Homo sapiens
  CDR3 for alpha chain variable domain of TCR clone 63678 (TRAV12-2, TRAJ13)
CAVKKTGGYQKVTF

SEQ ID NO: 127356 - protein, 14 aa, Homo sapiens
  CDR3 for beta chain variable domain of TCR clone 63678 (TRBV6-3, TRBJ2-7)
CASSYSVRVYEQYF

SEQ ID NO: 127357 - protein, 13 aa, Homo sapiens
  CDR3 for alpha chain variable domain of TCR clone 63679 (TRAV13-1, TRAJ12)
CAASPDSSYKLIF

SEQ ID NO: 127358 - protein, 16 aa, Homo sapiens
  CDR3 for beta chain variable domain of TCR clone 63679 (TRBV7-3, TRBJ2-2)
CASSLKRGTLSGELFF

SEQ ID NO: 127359 - protein, 13 aa, Homo sapiens
  CDR3 for alpha chain variable domain of TCR clone 63680 (TRAV35, TRAJ49)
CAGRLNTGNQFYF

SEQ ID NO: 127360 - protein, 15 aa, Homo sapiens
  CDR3 for beta chain variable domain of TCR clone 63680 (TRBV7-9, TRBJ2-7)
CASSLALAEAYEQYF

SEQ ID NO: 127361 - protein, 11 aa, Homo sapiens
  CDR3 for alpha chain variable domain of TCR clone 63681 (TRAV3, TRAJ32)
CAVREGIMVVL

SEQ ID NO: 127362 - protein, 13 aa, Homo sapiens
  CDR3 for beta chain variable domain of TCR clone 63681 (TRBV2, TRBJ1-1)
RASSEGGNTEAFF

SEQ ID NO: 127363 - protein, 14 aa, Homo sapiens
  CDR3 for alpha chain variable domain of TCR clone 63682 (TRAV8-3, TRAJ4)
CAVGAAGGYNKLIF

SEQ ID NO: 127364 - protein, 16 aa, Homo sapiens
  CDR3 for beta chain variable domain of TCR clone 63682 (TRBV19, TRBJ2-2)
CASRSPGIGATGELFF

SEQ ID NO: 127365 - protein, 17 aa, Homo sapiens
  CDR3 for alpha chain variable domain of TCR clone 63683 (TRAV8-6, TRAJ58)
CAVSSWVGETSGSRLTF

SEQ ID NO: 127366 - protein, 14 aa, Homo sapiens
  CDR3 for beta chain variable domain of TCR clone 63683 (TRBV4-2, TRBJ2-1)
CASGLDRAYNEQFF

SEQ ID NO: 127367 - protein, 14 aa, Homo sapiens
  CDR3 for alpha chain variable domain of TCR clone 63684 (TRAV21, TRAJ35)
CAVMPIGFGNVLHC

SEQ ID NO: 127368 - protein, 12 aa, Homo sapiens
  CDR3 for beta chain variable domain of TCR clone 63684 (TRBV7-9, TRBJ2-7)
CVSSIKREEQYF

SEQ ID NO: 127369 - protein, 13 aa, Homo sapiens
  CDR3 for alpha chain variable domain of TCR clone 63685 (TRAV8-6, TRAJ50)
CAVIKTSYDNVIF

SEQ ID NO: 127370 - protein, 15 aa, Homo sapiens
  CDR3 for beta chain variable domain of TCR clone 63685 (TRBV7-2, TRBJ2-2)
CASRRPGQNTGELFF

SEQ ID NO: 127371 - protein, 10 aa, Homo sapiens
  CDR3 for alpha chain variable domain of TCR clone 63686 (TRAV1-2, TRAJ23)
CAGQGGKLIF

SEQ ID NO: 127372 - protein, 12 aa, Homo sapiens
  CDR3 for beta chain variable domain of TCR clone 63686 (TRBV11-2, TRBJ2-2)
CASSLGGGELFF

SEQ ID NO: 127373 - protein, 13 aa, Homo sapiens
  CDR3 for alpha chain variable domain of TCR clone 63687 (TRAV22, TRAJ29)
CAVGGSGNTPLVF

SEQ ID NO: 127374 - protein, 14 aa, Homo sapiens
  CDR3 for beta chain variable domain of TCR clone 63687 (TRBV7-6, TRBJ2-3)
CASSVAGGTDTQYF

SEQ ID NO: 127375 - protein, 12 aa, Homo sapiens
  CDR3 for alpha chain variable domain of TCR clone 63688 (TRAV1-1, TRAJ39)
CAVPVIGNMLTF

SEQ ID NO: 127376 - protein, 15 aa, Homo sapiens
  CDR3 for beta chain variable domain of TCR clone 63688 (TRBV19, TRBJ1-6)
CASSTQGAVGSPLHF

SEQ ID NO: 127377 - protein, 16 aa, Homo sapiens
  CDR3 for alpha chain variable domain of TCR clone 63689 (TRAV30, TRAJ24)
CGTEIVDADSWGKFKF

SEQ ID NO: 127378 - protein, 14 aa, Homo sapiens
  CDR3 for beta chain variable domain of TCR clone 63689 (TRBV12-5, TRBJ2-5)
CASGSRTHQEAQYF

SEQ ID NO: 127379 - protein, 12 aa, Homo sapiens
  CDR3 for alpha chain variable domain of TCR clone 63690 (TRAV25, TRAJ11)
CAGASGYSTLTF

SEQ ID NO: 127380 - protein, 14 aa, Homo sapiens
  CDR3 for beta chain variable domain of TCR clone 63690 (TRBV5-8, TRBJ2-3)
CASSLGQGADTQYF

SEQ ID NO: 127381 - protein, 14 aa, Homo sapiens
  CDR3 for alpha chain variable domain of TCR clone 63691 (TRAV16, TRAJ42)
CALLAGGSQGNLIF

SEQ ID NO: 127382 - protein, 11 aa, Homo sapiens
  CDR3 for beta chain variable domain of TCR clone 63691 (TRBV10-3, TRBJ2-7)
CAISEGLEQYF

SEQ ID NO: 127383 - protein, 14 aa, Homo sapiens
  CDR3 for alpha chain variable domain of TCR clone 63692 (TRAV12-2, TRAJ40)
CAVKIPSGTYKYIF

SEQ ID NO: 127384 - protein, 13 aa, Homo sapiens
  CDR3 for beta chain variable domain of TCR clone 63692 (TRBV6-5, TRBJ1-1)
CASGPRENTEAFF

SEQ ID NO: 127385 - protein, 12 aa, Homo sapiens
  CDR3 for alpha chain variable domain of TCR clone 63693 (TRAV30, TRAJ43)
CGAEERGNDMRF

SEQ ID NO: 127386 - protein, 13 aa, Homo sapiens
  CDR3 for beta chain variable domain of TCR clone 63693 (TRBV27, TRBJ2-7)
CASSFSQGYEQYF

SEQ ID NO: 127387 - protein, 15 aa, Homo sapiens
  CDR3 for alpha chain variable domain of TCR clone 63694 (TRAV14/DV4, TRAJ20)
CAMRERGSNDYKLSF

SEQ ID NO: 127388 - protein, 13 aa, Homo sapiens
  CDR3 for beta chain variable domain of TCR clone 63694 (TRBV7-9, TRBJ1-2)
CASSLKQNYGYTF

SEQ ID NO: 127389 - protein, 14 aa, Homo sapiens
  CDR3 for alpha chain variable domain of TCR clone 63695 (TRAV1-2, TRAJ16)
CAVNRFSDGQKLLF

SEQ ID NO: 127390 - protein, 16 aa, Homo sapiens
  CDR3 for beta chain variable domain of TCR clone 63695 (TRBV7-3, TRBJ2-2)
CAGSLKRGTLSGELFF

SEQ ID NO: 127391 - protein, 14 aa, Homo sapiens
  CDR3 for alpha chain variable domain of TCR clone 63696 (TRAV23/DV6, TRAJ8)
CSASKATGFQKLVF

SEQ ID NO: 127392 - protein, 15 aa, Homo sapiens
  CDR3 for beta chain variable domain of TCR clone 63696 (TRBV28, TRBJ2-3)
CASSPDRQGANTQYF

SEQ ID NO: 127393 - protein, 12 aa, Homo sapiens
  CDR3 for alpha chain variable domain of TCR clone 63697 (TRAV23/DV6, TRAJ30)
CAASKGGDKIIF

SEQ ID NO: 127394 - protein, 18 aa, Homo sapiens
  CDR3 for beta chain variable domain of TCR clone 63697 (TRBV10-3, TRBJ2-3)
CAISESRVGPMRGDTQYF

SEQ ID NO: 127395 - protein, 16 aa, Homo sapiens
  CDR3 for alpha chain variable domain of TCR clone 63698 (TRAV12-3, TRAJ53)
CAMSVGSGGSNYKLTF

SEQ ID NO: 127396 - protein, 13 aa, Homo sapiens
  CDR3 for beta chain variable domain of TCR clone 63698 (TRBV7-6, TRBJ1-2)
CASSLVADYGYAF

SEQ ID NO: 127397 - protein, 12 aa, Homo sapiens
  CDR3 for alpha chain variable domain of TCR clone 63699 (TRAV16, TRAJ8)
CAPLGGFQRLVF

SEQ ID NO: 127398 - protein, 15 aa, Homo sapiens
  CDR3 for beta chain variable domain of TCR clone 63699 (TRBV6-1, TRBJ1-5)
CASIPDRLGNQPQHF

SEQ ID NO: 127399 - protein, 13 aa, Homo sapiens
  CDR3 for alpha chain variable domain of TCR clone 63700 (TRAV12-2, TRAJ52)
CAVSGTSYGKLTF

SEQ ID NO: 127400 - protein, 17 aa, Homo sapiens
  CDR3 for beta chain variable domain of TCR clone 63700 (TRBV11-2, TRBJ2-1)
CASSLYPLGVEYNEQFF

SEQ ID NO: 127401 - protein, 12 aa, Homo sapiens
  CDR3 for alpha chain variable domain of TCR clone 63701 (TRAV12-1, TRAJ34)
CVVTFNTDKLIF

SEQ ID NO: 127402 - protein, 14 aa, Homo sapiens
  CDR3 for beta chain variable domain of TCR clone 63701 (TRBV19, TRBJ1-1)
CASLRTGPNTEAFF

SEQ ID NO: 127403 - protein, 14 aa, Homo sapiens
  CDR3 for alpha chain variable domain of TCR clone 63702 (TRAV2, TRAJ37)
CAVGFTSNTGKLIF

SEQ ID NO: 127404 - protein, 13 aa, Homo sapiens
  CDR3 for beta chain variable domain of TCR clone 63702 (TRBV29-1, TRBJ2-2)
CSTTGVNTGELFF

SEQ ID NO: 127405 - protein, 16 aa, Homo sapiens
  CDR3 for alpha chain variable domain of TCR clone 63703 (TRAV23/DV6, TRAJ9)
CAASIGGNTGGFKTIF

SEQ ID NO: 127406 - protein, 14 aa, Homo sapiens
  CDR3 for beta chain variable domain of TCR clone 63703 (TRBV9, TRBJ2-7)
CASSIGVGSYEQYF

SEQ ID NO: 127407 - protein, 15 aa, Homo sapiens
  CDR3 for alpha chain variable domain of TCR clone 63704 (TRAV25, TRAJ52)
CAGRPGGSSYGKLTF

SEQ ID NO: 127408 - protein, 17 aa, Homo sapiens
  CDR3 for beta chain variable domain of TCR clone 63704 (TRBV7-8, TRBJ2-6)
CASSAGTGGAGANVLTF

SEQ ID NO: 127409 - protein, 15 aa, Homo sapiens
  CDR3 for alpha chain variable domain of TCR clone 63705 (TRAV13-2, TRAJ10)
CAENRDTGGGNKLTF

SEQ ID NO: 127410 - protein, 16 aa, Homo sapiens
  CDR3 for beta chain variable domain of TCR clone 63705 (TRBV2, TRBJ1-3)
CASSPTGGSTGNTIYF

SEQ ID NO: 127411 - protein, 13 aa, Homo sapiens
  CDR3 for alpha chain variable domain of TCR clone 63706 (TRAV29/DV5, TRAJ31)
CAASRNNNARLMF

SEQ ID NO: 127412 - protein, 13 aa, Homo sapiens
  CDR3 for beta chain variable domain of TCR clone 63706 (TRBV12-4, TRBJ2-7)
CASSPTETYEQYF

SEQ ID NO: 127413 - protein, 15 aa, Homo sapiens
  CDR3 for alpha chain variable domain of TCR clone 63707 (TRAV21, TRAJ53)
CATLNSGGSNYKLTF

SEQ ID NO: 127414 - protein, 16 aa, Homo sapiens
  CDR3 for beta chain variable domain of TCR clone 63707 (TRBV29-1, TRBJ1-2)
CSVEANRDIANYGYTF

SEQ ID NO: 127415 - protein, 14 aa, Homo sapiens
  CDR3 for alpha chain variable domain of TCR clone 63708 (TRAV13-1, TRAJ9)
CAASALTGGFKTIF

SEQ ID NO: 127416 - protein, 13 aa, Homo sapiens
  CDR3 for beta chain variable domain of TCR clone 63708 (TRBV20-1, TRBJ1-1)
CSAGTVVNTEAFF

SEQ ID NO: 127417 - protein, 14 aa, Homo sapiens
  CDR3 for alpha chain variable domain of TCR clone 63709 (TRAV2, TRAJ9)
CAVEDRSGGFKTIF

SEQ ID NO: 127418 - protein, 16 aa, Homo sapiens
  CDR3 for beta chain variable domain of TCR clone 63709 (TRBV4-3, TRBJ2-1)
CASSPALDRGVNEQFF

SEQ ID NO: 127419 - protein, 15 aa, Homo sapiens
  CDR3 for alpha chain variable domain of TCR clone 63710 (TRAV17, TRAJ16)
CATALRFSDGQKLLF

SEQ ID NO: 127420 - protein, 15 aa, Homo sapiens
  CDR3 for beta chain variable domain of TCR clone 63710 (TRBV2, TRBJ2-1)
CASSEEREGDNEQFF

SEQ ID NO: 127421 - protein, 12 aa, Homo sapiens
  CDR3 for alpha chain variable domain of TCR clone 63711 (TRAV3, TRAJ43)
CAVRDPNNDMRF

SEQ ID NO: 127422 - protein, 13 aa, Homo sapiens
  CDR3 for beta chain variable domain of TCR clone 63711 (TRBV19, TRBJ2-7)
CASSPRQSYEQYF

SEQ ID NO: 127423 - protein, 15 aa, Homo sapiens
  CDR3 for alpha chain variable domain of TCR clone 63712 (TRAV12-3, TRAJ13)
CAMSARSGGYQKVTF

SEQ ID NO: 127424 - protein, 18 aa, Homo sapiens
  CDR3 for beta chain variable domain of TCR clone 63712 (TRBV3-1, TRBJ2-7)
WASSQEGGGRSWHYEQYF

SEQ ID NO: 127425 - protein, 16 aa, Homo sapiens
  CDR3 for alpha chain variable domain of TCR clone 63713 (TRAV30, TRAJ24)
CGTEIVDADSWGKFQF

SEQ ID NO: 127426 - protein, 13 aa, Homo sapiens
  CDR3 for beta chain variable domain of TCR clone 63713 (TRBV18, TRBJ1-2)
CASSASTTEGYTF

SEQ ID NO: 127427 - protein, 19 aa, Homo sapiens
  CDR3 for alpha chain variable domain of TCR clone 63714 (TRAV2, TRAJ20)
ILQVREAGAAVYRDCKLSF

SEQ ID NO: 127428 - protein, 13 aa, Homo sapiens
  CDR3 for beta chain variable domain of TCR clone 63714 (TRBV15, TRBJ1-6)
CATSGGLNSPPHF

SEQ ID NO: 127429 - protein, 14 aa, Homo sapiens
  CDR3 for alpha chain variable domain of TCR clone 63715 (TRAV12-3, TRAJ10)
SHLPLTGGGNKLTF

SEQ ID NO: 127430 - protein, 12 aa, Homo sapiens
  CDR3 for beta chain variable domain of TCR clone 63715 (TRBV7-3, TRBJ2-5)
CASSAPGGTQYF

SEQ ID NO: 127431 - protein, 15 aa, Homo sapiens
  CDR3 for alpha chain variable domain of TCR clone 63716 (TRAV35, TRAJ50)
CAGQLRKTSCDKVIF

SEQ ID NO: 127432 - protein, 12 aa, Homo sapiens
  CDR3 for beta chain variable domain of TCR clone 63716 (TRBV5-1, TRBJ2-5)
CASSLGLETQYF

SEQ ID NO: 127433 - protein, 13 aa, Homo sapiens
  CDR3 for alpha chain variable domain of TCR clone 63717 (TRAV26-1, TRAJ29)
CIVRRSGNTPLVF

SEQ ID NO: 127434 - protein, 15 aa, Homo sapiens
  CDR3 for beta chain variable domain of TCR clone 63717 (TRBV9, TRBJ1-6)
CASSVAGTGDSPLHF

SEQ ID NO: 127435 - protein, 17 aa, Homo sapiens
  CDR3 for alpha chain variable domain of TCR clone 63718 (TRAV23/DV6, TRAJ57)
CAASSTLSQGGSEKLVF

SEQ ID NO: 127436 - protein, 14 aa, Homo sapiens
  CDR3 for beta chain variable domain of TCR clone 63718 (TRBV25-1, TRBJ1-1)
CASTHMGGNTEAFF

SEQ ID NO: 127437 - protein, 12 aa, Homo sapiens
  CDR3 for alpha chain variable domain of TCR clone 63719 (TRAV13-1, TRAJ27)
CAAHTNAGKSTF

SEQ ID NO: 127438 - protein, 17 aa, Homo sapiens
  CDR3 for beta chain variable domain of TCR clone 63719 (TRBV11-2, TRBJ2-1)
CASSLYPPGVEYNEQFF

SEQ ID NO: 127439 - protein, 15 aa, Homo sapiens
  CDR3 for alpha chain variable domain of TCR clone 63720 (TRAV3, TRAJ20)
CAVRDIKLSDYKLSF

SEQ ID NO: 127440 - protein, 16 aa, Homo sapiens
  CDR3 for beta chain variable domain of TCR clone 63720 (TRBV7-2, TRBJ1-2)
CASSSNQDRRGHGYTF

SEQ ID NO: 127441 - protein, 15 aa, Homo sapiens
  CDR3 for alpha chain variable domain of TCR clone 63721 (TRAV30, TRAJ13)
CGTQGVTGGYQKVTF

SEQ ID NO: 127442 - protein, 17 aa, Homo sapiens
  CDR3 for beta chain variable domain of TCR clone 63721 (TRBV20-1, TRBJ2-2)
CSARVKRAHVRSGELFF

SEQ ID NO: 127443 - protein, 22 aa, Homo sapiens
  CDR3 for alpha chain variable domain of TCR clone 63722 (TRAV12-3, TRAJ9)
CAMSPNTGGFKTILEQEQDYLL

SEQ ID NO: 127444 - protein, 12 aa, Homo sapiens
  CDR3 for beta chain variable domain of TCR clone 63722 (TRBV19, TRBJ1-5)
CASSIAQQPQHF

SEQ ID NO: 127445 - protein, 13 aa, Homo sapiens
  CDR3 for alpha chain variable domain of TCR clone 63723 (TRAV2, TRAJ40)
CAVVTSGTYKYIF

SEQ ID NO: 127446 - protein, 14 aa, Homo sapiens
  CDR3 for beta chain variable domain of TCR clone 63723 (TRBV7-2, TRBJ1-6)
CASSLQGANSPLHF

SEQ ID NO: 127447 - protein, 13 aa, Homo sapiens
  CDR3 for alpha chain variable domain of TCR clone 63724 (TRAV1-1, TRAJ9)
CAAKNTGGFKTIF

SEQ ID NO: 127448 - protein, 15 aa, Homo sapiens
  CDR3 for beta chain variable domain of TCR clone 63724 (TRBV7-3, TRBJ2-1)
CASSLGQGPFGEQFF

SEQ ID NO: 127449 - protein, 12 aa, Homo sapiens
  CDR3 for alpha chain variable domain of TCR clone 63725 (TRAV12-3, TRAJ4)
CAITGAGTRLAV

SEQ ID NO: 127450 - protein, 14 aa, Homo sapiens
  CDR3 for beta chain variable domain of TCR clone 63725 (TRBV10-3, TRBJ1-1)
CAISDTDRGVEAFF

SEQ ID NO: 127451 - protein, 12 aa, Homo sapiens
  CDR3 for alpha chain variable domain of TCR clone 63726 (TRAV1-2, TRAJ42)
CVAGGSQGNLIF

SEQ ID NO: 127452 - protein, 14 aa, Homo sapiens
  CDR3 for beta chain variable domain of TCR clone 63726 (TRBV25-1, TRBJ1-1)
CASTHLGGNTEAFF

SEQ ID NO: 127453 - protein, 14 aa, Homo sapiens
  CDR3 for alpha chain variable domain of TCR clone 63727 (TRAV36/DV7, TRAJ57)
CAVGFPGGTEKLVF

SEQ ID NO: 127454 - protein, 12 aa, Homo sapiens
  CDR3 for beta chain variable domain of TCR clone 63727 (TRBV19, TRBJ2-7)
CASTSGTYEQYF

SEQ ID NO: 127455 - protein, 16 aa, Homo sapiens
  CDR3 for alpha chain variable domain of TCR clone 63728 (TRAV14/DV4, TRAJ12)
CAMREVLMDSSYKLIF

SEQ ID NO: 127456 - protein, 14 aa, Homo sapiens
  CDR3 for beta chain variable domain of TCR clone 63728 (TRBV11-2, TRBJ2-1)
CASTTGQGNNEQFF

SEQ ID NO: 127457 - protein, 15 aa, Homo sapiens
  CDR3 for alpha chain variable domain of TCR clone 63729 (TRAV4, TRAJ39)
CLVGPNNCAGNMLTF

SEQ ID NO: 127458 - protein, 16 aa, Homo sapiens
  CDR3 for beta chain variable domain of TCR clone 63729 (TRBV13, TRBJ2-2)
CASSPRTGEHTGELFF

SEQ ID NO: 127459 - protein, 15 aa, Homo sapiens
  CDR3 for alpha chain variable domain of TCR clone 63730 (TRAV21, TRAJ45)
CAVSYSGGGADGHTF

SEQ ID NO: 127460 - protein, 13 aa, Homo sapiens
  CDR3 for beta chain variable domain of TCR clone 63730 (TRBV20-1, TRBJ2-5)
CSAATELQETQYF

SEQ ID NO: 127461 - protein, 15 aa, Homo sapiens
  CDR3 for alpha chain variable domain of TCR clone 63731 (TRAV27, TRAJ50)
CAGVGRGTAYDKVIF

SEQ ID NO: 127462 - protein, 14 aa, Homo sapiens
  CDR3 for beta chain variable domain of TCR clone 63731 (TRBV7-2, TRBJ1-1)
CASSFYDLNTEAFF

SEQ ID NO: 127463 - protein, 12 aa, Homo sapiens
  CDR3 for alpha chain variable domain of TCR clone 63732 (TRAV30, TRAJ43)
CGTEERGNDMRF

SEQ ID NO: 127464 - protein, 13 aa, Homo sapiens
  CDR3 for beta chain variable domain of TCR clone 63732 (TRBV7-9, TRBJ2-3)
CASSPWSTDTQYF

SEQ ID NO: 127465 - protein, 23 aa, Homo sapiens
  CDR3 for alpha chain variable domain of TCR clone 63733 (TRAV1-2, TRAJ30)
CAVRPTGTEMTRSSLEKGHDFIF

SEQ ID NO: 127466 - protein, 13 aa, Homo sapiens
  CDR3 for beta chain variable domain of TCR clone 63733 (TRBV4-1, TRBJ2-7)
CASSQGQAYEQYF

SEQ ID NO: 127467 - protein, 17 aa, Homo sapiens
  CDR3 for alpha chain variable domain of TCR clone 63734 (TRAV3, TRAJ42)
CAVRDRDYGGSQGNLIF

SEQ ID NO: 127468 - protein, 15 aa, Homo sapiens
  CDR3 for beta chain variable domain of TCR clone 63734 (TRBV6-6, TRBJ2-7)
CASSYSYGGSYEQFF

SEQ ID NO: 127469 - protein, 12 aa, Homo sapiens
  CDR3 for alpha chain variable domain of TCR clone 63735 (TRAV17, TRAJ39)
CDTGAAGNMLTF

SEQ ID NO: 127470 - protein, 14 aa, Homo sapiens
  CDR3 for beta chain variable domain of TCR clone 63735 (TRBV7-9, TRBJ1-2)
CASSRQGANYGYTF

SEQ ID NO: 127471 - protein, 15 aa, Homo sapiens
  CDR3 for alpha chain variable domain of TCR clone 63736 (TRAV3, TRAJ5)
CAVRDRKTGRRALTF

SEQ ID NO: 127472 - protein, 14 aa, Homo sapiens
  CDR3 for beta chain variable domain of TCR clone 63736 (TRBV12-5, TRBJ2-5)
CASGSRTHQETQYF

SEQ ID NO: 127473 - protein, 11 aa, Homo sapiens
  CDR3 for alpha chain variable domain of TCR clone 63737 (TRAV1-2, TRAJ21)
CALYNFNKFYF

SEQ ID NO: 127474 - protein, 15 aa, Homo sapiens
  CDR3 for beta chain variable domain of TCR clone 63737 (TRBV4-2, TRBJ2-7)
CASSQVDRSSYEQYF

SEQ ID NO: 127475 - protein, 12 aa, Homo sapiens
  CDR3 for alpha chain variable domain of TCR clone 63738 (TRAV21, TRAJ33)
CAKMDSNYQLIW

SEQ ID NO: 127476 - protein, 14 aa, Homo sapiens
  CDR3 for beta chain variable domain of TCR clone 63738 (TRBV2, TRBJ2-7)
CASSLTSGGYEQCS

SEQ ID NO: 127477 - protein, 14 aa, Homo sapiens
  CDR3 for alpha chain variable domain of TCR clone 63739 (TRAV12-3, TRAJ10)
SHLPLTGGGNKLTF

SEQ ID NO: 127478 - protein, 18 aa, Homo sapiens
  CDR3 for beta chain variable domain of TCR clone 63739 (TRBV5-1, TRBJ2-5)
CASSLLGETSGIGETQYF

SEQ ID NO: 127479 - protein, 17 aa, Homo sapiens
  CDR3 for alpha chain variable domain of TCR clone 63740 (TRAV8-6, TRAJ58)
CAVSSWVGETSGSRLTF

SEQ ID NO: 127480 - protein, 16 aa, Homo sapiens
  CDR3 for beta chain variable domain of TCR clone 63740 (TRBV11-2, TRBJ2-1)
CQQLIPPGVEYNEQFF

SEQ ID NO: 127481 - protein, 13 aa, Homo sapiens
  CDR3 for alpha chain variable domain of TCR clone 63741 (TRAV26-1, TRAJ29)
CIVRRSGNTPLVF

SEQ ID NO: 127482 - protein, 13 aa, Homo sapiens
  CDR3 for beta chain variable domain of TCR clone 63741 (TRBV15, TRBJ1-6)
CATSGGLNSPLHF

SEQ ID NO: 127483 - protein, 12 aa, Homo sapiens
  CDR3 for alpha chain variable domain of TCR clone 63742 (TRAV12-1, TRAJ6)
CVVSERSYIPTF

SEQ ID NO: 127484 - protein, 13 aa, Homo sapiens
  CDR3 for beta chain variable domain of TCR clone 63742 (TRBV14, TRBJ1-2)
CASCQQGYYGYTF

SEQ ID NO: 127485 - protein, 11 aa, Homo sapiens
  CDR3 for alpha chain variable domain of TCR clone 63743 (TRAV35, TRAJ30)
CAGERDDKIIF

SEQ ID NO: 127486 - protein, 15 aa, Homo sapiens
  CDR3 for beta chain variable domain of TCR clone 63743 (TRBV20-1, TRBJ2-7)
CSARDRVSGMDEQYF

SEQ ID NO: 127487 - protein, 15 aa, Homo sapiens
  CDR3 for alpha chain variable domain of TCR clone 63744 (TRAV13-2, TRAJ10)
CAENRDTGGGKKLTF

SEQ ID NO: 127488 - protein, 20 aa, Homo sapiens
  CDR3 for beta chain variable domain of TCR clone 63744 (TRBV28, TRBJ2-1)
CASTPIGRSPGLAGGNEQFF

SEQ ID NO: 127489 - protein, 17 aa, Homo sapiens
  CDR3 for alpha chain variable domain of TCR clone 63745 (TRAV3, TRAJ12)
CAVRDGGRMDSSYKLIF

SEQ ID NO: 127490 - protein, 13 aa, Homo sapiens
  CDR3 for beta chain variable domain of TCR clone 63745 (TRBV10-3, TRBJ2-7)
CASKLAVNYEQYF

SEQ ID NO: 127491 - protein, 12 aa, Homo sapiens
  CDR3 for alpha chain variable domain of TCR clone 63746 (TRAV12-3, TRAJ17)
CAMTLTGNKLTL

SEQ ID NO: 127492 - protein, 13 aa, Homo sapiens
  CDR3 for beta chain variable domain of TCR clone 63746 (TRBV7-9, TRBJ1-2)
CASSLKQNYGYTF

SEQ ID NO: 127493 - protein, 16 aa, Homo sapiens
  CDR3 for alpha chain variable domain of TCR clone 63747 (TRAV13-1, TRAJ48)
CSKYRESNFGNDKLTF

SEQ ID NO: 127494 - protein, 17 aa, Homo sapiens
  CDR3 for beta chain variable domain of TCR clone 63747 (TRBV28, TRBJ2-1)
CASSSARQALTYNEQFF

SEQ ID NO: 127495 - protein, 16 aa, Homo sapiens
  CDR3 for alpha chain variable domain of TCR clone 63748 (TRAV35, TRAJ28)
CAGQRYSGAGSYQLTS

SEQ ID NO: 127496 - protein, 14 aa, Homo sapiens
  CDR3 for beta chain variable domain of TCR clone 63748 (TRBV18, TRBJ2-7)
CASSPRGGAYEQYF

SEQ ID NO: 127497 - protein, 15 aa, Homo sapiens
  CDR3 for alpha chain variable domain of TCR clone 63749 (TRAV23/DV6, TRAJ18)
CAARYRGSTLGRLYF

SEQ ID NO: 127498 - protein, 15 aa, Homo sapiens
  CDR3 for beta chain variable domain of TCR clone 63749 (TRBV20-1, TRBJ2-5)
CSAEGTGGLQETQYF

SEQ ID NO: 127499 - protein, 13 aa, Homo sapiens
  CDR3 for alpha chain variable domain of TCR clone 63750 (TRAV22, TRAJ26)
CAVEHNYGQNFVF

SEQ ID NO: 127500 - protein, 16 aa, Homo sapiens
  CDR3 for beta chain variable domain of TCR clone 63750 (TRBV7-2, TRBJ2-6)
CASSERRASGANVLTS

SEQ ID NO: 127501 - protein, 16 aa, Homo sapiens
  CDR3 for alpha chain variable domain of TCR clone 63751 (TRAV30, TRAJ24)
CGTEIVDADSWGKFQF

SEQ ID NO: 127502 - protein, 15 aa, Homo sapiens
  CDR3 for beta chain variable domain of TCR clone 63751 (TRBV19, TRBJ2-1)
CASSIVRGEGREQFF

SEQ ID NO: 127503 - protein, 18 aa, Homo sapiens
  CDR3 for alpha chain variable domain of TCR clone 63752 (TRAV21, TRAJ52)
CAVRPSPSGGTSYGKLTF

SEQ ID NO: 127504 - protein, 13 aa, Homo sapiens
  CDR3 for beta chain variable domain of TCR clone 63752 (TRBV7-3, TRBJ1-1)
CASSQDWGAEAFF

SEQ ID NO: 127505 - protein, 14 aa, Homo sapiens
  CDR3 for alpha chain variable domain of TCR clone 63753 (TRAV4, TRAJ17)
CLVGDMAAGNKLTF

SEQ ID NO: 127506 - protein, 14 aa, Homo sapiens
  CDR3 for beta chain variable domain of TCR clone 63753 (TRBV7-6, TRBJ2-3)
CASSLGTVADTQYF

SEQ ID NO: 127507 - protein, 14 aa, Homo sapiens
  CDR3 for alpha chain variable domain of TCR clone 63754 (TRAV41, TRAJ57)
CAVLLQGGSEKLVF

SEQ ID NO: 127508 - protein, 12 aa, Homo sapiens
  CDR3 for beta chain variable domain of TCR clone 63754 (TRBV10-3, TRBJ1-1)
CATMDRPTEAFF

SEQ ID NO: 127509 - protein, 14 aa, Homo sapiens
  CDR3 for alpha chain variable domain of TCR clone 63755 (TRAV1-2, TRAJ16)
CAVNRLSDGQKLLF

SEQ ID NO: 127510 - protein, 13 aa, Homo sapiens
  CDR3 for beta chain variable domain of TCR clone 63755 (TRBV24-1, TRBJ2-2)
CATSDWSTGELFF

SEQ ID NO: 127511 - protein, 12 aa, Homo sapiens
  CDR3 for alpha chain variable domain of TCR clone 63756 (TRAV29/DV5, TRAJ15)
CASNQAGTALIF

SEQ ID NO: 127512 - protein, 15 aa, Homo sapiens
  CDR3 for beta chain variable domain of TCR clone 63756 (TRBV11-2, TRBJ2-2)
CASSSDRVNAGELLF

SEQ ID NO: 127513 - protein, 14 aa, Homo sapiens
  CDR3 for alpha chain variable domain of TCR clone 63757 (TRAV3, TRAJ17)
CAVRDAAAGNKPTF

SEQ ID NO: 127514 - protein, 13 aa, Homo sapiens
  CDR3 for beta chain variable domain of TCR clone 63757 (TRBV2, TRBJ1-1)
CASSVSGYTEAFF

SEQ ID NO: 127515 - protein, 16 aa, Homo sapiens
  CDR3 for alpha chain variable domain of TCR clone 63758 (TRAV12-3, TRAJ53)
CAMSPGSGGSNYKLTS

SEQ ID NO: 127516 - protein, 16 aa, Homo sapiens
  CDR3 for beta chain variable domain of TCR clone 63758 (TRBV4-2, TRBJ1-1)
CASSQAGFGMNTEAFF

SEQ ID NO: 127517 - protein, 18 aa, Homo sapiens
  CDR3 for alpha chain variable domain of TCR clone 63759 (TRAV4, )
CLVGPHNYDIQNPDPAVY

SEQ ID NO: 127518 - protein, 17 aa, Homo sapiens
  CDR3 for beta chain variable domain of TCR clone 63759 (TRBV24-1, TRBJ2-1)
CATSDVSTSGTYNEQFF

SEQ ID NO: 127519 - protein, 14 aa, Homo sapiens
  CDR3 for alpha chain variable domain of TCR clone 63760 (TRAV2, TRAJ37)
CAVDFTSNTGILIF

SEQ ID NO: 127520 - protein, 15 aa, Homo sapiens
  CDR3 for beta chain variable domain of TCR clone 63760 (TRBV20-1, TRBJ1-1)
CSASRGVTGNTEAFF

SEQ ID NO: 127521 - protein, 14 aa, Homo sapiens
  CDR3 for alpha chain variable domain of TCR clone 63761 (TRAV13-2, TRAJ4)
CAEKGPKGYNKLIF

SEQ ID NO: 127522 - protein, 16 aa, Homo sapiens
  CDR3 for beta chain variable domain of TCR clone 63761 (TRBV11-3, TRBJ2-5)
CASSSVVAGSTETQYF

SEQ ID NO: 127523 - protein, 13 aa, Homo sapiens
  CDR3 for alpha chain variable domain of TCR clone 63762 (TRAV12-2, TRAJ17)
CRAFQSCRQQATF

SEQ ID NO: 127524 - protein, 17 aa, Homo sapiens
  CDR3 for beta chain variable domain of TCR clone 63762 (TRBV20-1, TRBJ2-2)
CSASGSGQGGLTGELFF

SEQ ID NO: 127525 - protein, 13 aa, Homo sapiens
  CDR3 for alpha chain variable domain of TCR clone 63763 (TRAV35, TRAJ36)
CAGPQIGANNLFF

SEQ ID NO: 127526 - protein, 15 aa, Homo sapiens
  CDR3 for beta chain variable domain of TCR clone 63763 (TRBV28, TRBJ2-5)
CASSPPWSYQETQYF

SEQ ID NO: 127527 - protein, 13 aa, Homo sapiens
  CDR3 for alpha chain variable domain of TCR clone 63764 (TRAV26-1, TRAJ34)
CIVRPWITDKLIF

SEQ ID NO: 127528 - protein, 13 aa, Homo sapiens
  CDR3 for beta chain variable domain of TCR clone 63764 (TRBV5-1, TRBJ2-1)
GASSLGSYNEQFF

SEQ ID NO: 127529 - protein, 10 aa, Homo sapiens
  CDR3 for alpha chain variable domain of TCR clone 63765 (TRAV13-2, TRAJ49)
CADTGNQFYF

SEQ ID NO: 127530 - protein, 15 aa, Homo sapiens
  CDR3 for beta chain variable domain of TCR clone 63765 (TRBV4-1, TRBJ1-4)
CASSDTGGTNEKLFF

SEQ ID NO: 127531 - protein, 13 aa, Homo sapiens
  CDR3 for alpha chain variable domain of TCR clone 63766 (TRAV12-1, TRAJ7)
CVVNMRGNNRLAF

SEQ ID NO: 127532 - protein, 15 aa, Homo sapiens
  CDR3 for beta chain variable domain of TCR clone 63766 (TRBV27, TRBJ2-3)
CASGLGLAATDTQYF

SEQ ID NO: 127533 - protein, 14 aa, Homo sapiens
  CDR3 for alpha chain variable domain of TCR clone 63767 (TRAV12-3, TRAJ10)
SHLPLTGGGNKLTF

SEQ ID NO: 127534 - protein, 17 aa, Homo sapiens
  CDR3 for beta chain variable domain of TCR clone 63767 (TRBV6-1, TRBJ1-3)
CASVQGGGVETPYILER

SEQ ID NO: 127535 - protein, 16 aa, Homo sapiens
  CDR3 for alpha chain variable domain of TCR clone 63768 (TRAV20, TRAJ28)
CAVRDPSGAGSYQLTF

SEQ ID NO: 127536 - protein, 16 aa, Homo sapiens
  CDR3 for beta chain variable domain of TCR clone 63768 (TRBV19, TRBJ1-5)
CASSTRGTRSNQPQHF

SEQ ID NO: 127537 - protein, 14 aa, Homo sapiens
  CDR3 for alpha chain variable domain of TCR clone 63769 (TRAV12-2, TRAJ17)
CAMLFKAAGNKLTF

SEQ ID NO: 127538 - protein, 14 aa, Homo sapiens
  CDR3 for beta chain variable domain of TCR clone 63769 (TRBV4-1, TRBJ2-2)
CASSQAVNTGELFF

SEQ ID NO: 127539 - protein, 13 aa, Homo sapiens
  CDR3 for alpha chain variable domain of TCR clone 63770 (TRAV12-1, TRAJ9)
CVVLNTGGFTTIF

SEQ ID NO: 127540 - protein, 13 aa, Homo sapiens
  CDR3 for beta chain variable domain of TCR clone 63770 (TRBV20-1, TRBJ1-1)
CSARGGGNTEAFF

SEQ ID NO: 127541 - protein, 11 aa, Homo sapiens
  CDR3 for alpha chain variable domain of TCR clone 63771 (TRAV2, TRAJ13)
CASGGYQKVTF

SEQ ID NO: 127542 - protein, 16 aa, Homo sapiens
  CDR3 for beta chain variable domain of TCR clone 63771 (TRBV19, TRBJ2-1)
CASSKAGLSSYNEQFF

SEQ ID NO: 127543 - protein, 14 aa, Homo sapiens
  CDR3 for alpha chain variable domain of TCR clone 63772 (TRAV10, TRAJ48)
CVGVFHFGNEKLTF

SEQ ID NO: 127544 - protein, 15 aa, Homo sapiens
  CDR3 for beta chain variable domain of TCR clone 63772 (TRBV6-6, TRBJ1-5)
CASSSIQGTNQPQHF

SEQ ID NO: 127545 - protein, 14 aa, Homo sapiens
  CDR3 for alpha chain variable domain of TCR clone 63773 (TRAV12-1, TRAJ23)
YVVIVYNQGGKLIF

SEQ ID NO: 127546 - protein, 15 aa, Homo sapiens
  CDR3 for beta chain variable domain of TCR clone 63773 (TRBV20-1, TRBJ1-5)
CSAKPPGQGPQPQHF

SEQ ID NO: 127547 - protein, 16 aa, Homo sapiens
  CDR3 for alpha chain variable domain of TCR clone 63774 (TRAV30, TRAJ57)
CGTGWAPQGGSEKLVF

SEQ ID NO: 127548 - protein, 14 aa, Homo sapiens
  CDR3 for beta chain variable domain of TCR clone 63774 (TRBV18, TRBJ1-1)
CASSPGFQGVEAVF

SEQ ID NO: 127549 - protein, 14 aa, Homo sapiens
  CDR3 for alpha chain variable domain of TCR clone 63775 (TRAV12-3, TRAJ35)
CAMSLIGFGNVLHC

SEQ ID NO: 127550 - protein, 12 aa, Homo sapiens
  CDR3 for beta chain variable domain of TCR clone 63775 (TRBV12-4, TRBJ1-1)
CASSLAGLEDFF

SEQ ID NO: 127551 - protein, 14 aa, Homo sapiens
  CDR3 for alpha chain variable domain of TCR clone 63776 (TRAV12-3, TRAJ10)
SHLPLPGGGNKLTF

SEQ ID NO: 127552 - protein, 15 aa, Homo sapiens
  CDR3 for beta chain variable domain of TCR clone 63776 (TRBV7-9, TRBJ1-4)
CASSRTGGFNEKLFF

SEQ ID NO: 127553 - protein, 12 aa, Homo sapiens
  CDR3 for alpha chain variable domain of TCR clone 63777 (TRAV17, TRAJ5)
CAILTGRRALTL

SEQ ID NO: 127554 - protein, 16 aa, Homo sapiens
  CDR3 for beta chain variable domain of TCR clone 63777 (TRBV6-5, TRBJ1-5)
CASSPPGLEGNQPQHF

SEQ ID NO: 127555 - protein, 16 aa, Homo sapiens
  CDR3 for alpha chain variable domain of TCR clone 63778 (TRAV23/DV6, TRAJ9)
CAASIGGNTGGFKTIF

SEQ ID NO: 127556 - protein, 14 aa, Homo sapiens
  CDR3 for beta chain variable domain of TCR clone 63778 (TRBV27, TRBJ2-2)
CASRPGVNTGELFF

SEQ ID NO: 127557 - protein, 14 aa, Homo sapiens
  CDR3 for alpha chain variable domain of TCR clone 63779 (TRAV12-3, TRAJ10)
SHLPLTGGGNKLTF

SEQ ID NO: 127558 - protein, 12 aa, Homo sapiens
  CDR3 for beta chain variable domain of TCR clone 63779 (TRBV7-8, TRBJ2-7)
CAGSLGDREQYF

SEQ ID NO: 127559 - protein, 15 aa, Homo sapiens
  CDR3 for alpha chain variable domain of TCR clone 63780 (TRAV8-2, TRAJ40)
CVVLGTTSGTYKYIF

SEQ ID NO: 127560 - protein, 13 aa, Homo sapiens
  CDR3 for beta chain variable domain of TCR clone 63780 (TRBV7-9, TRBJ1-2)
CASSLKQNYGYTF

SEQ ID NO: 127561 - protein, 14 aa, Homo sapiens
  CDR3 for alpha chain variable domain of TCR clone 63781 (TRAV1-2, TRAJ8)
CAVREDTGFQKLVF

SEQ ID NO: 127562 - protein, 15 aa, Homo sapiens
  CDR3 for beta chain variable domain of TCR clone 63781 (TRBV7-9, TRBJ1-4)
CASSRTGGFNEKLFF

SEQ ID NO: 127563 - protein, 15 aa, Homo sapiens
  CDR3 for alpha chain variable domain of TCR clone 63782 (TRAV23/DV6, TRAJ30)
CAASSQESRDDKVIF

SEQ ID NO: 127564 - protein, 17 aa, Homo sapiens
  CDR3 for beta chain variable domain of TCR clone 63782 (TRBV4-3, TRBJ2-1)
CASSQFSSGRASGEQFF

SEQ ID NO: 127565 - protein, 14 aa, Homo sapiens
  CDR3 for alpha chain variable domain of TCR clone 63783 (TRAV8-2, TRAJ37)
CVASISGNTGKLIF

SEQ ID NO: 127566 - protein, 11 aa, Homo sapiens
  CDR3 for beta chain variable domain of TCR clone 63783 (TRBV18, TRBJ2-5)
CASSPRETQYF

SEQ ID NO: 127567 - protein, 13 aa, Homo sapiens
  CDR3 for alpha chain variable domain of TCR clone 63784 (TRAV8-1, TRAJ23)
CAWRDNQGGNLIF

SEQ ID NO: 127568 - protein, 13 aa, Homo sapiens
  CDR3 for beta chain variable domain of TCR clone 63784 (TRBV20-1, TRBJ2-7)
CSATHTSGYEQYF

SEQ ID NO: 127569 - protein, 12 aa, Homo sapiens
  CDR3 for alpha chain variable domain of TCR clone 63785 (TRAV2, TRAJ9)
CAVGAGGFKTIF

SEQ ID NO: 127570 - protein, 16 aa, Homo sapiens
  CDR3 for beta chain variable domain of TCR clone 63785 (TRBV13, TRBJ2-2)
CASSPRTGEHTGEQFF

SEQ ID NO: 127571 - protein, 13 aa, Homo sapiens
  CDR3 for alpha chain variable domain of TCR clone 63786 (TRAV20, TRAJ31)
CAVQAWNNARLMF

SEQ ID NO: 127572 - protein, 14 aa, Homo sapiens
  CDR3 for beta chain variable domain of TCR clone 63786 (TRBV18, TRBJ2-5)
CASSPGVSQETQYF

SEQ ID NO: 127573 - protein, 14 aa, Homo sapiens
  CDR3 for alpha chain variable domain of TCR clone 63787 (TRAV12-3, TRAJ10)
SHLPLTGGGNKLTF

SEQ ID NO: 127574 - protein, 12 aa, Homo sapiens
  CDR3 for beta chain variable domain of TCR clone 63787 (TRBV24-1, TRBJ1-1)
CAISDSDRGAFF

SEQ ID NO: 127575 - protein, 13 aa, Homo sapiens
  CDR3 for alpha chain variable domain of TCR clone 63788 (TRAV2, TRAJ29)
CAAQNSGNTPLVF

SEQ ID NO: 127576 - protein, 14 aa, Homo sapiens
  CDR3 for beta chain variable domain of TCR clone 63788 (TRBV7-9, TRBJ2-4)
CASSLAIGGNIQYF

SEQ ID NO: 127577 - protein, 13 aa, Homo sapiens
  CDR3 for alpha chain variable domain of TCR clone 63789 (TRAV12-1, TRAJ31)
CVVIPNNNARLMF

SEQ ID NO: 127578 - protein, 15 aa, Homo sapiens
  CDR3 for beta chain variable domain of TCR clone 63789 (TRBV20-1, TRBJ2-7)
CSARDRVSGMDEQYF

SEQ ID NO: 127579 - protein, 12 aa, Homo sapiens
  CDR3 for alpha chain variable domain of TCR clone 63790 (TRAV12-3, TRAJ17)
CAMTLTGNKLTL

SEQ ID NO: 127580 - protein, 20 aa, Homo sapiens
  CDR3 for beta chain variable domain of TCR clone 63790 (TRBV7-8, TRBJ2-2)
CASSHLFPGPTIHITGELFF

SEQ ID NO: 127581 - protein, 17 aa, Homo sapiens
  CDR3 for alpha chain variable domain of TCR clone 63791 (TRAV38-2/DV8, TRAJ56)
CAYRSEGGTGANSKLTF

SEQ ID NO: 127582 - protein, 14 aa, Homo sapiens
  CDR3 for beta chain variable domain of TCR clone 63791 (TRBV11-1, TRBJ1-1)
CASSLEHPNTEAFF

SEQ ID NO: 127583 - protein, 12 aa, Homo sapiens
  CDR3 for alpha chain variable domain of TCR clone 63792 (TRAV2, TRAJ33)
CAVPDSNYQLIW

SEQ ID NO: 127584 - protein, 15 aa, Homo sapiens
  CDR3 for beta chain variable domain of TCR clone 63792 (TRBV15, TRBJ1-5)
CTTSRDPVSNQPQHF

SEQ ID NO: 127585 - protein, 15 aa, Homo sapiens
  CDR3 for alpha chain variable domain of TCR clone 63793 (TRAV3, TRAJ5)
CAVRDRRTGRRALTF

SEQ ID NO: 127586 - protein, 15 aa, Homo sapiens
  CDR3 for beta chain variable domain of TCR clone 63793 (TRBV7-9, TRBJ2-2)
CASGPLDTFPGELFF

SEQ ID NO: 127587 - protein, 16 aa, Homo sapiens
  CDR3 for alpha chain variable domain of TCR clone 63794 (TRAV4, TRAJ22)
CLVGDLYSGSARRLTF

SEQ ID NO: 127588 - protein, 16 aa, Homo sapiens
  CDR3 for beta chain variable domain of TCR clone 63794 (TRBV7-9, TRBJ2-1)
CASSDVAGGSYNEQFF

SEQ ID NO: 127589 - protein, 14 aa, Homo sapiens
  CDR3 for alpha chain variable domain of TCR clone 63795 (TRAV35, TRAJ23)
CWAPGNNQGGKLIF

SEQ ID NO: 127590 - protein, 14 aa, Homo sapiens
  CDR3 for beta chain variable domain of TCR clone 63795 (TRBV7-9, TRBJ1-1)
CASTPLQSYTEAFF

SEQ ID NO: 127591 - protein, 15 aa, Homo sapiens
  CDR3 for alpha chain variable domain of TCR clone 63796 (TRAV12-2, TRAJ43)
CAFDMRFGAETRLTV

SEQ ID NO: 127592 - protein, 18 aa, Homo sapiens
  CDR3 for beta chain variable domain of TCR clone 63796 (TRBV20-1, TRBJ2-3)
CSASGLAGGPGTTDTQYF

SEQ ID NO: 127593 - protein, 13 aa, Homo sapiens
  CDR3 for alpha chain variable domain of TCR clone 63797 (TRAV30, TRAJ18)
CGTEASTLGRLYF

SEQ ID NO: 127594 - protein, 15 aa, Homo sapiens
  CDR3 for beta chain variable domain of TCR clone 63797 (TRBV7-3, TRBJ2-1)
CASSRSGTGSSEQFF

SEQ ID NO: 127595 - protein, 14 aa, Homo sapiens
  CDR3 for alpha chain variable domain of TCR clone 63798 (TRAV13-1, TRAJ40)
CAASMTSGTYKYIF

SEQ ID NO: 127596 - protein, 15 aa, Homo sapiens
  CDR3 for beta chain variable domain of TCR clone 63798 (TRBV7-3, TRBJ2-1)
CASSPTGGGEVEQFC

SEQ ID NO: 127597 - protein, 12 aa, Homo sapiens
  CDR3 for alpha chain variable domain of TCR clone 63799 (TRAV38-2/DV8, TRAJ57)
CAWRGGSEKLVF

SEQ ID NO: 127598 - protein, 13 aa, Homo sapiens
  CDR3 for beta chain variable domain of TCR clone 63799 (TRBV5-1, TRBJ1-5)
CASSLAQDQPQHF

SEQ ID NO: 127599 - protein, 13 aa, Homo sapiens
  CDR3 for alpha chain variable domain of TCR clone 63800 (TRAV23/DV6, TRAJ54)
CAASRQGAQKLVF

SEQ ID NO: 127600 - protein, 15 aa, Homo sapiens
  CDR3 for beta chain variable domain of TCR clone 63800 (TRBV5-1, TRBJ1-4)
CASSLARATNEKLFF

SEQ ID NO: 127601 - protein, 14 aa, Homo sapiens
  CDR3 for alpha chain variable domain of TCR clone 63801 (TRAV1-1, TRAJ30)
CAVRSLNRDDKIIF

SEQ ID NO: 127602 - protein, 16 aa, Homo sapiens
  CDR3 for beta chain variable domain of TCR clone 63801 (TRBV19, TRBJ1-1)
CASRFGGPVTGTEAFF

SEQ ID NO: 127603 - protein, 10 aa, Homo sapiens
  CDR3 for alpha chain variable domain of TCR clone 63802 (TRAV1-2, TRAJ31)
CVSEDARLMF

SEQ ID NO: 127604 - protein, 15 aa, Homo sapiens
  CDR3 for beta chain variable domain of TCR clone 63802 (TRBV2, TRBJ2-1)
CASSELAGSYNEQFF

SEQ ID NO: 127605 - protein, 14 aa, Homo sapiens
  CDR3 for alpha chain variable domain of TCR clone 63803 (TRAV8-3, TRAJ4)
CAVGAAGGYNKLIC

SEQ ID NO: 127606 - protein, 15 aa, Homo sapiens
  CDR3 for beta chain variable domain of TCR clone 63803 (TRBV6-5, TRBJ2-1)
CASSYDAGAGNEQFF

SEQ ID NO: 127607 - protein, 14 aa, Homo sapiens
  CDR3 for alpha chain variable domain of TCR clone 63804 (TRAV1-2, TRAJ16)
YAVNRFSDGQKLLF

SEQ ID NO: 127608 - protein, 15 aa, Homo sapiens
  CDR3 for beta chain variable domain of TCR clone 63804 (TRBV6-6, TRBJ2-7)
CASSYSYGGSYEQYF

SEQ ID NO: 127609 - protein, 16 aa, Homo sapiens
  CDR3 for alpha chain variable domain of TCR clone 63805 (TRAV12-2, TRAJ6)
CAVRIQASGGSYIPTF

SEQ ID NO: 127610 - protein, 14 aa, Homo sapiens
  CDR3 for beta chain variable domain of TCR clone 63805 (TRBV2, TRBJ2-2)
CARSERRFTGELFF

SEQ ID NO: 127611 - protein, 16 aa, Homo sapiens
  CDR3 for alpha chain variable domain of TCR clone 63806 (TRAV13-1, TRAJ40)
CAASIATTSGTYKYIF

SEQ ID NO: 127612 - protein, 14 aa, Homo sapiens
  CDR3 for beta chain variable domain of TCR clone 63806 (TRBV4-2, TRBJ2-1)
CASGLDRAYNEQFF

SEQ ID NO: 127613 - protein, 15 aa, Homo sapiens
  CDR3 for alpha chain variable domain of TCR clone 63807 (TRAV23/DV6, TRAJ13)
CAAWPGGGGYQKVTF

SEQ ID NO: 127614 - protein, 14 aa, Homo sapiens
  CDR3 for beta chain variable domain of TCR clone 63807 (TRBV25-1, TRBJ1-1)
CASTHLGGNTEAFF

SEQ ID NO: 127615 - protein, 22 aa, Homo sapiens
  CDR3 for alpha chain variable domain of TCR clone 63808 (TRAV3, TRAJ38)
CAVRDCLNAGNNRIQNPDPAVY

SEQ ID NO: 127616 - protein, 15 aa, Homo sapiens
  CDR3 for beta chain variable domain of TCR clone 63808 (TRBV6-5, TRBJ2-1)
CASSYDAGAGNEQFF

SEQ ID NO: 127617 - protein, 17 aa, Homo sapiens
  CDR3 for alpha chain variable domain of TCR clone 63809 (TRAV3, TRAJ6)
CAVRDGPRAGGSYIPTV

SEQ ID NO: 127618 - protein, 13 aa, Homo sapiens
  CDR3 for beta chain variable domain of TCR clone 63809 (TRBV27, TRBJ2-1)
CASRTLGVGEQFF

SEQ ID NO: 127619 - protein, 11 aa, Homo sapiens
  CDR3 for alpha chain variable domain of TCR clone 63810 (TRAV21, TRAJ34)
CAHYNTDKLIF

SEQ ID NO: 127620 - protein, 13 aa, Homo sapiens
  CDR3 for beta chain variable domain of TCR clone 63810 (TRBV20-1, TRBJ1-1)
CSAPLGGGTEAFF

SEQ ID NO: 127621 - protein, 11 aa, Homo sapiens
  CDR3 for alpha chain variable domain of TCR clone 63811 (TRAV17, TRAJ9)
CATTGGFKTIF

SEQ ID NO: 127622 - protein, 14 aa, Homo sapiens
  CDR3 for beta chain variable domain of TCR clone 63811 (TRBV7-9, TRBJ2-2)
SASSGLADTGELFF

SEQ ID NO: 127623 - protein, 14 aa, Homo sapiens
  CDR3 for alpha chain variable domain of TCR clone 63812 (TRAV8-2, TRAJ44)
CVVSLTGTASKLTF

SEQ ID NO: 127624 - protein, 15 aa, Homo sapiens
  CDR3 for beta chain variable domain of TCR clone 63812 (TRBV7-2, TRBJ2-1)
CASSFSVGIYNEQFF

SEQ ID NO: 127625 - protein, 17 aa, Homo sapiens
  CDR3 for alpha chain variable domain of TCR clone 63813 (TRAV26-1, TRAJ53)
CIVRVDDSGSSNYKLTF

SEQ ID NO: 127626 - protein, 15 aa, Homo sapiens
  CDR3 for beta chain variable domain of TCR clone 63813 (TRBV20-1, TRBJ1-2)
CSARDPLRQGYGYTF

SEQ ID NO: 127627 - protein, 13 aa, Homo sapiens
  CDR3 for alpha chain variable domain of TCR clone 63814 (TRAV3, TRAJ21)
CAVREPDFNKFYF

SEQ ID NO: 127628 - protein, 15 aa, Homo sapiens
  CDR3 for beta chain variable domain of TCR clone 63814 (TRBV28, TRBJ1-5)
CASSRTGGYVQPQHF

SEQ ID NO: 127629 - protein, 12 aa, Homo sapiens
  CDR3 for alpha chain variable domain of TCR clone 63815 (TRAV27, TRAJ13)
CAGAGGYQKVTF

SEQ ID NO: 127630 - protein, 15 aa, Homo sapiens
  CDR3 for beta chain variable domain of TCR clone 63815 (TRBV20-1, TRBJ2-6)
CSARDRGPGANVLSF

SEQ ID NO: 127631 - protein, 11 aa, Homo sapiens
  CDR3 for alpha chain variable domain of TCR clone 63816 (TRAV2, TRAJ13)
CASGGYQKVTF

SEQ ID NO: 127632 - protein, 14 aa, Homo sapiens
  CDR3 for beta chain variable domain of TCR clone 63816 (TRBV7-7, TRBJ2-2)
CATRQDSDTGELFF

SEQ ID NO: 127633 - protein, 14 aa, Homo sapiens
  CDR3 for alpha chain variable domain of TCR clone 63817 (TRAV8-3, TRAJ4)
CAVGASGGCNKLIF

SEQ ID NO: 127634 - protein, 13 aa, Homo sapiens
  CDR3 for beta chain variable domain of TCR clone 63817 (TRBV18, TRBJ2-5)
CASSLQGQETQYF

SEQ ID NO: 127635 - protein, 17 aa, Homo sapiens
  CDR3 for alpha chain variable domain of TCR clone 63818 (TRAV3, TRAJ6)
CAVRDGPRAGGSYIPTF

SEQ ID NO: 127636 - protein, 16 aa, Homo sapiens
  CDR3 for beta chain variable domain of TCR clone 63818 (TRBV3-1, TRBJ2-5)
CASSPGQFNGFGTQYF

SEQ ID NO: 127637 - protein, 19 aa, Homo sapiens
  CDR3 for alpha chain variable domain of TCR clone 63819 (TRAV1-2, TRAJ26)
CLLPLCCERPDNYCQNFVF

SEQ ID NO: 127638 - protein, 11 aa, Homo sapiens
  CDR3 for beta chain variable domain of TCR clone 63819 (TRBV12-4, TRBJ2-3)
CASTATDTQYF

SEQ ID NO: 127639 - protein, 12 aa, Homo sapiens
  CDR3 for alpha chain variable domain of TCR clone 63820 (TRAV12-3, TRAJ17)
CATTLTGNKLTF

SEQ ID NO: 127640 - protein, 15 aa, Homo sapiens
  CDR3 for beta chain variable domain of TCR clone 63820 (TRBV20-1, TRBJ2-7)
CSARDRVSGMDEQHF

SEQ ID NO: 127641 - protein, 14 aa, Homo sapiens
  CDR3 for alpha chain variable domain of TCR clone 63821 (TRAV35, TRAJ42)
CAGRYGGGQGNLIF

SEQ ID NO: 127642 - protein, 15 aa, Homo sapiens
  CDR3 for beta chain variable domain of TCR clone 63821 (TRBV7-9, TRBJ2-1)
CASSLGWGRANEQFF

SEQ ID NO: 127643 - protein, 11 aa, Homo sapiens
  CDR3 for alpha chain variable domain of TCR clone 63822 (TRAV12-1, TRAJ21)
CVVNNFNKFYF

SEQ ID NO: 127644 - protein, 14 aa, Homo sapiens
  CDR3 for beta chain variable domain of TCR clone 63822 (TRBV18, TRBJ2-7)
CASPPRGGAYEQYF

SEQ ID NO: 127645 - protein, 13 aa, Homo sapiens
  CDR3 for alpha chain variable domain of TCR clone 63823 (TRAV21, TRAJ34)
CAVSEGDTDKLIF

SEQ ID NO: 127646 - protein, 17 aa, Homo sapiens
  CDR3 for beta chain variable domain of TCR clone 63823 (TRBV20-1, TRBJ1-5)
CSARDPSARGFNQPQHF

SEQ ID NO: 127647 - protein, 12 aa, Homo sapiens
  CDR3 for alpha chain variable domain of TCR clone 63824 (TRAV12-2, TRAJ7)
CAVMRGNNRLAF

SEQ ID NO: 127648 - protein, 13 aa, Homo sapiens
  CDR3 for beta chain variable domain of TCR clone 63824 (TRBV10-3, TRBJ2-7)
CASKLAVNYEQYF

SEQ ID NO: 127649 - protein, 14 aa, Homo sapiens
  CDR3 for alpha chain variable domain of TCR clone 63825 (TRAV12-2, TRAJ53)
CAVKGGGSNYKLTF

SEQ ID NO: 127650 - protein, 13 aa, Homo sapiens
  CDR3 for beta chain variable domain of TCR clone 63825 (TRBV20-1, TRBJ1-1)
CSAPLGGGTEAFF

SEQ ID NO: 127651 - protein, 12 aa, Homo sapiens
  CDR3 for alpha chain variable domain of TCR clone 63826 (TRAV17, TRAJ39)
CATGAAGNMLTF

SEQ ID NO: 127652 - protein, 14 aa, Homo sapiens
  CDR3 for beta chain variable domain of TCR clone 63826 (TRBV7-9, TRBJ1-2)
CACSRQGANYGYTF

SEQ ID NO: 127653 - protein, 15 aa, Homo sapiens
  CDR3 for alpha chain variable domain of TCR clone 63827 (TRAV12-3, TRAJ27)
CAMRAYNTNAGKSTF

SEQ ID NO: 127654 - protein, 13 aa, Homo sapiens
  CDR3 for beta chain variable domain of TCR clone 63827 (TRBV11-2, TRBJ2-5)
CASSRGPSETQCF

SEQ ID NO: 127655 - protein, 12 aa, Homo sapiens
  CDR3 for alpha chain variable domain of TCR clone 63828 (TRAV27, TRAJ35)
CAGADFGNVLHC

SEQ ID NO: 127656 - protein, 14 aa, Homo sapiens
  CDR3 for beta chain variable domain of TCR clone 63828 (TRBV11-2, TRBJ2-5)
CASSRTGGIETQYF

SEQ ID NO: 127657 - protein, 15 aa, Homo sapiens
  CDR3 for alpha chain variable domain of TCR clone 63829 (TRAV35, TRAJ40)
CAGQLGTSGTYKYIF

SEQ ID NO: 127658 - protein, 14 aa, Homo sapiens
  CDR3 for beta chain variable domain of TCR clone 63829 (TRBV7-3, TRBJ2-1)
CASSLAGGTNVQFF

SEQ ID NO: 127659 - protein, 14 aa, Homo sapiens
  CDR3 for alpha chain variable domain of TCR clone 63830 (TRAV26-1, TRAJ8)
CIVRVDIGFQRLVF

SEQ ID NO: 127660 - protein, 15 aa, Homo sapiens
  CDR3 for beta chain variable domain of TCR clone 63830 (TRBV10-2, TRBJ2-7)
CASWNRGQATYERYF

SEQ ID NO: 127661 - protein, 17 aa, Homo sapiens
  CDR3 for alpha chain variable domain of TCR clone 63831 (TRAV1-1, TRAJ32)
CAVRVDELWWRYKQAHL

SEQ ID NO: 127662 - protein, 16 aa, Homo sapiens
  CDR3 for beta chain variable domain of TCR clone 63831 (TRBV5-4, TRBJ2-3)
CASQQPGAGGADTQYF

SEQ ID NO: 127663 - protein, 14 aa, Homo sapiens
  CDR3 for alpha chain variable domain of TCR clone 63832 (TRAV8-4, TRAJ5)
CAVSTDTGRRALTF

SEQ ID NO: 127664 - protein, 16 aa, Homo sapiens
  CDR3 for beta chain variable domain of TCR clone 63832 (TRBV4-2, TRBJ1-1)
CASRPLDGGGDTEAFF

SEQ ID NO: 127665 - protein, 16 aa, Homo sapiens
  CDR3 for alpha chain variable domain of TCR clone 63833 (TRAV30, TRAJ24)
CGTEIVDADSWGKFRF

SEQ ID NO: 127666 - protein, 13 aa, Homo sapiens
  CDR3 for beta chain variable domain of TCR clone 63833 (TRBV18, TRBJ1-1)
CASSGGRNTEAFF

SEQ ID NO: 127667 - protein, 14 aa, Homo sapiens
  CDR3 for alpha chain variable domain of TCR clone 63834 (TRAV23/DV6, TRAJ58)
CAGMRETSGSRLTF

SEQ ID NO: 127668 - protein, 13 aa, Homo sapiens
  CDR3 for beta chain variable domain of TCR clone 63834 (TRBV28, TRBJ2-7)
CASRASGVYEQYF

SEQ ID NO: 127669 - protein, 18 aa, Homo sapiens
  CDR3 for alpha chain variable domain of TCR clone 63835 (TRAV21, TRAJ52)
CAVRPSPAGGTRYGKLTF

SEQ ID NO: 127670 - protein, 15 aa, Homo sapiens
  CDR3 for beta chain variable domain of TCR clone 63835 (TRBV7-9, TRBJ2-7)
CASSSSGLAVYEQYF

SEQ ID NO: 127671 - protein, 14 aa, Homo sapiens
  CDR3 for alpha chain variable domain of TCR clone 63836 (TRAV3, TRAJ21)
CALGRGSTNLTLDL

SEQ ID NO: 127672 - protein, 14 aa, Homo sapiens
  CDR3 for beta chain variable domain of TCR clone 63836 (TRBV7-9, TRBJ2-4)
CASSLAMGGNIQYF

SEQ ID NO: 127673 - protein, 14 aa, Homo sapiens
  CDR3 for alpha chain variable domain of TCR clone 63837 (TRAV12-1, TRAJ16)
CVVTLMARSCSLQG

SEQ ID NO: 127674 - protein, 11 aa, Homo sapiens
  CDR3 for beta chain variable domain of TCR clone 63837 (TRBV29-1, TRBJ2-5)
CSEDRTGTQYF

SEQ ID NO: 127675 - protein, 12 aa, Homo sapiens
  CDR3 for alpha chain variable domain of TCR clone 63838 (TRAV13-1, TRAJ21)
CAAKEGFNKFYF

SEQ ID NO: 127676 - protein, 13 aa, Homo sapiens
  CDR3 for beta chain variable domain of TCR clone 63838 (TRBV7-9, TRBJ2-1)
CASSLGTVNEQFF

SEQ ID NO: 127677 - protein, 12 aa, Homo sapiens
  CDR3 for alpha chain variable domain of TCR clone 63839 (TRAV12-3, TRAJ40)
CAMTLTGNKLTF

SEQ ID NO: 127678 - protein, 18 aa, Homo sapiens
  CDR3 for beta chain variable domain of TCR clone 63839 (TRBV11-3, TRBJ2-3)
CASSLGGASRGAPNTQYF

SEQ ID NO: 127679 - protein, 14 aa, Homo sapiens
  CDR3 for alpha chain variable domain of TCR clone 63840 (TRAV39, TRAJ47)
CAVDFVQSGNKLVF

SEQ ID NO: 127680 - protein, 13 aa, Homo sapiens
  CDR3 for beta chain variable domain of TCR clone 63840 (TRBV7-3, TRBJ1-1)
CASSQDWGAEAFF

SEQ ID NO: 127681 - protein, 12 aa, Homo sapiens
  CDR3 for alpha chain variable domain of TCR clone 63841 (TRAV17, TRAJ39)
CATGAEGNMLTF

SEQ ID NO: 127682 - protein, 14 aa, Homo sapiens
  CDR3 for beta chain variable domain of TCR clone 63841 (TRBV7-9, TRBJ1-2)
CASSRQGANYGYTF

SEQ ID NO: 127683 - protein, 12 aa, Homo sapiens
  CDR3 for alpha chain variable domain of TCR clone 63842 (TRAV1-1, TRAJ39)
CAVPVVGNMLTF

SEQ ID NO: 127684 - protein, 16 aa, Homo sapiens
  CDR3 for beta chain variable domain of TCR clone 63842 (TRBV24-1, TRBJ2-3)
CATSDPGTGATDTQYF

SEQ ID NO: 127685 - protein, 13 aa, Homo sapiens
  CDR3 for alpha chain variable domain of TCR clone 63843 (TRAV17, TRAJ6)
CATGFGGSYIPTL

SEQ ID NO: 127686 - protein, 14 aa, Homo sapiens
  CDR3 for beta chain variable domain of TCR clone 63843 (TRBV5-1, TRBJ2-5)
CASSFGGSQETQYF

SEQ ID NO: 127687 - protein, 13 aa, Homo sapiens
  CDR3 for alpha chain variable domain of TCR clone 63844 (TRAV2, TRAJ15)
CAVASQAGTALIF

SEQ ID NO: 127688 - protein, 13 aa, Homo sapiens
  CDR3 for beta chain variable domain of TCR clone 63844 (TRBV7-9, TRBJ1-2)
CASSLKQNYDYTF

SEQ ID NO: 127689 - protein, 17 aa, Homo sapiens
  CDR3 for alpha chain variable domain of TCR clone 63845 (TRAV3, TRAJ6)
CAVRDGPRAGGSYIPTF

SEQ ID NO: 127690 - protein, 13 aa, Homo sapiens
  CDR3 for beta chain variable domain of TCR clone 63845 (TRBV19, TRBJ2-7)
CASRKAGGSEQYF

SEQ ID NO: 127691 - protein, 15 aa, Homo sapiens
  CDR3 for alpha chain variable domain of TCR clone 63846 (TRAV13-1, TRAJ18)
CAASGGGSTLGRLSF

SEQ ID NO: 127692 - protein, 13 aa, Homo sapiens
  CDR3 for beta chain variable domain of TCR clone 63846 (TRBV18, TRBJ2-1)
CASGLASNNEQFF

SEQ ID NO: 127693 - protein, 15 aa, Homo sapiens
  CDR3 for alpha chain variable domain of TCR clone 63847 (TRAV23/DV6, TRAJ18)
CAARFRGSTLGRLYF

SEQ ID NO: 127694 - protein, 13 aa, Homo sapiens
  CDR3 for beta chain variable domain of TCR clone 63847 (TRBV28, TRBJ2-7)
CAILDRAGGEQYF

SEQ ID NO: 127695 - protein, 14 aa, Homo sapiens
  CDR3 for alpha chain variable domain of TCR clone 63848 (TRAV26-1, TRAJ21)
CIVRVVYNFNKSYF

SEQ ID NO: 127696 - protein, 11 aa, Homo sapiens
  CDR3 for beta chain variable domain of TCR clone 63848 (TRBV5-6, TRBJ2-5)
CASSLERTQYF

SEQ ID NO: 127697 - protein, 15 aa, Homo sapiens
  CDR3 for alpha chain variable domain of TCR clone 63849 (TRAV12-3, TRAJ13)
CAMSARSGGYQKVTF

SEQ ID NO: 127698 - protein, 13 aa, Homo sapiens
  CDR3 for beta chain variable domain of TCR clone 63849 (TRBV19, TRBJ2-3)
CATWDKITDTQYF

SEQ ID NO: 127699 - protein, 12 aa, Homo sapiens
  CDR3 for alpha chain variable domain of TCR clone 63850 (TRAV13-1, TRAJ49)
CAAPNTGKQFYF

SEQ ID NO: 127700 - protein, 17 aa, Homo sapiens
  CDR3 for beta chain variable domain of TCR clone 63850 (TRBV25-1, TRBJ2-7)
CASSDARVVFSSYEQYF

SEQ ID NO: 127701 - protein, 14 aa, Homo sapiens
  CDR3 for alpha chain variable domain of TCR clone 63851 (TRAV12-3, TRAJ42)
CAMNYVGSQGNLIF

SEQ ID NO: 127702 - protein, 15 aa, Homo sapiens
  CDR3 for beta chain variable domain of TCR clone 63851 (TRBV5-7, TRBJ1-5)
CASSYGKLWDQPQHF

SEQ ID NO: 127703 - protein, 13 aa, Homo sapiens
  CDR3 for alpha chain variable domain of TCR clone 63852 (TRAV2, TRAJ40)
CAVVTSGTYKYIF

SEQ ID NO: 127704 - protein, 11 aa, Homo sapiens
  CDR3 for beta chain variable domain of TCR clone 63852 (TRBV7-6, TRBJ2-5)
CASSFQETQYF

SEQ ID NO: 127705 - protein, 12 aa, Homo sapiens
  CDR3 for alpha chain variable domain of TCR clone 63853 (TRAV22, TRAJ22)
CAPGGSARQLTF

SEQ ID NO: 127706 - protein, 14 aa, Homo sapiens
  CDR3 for beta chain variable domain of TCR clone 63853 (TRBV7-3, TRBJ2-2)
CASSSGGYTGELFF

SEQ ID NO: 127707 - protein, 18 aa, Homo sapiens
  CDR3 for alpha chain variable domain of TCR clone 63854 (TRAV12-3, TRAJ52)
CAMSRTNAGGTSYGKLTF

SEQ ID NO: 127708 - protein, 17 aa, Homo sapiens
  CDR3 for beta chain variable domain of TCR clone 63854 (TRBV7-3, TRBJ2-3)
CASSLMKRMRGADMQYF

SEQ ID NO: 127709 - protein, 12 aa, Homo sapiens
  CDR3 for alpha chain variable domain of TCR clone 63855 (TRAV3, TRAJ7)
CADLLWEQQTRF

SEQ ID NO: 127710 - protein, 19 aa, Homo sapiens
  CDR3 for beta chain variable domain of TCR clone 63855 (TRBV23-1, TRBJ2-3)
TVSLRQQPRSTGSTDTQYF

SEQ ID NO: 127711 - protein, 13 aa, Homo sapiens
  CDR3 for alpha chain variable domain of TCR clone 63856 (TRAV13-1, TRAJ20)
CAARVSNDYKLSF

SEQ ID NO: 127712 - protein, 16 aa, Homo sapiens
  CDR3 for beta chain variable domain of TCR clone 63856 (TRBV11-1, TRBJ1-1)
CATNPRDRAFNTEAFL

SEQ ID NO: 127713 - protein, 14 aa, Homo sapiens
  CDR3 for alpha chain variable domain of TCR clone 63857 (TRAV1-2, TRAJ8)
CAVREDTGFQKLVF

SEQ ID NO: 127714 - protein, 12 aa, Homo sapiens
  CDR3 for beta chain variable domain of TCR clone 63857 (TRBV11-2, TRBJ2-2)
CACSLGGGELFF

SEQ ID NO: 127715 - protein, 23 aa, Homo sapiens
  CDR3 for alpha chain variable domain of TCR clone 63858 (TRAV8-3, )
CAVVTTRIPDIQNPDPAVYQLRD

SEQ ID NO: 127716 - protein, 14 aa, Homo sapiens
  CDR3 for beta chain variable domain of TCR clone 63858 (TRBV11-2, TRBJ2-7)
CASSPSTTFYEQYF

SEQ ID NO: 127717 - protein, 15 aa, Homo sapiens
  CDR3 for alpha chain variable domain of TCR clone 63859 (TRAV3, TRAJ22)
CAVRDRGGSARQLTF

SEQ ID NO: 127718 - protein, 13 aa, Homo sapiens
  CDR3 for beta chain variable domain of TCR clone 63859 (TRBV2, TRBJ1-5)
CGTAGPGNQPQHF

SEQ ID NO: 127719 - protein, 16 aa, Homo sapiens
  CDR3 for alpha chain variable domain of TCR clone 63860 (TRAV29/DV5, TRAJ30)
QCTSVKQANRDDKIIF

SEQ ID NO: 127720 - protein, 13 aa, Homo sapiens
  CDR3 for beta chain variable domain of TCR clone 63860 (TRBV12-5, TRBJ2-3)
CASQNRGTDTQYF

SEQ ID NO: 127721 - protein, 14 aa, Homo sapiens
  CDR3 for alpha chain variable domain of TCR clone 63861 (TRAV20, TRAJ56)
CAVQFGGANSKLTF

SEQ ID NO: 127722 - protein, 14 aa, Homo sapiens
  CDR3 for beta chain variable domain of TCR clone 63861 (TRBV7-2, TRBJ1-1)
CASSFLTGTTEASF

SEQ ID NO: 127723 - protein, 14 aa, Homo sapiens
  CDR3 for alpha chain variable domain of TCR clone 63862 (TRAV12-2, TRAJ36)
CAVKISTGANNLFF

SEQ ID NO: 127724 - protein, 14 aa, Homo sapiens
  CDR3 for beta chain variable domain of TCR clone 63862 (TRBV25-1, TRBJ1-2)
CASSDTTGVVGYIF

SEQ ID NO: 127725 - protein, 15 aa, Homo sapiens
  CDR3 for alpha chain variable domain of TCR clone 63863 (TRAV2, TRAJ15)
CAVEDRGQAGTALIF

SEQ ID NO: 127726 - protein, 13 aa, Homo sapiens
  CDR3 for beta chain variable domain of TCR clone 63863 (TRBV7-3, TRBJ1-1)
CASSQDWGAEAFF

SEQ ID NO: 127727 - protein, 14 aa, Homo sapiens
  CDR3 for alpha chain variable domain of TCR clone 63864 (TRAV17, TRAJ39)
CATDPVRAGNMLTF

SEQ ID NO: 127728 - protein, 17 aa, Homo sapiens
  CDR3 for beta chain variable domain of TCR clone 63864 (TRBV13, TRBJ2-1)
CASSLYPPGVEYNEQFF

SEQ ID NO: 127729 - protein, 16 aa, Homo sapiens
  CDR3 for alpha chain variable domain of TCR clone 63865 (TRAV3, TRAJ10)
CAVRDMRAGGGNKLTF

SEQ ID NO: 127730 - protein, 16 aa, Homo sapiens
  CDR3 for beta chain variable domain of TCR clone 63865 (TRBV20-1, TRBJ1-4)
CSAPGQGLLTNENLFF

SEQ ID NO: 127731 - protein, 12 aa, Homo sapiens
  CDR3 for alpha chain variable domain of TCR clone 63866 (TRAV30, TRAJ43)
CGTEERGNDMRF

SEQ ID NO: 127732 - protein, 15 aa, Homo sapiens
  CDR3 for beta chain variable domain of TCR clone 63866 (TRBV11-3, TRBJ2-7)
CASSLGRLSGYEQYF

SEQ ID NO: 127733 - protein, 15 aa, Homo sapiens
  CDR3 for alpha chain variable domain of TCR clone 63867 (TRAV12-2, TRAJ53)
CAVNGGGGSNYKLTF

SEQ ID NO: 127734 - protein, 13 aa, Homo sapiens
  CDR3 for beta chain variable domain of TCR clone 63867 (TRBV7-7, TRBJ2-2)
CASSLTSAGELFF

SEQ ID NO: 127735 - protein, 14 aa, Homo sapiens
  CDR3 for alpha chain variable domain of TCR clone 63868 (TRAV30, TRAJ26)
CGTEIVSYGQNFVF

SEQ ID NO: 127736 - protein, 13 aa, Homo sapiens
  CDR3 for beta chain variable domain of TCR clone 63868 (TRBV19, TRBJ1-3)
YASRLSLGNTIYF

SEQ ID NO: 127737 - protein, 14 aa, Homo sapiens
  CDR3 for alpha chain variable domain of TCR clone 63869 (TRAV2, TRAJ9)
CAVEDRSGGFKTIF

SEQ ID NO: 127738 - protein, 14 aa, Homo sapiens
  CDR3 for beta chain variable domain of TCR clone 63869 (TRBV5-4, TRBJ1-1)
CASSLDSRRDEAFF

SEQ ID NO: 127739 - protein, 14 aa, Homo sapiens
  CDR3 for alpha chain variable domain of TCR clone 63870 (TRAV12-2, TRAJ13)
CAVEETGGYQKVTF

SEQ ID NO: 127740 - protein, 15 aa, Homo sapiens
  CDR3 for beta chain variable domain of TCR clone 63870 (TRBV27, TRBJ2-1)
CASSNGGGSSNEQFF

SEQ ID NO: 127741 - protein, 14 aa, Homo sapiens
  CDR3 for alpha chain variable domain of TCR clone 63871 (TRAV3, TRAJ28)
CAVRRGAGSYQLTF

SEQ ID NO: 127742 - protein, 15 aa, Homo sapiens
  CDR3 for beta chain variable domain of TCR clone 63871 (TRBV28, TRBJ2-1)
CASSIIAGGRSEQFF

SEQ ID NO: 127743 - protein, 16 aa, Homo sapiens
  CDR3 for alpha chain variable domain of TCR clone 63872 (TRAV16, TRAJ4)
CALSRMFSGGYNKLIF

SEQ ID NO: 127744 - protein, 12 aa, Homo sapiens
  CDR3 for beta chain variable domain of TCR clone 63872 (TRBV12-4, TRBJ1-3)
CASSFSGNTIYF

SEQ ID NO: 127745 - protein, 14 aa, Homo sapiens
  CDR3 for alpha chain variable domain of TCR clone 63873 (TRAV12-1, TRAJ30)
CVVNIGGRDDKIIF

SEQ ID NO: 127746 - protein, 14 aa, Homo sapiens
  CDR3 for beta chain variable domain of TCR clone 63873 (TRBV7-3, TRBJ2-1)
CASSLAGGTNEQFF

SEQ ID NO: 127747 - protein, 11 aa, Homo sapiens
  CDR3 for alpha chain variable domain of TCR clone 63874 (TRAV13-1, TRAJ39)
CASHAGNMLTF

SEQ ID NO: 127748 - protein, 13 aa, Homo sapiens
  CDR3 for beta chain variable domain of TCR clone 63874 (TRBV7-9, TRBJ1-2)
CASSLKQNYGYTF

SEQ ID NO: 127749 - protein, 15 aa, Homo sapiens
  CDR3 for alpha chain variable domain of TCR clone 63875 (TRAV26-1, TRAJ39)
CIVRDGSNAGNMLTF

SEQ ID NO: 127750 - protein, 14 aa, Homo sapiens
  CDR3 for beta chain variable domain of TCR clone 63875 (TRBV10-3, TRBJ1-2)
YAIRAGTGDYGYTF

SEQ ID NO: 127751 - protein, 11 aa, Homo sapiens
  CDR3 for alpha chain variable domain of TCR clone 63876 (TRAV13-1, TRAJ15)
CAATPGTALTF

SEQ ID NO: 127752 - protein, 13 aa, Homo sapiens
  CDR3 for beta chain variable domain of TCR clone 63876 (TRBV7-2, TRBJ2-1)
CASGLGVYNEQFF

SEQ ID NO: 127753 - protein, 15 aa, Homo sapiens
  CDR3 for alpha chain variable domain of TCR clone 63877 (TRAV3, TRAJ5)
CAVRDRKTGRRALTF

SEQ ID NO: 127754 - protein, 16 aa, Homo sapiens
  CDR3 for beta chain variable domain of TCR clone 63877 (TRBV4-1, TRBJ2-3)
CASSQSTSGAEDTQYF

SEQ ID NO: 127755 - protein, 16 aa, Homo sapiens
  CDR3 for alpha chain variable domain of TCR clone 63878 (TRAV3, TRAJ10)
CAVRDMRAGGGNKLTF

SEQ ID NO: 127756 - protein, 14 aa, Homo sapiens
  CDR3 for beta chain variable domain of TCR clone 63878 (TRBV7-3, TRBJ1-1)
CASSLKGGNTEAFF

SEQ ID NO: 127757 - protein, 14 aa, Homo sapiens
  CDR3 for alpha chain variable domain of TCR clone 63879 (TRAV13-1, TRAJ9)
CAASALTGGFKTIF

SEQ ID NO: 127758 - protein, 13 aa, Homo sapiens
  CDR3 for beta chain variable domain of TCR clone 63879 (TRBV20-1, TRBJ1-1)
CSAGTVRNTEAFF

SEQ ID NO: 127759 - protein, 15 aa, Homo sapiens
  CDR3 for alpha chain variable domain of TCR clone 63880 (TRAV8-2, TRAJ40)
CVVLGTASGTYKYIF

SEQ ID NO: 127760 - protein, 16 aa, Homo sapiens
  CDR3 for beta chain variable domain of TCR clone 63880 (TRBV7-3, TRBJ2-1)
CASSLEGYRSYNEQFF

SEQ ID NO: 127761 - protein, 16 aa, Homo sapiens
  CDR3 for alpha chain variable domain of TCR clone 63881 (TRAV30, TRAJ24)
CGTEIVDADSWGKFQF

SEQ ID NO: 127762 - protein, 14 aa, Homo sapiens
  CDR3 for beta chain variable domain of TCR clone 63881 (TRBV3-1, TRBJ2-5)
CASSQGPDQETQYF

SEQ ID NO: 127763 - protein, 15 aa, Homo sapiens
  CDR3 for alpha chain variable domain of TCR clone 63882 (TRAV26-1, TRAJ29)
CIVRVEGSGNTPLVF

SEQ ID NO: 127764 - protein, 15 aa, Homo sapiens
  CDR3 for beta chain variable domain of TCR clone 63882 (TRBV12-4, TRBJ1-1)
CQQQDRVVANTGAFF

SEQ ID NO: 127765 - protein, 15 aa, Homo sapiens
  CDR3 for alpha chain variable domain of TCR clone 63883 (TRAV26-1, TRAJ22)
CIVRVSFWFCKATDL

SEQ ID NO: 127766 - protein, 13 aa, Homo sapiens
  CDR3 for beta chain variable domain of TCR clone 63883 (TRBV7-9, TRBJ1-2)
CASSFKQNYGYTF

SEQ ID NO: 127767 - protein, 19 aa, Homo sapiens
  CDR3 for alpha chain variable domain of TCR clone 63884 (TRAV26-1, TRAJ28)
CIVRVAHAYSGAGSYQLTF

SEQ ID NO: 127768 - protein, 13 aa, Homo sapiens
  CDR3 for beta chain variable domain of TCR clone 63884 (TRBV7-3, TRBJ1-1)
CASSQDWGAEAFF

SEQ ID NO: 127769 - protein, 12 aa, Homo sapiens
  CDR3 for alpha chain variable domain of TCR clone 63885 (TRAV27, TRAJ13)
CSGVRGYQKVTF

SEQ ID NO: 127770 - protein, 16 aa, Homo sapiens
  CDR3 for beta chain variable domain of TCR clone 63885 (TRBV28, TRBJ2-1)
CASSSSYSGSLNEQFF

SEQ ID NO: 127771 - protein, 12 aa, Homo sapiens
  CDR3 for alpha chain variable domain of TCR clone 63886 (TRAV12-1, TRAJ6)
CVVSERSYIPTF

SEQ ID NO: 127772 - protein, 21 aa, Homo sapiens
  CDR3 for beta chain variable domain of TCR clone 63886 (TRBV7-3, TRBJ2-1)
CASSLWPSGSPVLRARDTAHR

SEQ ID NO: 127773 - protein, 14 aa, Homo sapiens
  CDR3 for alpha chain variable domain of TCR clone 63887 (TRAV1-2, TRAJ8)
CAVREDTGFQKLVF

SEQ ID NO: 127774 - protein, 16 aa, Homo sapiens
  CDR3 for beta chain variable domain of TCR clone 63887 (TRBV12-5, TRBJ2-5)
CASGPRTSGNQEAQYF

SEQ ID NO: 127775 - protein, 14 aa, Homo sapiens
  CDR3 for alpha chain variable domain of TCR clone 63888 (TRAV23/DV6, TRAJ27)
CAASRDTNAGKSTF

SEQ ID NO: 127776 - protein, 13 aa, Homo sapiens
  CDR3 for beta chain variable domain of TCR clone 63888 (TRBV11-2, TRBJ1-5)
CASSSGGNQPQHF

SEQ ID NO: 127777 - protein, 16 aa, Homo sapiens
  CDR3 for alpha chain variable domain of TCR clone 63889 (TRAV30, TRAJ24)
CCTEIVDADSWGKFQF

SEQ ID NO: 127778 - protein, 15 aa, Homo sapiens
  CDR3 for beta chain variable domain of TCR clone 63889 (TRBV20-1, TRBJ2-7)
CSARDRVSGMDEQYF

SEQ ID NO: 127779 - protein, 11 aa, Homo sapiens
  CDR3 for alpha chain variable domain of TCR clone 63890 (TRAV4, TRAJ23)
CLVAPGGKLIF

SEQ ID NO: 127780 - protein, 15 aa, Homo sapiens
  CDR3 for beta chain variable domain of TCR clone 63890 (TRBV7-2, TRBJ2-1)
CASSFQAEEYNEQFF

SEQ ID NO: 127781 - protein, 15 aa, Homo sapiens
  CDR3 for alpha chain variable domain of TCR clone 63891 (TRAV12-3, TRAJ6)
CAMSPASGGSYIPTF

SEQ ID NO: 127782 - protein, 14 aa, Homo sapiens
  CDR3 for beta chain variable domain of TCR clone 63891 (TRBV4-2, TRBJ2-1)
CASGLDRAYNEQFF

SEQ ID NO: 127783 - protein, 13 aa, Homo sapiens
  CDR3 for alpha chain variable domain of TCR clone 63892 (TRAV26-1, TRAJ41)
CIVRINSGYALNL

SEQ ID NO: 127784 - protein, 13 aa, Homo sapiens
  CDR3 for beta chain variable domain of TCR clone 63892 (TRBV20-1, TRBJ1-5)
CSATAAGGQPQHF

SEQ ID NO: 127785 - protein, 16 aa, Homo sapiens
  CDR3 for alpha chain variable domain of TCR clone 63893 (TRAV12-3, TRAJ10)
CAMKKGTTGGGNKLTF

SEQ ID NO: 127786 - protein, 12 aa, Homo sapiens
  CDR3 for beta chain variable domain of TCR clone 63893 (TRBV20-1, TRBJ2-7)
CSAITPTKEQYF

SEQ ID NO: 127787 - protein, 14 aa, Homo sapiens
  CDR3 for alpha chain variable domain of TCR clone 63894 (TRAV12-2, TRAJ5)
CAVNRSTGRRALTF

SEQ ID NO: 127788 - protein, 14 aa, Homo sapiens
  CDR3 for beta chain variable domain of TCR clone 63894 (TRBV25-1, TRBJ1-1)
CASTHLGGNTEAFF

SEQ ID NO: 127789 - protein, 14 aa, Homo sapiens
  CDR3 for alpha chain variable domain of TCR clone 63895 (TRAV12-2, TRAJ53)
CAVKGGGSNYKLTF

SEQ ID NO: 127790 - protein, 15 aa, Homo sapiens
  CDR3 for beta chain variable domain of TCR clone 63895 (TRBV11-2, TRBJ2-1)
CASSKNRGLIYEQFF

SEQ ID NO: 127791 - protein, 12 aa, Homo sapiens
  CDR3 for alpha chain variable domain of TCR clone 63896 (TRAV12-3, TRAJ17)
CAMTLTGNKLTF

SEQ ID NO: 127792 - protein, 16 aa, Homo sapiens
  CDR3 for beta chain variable domain of TCR clone 63896 (TRBV19, TRBJ1-6)
CASSVAPVAGNSPLHF

SEQ ID NO: 127793 - protein, 15 aa, Homo sapiens
  CDR3 for alpha chain variable domain of TCR clone 63897 (TRAV8-3, TRAJ27)
CAVGPSKTNAGKATF

SEQ ID NO: 127794 - protein, 14 aa, Homo sapiens
  CDR3 for beta chain variable domain of TCR clone 63897 (TRBV11-2, TRBJ2-3)
CASSRLARTDTQYF

SEQ ID NO: 127795 - protein, 14 aa, Homo sapiens
  CDR3 for alpha chain variable domain of TCR clone 63898 (TRAV17, TRAJ15)
CATTTNQAGTALIF

SEQ ID NO: 127796 - protein, 16 aa, Homo sapiens
  CDR3 for beta chain variable domain of TCR clone 63898 (TRBV4-1, TRBJ2-7)
CASSRGDTLNSYEQYF

SEQ ID NO: 127797 - protein, 15 aa, Homo sapiens
  CDR3 for alpha chain variable domain of TCR clone 63899 (TRAV25, TRAJ53)
CAATGGGGSNYKLTF

SEQ ID NO: 127798 - protein, 14 aa, Homo sapiens
  CDR3 for beta chain variable domain of TCR clone 63899 (TRBV19, TRBJ2-7)
CASSIFAGTYEQYF

SEQ ID NO: 127799 - protein, 13 aa, Homo sapiens
  CDR3 for alpha chain variable domain of TCR clone 63900 (TRAV2, TRAJ15)
CAVASQAGTALIF

SEQ ID NO: 127800 - protein, 20 aa, Homo sapiens
  CDR3 for beta chain variable domain of TCR clone 63900 (TRBV28, TRBJ2-1)
CASTPIGRSPGLAGGNEQFF

SEQ ID NO: 127801 - protein, 16 aa, Homo sapiens
  CDR3 for alpha chain variable domain of TCR clone 63901 (TRAV12-3, TRAJ53)
CAMSPGSGGSTYKLTF

SEQ ID NO: 127802 - protein, 16 aa, Homo sapiens
  CDR3 for beta chain variable domain of TCR clone 63901 (TRBV4-2, TRBJ1-1)
CASSQAGFGMNTEAFF

SEQ ID NO: 127803 - protein, 14 aa, Homo sapiens
  CDR3 for alpha chain variable domain of TCR clone 63902 (TRAV13-1, TRAJ26)
CAASSAHYGQNFVF

SEQ ID NO: 127804 - protein, 17 aa, Homo sapiens
  CDR3 for beta chain variable domain of TCR clone 63902 (TRBV25-1, TRBJ2-5)
CAGSRRGGRGGQETQYF

SEQ ID NO: 127805 - protein, 16 aa, Homo sapiens
  CDR3 for alpha chain variable domain of TCR clone 63903 (TRAV3, TRAJ37)
CAVRGKGSGNTGKLIF

SEQ ID NO: 127806 - protein, 11 aa, Homo sapiens
  CDR3 for beta chain variable domain of TCR clone 63903 (TRBV6-3, TRBJ2-3)
CATGQADTQYF

SEQ ID NO: 127807 - protein, 20 aa, Homo sapiens
  CDR3 for alpha chain variable domain of TCR clone 63904 (TRAV26-1, TRAJ42)
CCVLLHRQTYYGGNQGNLIF

SEQ ID NO: 127808 - protein, 16 aa, Homo sapiens
  CDR3 for beta chain variable domain of TCR clone 63904 (TRBV7-3, TRBJ2-2)
CASSLKRGTLSGELFF

SEQ ID NO: 127809 - protein, 12 aa, Homo sapiens
  CDR3 for alpha chain variable domain of TCR clone 63905 (TRAV16, TRAJ10)
CSLTGGGNKLTF

SEQ ID NO: 127810 - protein, 15 aa, Homo sapiens
  CDR3 for beta chain variable domain of TCR clone 63905 (TRBV6-3, TRBJ2-7)
CASSSPGTVFYEQYF

SEQ ID NO: 127811 - protein, 14 aa, Homo sapiens
  CDR3 for alpha chain variable domain of TCR clone 63906 (TRAV8-1, TRAJ23)
CAVGTYNQGGKLIF

SEQ ID NO: 127812 - protein, 16 aa, Homo sapiens
  CDR3 for beta chain variable domain of TCR clone 63906 (TRBV18, TRBJ1-5)
CASSPSTGNSNQTQHF

SEQ ID NO: 127813 - protein, 15 aa, Homo sapiens
  CDR3 for alpha chain variable domain of TCR clone 63907 (TRAV3, TRAJ9)
CAVRARNTGGFKTIF

SEQ ID NO: 127814 - protein, 13 aa, Homo sapiens
  CDR3 for beta chain variable domain of TCR clone 63907 (TRBV7-9, TRBJ1-2)
CASSLKQNYGYTF

SEQ ID NO: 127815 - protein, 16 aa, Homo sapiens
  CDR3 for alpha chain variable domain of TCR clone 63908 (TRAV12-2, TRAJ32)
CAVNMNYGGATNKPIF

SEQ ID NO: 127816 - protein, 16 aa, Homo sapiens
  CDR3 for beta chain variable domain of TCR clone 63908 (TRBV7-8, TRBJ2-3)
CASSTEGQRETDTQYF

SEQ ID NO: 127817 - protein, 17 aa, Homo sapiens
  CDR3 for alpha chain variable domain of TCR clone 63909 (TRAV38-1, TRAJ56)
CAFMRTLDTGANSKLTF

SEQ ID NO: 127818 - protein, 13 aa, Homo sapiens
  CDR3 for beta chain variable domain of TCR clone 63909 (TRBV7-9, TRBJ1-2)
CASSLKQNYGYTF

SEQ ID NO: 127819 - protein, 12 aa, Homo sapiens
  CDR3 for alpha chain variable domain of TCR clone 63910 (TRAV1-1, TRAJ8)
CAGGTGFQKLVF

SEQ ID NO: 127820 - protein, 13 aa, Homo sapiens
  CDR3 for beta chain variable domain of TCR clone 63910 (TRBV20-1, TRBJ1-6)
CSAPLGVGSPLHF

SEQ ID NO: 127821 - protein, 14 aa, Homo sapiens
  CDR3 for alpha chain variable domain of TCR clone 63911 (TRAV1-2, TRAJ16)
CAVNRFSDGQKLLF

SEQ ID NO: 127822 - protein, 11 aa, Homo sapiens
  CDR3 for beta chain variable domain of TCR clone 63911 (TRBV13, TRBJ2-3)
CASGNADTQYF

SEQ ID NO: 127823 - protein, 13 aa, Homo sapiens
  CDR3 for alpha chain variable domain of TCR clone 63912 (TRAV3, TRAJ36)
CAVRDTGANNLFF

SEQ ID NO: 127824 - protein, 15 aa, Homo sapiens
  CDR3 for beta chain variable domain of TCR clone 63912 (TRBV24-1, TRBJ2-1)
CATGGSGGFYNEQFF

SEQ ID NO: 127825 - protein, 14 aa, Homo sapiens
  CDR3 for alpha chain variable domain of TCR clone 63913 (TRAV12-2, TRAJ13)
CAVKKAGGYQKVTF

SEQ ID NO: 127826 - protein, 14 aa, Homo sapiens
  CDR3 for beta chain variable domain of TCR clone 63913 (TRBV12-5, TRBJ2-5)
CASGSRTHQETQYF

SEQ ID NO: 127827 - protein, 14 aa, Homo sapiens
  CDR3 for alpha chain variable domain of TCR clone 63914 (TRAV1-2, TRAJ8)
CAVREDTGFQKIVF

SEQ ID NO: 127828 - protein, 15 aa, Homo sapiens
  CDR3 for beta chain variable domain of TCR clone 63914 (TRBV7-9, TRBJ1-6)
CASSSPGRGNSPLHF

SEQ ID NO: 127829 - protein, 17 aa, Homo sapiens
  CDR3 for alpha chain variable domain of TCR clone 63915 (TRAV3, TRAJ6)
CAVRDGPRAGGSYIPTF

SEQ ID NO: 127830 - protein, 20 aa, Homo sapiens
  CDR3 for beta chain variable domain of TCR clone 63915 (TRBV28, TRBJ2-1)
CASTSIGRSPGLAGGNEQFF

SEQ ID NO: 127831 - protein, 15 aa, Homo sapiens
  CDR3 for alpha chain variable domain of TCR clone 63916 (TRAV26-1, TRAJ56)
CIVRVATGANSKLTF

SEQ ID NO: 127832 - protein, 15 aa, Homo sapiens
  CDR3 for beta chain variable domain of TCR clone 63916 (TRBV27, TRBJ2-7)
CASGPQREGQREQYF

SEQ ID NO: 127833 - protein, 16 aa, Homo sapiens
  CDR3 for alpha chain variable domain of TCR clone 63917 (TRAV21, TRAJ33)
CAVSPASMDSNYQLIW

SEQ ID NO: 127834 - protein, 17 aa, Homo sapiens
  CDR3 for beta chain variable domain of TCR clone 63917 (TRBV2, TRBJ1-4)
CAGSKRELTQGEEKLFF

SEQ ID NO: 127835 - protein, 18 aa, Homo sapiens
  CDR3 for alpha chain variable domain of TCR clone 63918 (TRAV21, TRAJ52)
CAVRPSPAGGTSYGKLTF

SEQ ID NO: 127836 - protein, 17 aa, Homo sapiens
  CDR3 for beta chain variable domain of TCR clone 63918 (TRBV13, TRBJ2-3)
CASSLSRVAGGTNTQYF

SEQ ID NO: 127837 - protein, 13 aa, Homo sapiens
  CDR3 for alpha chain variable domain of TCR clone 63919 (TRAV8-1, TRAJ30)
CAVMMNRDDKIIF

SEQ ID NO: 127838 - protein, 14 aa, Homo sapiens
  CDR3 for beta chain variable domain of TCR clone 63919 (TRBV7-2, TRBJ1-6)
CASSLQGANSPLHF

SEQ ID NO: 127839 - protein, 15 aa, Homo sapiens
  CDR3 for alpha chain variable domain of TCR clone 63920 (TRAV21, TRAJ52)
CAVRGGGTSYGKLTF

SEQ ID NO: 127840 - protein, 13 aa, Homo sapiens
  CDR3 for beta chain variable domain of TCR clone 63920 (TRBV4-1, TRBJ2-5)
CASSQEVQETQYF

SEQ ID NO: 127841 - protein, 16 aa, Homo sapiens
  CDR3 for alpha chain variable domain of TCR clone 63921 (TRAV20, TRAJ54)
CAVQRVLIQGAQKLVF

SEQ ID NO: 127842 - protein, 15 aa, Homo sapiens
  CDR3 for beta chain variable domain of TCR clone 63921 (TRBV7-3, TRBJ2-1)
CASSPTGGGEVEQFF

SEQ ID NO: 127843 - protein, 13 aa, Homo sapiens
  CDR3 for alpha chain variable domain of TCR clone 63922 (TRAV12-1, TRAJ40)
CVVPTSGTYKYIF

SEQ ID NO: 127844 - protein, 18 aa, Homo sapiens
  CDR3 for beta chain variable domain of TCR clone 63922 (TRBV7-6, TRBJ2-1)
CACSPRTSGMSSYNEQFF

SEQ ID NO: 127845 - protein, 13 aa, Homo sapiens
  CDR3 for alpha chain variable domain of TCR clone 63923 (TRAV21, TRAJ45)
CAVMGGGADGLTF

SEQ ID NO: 127846 - protein, 14 aa, Homo sapiens
  CDR3 for beta chain variable domain of TCR clone 63923 (TRBV12-5, TRBJ2-5)
CASGSRTHQETQYF

SEQ ID NO: 127847 - protein, 13 aa, Homo sapiens
  CDR3 for alpha chain variable domain of TCR clone 63924 (TRAV12-3, TRAJ9)
CAMSADGGFKTIF

SEQ ID NO: 127848 - protein, 16 aa, Homo sapiens
  CDR3 for beta chain variable domain of TCR clone 63924 (TRBV7-9, TRBJ2-3)
CASSLDYPDLTDTQYF

SEQ ID NO: 127849 - protein, 14 aa, Homo sapiens
  CDR3 for alpha chain variable domain of TCR clone 63925 (TRAV12-3, TRAJ57)
CAMSAWGGSEKLVF

SEQ ID NO: 127850 - protein, 14 aa, Homo sapiens
  CDR3 for beta chain variable domain of TCR clone 63925 (TRBV18, TRBJ2-5)
CASSPGGSQETQYF

SEQ ID NO: 127851 - protein, 14 aa, Homo sapiens
  CDR3 for alpha chain variable domain of TCR clone 63926 (TRAV17, TRAJ6)
CATPAMGGSYIPTF

SEQ ID NO: 127852 - protein, 12 aa, Homo sapiens
  CDR3 for beta chain variable domain of TCR clone 63926 (TRBV6-3, TRBJ2-7)
CASSRTPYEQYF

SEQ ID NO: 127853 - protein, 12 aa, Homo sapiens
  CDR3 for alpha chain variable domain of TCR clone 63927 (TRAV21, TRAJ42)
CAVGGSQRNLIF

SEQ ID NO: 127854 - protein, 14 aa, Homo sapiens
  CDR3 for beta chain variable domain of TCR clone 63927 (TRBV12-4, TRBJ1-1)
CASSLGTGGTEAFF

SEQ ID NO: 127855 - protein, 13 aa, Homo sapiens
  CDR3 for alpha chain variable domain of TCR clone 63928 (TRAV27, TRAJ29)
CAGAHSGNTPLVF

SEQ ID NO: 127856 - protein, 13 aa, Homo sapiens
  CDR3 for beta chain variable domain of TCR clone 63928 (TRBV11-2, TRBJ2-5)
CASSFSSQETQYF

SEQ ID NO: 127857 - protein, 13 aa, Homo sapiens
  CDR3 for alpha chain variable domain of TCR clone 63929 (TRAV17, TRAJ21)
CATDGSNFNKFYF

SEQ ID NO: 127858 - protein, 13 aa, Homo sapiens
  CDR3 for beta chain variable domain of TCR clone 63929 (TRBV11-3, TRBJ1-1)
CASTGSLNTEAFF

SEQ ID NO: 127859 - protein, 14 aa, Homo sapiens
  CDR3 for alpha chain variable domain of TCR clone 63930 (TRAV16, TRAJ39)
CALSKNNAGNMLTF

SEQ ID NO: 127860 - protein, 13 aa, Homo sapiens
  CDR3 for beta chain variable domain of TCR clone 63930 (TRBV25-1, TRBJ1-1)
CQHPPGGNTEAFF

SEQ ID NO: 127861 - protein, 16 aa, Homo sapiens
  CDR3 for alpha chain variable domain of TCR clone 63931 (TRAV3, TRAJ21)
CAVRDIERGNFNKFYF

SEQ ID NO: 127862 - protein, 13 aa, Homo sapiens
  CDR3 for beta chain variable domain of TCR clone 63931 (TRBV4-2, TRBJ1-1)
CASSQAGNTEAFF

SEQ ID NO: 127863 - protein, 13 aa, Homo sapiens
  CDR3 for alpha chain variable domain of TCR clone 63932 (TRAV12-2, TRAJ12)
CAVNGDSSYKLIF

SEQ ID NO: 127864 - protein, 19 aa, Homo sapiens
  CDR3 for beta chain variable domain of TCR clone 63932 (TRBV19, TRBJ2-5)
CASSIGQVTDFFLGETQYF

SEQ ID NO: 127865 - protein, 15 aa, Homo sapiens
  CDR3 for alpha chain variable domain of TCR clone 63933 (TRAV27, TRAJ38)
CAARRNAGNNRKLSW

SEQ ID NO: 127866 - protein, 13 aa, Homo sapiens
  CDR3 for beta chain variable domain of TCR clone 63933 (TRBV28, TRBJ2-5)
CAGVSRGEETQYF

SEQ ID NO: 127867 - protein, 18 aa, Homo sapiens
  CDR3 for alpha chain variable domain of TCR clone 63934 (TRAV21, TRAJ52)
CAVRPSPAGGTSYGKLTF

SEQ ID NO: 127868 - protein, 13 aa, Homo sapiens
  CDR3 for beta chain variable domain of TCR clone 63934 (TRBV4-1, TRBJ1-1)
CASSRKMNTEAFF

SEQ ID NO: 127869 - protein, 13 aa, Homo sapiens
  CDR3 for alpha chain variable domain of TCR clone 63935 (TRAV13-1, TRAJ6)
CAASKGGNYIPTF

SEQ ID NO: 127870 - protein, 14 aa, Homo sapiens
  CDR3 for beta chain variable domain of TCR clone 63935 (TRBV7-2, TRBJ2-1)
CASSLGVGYNEQFF

SEQ ID NO: 127871 - protein, 14 aa, Homo sapiens
  CDR3 for alpha chain variable domain of TCR clone 63936 (TRAV12-3, TRAJ29)
CAMILLSGKTPLVF

SEQ ID NO: 127872 - protein, 16 aa, Homo sapiens
  CDR3 for beta chain variable domain of TCR clone 63936 (TRBV28, TRBJ2-7)
CASSSGTSGRGYEQYF

SEQ ID NO: 127873 - protein, 16 aa, Homo sapiens
  CDR3 for alpha chain variable domain of TCR clone 63937 (TRAV3, TRAJ37)
CAVRPHGSGNTGKLIF

SEQ ID NO: 127874 - protein, 15 aa, Homo sapiens
  CDR3 for beta chain variable domain of TCR clone 63937 (TRBV7-2, TRBJ1-1)
CASSPQGGANTEAFF

SEQ ID NO: 127875 - protein, 19 aa, Homo sapiens
  CDR3 for alpha chain variable domain of TCR clone 63938 (TRAV25, TRAJ43)
TATQTTYVGTYFCAVFMRF

SEQ ID NO: 127876 - protein, 13 aa, Homo sapiens
  CDR3 for beta chain variable domain of TCR clone 63938 (TRBV7-9, TRBJ1-2)
CASSLKQNYGYTF

SEQ ID NO: 127877 - protein, 16 aa, Homo sapiens
  CDR3 for alpha chain variable domain of TCR clone 63939 (TRAV8-3, TRAJ13)
CAVGAYPSGGYQKVTF

SEQ ID NO: 127878 - protein, 14 aa, Homo sapiens
  CDR3 for beta chain variable domain of TCR clone 63939 (TRBV18, TRBJ2-5)
RASSPRASSETQYF

SEQ ID NO: 127879 - protein, 14 aa, Homo sapiens
  CDR3 for alpha chain variable domain of TCR clone 63940 (TRAV1-2, TRAJ8)
CAVREDTGFQKPVF

SEQ ID NO: 127880 - protein, 15 aa, Homo sapiens
  CDR3 for beta chain variable domain of TCR clone 63940 (TRBV7-9, TRBJ2-2)
CASGPLDTFPGELFF

SEQ ID NO: 127881 - protein, 13 aa, Homo sapiens
  CDR3 for alpha chain variable domain of TCR clone 63941 (TRAV12-2, TRAJ39)
CAVNNNAGNMLTF

SEQ ID NO: 127882 - protein, 15 aa, Homo sapiens
  CDR3 for beta chain variable domain of TCR clone 63941 (TRBV9, TRBJ1-6)
CASSVAGTGDSPLHF

SEQ ID NO: 127883 - protein, 17 aa, Homo sapiens
  CDR3 for alpha chain variable domain of TCR clone 63942 (TRAV38-2/DV8, TRAJ45)
CAYRSRYSGGGADGLTF

SEQ ID NO: 127884 - protein, 15 aa, Homo sapiens
  CDR3 for beta chain variable domain of TCR clone 63942 (TRBV19, TRBJ2-1)
CASIKGRGPYNEQLF

SEQ ID NO: 127885 - protein, 18 aa, Homo sapiens
  CDR3 for alpha chain variable domain of TCR clone 63943 (TRAV12-3, TRAJ52)
CAMSRTNAGGTSYGKLTF

SEQ ID NO: 127886 - protein, 17 aa, Homo sapiens
  CDR3 for beta chain variable domain of TCR clone 63943 (TRBV7-3, TRBJ2-3)
CASSLMKRMRGADKQYF

SEQ ID NO: 127887 - protein, 11 aa, Homo sapiens
  CDR3 for alpha chain variable domain of TCR clone 63944 (TRAV1-2, TRAJ31)
CAVNNNARLMF

SEQ ID NO: 127888 - protein, 15 aa, Homo sapiens
  CDR3 for beta chain variable domain of TCR clone 63944 (TRBV28, TRBJ2-1)
CASSIIAGGRSELFF

SEQ ID NO: 127889 - protein, 14 aa, Homo sapiens
  CDR3 for alpha chain variable domain of TCR clone 63945 (TRAV12-2, TRAJ45)
CAVYSGGGADGLTF

SEQ ID NO: 127890 - protein, 14 aa, Homo sapiens
  CDR3 for beta chain variable domain of TCR clone 63945 (TRBV6-5, TRBJ1-2)
CASTRGGGSDGYAF

SEQ ID NO: 127891 - protein, 13 aa, Homo sapiens
  CDR3 for alpha chain variable domain of TCR clone 63946 (TRAV20, TRAJ48)
CAVQGVGNEKLTF

SEQ ID NO: 127892 - protein, 19 aa, Homo sapiens
  CDR3 for beta chain variable domain of TCR clone 63946 (TRBV2, TRBJ2-2)
CASSQPGLGGGGNTGELFF

SEQ ID NO: 127893 - protein, 21 aa, Homo sapiens
  CDR3 for alpha chain variable domain of TCR clone 63947 (TRAV1-1, TRAJ6)
CLLLLRCERLGRTGGSYIPTF

SEQ ID NO: 127894 - protein, 15 aa, Homo sapiens
  CDR3 for beta chain variable domain of TCR clone 63947 (TRBV7-2, TRBJ2-3)
CASSLVVRGPDTQYF

SEQ ID NO: 127895 - protein, 11 aa, Homo sapiens
  CDR3 for alpha chain variable domain of TCR clone 63948 (TRAV1-2, TRAJ31)
CAVNNNARLMF

SEQ ID NO: 127896 - protein, 11 aa, Homo sapiens
  CDR3 for beta chain variable domain of TCR clone 63948 (TRBV7-8, TRBJ2-7)
CASSLSLEQYF

SEQ ID NO: 127897 - protein, 11 aa, Homo sapiens
  CDR3 for alpha chain variable domain of TCR clone 63949 (TRAV2, TRAJ33)
CAVESNYQLIW

SEQ ID NO: 127898 - protein, 15 aa, Homo sapiens
  CDR3 for beta chain variable domain of TCR clone 63949 (TRBV19, TRBJ1-1)
SASTSGQIQNTEAFF

SEQ ID NO: 127899 - protein, 13 aa, Homo sapiens
  CDR3 for alpha chain variable domain of TCR clone 63950 (TRAV2, TRAJ40)
CAVVTSGTYKYIF

SEQ ID NO: 127900 - protein, 19 aa, Homo sapiens
  CDR3 for beta chain variable domain of TCR clone 63950 (TRBV7-2, TRBJ2-3)
CASSFLSRNWGGGTDTQYF

SEQ ID NO: 127901 - protein, 15 aa, Homo sapiens
  CDR3 for alpha chain variable domain of TCR clone 63951 (TRAV20, TRAJ43)
CAVQAGKSSNNDMRF

SEQ ID NO: 127902 - protein, 14 aa, Homo sapiens
  CDR3 for beta chain variable domain of TCR clone 63951 (TRBV27, TRBJ2-1)
CASGHLGGGKEQFF

SEQ ID NO: 127903 - protein, 16 aa, Homo sapiens
  CDR3 for alpha chain variable domain of TCR clone 63952 (TRAV27, TRAJ53)
CAAPEGSGGSNYKLTF

SEQ ID NO: 127904 - protein, 14 aa, Homo sapiens
  CDR3 for beta chain variable domain of TCR clone 63952 (TRBV4-3, TRBJ1-5)
CASSQGGQGWPRHF

SEQ ID NO: 127905 - protein, 14 aa, Homo sapiens
  CDR3 for alpha chain variable domain of TCR clone 63953 (TRAV1-2, TRAJ8)
CAVREDTGFQKLVF

SEQ ID NO: 127906 - protein, 15 aa, Homo sapiens
  CDR3 for beta chain variable domain of TCR clone 63953 (TRBV12-4, TRBJ2-5)
CASSPPTGLQETQYV

SEQ ID NO: 127907 - protein, 13 aa, Homo sapiens
  CDR3 for alpha chain variable domain of TCR clone 63954 (TRAV3, TRAJ27)
CAVRPLGAGKSTF

SEQ ID NO: 127908 - protein, 13 aa, Homo sapiens
  CDR3 for beta chain variable domain of TCR clone 63954 (TRBV7-9, TRBJ2-3)
CASNPGSTDTQYF

SEQ ID NO: 127909 - protein, 10 aa, Homo sapiens
  CDR3 for alpha chain variable domain of TCR clone 63955 (TRAV1-2, TRAJ23)
FAGQGGKLIF

SEQ ID NO: 127910 - protein, 16 aa, Homo sapiens
  CDR3 for beta chain variable domain of TCR clone 63955 (TRBV11-2, TRBJ1-1)
CASSLRQGGEHSKAFF

SEQ ID NO: 127911 - protein, 16 aa, Homo sapiens
  CDR3 for alpha chain variable domain of TCR clone 63956 (TRAV17, TRAJ52)
CATSNAGGTSYGKLTF

SEQ ID NO: 127912 - protein, 13 aa, Homo sapiens
  CDR3 for beta chain variable domain of TCR clone 63956 (TRBV27, TRBJ1-6)
CASSVVLVSPLHF

SEQ ID NO: 127913 - protein, 14 aa, Homo sapiens
  CDR3 for alpha chain variable domain of TCR clone 63957 (TRAV13-1, TRAJ13)
CAASRVGGYQKVTF

SEQ ID NO: 127914 - protein, 15 aa, Homo sapiens
  CDR3 for beta chain variable domain of TCR clone 63957 (TRBV19, TRBJ2-1)
CASSSPGVPLDEQFF

SEQ ID NO: 127915 - protein, 14 aa, Homo sapiens
  CDR3 for alpha chain variable domain of TCR clone 63958 (TRAV12-2, TRAJ17)
CAVNIEAAGNKLTF

SEQ ID NO: 127916 - protein, 16 aa, Homo sapiens
  CDR3 for beta chain variable domain of TCR clone 63958 (TRBV20-1, TRBJ2-6)
CSASSQGYDGANVLTF

SEQ ID NO: 127917 - protein, 13 aa, Homo sapiens
  CDR3 for alpha chain variable domain of TCR clone 63959 (TRAV36/DV7, TRAJ33)
CAVDMDSNYQLIW

SEQ ID NO: 127918 - protein, 16 aa, Homo sapiens
  CDR3 for beta chain variable domain of TCR clone 63959 (TRBV15, TRBJ2-3)
CATRLSGGRAPDAQYF

SEQ ID NO: 127919 - protein, 16 aa, Homo sapiens
  CDR3 for alpha chain variable domain of TCR clone 63960 (TRAV22, TRAJ45)
CAVERGKRGGADGLTF

SEQ ID NO: 127920 - protein, 13 aa, Homo sapiens
  CDR3 for beta chain variable domain of TCR clone 63960 (TRBV27, TRBJ1-1)
WASSLSIGAEAFF

SEQ ID NO: 127921 - protein, 11 aa, Homo sapiens
  CDR3 for alpha chain variable domain of TCR clone 63961 (TRAV1-1, TRAJ40)
CAVPGTYKYIF

SEQ ID NO: 127922 - protein, 16 aa, Homo sapiens
  CDR3 for beta chain variable domain of TCR clone 63961 (TRBV7-8, TRBJ2-4)
CASSAERTLAKNIQYF

SEQ ID NO: 127923 - protein, 12 aa, Homo sapiens
  CDR3 for alpha chain variable domain of TCR clone 63962 (TRAV12-3, TRAJ39)
CAMTQASNMLTF

SEQ ID NO: 127924 - protein, 13 aa, Homo sapiens
  CDR3 for beta chain variable domain of TCR clone 63962 (TRBV20-1, TRBJ1-1)
CSAPEGGNTEAFF

SEQ ID NO: 127925 - protein, 16 aa, Homo sapiens
  CDR3 for alpha chain variable domain of TCR clone 63963 (TRAV3, TRAJ10)
CAVRDMRAGGGNKLTF

SEQ ID NO: 127926 - protein, 17 aa, Homo sapiens
  CDR3 for beta chain variable domain of TCR clone 63963 (TRBV28, TRBJ2-3)
CASSPTPAGGRVDTQYF

SEQ ID NO: 127927 - protein, 16 aa, Homo sapiens
  CDR3 for alpha chain variable domain of TCR clone 63964 (TRAV3, TRAJ21)
CAVRDIERGNFNKFYF

SEQ ID NO: 127928 - protein, 16 aa, Homo sapiens
  CDR3 for beta chain variable domain of TCR clone 63964 (TRBV12-4, TRBJ1-5)
CASSRPVGGSNQPQHF

SEQ ID NO: 127929 - protein, 15 aa, Homo sapiens
  CDR3 for alpha chain variable domain of TCR clone 63965 (TRAV26-1, TRAJ42)
FIVRVKGGSQGNLIF

SEQ ID NO: 127930 - protein, 14 aa, Homo sapiens
  CDR3 for beta chain variable domain of TCR clone 63965 (TRBV19, TRBJ2-2)
CATTGHANTGELFY

SEQ ID NO: 127931 - protein, 13 aa, Homo sapiens
  CDR3 for alpha chain variable domain of TCR clone 63966 (TRAV12-1, TRAJ39)
CVALNNAGNMLTF

SEQ ID NO: 127932 - protein, 17 aa, Homo sapiens
  CDR3 for beta chain variable domain of TCR clone 63966 (TRBV6-1, TRBJ2-3)
CASSECVTGGPTDTQYF

SEQ ID NO: 127933 - protein, 10 aa, Homo sapiens
  CDR3 for alpha chain variable domain of TCR clone 63967 (TRAV1-2, TRAJ20)
CALNDYKLSF

SEQ ID NO: 127934 - protein, 15 aa, Homo sapiens
  CDR3 for beta chain variable domain of TCR clone 63967 (TRBV6-3, TRBJ2-7)
CASSSPGTVFYEQYF

SEQ ID NO: 127935 - protein, 13 aa, Homo sapiens
  CDR3 for alpha chain variable domain of TCR clone 63968 (TRAV12-2, TRAJ39)
CAVNNNSGNMLTF

SEQ ID NO: 127936 - protein, 13 aa, Homo sapiens
  CDR3 for beta chain variable domain of TCR clone 63968 (TRBV2, TRBJ1-5)
CATAGPGNQPQHF

SEQ ID NO: 127937 - protein, 13 aa, Homo sapiens
  CDR3 for alpha chain variable domain of TCR clone 63969 (TRAV12-3, TRAJ35)
CAMAIGFGNVLHC

SEQ ID NO: 127938 - protein, 13 aa, Homo sapiens
  CDR3 for beta chain variable domain of TCR clone 63969 (TRBV12-4, TRBJ1-2)
CASSLRQGKGYTF

SEQ ID NO: 127939 - protein, 13 aa, Homo sapiens
  CDR3 for alpha chain variable domain of TCR clone 63970 (TRAV21, TRAJ27)
CAARPGNAGNSTF

SEQ ID NO: 127940 - protein, 14 aa, Homo sapiens
  CDR3 for beta chain variable domain of TCR clone 63970 (TRBV11-2, TRBJ2-7)
CASSLGAGAYEQYF

SEQ ID NO: 127941 - protein, 21 aa, Homo sapiens
  CDR3 for alpha chain variable domain of TCR clone 63971 (TRAV16, TRAJ22)
HLKKPFAQEEDSARYLRQLTF

SEQ ID NO: 127942 - protein, 15 aa, Homo sapiens
  CDR3 for beta chain variable domain of TCR clone 63971 (TRBV7-9, TRBJ1-6)
CASSSPGRGNSPLHF

SEQ ID NO: 127943 - protein, 16 aa, Homo sapiens
  CDR3 for alpha chain variable domain of TCR clone 63972 (TRAV3, TRAJ37)
CAVRGKGSGNTDKLIF

SEQ ID NO: 127944 - protein, 13 aa, Homo sapiens
  CDR3 for beta chain variable domain of TCR clone 63972 (TRBV14, TRBJ2-7)
CASSQDRRYEQYF

SEQ ID NO: 127945 - protein, 15 aa, Homo sapiens
  CDR3 for alpha chain variable domain of TCR clone 63973 (TRAV8-3, TRAJ45)
CASSYSGGGADGLTF

SEQ ID NO: 127946 - protein, 17 aa, Homo sapiens
  CDR3 for beta chain variable domain of TCR clone 63973 (TRBV7-8, TRBJ1-2)
YASSLRPLQGHLYGYTF

SEQ ID NO: 127947 - protein, 23 aa, Homo sapiens
  CDR3 for alpha chain variable domain of TCR clone 63974 (TRAV12-2, TRAJ43)
SLLIRDSQPSDSATYPCAFDMRF

SEQ ID NO: 127948 - protein, 15 aa, Homo sapiens
  CDR3 for beta chain variable domain of TCR clone 63974 (TRBV7-3, TRBJ2-2)
CASSETGQGTGELFF

SEQ ID NO: 127949 - protein, 14 aa, Homo sapiens
  CDR3 for alpha chain variable domain of TCR clone 63975 (TRAV1-2, TRAJ16)
CAVNRFSDGQKLLF

SEQ ID NO: 127950 - protein, 16 aa, Homo sapiens
  CDR3 for beta chain variable domain of TCR clone 63975 (TRBV12-5, TRBJ2-5)
CASGPRTSGNQEAQYF

SEQ ID NO: 127951 - protein, 15 aa, Homo sapiens
  CDR3 for alpha chain variable domain of TCR clone 63976 (TRAV3, TRAJ5)
CAVRDRKTGRRALTF

SEQ ID NO: 127952 - protein, 15 aa, Homo sapiens
  CDR3 for beta chain variable domain of TCR clone 63976 (TRBV7-8, TRBJ2-1)
CASSFADSLYNEQFF

SEQ ID NO: 127953 - protein, 15 aa, Homo sapiens
  CDR3 for alpha chain variable domain of TCR clone 63977 (TRAV16, TRAJ48)
CALFISNFGNEKLTF

SEQ ID NO: 127954 - protein, 14 aa, Homo sapiens
  CDR3 for beta chain variable domain of TCR clone 63977 (TRBV7-2, TRBJ1-1)
CASSFLTGTTEAFF

SEQ ID NO: 127955 - protein, 18 aa, Homo sapiens
  CDR3 for alpha chain variable domain of TCR clone 63978 (TRAV21, TRAJ52)
CAVRPSPAGGTSYGKLTF

SEQ ID NO: 127956 - protein, 15 aa, Homo sapiens
  CDR3 for beta chain variable domain of TCR clone 63978 (TRBV5-7, TRBJ1-5)
CAGSYGKLWDQPQHF

SEQ ID NO: 127957 - protein, 16 aa, Homo sapiens
  CDR3 for alpha chain variable domain of TCR clone 63979 (TRAV23/DV6, TRAJ57)
CAASSTLSPGGSEKLV

SEQ ID NO: 127958 - protein, 14 aa, Homo sapiens
  CDR3 for beta chain variable domain of TCR clone 63979 (TRBV25-1, TRBJ1-1)
CASTHLGGNTEAFF

SEQ ID NO: 127959 - protein, 23 aa, Homo sapiens
  CDR3 for alpha chain variable domain of TCR clone 63980 (TRAV26-1, TRAJ38)
CIAVNAGNNHIQNPDPAVYQLRD

SEQ ID NO: 127960 - protein, 13 aa, Homo sapiens
  CDR3 for beta chain variable domain of TCR clone 63980 (TRBV20-1, TRBJ1-1)
CSARGGGNTEAFF

SEQ ID NO: 127961 - protein, 14 aa, Homo sapiens
  CDR3 for alpha chain variable domain of TCR clone 63981 (TRAV21, TRAJ15)
CAVSLSQAGTALVF

SEQ ID NO: 127962 - protein, 11 aa, Homo sapiens
  CDR3 for beta chain variable domain of TCR clone 63981 (TRBV20-1, TRBJ2-7)
CSARTSYEQYF

SEQ ID NO: 127963 - protein, 10 aa, Homo sapiens
  CDR3 for alpha chain variable domain of TCR clone 63982 (TRAV12-2, TRAJ31)
CAVNNARLMF

SEQ ID NO: 127964 - protein, 15 aa, Homo sapiens
  CDR3 for beta chain variable domain of TCR clone 63982 (TRBV5-1, TRBJ2-1)
CASSPPRAPYNEQFF

SEQ ID NO: 127965 - protein, 12 aa, Homo sapiens
  CDR3 for alpha chain variable domain of TCR clone 63983 (TRAV21, TRAJ33)
CAKMDSNYQLIW

SEQ ID NO: 127966 - protein, 14 aa, Homo sapiens
  CDR3 for beta chain variable domain of TCR clone 63983 (TRBV2, TRBJ2-7)
CGSSLTSGGYEQYF

SEQ ID NO: 127967 - protein, 12 aa, Homo sapiens
  CDR3 for alpha chain variable domain of TCR clone 63984 (TRAV26-1, TRAJ36)
CIVRVRADNLFF

SEQ ID NO: 127968 - protein, 14 aa, Homo sapiens
  CDR3 for beta chain variable domain of TCR clone 63984 (TRBV19, TRBJ2-1)
CASPTFVLSGEQFF

SEQ ID NO: 127969 - protein, 15 aa, Homo sapiens
  CDR3 for alpha chain variable domain of TCR clone 63985 (TRAV34, TRAJ38)
CGADFTPGNNRKLLW

SEQ ID NO: 127970 - protein, 16 aa, Homo sapiens
  CDR3 for beta chain variable domain of TCR clone 63985 (TRBV6-1, TRBJ2-3)
CASSEVIGQGTDTQYF

SEQ ID NO: 127971 - protein, 13 aa, Homo sapiens
  CDR3 for alpha chain variable domain of TCR clone 63986 (TRAV1-2, TRAJ9)
CAALNTVGFKTIF

SEQ ID NO: 127972 - protein, 12 aa, Homo sapiens
  CDR3 for beta chain variable domain of TCR clone 63986 (TRBV11-3, TRBJ1-1)
CASSHRQGEAFF

SEQ ID NO: 127973 - protein, 16 aa, Homo sapiens
  CDR3 for alpha chain variable domain of TCR clone 63987 (TRAV3, TRAJ10)
CAVRDMNAGGGNKLTF

SEQ ID NO: 127974 - protein, 16 aa, Homo sapiens
  CDR3 for beta chain variable domain of TCR clone 63987 (TRBV6-3, TRBJ1-2)
CASSYSRRASNYGDTF

SEQ ID NO: 127975 - protein, 18 aa, Homo sapiens
  CDR3 for alpha chain variable domain of TCR clone 63988 (TRAV12-3, TRAJ52)
CAMSRTNAGGTSYGKLTF

SEQ ID NO: 127976 - protein, 18 aa, Homo sapiens
  CDR3 for beta chain variable domain of TCR clone 63988 (TRBV11-2, TRBJ2-3)
CASSLGGASRGAPNTQYF

SEQ ID NO: 127977 - protein, 15 aa, Homo sapiens
  CDR3 for alpha chain variable domain of TCR clone 63989 (TRAV3, TRAJ4)
CAVRDGTGGYNKLIF

SEQ ID NO: 127978 - protein, 15 aa, Homo sapiens
  CDR3 for beta chain variable domain of TCR clone 63989 (TRBV27, TRBJ2-1)
CASGNGGGSSNEQFF

SEQ ID NO: 127979 - protein, 16 aa, Homo sapiens
  CDR3 for alpha chain variable domain of TCR clone 63990 (TRAV12-1, TRAJ43)
CVVNPHRFGAGTRLTV

SEQ ID NO: 127980 - protein, 13 aa, Homo sapiens
  CDR3 for beta chain variable domain of TCR clone 63990 (TRBV28, TRBJ2-2)
CASIGGLGGELFF

SEQ ID NO: 127981 - protein, 13 aa, Homo sapiens
  CDR3 for alpha chain variable domain of TCR clone 63991 (TRAV2, TRAJ15)
RAVASQAGTALIF

SEQ ID NO: 127982 - protein, 15 aa, Homo sapiens
  CDR3 for beta chain variable domain of TCR clone 63991 (TRBV7-3, TRBJ2-2)
CASSETGQGTGELFF

SEQ ID NO: 127983 - protein, 11 aa, Homo sapiens
  CDR3 for alpha chain variable domain of TCR clone 63992 (TRAV12-1, TRAJ21)
CVVYNFNKSYF

SEQ ID NO: 127984 - protein, 14 aa, Homo sapiens
  CDR3 for beta chain variable domain of TCR clone 63992 (TRBV19, TRBJ2-7)
CASSMGQGAIEQYF

SEQ ID NO: 127985 - protein, 17 aa, Homo sapiens
  CDR3 for alpha chain variable domain of TCR clone 63993 (TRAV3, TRAJ6)
CAVRDGPRAGGSYIPTF

SEQ ID NO: 127986 - protein, 13 aa, Homo sapiens
  CDR3 for beta chain variable domain of TCR clone 63993 (TRBV19, TRBJ2-7)
CACSIDRTYEQYF

SEQ ID NO: 127987 - protein, 12 aa, Homo sapiens
  CDR3 for alpha chain variable domain of TCR clone 63994 (TRAV29/DV5, TRAJ49)
CAATDTGNQFYF

SEQ ID NO: 127988 - protein, 15 aa, Homo sapiens
  CDR3 for beta chain variable domain of TCR clone 63994 (TRBV19, TRBJ1-1)
CASTSGQIQNTEAFF

SEQ ID NO: 127989 - protein, 13 aa, Homo sapiens
  CDR3 for alpha chain variable domain of TCR clone 63995 (TRAV12-2, TRAJ7)
CAVSLYGNNRLAF

SEQ ID NO: 127990 - protein, 16 aa, Homo sapiens
  CDR3 for beta chain variable domain of TCR clone 63995 (TRBV7-3, TRBJ2-2)
CASSLKRGTLSGELFF

SEQ ID NO: 127991 - protein, 14 aa, Homo sapiens
  CDR3 for alpha chain variable domain of TCR clone 63996 (TRAV13-1, TRAJ35)
CAASKGGFGNVLHC

SEQ ID NO: 127992 - protein, 13 aa, Homo sapiens
  CDR3 for beta chain variable domain of TCR clone 63996 (TRBV7-3, TRBJ1-1)
CASSQHWGAEAFF

SEQ ID NO: 127993 - protein, 15 aa, Homo sapiens
  CDR3 for alpha chain variable domain of TCR clone 63997 (TRAV25, TRAJ52)
CAGRPGGTSYGKLTF

SEQ ID NO: 127994 - protein, 13 aa, Homo sapiens
  CDR3 for beta chain variable domain of TCR clone 63997 (TRBV28, TRBJ2-7)
CASTPGLAGEQYF

SEQ ID NO: 127995 - protein, 17 aa, Homo sapiens
  CDR3 for alpha chain variable domain of TCR clone 63998 (TRAV26-1, TRAJ11)
CIVRVGQSNSGYSTLTF

SEQ ID NO: 127996 - protein, 13 aa, Homo sapiens
  CDR3 for beta chain variable domain of TCR clone 63998 (TRBV15, TRBJ1-6)
CATSGGLNSPLHF

SEQ ID NO: 127997 - protein, 18 aa, Homo sapiens
  CDR3 for alpha chain variable domain of TCR clone 63999 (TRAV26-2, TRAJ54)
CILRDVEVGIQGAQKLVF

SEQ ID NO: 127998 - protein, 17 aa, Homo sapiens
  CDR3 for beta chain variable domain of TCR clone 63999 (TRBV20-1, TRBJ1-5)
CSASLSQGQGGNQPQHF

SEQ ID NO: 127999 - protein, 13 aa, Homo sapiens
  CDR3 for alpha chain variable domain of TCR clone 64000 (TRAV21, TRAJ27)
CAARPGNAGKSTF

SEQ ID NO: 128000 - protein, 14 aa, Homo sapiens
  CDR3 for beta chain variable domain of TCR clone 64000 (TRBV7-6, TRBJ2-3)
CASSLGTVTHTQYF

SEQ ID NO: 128001 - protein, 10 aa, Homo sapiens
  CDR3 for alpha chain variable domain of TCR clone 64001 (TRAV26-1, TRAJ22)
CIVSLNFFWF

SEQ ID NO: 128002 - protein, 15 aa, Homo sapiens
  CDR3 for beta chain variable domain of TCR clone 64001 (TRBV4-1, TRBJ2-7)
CASSQQGQGFDEQYF

SEQ ID NO: 128003 - protein, 13 aa, Homo sapiens
  CDR3 for alpha chain variable domain of TCR clone 64002 (TRAV29/DV5, TRAJ31)
CAASRNNNARLMF

SEQ ID NO: 128004 - protein, 12 aa, Homo sapiens
  CDR3 for beta chain variable domain of TCR clone 64002 (TRBV14, TRBJ2-7)
CVSSLYKDEQYF

SEQ ID NO: 128005 - protein, 12 aa, Homo sapiens
  CDR3 for alpha chain variable domain of TCR clone 64003 (TRAV12-3, TRAJ17)
CAMTLTGNKLTF

SEQ ID NO: 128006 - protein, 15 aa, Homo sapiens
  CDR3 for beta chain variable domain of TCR clone 64003 (TRBV20-1, TRBJ2-7)
CSARERVAGMDEQYF

SEQ ID NO: 128007 - protein, 12 aa, Homo sapiens
  CDR3 for alpha chain variable domain of TCR clone 64004 (TRAV13-1, TRAJ48)
CAANFGNEKLTF

SEQ ID NO: 128008 - protein, 13 aa, Homo sapiens
  CDR3 for beta chain variable domain of TCR clone 64004 (TRBV7-3, TRBJ1-1)
CASSQDWGAEALF

SEQ ID NO: 128009 - protein, 17 aa, Homo sapiens
  CDR3 for alpha chain variable domain of TCR clone 64005 (TRAV3, TRAJ42)
CAVRDRDYGGSQGNLIS

SEQ ID NO: 128010 - protein, 13 aa, Homo sapiens
  CDR3 for beta chain variable domain of TCR clone 64005 (TRBV20-1, TRBJ2-5)
CSARRGTGATQYF

SEQ ID NO: 128011 - protein, 17 aa, Homo sapiens
  CDR3 for alpha chain variable domain of TCR clone 64006 (TRAV3, TRAJ12)
CAVRDGGRMDSNYKLIF

SEQ ID NO: 128012 - protein, 12 aa, Homo sapiens
  CDR3 for beta chain variable domain of TCR clone 64006 (TRBV11-2, TRBJ2-2)
CASSLGGGELFF

SEQ ID NO: 128013 - protein, 15 aa, Homo sapiens
  CDR3 for alpha chain variable domain of TCR clone 64007 (TRAV26-1, TRAJ29)
CIVRVEGSGNTPLVF

SEQ ID NO: 128014 - protein, 17 aa, Homo sapiens
  CDR3 for beta chain variable domain of TCR clone 64007 (TRBV28, TRBJ2-5)
CASSRQGGLAGAETQYF

SEQ ID NO: 128015 - protein, 16 aa, Homo sapiens
  CDR3 for alpha chain variable domain of TCR clone 64008 (TRAV23/DV6, TRAJ9)
CAASIGGNTGGFKTIF

SEQ ID NO: 128016 - protein, 16 aa, Homo sapiens
  CDR3 for beta chain variable domain of TCR clone 64008 (TRBV4-2, TRBJ2-7)
CASSQEGLANSYEQYF

SEQ ID NO: 128017 - protein, 11 aa, Homo sapiens
  CDR3 for alpha chain variable domain of TCR clone 64009 (TRAV12-3, TRAJ43)
CAMSVSNVMRF

SEQ ID NO: 128018 - protein, 13 aa, Homo sapiens
  CDR3 for beta chain variable domain of TCR clone 64009 (TRBV20-1, TRBJ1-1)
CSAPLGGGTEAFF

SEQ ID NO: 128019 - protein, 12 aa, Homo sapiens
  CDR3 for alpha chain variable domain of TCR clone 64010 (TRAV2, TRAJ10)
CASTGGGNKLTF

SEQ ID NO: 128020 - protein, 14 aa, Homo sapiens
  CDR3 for beta chain variable domain of TCR clone 64010 (TRBV7-2, TRBJ2-2)
CASRGQGAAGELFL

SEQ ID NO: 128021 - protein, 11 aa, Homo sapiens
  CDR3 for alpha chain variable domain of TCR clone 64011 (TRAV3, TRAJ21)
CAVGNFNKFYF

SEQ ID NO: 128022 - protein, 13 aa, Homo sapiens
  CDR3 for beta chain variable domain of TCR clone 64011 (TRBV10-2, TRBJ2-7)
CASGASGGYEQYF

SEQ ID NO: 128023 - protein, 13 aa, Homo sapiens
  CDR3 for alpha chain variable domain of TCR clone 64012 (TRAV17, TRAJ9)
CATDYTGGFKTIF

SEQ ID NO: 128024 - protein, 16 aa, Homo sapiens
  CDR3 for beta chain variable domain of TCR clone 64012 (TRBV7-7, TRBJ2-1)
CGSSLASGTSYNEQFF

SEQ ID NO: 128025 - protein, 11 aa, Homo sapiens
  CDR3 for alpha chain variable domain of TCR clone 64013 (TRAV12-1, TRAJ43)
CVEYDNNDMSF

SEQ ID NO: 128026 - protein, 16 aa, Homo sapiens
  CDR3 for beta chain variable domain of TCR clone 64013 (TRBV5-4, TRBJ2-1)
CASSLVGSGQDNEQFF

SEQ ID NO: 128027 - protein, 13 aa, Homo sapiens
  CDR3 for alpha chain variable domain of TCR clone 64014 (TRAV13-2, TRAJ48)
CAETDFGNEKLTF

SEQ ID NO: 128028 - protein, 15 aa, Homo sapiens
  CDR3 for beta chain variable domain of TCR clone 64014 (TRBV7-9, TRBJ1-6)
CASSSPGRGNSPLHF

SEQ ID NO: 128029 - protein, 14 aa, Homo sapiens
  CDR3 for alpha chain variable domain of TCR clone 64015 (TRAV3, TRAJ9)
CAVRLNTGGFKTIL

SEQ ID NO: 128030 - protein, 14 aa, Homo sapiens
  CDR3 for beta chain variable domain of TCR clone 64015 (TRBV20-1, TRBJ1-1)
CSAQTRIGGTEAFF

SEQ ID NO: 128031 - protein, 12 aa, Homo sapiens
  CDR3 for alpha chain variable domain of TCR clone 64016 (TRAV12-2, TRAJ43)
CAMNVNNNDMRF

SEQ ID NO: 128032 - protein, 14 aa, Homo sapiens
  CDR3 for beta chain variable domain of TCR clone 64016 (TRBV12-5, TRBJ2-5)
CASGSRTHQETQYF

SEQ ID NO: 128033 - protein, 14 aa, Homo sapiens
  CDR3 for alpha chain variable domain of TCR clone 64017 (TRAV12-3, TRAJ56)
CAMSVTGANSKLTF

SEQ ID NO: 128034 - protein, 15 aa, Homo sapiens
  CDR3 for beta chain variable domain of TCR clone 64017 (TRBV19, TRBJ1-1)
CASTSGQIQNTEAFF

SEQ ID NO: 128035 - protein, 17 aa, Homo sapiens
  CDR3 for alpha chain variable domain of TCR clone 64018 (TRAV38-1, TRAJ45)
CAFMRSHSGGGADGLTF

SEQ ID NO: 128036 - protein, 14 aa, Homo sapiens
  CDR3 for beta chain variable domain of TCR clone 64018 (TRBV11-2, TRBJ2-5)
CASSRTGGIETQYF

SEQ ID NO: 128037 - protein, 12 aa, Homo sapiens
  CDR3 for alpha chain variable domain of TCR clone 64019 (TRAV27, TRAJ35)
CAGADFGNVLHC

SEQ ID NO: 128038 - protein, 16 aa, Homo sapiens
  CDR3 for beta chain variable domain of TCR clone 64019 (TRBV6-1, TRBJ2-1)
YASILRQGSSYNEQFF

SEQ ID NO: 128039 - protein, 13 aa, Homo sapiens
  CDR3 for alpha chain variable domain of TCR clone 64020 (TRAV1-2, TRAJ12)
CAVSMYSSYKLIF

SEQ ID NO: 128040 - protein, 15 aa, Homo sapiens
  CDR3 for beta chain variable domain of TCR clone 64020 (TRBV27, TRBJ2-5)
CASSLIPSGGETQYF

SEQ ID NO: 128041 - protein, 16 aa, Homo sapiens
  CDR3 for alpha chain variable domain of TCR clone 64021 (TRAV12-2, TRAJ43)
CAGDDMRFGAGTRLTV

SEQ ID NO: 128042 - protein, 15 aa, Homo sapiens
  CDR3 for beta chain variable domain of TCR clone 64021 (TRBV6-3, TRBJ2-7)
CASSSPGTVFYEQYF

SEQ ID NO: 128043 - protein, 14 aa, Homo sapiens
  CDR3 for alpha chain variable domain of TCR clone 64022 (TRAV17, TRAJ12)
CAIRPMDSSYKLIF

SEQ ID NO: 128044 - protein, 16 aa, Homo sapiens
  CDR3 for beta chain variable domain of TCR clone 64022 (TRBV3-1, TRBJ2-5)
CASSPGQFNGFGTQYF

SEQ ID NO: 128045 - protein, 13 aa, Homo sapiens
  CDR3 for alpha chain variable domain of TCR clone 64023 (TRAV1-2, TRAJ12)
CAVSMVSSYKLIF

SEQ ID NO: 128046 - protein, 15 aa, Homo sapiens
  CDR3 for beta chain variable domain of TCR clone 64023 (TRBV27, TRBJ2-5)
CASSLIPSGGETQYF

SEQ ID NO: 128047 - protein, 16 aa, Homo sapiens
  CDR3 for alpha chain variable domain of TCR clone 64024 (TRAV12-1, TRAJ42)
CVVTPYYGGSQGNLIF

SEQ ID NO: 128048 - protein, 15 aa, Homo sapiens
  CDR3 for beta chain variable domain of TCR clone 64024 (TRBV4-3, TRBJ2-7)
CASSQGGRGIYERYF

SEQ ID NO: 128049 - protein, 17 aa, Homo sapiens
  CDR3 for alpha chain variable domain of TCR clone 64025 (TRAV3, TRAJ6)
CAVRDGPRAGGSYIPTF

SEQ ID NO: 128050 - protein, 13 aa, Homo sapiens
  CDR3 for beta chain variable domain of TCR clone 64025 (TRBV15, TRBJ2-7)
CATSTTGHYEQYF

SEQ ID NO: 128051 - protein, 15 aa, Homo sapiens
  CDR3 for alpha chain variable domain of TCR clone 64026 (TRAV8-2, TRAJ40)
CVVSDRGSGTYKYIF

SEQ ID NO: 128052 - protein, 14 aa, Homo sapiens
  CDR3 for beta chain variable domain of TCR clone 64026 (TRBV6-1, TRBJ1-3)
CASVQGGGGNTIYF

SEQ ID NO: 128053 - protein, 14 aa, Homo sapiens
  CDR3 for alpha chain variable domain of TCR clone 64027 (TRAV12-3, TRAJ12)
CAMSEVDSSYKLIF

SEQ ID NO: 128054 - protein, 12 aa, Homo sapiens
  CDR3 for beta chain variable domain of TCR clone 64027 (TRBV18, TRBJ1-4)
CASSPSLEKLFF

SEQ ID NO: 128055 - protein, 15 aa, Homo sapiens
  CDR3 for alpha chain variable domain of TCR clone 64028 (TRAV21, TRAJ24)
CAARSSTDSWGKLQF

SEQ ID NO: 128056 - protein, 13 aa, Homo sapiens
  CDR3 for beta chain variable domain of TCR clone 64028 (TRBV11-2, TRBJ2-5)
CASSLTGEETQYF

SEQ ID NO: 128057 - protein, 17 aa, Homo sapiens
  CDR3 for alpha chain variable domain of TCR clone 64029 (TRAV36/DV7, TRAJ52)
CAVAQRAGGTSYGKLTF

SEQ ID NO: 128058 - protein, 15 aa, Homo sapiens
  CDR3 for beta chain variable domain of TCR clone 64029 (TRBV28, TRBJ2-1)
CASSIISGGRSEQFF

SEQ ID NO: 128059 - protein, 14 aa, Homo sapiens
  CDR3 for alpha chain variable domain of TCR clone 64030 (TRAV1-1, TRAJ27)
CAVIYNTNAGKSIF

SEQ ID NO: 128060 - protein, 15 aa, Homo sapiens
  CDR3 for beta chain variable domain of TCR clone 64030 (TRBV7-2, TRBJ2-1)
CASSSGLAGGNEQFF

SEQ ID NO: 128061 - protein, 13 aa, Homo sapiens
  CDR3 for alpha chain variable domain of TCR clone 64031 (TRAV13-1, TRAJ5)
CTASDTGRRALTF

SEQ ID NO: 128062 - protein, 12 aa, Homo sapiens
  CDR3 for beta chain variable domain of TCR clone 64031 (TRBV28, TRBJ2-3)
CASSLYRDTQYF

SEQ ID NO: 128063 - protein, 14 aa, Homo sapiens
  CDR3 for alpha chain variable domain of TCR clone 64032 (TRAV12-2, TRAJ13)
CAVKKTGGYQKVTF

SEQ ID NO: 128064 - protein, 12 aa, Homo sapiens
  CDR3 for beta chain variable domain of TCR clone 64032 (TRBV6-3, TRBJ2-7)
CASSLTPYERYF

SEQ ID NO: 128065 - protein, 12 aa, Homo sapiens
  CDR3 for alpha chain variable domain of TCR clone 64033 (TRAV21, TRAJ11)
CAATSGYSTLTF

SEQ ID NO: 128066 - protein, 16 aa, Homo sapiens
  CDR3 for beta chain variable domain of TCR clone 64033 (TRBV28, TRBJ2-2)
CDSSLEGGSNTGELFF

SEQ ID NO: 128067 - protein, 15 aa, Homo sapiens
  CDR3 for alpha chain variable domain of TCR clone 64034 (TRAV8-3, TRAJ45)
CASSYSGGGADGLTF

SEQ ID NO: 128068 - protein, 16 aa, Homo sapiens
  CDR3 for beta chain variable domain of TCR clone 64034 (TRBV7-9, TRBJ2-2)
CASSGFGGANTGELFV

SEQ ID NO: 128069 - protein, 14 aa, Homo sapiens
  CDR3 for alpha chain variable domain of TCR clone 64035 (TRAV8-3, TRAJ4)
CAAGASGGYNKLIF

SEQ ID NO: 128070 - protein, 17 aa, Homo sapiens
  CDR3 for beta chain variable domain of TCR clone 64035 (TRBV11-2, TRBJ2-1)
CASSLYPPGVEYNEQFF

SEQ ID NO: 128071 - protein, 14 aa, Homo sapiens
  CDR3 for alpha chain variable domain of TCR clone 64036 (TRAV13-1, TRAJ44)
CAAKATGTASKLNF

SEQ ID NO: 128072 - protein, 14 aa, Homo sapiens
  CDR3 for beta chain variable domain of TCR clone 64036 (TRBV19, TRBJ2-2)
CASSTLHRSGELFF

SEQ ID NO: 128073 - protein, 14 aa, Homo sapiens
  CDR3 for alpha chain variable domain of TCR clone 64037 (TRAV35, TRAJ44)
CAGRPSRTASKLTF

SEQ ID NO: 128074 - protein, 13 aa, Homo sapiens
  CDR3 for beta chain variable domain of TCR clone 64037 (TRBV12-4, TRBJ1-5)
CASSPDRAQPQHF

SEQ ID NO: 128075 - protein, 13 aa, Homo sapiens
  CDR3 for alpha chain variable domain of TCR clone 64038 (TRAV2, TRAJ15)
CAVASQAGTALIF

SEQ ID NO: 128076 - protein, 14 aa, Homo sapiens
  CDR3 for beta chain variable domain of TCR clone 64038 (TRBV19, TRBJ2-5)
CASSMTGQQETQYF

SEQ ID NO: 128077 - protein, 12 aa, Homo sapiens
  CDR3 for alpha chain variable domain of TCR clone 64039 (TRAV8-3, TRAJ26)
SAGDNYGQNFVF

SEQ ID NO: 128078 - protein, 15 aa, Homo sapiens
  CDR3 for beta chain variable domain of TCR clone 64039 (TRBV9, TRBJ2-1)
CASSLAGSSYNEQFF

SEQ ID NO: 128079 - protein, 15 aa, Homo sapiens
  CDR3 for alpha chain variable domain of TCR clone 64040 (TRAV8-3, TRAJ41)
CAVGSNSNSGYALNF

SEQ ID NO: 128080 - protein, 17 aa, Homo sapiens
  CDR3 for beta chain variable domain of TCR clone 64040 (TRBV25-1, TRBJ2-1)
CASSAYGQGRGVYEQFV

SEQ ID NO: 128081 - protein, 14 aa, Homo sapiens
  CDR3 for alpha chain variable domain of TCR clone 64041 (TRAV12-3, TRAJ56)
CAMSVTGANSKLTF

SEQ ID NO: 128082 - protein, 17 aa, Homo sapiens
  CDR3 for beta chain variable domain of TCR clone 64041 (TRBV20-1, TRBJ2-3)
CSASLIGRGGSADTQYF

SEQ ID NO: 128083 - protein, 12 aa, Homo sapiens
  CDR3 for alpha chain variable domain of TCR clone 64042 (TRAV9-2, TRAJ20)
CALSEGDYKLSF

SEQ ID NO: 128084 - protein, 13 aa, Homo sapiens
  CDR3 for beta chain variable domain of TCR clone 64042 (TRBV11-2, TRBJ1-6)
CASSLAGVSTLHF

SEQ ID NO: 128085 - protein, 17 aa, Homo sapiens
  CDR3 for alpha chain variable domain of TCR clone 64043 (TRAV13-1, TRAJ52)
CAASSGAGGTSYGKLTF

SEQ ID NO: 128086 - protein, 17 aa, Homo sapiens
  CDR3 for beta chain variable domain of TCR clone 64043 (TRBV11-2, TRBJ2-1)
CASSLSPPGVEYNEQFF

SEQ ID NO: 128087 - protein, 14 aa, Homo sapiens
  CDR3 for alpha chain variable domain of TCR clone 64044 (TRAV12-2, TRAJ17)
CAVLFKAAGNKLTF

SEQ ID NO: 128088 - protein, 17 aa, Homo sapiens
  CDR3 for beta chain variable domain of TCR clone 64044 (TRBV20-1, TRBJ2-2)
CSACGSGQGGLTGELFF

SEQ ID NO: 128089 - protein, 15 aa, Homo sapiens
  CDR3 for alpha chain variable domain of TCR clone 64045 (TRAV2, TRAJ9)
CAVEDRGTGGFKTIF

SEQ ID NO: 128090 - protein, 16 aa, Homo sapiens
  CDR3 for beta chain variable domain of TCR clone 64045 (TRBV24-1, TRBJ2-3)
CATCDPGTGATDTQYF

SEQ ID NO: 128091 - protein, 16 aa, Homo sapiens
  CDR3 for alpha chain variable domain of TCR clone 64046 (TRAV21, TRAJ37)
CADRTAGSSNTGKLIF

SEQ ID NO: 128092 - protein, 13 aa, Homo sapiens
  CDR3 for beta chain variable domain of TCR clone 64046 (TRBV7-9, TRBJ2-5)
CASLPSGRETQYF

SEQ ID NO: 128093 - protein, 13 aa, Homo sapiens
  CDR3 for alpha chain variable domain of TCR clone 64047 (TRAV26-1, TRAJ34)
CIVRPWITDKPIF

SEQ ID NO: 128094 - protein, 14 aa, Homo sapiens
  CDR3 for beta chain variable domain of TCR clone 64047 (TRBV7-2, TRBJ2-7)
CASRSQGAAYEQYF

SEQ ID NO: 128095 - protein, 13 aa, Homo sapiens
  CDR3 for alpha chain variable domain of TCR clone 64048 (TRAV8-1, TRAJ32)
CAADGGATNKLIF

SEQ ID NO: 128096 - protein, 15 aa, Homo sapiens
  CDR3 for beta chain variable domain of TCR clone 64048 (TRBV7-3, TRBJ2-1)
CASSLSSGSFDEQFF

SEQ ID NO: 128097 - protein, 17 aa, Homo sapiens
  CDR3 for alpha chain variable domain of TCR clone 64049 (TRAV3, TRAJ6)
CAVRDGPRAGGSYIPTF

SEQ ID NO: 128098 - protein, 15 aa, Homo sapiens
  CDR3 for beta chain variable domain of TCR clone 64049 (TRBV6-1, TRBJ2-6)
CASSSRPSGANVLTF

SEQ ID NO: 128099 - protein, 12 aa, Homo sapiens
  CDR3 for alpha chain variable domain of TCR clone 64050 (TRAV26-2, TRAJ47)
CILVEYGNKLVF

SEQ ID NO: 128100 - protein, 16 aa, Homo sapiens
  CDR3 for beta chain variable domain of TCR clone 64050 (TRBV18, TRBJ1-4)
CSSSPLVGDRAEKLFF

SEQ ID NO: 128101 - protein, 17 aa, Homo sapiens
  CDR3 for alpha chain variable domain of TCR clone 64051 (TRAV3, TRAJ42)
CAVRGRDYGGSQGNLIF

SEQ ID NO: 128102 - protein, 14 aa, Homo sapiens
  CDR3 for beta chain variable domain of TCR clone 64051 (TRBV7-2, TRBJ2-5)
CASSPRGSSETQYF

SEQ ID NO: 128103 - protein, 11 aa, Homo sapiens
  CDR3 for alpha chain variable domain of TCR clone 64052 (TRAV12-3, TRAJ17)
SMTLTGNKLTF

SEQ ID NO: 128104 - protein, 15 aa, Homo sapiens
  CDR3 for beta chain variable domain of TCR clone 64052 (TRBV20-1, TRBJ2-7)
CSARDRVSGMDEQYF

SEQ ID NO: 128105 - protein, 12 aa, Homo sapiens
  CDR3 for alpha chain variable domain of TCR clone 64053 (TRAV13-1, TRAJ21)
CAAKEGFNKFYF

SEQ ID NO: 128106 - protein, 13 aa, Homo sapiens
  CDR3 for beta chain variable domain of TCR clone 64053 (TRBV7-2, TRBJ2-7)
CASSSPSGSEQYF

SEQ ID NO: 128107 - protein, 14 aa, Homo sapiens
  CDR3 for alpha chain variable domain of TCR clone 64054 (TRAV12-3, TRAJ10)
SHPPLTGGGNKLTF

SEQ ID NO: 128108 - protein, 14 aa, Homo sapiens
  CDR3 for beta chain variable domain of TCR clone 64054 (TRBV6-1, TRBJ1-3)
CASVQGGGGNTIYF

SEQ ID NO: 128109 - protein, 12 aa, Homo sapiens
  CDR3 for alpha chain variable domain of TCR clone 64055 (TRAV21, TRAJ31)
CAVWGNNARLMF

SEQ ID NO: 128110 - protein, 16 aa, Homo sapiens
  CDR3 for beta chain variable domain of TCR clone 64055 (TRBV27, TRBJ2-5)
CASSYGPGGQKETQYV

SEQ ID NO: 128111 - protein, 12 aa, Homo sapiens
  CDR3 for alpha chain variable domain of TCR clone 64056 (TRAV12-3, TRAJ17)
CAMTLTGNKLTF

SEQ ID NO: 128112 - protein, 14 aa, Homo sapiens
  CDR3 for beta chain variable domain of TCR clone 64056 (TRBV19, TRBJ2-2)
CASSASRGIGELFF

SEQ ID NO: 128113 - protein, 11 aa, Homo sapiens
  CDR3 for alpha chain variable domain of TCR clone 64057 (TRAV3, TRAJ21)
RAVGNFNKFYF

SEQ ID NO: 128114 - protein, 15 aa, Homo sapiens
  CDR3 for beta chain variable domain of TCR clone 64057 (TRBV19, TRBJ1-1)
CASTSGQIQNTEAFF

SEQ ID NO: 128115 - protein, 14 aa, Homo sapiens
  CDR3 for alpha chain variable domain of TCR clone 64058 (TRAV12-2, TRAJ48)
FAVNAFFGNEKLTF

SEQ ID NO: 128116 - protein, 13 aa, Homo sapiens
  CDR3 for beta chain variable domain of TCR clone 64058 (TRBV28, TRBJ2-7)
CAGAQQGLDEQYF

SEQ ID NO: 128117 - protein, 14 aa, Homo sapiens
  CDR3 for alpha chain variable domain of TCR clone 64059 (TRAV2, TRAJ9)
CAVEDRSGGFKTTF

SEQ ID NO: 128118 - protein, 11 aa, Homo sapiens
  CDR3 for beta chain variable domain of TCR clone 64059 (TRBV12-4, TRBJ2-3)
CASTATDTQYF

SEQ ID NO: 128119 - protein, 19 aa, Homo sapiens
  CDR3 for alpha chain variable domain of TCR clone 64060 (TRAV1-2, TRAJ26)
CLLPLCCERPDNYGQNFVF

SEQ ID NO: 128120 - protein, 15 aa, Homo sapiens
  CDR3 for beta chain variable domain of TCR clone 64060 (TRBV7-9, TRBJ1-5)
CASSQGHQPNQPQHF

SEQ ID NO: 128121 - protein, 11 aa, Homo sapiens
  CDR3 for alpha chain variable domain of TCR clone 64061 (TRAV29/DV5, TRAJ31)
CAASYRDRLMF

SEQ ID NO: 128122 - protein, 15 aa, Homo sapiens
  CDR3 for beta chain variable domain of TCR clone 64061 (TRBV4-1, TRBJ2-7)
CASSQQGQGFDEQYF

SEQ ID NO: 128123 - protein, 16 aa, Homo sapiens
  CDR3 for alpha chain variable domain of TCR clone 64062 (TRAV12-3, TRAJ53)
CAMSPGSGGSNYKLTF

SEQ ID NO: 128124 - protein, 13 aa, Homo sapiens
  CDR3 for beta chain variable domain of TCR clone 64062 (TRBV7-2, TRBJ2-2)
CASSSVRAGELFF

SEQ ID NO: 128125 - protein, 15 aa, Homo sapiens
  CDR3 for alpha chain variable domain of TCR clone 64063 (TRAV8-3, TRAJ11)
CAVGLLNSGYSALTF

SEQ ID NO: 128126 - protein, 23 aa, Homo sapiens
  CDR3 for beta chain variable domain of TCR clone 64063 (TRBV7-9, TRBJ1-2)
EAQLEKSRLLSDRFSSGEDGYTF

SEQ ID NO: 128127 - protein, 16 aa, Homo sapiens
  CDR3 for alpha chain variable domain of TCR clone 64064 (TRAV3, TRAJ37)
CAVRDSGSGNTGKLIF

SEQ ID NO: 128128 - protein, 15 aa, Homo sapiens
  CDR3 for beta chain variable domain of TCR clone 64064 (TRBV7-2, TRBJ2-1)
CASSFQADEYNEQFF

SEQ ID NO: 128129 - protein, 14 aa, Homo sapiens
  CDR3 for alpha chain variable domain of TCR clone 64065 (TRAV8-1, TRAJ4)
CAVPFSGGYNKLIF

SEQ ID NO: 128130 - protein, 15 aa, Homo sapiens
  CDR3 for beta chain variable domain of TCR clone 64065 (TRBV9, TRBJ1-6)
CASSVAGTGDSPLHF

SEQ ID NO: 128131 - protein, 14 aa, Homo sapiens
  CDR3 for alpha chain variable domain of TCR clone 64066 (TRAV12-1, TRAJ30)
CVLNIGGRDDKIIF

SEQ ID NO: 128132 - protein, 13 aa, Homo sapiens
  CDR3 for beta chain variable domain of TCR clone 64066 (TRBV12-5, TRBJ2-1)
CASGLGRGNEQFF

SEQ ID NO: 128133 - protein, 11 aa, Homo sapiens
  CDR3 for alpha chain variable domain of TCR clone 64067 (TRAV26-1, TRAJ27)
CIDPSAGKSTF

SEQ ID NO: 128134 - protein, 18 aa, Homo sapiens
  CDR3 for beta chain variable domain of TCR clone 64067 (TRBV7-9, TRBJ2-6)
CASSFPGAGISGANVLTF

SEQ ID NO: 128135 - protein, 12 aa, Homo sapiens
  CDR3 for alpha chain variable domain of TCR clone 64068 (TRAV21, TRAJ49)
CAVTNTGNQFYF

SEQ ID NO: 128136 - protein, 17 aa, Homo sapiens
  CDR3 for beta chain variable domain of TCR clone 64068 (TRBV13, TRBJ2-3)
CASSLSRVSGGRNTQYF

SEQ ID NO: 128137 - protein, 15 aa, Homo sapiens
  CDR3 for alpha chain variable domain of TCR clone 64069 (TRAV2, TRAJ37)
CAVEAGSSNTGKLIF

SEQ ID NO: 128138 - protein, 16 aa, Homo sapiens
  CDR3 for beta chain variable domain of TCR clone 64069 (TRBV19, TRBJ2-2)
CASRSPGTGATGELFF

SEQ ID NO: 128139 - protein, 15 aa, Homo sapiens
  CDR3 for alpha chain variable domain of TCR clone 64070 (TRAV17, TRAJ16)
CATALRFSDGQKLLF

SEQ ID NO: 128140 - protein, 15 aa, Homo sapiens
  CDR3 for beta chain variable domain of TCR clone 64070 (TRBV20-1, TRBJ1-1)
CSASRGVTGNTEAFS

SEQ ID NO: 128141 - protein, 13 aa, Homo sapiens
  CDR3 for alpha chain variable domain of TCR clone 64071 (TRAV8-3, TRAJ48)
CVVVPFGNEKLTF

SEQ ID NO: 128142 - protein, 14 aa, Homo sapiens
  CDR3 for beta chain variable domain of TCR clone 64071 (TRBV18, TRBJ2-7)
CASSPRGGAYEQYF

SEQ ID NO: 128143 - protein, 15 aa, Homo sapiens
  CDR3 for alpha chain variable domain of TCR clone 64072 (TRAV17, TRAJ10)
CATVLLTGGGNKLTF

SEQ ID NO: 128144 - protein, 15 aa, Homo sapiens
  CDR3 for beta chain variable domain of TCR clone 64072 (TRBV11-3, TRBJ2-3)
CASLKDGREGDKQYF

SEQ ID NO: 128145 - protein, 14 aa, Homo sapiens
  CDR3 for alpha chain variable domain of TCR clone 64073 (TRAV1-2, TRAJ16)
CAVNRFSDGQKLLF

SEQ ID NO: 128146 - protein, 16 aa, Homo sapiens
  CDR3 for beta chain variable domain of TCR clone 64073 (TRBV12-4, TRBJ1-5)
CASSRPVGGSNKPQHF

SEQ ID NO: 128147 - protein, 13 aa, Homo sapiens
  CDR3 for alpha chain variable domain of TCR clone 64074 (TRAV8-2, TRAJ13)
CVVSDLRYQKVTF

SEQ ID NO: 128148 - protein, 11 aa, Homo sapiens
  CDR3 for beta chain variable domain of TCR clone 64074 (TRBV25-1, TRBJ1-1)
PTWGGNTEAFF

SEQ ID NO: 128149 - protein, 15 aa, Homo sapiens
  CDR3 for alpha chain variable domain of TCR clone 64075 (TRAV25, TRAJ53)
CPTSNSGGSNYKLTF

SEQ ID NO: 128150 - protein, 14 aa, Homo sapiens
  CDR3 for beta chain variable domain of TCR clone 64075 (TRBV11-2, TRBJ2-3)
CASSRIARTDTQYF

SEQ ID NO: 128151 - protein, 13 aa, Homo sapiens
  CDR3 for alpha chain variable domain of TCR clone 64076 (TRAV27, TRAJ49)
CAPRPYNGNQFYF

SEQ ID NO: 128152 - protein, 16 aa, Homo sapiens
  CDR3 for beta chain variable domain of TCR clone 64076 (TRBV4-1, TRBJ1-2)
CASSQDAGQVLYGYTF

SEQ ID NO: 128153 - protein, 15 aa, Homo sapiens
  CDR3 for alpha chain variable domain of TCR clone 64077 (TRAV26-1, TRAJ29)
CIVRVEGSGNTPLVF

SEQ ID NO: 128154 - protein, 15 aa, Homo sapiens
  CDR3 for beta chain variable domain of TCR clone 64077 (TRBV7-9, TRBJ1-5)
CASSQGHQPNQPPHF

SEQ ID NO: 128155 - protein, 15 aa, Homo sapiens
  CDR3 for alpha chain variable domain of TCR clone 64078 (TRAV8-3, TRAJ45)
CASSYSGGGADGLAF

SEQ ID NO: 128156 - protein, 16 aa, Homo sapiens
  CDR3 for beta chain variable domain of TCR clone 64078 (TRBV20-1, TRBJ2-2)
CSASASGIPGAGELFF

SEQ ID NO: 128157 - protein, 14 aa, Homo sapiens
  CDR3 for alpha chain variable domain of TCR clone 64079 (TRAV29/DV5, TRAJ47)
CAASSIEYGNKLVF

SEQ ID NO: 128158 - protein, 16 aa, Homo sapiens
  CDR3 for beta chain variable domain of TCR clone 64079 (TRBV12-4, TRBJ2-7)
CASSLIGGTGTYEQYF

SEQ ID NO: 128159 - protein, 14 aa, Homo sapiens
  CDR3 for alpha chain variable domain of TCR clone 64080 (TRAV35, TRAJ33)
CAGSSQDSNYQLIW

SEQ ID NO: 128160 - protein, 12 aa, Homo sapiens
  CDR3 for beta chain variable domain of TCR clone 64080 (TRBV11-2, TRBJ2-5)
CASSLGQETQYF

SEQ ID NO: 128161 - protein, 14 aa, Homo sapiens
  CDR3 for alpha chain variable domain of TCR clone 64081 (TRAV13-1, TRAJ35)
CAASKGGFGNVLHC

SEQ ID NO: 128162 - protein, 16 aa, Homo sapiens
  CDR3 for beta chain variable domain of TCR clone 64081 (TRBV12-4, TRBJ1-5)
CASSRPVGGSNQPQHF

SEQ ID NO: 128163 - protein, 16 aa, Homo sapiens
  CDR3 for alpha chain variable domain of TCR clone 64082 (TRAV38-2/DV8, TRAJ47)
CAYRGAIMEYGNKLVF

SEQ ID NO: 128164 - protein, 14 aa, Homo sapiens
  CDR3 for beta chain variable domain of TCR clone 64082 (TRBV19, TRBJ2-7)
CASSIFAGTYEQYF

SEQ ID NO: 128165 - protein, 14 aa, Homo sapiens
  CDR3 for alpha chain variable domain of TCR clone 64083 (TRAV12-2, TRAJ40)
CAVKIPSGTYKYIF

SEQ ID NO: 128166 - protein, 17 aa, Homo sapiens
  CDR3 for beta chain variable domain of TCR clone 64083 (TRBV4-1, TRBJ2-7)
CASSRDPLGVRGGEQYF

SEQ ID NO: 128167 - protein, 14 aa, Homo sapiens
  CDR3 for alpha chain variable domain of TCR clone 64084 (TRAV17, TRAJ12)
CATDEKDSSYKLIF

SEQ ID NO: 128168 - protein, 16 aa, Homo sapiens
  CDR3 for beta chain variable domain of TCR clone 64084 (TRBV11-2, TRBJ2-1)
CASSPRLAGVYNEQFL

SEQ ID NO: 128169 - protein, 14 aa, Homo sapiens
  CDR3 for alpha chain variable domain of TCR clone 64085 (TRAV5, TRAJ29)
CAETLNSGNTPLVF

SEQ ID NO: 128170 - protein, 14 aa, Homo sapiens
  CDR3 for beta chain variable domain of TCR clone 64085 (TRBV6-1, TRBJ1-3)
CASVQEGGGNTIYF

SEQ ID NO: 128171 - protein, 14 aa, Homo sapiens
  CDR3 for alpha chain variable domain of TCR clone 64086 (TRAV29/DV5, TRAJ45)
CAASFRGGAGGLTF

SEQ ID NO: 128172 - protein, 11 aa, Homo sapiens
  CDR3 for beta chain variable domain of TCR clone 64086 (TRBV11-2, TRBJ2-2)
CASSLPGELFF

SEQ ID NO: 128173 - protein, 17 aa, Homo sapiens
  CDR3 for alpha chain variable domain of TCR clone 64087 (TRAV20, TRAJ45)
CAVQGMYSGGGADGLTF

SEQ ID NO: 128174 - protein, 15 aa, Homo sapiens
  CDR3 for beta chain variable domain of TCR clone 64087 (TRBV25-1, TRBJ1-4)
CASSKRIATNEKLFF

SEQ ID NO: 128175 - protein, 13 aa, Homo sapiens
  CDR3 for alpha chain variable domain of TCR clone 64088 (TRAV12-2, TRAJ40)
CREDPSGTYKYIF

SEQ ID NO: 128176 - protein, 14 aa, Homo sapiens
  CDR3 for beta chain variable domain of TCR clone 64088 (TRBV20-1, TRBJ1-1)
CSAQTRIGGTEAFF

SEQ ID NO: 128177 - protein, 13 aa, Homo sapiens
  CDR3 for alpha chain variable domain of TCR clone 64089 (TRAV1-2, TRAJ31)
CAVRPNNNARLMF

SEQ ID NO: 128178 - protein, 18 aa, Homo sapiens
  CDR3 for beta chain variable domain of TCR clone 64089 (TRBV7-9, TRBJ2-3)
CASSLPINGQISTDTQYF

SEQ ID NO: 128179 - protein, 15 aa, Homo sapiens
  CDR3 for alpha chain variable domain of TCR clone 64090 (TRAV21, TRAJ24)
CAARSSTDSWGKLQF

SEQ ID NO: 128180 - protein, 15 aa, Homo sapiens
  CDR3 for beta chain variable domain of TCR clone 64090 (TRBV5-1, TRBJ2-1)
CASSPPRAAYNEQFF

SEQ ID NO: 128181 - protein, 14 aa, Homo sapiens
  CDR3 for alpha chain variable domain of TCR clone 64091 (TRAV3, TRAJ22)
CCERRGGSARQLTF

SEQ ID NO: 128182 - protein, 13 aa, Homo sapiens
  CDR3 for beta chain variable domain of TCR clone 64091 (TRBV2, TRBJ1-5)
CATAGPGNQPQHF

SEQ ID NO: 128183 - protein, 13 aa, Homo sapiens
  CDR3 for alpha chain variable domain of TCR clone 64092 (TRAV9-2, TRAJ53)
CSLSGGSNYKLTF

SEQ ID NO: 128184 - protein, 17 aa, Homo sapiens
  CDR3 for beta chain variable domain of TCR clone 64092 (TRBV11-2, TRBJ2-1)
CASSLYPPGVEYNEQFF

SEQ ID NO: 128185 - protein, 16 aa, Homo sapiens
  CDR3 for alpha chain variable domain of TCR clone 64093 (TRAV20, TRAJ22)
CAVRASSSGSARQLTF

SEQ ID NO: 128186 - protein, 13 aa, Homo sapiens
  CDR3 for beta chain variable domain of TCR clone 64093 (TRBV7-2, TRBJ2-5)
CASSQTSVETQYF

SEQ ID NO: 128187 - protein, 13 aa, Homo sapiens
  CDR3 for alpha chain variable domain of TCR clone 64094 (TRAV38-1, TRAJ7)
CAFMMDGNNRLAF

SEQ ID NO: 128188 - protein, 14 aa, Homo sapiens
  CDR3 for beta chain variable domain of TCR clone 64094 (TRBV4-2, TRBJ2-3)
CASRETRSPGMQYF

SEQ ID NO: 128189 - protein, 16 aa, Homo sapiens
  CDR3 for alpha chain variable domain of TCR clone 64095 (TRAV12-3, TRAJ53)
YAMSPGSGGSNYKLTF

SEQ ID NO: 128190 - protein, 14 aa, Homo sapiens
  CDR3 for beta chain variable domain of TCR clone 64095 (TRBV4-1, TRBJ2-7)
CASSPVAGGDEQYF

SEQ ID NO: 128191 - protein, 13 aa, Homo sapiens
  CDR3 for alpha chain variable domain of TCR clone 64096 (TRAV21, TRAJ20)
CAVGLRVDYKLSF

SEQ ID NO: 128192 - protein, 16 aa, Homo sapiens
  CDR3 for beta chain variable domain of TCR clone 64096 (TRBV29-1, TRBJ2-7)
CSVEVVGTSGSYEQYF

SEQ ID NO: 128193 - protein, 15 aa, Homo sapiens
  CDR3 for alpha chain variable domain of TCR clone 64097 (TRAV3, TRAJ22)
CALRDRGGSARQLTF

SEQ ID NO: 128194 - protein, 13 aa, Homo sapiens
  CDR3 for beta chain variable domain of TCR clone 64097 (TRBV2, TRBJ1-5)
CATAGPGNQPQHF

SEQ ID NO: 128195 - protein, 13 aa, Homo sapiens
  CDR3 for alpha chain variable domain of TCR clone 64098 (TRAV12-1, TRAJ26)
WVVRRNYGQNFVF

SEQ ID NO: 128196 - protein, 15 aa, Homo sapiens
  CDR3 for beta chain variable domain of TCR clone 64098 (TRBV28, TRBJ2-1)
CASSIIAGGRSEQFF

SEQ ID NO: 128197 - protein, 12 aa, Homo sapiens
  CDR3 for alpha chain variable domain of TCR clone 64099 (TRAV12-3, TRAJ17)
CAMTLTGNKLTF

SEQ ID NO: 128198 - protein, 16 aa, Homo sapiens
  CDR3 for beta chain variable domain of TCR clone 64099 (TRBV20-1, TRBJ1-2)
CSASMGQGAANCGYTF

SEQ ID NO: 128199 - protein, 11 aa, Homo sapiens
  CDR3 for alpha chain variable domain of TCR clone 64100 (TRAV3, TRAJ21)
CAVGNFNKFYF

SEQ ID NO: 128200 - protein, 12 aa, Homo sapiens
  CDR3 for beta chain variable domain of TCR clone 64100 (TRBV12-4, TRBJ1-2)
CASSFIWLHLRF

SEQ ID NO: 128201 - protein, 14 aa, Homo sapiens
  CDR3 for alpha chain variable domain of TCR clone 64101 (TRAV1-2, TRAJ27)
CAPAEYTNAGKSTF

SEQ ID NO: 128202 - protein, 18 aa, Homo sapiens
  CDR3 for beta chain variable domain of TCR clone 64101 (TRBV28, TRBJ1-2)
CASRQRQGKRGSNYGYTF

SEQ ID NO: 128203 - protein, 15 aa, Homo sapiens
  CDR3 for alpha chain variable domain of TCR clone 64102 (TRAV12-1, TRAJ36)
CVVNEHQTGANNLFF

SEQ ID NO: 128204 - protein, 12 aa, Homo sapiens
  CDR3 for beta chain variable domain of TCR clone 64102 (TRBV29-1, TRBJ2-3)
CSVTGGADTQYL

SEQ ID NO: 128205 - protein, 14 aa, Homo sapiens
  CDR3 for alpha chain variable domain of TCR clone 64103 (TRAV12-2, TRAJ13)
CAVKKAGGYQKVTF

SEQ ID NO: 128206 - protein, 14 aa, Homo sapiens
  CDR3 for beta chain variable domain of TCR clone 64103 (TRBV5-5, TRBJ2-7)
CASSLGQGTYEQYF

SEQ ID NO: 128207 - protein, 15 aa, Homo sapiens
  CDR3 for alpha chain variable domain of TCR clone 64104 (TRAV12-3, TRAJ17)
CAMSPSLAAGNKLTF

SEQ ID NO: 128208 - protein, 17 aa, Homo sapiens
  CDR3 for beta chain variable domain of TCR clone 64104 (TRBV11-2, TRBJ2-1)
CASSLYPPGVEYNEQFF

SEQ ID NO: 128209 - protein, 12 aa, Homo sapiens
  CDR3 for alpha chain variable domain of TCR clone 64105 (TRAV2, TRAJ5)
CALDTGRRALTF

SEQ ID NO: 128210 - protein, 15 aa, Homo sapiens
  CDR3 for beta chain variable domain of TCR clone 64105 (TRBV10-3, TRBJ2-1)
CATSDVQDRAYEQFF

SEQ ID NO: 128211 - protein, 12 aa, Homo sapiens
  CDR3 for alpha chain variable domain of TCR clone 64106 (TRAV1-2, TRAJ33)
CAALDSNYQLIW

SEQ ID NO: 128212 - protein, 14 aa, Homo sapiens
  CDR3 for beta chain variable domain of TCR clone 64106 (TRBV7-2, TRBJ1-1)
CASSFLTGTTEAFF

SEQ ID NO: 128213 - protein, 17 aa, Homo sapiens
  CDR3 for alpha chain variable domain of TCR clone 64107 (TRAV3, TRAJ38)
CAVRDCLNAGNNRKLIW

SEQ ID NO: 128214 - protein, 14 aa, Homo sapiens
  CDR3 for beta chain variable domain of TCR clone 64107 (TRBV6-1, TRBJ1-3)
CASVQGGGGNTIYF

SEQ ID NO: 128215 - protein, 13 aa, Homo sapiens
  CDR3 for alpha chain variable domain of TCR clone 64108 (TRAV12-3, TRAJ7)
CAMSASGNNRLAF

SEQ ID NO: 128216 - protein, 14 aa, Homo sapiens
  CDR3 for beta chain variable domain of TCR clone 64108 (TRBV13, TRBJ2-5)
CSSSLGPRGETQYF

SEQ ID NO: 128217 - protein, 16 aa, Homo sapiens
  CDR3 for alpha chain variable domain of TCR clone 64109 (TRAV3, TRAJ10)
CAVRDMNAGGGNKPTF

SEQ ID NO: 128218 - protein, 16 aa, Homo sapiens
  CDR3 for beta chain variable domain of TCR clone 64109 (TRBV6-3, TRBJ1-2)
CASSYSRRASNYGYTF

SEQ ID NO: 128219 - protein, 12 aa, Homo sapiens
  CDR3 for alpha chain variable domain of TCR clone 64110 (TRAV14/DV4, TRAJ3)
CRYYSSASKIIF

SEQ ID NO: 128220 - protein, 15 aa, Homo sapiens
  CDR3 for beta chain variable domain of TCR clone 64110 (TRBV4-1, TRBJ1-4)
CASSDTGGTNEKLFF

SEQ ID NO: 128221 - protein, 11 aa, Homo sapiens
  CDR3 for alpha chain variable domain of TCR clone 64111 (TRAV35, TRAJ34)
CWARNTDKLIF

SEQ ID NO: 128222 - protein, 15 aa, Homo sapiens
  CDR3 for beta chain variable domain of TCR clone 64111 (TRBV20-1, TRBJ1-1)
CSASRGVTGNTEAFF

SEQ ID NO: 128223 - protein, 13 aa, Homo sapiens
  CDR3 for alpha chain variable domain of TCR clone 64112 (TRAV36/DV7, TRAJ43)
CADVETITMTCAL

SEQ ID NO: 128224 - protein, 13 aa, Homo sapiens
  CDR3 for beta chain variable domain of TCR clone 64112 (TRBV7-9, TRBJ1-2)
CASSLKQNYGYTF

SEQ ID NO: 128225 - protein, 11 aa, Homo sapiens
  CDR3 for alpha chain variable domain of TCR clone 64113 (TRAV1-2, TRAJ40)
CAVPGTYKYIF

SEQ ID NO: 128226 - protein, 13 aa, Homo sapiens
  CDR3 for beta chain variable domain of TCR clone 64113 (TRBV27, TRAJ18)
CASSLMGDEKLFF

SEQ ID NO: 128227 - protein, 12 aa, Homo sapiens
  CDR3 for alpha chain variable domain of TCR clone 64114 (TRAV12-3, TRAJ17)
CAMTLTGNKLTF

SEQ ID NO: 128228 - protein, 14 aa, Homo sapiens
  CDR3 for beta chain variable domain of TCR clone 64114 (TRBV7-6, TRBJ2-3)
CASSSGPNTDTQYF

SEQ ID NO: 128229 - protein, 10 aa, Homo sapiens
  CDR3 for alpha chain variable domain of TCR clone 64115 (TRAV1-2, TRAJ23)
CAGQGGKLIF

SEQ ID NO: 128230 - protein, 16 aa, Homo sapiens
  CDR3 for beta chain variable domain of TCR clone 64115 (TRBV11-2, TRBJ1-1)
CASSLRQGGEHSEAFF

SEQ ID NO: 128231 - protein, 12 aa, Homo sapiens
  CDR3 for alpha chain variable domain of TCR clone 64116 (TRAV12-3, TRAJ17)
CAMALTGNKLTF

SEQ ID NO: 128232 - protein, 15 aa, Homo sapiens
  CDR3 for beta chain variable domain of TCR clone 64116 (TRBV19, TRBJ2-1)
CASSILGEGRNEQFF

SEQ ID NO: 128233 - protein, 12 aa, Homo sapiens
  CDR3 for alpha chain variable domain of TCR clone 64117 (TRAV12-2, TRAJ10)
CRPTGGGNKLTF

SEQ ID NO: 128234 - protein, 11 aa, Homo sapiens
  CDR3 for beta chain variable domain of TCR clone 64117 (TRBV6-1, TRBJ2-1)
CASISSNEQFF

SEQ ID NO: 128235 - protein, 10 aa, Homo sapiens
  CDR3 for alpha chain variable domain of TCR clone 64118 (TRAV23/DV6, TRAJ4)
CAARDFWSGD

SEQ ID NO: 128236 - protein, 13 aa, Homo sapiens
  CDR3 for beta chain variable domain of TCR clone 64118 (TRBV7-2, TRBJ1-1)
CASSRNTNTEAFF

SEQ ID NO: 128237 - protein, 17 aa, Homo sapiens
  CDR3 for alpha chain variable domain of TCR clone 64119 (TRAV8-6, TRAJ58)
WAVSSWVGETSGSRLTF

SEQ ID NO: 128238 - protein, 14 aa, Homo sapiens
  CDR3 for beta chain variable domain of TCR clone 64119 (TRBV4-2, TRBJ2-1)
CASGLDRAYNEQFF

SEQ ID NO: 128239 - protein, 16 aa, Homo sapiens
  CDR3 for alpha chain variable domain of TCR clone 64120 (TRAV3, TRAJ10)
CAVGDMRAGGGNKLTF

SEQ ID NO: 128240 - protein, 14 aa, Homo sapiens
  CDR3 for beta chain variable domain of TCR clone 64120 (TRBV25-1, TRBJ1-1)
CASTHLGGNTEAFF

SEQ ID NO: 128241 - protein, 14 aa, Homo sapiens
  CDR3 for alpha chain variable domain of TCR clone 64121 (TRAV17, TRAJ53)
CSTDAGGSNYKLTF

SEQ ID NO: 128242 - protein, 16 aa, Homo sapiens
  CDR3 for beta chain variable domain of TCR clone 64121 (TRBV4-1, TRBJ1-1)
CASSQDAGMGNTEAFF

SEQ ID NO: 128243 - protein, 16 aa, Homo sapiens
  CDR3 for alpha chain variable domain of TCR clone 64122 (TRAV39, TRAJ32)
CAVDMGYGGATNKLIF

SEQ ID NO: 128244 - protein, 14 aa, Homo sapiens
  CDR3 for beta chain variable domain of TCR clone 64122 (TRBV9, TRBJ2-4)
CASSPSGTSGFRYF

SEQ ID NO: 128245 - protein, 14 aa, Homo sapiens
  CDR3 for alpha chain variable domain of TCR clone 64123 (TRAV12-3, TRAJ9)
CAMSVETGGFKTIF

SEQ ID NO: 128246 - protein, 13 aa, Homo sapiens
  CDR3 for beta chain variable domain of TCR clone 64123 (TRBV4-1, TRBJ1-1)
CASSRKMNTEAFF

SEQ ID NO: 128247 - protein, 14 aa, Homo sapiens
  CDR3 for alpha chain variable domain of TCR clone 64124 (TRAV2, TRAJ9)
CAVEDRCGGFKTIF

SEQ ID NO: 128248 - protein, 13 aa, Homo sapiens
  CDR3 for beta chain variable domain of TCR clone 64124 (TRBV7-3, TRBJ1-1)
CASSQDWGAEAFF

SEQ ID NO: 128249 - protein, 14 aa, Homo sapiens
  CDR3 for alpha chain variable domain of TCR clone 64125 (TRAV13-1, TRAJ35)
CAASKGGLGNVLHC

SEQ ID NO: 128250 - protein, 14 aa, Homo sapiens
  CDR3 for beta chain variable domain of TCR clone 64125 (TRBV2, TRBJ2-5)
CQQPLWAAGETQYF

SEQ ID NO: 128251 - protein, 13 aa, Homo sapiens
  CDR3 for alpha chain variable domain of TCR clone 64126 (TRAV3, TRAJ33)
CAVRDRSNYQVIW

SEQ ID NO: 128252 - protein, 16 aa, Homo sapiens
  CDR3 for beta chain variable domain of TCR clone 64126 (TRBV4-2, TRBJ2-7)
CASSQDRGTSSYEQYF

SEQ ID NO: 128253 - protein, 13 aa, Homo sapiens
  CDR3 for alpha chain variable domain of TCR clone 64127 (TRAV22, TRAJ29)
CAVGGSGNTPLVF

SEQ ID NO: 128254 - protein, 13 aa, Homo sapiens
  CDR3 for beta chain variable domain of TCR clone 64127 (TRBV7-3, TRBJ1-1)
CASSQDWGAEAFF

SEQ ID NO: 128255 - protein, 15 aa, Homo sapiens
  CDR3 for alpha chain variable domain of TCR clone 64128 (TRAV17, TRAJ22)
CATVAPFGSARQLTF

SEQ ID NO: 128256 - protein, 16 aa, Homo sapiens
  CDR3 for beta chain variable domain of TCR clone 64128 (TRBV7-2, TRBJ2-5)
CASSPGGARRGETQYF

SEQ ID NO: 128257 - protein, 13 aa, Homo sapiens
  CDR3 for alpha chain variable domain of TCR clone 64129 (TRAV1-1, TRAJ9)
CAAKNTGGFKTIF

SEQ ID NO: 128258 - protein, 15 aa, Homo sapiens
  CDR3 for beta chain variable domain of TCR clone 64129 (TRBV5-1, TRBJ2-1)
CASTGSRRTYNEQFF

SEQ ID NO: 128259 - protein, 14 aa, Homo sapiens
  CDR3 for alpha chain variable domain of TCR clone 64130 (TRAV8-2, TRAJ37)
CVVSISGNPGKLIF

SEQ ID NO: 128260 - protein, 11 aa, Homo sapiens
  CDR3 for beta chain variable domain of TCR clone 64130 (TRBV18, TRBJ2-5)
CASSPRETQYF

SEQ ID NO: 128261 - protein, 13 aa, Homo sapiens
  CDR3 for alpha chain variable domain of TCR clone 64131 (TRAV27, TRAJ45)
CRSSGGGADGLTF

SEQ ID NO: 128262 - protein, 14 aa, Homo sapiens
  CDR3 for beta chain variable domain of TCR clone 64131 (TRBV7-9, TRBJ2-1)
CASSSVVGFGEQFF

SEQ ID NO: 128263 - protein, 11 aa, Homo sapiens
  CDR3 for alpha chain variable domain of TCR clone 64132 (TRAV2, TRAJ13)
CASGGNQKVTF

SEQ ID NO: 128264 - protein, 16 aa, Homo sapiens
  CDR3 for beta chain variable domain of TCR clone 64132 (TRBV6-1, TRBJ2-5)
CASSETLDRGAETQYF

SEQ ID NO: 128265 - protein, 15 aa, Homo sapiens
  CDR3 for alpha chain variable domain of TCR clone 64133 (TRAV17, TRAJ22)
CATVAPSGSARQLTF

SEQ ID NO: 128266 - protein, 16 aa, Homo sapiens
  CDR3 for beta chain variable domain of TCR clone 64133 (TRBV10-3, TRBJ2-7)
CAISADVADRPYEQYF

SEQ ID NO: 128267 - protein, 12 aa, Homo sapiens
  CDR3 for alpha chain variable domain of TCR clone 64134 (TRAV3, TRAJ26)
CAVRDYGQNFVF

SEQ ID NO: 128268 - protein, 16 aa, Homo sapiens
  CDR3 for beta chain variable domain of TCR clone 64134 (TRBV11-2, TRBJ1-2)
CASSSSGREANYGYTF

SEQ ID NO: 128269 - protein, 13 aa, Homo sapiens
  CDR3 for alpha chain variable domain of TCR clone 64135 (TRAV17, TRAJ9)
CATDYTGGFKTIF

SEQ ID NO: 128270 - protein, 16 aa, Homo sapiens
  CDR3 for beta chain variable domain of TCR clone 64135 (TRBV7-7, TRBJ2-1)
CASSLASGASYNEQFF

SEQ ID NO: 128271 - protein, 13 aa, Homo sapiens
  CDR3 for alpha chain variable domain of TCR clone 64136 (TRAV2, TRAJ40)
CAVVTSGTYKYIF

SEQ ID NO: 128272 - protein, 14 aa, Homo sapiens
  CDR3 for beta chain variable domain of TCR clone 64136 (TRBV19, TRBJ2-1)
CASTTVVLSGEQFF

SEQ ID NO: 128273 - protein, 10 aa, Homo sapiens
  CDR3 for alpha chain variable domain of TCR clone 64137 (TRAV25, TRAJ17)
CQAAGNKLTF

SEQ ID NO: 128274 - protein, 15 aa, Homo sapiens
  CDR3 for beta chain variable domain of TCR clone 64137 (TRBV18, TRBJ2-2)
CASSTSGLHTGELFF

SEQ ID NO: 128275 - protein, 12 aa, Homo sapiens
  CDR3 for alpha chain variable domain of TCR clone 64138 (TRAV21, TRAJ11)
CAARGGNSTLTF

SEQ ID NO: 128276 - protein, 15 aa, Homo sapiens
  CDR3 for beta chain variable domain of TCR clone 64138 (TRBV6-1, TRBJ2-7)
CASSEPIAATTEQYF

SEQ ID NO: 128277 - protein, 15 aa, Homo sapiens
  CDR3 for alpha chain variable domain of TCR clone 64139 (TRAV17, TRAJ35)
CATAFVIGFGNVLHC

SEQ ID NO: 128278 - protein, 14 aa, Homo sapiens
  CDR3 for beta chain variable domain of TCR clone 64139 (TRBV18, TRBJ2-7)
CASSPRGGAYEQYF

SEQ ID NO: 128279 - protein, 10 aa, Homo sapiens
  CDR3 for alpha chain variable domain of TCR clone 64140 (TRAV16, TRAJ22)
SAMYHRQLTF

SEQ ID NO: 128280 - protein, 15 aa, Homo sapiens
  CDR3 for beta chain variable domain of TCR clone 64140 (TRBV7-9, TRBJ1-6)
CASSSPGRGNSPLHF

SEQ ID NO: 128281 - protein, 14 aa, Homo sapiens
  CDR3 for alpha chain variable domain of TCR clone 64141 (TRAV1-2, TRAJ8)
CAVREDTGFQKLVF

SEQ ID NO: 128282 - protein, 12 aa, Homo sapiens
  CDR3 for beta chain variable domain of TCR clone 64141 (TRBV5-1, TRBJ1-2)
CASSQDTYGYTF

SEQ ID NO: 128283 - protein, 15 aa, Homo sapiens
  CDR3 for alpha chain variable domain of TCR clone 64142 (TRAV3, TRAJ47)
CAARDIGEYGNKLVF

SEQ ID NO: 128284 - protein, 14 aa, Homo sapiens
  CDR3 for beta chain variable domain of TCR clone 64142 (TRBV13, TRBJ2-5)
CASSLERVGETQYF

SEQ ID NO: 128285 - protein, 13 aa, Homo sapiens
  CDR3 for alpha chain variable domain of TCR clone 64143 (TRAV23/DV6, TRAJ16)
CAASISDGQKLLF

SEQ ID NO: 128286 - protein, 15 aa, Homo sapiens
  CDR3 for beta chain variable domain of TCR clone 64143 (TRBV2, TRBJ2-2)
CASSRETVGTWELFL

SEQ ID NO: 128287 - protein, 13 aa, Homo sapiens
  CDR3 for alpha chain variable domain of TCR clone 64144 (TRAV21, TRAJ27)
CAARPGNAGESTF

SEQ ID NO: 128288 - protein, 13 aa, Homo sapiens
  CDR3 for beta chain variable domain of TCR clone 64144 (TRBV10-3, TRBJ2-7)
CASKLAVNYEQYF

SEQ ID NO: 128289 - protein, 15 aa, Homo sapiens
  CDR3 for alpha chain variable domain of TCR clone 64145 (TRAV21, TRAJ53)
CATLNSGGSNYKLTS

SEQ ID NO: 128290 - protein, 12 aa, Homo sapiens
  CDR3 for beta chain variable domain of TCR clone 64145 (TRBV18, TRBJ2-1)
CASSSDEDEQFF

SEQ ID NO: 128291 - protein, 14 aa, Homo sapiens
  CDR3 for alpha chain variable domain of TCR clone 64146 (TRAV20, TRAJ56)
CAVQFGGANSKLTF

SEQ ID NO: 128292 - protein, 17 aa, Homo sapiens
  CDR3 for beta chain variable domain of TCR clone 64146 (TRBV11-2, TRBJ2-1)
CASSLYPPGVEYNEQFF

SEQ ID NO: 128293 - protein, 15 aa, Homo sapiens
  CDR3 for alpha chain variable domain of TCR clone 64147 (TRAV3, TRAJ17)
CAVRDTGAAGNKLTF

SEQ ID NO: 128294 - protein, 16 aa, Homo sapiens
  CDR3 for beta chain variable domain of TCR clone 64147 (TRBV12-5, TRBJ2-5)
CASGPRTSGNQETQYF

SEQ ID NO: 128295 - protein, 15 aa, Homo sapiens
  CDR3 for alpha chain variable domain of TCR clone 64148 (TRAV8-3, TRAJ45)
CASSYSGGGADGLTF

SEQ ID NO: 128296 - protein, 15 aa, Homo sapiens
  CDR3 for beta chain variable domain of TCR clone 64148 (TRBV7-9, TRBJ1-4)
CASSARTGGNEKLFF

SEQ ID NO: 128297 - protein, 13 aa, Homo sapiens
  CDR3 for alpha chain variable domain of TCR clone 64149 (TRAV21, TRAJ20)
CAVGLRVDYKLSF

SEQ ID NO: 128298 - protein, 16 aa, Homo sapiens
  CDR3 for beta chain variable domain of TCR clone 64149 (TRBV19, TRBJ2-1)
CASSKAGPSAYNEQFF

SEQ ID NO: 128299 - protein, 14 aa, Homo sapiens
  CDR3 for alpha chain variable domain of TCR clone 64150 (TRAV20, TRAJ29)
CAVQAWVGNTPLVF

SEQ ID NO: 128300 - protein, 15 aa, Homo sapiens
  CDR3 for beta chain variable domain of TCR clone 64150 (TRBV29-1, TRBJ2-7)
CSVEFFDKGSYEQYF

SEQ ID NO: 128301 - protein, 13 aa, Homo sapiens
  CDR3 for alpha chain variable domain of TCR clone 64151 (TRAV12-3, TRAJ7)
CAMSASGNNRLAF

SEQ ID NO: 128302 - protein, 14 aa, Homo sapiens
  CDR3 for beta chain variable domain of TCR clone 64151 (TRBV19, TRBJ2-1)
CASPTFVLSGEQFF

SEQ ID NO: 128303 - protein, 15 aa, Homo sapiens
  CDR3 for alpha chain variable domain of TCR clone 64152 (TRAV26-2, TRAJ54)
CILRDVGQGAQKLVL

SEQ ID NO: 128304 - protein, 13 aa, Homo sapiens
  CDR3 for beta chain variable domain of TCR clone 64152 (TRBV7-9, TRBJ1-1)
CASSLAGVTEAFF

SEQ ID NO: 128305 - protein, 10 aa, Homo sapiens
  CDR3 for alpha chain variable domain of TCR clone 64153 (TRAV26-1, TRAJ40)
CIAGTYKYIF

SEQ ID NO: 128306 - protein, 15 aa, Homo sapiens
  CDR3 for beta chain variable domain of TCR clone 64153 (TRBV19, TRBJ2-1)
CASSSPGVPFDEQFF

SEQ ID NO: 128307 - protein, 15 aa, Homo sapiens
  CDR3 for alpha chain variable domain of TCR clone 64154 (TRAV35, TRAJ50)
CAGQLRKTSYDKVIF

SEQ ID NO: 128308 - protein, 12 aa, Homo sapiens
  CDR3 for beta chain variable domain of TCR clone 64154 (TRBV5-1, TRBJ2-5)
GASSLGLETQYF

SEQ ID NO: 128309 - protein, 13 aa, Homo sapiens
  CDR3 for alpha chain variable domain of TCR clone 64155 (TRAV21, TRAJ27)
CAARPGNAGKSTF

SEQ ID NO: 128310 - protein, 13 aa, Homo sapiens
  CDR3 for beta chain variable domain of TCR clone 64155 (TRBV12-4, TRBJ2-7)
CASSFVPTAEQYF

SEQ ID NO: 128311 - protein, 16 aa, Homo sapiens
  CDR3 for alpha chain variable domain of TCR clone 64156 (TRAV16, TRAJ52)
CALSAAGGTSYGKLTF

SEQ ID NO: 128312 - protein, 12 aa, Homo sapiens
  CDR3 for beta chain variable domain of TCR clone 64156 (TRBV11-2, TRBJ2-2)
CASSLGGGELFF

SEQ ID NO: 128313 - protein, 13 aa, Homo sapiens
  CDR3 for alpha chain variable domain of TCR clone 64157 (TRAV12-3, TRAJ5)
CAMIYTGRRALTF

SEQ ID NO: 128314 - protein, 12 aa, Homo sapiens
  CDR3 for beta chain variable domain of TCR clone 64157 (TRBV18, TRBJ1-4)
CASSPSGEKLFF

SEQ ID NO: 128315 - protein, 12 aa, Homo sapiens
  CDR3 for alpha chain variable domain of TCR clone 64158 (TRAV12-3, TRAJ17)
CAMTLTGNRLTF

SEQ ID NO: 128316 - protein, 16 aa, Homo sapiens
  CDR3 for beta chain variable domain of TCR clone 64158 (TRBV15, TRBJ2-3)
CATSRDLGIVTDTQYF

SEQ ID NO: 128317 - protein, 14 aa, Homo sapiens
  CDR3 for alpha chain variable domain of TCR clone 64159 (TRAV21, TRAJ38)
CAVMGAGNNRKLIW

SEQ ID NO: 128318 - protein, 15 aa, Homo sapiens
  CDR3 for beta chain variable domain of TCR clone 64159 (TRBV20-1, TRBJ2-7)
CSARDRVSGMDEQYF

SEQ ID NO: 128319 - protein, 19 aa, Homo sapiens
  CDR3 for alpha chain variable domain of TCR clone 64160 (TRAV26-1, TRAJ29)
CCVLLHRQSRGIRKHTSFF

SEQ ID NO: 128320 - protein, 14 aa, Homo sapiens
  CDR3 for beta chain variable domain of TCR clone 64160 (TRBV18, TRBJ2-5)
CASSPGVSQETQYF

SEQ ID NO: 128321 - protein, 15 aa, Homo sapiens
  CDR3 for alpha chain variable domain of TCR clone 64161 (TRAV26-1, TRAJ44)
CIARANTGTASKLTF

SEQ ID NO: 128322 - protein, 12 aa, Homo sapiens
  CDR3 for beta chain variable domain of TCR clone 64161 (TRBV7-3, TRBJ2-1)
CASSLGFNEQFF

SEQ ID NO: 128323 - protein, 15 aa, Homo sapiens
  CDR3 for alpha chain variable domain of TCR clone 64162 (TRAV12-1, TRAJ44)
CVVFVNTGTASKLTF

SEQ ID NO: 128324 - protein, 16 aa, Homo sapiens
  CDR3 for beta chain variable domain of TCR clone 64162 (TRBV20-1, TRBJ2-5)
CSPGGTSEGYMETQYF

SEQ ID NO: 128325 - protein, 12 aa, Homo sapiens
  CDR3 for alpha chain variable domain of TCR clone 64163 (TRAV29/DV5, TRAJ49)
CEATDTGNQFYF

SEQ ID NO: 128326 - protein, 12 aa, Homo sapiens
  CDR3 for beta chain variable domain of TCR clone 64163 (TRBV12-4, TRBJ2-7)
CASSLGGYEQYF

SEQ ID NO: 128327 - protein, 13 aa, Homo sapiens
  CDR3 for alpha chain variable domain of TCR clone 64164 (TRAV35, TRAJ53)
CTGQESSNYKLTF

SEQ ID NO: 128328 - protein, 11 aa, Homo sapiens
  CDR3 for beta chain variable domain of TCR clone 64164 (TRBV29-1, TRBJ2-5)
CSEDRTGTQYF

SEQ ID NO: 128329 - protein, 14 aa, Homo sapiens
  CDR3 for alpha chain variable domain of TCR clone 64165 (TRAV12-1, TRAJ42)
CVVIYGGSQGNLIF

SEQ ID NO: 128330 - protein, 13 aa, Homo sapiens
  CDR3 for beta chain variable domain of TCR clone 64165 (TRBV18, TRBJ2-5)
CVSSPPGKETQYF

SEQ ID NO: 128331 - protein, 11 aa, Homo sapiens
  CDR3 for alpha chain variable domain of TCR clone 64166 (TRAV21, TRAJ48)
CAVDGNEKLTF

SEQ ID NO: 128332 - protein, 16 aa, Homo sapiens
  CDR3 for beta chain variable domain of TCR clone 64166 (TRBV12-4, TRBJ1-5)
CASSSGPRGSNQPKHF

SEQ ID NO: 128333 - protein, 12 aa, Homo sapiens
  CDR3 for alpha chain variable domain of TCR clone 64167 (TRAV21, TRAJ31)
CVLAGNNARLMF

SEQ ID NO: 128334 - protein, 16 aa, Homo sapiens
  CDR3 for beta chain variable domain of TCR clone 64167 (TRBV13, TRBJ2-2)
CASSPRTGEHTGELFF

SEQ ID NO: 128335 - protein, 12 aa, Homo sapiens
  CDR3 for alpha chain variable domain of TCR clone 64168 (TRAV13-1, TRAJ48)
CAANFGNEKLTF

SEQ ID NO: 128336 - protein, 14 aa, Homo sapiens
  CDR3 for beta chain variable domain of TCR clone 64168 (TRBV11-2, TRBJ2-1)
CASSLEVANNEQFF

SEQ ID NO: 128337 - protein, 14 aa, Homo sapiens
  CDR3 for alpha chain variable domain of TCR clone 64169 (TRAV17, TRAJ57)
CATDPQGGSEKLVF

SEQ ID NO: 128338 - protein, 14 aa, Homo sapiens
  CDR3 for beta chain variable domain of TCR clone 64169 (TRBV7-8, TRBJ2-7)
CASSPRDRVCEQYF

SEQ ID NO: 128339 - protein, 16 aa, Homo sapiens
  CDR3 for alpha chain variable domain of TCR clone 64170 (TRAV3, TRAJ23)
CAVKIGIYNQGGKLIF

SEQ ID NO: 128340 - protein, 17 aa, Homo sapiens
  CDR3 for beta chain variable domain of TCR clone 64170 (TRBV10-3, TRBJ2-6)
CAISDSTAPSGANVLTF

SEQ ID NO: 128341 - protein, 14 aa, Homo sapiens
  CDR3 for alpha chain variable domain of TCR clone 64171 (TRAV8-2, TRAJ4)
CVMSPSGGYNKLIF

SEQ ID NO: 128342 - protein, 15 aa, Homo sapiens
  CDR3 for beta chain variable domain of TCR clone 64171 (TRBV4-1, TRBJ1-4)
CASSDTGGTNEKLFF

SEQ ID NO: 128343 - protein, 13 aa, Homo sapiens
  CDR3 for alpha chain variable domain of TCR clone 64172 (TRAV8-3, TRAJ48)
CAVVPFGNETLTF

SEQ ID NO: 128344 - protein, 15 aa, Homo sapiens
  CDR3 for beta chain variable domain of TCR clone 64172 (TRBV11-2, TRBJ2-1)
CASSSPSTRYNEQFF

SEQ ID NO: 128345 - protein, 12 aa, Homo sapiens
  CDR3 for alpha chain variable domain of TCR clone 64173 (TRAV13-2, TRAJ23)
CAERHRGGKLIF

SEQ ID NO: 128346 - protein, 12 aa, Homo sapiens
  CDR3 for beta chain variable domain of TCR clone 64173 (TRBV11-2, TRBJ2-2)
CASSLPTGELFF

SEQ ID NO: 128347 - protein, 14 aa, Homo sapiens
  CDR3 for alpha chain variable domain of TCR clone 64174 (TRAV27, TRAJ17)
CRSTIRAAGNNLTF

SEQ ID NO: 128348 - protein, 16 aa, Homo sapiens
  CDR3 for beta chain variable domain of TCR clone 64174 (TRBV5-7, TRBJ2-5)
CASTLAPAGGRETQYF

SEQ ID NO: 128349 - protein, 14 aa, Homo sapiens
  CDR3 for alpha chain variable domain of TCR clone 64175 (TRAV16, TRAJ32)
CALKSGGATNKLIF

SEQ ID NO: 128350 - protein, 20 aa, Homo sapiens
  CDR3 for beta chain variable domain of TCR clone 64175 (TRBV7-8, TRBJ2-2)
CASSHLFPGPTIHITGELFF

SEQ ID NO: 128351 - protein, 13 aa, Homo sapiens
  CDR3 for alpha chain variable domain of TCR clone 64176 (TRAV8-6, TRAJ50)
CAVIKTSYDKVIF

SEQ ID NO: 128352 - protein, 13 aa, Homo sapiens
  CDR3 for beta chain variable domain of TCR clone 64176 (TRBV4-2, TRBJ1-1)
CASSQAGNNEAFF

SEQ ID NO: 128353 - protein, 14 aa, Homo sapiens
  CDR3 for alpha chain variable domain of TCR clone 64177 (TRAV23/DV6, TRAJ45)
CAASWGGGADGLTF

SEQ ID NO: 128354 - protein, 13 aa, Homo sapiens
  CDR3 for beta chain variable domain of TCR clone 64177 (TRBV15, TRBJ2-7)
CATSTTGHYEQYF

SEQ ID NO: 128355 - protein, 12 aa, Homo sapiens
  CDR3 for alpha chain variable domain of TCR clone 64178 (TRAV12-1, TRAJ40)
CVVYSGTYKYIV

SEQ ID NO: 128356 - protein, 18 aa, Homo sapiens
  CDR3 for beta chain variable domain of TCR clone 64178 (TRBV11-2, TRBJ2-3)
CASSLGGASRGAPNTQYF

SEQ ID NO: 128357 - protein, 13 aa, Homo sapiens
  CDR3 for alpha chain variable domain of TCR clone 64179 (TRAV12-1, TRAJ16)
CVVNGPDGQKLLF

SEQ ID NO: 128358 - protein, 13 aa, Homo sapiens
  CDR3 for beta chain variable domain of TCR clone 64179 (TRBV2, TRBJ1-1)
CARNPTGGFHAIF

SEQ ID NO: 128359 - protein, 13 aa, Homo sapiens
  CDR3 for alpha chain variable domain of TCR clone 64180 (TRAV17, TRAJ4)
CATKSGGYIKLIF

SEQ ID NO: 128360 - protein, 14 aa, Homo sapiens
  CDR3 for beta chain variable domain of TCR clone 64180 (TRBV20-1, TRBJ1-5)
CSARDDRGNQPQHF

SEQ ID NO: 128361 - protein, 13 aa, Homo sapiens
  CDR3 for alpha chain variable domain of TCR clone 64181 (TRAV35, TRAJ42)
CAGFPGSQGNLIF

SEQ ID NO: 128362 - protein, 12 aa, Homo sapiens
  CDR3 for beta chain variable domain of TCR clone 64181 (TRBV2, TRBJ2-7)
CASTYRTDEQYF

SEQ ID NO: 128363 - protein, 13 aa, Homo sapiens
  CDR3 for alpha chain variable domain of TCR clone 64182 (TRAV8-3, TRAJ48)
CAVVPFGNEKLTF

SEQ ID NO: 128364 - protein, 13 aa, Homo sapiens
  CDR3 for beta chain variable domain of TCR clone 64182 (TRBV18, TRBJ2-7)
CQLTERGAYEQYF

SEQ ID NO: 128365 - protein, 11 aa, Homo sapiens
  CDR3 for alpha chain variable domain of TCR clone 64183 (TRAV27, TRAJ45)
CAGAQEEVLTD

SEQ ID NO: 128366 - protein, 17 aa, Homo sapiens
  CDR3 for beta chain variable domain of TCR clone 64183 (TRBV11-2, TRBJ2-1)
CASSLYPPGVEYNEQSF

SEQ ID NO: 128367 - protein, 15 aa, Homo sapiens
  CDR3 for alpha chain variable domain of TCR clone 64184 (TRAV26-1, TRAJ29)
CIVRVEGSGNTPLVF

SEQ ID NO: 128368 - protein, 14 aa, Homo sapiens
  CDR3 for beta chain variable domain of TCR clone 64184 (TRBV25-1, TRBJ1-1)
CASTHLGGDTEAFF

SEQ ID NO: 128369 - protein, 11 aa, Homo sapiens
  CDR3 for alpha chain variable domain of TCR clone 64185 (TRAV3, TRAJ21)
CAVGNFNKFFF

SEQ ID NO: 128370 - protein, 13 aa, Homo sapiens
  CDR3 for beta chain variable domain of TCR clone 64185 (TRBV20-1, TRBJ2-5)
CSARGDYQETQYF

SEQ ID NO: 128371 - protein, 12 aa, Homo sapiens
  CDR3 for alpha chain variable domain of TCR clone 64186 (TRAV27, TRAJ35)
CAGADFGNVLHC

SEQ ID NO: 128372 - protein, 16 aa, Homo sapiens
  CDR3 for beta chain variable domain of TCR clone 64186 (TRBV6-1, TRBJ2-1)
CAGISRQGSSYNEQFF

SEQ ID NO: 128373 - protein, 14 aa, Homo sapiens
  CDR3 for alpha chain variable domain of TCR clone 64187 (TRAV12-1, TRAJ15)
CLPQANQAGTALIF

SEQ ID NO: 128374 - protein, 13 aa, Homo sapiens
  CDR3 for beta chain variable domain of TCR clone 64187 (TRBV7-2, TRBJ2-4)
CASSREHANIQYF

SEQ ID NO: 128375 - protein, 15 aa, Homo sapiens
  CDR3 for alpha chain variable domain of TCR clone 64188 (TRAV12-3, TRAJ42)
CAMITSVGSQGNLIF

SEQ ID NO: 128376 - protein, 14 aa, Homo sapiens
  CDR3 for beta chain variable domain of TCR clone 64188 (TRBV12-5, TRBJ2-5)
CASGSRTHQETQYF

SEQ ID NO: 128377 - protein, 15 aa, Homo sapiens
  CDR3 for alpha chain variable domain of TCR clone 64189 (TRAV12-3, TRAJ6)
CAMSATTGGSYIPTF

SEQ ID NO: 128378 - protein, 13 aa, Homo sapiens
  CDR3 for beta chain variable domain of TCR clone 64189 (TRBV28, TRBJ1-5)
CASRMTGDQPQHF

SEQ ID NO: 128379 - protein, 13 aa, Homo sapiens
  CDR3 for alpha chain variable domain of TCR clone 64190 (TRAV8-1, TRAJ23)
CAWRDNQGGKLIF

SEQ ID NO: 128380 - protein, 14 aa, Homo sapiens
  CDR3 for beta chain variable domain of TCR clone 64190 (TRBV7-2, TRBJ2-7)
CASSPKTSFYEQYF

SEQ ID NO: 128381 - protein, 12 aa, Homo sapiens
  CDR3 for alpha chain variable domain of TCR clone 64191 (TRAV13-1, TRAJ15)
CAASHAGTALIF

SEQ ID NO: 128382 - protein, 14 aa, Homo sapiens
  CDR3 for beta chain variable domain of TCR clone 64191 (TRBV19, TRBJ2-2)
CASSTLHRSGELFF

SEQ ID NO: 128383 - protein, 17 aa, Homo sapiens
  CDR3 for alpha chain variable domain of TCR clone 64192 (TRAV3, TRAJ12)
CAVRDGGRLDSSYKLIF

SEQ ID NO: 128384 - protein, 14 aa, Homo sapiens
  CDR3 for beta chain variable domain of TCR clone 64192 (TRBV7-9, TRBJ1-2)
CASSRQGANYGYTF

SEQ ID NO: 128385 - protein, 14 aa, Homo sapiens
  CDR3 for alpha chain variable domain of TCR clone 64193 (TRAV2, TRAJ37)
CAVDFTSNTGKLIF

SEQ ID NO: 128386 - protein, 15 aa, Homo sapiens
  CDR3 for beta chain variable domain of TCR clone 64193 (TRBV20-1, TRBJ1-1)
CSSSRGVTGNTEAFF

SEQ ID NO: 128387 - protein, 13 aa, Homo sapiens
  CDR3 for alpha chain variable domain of TCR clone 64194 (TRAV12-1, TRAJ6)
CVVFPGGSYIPTF

SEQ ID NO: 128388 - protein, 13 aa, Homo sapiens
  CDR3 for beta chain variable domain of TCR clone 64194 (TRBV28, TRBJ1-2)
CAGRDRGNYGYTF

SEQ ID NO: 128389 - protein, 18 aa, Homo sapiens
  CDR3 for alpha chain variable domain of TCR clone 64195 (TRAV21, TRAJ52)
CAVRPSPAGGTSHGKLTF

SEQ ID NO: 128390 - protein, 15 aa, Homo sapiens
  CDR3 for beta chain variable domain of TCR clone 64195 (TRBV27, TRBJ2-1)
CASSNGGGSSNEQFF

SEQ ID NO: 128391 - protein, 14 aa, Homo sapiens
  CDR3 for alpha chain variable domain of TCR clone 64196 (TRAV1-2, TRAJ16)
CAVNRFSDGQKLLF

SEQ ID NO: 128392 - protein, 15 aa, Homo sapiens
  CDR3 for beta chain variable domain of TCR clone 64196 (TRBV19, TRBJ2-7)
CASSFNSGGVWEQYF

SEQ ID NO: 128393 - protein, 15 aa, Homo sapiens
  CDR3 for alpha chain variable domain of TCR clone 64197 (TRAV12-3, TRAJ42)
CAMGGHGGSQGNLIF

SEQ ID NO: 128394 - protein, 13 aa, Homo sapiens
  CDR3 for beta chain variable domain of TCR clone 64197 (TRBV19, TRBJ2-5)
CASSGRAGETQYF

SEQ ID NO: 128395 - protein, 17 aa, Homo sapiens
  CDR3 for alpha chain variable domain of TCR clone 64198 (TRAV26-1, TRAJ37)
CIVRVITVSSNTGKLIF

SEQ ID NO: 128396 - protein, 16 aa, Homo sapiens
  CDR3 for beta chain variable domain of TCR clone 64198 (TRBV13, TRBJ2-2)
GASSPRTGEHTGELFF

SEQ ID NO: 128397 - protein, 14 aa, Homo sapiens
  CDR3 for alpha chain variable domain of TCR clone 64199 (TRAV12-3, TRAJ5)
CAMTWDTGRRALTF

SEQ ID NO: 128398 - protein, 14 aa, Homo sapiens
  CDR3 for beta chain variable domain of TCR clone 64199 (TRBV10-2, TRBJ1-5)
CASSSTGRNQTQHF

SEQ ID NO: 128399 - protein, 14 aa, Homo sapiens
  CDR3 for alpha chain variable domain of TCR clone 64200 (TRAV1-2, TRAJ15)
CAVRDRQAGTALIF

SEQ ID NO: 128400 - protein, 17 aa, Homo sapiens
  CDR3 for beta chain variable domain of TCR clone 64200 (TRBV28, TRBJ2-7)
CASSPLHRASGVYEQYF

SEQ ID NO: 128401 - protein, 16 aa, Homo sapiens
  CDR3 for alpha chain variable domain of TCR clone 64201 (TRAV26-1, TRAJ32)
YIVRTNYGGATNKLIF

SEQ ID NO: 128402 - protein, 15 aa, Homo sapiens
  CDR3 for beta chain variable domain of TCR clone 64201 (TRBV11-2, TRBJ2-1)
CASSLGTSGLNEQFF

SEQ ID NO: 128403 - protein, 12 aa, Homo sapiens
  CDR3 for alpha chain variable domain of TCR clone 64202 (TRAV16, TRAJ26)
CALRSYGQNFVF

SEQ ID NO: 128404 - protein, 16 aa, Homo sapiens
  CDR3 for beta chain variable domain of TCR clone 64202 (TRBV12-4, TRBJ2-5)
CASSFFVRGRQETQYF

SEQ ID NO: 128405 - protein, 16 aa, Homo sapiens
  CDR3 for alpha chain variable domain of TCR clone 64203 (TRAV16, TRAJ52)
CALSAAGGTSYGKLTF

SEQ ID NO: 128406 - protein, 16 aa, Homo sapiens
  CDR3 for beta chain variable domain of TCR clone 64203 (TRBV7-3, TRBJ2-2)
CASSLKRGTLSGELFF

SEQ ID NO: 128407 - protein, 16 aa, Homo sapiens
  CDR3 for alpha chain variable domain of TCR clone 64204 (TRAV3, TRAJ21)
CAVRDIERGNFNKFYF

SEQ ID NO: 128408 - protein, 14 aa, Homo sapiens
  CDR3 for beta chain variable domain of TCR clone 64204 (TRBV12-5, TRBJ2-5)
CASGSRTHQETQYF

SEQ ID NO: 128409 - protein, 16 aa, Homo sapiens
  CDR3 for alpha chain variable domain of TCR clone 64205 (TRAV38-1, TRAJ37)
CAFKGDGSSNAGKLIF

SEQ ID NO: 128410 - protein, 13 aa, Homo sapiens
  CDR3 for beta chain variable domain of TCR clone 64205 (TRBV12-4, TRBJ2-5)
CASSLFRRETQYF

SEQ ID NO: 128411 - protein, 12 aa, Homo sapiens
  CDR3 for alpha chain variable domain of TCR clone 64206 (TRAV22, TRAJ29)
CAPPSGNTPLVF

SEQ ID NO: 128412 - protein, 15 aa, Homo sapiens
  CDR3 for beta chain variable domain of TCR clone 64206 (TRBV5-7, TRBJ2-3)
CASSPGLATTDTQYF

SEQ ID NO: 128413 - protein, 14 aa, Homo sapiens
  CDR3 for alpha chain variable domain of TCR clone 64207 (TRAV35, TRAJ24)
CAGPRRDSWGKLQF

SEQ ID NO: 128414 - protein, 12 aa, Homo sapiens
  CDR3 for beta chain variable domain of TCR clone 64207 (TRBV12-4, TRBJ2-3)
CASRLGQDTQYF

SEQ ID NO: 128415 - protein, 14 aa, Homo sapiens
  CDR3 for alpha chain variable domain of TCR clone 64208 (TRAV20, TRAJ42)
CAVQAGGRQGNLLF

SEQ ID NO: 128416 - protein, 14 aa, Homo sapiens
  CDR3 for beta chain variable domain of TCR clone 64208 (TRBV28, TRBJ1-2)
CASRIQGANYGYTF

SEQ ID NO: 128417 - protein, 14 aa, Homo sapiens
  CDR3 for alpha chain variable domain of TCR clone 64209 (TRAV1-2, TRAJ16)
CAVNRFSDGQKLLF

SEQ ID NO: 128418 - protein, 12 aa, Homo sapiens
  CDR3 for beta chain variable domain of TCR clone 64209 (TRBV6-3, TRBJ2-1)
CASSGSYNEQFF

SEQ ID NO: 128419 - protein, 16 aa, Homo sapiens
  CDR3 for alpha chain variable domain of TCR clone 64210 (TRAV12-2, TRAJ10)
CAVNRGLTGGGNKLTF

SEQ ID NO: 128420 - protein, 12 aa, Homo sapiens
  CDR3 for beta chain variable domain of TCR clone 64210 (TRBV28, TRBJ2-7)
CASSFSSYEQYF

SEQ ID NO: 128421 - protein, 16 aa, Homo sapiens
  CDR3 for alpha chain variable domain of TCR clone 64211 (TRAV38-2/DV8, TRAJ45)
CAYTTTSGGGADGLTF

SEQ ID NO: 128422 - protein, 14 aa, Homo sapiens
  CDR3 for beta chain variable domain of TCR clone 64211 (TRBV7-9, TRBJ2-2)
CASSLGRRTGELFF

SEQ ID NO: 128423 - protein, 11 aa, Homo sapiens
  CDR3 for alpha chain variable domain of TCR clone 64212 (TRAV1-1, TRAJ23)
CAVRQGGKLIF

SEQ ID NO: 128424 - protein, 16 aa, Homo sapiens
  CDR3 for beta chain variable domain of TCR clone 64212 (TRBV7-3, TRBJ2-1)
CASSLEGYRSYNEQFL

SEQ ID NO: 128425 - protein, 13 aa, Homo sapiens
  CDR3 for alpha chain variable domain of TCR clone 64213 (TRAV26-1, TRAJ33)
CIVRIDSNYQLIW

SEQ ID NO: 128426 - protein, 15 aa, Homo sapiens
  CDR3 for beta chain variable domain of TCR clone 64213 (TRBV7-2, TRBJ1-5)
CASSFSAGINQPQHF

SEQ ID NO: 128427 - protein, 12 aa, Homo sapiens
  CDR3 for alpha chain variable domain of TCR clone 64214 (TRAV8-4, TRAJ31)
CAVSDSNARLMF

SEQ ID NO: 128428 - protein, 15 aa, Homo sapiens
  CDR3 for beta chain variable domain of TCR clone 64214 (TRBV11-1, TRBJ2-7)
CASRFWGQGADEQYF

SEQ ID NO: 128429 - protein, 11 aa, Homo sapiens
  CDR3 for alpha chain variable domain of TCR clone 64215 (TRAV2, TRAJ13)
CASGGYQKVTF

SEQ ID NO: 128430 - protein, 11 aa, Homo sapiens
  CDR3 for beta chain variable domain of TCR clone 64215 (TRBV6-3, TRBJ2-3)
CATGQADTQYL

SEQ ID NO: 128431 - protein, 15 aa, Homo sapiens
  CDR3 for alpha chain variable domain of TCR clone 64216 (TRAV38-1, TRAJ37)
CAFIHGSGNTVKLIF

SEQ ID NO: 128432 - protein, 12 aa, Homo sapiens
  CDR3 for beta chain variable domain of TCR clone 64216 (TRBV7-9, TRBJ2-7)
CASSFGSYEQYF

SEQ ID NO: 128433 - protein, 16 aa, Homo sapiens
  CDR3 for alpha chain variable domain of TCR clone 64217 (TRAV20, TRAJ10)
CAVLRGRTGGGNKLTF

SEQ ID NO: 128434 - protein, 14 aa, Homo sapiens
  CDR3 for beta chain variable domain of TCR clone 64217 (TRBV19, TRBJ1-5)
CASRAPDSFLSQHF

SEQ ID NO: 128435 - protein, 10 aa, Homo sapiens
  CDR3 for alpha chain variable domain of TCR clone 64218 (TRAV12-3, TRAJ4)
CAMTGAGTRL

SEQ ID NO: 128436 - protein, 14 aa, Homo sapiens
  CDR3 for beta chain variable domain of TCR clone 64218 (TRBV10-3, TRBJ1-1)
CAISDTDRGVEAFL

SEQ ID NO: 128437 - protein, 16 aa, Homo sapiens
  CDR3 for alpha chain variable domain of TCR clone 64219 (TRAV20, TRAJ22)
CAVQSSSSGSARQLTF

SEQ ID NO: 128438 - protein, 13 aa, Homo sapiens
  CDR3 for beta chain variable domain of TCR clone 64219 (TRBV7-2, TRBJ2-5)
CASSQTSVETQYF

SEQ ID NO: 128439 - protein, 12 aa, Homo sapiens
  CDR3 for alpha chain variable domain of TCR clone 64220 (TRAV2, TRAJ5)
CALDTGRRALIL

SEQ ID NO: 128440 - protein, 15 aa, Homo sapiens
  CDR3 for beta chain variable domain of TCR clone 64220 (TRBV10-3, TRBJ2-1)
CAISDVQDGAYEQFF

SEQ ID NO: 128441 - protein, 16 aa, Homo sapiens
  CDR3 for alpha chain variable domain of TCR clone 64221 (TRAV16, TRAJ52)
CALSAAGGTSYGKLTS

SEQ ID NO: 128442 - protein, 12 aa, Homo sapiens
  CDR3 for beta chain variable domain of TCR clone 64221 (TRBV12-4, TRBJ1-3)
CASSFSGNTIYF

SEQ ID NO: 128443 - protein, 15 aa, Homo sapiens
  CDR3 for alpha chain variable domain of TCR clone 64222 (TRAV26-1, TRAJ22)
CIVRVSFWFCKATAL

SEQ ID NO: 128444 - protein, 14 aa, Homo sapiens
  CDR3 for beta chain variable domain of TCR clone 64222 (TRBV4-1, TRBJ2-2)
CASSQAVNTGELFF

SEQ ID NO: 128445 - protein, 14 aa, Homo sapiens
  CDR3 for alpha chain variable domain of TCR clone 64223 (TRAV9-2, TRAJ39)
CALYIYNAGNMLTF

SEQ ID NO: 128446 - protein, 11 aa, Homo sapiens
  CDR3 for beta chain variable domain of TCR clone 64223 (TRBV20-1, TRBJ2-7)
RSGRQGHEQYF

SEQ ID NO: 128447 - protein, 12 aa, Homo sapiens
  CDR3 for alpha chain variable domain of TCR clone 64224 (TRAV1-1, TRAJ43)
CAPRVSSNDMRF

SEQ ID NO: 128448 - protein, 13 aa, Homo sapiens
  CDR3 for beta chain variable domain of TCR clone 64224 (TRBV7-9, TRBJ1-2)
CASSLKQNYGYTF

SEQ ID NO: 128449 - protein, 10 aa, Homo sapiens
  CDR3 for alpha chain variable domain of TCR clone 64225 (TRAV1-2, TRAJ20)
CACNDYKLSF

SEQ ID NO: 128450 - protein, 15 aa, Homo sapiens
  CDR3 for beta chain variable domain of TCR clone 64225 (TRBV5-1, TRBJ2-3)
CASSVTSGSTDTQYF

SEQ ID NO: 128451 - protein, 17 aa, Homo sapiens
  CDR3 for alpha chain variable domain of TCR clone 64226 (TRAV4, TRAJ13)
CLVGVQGSAGGYQKVTF

SEQ ID NO: 128452 - protein, 18 aa, Homo sapiens
  CDR3 for beta chain variable domain of TCR clone 64226 (TRBV15, TRBJ2-3)
CATSRDGARSWDTDTQYF

SEQ ID NO: 128453 - protein, 13 aa, Homo sapiens
  CDR3 for alpha chain variable domain of TCR clone 64227 (TRAV3, TRAJ27)
CAVRPLGAGKSTF

SEQ ID NO: 128454 - protein, 16 aa, Homo sapiens
  CDR3 for beta chain variable domain of TCR clone 64227 (TRBV6-1, TRBJ2-5)
CASSETLDRGAETQYF

SEQ ID NO: 128455 - protein, 15 aa, Homo sapiens
  CDR3 for alpha chain variable domain of TCR clone 64228 (TRAV8-3, TRAJ45)
CASSYSGGGADGLTF

SEQ ID NO: 128456 - protein, 14 aa, Homo sapiens
  CDR3 for beta chain variable domain of TCR clone 64228 (TRBV7-2, TRBJ1-1)
CASSFLTGTTEAFF

SEQ ID NO: 128457 - protein, 18 aa, Homo sapiens
  CDR3 for alpha chain variable domain of TCR clone 64229 (TRAV26-1, TRAJ23)
CIVRVGLEVWNQGGKLIF

SEQ ID NO: 128458 - protein, 16 aa, Homo sapiens
  CDR3 for beta chain variable domain of TCR clone 64229 (TRBV12-4, TRBJ2-5)
CASSFFFRGRQETQYF

SEQ ID NO: 128459 - protein, 14 aa, Homo sapiens
  CDR3 for alpha chain variable domain of TCR clone 64230 (TRAV12-2, TRAJ17)
CAVLFKAAGNKLTF

SEQ ID NO: 128460 - protein, 12 aa, Homo sapiens
  CDR3 for beta chain variable domain of TCR clone 64230 (TRBV12-4, TRBJ2-7)
CASSLGGYEQYF

SEQ ID NO: 128461 - protein, 14 aa, Homo sapiens
  CDR3 for alpha chain variable domain of TCR clone 64231 (TRAV12-3, TRAJ22)
CAMSLFGTARQLTF

SEQ ID NO: 128462 - protein, 11 aa, Homo sapiens
  CDR3 for beta chain variable domain of TCR clone 64231 (TRBV12-4, TRBJ2-2)
CASSSAGELFF

SEQ ID NO: 128463 - protein, 12 aa, Homo sapiens
  CDR3 for alpha chain variable domain of TCR clone 64232 (TRAV2, TRAJ10)
CAPTGGGNKLTF

SEQ ID NO: 128464 - protein, 16 aa, Homo sapiens
  CDR3 for beta chain variable domain of TCR clone 64232 (TRBV7-3, TRBJ2-2)
CASSLKRGTLSGELFF

SEQ ID NO: 128465 - protein, 12 aa, Homo sapiens
  CDR3 for alpha chain variable domain of TCR clone 64233 (TRAV20, TRAJ39)
CAVGNAGNMLTF

SEQ ID NO: 128466 - protein, 17 aa, Homo sapiens
  CDR3 for beta chain variable domain of TCR clone 64233 (TRBV13, TRBJ2-3)
CASSLSRVAGGRNTQYF

SEQ ID NO: 128467 - protein, 13 aa, Homo sapiens
  CDR3 for alpha chain variable domain of TCR clone 64234 (TRAV1-2, TRAJ9)
CAALNTGGFKTIF

SEQ ID NO: 128468 - protein, 14 aa, Homo sapiens
  CDR3 for beta chain variable domain of TCR clone 64234 (TRBV11-2, TRBJ2-3)
CASSSIASTDTQYF

SEQ ID NO: 128469 - protein, 14 aa, Homo sapiens
  CDR3 for alpha chain variable domain of TCR clone 64235 (TRAV3, TRAJ22)
CAVRDYGSARQLTF

SEQ ID NO: 128470 - protein, 15 aa, Homo sapiens
  CDR3 for beta chain variable domain of TCR clone 64235 (TRBV11-3, TRBJ1-3)
CASSLFGPSGNTIYF

SEQ ID NO: 128471 - protein, 13 aa, Homo sapiens
  CDR3 for alpha chain variable domain of TCR clone 64236 (TRAV16, TRAJ48)
CSPLKFGNEKLTF

SEQ ID NO: 128472 - protein, 11 aa, Homo sapiens
  CDR3 for beta chain variable domain of TCR clone 64236 (TRBV7-9, TRBJ2-3)
CASSPTDTQYF

SEQ ID NO: 128473 - protein, 19 aa, Homo sapiens
  CDR3 for alpha chain variable domain of TCR clone 64237 (TRAV21, TRAJ20)
SLVTKPPTSVLPNDYKLSF

SEQ ID NO: 128474 - protein, 14 aa, Homo sapiens
  CDR3 for beta chain variable domain of TCR clone 64237 (TRBV7-2, TRBJ1-3)
CASSRLRSGNTIYF

SEQ ID NO: 128475 - protein, 16 aa, Homo sapiens
  CDR3 for alpha chain variable domain of TCR clone 64238 (TRAV3, TRAJ10)
CAVRDMREGGGNKLTF

SEQ ID NO: 128476 - protein, 13 aa, Homo sapiens
  CDR3 for beta chain variable domain of TCR clone 64238 (TRBV4-2, TRBJ1-1)
CASSQAGNTEAFF

SEQ ID NO: 128477 - protein, 12 aa, Homo sapiens
  CDR3 for alpha chain variable domain of TCR clone 64239 (TRAV3, TRAJ31)
CAVRDGNARLMF

SEQ ID NO: 128478 - protein, 14 aa, Homo sapiens
  CDR3 for beta chain variable domain of TCR clone 64239 (TRBV25-1, TRBJ1-1)
CASTHLGGNTEAFF

SEQ ID NO: 128479 - protein, 15 aa, Homo sapiens
  CDR3 for alpha chain variable domain of TCR clone 64240 (TRAV12-3, TRAJ53)
CNERPIEGSNYKLTF

SEQ ID NO: 128480 - protein, 14 aa, Homo sapiens
  CDR3 for beta chain variable domain of TCR clone 64240 (TRBV7-3, TRBJ1-1)
CASSLKGGNTEAFF

SEQ ID NO: 128481 - protein, 15 aa, Homo sapiens
  CDR3 for alpha chain variable domain of TCR clone 64241 (TRAV26-1, TRAJ29)
CIVRVEGSGNTPLVF

SEQ ID NO: 128482 - protein, 14 aa, Homo sapiens
  CDR3 for beta chain variable domain of TCR clone 64241 (TRBV7-9, TRBJ2-2)
CASSLGHRTGELFF

SEQ ID NO: 128483 - protein, 12 aa, Homo sapiens
  CDR3 for alpha chain variable domain of TCR clone 64242 (TRAV21, TRAJ23)
CAVMLQGGKLIF

SEQ ID NO: 128484 - protein, 12 aa, Homo sapiens
  CDR3 for beta chain variable domain of TCR clone 64242 (TRBV7-9, TRBJ2-7)
CASSLQGYEQYF

SEQ ID NO: 128485 - protein, 14 aa, Homo sapiens
  CDR3 for alpha chain variable domain of TCR clone 64243 (TRAV30, TRAJ33)
CGTVAPRSNYQLIW

SEQ ID NO: 128486 - protein, 14 aa, Homo sapiens
  CDR3 for beta chain variable domain of TCR clone 64243 (TRBV19, TRBJ2-1)
CASPTFVLSGGQFF

SEQ ID NO: 128487 - protein, 15 aa, Homo sapiens
  CDR3 for alpha chain variable domain of TCR clone 64244 (TRAV3, TRAJ4)
CAVRDGTGGYNKLIS

SEQ ID NO: 128488 - protein, 16 aa, Homo sapiens
  CDR3 for beta chain variable domain of TCR clone 64244 (TRBV27, TRBJ2-2)
CASSSSGVSNAGELFF

SEQ ID NO: 128489 - protein, 16 aa, Homo sapiens
  CDR3 for alpha chain variable domain of TCR clone 64245 (TRAV26-2, TRAJ52)
CIRGPAGGTSYGKLTF

SEQ ID NO: 128490 - protein, 15 aa, Homo sapiens
  CDR3 for beta chain variable domain of TCR clone 64245 (TRBV5-1, TRBJ2-1)
CASSWGPGPGGEQLF

SEQ ID NO: 128491 - protein, 13 aa, Homo sapiens
  CDR3 for alpha chain variable domain of TCR clone 64246 (TRAV13-1, TRAJ5)
CAARVTGRRALIF

SEQ ID NO: 128492 - protein, 15 aa, Homo sapiens
  CDR3 for beta chain variable domain of TCR clone 64246 (TRBV7-9, TRBJ2-7)
CASSPGGGLTYEQYF

SEQ ID NO: 128493 - protein, 12 aa, Homo sapiens
  CDR3 for alpha chain variable domain of TCR clone 64247 (TRAV16, TRAJ10)
CSRTGGGNKLTF

SEQ ID NO: 128494 - protein, 16 aa, Homo sapiens
  CDR3 for beta chain variable domain of TCR clone 64247 (TRBV7-3, TRBJ2-2)
CASSLKQGTLSGELFF

SEQ ID NO: 128495 - protein, 10 aa, Homo sapiens
  CDR3 for alpha chain variable domain of TCR clone 64248 (TRAV30, TRAJ48)
CGLGNEKLTF

SEQ ID NO: 128496 - protein, 14 aa, Homo sapiens
  CDR3 for beta chain variable domain of TCR clone 64248 (TRBV7-6, TRBJ2-3)
CASSVAGGTDTQYF

SEQ ID NO: 128497 - protein, 16 aa, Homo sapiens
  CDR3 for alpha chain variable domain of TCR clone 64249 (TRAV3, TRAJ21)
CAVRDIERGNFNKFYF

SEQ ID NO: 128498 - protein, 16 aa, Homo sapiens
  CDR3 for beta chain variable domain of TCR clone 64249 (TRBV7-9, TRBJ2-1)
CASSDVAGGSYNEQFF

SEQ ID NO: 128499 - protein, 18 aa, Homo sapiens
  CDR3 for alpha chain variable domain of TCR clone 64250 (TRAV21, TRAJ52)
CAVRPSPAGGTSYGKLTF

SEQ ID NO: 128500 - protein, 17 aa, Homo sapiens
  CDR3 for beta chain variable domain of TCR clone 64250 (TRBV7-3, TRBJ2-3)
RASSLMKRMRGADTQYF

SEQ ID NO: 128501 - protein, 14 aa, Homo sapiens
  CDR3 for alpha chain variable domain of TCR clone 64251 (TRAV8-3, TRAJ9)
CAVIYNTGGFKTIF

SEQ ID NO: 128502 - protein, 14 aa, Homo sapiens
  CDR3 for beta chain variable domain of TCR clone 64251 (TRBV7-3, TRBJ2-2)
CASSSGGYTGELFF

SEQ ID NO: 128503 - protein, 12 aa, Homo sapiens
  CDR3 for alpha chain variable domain of TCR clone 64252 (TRAV3, TRAJ43)
CAVRDPNNDMRF

SEQ ID NO: 128504 - protein, 13 aa, Homo sapiens
  CDR3 for beta chain variable domain of TCR clone 64252 (TRBV20-1, TRBJ1-1)
CSAPLGGGTEAFF

SEQ ID NO: 128505 - protein, 12 aa, Homo sapiens
  CDR3 for alpha chain variable domain of TCR clone 64253 (TRAV8-3, TRAJ26)
CAGDNYGQNFVF

SEQ ID NO: 128506 - protein, 12 aa, Homo sapiens
  CDR3 for beta chain variable domain of TCR clone 64253 (TRBV12-4, TRBJ2-1)
CASSLVRVEQFF

SEQ ID NO: 128507 - protein, 17 aa, Homo sapiens
  CDR3 for alpha chain variable domain of TCR clone 64254 (TRAV3, TRAJ42)
CAVSDRDYGGSQGNLIF

SEQ ID NO: 128508 - protein, 15 aa, Homo sapiens
  CDR3 for beta chain variable domain of TCR clone 64254 (TRBV2, TRBJ2-7)
CASSEGLARSYEQYF

SEQ ID NO: 128509 - protein, 10 aa, Homo sapiens
  CDR3 for alpha chain variable domain of TCR clone 64255 (TRAV30, TRAJ48)
CGIGNEKLTF

SEQ ID NO: 128510 - protein, 14 aa, Homo sapiens
  CDR3 for beta chain variable domain of TCR clone 64255 (TRBV7-6, TRBJ2-3)
CASSVAGGTDTQCF

SEQ ID NO: 128511 - protein, 13 aa, Homo sapiens
  CDR3 for alpha chain variable domain of TCR clone 64256 (TRAV8-3, TRAJ36)
CAVGATGANNLFF

SEQ ID NO: 128512 - protein, 14 aa, Homo sapiens
  CDR3 for beta chain variable domain of TCR clone 64256 (TRBV5-4, TRBJ1-1)
CASSLDSRRDEAFF

SEQ ID NO: 128513 - protein, 14 aa, Homo sapiens
  CDR3 for alpha chain variable domain of TCR clone 64257 (TRAV12-1, TRAJ27)
CGEHIRTNAGKSTF

SEQ ID NO: 128514 - protein, 15 aa, Homo sapiens
  CDR3 for beta chain variable domain of TCR clone 64257 (TRBV19, TRBJ1-1)
CASTSGQIQNTEAFS

SEQ ID NO: 128515 - protein, 13 aa, Homo sapiens
  CDR3 for alpha chain variable domain of TCR clone 64258 (TRAV17, TRAJ5)
CAPMDAGRRALTF

SEQ ID NO: 128516 - protein, 15 aa, Homo sapiens
  CDR3 for beta chain variable domain of TCR clone 64258 (TRBV6-6, TRBJ2-5)
CASSPGGGLEETQYF

SEQ ID NO: 128517 - protein, 18 aa, Homo sapiens
  CDR3 for alpha chain variable domain of TCR clone 64259 (TRAV26-1, TRAJ23)
CIVRVGLEVWNQRGKLIF

SEQ ID NO: 128518 - protein, 16 aa, Homo sapiens
  CDR3 for beta chain variable domain of TCR clone 64259 (TRBV12-4, TRBJ2-5)
CASSFFVRGRQETQYF

SEQ ID NO: 128519 - protein, 16 aa, Homo sapiens
  CDR3 for alpha chain variable domain of TCR clone 64260 (TRAV30, TRAJ24)
CGTEIVDADSWGKSQF

SEQ ID NO: 128520 - protein, 18 aa, Homo sapiens
  CDR3 for beta chain variable domain of TCR clone 64260 (TRBV7-9, TRBJ2-7)
CASSLTTSGSRTWYEQYF

SEQ ID NO: 128521 - protein, 12 aa, Homo sapiens
  CDR3 for alpha chain variable domain of TCR clone 64261 (TRAV12-3, TRAJ17)
CAMTLTGNKLTF

SEQ ID NO: 128522 - protein, 15 aa, Homo sapiens
  CDR3 for beta chain variable domain of TCR clone 64261 (TRBV19, TRBJ2-1)
CASSILGEGRSEQFF

SEQ ID NO: 128523 - protein, 12 aa, Homo sapiens
  CDR3 for alpha chain variable domain of TCR clone 64262 (TRAV12-3, TRAJ17)
CAMTLTGNKLTF

SEQ ID NO: 128524 - protein, 16 aa, Homo sapiens
  CDR3 for beta chain variable domain of TCR clone 64262 (TRBV15, TRBJ2-3)
CATSRDLGIVTGTQYF

SEQ ID NO: 128525 - protein, 16 aa, Homo sapiens
  CDR3 for alpha chain variable domain of TCR clone 64263 (TRAV1-2, TRAJ10)
CAVRGVLTGGGNKLTF

SEQ ID NO: 128526 - protein, 20 aa, Homo sapiens
  CDR3 for beta chain variable domain of TCR clone 64263 (TRBV7-8, TRBJ2-2)
CASSHLLPGPTIHITGELFF

SEQ ID NO: 128527 - protein, 13 aa, Homo sapiens
  CDR3 for alpha chain variable domain of TCR clone 64264 (TRAV27, TRAJ56)
CAGKPGANSKLTS

SEQ ID NO: 128528 - protein, 18 aa, Homo sapiens
  CDR3 for beta chain variable domain of TCR clone 64264 (TRBV11-2, TRBJ2-3)
CASSLGGASRGAPNTQYF

SEQ ID NO: 128529 - protein, 14 aa, Homo sapiens
  CDR3 for alpha chain variable domain of TCR clone 64265 (TRAV12-2, TRAJ15)
CAPHTGQAGTALIF

SEQ ID NO: 128530 - protein, 14 aa, Homo sapiens
  CDR3 for beta chain variable domain of TCR clone 64265 (TRBV6-1, TRBJ1-3)
CASVQGGGGNTMYF

SEQ ID NO: 128531 - protein, 16 aa, Homo sapiens
  CDR3 for alpha chain variable domain of TCR clone 64266 (TRAV3, TRAJ37)
CAVRPHGSGNTGKLIF

SEQ ID NO: 128532 - protein, 16 aa, Homo sapiens
  CDR3 for beta chain variable domain of TCR clone 64266 (TRBV11-2, TRBJ2-7)
CASSPTTGGVSYEQYF

SEQ ID NO: 128533 - protein, 16 aa, Homo sapiens
  CDR3 for alpha chain variable domain of TCR clone 64267 (TRAV3, TRAJ37)
CTVRPHGSGNTGKLIF

SEQ ID NO: 128534 - protein, 14 aa, Homo sapiens
  CDR3 for beta chain variable domain of TCR clone 64267 (TRBV25-1, TRBJ1-1)
CASTHLGGNTEAFF

SEQ ID NO: 128535 - protein, 15 aa, Homo sapiens
  CDR3 for alpha chain variable domain of TCR clone 64268 (TRAV17, TRAJ56)
CATDANTGVNSKLTF

SEQ ID NO: 128536 - protein, 14 aa, Homo sapiens
  CDR3 for beta chain variable domain of TCR clone 64268 (TRBV19, TRBJ1-5)
CASSLGTGGQPQHF

SEQ ID NO: 128537 - protein, 14 aa, Homo sapiens
  CDR3 for alpha chain variable domain of TCR clone 64269 (TRAV36/DV7, TRAJ44)
CCGANTGTASKLTF

SEQ ID NO: 128538 - protein, 13 aa, Homo sapiens
  CDR3 for beta chain variable domain of TCR clone 64269 (TRBV7-3, TRBJ1-1)
CASSQDWGAEAFF

SEQ ID NO: 128539 - protein, 11 aa, Homo sapiens
  CDR3 for alpha chain variable domain of TCR clone 64270 (TRAV17, TRAJ49)
CATNTGNQFYF

SEQ ID NO: 128540 - protein, 12 aa, Homo sapiens
  CDR3 for beta chain variable domain of TCR clone 64270 (TRBV2, TRBJ2-7)
CASSGGIGIPYF

SEQ ID NO: 128541 - protein, 15 aa, Homo sapiens
  CDR3 for alpha chain variable domain of TCR clone 64271 (TRAV29/DV5, TRAJ42)
CAAKTDGGSQGNLIF

SEQ ID NO: 128542 - protein, 10 aa, Homo sapiens
  CDR3 for beta chain variable domain of TCR clone 64271 (TRBV5-1, TRBJ2-2)
CASSSQGGTP

SEQ ID NO: 128543 - protein, 12 aa, Homo sapiens
  CDR3 for alpha chain variable domain of TCR clone 64272 (TRAV21, TRAJ11)
CAATSGYSTLTF

SEQ ID NO: 128544 - protein, 14 aa, Homo sapiens
  CDR3 for beta chain variable domain of TCR clone 64272 (TRBV4-2, TRBJ2-7)
CASSPNRAPYEQYF

SEQ ID NO: 128545 - protein, 15 aa, Homo sapiens
  CDR3 for alpha chain variable domain of TCR clone 64273 (TRAV3, TRAJ20)
CAVRVIKLSDYKLSF

SEQ ID NO: 128546 - protein, 15 aa, Homo sapiens
  CDR3 for beta chain variable domain of TCR clone 64273 (TRBV7-9, TRBJ1-6)
CASSSPGRGNSPLHF

SEQ ID NO: 128547 - protein, 15 aa, Homo sapiens
  CDR3 for alpha chain variable domain of TCR clone 64274 (TRAV3, TRAJ20)
CAVRDIKLSDYKLSF

SEQ ID NO: 128548 - protein, 13 aa, Homo sapiens
  CDR3 for beta chain variable domain of TCR clone 64274 (TRBV7-9, TRBJ1-2)
CASSLKQNYGYTF

SEQ ID NO: 128549 - protein, 14 aa, Homo sapiens
  CDR3 for alpha chain variable domain of TCR clone 64275 (TRAV8-3, TRAJ6)
CAVVASGGSYIPTF

SEQ ID NO: 128550 - protein, 17 aa, Homo sapiens
  CDR3 for beta chain variable domain of TCR clone 64275 (TRBV18, TRBJ2-2)
CASSPSDPWQNTGELFF

SEQ ID NO: 128551 - protein, 12 aa, Homo sapiens
  CDR3 for alpha chain variable domain of TCR clone 64276 (TRAV27, TRAJ9)
CAGESGGFKTIF

SEQ ID NO: 128552 - protein, 13 aa, Homo sapiens
  CDR3 for beta chain variable domain of TCR clone 64276 (TRBV7-3, TRBJ1-1)
CASSQDWGAEAFF

SEQ ID NO: 128553 - protein, 14 aa, Homo sapiens
  CDR3 for alpha chain variable domain of TCR clone 64277 (TRAV20, TRAJ4)
CAVRLGGGYNKLIF

SEQ ID NO: 128554 - protein, 15 aa, Homo sapiens
  CDR3 for beta chain variable domain of TCR clone 64277 (TRBV15, TRBJ2-1)
CTCVPPAEVDTARFF

SEQ ID NO: 128555 - protein, 17 aa, Homo sapiens
  CDR3 for alpha chain variable domain of TCR clone 64278 (TRAV3, TRAJ6)
CAVRDGPRAGGSYIPTF

SEQ ID NO: 128556 - protein, 13 aa, Homo sapiens
  CDR3 for beta chain variable domain of TCR clone 64278 (TRBV7-2, TRBJ2-4)
CASSREHANIQYF

SEQ ID NO: 128557 - protein, 14 aa, Homo sapiens
  CDR3 for alpha chain variable domain of TCR clone 64279 (TRAV12-2, TRAJ13)
CAVKKTGGYQKVTF

SEQ ID NO: 128558 - protein, 15 aa, Homo sapiens
  CDR3 for beta chain variable domain of TCR clone 64279 (TRBV11-2, TRBJ2-2)
CASSLDTGNTGELFF

SEQ ID NO: 128559 - protein, 17 aa, Homo sapiens
  CDR3 for alpha chain variable domain of TCR clone 64280 (TRAV12-2, TRAJ39)
CAVNNMLTFGGGTRLLV

SEQ ID NO: 128560 - protein, 16 aa, Homo sapiens
  CDR3 for beta chain variable domain of TCR clone 64280 (TRBV9, TRBJ2-7)
CASSAGPDRSPYEQYF

SEQ ID NO: 128561 - protein, 11 aa, Homo sapiens
  CDR3 for alpha chain variable domain of TCR clone 64281 (TRAV3, TRAJ21)
CAVGNFNKFYF

SEQ ID NO: 128562 - protein, 14 aa, Homo sapiens
  CDR3 for beta chain variable domain of TCR clone 64281 (TRBV7-3, TRBJ2-1)
CASSLAGGTNEQFF

SEQ ID NO: 128563 - protein, 16 aa, Homo sapiens
  CDR3 for alpha chain variable domain of TCR clone 64282 (TRAV1-2, TRAJ10)
CAVRGVLTGGGNKLTF

SEQ ID NO: 128564 - protein, 14 aa, Homo sapiens
  CDR3 for beta chain variable domain of TCR clone 64282 (TRBV5-1, TRBJ2-7)
CASSFASGVNEQYF

SEQ ID NO: 128565 - protein, 13 aa, Homo sapiens
  CDR3 for alpha chain variable domain of TCR clone 64283 (TRAV13-1, TRAJ39)
CAASIWAGSMLTF

SEQ ID NO: 128566 - protein, 15 aa, Homo sapiens
  CDR3 for beta chain variable domain of TCR clone 64283 (TRBV7-9, TRBJ1-1)
CASSLLEQGGTEAFF

SEQ ID NO: 128567 - protein, 16 aa, Homo sapiens
  CDR3 for alpha chain variable domain of TCR clone 64284 (TRAV30, TRAJ24)
CGTEIADADSWGKFQF

SEQ ID NO: 128568 - protein, 14 aa, Homo sapiens
  CDR3 for beta chain variable domain of TCR clone 64284 (TRBV7-2, TRBJ2-7)
CASSPKTSFYEQYF

SEQ ID NO: 128569 - protein, 12 aa, Homo sapiens
  CDR3 for alpha chain variable domain of TCR clone 64285 (TRAV29/DV5, TRAJ34)
CAASGNTDKLIF

SEQ ID NO: 128570 - protein, 17 aa, Homo sapiens
  CDR3 for beta chain variable domain of TCR clone 64285 (TRBV7-3, TRBJ2-2)
CASSLSGTSGGTGELFF

SEQ ID NO: 128571 - protein, 17 aa, Homo sapiens
  CDR3 for alpha chain variable domain of TCR clone 64286 (TRAV3, TRAJ42)
CAVRDRDYGGSQGNLIF

SEQ ID NO: 128572 - protein, 15 aa, Homo sapiens
  CDR3 for beta chain variable domain of TCR clone 64286 (TRBV7-9, TRBJ1-5)
CASSQGHQPNQPQHF

SEQ ID NO: 128573 - protein, 11 aa, Homo sapiens
  CDR3 for alpha chain variable domain of TCR clone 64287 (TRAV12-3, TRAJ43)
CAMSVSNDIRF

SEQ ID NO: 128574 - protein, 16 aa, Homo sapiens
  CDR3 for beta chain variable domain of TCR clone 64287 (TRBV2, TRBJ2-3)
CASSTSVEGVTDTQYF

SEQ ID NO: 128575 - protein, 14 aa, Homo sapiens
  CDR3 for alpha chain variable domain of TCR clone 64288 (TRAV16, TRAJ33)
CALSAMDSNYQLIW

SEQ ID NO: 128576 - protein, 15 aa, Homo sapiens
  CDR3 for beta chain variable domain of TCR clone 64288 (TRBV5-1, TRBJ2-7)
CASSLNGGPAREQYF

SEQ ID NO: 128577 - protein, 15 aa, Homo sapiens
  CDR3 for alpha chain variable domain of TCR clone 64289 (TRAV3, TRAJ22)
CAVRDRGGSARQLTS

SEQ ID NO: 128578 - protein, 14 aa, Homo sapiens
  CDR3 for beta chain variable domain of TCR clone 64289 (TRBV20-1, TRBJ1-1)
CSAQTRIGGTEAFF

SEQ ID NO: 128579 - protein, 16 aa, Homo sapiens
  CDR3 for alpha chain variable domain of TCR clone 64290 (TRAV23/DV6, TRAJ9)
CAASIGGDTGGFKTIF

SEQ ID NO: 128580 - protein, 14 aa, Homo sapiens
  CDR3 for beta chain variable domain of TCR clone 64290 (TRBV9, TRBJ2-7)
CASSVGVGSYEQYF

SEQ ID NO: 128581 - protein, 17 aa, Homo sapiens
  CDR3 for alpha chain variable domain of TCR clone 64291 (TRAV3, TRAJ42)
CAVRDRDYGGSQGNLIF

SEQ ID NO: 128582 - protein, 13 aa, Homo sapiens
  CDR3 for beta chain variable domain of TCR clone 64291 (TRBV7-2, TRBJ2-7)
CASSSPSGSEQYF

SEQ ID NO: 128583 - protein, 11 aa, Homo sapiens
  CDR3 for alpha chain variable domain of TCR clone 64292 (TRAV1-2, TRAJ40)
CAVPGTYKYIF

SEQ ID NO: 128584 - protein, 16 aa, Homo sapiens
  CDR3 for beta chain variable domain of TCR clone 64292 (TRBV29-1, TRBJ2-7)
CSVEVVGTSGSYGQYF

SEQ ID NO: 128585 - protein, 15 aa, Homo sapiens
  CDR3 for alpha chain variable domain of TCR clone 64293 (TRAV3, TRAJ22)
CAVRDRGGSARQLTF

SEQ ID NO: 128586 - protein, 13 aa, Homo sapiens
  CDR3 for beta chain variable domain of TCR clone 64293 (TRBV2, TRBJ1-5)
CATAGPGNQPQHS

SEQ ID NO: 128587 - protein, 14 aa, Homo sapiens
  CDR3 for alpha chain variable domain of TCR clone 64294 (TRAV1-2, TRAJ8)
CAVREDTGFQKLVF

SEQ ID NO: 128588 - protein, 14 aa, Homo sapiens
  CDR3 for beta chain variable domain of TCR clone 64294 (TRBV28, TRBJ2-1)
CASSRPGLRDEQFF

SEQ ID NO: 128589 - protein, 15 aa, Homo sapiens
  CDR3 for alpha chain variable domain of TCR clone 64295 (TRAV12-1, TRAJ44)
CVADLPTGTASKLTF

SEQ ID NO: 128590 - protein, 13 aa, Homo sapiens
  CDR3 for beta chain variable domain of TCR clone 64295 (TRBV6-5, TRBJ2-5)
CDSSPQGGETQYF

SEQ ID NO: 128591 - protein, 15 aa, Homo sapiens
  CDR3 for alpha chain variable domain of TCR clone 64296 (TRAV24, TRAJ24)
CARTMTTDSWGKFQF

SEQ ID NO: 128592 - protein, 13 aa, Homo sapiens
  CDR3 for beta chain variable domain of TCR clone 64296 (TRBV7-2, TRBJ2-2)
CASSLAVTGELFF

SEQ ID NO: 128593 - protein, 14 aa, Homo sapiens
  CDR3 for alpha chain variable domain of TCR clone 64297 (TRAV12-2, TRAJ3)
CAVNGYSSASKIIF

SEQ ID NO: 128594 - protein, 13 aa, Homo sapiens
  CDR3 for beta chain variable domain of TCR clone 64297 (TRBV19, TRBJ1-2)
CASSQGQVYGYTF

SEQ ID NO: 128595 - protein, 13 aa, Homo sapiens
  CDR3 for alpha chain variable domain of TCR clone 64298 (TRAV3, TRAJ21)
CAVREPDFNKFYF

SEQ ID NO: 128596 - protein, 15 aa, Homo sapiens
  CDR3 for beta chain variable domain of TCR clone 64298 (TRBV4-1, TRBJ2-7)
CASSQNTGRLYEQYF

SEQ ID NO: 128597 - protein, 13 aa, Homo sapiens
  CDR3 for alpha chain variable domain of TCR clone 64299 (TRAV35, TRAJ36)
FAGPRIGANNLFF

SEQ ID NO: 128598 - protein, 15 aa, Homo sapiens
  CDR3 for beta chain variable domain of TCR clone 64299 (TRBV28, TRBJ2-5)
CASSPPWSYQETQYF

SEQ ID NO: 128599 - protein, 14 aa, Homo sapiens
  CDR3 for alpha chain variable domain of TCR clone 64300 (TRAV13-1, TRAJ3)
CASEGYSSASKIIF

SEQ ID NO: 128600 - protein, 13 aa, Homo sapiens
  CDR3 for beta chain variable domain of TCR clone 64300 (TRBV5-7, TRBJ1-1)
CASSLFQNTEAFF

SEQ ID NO: 128601 - protein, 16 aa, Homo sapiens
  CDR3 for alpha chain variable domain of TCR clone 64301 (TRAV3, TRAJ21)
CAVREGPENNFNKFYF

SEQ ID NO: 128602 - protein, 12 aa, Homo sapiens
  CDR3 for beta chain variable domain of TCR clone 64301 (TRBV29-1, TRBJ2-2)
CSVDKYTGELFF

SEQ ID NO: 128603 - protein, 14 aa, Homo sapiens
  CDR3 for alpha chain variable domain of TCR clone 64302 (TRAV38-2/DV8, TRAJ23)
CAYRSQNQGGKLIF

SEQ ID NO: 128604 - protein, 13 aa, Homo sapiens
  CDR3 for beta chain variable domain of TCR clone 64302 (TRBV24-1, TRBJ2-1)
RATSAGPYNEQFF

SEQ ID NO: 128605 - protein, 14 aa, Homo sapiens
  CDR3 for alpha chain variable domain of TCR clone 64303 (TRAV2, TRAJ24)
CAPSQLGEIAVWSR

SEQ ID NO: 128606 - protein, 17 aa, Homo sapiens
  CDR3 for beta chain variable domain of TCR clone 64303 (TRBV5-1, TRBJ2-1)
CASSTGTSGYSYNEQFF

SEQ ID NO: 128607 - protein, 16 aa, Homo sapiens
  CDR3 for alpha chain variable domain of TCR clone 64304 (TRAV30, TRAJ24)
CGTEIVDADSWGKFQF

SEQ ID NO: 128608 - protein, 15 aa, Homo sapiens
  CDR3 for beta chain variable domain of TCR clone 64304 (TRBV20-1, TRBJ2-4)
CSARDHTGGPNIQYF

SEQ ID NO: 128609 - protein, 15 aa, Homo sapiens
  CDR3 for alpha chain variable domain of TCR clone 64305 (TRAV13-1, TRAJ11)
CAARNRNSGYSTLTF

SEQ ID NO: 128610 - protein, 11 aa, Homo sapiens
  CDR3 for beta chain variable domain of TCR clone 64305 (TRBV20-1, TRBJ2-7)
CSARLSYEQYF

SEQ ID NO: 128611 - protein, 18 aa, Homo sapiens
  CDR3 for alpha chain variable domain of TCR clone 64306 (TRAV13-1, TRAJ52)
CAAKNPNAGGISYGKLTF

SEQ ID NO: 128612 - protein, 15 aa, Homo sapiens
  CDR3 for beta chain variable domain of TCR clone 64306 (TRBV6-1, TRBJ2-3)
CASSERGGITDTQYF

SEQ ID NO: 128613 - protein, 15 aa, Homo sapiens
  CDR3 for alpha chain variable domain of TCR clone 64307 (TRAV26-1, TRAJ29)
CIVRVEGSGNTPLVF

SEQ ID NO: 128614 - protein, 15 aa, Homo sapiens
  CDR3 for beta chain variable domain of TCR clone 64307 (TRBV7-8, TRBJ2-7)
CASSLERAGSYEQYF

SEQ ID NO: 128615 - protein, 15 aa, Homo sapiens
  CDR3 for alpha chain variable domain of TCR clone 64308 (TRAV38-1, TRAJ37)
CAFIHGSGNTGKLIF

SEQ ID NO: 128616 - protein, 13 aa, Homo sapiens
  CDR3 for beta chain variable domain of TCR clone 64308 (TRBV7-9, TRBJ1-2)
CASSLKQNYGYTF

SEQ ID NO: 128617 - protein, 14 aa, Homo sapiens
  CDR3 for alpha chain variable domain of TCR clone 64309 (TRAV17, TRAJ23)
CATALGGQGGKLIF

SEQ ID NO: 128618 - protein, 14 aa, Homo sapiens
  CDR3 for beta chain variable domain of TCR clone 64309 (TRBV25-1, TRBJ1-1)
CASTHLGGNTEAFF

SEQ ID NO: 128619 - protein, 15 aa, Homo sapiens
  CDR3 for alpha chain variable domain of TCR clone 64310 (TRAV41, TRAJ45)
CAASYSGGGADRLTF

SEQ ID NO: 128620 - protein, 14 aa, Homo sapiens
  CDR3 for beta chain variable domain of TCR clone 64310 (TRBV27, TRBJ2-2)
CASRPGVNTGELFF

SEQ ID NO: 128621 - protein, 16 aa, Homo sapiens
  CDR3 for alpha chain variable domain of TCR clone 64311 (TRAV3, TRAJ18)
CAVRDGRGPTLGRLYF

SEQ ID NO: 128622 - protein, 17 aa, Homo sapiens
  CDR3 for beta chain variable domain of TCR clone 64311 (TRBV5-1, TRBJ2-3)
CASSKIGLVDRTDTQYF

SEQ ID NO: 128623 - protein, 19 aa, Homo sapiens
  CDR3 for alpha chain variable domain of TCR clone 64312 (TRAV26-1, TRAJ52)
CIVRAHRNAGGTSYGKLTF

SEQ ID NO: 128624 - protein, 14 aa, Homo sapiens
  CDR3 for beta chain variable domain of TCR clone 64312 (TRBV25-1, TRBJ1-1)
CASTHLGGNTEAFF

SEQ ID NO: 128625 - protein, 13 aa, Homo sapiens
  CDR3 for alpha chain variable domain of TCR clone 64313 (TRAV3, TRAJ27)
CAVRPLGAGKSTF

SEQ ID NO: 128626 - protein, 14 aa, Homo sapiens
  CDR3 for beta chain variable domain of TCR clone 64313 (TRBV7-2, TRBJ1-1)
CASSFLTGTTEAFF

SEQ ID NO: 128627 - protein, 13 aa, Homo sapiens
  CDR3 for alpha chain variable domain of TCR clone 64314 (TRAV8-1, TRAJ28)
CAVSGAGRYQLTF

SEQ ID NO: 128628 - protein, 14 aa, Homo sapiens
  CDR3 for beta chain variable domain of TCR clone 64314 (TRBV7-2, TRBJ2-2)
CASRGQGAAGELFF

SEQ ID NO: 128629 - protein, 13 aa, Homo sapiens
  CDR3 for alpha chain variable domain of TCR clone 64315 (TRAV2, TRAJ21)
CAVEDLNFNKFYF

SEQ ID NO: 128630 - protein, 17 aa, Homo sapiens
  CDR3 for beta chain variable domain of TCR clone 64315 (TRBV13, TRBJ2-3)
CASSLSRVAGGRNTQYF

SEQ ID NO: 128631 - protein, 14 aa, Homo sapiens
  CDR3 for alpha chain variable domain of TCR clone 64316 (TRAV2, TRAJ9)
CAVEDRSGGFKTIF

SEQ ID NO: 128632 - protein, 16 aa, Homo sapiens
  CDR3 for beta chain variable domain of TCR clone 64316 (TRBV25-1, TRBJ1-1)
CASSGDRDRGRIEAFF

SEQ ID NO: 128633 - protein, 14 aa, Homo sapiens
  CDR3 for alpha chain variable domain of TCR clone 64317 (TRAV1-2, TRAJ16)
CAVNLFSDGQKLLF

SEQ ID NO: 128634 - protein, 13 aa, Homo sapiens
  CDR3 for beta chain variable domain of TCR clone 64317 (TRBV7-3, TRBJ1-1)
CASSQDWGAEAFF

SEQ ID NO: 128635 - protein, 13 aa, Homo sapiens
  CDR3 for alpha chain variable domain of TCR clone 64318 (TRAV12-3, TRAJ53)
CAMRGGSNYKLTF

SEQ ID NO: 128636 - protein, 15 aa, Homo sapiens
  CDR3 for beta chain variable domain of TCR clone 64318 (TRBV2, TRBJ2-1)
CATQARLVTIGEQFF

SEQ ID NO: 128637 - protein, 12 aa, Homo sapiens
  CDR3 for alpha chain variable domain of TCR clone 64319 (TRAV17, TRAJ12)
YATLRSSYKLIF

SEQ ID NO: 128638 - protein, 16 aa, Homo sapiens
  CDR3 for beta chain variable domain of TCR clone 64319 (TRBV28, TRBJ2-7)
CASSLFFETGGPEQYF

SEQ ID NO: 128639 - protein, 14 aa, Homo sapiens
  CDR3 for alpha chain variable domain of TCR clone 64320 (TRAV35, TRAJ22)
CAGLRPGSARQLTF

SEQ ID NO: 128640 - protein, 16 aa, Homo sapiens
  CDR3 for beta chain variable domain of TCR clone 64320 (TRBV13, TRBJ2-2)
CASSPRTGEHTGELFF

SEQ ID NO: 128641 - protein, 14 aa, Homo sapiens
  CDR3 for alpha chain variable domain of TCR clone 64321 (TRAV8-3, TRAJ30)
CAVGDMNRDDRIIF

SEQ ID NO: 128642 - protein, 17 aa, Homo sapiens
  CDR3 for beta chain variable domain of TCR clone 64321 (TRBV19, TRBJ2-2)
CASSRNPGGFGTGELFF

SEQ ID NO: 128643 - protein, 12 aa, Homo sapiens
  CDR3 for alpha chain variable domain of TCR clone 64322 (TRAV23/DV6, TRAJ30)
CAASKGDDKIIF

SEQ ID NO: 128644 - protein, 16 aa, Homo sapiens
  CDR3 for beta chain variable domain of TCR clone 64322 (TRBV12-4, TRBJ1-5)
CASRQPVEGSNQPQHF

SEQ ID NO: 128645 - protein, 17 aa, Homo sapiens
  CDR3 for alpha chain variable domain of TCR clone 64323 (TRAV3, TRAJ6)
CAVRDGPRAGGSYIPTF

SEQ ID NO: 128646 - protein, 12 aa, Homo sapiens
  CDR3 for beta chain variable domain of TCR clone 64323 (TRBV12-4, TRBJ2-3)
CASSTLPDTQYF

SEQ ID NO: 128647 - protein, 13 aa, Homo sapiens
  CDR3 for alpha chain variable domain of TCR clone 64324 (TRAV8-3, TRAJ48)
YAVVPFGNEKLTF

SEQ ID NO: 128648 - protein, 19 aa, Homo sapiens
  CDR3 for beta chain variable domain of TCR clone 64324 (TRBV25-1, TRBJ2-2)
CAILVYRVDRGRKTGELFF

SEQ ID NO: 128649 - protein, 14 aa, Homo sapiens
  CDR3 for alpha chain variable domain of TCR clone 64325 (TRAV1-2, TRAJ8)
CAVREDTGFQKLVF

SEQ ID NO: 128650 - protein, 15 aa, Homo sapiens
  CDR3 for beta chain variable domain of TCR clone 64325 (TRBV18, TRBJ2-7)
CASSPSSTGNYEQYF

SEQ ID NO: 128651 - protein, 12 aa, Homo sapiens
  CDR3 for alpha chain variable domain of TCR clone 64326 (TRAV2, TRAJ33)
CAFMDSNYQLIW

SEQ ID NO: 128652 - protein, 16 aa, Homo sapiens
  CDR3 for beta chain variable domain of TCR clone 64326 (TRBV2, TRBJ2-7)
CASSVPWTGPSYEQYF

SEQ ID NO: 128653 - protein, 13 aa, Homo sapiens
  CDR3 for alpha chain variable domain of TCR clone 64327 (TRAV12-2, TRAJ42)
CAVKRGSQGNLIL

SEQ ID NO: 128654 - protein, 12 aa, Homo sapiens
  CDR3 for beta chain variable domain of TCR clone 64327 (TRBV5-7, TRBJ1-2)
CASSLVQNGYTF

SEQ ID NO: 128655 - protein, 12 aa, Homo sapiens
  CDR3 for alpha chain variable domain of TCR clone 64328 (TRAV2, TRAJ31)
CAVEDNNARLMF

SEQ ID NO: 128656 - protein, 16 aa, Homo sapiens
  CDR3 for beta chain variable domain of TCR clone 64328 (TRBV10-3, TRBJ2-1)
CAISGVGNGGGGEQFF

SEQ ID NO: 128657 - protein, 12 aa, Homo sapiens
  CDR3 for alpha chain variable domain of TCR clone 64329 (TRAV26-2, TRAJ47)
CILVEYGNKLVF

SEQ ID NO: 128658 - protein, 13 aa, Homo sapiens
  CDR3 for beta chain variable domain of TCR clone 64329 (TRBV11-2, TRBJ2-1)
CASSLGLAGGRFF

SEQ ID NO: 128659 - protein, 15 aa, Homo sapiens
  CDR3 for alpha chain variable domain of TCR clone 64330 (TRAV13-1, TRAJ9)
CAASTLNTGGFKTIF

SEQ ID NO: 128660 - protein, 15 aa, Homo sapiens
  CDR3 for beta chain variable domain of TCR clone 64330 (TRBV6-5, TRBJ2-4)
CASSLRESPKNMQYF

SEQ ID NO: 128661 - protein, 14 aa, Homo sapiens
  CDR3 for alpha chain variable domain of TCR clone 64331 (TRAV26-1, TRAJ45)
CIEITGGGADGLTF

SEQ ID NO: 128662 - protein, 13 aa, Homo sapiens
  CDR3 for beta chain variable domain of TCR clone 64331 (TRBV7-6, TRBJ1-2)
CASSLVADYGYTF

SEQ ID NO: 128663 - protein, 16 aa, Homo sapiens
  CDR3 for alpha chain variable domain of TCR clone 64332 (TRAV22, TRAJ45)
CAVERGKRGGADGLTF

SEQ ID NO: 128664 - protein, 13 aa, Homo sapiens
  CDR3 for beta chain variable domain of TCR clone 64332 (TRBV7-9, TRBJ1-2)
CASSLKQNYGYTF

SEQ ID NO: 128665 - protein, 14 aa, Homo sapiens
  CDR3 for alpha chain variable domain of TCR clone 64333 (TRAV12-3, TRAJ10)
SHLPLTGGGNKLTF

SEQ ID NO: 128666 - protein, 13 aa, Homo sapiens
  CDR3 for beta chain variable domain of TCR clone 64333 (TRBV4-1, TRBJ1-1)
RASSRKMNTEAFF

SEQ ID NO: 128667 - protein, 17 aa, Homo sapiens
  CDR3 for alpha chain variable domain of TCR clone 64334 (TRAV13-1, TRAJ52)
CAASSGAGGTSYGKLTF

SEQ ID NO: 128668 - protein, 15 aa, Homo sapiens
  CDR3 for beta chain variable domain of TCR clone 64334 (TRBV2, TRBJ2-1)
CASNELAGSYNEQFF

SEQ ID NO: 128669 - protein, 18 aa, Homo sapiens
  CDR3 for alpha chain variable domain of TCR clone 64335 (TRAV8-4, TRAJ52)
CAVTRANAGGTSYGKLTF

SEQ ID NO: 128670 - protein, 20 aa, Homo sapiens
  CDR3 for beta chain variable domain of TCR clone 64335 (TRBV19, TRBJ2-1)
CARSISRTVTSTRLNNEQFF

SEQ ID NO: 128671 - protein, 14 aa, Homo sapiens
  CDR3 for alpha chain variable domain of TCR clone 64336 (TRAV29/DV5, TRAJ45)
CAASFRGGADGLTF

SEQ ID NO: 128672 - protein, 15 aa, Homo sapiens
  CDR3 for beta chain variable domain of TCR clone 64336 (TRBV27, TRBJ2-1)
CSSSNGGGSSNEQFF

SEQ ID NO: 128673 - protein, 12 aa, Homo sapiens
  CDR3 for alpha chain variable domain of TCR clone 64337 (TRAV21, TRAJ11)
CAATSGYSTLTF

SEQ ID NO: 128674 - protein, 15 aa, Homo sapiens
  CDR3 for beta chain variable domain of TCR clone 64337 (TRBV7-6, TRBJ2-7)
CASSGRRDTFGEQYF

SEQ ID NO: 128675 - protein, 12 aa, Homo sapiens
  CDR3 for alpha chain variable domain of TCR clone 64338 (TRAV1-2, TRAJ17)
CAVRAAGNKPTF

SEQ ID NO: 128676 - protein, 16 aa, Homo sapiens
  CDR3 for beta chain variable domain of TCR clone 64338 (TRBV20-1, TRBJ2-1)
CSAPGLAGSYSDEQFF

SEQ ID NO: 128677 - protein, 11 aa, Homo sapiens
  CDR3 for alpha chain variable domain of TCR clone 64339 (TRAV17, TRAJ9)
YATTGGFKTIF

SEQ ID NO: 128678 - protein, 14 aa, Homo sapiens
  CDR3 for beta chain variable domain of TCR clone 64339 (TRBV7-9, TRBJ2-2)
CASSGLADTGELFF

SEQ ID NO: 128679 - protein, 14 aa, Homo sapiens
  CDR3 for alpha chain variable domain of TCR clone 64340 (TRAV12-2, TRAJ24)
CAVTPADSGGKLQF

SEQ ID NO: 128680 - protein, 12 aa, Homo sapiens
  CDR3 for beta chain variable domain of TCR clone 64340 (TRBV3-1, TRBJ2-1)
CASSQGSSGQFF

SEQ ID NO: 128681 - protein, 12 aa, Homo sapiens
  CDR3 for alpha chain variable domain of TCR clone 64341 (TRAV21, TRAJ8)
CAVDTGFQKLVF

SEQ ID NO: 128682 - protein, 13 aa, Homo sapiens
  CDR3 for beta chain variable domain of TCR clone 64341 (TRBV6-3, TRBJ2-1)
CASSYDNYNEQFF

SEQ ID NO: 128683 - protein, 15 aa, Homo sapiens
  CDR3 for alpha chain variable domain of TCR clone 64342 (TRAV25, TRAJ52)
CAGTSGGTSYGKLKF

SEQ ID NO: 128684 - protein, 16 aa, Homo sapiens
  CDR3 for beta chain variable domain of TCR clone 64342 (TRBV15, TRBJ1-2)
CATSRGPRTGGGGYTF

SEQ ID NO: 128685 - protein, 13 aa, Homo sapiens
  CDR3 for alpha chain variable domain of TCR clone 64343 (TRAV17, TRAJ40)
CAGALGGTYKYIF

SEQ ID NO: 128686 - protein, 16 aa, Homo sapiens
  CDR3 for beta chain variable domain of TCR clone 64343 (TRBV7-2, TRBJ1-4)
CASSLAPGRRDEKRFF

SEQ ID NO: 128687 - protein, 13 aa, Homo sapiens
  CDR3 for alpha chain variable domain of TCR clone 64344 (TRAV16, TRAJ31)
CALSAHNNARLMF

SEQ ID NO: 128688 - protein, 17 aa, Homo sapiens
  CDR3 for beta chain variable domain of TCR clone 64344 (TRBV12-4, TRBJ2-1)
CASSPGLAGGRINEQSF

SEQ ID NO: 128689 - protein, 16 aa, Homo sapiens
  CDR3 for alpha chain variable domain of TCR clone 64345 (TRAV16, TRAJ52)
CALSGVGGTSYGKLTY

SEQ ID NO: 128690 - protein, 14 aa, Homo sapiens
  CDR3 for beta chain variable domain of TCR clone 64345 (TRBV19, TRBJ1-2)
CASSLQGQAYGYTF

SEQ ID NO: 128691 - protein, 13 aa, Homo sapiens
  CDR3 for alpha chain variable domain of TCR clone 64346 (TRAV3, TRAJ8)
CAVRFTGFQKLVF

SEQ ID NO: 128692 - protein, 15 aa, Homo sapiens
  CDR3 for beta chain variable domain of TCR clone 64346 (TRBV20-1, TRBJ2-7)
CSARDRVSRMDEQYF

SEQ ID NO: 128693 - protein, 12 aa, Homo sapiens
  CDR3 for alpha chain variable domain of TCR clone 64347 (TRAV9-2, TRAJ9)
CAMNTGGFKTIF

SEQ ID NO: 128694 - protein, 17 aa, Homo sapiens
  CDR3 for beta chain variable domain of TCR clone 64347 (TRBV28, TRBJ2-5)
CSSSRQGGLAGAETQYF

SEQ ID NO: 128695 - protein, 13 aa, Homo sapiens
  CDR3 for alpha chain variable domain of TCR clone 64348 (TRAV3, TRAJ29)
CAVRDWGNTPLVF

SEQ ID NO: 128696 - protein, 15 aa, Homo sapiens
  CDR3 for beta chain variable domain of TCR clone 64348 (TRBV12-4, TRBJ2-5)
CASIGRTGGGETQYL

SEQ ID NO: 128697 - protein, 12 aa, Homo sapiens
  CDR3 for alpha chain variable domain of TCR clone 64349 (TRAV17, TRAJ4)
CDVSGGYNKLIF

SEQ ID NO: 128698 - protein, 13 aa, Homo sapiens
  CDR3 for beta chain variable domain of TCR clone 64349 (TRBV6-1, TRBJ1-1)
CASSEGWGTEAFF

SEQ ID NO: 128699 - protein, 11 aa, Homo sapiens
  CDR3 for alpha chain variable domain of TCR clone 64350 (TRAV12-2, TRAJ29)
CAVTLRSPLVF

SEQ ID NO: 128700 - protein, 16 aa, Homo sapiens
  CDR3 for beta chain variable domain of TCR clone 64350 (TRBV19, TRBJ1-5)
CASSIDRRGPRQPQHF

SEQ ID NO: 128701 - protein, 15 aa, Homo sapiens
  CDR3 for alpha chain variable domain of TCR clone 64351 (TRAV13-1, TRAJ17)
CAASIERDAGNKLTF

SEQ ID NO: 128702 - protein, 13 aa, Homo sapiens
  CDR3 for beta chain variable domain of TCR clone 64351 (TRBV7-7, TRBJ2-3)
CASSLSRADTQYF

SEQ ID NO: 128703 - protein, 13 aa, Homo sapiens
  CDR3 for alpha chain variable domain of TCR clone 64352 (TRAV35, TRAJ42)
CAGFPGSQGNLIF

SEQ ID NO: 128704 - protein, 20 aa, Homo sapiens
  CDR3 for beta chain variable domain of TCR clone 64352 (TRBV7-8, TRBJ2-2)
CASSHLFPGPTIHITGELFF

SEQ ID NO: 128705 - protein, 11 aa, Homo sapiens
  CDR3 for alpha chain variable domain of TCR clone 64353 (TRAV3, TRAJ6)
CAVRDRNPADQ

SEQ ID NO: 128706 - protein, 15 aa, Homo sapiens
  CDR3 for beta chain variable domain of TCR clone 64353 (TRBV18, TRBJ2-7)
CASSPTFMDSYEQYF

SEQ ID NO: 128707 - protein, 16 aa, Homo sapiens
  CDR3 for alpha chain variable domain of TCR clone 64354 (TRAV27, TRAJ13)
CAGAKSDSAGYQKVTF

SEQ ID NO: 128708 - protein, 15 aa, Homo sapiens
  CDR3 for beta chain variable domain of TCR clone 64354 (TRBV29-1, TRBJ2-1)
CSVGRHALFYNEQFF

SEQ ID NO: 128709 - protein, 14 aa, Homo sapiens
  CDR3 for alpha chain variable domain of TCR clone 64355 (TRAV12-3, TRAJ57)
CAMSAWGGSEKLVF

SEQ ID NO: 128710 - protein, 14 aa, Homo sapiens
  CDR3 for beta chain variable domain of TCR clone 64355 (TRBV28, TRBJ1-4)
CASRVTGFDEKLFF

SEQ ID NO: 128711 - protein, 14 aa, Homo sapiens
  CDR3 for alpha chain variable domain of TCR clone 64356 (TRAV1-2, TRAJ16)
CAVNRFSDDQKLLF

SEQ ID NO: 128712 - protein, 14 aa, Homo sapiens
  CDR3 for beta chain variable domain of TCR clone 64356 (TRBV4-1, TRBJ2-2)
CASSQAVNTGELFF

SEQ ID NO: 128713 - protein, 15 aa, Homo sapiens
  CDR3 for alpha chain variable domain of TCR clone 64357 (TRAV12-2, TRAJ53)
CAVNGGGGSNYKLTF

SEQ ID NO: 128714 - protein, 17 aa, Homo sapiens
  CDR3 for beta chain variable domain of TCR clone 64357 (TRBV7-3, TRBJ2-3)
RASSLMKRMRGADTQYF

SEQ ID NO: 128715 - protein, 11 aa, Homo sapiens
  CDR3 for alpha chain variable domain of TCR clone 64358 (TRAV4, TRAJ23)
CLVAPGGKLIV

SEQ ID NO: 128716 - protein, 15 aa, Homo sapiens
  CDR3 for beta chain variable domain of TCR clone 64358 (TRBV7-2, TRBJ2-1)
CASSFQADEYNEQFF

SEQ ID NO: 128717 - protein, 13 aa, Homo sapiens
  CDR3 for alpha chain variable domain of TCR clone 64359 (TRAV12-1, TRAJ6)
CVVFPGGSYIPTF

SEQ ID NO: 128718 - protein, 15 aa, Homo sapiens
  CDR3 for beta chain variable domain of TCR clone 64359 (TRBV20-1, TRBJ2-1)
CSARGVGGTYNEQFF

SEQ ID NO: 128719 - protein, 12 aa, Homo sapiens
  CDR3 for alpha chain variable domain of TCR clone 64360 (TRAV13-1, TRAJ48)
CAANFGNEKLTF

SEQ ID NO: 128720 - protein, 13 aa, Homo sapiens
  CDR3 for beta chain variable domain of TCR clone 64360 (TRBV4-1, TRBJ2-2)
CASSQENTGELFF

SEQ ID NO: 128721 - protein, 15 aa, Homo sapiens
  CDR3 for alpha chain variable domain of TCR clone 64361 (TRAV13-1, TRAJ18)
CAASGGGSTLGRRYF

SEQ ID NO: 128722 - protein, 13 aa, Homo sapiens
  CDR3 for beta chain variable domain of TCR clone 64361 (TRBV18, TRBJ2-1)
CASGLASNNEQFF

SEQ ID NO: 128723 - protein, 18 aa, Homo sapiens
  CDR3 for alpha chain variable domain of TCR clone 64362 (TRAV8-4, TRAJ52)
CAVTRANAGGTSYGKLTF

SEQ ID NO: 128724 - protein, 20 aa, Homo sapiens
  CDR3 for beta chain variable domain of TCR clone 64362 (TRBV19, TRBJ2-1)
CASSISRTVTSTQLNNEQFF

SEQ ID NO: 128725 - protein, 12 aa, Homo sapiens
  CDR3 for alpha chain variable domain of TCR clone 64363 (TRAV8-3, TRAJ26)
CAGDNYDQNFVF

SEQ ID NO: 128726 - protein, 13 aa, Homo sapiens
  CDR3 for beta chain variable domain of TCR clone 64363 (TRBV20-1, TRBJ2-5)
CSARGDYQETQYF

SEQ ID NO: 128727 - protein, 15 aa, Homo sapiens
  CDR3 for alpha chain variable domain of TCR clone 64364 (TRAV25, TRAJ52)
CAGRPGGTSYGKLTF

SEQ ID NO: 128728 - protein, 17 aa, Homo sapiens
  CDR3 for beta chain variable domain of TCR clone 64364 (TRBV7-8, TRBJ2-6)
CASSAGSGGAGANVLTF

SEQ ID NO: 128729 - protein, 14 aa, Homo sapiens
  CDR3 for alpha chain variable domain of TCR clone 64365 (TRAV20, TRAJ56)
CAVQFGGANSKLAF

SEQ ID NO: 128730 - protein, 14 aa, Homo sapiens
  CDR3 for beta chain variable domain of TCR clone 64365 (TRBV20-1, TRBJ2-7)
CSDKRGRSSYEQYF

SEQ ID NO: 128731 - protein, 14 aa, Homo sapiens
  CDR3 for alpha chain variable domain of TCR clone 64366 (TRAV2, TRAJ9)
CAVDPNTGGLKTIF

SEQ ID NO: 128732 - protein, 14 aa, Homo sapiens
  CDR3 for beta chain variable domain of TCR clone 64366 (TRBV7-2, TRBJ1-1)
CASSFLTGTTEAFF

SEQ ID NO: 128733 - protein, 13 aa, Homo sapiens
  CDR3 for alpha chain variable domain of TCR clone 64367 (TRAV35, TRAJ42)
CAGFPGSQGNLIF

SEQ ID NO: 128734 - protein, 13 aa, Homo sapiens
  CDR3 for beta chain variable domain of TCR clone 64367 (TRBV29-1, TRBJ2-1)
CSVDGGRVNEQFF

SEQ ID NO: 128735 - protein, 14 aa, Homo sapiens
  CDR3 for alpha chain variable domain of TCR clone 64368 (TRAV26-1, TRAJ38)
CIADNAGNSRKLIW

SEQ ID NO: 128736 - protein, 17 aa, Homo sapiens
  CDR3 for beta chain variable domain of TCR clone 64368 (TRBV7-9, TRBJ2-3)
CASSPTVAGDLTDTQYF

SEQ ID NO: 128737 - protein, 14 aa, Homo sapiens
  CDR3 for alpha chain variable domain of TCR clone 64369 (TRAV8-3, TRAJ9)
CAVVYNTGGFKTIF

SEQ ID NO: 128738 - protein, 14 aa, Homo sapiens
  CDR3 for beta chain variable domain of TCR clone 64369 (TRBV6-1, TRBJ1-3)
CASVQGGGGNTIYF

SEQ ID NO: 128739 - protein, 14 aa, Homo sapiens
  CDR3 for alpha chain variable domain of TCR clone 64370 (TRAV27, TRAJ37)
CAGERSSNTGKLIF

SEQ ID NO: 128740 - protein, 15 aa, Homo sapiens
  CDR3 for beta chain variable domain of TCR clone 64370 (TRBV11-3, TRBJ1-6)
CASSLDWGVNSPLHF

SEQ ID NO: 128741 - protein, 13 aa, Homo sapiens
  CDR3 for alpha chain variable domain of TCR clone 64371 (TRAV12-1, TRAJ26)
CVVRRNYGQNFVF

SEQ ID NO: 128742 - protein, 14 aa, Homo sapiens
  CDR3 for beta chain variable domain of TCR clone 64371 (TRBV6-3, TRBJ1-1)
CAGRYTGESTEAFF

SEQ ID NO: 128743 - protein, 14 aa, Homo sapiens
  CDR3 for alpha chain variable domain of TCR clone 64372 (TRAV12-2, TRAJ13)
CAVKKTGGYQKVTF

SEQ ID NO: 128744 - protein, 13 aa, Homo sapiens
  CDR3 for beta chain variable domain of TCR clone 64372 (TRBV6-3, TRBJ2-1)
CASSYDNYNEQFF

SEQ ID NO: 128745 - protein, 13 aa, Homo sapiens
  CDR3 for alpha chain variable domain of TCR clone 64373 (TRAV30, TRAJ24)
CGTVTDSWGKLQF

SEQ ID NO: 128746 - protein, 15 aa, Homo sapiens
  CDR3 for beta chain variable domain of TCR clone 64373 (TRBV7-6, TRBJ2-5)
CASSKPTGPQETQYF

SEQ ID NO: 128747 - protein, 12 aa, Homo sapiens
  CDR3 for alpha chain variable domain of TCR clone 64374 (TRAV23/DV6, TRAJ30)
CAASKGDDRIIF

SEQ ID NO: 128748 - protein, 13 aa, Homo sapiens
  CDR3 for beta chain variable domain of TCR clone 64374 (TRBV19, TRBJ1-2)
CASSVPGQDGYTF

SEQ ID NO: 128749 - protein, 14 aa, Homo sapiens
  CDR3 for alpha chain variable domain of TCR clone 64375 (TRAV1-1, TRAJ27)
CAVIYNTNASKSTF

SEQ ID NO: 128750 - protein, 18 aa, Homo sapiens
  CDR3 for beta chain variable domain of TCR clone 64375 (TRBV7-3, TRBJ2-1)
CASSLTLASGRAMVSSSS

SEQ ID NO: 128751 - protein, 14 aa, Homo sapiens
  CDR3 for alpha chain variable domain of TCR clone 64376 (TRAV16, TRAJ42)
CALLAGGSQRNLIF

SEQ ID NO: 128752 - protein, 15 aa, Homo sapiens
  CDR3 for beta chain variable domain of TCR clone 64376 (TRBV2, TRBJ2-7)
CASSEGLARSYEQYF

SEQ ID NO: 128753 - protein, 13 aa, Homo sapiens
  CDR3 for alpha chain variable domain of TCR clone 64377 (TRAV13-1, TRAJ5)
CAARGTGRRALTF

SEQ ID NO: 128754 - protein, 15 aa, Homo sapiens
  CDR3 for beta chain variable domain of TCR clone 64377 (TRBV7-9, TRBJ2-7)
CASSPGGGLTYEQYF

SEQ ID NO: 128755 - protein, 15 aa, Homo sapiens
  CDR3 for alpha chain variable domain of TCR clone 64378 (TRAV20, TRAJ58)
CAVQDLETSGSRLTF

SEQ ID NO: 128756 - protein, 13 aa, Homo sapiens
  CDR3 for beta chain variable domain of TCR clone 64378 (TRBV20-1, TRBJ1-1)
CSARGGGNAEAFF

SEQ ID NO: 128757 - protein, 12 aa, Homo sapiens
  CDR3 for alpha chain variable domain of TCR clone 64379 (TRAV17, TRAJ39)
CATGAAGNMLTF

SEQ ID NO: 128758 - protein, 14 aa, Homo sapiens
  CDR3 for beta chain variable domain of TCR clone 64379 (TRBV7-9, TRBJ1-2)
CASSRHGANYGYTF

SEQ ID NO: 128759 - protein, 14 aa, Homo sapiens
  CDR3 for alpha chain variable domain of TCR clone 64380 (TRAV12-1, TRAJ23)
CVVIVYNQGGKLIF

SEQ ID NO: 128760 - protein, 15 aa, Homo sapiens
  CDR3 for beta chain variable domain of TCR clone 64380 (TRBV20-1, TRBJ1-5)
CSAKPPGQGPQAQHF

SEQ ID NO: 128761 - protein, 15 aa, Homo sapiens
  CDR3 for alpha chain variable domain of TCR clone 64381 (TRAV25, TRAJ53)
CAATGGGGSNYKLTF

SEQ ID NO: 128762 - protein, 19 aa, Homo sapiens
  CDR3 for beta chain variable domain of TCR clone 64381 (TRBV7-2, TRBJ2-3)
CASSFLSRNWGGGTGTQYF

SEQ ID NO: 128763 - protein, 14 aa, Homo sapiens
  CDR3 for alpha chain variable domain of TCR clone 64382 (TRAV13-1, TRAJ40)
CAASMTSGTYKFIF

SEQ ID NO: 128764 - protein, 15 aa, Homo sapiens
  CDR3 for beta chain variable domain of TCR clone 64382 (TRBV7-3, TRBJ2-1)
CASSPTGGGEVEQFF

SEQ ID NO: 128765 - protein, 12 aa, Homo sapiens
  CDR3 for alpha chain variable domain of TCR clone 64383 (TRAV12-1, TRAJ40)
CVVYSGTYKYIF

SEQ ID NO: 128766 - protein, 18 aa, Homo sapiens
  CDR3 for beta chain variable domain of TCR clone 64383 (TRBV11-2, TRBJ2-3)
CASSLGGASRGAPNSQYF

SEQ ID NO: 128767 - protein, 19 aa, Homo sapiens
  CDR3 for alpha chain variable domain of TCR clone 64384 (TRAV26-1, TRAJ22)
CCVLLHRWVFSGSARQLTF

SEQ ID NO: 128768 - protein, 19 aa, Homo sapiens
  CDR3 for beta chain variable domain of TCR clone 64384 (TRBV19, TRBJ2-5)
CASSIGQVTDFFLGETQHF

SEQ ID NO: 128769 - protein, 13 aa, Homo sapiens
  CDR3 for alpha chain variable domain of TCR clone 64385 (TRAV8-1, TRAJ41)
CAVNPGSGYALNF

SEQ ID NO: 128770 - protein, 15 aa, Homo sapiens
  CDR3 for beta chain variable domain of TCR clone 64385 (TRBV7-9, TRBJ2-1)
CASSLGWGRANEQFF

SEQ ID NO: 128771 - protein, 14 aa, Homo sapiens
  CDR3 for alpha chain variable domain of TCR clone 64386 (TRAV1-2, TRAJ16)
CAVNRFSDGQKLLF

SEQ ID NO: 128772 - protein, 12 aa, Homo sapiens
  CDR3 for beta chain variable domain of TCR clone 64386 (TRBV11-2, TRBJ2-4)
CASSSASGSEYF

SEQ ID NO: 128773 - protein, 14 aa, Homo sapiens
  CDR3 for alpha chain variable domain of TCR clone 64387 (TRAV12-2, TRAJ13)
CAVKKTGGYQKVTF

SEQ ID NO: 128774 - protein, 15 aa, Homo sapiens
  CDR3 for beta chain variable domain of TCR clone 64387 (TRBV10-3, TRBJ2-7)
CAISTFSGVKGEQYF

SEQ ID NO: 128775 - protein, 14 aa, Homo sapiens
  CDR3 for alpha chain variable domain of TCR clone 64388 (TRAV26-1, TRAJ21)
CIVRPPYNFNKFYF

SEQ ID NO: 128776 - protein, 17 aa, Homo sapiens
  CDR3 for beta chain variable domain of TCR clone 64388 (TRBV14, TRBJ2-1)
CASSQDRRVTSYNEQFF

SEQ ID NO: 128777 - protein, 14 aa, Homo sapiens
  CDR3 for alpha chain variable domain of TCR clone 64389 (TRAV1-2, TRAJ16)
CAVNRFSDGQKLLF

SEQ ID NO: 128778 - protein, 14 aa, Homo sapiens
  CDR3 for beta chain variable domain of TCR clone 64389 (TRBV7-9, TRBJ2-5)
CASSPRPSGETQYF

SEQ ID NO: 128779 - protein, 15 aa, Homo sapiens
  CDR3 for alpha chain variable domain of TCR clone 64390 (TRAV1-2, TRAJ18)
CAVRDRGSTLGRLYF

SEQ ID NO: 128780 - protein, 15 aa, Homo sapiens
  CDR3 for beta chain variable domain of TCR clone 64390 (TRBV10-3, TRBJ2-1)
CAISGGREGSDEQFS

SEQ ID NO: 128781 - protein, 16 aa, Homo sapiens
  CDR3 for alpha chain variable domain of TCR clone 64391 (TRAV30, TRAJ24)
CGTEIVDADSWGKFQF

SEQ ID NO: 128782 - protein, 12 aa, Homo sapiens
  CDR3 for beta chain variable domain of TCR clone 64391 (TRBV2, TRBJ2-1)
CAYGPPGNEQFF

SEQ ID NO: 128783 - protein, 10 aa, Homo sapiens
  CDR3 for alpha chain variable domain of TCR clone 64392 (TRAV12-1, TRAJ43)
CVVHNNDMRF

SEQ ID NO: 128784 - protein, 15 aa, Homo sapiens
  CDR3 for beta chain variable domain of TCR clone 64392 (TRBV20-1, TRBJ2-7)
CSARDRVSGMDEQYF

SEQ ID NO: 128785 - protein, 13 aa, Homo sapiens
  CDR3 for alpha chain variable domain of TCR clone 64393 (TRAV27, TRAJ29)
CAGAYSGNTPLVF

SEQ ID NO: 128786 - protein, 18 aa, Homo sapiens
  CDR3 for beta chain variable domain of TCR clone 64393 (TRBV6-6, TRBJ1-3)
CASSYSKWDSISGNTIYF

SEQ ID NO: 128787 - protein, 14 aa, Homo sapiens
  CDR3 for alpha chain variable domain of TCR clone 64394 (TRAV12-2, TRAJ13)
CAVKKTGGYQKVTF

SEQ ID NO: 128788 - protein, 15 aa, Homo sapiens
  CDR3 for beta chain variable domain of TCR clone 64394 (TRBV19, TRBJ1-1)
CASTSGGIQNTEAFF

SEQ ID NO: 128789 - protein, 15 aa, Homo sapiens
  CDR3 for alpha chain variable domain of TCR clone 64395 (TRAV17, TRAJ22)
CATVAPSGSARQLTF

SEQ ID NO: 128790 - protein, 14 aa, Homo sapiens
  CDR3 for beta chain variable domain of TCR clone 64395 (TRBV25-1, TRBJ1-1)
CASTHLGGNTEAFF

SEQ ID NO: 128791 - protein, 12 aa, Homo sapiens
  CDR3 for alpha chain variable domain of TCR clone 64396 (TRAV12-3, TRAJ17)
CAMTLAGNKLTF

SEQ ID NO: 128792 - protein, 14 aa, Homo sapiens
  CDR3 for beta chain variable domain of TCR clone 64396 (TRBV20-1, TRBJ1-3)
CSASPTGAGNTIYF

SEQ ID NO: 128793 - protein, 14 aa, Homo sapiens
  CDR3 for alpha chain variable domain of TCR clone 64397 (TRAV2, TRAJ15)
CAVGTGQAGTALIF

SEQ ID NO: 128794 - protein, 15 aa, Homo sapiens
  CDR3 for beta chain variable domain of TCR clone 64397 (TRBV20-1, TRBJ2-7)
CSARDRVSGMDEQYF

SEQ ID NO: 128795 - protein, 14 aa, Homo sapiens
  CDR3 for alpha chain variable domain of TCR clone 64398 (TRAV12-3, TRAJ10)
SHLPLTGGGNKLTF

SEQ ID NO: 128796 - protein, 16 aa, Homo sapiens
  CDR3 for beta chain variable domain of TCR clone 64398 (TRBV7-3, TRBJ2-3)
CASSLSGYRPEDTQYF

SEQ ID NO: 128797 - protein, 11 aa, Homo sapiens
  CDR3 for alpha chain variable domain of TCR clone 64399 (TRAV3, TRAJ21)
CAVGNFNKFYF

SEQ ID NO: 128798 - protein, 15 aa, Homo sapiens
  CDR3 for beta chain variable domain of TCR clone 64399 (TRBV29-1, TRBJ2-1)
CSFEGGPASYNEQFF

SEQ ID NO: 128799 - protein, 14 aa, Homo sapiens
  CDR3 for alpha chain variable domain of TCR clone 64400 (TRAV26-1, TRAJ38)
CIADNAGNNRKLIW

SEQ ID NO: 128800 - protein, 14 aa, Homo sapiens
  CDR3 for beta chain variable domain of TCR clone 64400 (TRBV5-4, TRBJ1-1)
CASSLDSRRDEAFF

SEQ ID NO: 128801 - protein, 14 aa, Homo sapiens
  CDR3 for alpha chain variable domain of TCR clone 64401 (TRAV8-3, TRAJ4)
CAVGAAGGYNKLLF

SEQ ID NO: 128802 - protein, 15 aa, Homo sapiens
  CDR3 for beta chain variable domain of TCR clone 64401 (TRBV20-1, TRBJ2-5)
CSAPPRTGFGETQYF

SEQ ID NO: 128803 - protein, 16 aa, Homo sapiens
  CDR3 for alpha chain variable domain of TCR clone 64402 (TRAV14/DV4, TRAJ54)
CAMREGRIQGAQKLGF

SEQ ID NO: 128804 - protein, 15 aa, Homo sapiens
  CDR3 for beta chain variable domain of TCR clone 64402 (TRBV20-1, TRBJ2-7)
CSARDRVSGMDEQYF

SEQ ID NO: 128805 - protein, 12 aa, Homo sapiens
  CDR3 for alpha chain variable domain of TCR clone 64403 (TRAV12-3, TRAJ42)
CAPGGRQGNLIF

SEQ ID NO: 128806 - protein, 13 aa, Homo sapiens
  CDR3 for beta chain variable domain of TCR clone 64403 (TRBV5-7, TRBJ2-6)
CASTSSGANVLTF

SEQ ID NO: 128807 - protein, 17 aa, Homo sapiens
  CDR3 for alpha chain variable domain of TCR clone 64404 (TRAV4, TRAJ5)
CLVGDTGLGTGRRALTF

SEQ ID NO: 128808 - protein, 14 aa, Homo sapiens
  CDR3 for beta chain variable domain of TCR clone 64404 (TRBV7-2, TRBJ2-7)
CASRSQGAAYEQYF

SEQ ID NO: 128809 - protein, 14 aa, Homo sapiens
  CDR3 for alpha chain variable domain of TCR clone 64405 (TRAV17, TRAJ16)
CATADFSAGQKLLF

SEQ ID NO: 128810 - protein, 12 aa, Homo sapiens
  CDR3 for beta chain variable domain of TCR clone 64405 (TRBV24-1, TRBJ1-1)
CATLYPDTEAFF

SEQ ID NO: 128811 - protein, 16 aa, Homo sapiens
  CDR3 for alpha chain variable domain of TCR clone 64406 (TRAV26-1, TRAJ47)
CIVRVVLSQYGNKLVF

SEQ ID NO: 128812 - protein, 16 aa, Homo sapiens
  CDR3 for beta chain variable domain of TCR clone 64406 (TRBV5-1, TRBJ2-1)
CASSCGVSGSYNEQFF

SEQ ID NO: 128813 - protein, 16 aa, Homo sapiens
  CDR3 for alpha chain variable domain of TCR clone 64407 (TRAV30, TRAJ24)
CGTEIVDADSWGNFRF

SEQ ID NO: 128814 - protein, 14 aa, Homo sapiens
  CDR3 for beta chain variable domain of TCR clone 64407 (TRBV12-5, TRBJ2-5)
CASGSRTHQETQYF

SEQ ID NO: 128815 - protein, 14 aa, Homo sapiens
  CDR3 for alpha chain variable domain of TCR clone 64408 (TRAV1-2, TRAJ16)
CASNRFSDGQKLLF

SEQ ID NO: 128816 - protein, 14 aa, Homo sapiens
  CDR3 for beta chain variable domain of TCR clone 64408 (TRBV7-9, TRBJ2-3)
CASSLEDGTDTQYF

SEQ ID NO: 128817 - protein, 13 aa, Homo sapiens
  CDR3 for alpha chain variable domain of TCR clone 64409 (TRAV3, TRAJ21)
CAVREPDFNKFYF

SEQ ID NO: 128818 - protein, 14 aa, Homo sapiens
  CDR3 for beta chain variable domain of TCR clone 64409 (TRBV7-9, TRBJ2-7)
CAGSPSGGQNEQYF

SEQ ID NO: 128819 - protein, 14 aa, Homo sapiens
  CDR3 for alpha chain variable domain of TCR clone 64410 (TRAV27, TRAJ45)
CAGAQEEVLTDSPL

SEQ ID NO: 128820 - protein, 14 aa, Homo sapiens
  CDR3 for beta chain variable domain of TCR clone 64410 (TRBV7-9, TRBJ2-1)
CASSSMVGFGEQFF

SEQ ID NO: 128821 - protein, 14 aa, Homo sapiens
  CDR3 for alpha chain variable domain of TCR clone 64411 (TRAV13-1, TRAJ35)
CAASKGGFVNVLHC

SEQ ID NO: 128822 - protein, 13 aa, Homo sapiens
  CDR3 for beta chain variable domain of TCR clone 64411 (TRBV7-3, TRBJ1-1)
CASSQDWGAEAFF

SEQ ID NO: 128823 - protein, 15 aa, Homo sapiens
  CDR3 for alpha chain variable domain of TCR clone 64412 (TRAV20, TRAJ43)
CAVQAGKSSDNDMRF

SEQ ID NO: 128824 - protein, 13 aa, Homo sapiens
  CDR3 for beta chain variable domain of TCR clone 64412 (TRBV27, TRBJ1-1)
CASSLSIGADAFF

SEQ ID NO: 128825 - protein, 12 aa, Homo sapiens
  CDR3 for alpha chain variable domain of TCR clone 64413 (TRAV3, TRAJ20)
FAVRDPDYKLSF

SEQ ID NO: 128826 - protein, 13 aa, Homo sapiens
  CDR3 for beta chain variable domain of TCR clone 64413 (TRBV9, TRBJ2-1)
CASSVGQGGEQFF

SEQ ID NO: 128827 - protein, 12 aa, Homo sapiens
  CDR3 for alpha chain variable domain of TCR clone 64414 (TRAV25, TRAJ11)
CAGASGYSTLTF

SEQ ID NO: 128828 - protein, 13 aa, Homo sapiens
  CDR3 for beta chain variable domain of TCR clone 64414 (TRBV10-3, TRBJ2-7)
CASKLAVNYEQYF

SEQ ID NO: 128829 - protein, 12 aa, Homo sapiens
  CDR3 for alpha chain variable domain of TCR clone 64415 (TRAV12-3, TRAJ17)
CAMTLTGNKLTF

SEQ ID NO: 128830 - protein, 13 aa, Homo sapiens
  CDR3 for beta chain variable domain of TCR clone 64415 (TRBV7-9, TRBJ1-2)
CASSLKQSYGYTF

SEQ ID NO: 128831 - protein, 13 aa, Homo sapiens
  CDR3 for alpha chain variable domain of TCR clone 64416 (TRAV13-1, TRAJ39)
CSKYSNAGNMLTF

SEQ ID NO: 128832 - protein, 14 aa, Homo sapiens
  CDR3 for beta chain variable domain of TCR clone 64416 (TRBV7-9, TRBJ2-1)
CASSPRDSLYEQFF

SEQ ID NO: 128833 - protein, 20 aa, Homo sapiens
  CDR3 for alpha chain variable domain of TCR clone 64417 (TRAV12-1, TRAJ42)
SSVTQPPTSVKGGSQGNLIF

SEQ ID NO: 128834 - protein, 18 aa, Homo sapiens
  CDR3 for beta chain variable domain of TCR clone 64417 (TRBV11-2, TRBJ2-3)
CASSLGGASRGAPNTQYF

SEQ ID NO: 128835 - protein, 12 aa, Homo sapiens
  CDR3 for alpha chain variable domain of TCR clone 64418 (TRAV16, TRAJ10)
CSRPGGGNKLTF

SEQ ID NO: 128836 - protein, 13 aa, Homo sapiens
  CDR3 for beta chain variable domain of TCR clone 64418 (TRBV7-3, TRBJ1-1)
CASSQDWGAEAFF

SEQ ID NO: 128837 - protein, 15 aa, Homo sapiens
  CDR3 for alpha chain variable domain of TCR clone 64419 (TRAV17, TRAJ57)
CATGPSQGGSEKLVF

SEQ ID NO: 128838 - protein, 15 aa, Homo sapiens
  CDR3 for beta chain variable domain of TCR clone 64419 (TRBV19, TRBJ2-4)
CASRGPRRGENMQYF

SEQ ID NO: 128839 - protein, 12 aa, Homo sapiens
  CDR3 for alpha chain variable domain of TCR clone 64420 (TRAV17, TRAJ57)
CASDGGSEKLVF

SEQ ID NO: 128840 - protein, 13 aa, Homo sapiens
  CDR3 for beta chain variable domain of TCR clone 64420 (TRBV7-9, TRBJ2-7)
CASSFAGAYEQYF

SEQ ID NO: 128841 - protein, 15 aa, Homo sapiens
  CDR3 for alpha chain variable domain of TCR clone 64421 (TRAV14/DV4, TRAJ10)
CAMRELTGGGNKLTF

SEQ ID NO: 128842 - protein, 18 aa, Homo sapiens
  CDR3 for beta chain variable domain of TCR clone 64421 (TRBV7-9, TRBJ2-7)
CASSLTTSGSRTLYEQYF

SEQ ID NO: 128843 - protein, 14 aa, Homo sapiens
  CDR3 for alpha chain variable domain of TCR clone 64422 (TRAV1-2, TRAJ16)
CAVNRFSDGQKLLF

SEQ ID NO: 128844 - protein, 14 aa, Homo sapiens
  CDR3 for beta chain variable domain of TCR clone 64422 (TRBV20-1, TRBJ2-2)
CSAPDTANTGELFF

SEQ ID NO: 128845 - protein, 16 aa, Homo sapiens
  CDR3 for alpha chain variable domain of TCR clone 64423 (TRAV4, TRAJ18)
CCVLLIGGSTLGRLYF

SEQ ID NO: 128846 - protein, 16 aa, Homo sapiens
  CDR3 for beta chain variable domain of TCR clone 64423 (TRBV12-5, TRBJ2-5)
CASGPRTSGNQETQYF

SEQ ID NO: 128847 - protein, 11 aa, Homo sapiens
  CDR3 for alpha chain variable domain of TCR clone 64424 (TRAV8-3, TRAJ15)
CAVGPGTVLIF

SEQ ID NO: 128848 - protein, 18 aa, Homo sapiens
  CDR3 for beta chain variable domain of TCR clone 64424 (TRBV18, TRBJ2-3)
CASSYTSGAAGGTDTQYF

SEQ ID NO: 128849 - protein, 12 aa, Homo sapiens
  CDR3 for alpha chain variable domain of TCR clone 64425 (TRAV17, TRAJ4)
CATDGGYNKLIF

SEQ ID NO: 128850 - protein, 13 aa, Homo sapiens
  CDR3 for beta chain variable domain of TCR clone 64425 (TRBV12-5, TRBJ2-3)
CASGDRQSDTQYF

SEQ ID NO: 128851 - protein, 15 aa, Homo sapiens
  CDR3 for alpha chain variable domain of TCR clone 64426 (TRAV40, TRAJ45)
CLLGDLGGGADGLTF

SEQ ID NO: 128852 - protein, 13 aa, Homo sapiens
  CDR3 for beta chain variable domain of TCR clone 64426 (TRBV7-9, TRBJ1-2)
CASSLKQNYGYAF

SEQ ID NO: 128853 - protein, 17 aa, Homo sapiens
  CDR3 for alpha chain variable domain of TCR clone 64427 (TRAV2, TRAJ32)
CLLLCFHYGGATNKLIF

SEQ ID NO: 128854 - protein, 16 aa, Homo sapiens
  CDR3 for beta chain variable domain of TCR clone 64427 (TRBV7-9, TRBJ2-7)
CASSYPDREGGYEQYF

SEQ ID NO: 128855 - protein, 10 aa, Homo sapiens
  CDR3 for alpha chain variable domain of TCR clone 64428 (TRAV35, TRAJ22)
RPGSARQLTF

SEQ ID NO: 128856 - protein, 15 aa, Homo sapiens
  CDR3 for beta chain variable domain of TCR clone 64428 (TRBV12-4, TRBJ2-5)
CASSPPTGLQETQYF

SEQ ID NO: 128857 - protein, 13 aa, Homo sapiens
  CDR3 for alpha chain variable domain of TCR clone 64429 (TRAV13-2, TRAJ8)
CAFMNTGFQKLVF

SEQ ID NO: 128858 - protein, 17 aa, Homo sapiens
  CDR3 for beta chain variable domain of TCR clone 64429 (TRBV28, TRBJ2-1)
CVSSSARQALTYNEQFF

SEQ ID NO: 128859 - protein, 16 aa, Homo sapiens
  CDR3 for alpha chain variable domain of TCR clone 64430 (TRAV12-3, TRAJ53)
CAMSPGSGGSNYKLTF

SEQ ID NO: 128860 - protein, 15 aa, Homo sapiens
  CDR3 for beta chain variable domain of TCR clone 64430 (TRBV25-1, TRBJ1-4)
CASSKRIATSEKLFF

SEQ ID NO: 128861 - protein, 11 aa, Homo sapiens
  CDR3 for alpha chain variable domain of TCR clone 64431 (TRAV21, TRAJ34)
CAHYNTDKLIF

SEQ ID NO: 128862 - protein, 14 aa, Homo sapiens
  CDR3 for beta chain variable domain of TCR clone 64431 (TRBV13, TRBJ2-5)
CASSLGRGQETQYF

SEQ ID NO: 128863 - protein, 13 aa, Homo sapiens
  CDR3 for alpha chain variable domain of TCR clone 64432 (TRAV8-3, TRAJ43)
CAVGADNNNDMRF

SEQ ID NO: 128864 - protein, 13 aa, Homo sapiens
  CDR3 for beta chain variable domain of TCR clone 64432 (TRBV4-2, TRBJ1-1)
CVSSQAGNTEAFF

SEQ ID NO: 128865 - protein, 13 aa, Homo sapiens
  CDR3 for alpha chain variable domain of TCR clone 64433 (TRAV3, TRAJ20)
CAVRSLNDYKLSF

SEQ ID NO: 128866 - protein, 15 aa, Homo sapiens
  CDR3 for beta chain variable domain of TCR clone 64433 (TRBV20-1, TRBJ2-7)
CSARDRVSGMDEQYF

SEQ ID NO: 128867 - protein, 13 aa, Homo sapiens
  CDR3 for alpha chain variable domain of TCR clone 64434 (TRAV23/DV6, TRAJ3)
CAATYSSASKITF

SEQ ID NO: 128868 - protein, 15 aa, Homo sapiens
  CDR3 for beta chain variable domain of TCR clone 64434 (TRBV19, TRBJ1-1)
CASTSGQIQNTEAFF

SEQ ID NO: 128869 - protein, 11 aa, Homo sapiens
  CDR3 for alpha chain variable domain of TCR clone 64435 (TRAV2, TRAJ13)
CASGGYQKVTF

SEQ ID NO: 128870 - protein, 14 aa, Homo sapiens
  CDR3 for beta chain variable domain of TCR clone 64435 (TRBV7-2, TRBJ2-7)
CASSLPPGQGPQYF

SEQ ID NO: 128871 - protein, 14 aa, Homo sapiens
  CDR3 for alpha chain variable domain of TCR clone 64436 (TRAV26-1, TRAJ38)
CIADNAGNNRKLIW

SEQ ID NO: 128872 - protein, 14 aa, Homo sapiens
  CDR3 for beta chain variable domain of TCR clone 64436 (TRBV4-1, TRBJ2-2)
CASSQAVNTWELFF

SEQ ID NO: 128873 - protein, 13 aa, Homo sapiens
  CDR3 for alpha chain variable domain of TCR clone 64437 (TRAV13-2, TRAJ40)
CAEFTSGTYKYIF

SEQ ID NO: 128874 - protein, 14 aa, Homo sapiens
  CDR3 for beta chain variable domain of TCR clone 64437 (TRBV10-2, TRBJ1-5)
CACSSTGRNQPQHF

SEQ ID NO: 128875 - protein, 15 aa, Homo sapiens
  CDR3 for alpha chain variable domain of TCR clone 64438 (TRAV26-1, TRAJ29)
CIVRVEGSGNTPLVF

SEQ ID NO: 128876 - protein, 20 aa, Homo sapiens
  CDR3 for beta chain variable domain of TCR clone 64438 (TRBV28, TRBJ2-1)
CAITPIGRSPGLAGGNEQFF

SEQ ID NO: 128877 - protein, 11 aa, Homo sapiens
  CDR3 for alpha chain variable domain of TCR clone 64439 (TRAV12-1, TRAJ15)
CVVNAGTALIF

SEQ ID NO: 128878 - protein, 16 aa, Homo sapiens
  CDR3 for beta chain variable domain of TCR clone 64439 (TRBV19, TRBJ2-1)
CASSMGGGSSYNEQFF

SEQ ID NO: 128879 - protein, 13 aa, Homo sapiens
  CDR3 for alpha chain variable domain of TCR clone 64440 (TRAV26-1, TRAJ40)
CTVRVEGTYRYIF

SEQ ID NO: 128880 - protein, 15 aa, Homo sapiens
  CDR3 for beta chain variable domain of TCR clone 64440 (TRBV12-4, TRBJ1-2)
CASSLAHRDGQAYTF

SEQ ID NO: 128881 - protein, 13 aa, Homo sapiens
  CDR3 for alpha chain variable domain of TCR clone 64441 (TRAV2, TRAJ24)
CDLQLTAGGNSSL

SEQ ID NO: 128882 - protein, 13 aa, Homo sapiens
  CDR3 for beta chain variable domain of TCR clone 64441 (TRBV7-9, TRBJ1-2)
CASSLKQNYGDTF

SEQ ID NO: 128883 - protein, 22 aa, Homo sapiens
  CDR3 for alpha chain variable domain of TCR clone 64442 (TRAV26-1, TRAJ30)
CIVRVRTEMTRSSLEKGHDFIF

SEQ ID NO: 128884 - protein, 18 aa, Homo sapiens
  CDR3 for beta chain variable domain of TCR clone 64442 (TRBV4-1, TRBJ1-5)
CASSQDPRGQGLNQPQHF

SEQ ID NO: 128885 - protein, 19 aa, Homo sapiens
  CDR3 for alpha chain variable domain of TCR clone 64443 (TRAV1-2, TRAJ26)
CLLPLCCERPDSYGQNFVF

SEQ ID NO: 128886 - protein, 15 aa, Homo sapiens
  CDR3 for beta chain variable domain of TCR clone 64443 (TRBV9, TRBJ1-6)
CASSVAGTGDSPLHF

SEQ ID NO: 128887 - protein, 12 aa, Homo sapiens
  CDR3 for alpha chain variable domain of TCR clone 64444 (TRAV13-1, TRAJ27)
CAAHTNAGKTTF

SEQ ID NO: 128888 - protein, 14 aa, Homo sapiens
  CDR3 for beta chain variable domain of TCR clone 64444 (TRBV19, TRBJ2-2)
CASSGQGIAGELFF

SEQ ID NO: 128889 - protein, 12 aa, Homo sapiens
  CDR3 for alpha chain variable domain of TCR clone 64445 (TRAV12-3, TRAJ17)
CAMTLTGNKLTF

SEQ ID NO: 128890 - protein, 13 aa, Homo sapiens
  CDR3 for beta chain variable domain of TCR clone 64445 (TRBV24-1, TRBJ2-2)
CATSDWSTGGLFF

SEQ ID NO: 128891 - protein, 12 aa, Homo sapiens
  CDR3 for alpha chain variable domain of TCR clone 64446 (TRAV12-3, TRAJ17)
CEMTLTGNKLTF

SEQ ID NO: 128892 - protein, 13 aa, Homo sapiens
  CDR3 for beta chain variable domain of TCR clone 64446 (TRBV7-3, TRBJ1-1)
CASSQDWGAEAFF

SEQ ID NO: 128893 - protein, 14 aa, Homo sapiens
  CDR3 for alpha chain variable domain of TCR clone 64447 (TRAV1-2, TRAJ8)
CAVREDTGFQELVF

SEQ ID NO: 128894 - protein, 12 aa, Homo sapiens
  CDR3 for beta chain variable domain of TCR clone 64447 (TRBV29-1, TRBJ2-7)
CSARDRPYEQYF

SEQ ID NO: 128895 - protein, 15 aa, Homo sapiens
  CDR3 for alpha chain variable domain of TCR clone 64448 (TRAV13-1, TRAJ16)
CAARYQMARSCSLQG

SEQ ID NO: 128896 - protein, 13 aa, Homo sapiens
  CDR3 for beta chain variable domain of TCR clone 64448 (TRBV4-1, TRBJ2-1)
CASSQEGGDEQFF

SEQ ID NO: 128897 - protein, 17 aa, Homo sapiens
  CDR3 for alpha chain variable domain of TCR clone 64449 (TRAV3, TRAJ6)
CAVRDGPRAGGSYIPTF

SEQ ID NO: 128898 - protein, 15 aa, Homo sapiens
  CDR3 for beta chain variable domain of TCR clone 64449 (TRBV4-1, TRBJ2-7)
CASSQNTGRLYEQYF

SEQ ID NO: 128899 - protein, 13 aa, Homo sapiens
  CDR3 for alpha chain variable domain of TCR clone 64450 (TRAV12-2, TRAJ39)
CAVTNNAGNMLTF

SEQ ID NO: 128900 - protein, 13 aa, Homo sapiens
  CDR3 for beta chain variable domain of TCR clone 64450 (TRBV2, TRBJ1-5)
CATAGPGNQPQHF

SEQ ID NO: 128901 - protein, 16 aa, Homo sapiens
  CDR3 for alpha chain variable domain of TCR clone 64451 (TRAV14/DV4, TRAJ53)
CAMREGGGGSNYKLTF

SEQ ID NO: 128902 - protein, 12 aa, Homo sapiens
  CDR3 for beta chain variable domain of TCR clone 64451 (TRBV12-4, TRBJ1-5)
CASSLGRQPQHF

SEQ ID NO: 128903 - protein, 10 aa, Homo sapiens
  CDR3 for alpha chain variable domain of TCR clone 64452 (TRAV23/DV6, TRAJ43)
CAAAVASLEQ

SEQ ID NO: 128904 - protein, 13 aa, Homo sapiens
  CDR3 for beta chain variable domain of TCR clone 64452 (TRBV12-4, TRBJ1-2)
CASSLRQGKGYTF

SEQ ID NO: 128905 - protein, 14 aa, Homo sapiens
  CDR3 for alpha chain variable domain of TCR clone 64453 (TRAV35, TRAJ33)
CWPGGRDSNYQLIW

SEQ ID NO: 128906 - protein, 11 aa, Homo sapiens
  CDR3 for beta chain variable domain of TCR clone 64453 (TRBV10-3, TRBJ2-7)
CAISEGLEQYF

SEQ ID NO: 128907 - protein, 14 aa, Homo sapiens
  CDR3 for alpha chain variable domain of TCR clone 64454 (TRAV26-1, TRAJ38)
CIAVGAGNNRKLIW

SEQ ID NO: 128908 - protein, 12 aa, Homo sapiens
  CDR3 for beta chain variable domain of TCR clone 64454 (TRBV5-1, TRBJ2-5)
CASSWDQETQYF

SEQ ID NO: 128909 - protein, 16 aa, Homo sapiens
  CDR3 for alpha chain variable domain of TCR clone 64455 (TRAV27, TRAJ52)
CAGAGAGGTSYGKLTF

SEQ ID NO: 128910 - protein, 17 aa, Homo sapiens
  CDR3 for beta chain variable domain of TCR clone 64455 (TRBV24-1, TRBJ2-3)
CATSDLPSGEDTDTQYL

SEQ ID NO: 128911 - protein, 16 aa, Homo sapiens
  CDR3 for alpha chain variable domain of TCR clone 64456 (TRAV8-3, TRAJ18)
CAVGARRGSTLGRLYF

SEQ ID NO: 128912 - protein, 14 aa, Homo sapiens
  CDR3 for beta chain variable domain of TCR clone 64456 (TRBV20-1, TRBJ1-1)
CSAQTRIGGTEAFF

SEQ ID NO: 128913 - protein, 12 aa, Homo sapiens
  CDR3 for alpha chain variable domain of TCR clone 64457 (TRAV17, TRAJ20)
CATDGDDYKLSF

SEQ ID NO: 128914 - protein, 14 aa, Homo sapiens
  CDR3 for beta chain variable domain of TCR clone 64457 (TRBV12-5, TRBJ2-5)
CASGSRTHQETQYF

SEQ ID NO: 128915 - protein, 16 aa, Homo sapiens
  CDR3 for alpha chain variable domain of TCR clone 64458 (TRAV8-3, TRAJ13)
CAVGAYPSGGYQKVTF

SEQ ID NO: 128916 - protein, 16 aa, Homo sapiens
  CDR3 for beta chain variable domain of TCR clone 64458 (TRBV5-1, TRBJ2-2)
CASSSKLAENTGELFF

SEQ ID NO: 128917 - protein, 16 aa, Homo sapiens
  CDR3 for alpha chain variable domain of TCR clone 64459 (TRAV14/DV4, TRAJ10)
CAMREGRAGGGNKLTF

SEQ ID NO: 128918 - protein, 13 aa, Homo sapiens
  CDR3 for beta chain variable domain of TCR clone 64459 (TRBV12-4, TRBJ2-7)
CASSPTETYEQYF

SEQ ID NO: 128919 - protein, 15 aa, Homo sapiens
  CDR3 for alpha chain variable domain of TCR clone 64460 (TRAV26-1, TRAJ42)
CTVRVKGGSQGNLIF

SEQ ID NO: 128920 - protein, 14 aa, Homo sapiens
  CDR3 for beta chain variable domain of TCR clone 64460 (TRBV19, TRBJ2-2)
CATTGHANTGELFF

SEQ ID NO: 128921 - protein, 13 aa, Homo sapiens
  CDR3 for alpha chain variable domain of TCR clone 64461 (TRAV8-3, TRAJ36)
CAVGATGANNLFF

SEQ ID NO: 128922 - protein, 15 aa, Homo sapiens
  CDR3 for beta chain variable domain of TCR clone 64461 (TRBV10-3, TRBJ2-1)
CAISDVQDRAYEQFF

SEQ ID NO: 128923 - protein, 14 aa, Homo sapiens
  CDR3 for alpha chain variable domain of TCR clone 64462 (TRAV12-3, TRAJ9)
CAMSPNTGGFKTIF

SEQ ID NO: 128924 - protein, 15 aa, Homo sapiens
  CDR3 for beta chain variable domain of TCR clone 64462 (TRBV6-5, TRBJ2-1)
CDSSYDAGAGNEQFF

SEQ ID NO: 128925 - protein, 15 aa, Homo sapiens
  CDR3 for alpha chain variable domain of TCR clone 64463 (TRAV4, TRAJ39)
CLVGPNNNAGNMLTL

SEQ ID NO: 128926 - protein, 14 aa, Homo sapiens
  CDR3 for beta chain variable domain of TCR clone 64463 (TRBV19, TRBJ2-7)
CASNFRDTFTGMYF

SEQ ID NO: 128927 - protein, 13 aa, Homo sapiens
  CDR3 for alpha chain variable domain of TCR clone 64464 (TRAV12-2, TRAJ37)
CAGGSGNTGKLIF

SEQ ID NO: 128928 - protein, 13 aa, Homo sapiens
  CDR3 for beta chain variable domain of TCR clone 64464 (TRBV7-3, TRBJ1-1)
CASSQDWGAEAFF

SEQ ID NO: 128929 - protein, 15 aa, Homo sapiens
  CDR3 for alpha chain variable domain of TCR clone 64465 (TRAV34, TRAJ38)
CGADFTPGNNRKLIW

SEQ ID NO: 128930 - protein, 16 aa, Homo sapiens
  CDR3 for beta chain variable domain of TCR clone 64465 (TRBV7-9, TRBJ1-2)
CASSLGFSSGEDGYTF

SEQ ID NO: 128931 - protein, 12 aa, Homo sapiens
  CDR3 for alpha chain variable domain of TCR clone 64466 (TRAV21, TRAJ20)
CAVNVGRPQAQL

SEQ ID NO: 128932 - protein, 15 aa, Homo sapiens
  CDR3 for beta chain variable domain of TCR clone 64466 (TRBV6-1, TRBJ2-5)
CASSEFPLMGETQYF

SEQ ID NO: 128933 - protein, 18 aa, Homo sapiens
  CDR3 for alpha chain variable domain of TCR clone 64467 (TRAV26-2, TRAJ45)
CILRADKYSGGGADGLTF

SEQ ID NO: 128934 - protein, 12 aa, Homo sapiens
  CDR3 for beta chain variable domain of TCR clone 64467 (TRBV29-1, TRBJ2-3)
CSVTGGADTQYF

SEQ ID NO: 128935 - protein, 12 aa, Homo sapiens
  CDR3 for alpha chain variable domain of TCR clone 64468 (TRAV10, TRAJ43)
CVVVRVGHDMRF

SEQ ID NO: 128936 - protein, 15 aa, Homo sapiens
  CDR3 for beta chain variable domain of TCR clone 64468 (TRBV2, TRBJ2-7)
CASSEGLARSYEQYF

SEQ ID NO: 128937 - protein, 15 aa, Homo sapiens
  CDR3 for alpha chain variable domain of TCR clone 64469 (TRAV17, TRAJ37)
CATDHGSSNPGKLIF

SEQ ID NO: 128938 - protein, 14 aa, Homo sapiens
  CDR3 for beta chain variable domain of TCR clone 64469 (TRBV7-2, TRBJ2-3)
CASSRTSGADTQYF

SEQ ID NO: 128939 - protein, 14 aa, Homo sapiens
  CDR3 for alpha chain variable domain of TCR clone 64470 (TRAV12-2, TRAJ13)
CAVKKTGGYQKVTF

SEQ ID NO: 128940 - protein, 16 aa, Homo sapiens
  CDR3 for beta chain variable domain of TCR clone 64470 (TRBV4-3, TRBJ2-2)
CASSHLQGSGTGELFF

SEQ ID NO: 128941 - protein, 14 aa, Homo sapiens
  CDR3 for alpha chain variable domain of TCR clone 64471 (TRAV12-3, TRAJ10)
SHLPLTGGGNKLTF

SEQ ID NO: 128942 - protein, 15 aa, Homo sapiens
  CDR3 for beta chain variable domain of TCR clone 64471 (TRBV15, TRBJ1-1)
CATSLQGGRNTEAFF

SEQ ID NO: 128943 - protein, 16 aa, Homo sapiens
  CDR3 for alpha chain variable domain of TCR clone 64472 (TRAV30, TRAJ24)
CGTEIVDADSWGKFQF

SEQ ID NO: 128944 - protein, 13 aa, Homo sapiens
  CDR3 for beta chain variable domain of TCR clone 64472 (TRBV18, TRBJ1-2)
CASSASATEDYTF

SEQ ID NO: 128945 - protein, 14 aa, Homo sapiens
  CDR3 for alpha chain variable domain of TCR clone 64473 (TRAV26-1, TRAJ38)
CIADNAGNNRKLIG

SEQ ID NO: 128946 - protein, 13 aa, Homo sapiens
  CDR3 for beta chain variable domain of TCR clone 64473 (TRBV7-9, TRBJ1-2)
CASSLKQNYGYTF

SEQ ID NO: 128947 - protein, 13 aa, Homo sapiens
  CDR3 for alpha chain variable domain of TCR clone 64474 (TRAV13-1, TRAJ5)
CAARVTGWRALTF

SEQ ID NO: 128948 - protein, 15 aa, Homo sapiens
  CDR3 for beta chain variable domain of TCR clone 64474 (TRBV7-9, TRBJ2-7)
CASSPGGGLTYEQYF

SEQ ID NO: 128949 - protein, 12 aa, Homo sapiens
  CDR3 for alpha chain variable domain of TCR clone 64475 (TRAV16, TRAJ10)
CSRTGGGNKLTF

SEQ ID NO: 128950 - protein, 15 aa, Homo sapiens
  CDR3 for beta chain variable domain of TCR clone 64475 (TRBV6-3, TRBJ2-7)
CASSSPGTVFYEQCF

SEQ ID NO: 128951 - protein, 14 aa, Homo sapiens
  CDR3 for alpha chain variable domain of TCR clone 64476 (TRAV12-2, TRAJ40)
CAVRIPSGTYKYIF

SEQ ID NO: 128952 - protein, 17 aa, Homo sapiens
  CDR3 for beta chain variable domain of TCR clone 64476 (TRBV7-8, TRBJ2-6)
CASSAGTGGAGANVLTF

SEQ ID NO: 128953 - protein, 17 aa, Homo sapiens
  CDR3 for alpha chain variable domain of TCR clone 64477 (TRAV26-1, TRAJ53)
FIVRVDDSGGSNYKLTF

SEQ ID NO: 128954 - protein, 15 aa, Homo sapiens
  CDR3 for beta chain variable domain of TCR clone 64477 (TRBV20-1, TRBJ2-7)
CSARDRVSGMDEQYF

SEQ ID NO: 128955 - protein, 17 aa, Homo sapiens
  CDR3 for alpha chain variable domain of TCR clone 64478 (TRAV3, TRAJ6)
CAVRDVPRAGGSYIPTF

SEQ ID NO: 128956 - protein, 13 aa, Homo sapiens
  CDR3 for beta chain variable domain of TCR clone 64478 (TRBV20-1, TRBJ2-5)
CSARYTGEETQYF

SEQ ID NO: 128957 - protein, 13 aa, Homo sapiens
  CDR3 for alpha chain variable domain of TCR clone 64479 (TRAV20, TRAJ9)
CAVPDTGGFKAIF

SEQ ID NO: 128958 - protein, 14 aa, Homo sapiens
  CDR3 for beta chain variable domain of TCR clone 64479 (TRBV7-2, TRBJ2-5)
CASSPRGSSETQYF

SEQ ID NO: 128959 - protein, 12 aa, Homo sapiens
  CDR3 for alpha chain variable domain of TCR clone 64480 (TRAV13-2, TRAJ8)
CAPWLGFQKLVF

SEQ ID NO: 128960 - protein, 15 aa, Homo sapiens
  CDR3 for beta chain variable domain of TCR clone 64480 (TRBV4-2, TRBJ1-2)
CASSRNTGAGYGYTF

SEQ ID NO: 128961 - protein, 14 aa, Homo sapiens
  CDR3 for alpha chain variable domain of TCR clone 64481 (TRAV1-1, TRAJ27)
CAVIYNTNAGKSTF

SEQ ID NO: 128962 - protein, 11 aa, Homo sapiens
  CDR3 for beta chain variable domain of TCR clone 64481 (TRBV19, TRBJ1-1)
CASSIGSEAFF

SEQ ID NO: 128963 - protein, 14 aa, Homo sapiens
  CDR3 for alpha chain variable domain of TCR clone 64482 (TRAV12-3, TRAJ15)
CAMIPPQAGTALIF

SEQ ID NO: 128964 - protein, 12 aa, Homo sapiens
  CDR3 for beta chain variable domain of TCR clone 64482 (TRBV11-3, TRBJ2-2)
CASSLGGGELFF

SEQ ID NO: 128965 - protein, 12 aa, Homo sapiens
  CDR3 for alpha chain variable domain of TCR clone 64483 (TRAV12-2, TRAJ36)
CAAPRGANNLFF

SEQ ID NO: 128966 - protein, 15 aa, Homo sapiens
  CDR3 for beta chain variable domain of TCR clone 64483 (TRBV11-2, TRBJ1-3)
CASSLGGTVGNTIYF

SEQ ID NO: 128967 - protein, 16 aa, Homo sapiens
  CDR3 for alpha chain variable domain of TCR clone 64484 (TRAV3, TRAJ21)
CAVRDIERGNFNKFYF

SEQ ID NO: 128968 - protein, 14 aa, Homo sapiens
  CDR3 for beta chain variable domain of TCR clone 64484 (TRBV7-6, TRBJ2-3)
CASSLGTATDTQYF

SEQ ID NO: 128969 - protein, 12 aa, Homo sapiens
  CDR3 for alpha chain variable domain of TCR clone 64485 (TRAV3, TRAJ20)
CAVRDPDYKLIF

SEQ ID NO: 128970 - protein, 15 aa, Homo sapiens
  CDR3 for beta chain variable domain of TCR clone 64485 (TRBV2, TRBJ2-2)
CASSRETVGTGELFF

SEQ ID NO: 128971 - protein, 17 aa, Homo sapiens
  CDR3 for alpha chain variable domain of TCR clone 64486 (TRAV3, TRAJ12)
CAVRDGGRMDSSYKLIF

SEQ ID NO: 128972 - protein, 13 aa, Homo sapiens
  CDR3 for beta chain variable domain of TCR clone 64486 (TRBV7-9, TRBJ2-1)
CASSWESYNEQFF

SEQ ID NO: 128973 - protein, 14 aa, Homo sapiens
  CDR3 for alpha chain variable domain of TCR clone 64487 (TRAV8-3, TRAJ9)
CAVVYNTGGFKTIF

SEQ ID NO: 128974 - protein, 18 aa, Homo sapiens
  CDR3 for beta chain variable domain of TCR clone 64487 (TRBV10-3, TRBJ2-3)
CAISESRVGPMRGDTQYF

SEQ ID NO: 128975 - protein, 16 aa, Homo sapiens
  CDR3 for alpha chain variable domain of TCR clone 64488 (TRAV26-1, TRAJ53)
CIVRVAMGGSNYKLTF

SEQ ID NO: 128976 - protein, 12 aa, Homo sapiens
  CDR3 for beta chain variable domain of TCR clone 64488 (TRBV7-9, TRBJ1-5)
CASSPRGQPQHF

SEQ ID NO: 128977 - protein, 14 aa, Homo sapiens
  CDR3 for alpha chain variable domain of TCR clone 64489 (TRAV16, TRAJ39)
CALSKNNAGNMLTF

SEQ ID NO: 128978 - protein, 16 aa, Homo sapiens
  CDR3 for beta chain variable domain of TCR clone 64489 (TRBV6-5, TRBJ2-1)
CASSYSFSGSYNEQFF

SEQ ID NO: 128979 - protein, 14 aa, Homo sapiens
  CDR3 for alpha chain variable domain of TCR clone 64490 (TRAV12-3, TRAJ10)
SHLPLTGGGNKLTF

SEQ ID NO: 128980 - protein, 15 aa, Homo sapiens
  CDR3 for beta chain variable domain of TCR clone 64490 (TRBV11-2, TRBJ2-1)
CASSLGTSGLNEQFF

SEQ ID NO: 128981 - protein, 16 aa, Homo sapiens
  CDR3 for alpha chain variable domain of TCR clone 64491 (TRAV22, TRAJ45)
CGVERGKRGGADGLTF

SEQ ID NO: 128982 - protein, 13 aa, Homo sapiens
  CDR3 for beta chain variable domain of TCR clone 64491 (TRBV27, TRBJ1-1)
CASSLSIGAEAFF

SEQ ID NO: 128983 - protein, 17 aa, Homo sapiens
  CDR3 for alpha chain variable domain of TCR clone 64492 (TRAV13-1, TRAJ52)
CAASSGAGGTSYGKLTF

SEQ ID NO: 128984 - protein, 15 aa, Homo sapiens
  CDR3 for beta chain variable domain of TCR clone 64492 (TRBV7-2, TRBJ2-1)
CASSSGLAGDNEQFF

SEQ ID NO: 128985 - protein, 14 aa, Homo sapiens
  CDR3 for alpha chain variable domain of TCR clone 64493 (TRAV12-3, TRAJ58)
CAMSTETSGSRLTF

SEQ ID NO: 128986 - protein, 15 aa, Homo sapiens
  CDR3 for beta chain variable domain of TCR clone 64493 (TRBV4-1, TRBJ1-4)
CASSDTGGANEKLFF

SEQ ID NO: 128987 - protein, 22 aa, Homo sapiens
  CDR3 for alpha chain variable domain of TCR clone 64494 (TRAV8-2, TRAJ45)
HLTKPSAHMSDAAECSADGLTF

SEQ ID NO: 128988 - protein, 13 aa, Homo sapiens
  CDR3 for beta chain variable domain of TCR clone 64494 (TRBV7-3, TRBJ2-1)
CASSPVAYNEQFF

SEQ ID NO: 128989 - protein, 14 aa, Homo sapiens
  CDR3 for alpha chain variable domain of TCR clone 64495 (TRAV25, TRAJ35)
CARRMEGFGNVLHG

SEQ ID NO: 128990 - protein, 13 aa, Homo sapiens
  CDR3 for beta chain variable domain of TCR clone 64495 (TRBV7-2, TRBJ1-4)
CASSLAGLEKLFF

SEQ ID NO: 128991 - protein, 15 aa, Homo sapiens
  CDR3 for alpha chain variable domain of TCR clone 64496 (TRAV2, TRAJ24)
CAVVRLKNGWGKLQF

SEQ ID NO: 128992 - protein, 16 aa, Homo sapiens
  CDR3 for beta chain variable domain of TCR clone 64496 (TRBV7-7, TRBJ2-3)
CASSPGTSGSTDTQYF

SEQ ID NO: 128993 - protein, 12 aa, Homo sapiens
  CDR3 for alpha chain variable domain of TCR clone 64497 (TRAV13-1, TRAJ21)
CAAFFNFNNFYF

SEQ ID NO: 128994 - protein, 14 aa, Homo sapiens
  CDR3 for beta chain variable domain of TCR clone 64497 (TRBV4-1, TRBJ2-7)
CASRLTSGSYEQYF

SEQ ID NO: 128995 - protein, 14 aa, Homo sapiens
  CDR3 for alpha chain variable domain of TCR clone 64498 (TRAV13-2, TRAJ17)
CAENSKAAGNKLTF

SEQ ID NO: 128996 - protein, 15 aa, Homo sapiens
  CDR3 for beta chain variable domain of TCR clone 64498 (TRBV9, TRBJ1-6)
CASSVAGTGDSPLHF

SEQ ID NO: 128997 - protein, 18 aa, Homo sapiens
  CDR3 for alpha chain variable domain of TCR clone 64499 (TRAV12-3, TRAJ52)
CAMSVGGAGGTSYGKLTF

SEQ ID NO: 128998 - protein, 16 aa, Homo sapiens
  CDR3 for beta chain variable domain of TCR clone 64499 (TRBV19, TRBJ2-1)
CASSKAGPSSYNEQFF

SEQ ID NO: 128999 - protein, 10 aa, Homo sapiens
  CDR3 for alpha chain variable domain of TCR clone 64500 (TRAV39, TRAJ49)
CAVAGNQFYF

SEQ ID NO: 129000 - protein, 14 aa, Homo sapiens
  CDR3 for beta chain variable domain of TCR clone 64500 (TRBV11-2, TRBJ2-7)
CASSLGAGAYEQYF

SEQ ID NO: 129001 - protein, 14 aa, Homo sapiens
  CDR3 for alpha chain variable domain of TCR clone 64501 (TRAV20, TRAJ22)
CAVALVGSARQLTF

SEQ ID NO: 129002 - protein, 15 aa, Homo sapiens
  CDR3 for beta chain variable domain of TCR clone 64501 (TRBV7-2, TRBJ1-1)
CASSFAGDRDTEAFF

SEQ ID NO: 129003 - protein, 14 aa, Homo sapiens
  CDR3 for alpha chain variable domain of TCR clone 64502 (TRAV12-2, TRAJ13)
CAVKKTGGYQKVTF

SEQ ID NO: 129004 - protein, 14 aa, Homo sapiens
  CDR3 for beta chain variable domain of TCR clone 64502 (TRBV19, TRBJ2-1)
CASKDPSSYNEQFF

SEQ ID NO: 129005 - protein, 14 aa, Homo sapiens
  CDR3 for alpha chain variable domain of TCR clone 64503 (TRAV12-3, TRAJ54)
CAMRGIQGAQKLVF

SEQ ID NO: 129006 - protein, 15 aa, Homo sapiens
  CDR3 for beta chain variable domain of TCR clone 64503 (TRBV19, TRBJ2-3)
CASRETMGSRNTQYF

SEQ ID NO: 129007 - protein, 14 aa, Homo sapiens
  CDR3 for alpha chain variable domain of TCR clone 64504 (TRAV20, TRAJ56)
CAVQFGGANSKLTF

SEQ ID NO: 129008 - protein, 14 aa, Homo sapiens
  CDR3 for beta chain variable domain of TCR clone 64504 (TRBV20-1, TRBJ2-7)
CSAKRGRSYYEQYF

SEQ ID NO: 129009 - protein, 13 aa, Homo sapiens
  CDR3 for alpha chain variable domain of TCR clone 64505 (TRAV2, TRAJ29)
CAAQNSGNTPLAF

SEQ ID NO: 129010 - protein, 14 aa, Homo sapiens
  CDR3 for beta chain variable domain of TCR clone 64505 (TRBV7-9, TRBJ2-4)
CASSLAMGGNIQYF

SEQ ID NO: 129011 - protein, 12 aa, Homo sapiens
  CDR3 for alpha chain variable domain of TCR clone 64506 (TRAV38-1, TRAJ32)
CAPVGATNKLIF

SEQ ID NO: 129012 - protein, 14 aa, Homo sapiens
  CDR3 for beta chain variable domain of TCR clone 64506 (TRBV29-1, TRBJ2-5)
CSVETSGSGETQYF

SEQ ID NO: 129013 - protein, 12 aa, Homo sapiens
  CDR3 for alpha chain variable domain of TCR clone 64507 (TRAV3, TRAJ43)
CAVRDPNNDMRF

SEQ ID NO: 129014 - protein, 13 aa, Homo sapiens
  CDR3 for beta chain variable domain of TCR clone 64507 (TRBV7-9, TRBJ1-2)
CASSLKQNYGYTF

SEQ ID NO: 129015 - protein, 14 aa, Homo sapiens
  CDR3 for alpha chain variable domain of TCR clone 64508 (TRAV12-2, TRAJ13)
CAVKKTGGYQKVTF

SEQ ID NO: 129016 - protein, 15 aa, Homo sapiens
  CDR3 for beta chain variable domain of TCR clone 64508 (TRBV27, TRBJ2-7)
CASSNGGGSSNEQFF

SEQ ID NO: 129017 - protein, 13 aa, Homo sapiens
  CDR3 for alpha chain variable domain of TCR clone 64509 (TRAV12-2, TRAJ20)
CAVYPSNDYKLSS

SEQ ID NO: 129018 - protein, 15 aa, Homo sapiens
  CDR3 for beta chain variable domain of TCR clone 64509 (TRBV27, TRBJ2-5)
CASSLYPRGGETQYF

SEQ ID NO: 129019 - protein, 12 aa, Homo sapiens
  CDR3 for alpha chain variable domain of TCR clone 64510 (TRAV3, TRAJ27)
CAVRDKAGKSTF

SEQ ID NO: 129020 - protein, 15 aa, Homo sapiens
  CDR3 for beta chain variable domain of TCR clone 64510 (TRBV6-5, TRBJ2-2)
CASRPGQTNTGELFF

SEQ ID NO: 129021 - protein, 15 aa, Homo sapiens
  CDR3 for alpha chain variable domain of TCR clone 64511 (TRAV26-1, TRAJ29)
CIVRVEGSGNTPLVF

SEQ ID NO: 129022 - protein, 13 aa, Homo sapiens
  CDR3 for beta chain variable domain of TCR clone 64511 (TRBV11-2, TRBJ2-5)
CASSRGPSETQYF

SEQ ID NO: 129023 - protein, 14 aa, Homo sapiens
  CDR3 for alpha chain variable domain of TCR clone 64512 (TRAV25, TRAJ44)
CAVFPTGTASKLTF

SEQ ID NO: 129024 - protein, 15 aa, Homo sapiens
  CDR3 for beta chain variable domain of TCR clone 64512 (TRBV6-3, TRBJ2-7)
CASSSPGTVFYEQYF

SEQ ID NO: 129025 - protein, 13 aa, Homo sapiens
  CDR3 for alpha chain variable domain of TCR clone 64513 (TRAV16, TRAJ26)
CITVLCLAQNFVF

SEQ ID NO: 129026 - protein, 12 aa, Homo sapiens
  CDR3 for beta chain variable domain of TCR clone 64513 (TRBV11-2, TRBJ2-1)
CASSPGNNEQFF

SEQ ID NO: 129027 - protein, 14 aa, Homo sapiens
  CDR3 for alpha chain variable domain of TCR clone 64514 (TRAV17, TRAJ31)
CATVLRNNNASLMF

SEQ ID NO: 129028 - protein, 14 aa, Homo sapiens
  CDR3 for beta chain variable domain of TCR clone 64514 (TRBV12-4, TRBJ2-5)
CASSLWQKQETQYF

SEQ ID NO: 129029 - protein, 16 aa, Homo sapiens
  CDR3 for alpha chain variable domain of TCR clone 64515 (TRAV12-1, TRAJ8)
CVVNGRGNTGFQKLVF

SEQ ID NO: 129030 - protein, 15 aa, Homo sapiens
  CDR3 for beta chain variable domain of TCR clone 64515 (TRBV6-1, TRBJ1-2)
CASSPGRGGSYGYTF

SEQ ID NO: 129031 - protein, 12 aa, Homo sapiens
  CDR3 for alpha chain variable domain of TCR clone 64516 (TRAV36/DV7, TRAJ40)
CAVGTGTYKYIF

SEQ ID NO: 129032 - protein, 12 aa, Homo sapiens
  CDR3 for beta chain variable domain of TCR clone 64516 (TRBV11-2, TRBJ2-1)
CASSPGNNEQFF

SEQ ID NO: 129033 - protein, 19 aa, Homo sapiens
  CDR3 for alpha chain variable domain of TCR clone 64517 (TRAV26-1, TRAJ52)
CIVRAHRNAGGTSHGKLTF

SEQ ID NO: 129034 - protein, 15 aa, Homo sapiens
  CDR3 for beta chain variable domain of TCR clone 64517 (TRBV12-4, TRBJ2-5)
CASSPPTGLQETQYF

SEQ ID NO: 129035 - protein, 13 aa, Homo sapiens
  CDR3 for alpha chain variable domain of TCR clone 64518 (TRAV13-1, TRAJ5)
CATRVTGRRALTF

SEQ ID NO: 129036 - protein, 15 aa, Homo sapiens
  CDR3 for beta chain variable domain of TCR clone 64518 (TRBV7-9, TRBJ2-7)
CASSPGGGLTYEQYF

SEQ ID NO: 129037 - protein, 12 aa, Homo sapiens
  CDR3 for alpha chain variable domain of TCR clone 64519 (TRAV13-1, TRAJ21)
CAAKEGFNKFYF

SEQ ID NO: 129038 - protein, 17 aa, Homo sapiens
  CDR3 for beta chain variable domain of TCR clone 64519 (TRBV20-1, TRBJ2-1)
CSASSSGLAVPYNEQFF

SEQ ID NO: 129039 - protein, 14 aa, Homo sapiens
  CDR3 for alpha chain variable domain of TCR clone 64520 (TRAV13-1, TRAJ24)
CAASRTDSWGKLQF

SEQ ID NO: 129040 - protein, 15 aa, Homo sapiens
  CDR3 for beta chain variable domain of TCR clone 64520 (TRBV7-9, TRBJ1-5)
CASSQGHQPNQTQHF

SEQ ID NO: 129041 - protein, 11 aa, Homo sapiens
  CDR3 for alpha chain variable domain of TCR clone 64521 (TRAV2, TRAJ33)
CAVDSNYQLIW

SEQ ID NO: 129042 - protein, 15 aa, Homo sapiens
  CDR3 for beta chain variable domain of TCR clone 64521 (TRBV4-1, TRBJ1-4)
CASSDTGGTNEKLFF

SEQ ID NO: 129043 - protein, 16 aa, Homo sapiens
  CDR3 for alpha chain variable domain of TCR clone 64522 (TRAV3, TRAJ37)
CAVRGKGSGNTGKLIF

SEQ ID NO: 129044 - protein, 14 aa, Homo sapiens
  CDR3 for beta chain variable domain of TCR clone 64522 (TRBV2, TRBJ1-5)
CASSENRGGQPQHF

SEQ ID NO: 129045 - protein, 11 aa, Homo sapiens
  CDR3 for alpha chain variable domain of TCR clone 64523 (TRAV1-1, TRAJ16)
CAAGDGQKRLF

SEQ ID NO: 129046 - protein, 15 aa, Homo sapiens
  CDR3 for beta chain variable domain of TCR clone 64523 (TRBV28, TRBJ1-2)
CASIPQGSDDYGYTF

SEQ ID NO: 129047 - protein, 15 aa, Homo sapiens
  CDR3 for alpha chain variable domain of TCR clone 64524 (TRAV13-1, TRAJ27)
CAARELNTNAGKSTF

SEQ ID NO: 129048 - protein, 14 aa, Homo sapiens
  CDR3 for beta chain variable domain of TCR clone 64524 (TRBV6-5, TRBJ1-2)
CASSYTRGRGRYTF

SEQ ID NO: 129049 - protein, 18 aa, Homo sapiens
  CDR3 for alpha chain variable domain of TCR clone 64525 (TRAV29/DV5, TRAJ52)
CAAGFRGAGGTSYGKLTF

SEQ ID NO: 129050 - protein, 15 aa, Homo sapiens
  CDR3 for beta chain variable domain of TCR clone 64525 (TRBV10-2, TRBJ2-6)
CASSEQGTGANVLTF

SEQ ID NO: 129051 - protein, 12 aa, Homo sapiens
  CDR3 for alpha chain variable domain of TCR clone 64526 (TRAV8-3, TRAJ20)
CAVGANDYNLSF

SEQ ID NO: 129052 - protein, 15 aa, Homo sapiens
  CDR3 for beta chain variable domain of TCR clone 64526 (TRBV11-2, TRBJ2-1)
CASSLGTSGLNEQFF

SEQ ID NO: 129053 - protein, 14 aa, Homo sapiens
  CDR3 for alpha chain variable domain of TCR clone 64527 (TRAV12-2, TRAJ40)
CAVRIPSGTYKYIF

SEQ ID NO: 129054 - protein, 17 aa, Homo sapiens
  CDR3 for beta chain variable domain of TCR clone 64527 (TRBV11-2, TRBJ2-1)
CASSLYPTGVEYNEQFF

SEQ ID NO: 129055 - protein, 15 aa, Homo sapiens
  CDR3 for alpha chain variable domain of TCR clone 64528 (TRAV13-1, TRAJ52)
CALRTGGTSYGKLTF

SEQ ID NO: 129056 - protein, 15 aa, Homo sapiens
  CDR3 for beta chain variable domain of TCR clone 64528 (TRBV7-3, TRBJ2-2)
CASSETGQGTGELFF

SEQ ID NO: 129057 - protein, 14 aa, Homo sapiens
  CDR3 for alpha chain variable domain of TCR clone 64529 (TRAV8-2, TRAJ33)
CVVGGMDSNYQLIW

SEQ ID NO: 129058 - protein, 14 aa, Homo sapiens
  CDR3 for beta chain variable domain of TCR clone 64529 (TRBV9, TRBJ2-1)
CASSQGVSYNEQFF

SEQ ID NO: 129059 - protein, 16 aa, Homo sapiens
  CDR3 for alpha chain variable domain of TCR clone 64530 (TRAV30, TRAJ24)
CGTEIVDADSRGKFQF

SEQ ID NO: 129060 - protein, 14 aa, Homo sapiens
  CDR3 for beta chain variable domain of TCR clone 64530 (TRBV12-5, TRBJ2-5)
RASGSRTHQETQYF

SEQ ID NO: 129061 - protein, 13 aa, Homo sapiens
  CDR3 for alpha chain variable domain of TCR clone 64531 (TRAV36/DV7, TRAJ54)
CAVDIQGAQKLVF

SEQ ID NO: 129062 - protein, 14 aa, Homo sapiens
  CDR3 for beta chain variable domain of TCR clone 64531 (TRBV19, TRBJ2-7)
CASNFRDTFTGVYF

SEQ ID NO: 129063 - protein, 13 aa, Homo sapiens
  CDR3 for alpha chain variable domain of TCR clone 64532 (TRAV8-3, TRAJ48)
CAVVPSGNEKLTF

SEQ ID NO: 129064 - protein, 15 aa, Homo sapiens
  CDR3 for beta chain variable domain of TCR clone 64532 (TRBV11-2, TRBJ2-1)
CASSSPSTRYNEQFF

SEQ ID NO: 129065 - protein, 14 aa, Homo sapiens
  CDR3 for alpha chain variable domain of TCR clone 64533 (TRAV26-1, TRAJ21)
CIVRPPYNFNKFYF

SEQ ID NO: 129066 - protein, 15 aa, Homo sapiens
  CDR3 for beta chain variable domain of TCR clone 64533 (TRBV27, TRBJ2-1)
CASSNGGGSSNEQFF

SEQ ID NO: 129067 - protein, 12 aa, Homo sapiens
  CDR3 for alpha chain variable domain of TCR clone 64534 (TRAV6, TRAJ34)
CALHRGTDKLIF

SEQ ID NO: 129068 - protein, 16 aa, Homo sapiens
  CDR3 for beta chain variable domain of TCR clone 64534 (TRBV3-1, TRBJ2-5)
CASSQDWASGKETQYF

SEQ ID NO: 129069 - protein, 14 aa, Homo sapiens
  CDR3 for alpha chain variable domain of TCR clone 64535 (TRAV17, TRAJ31)
CATVLRNNNARLMF

SEQ ID NO: 129070 - protein, 14 aa, Homo sapiens
  CDR3 for beta chain variable domain of TCR clone 64535 (TRBV19, TRBJ2-1)
CASPTFVLSGEQFF

SEQ ID NO: 129071 - protein, 11 aa, Homo sapiens
  CDR3 for alpha chain variable domain of TCR clone 64536 (TRAV12-3, TRAJ43)
CAMSVYNDMRF

SEQ ID NO: 129072 - protein, 20 aa, Homo sapiens
  CDR3 for beta chain variable domain of TCR clone 64536 (TRBV28, TRBJ2-1)
CASTPIGRSPGLAGGNEQFF

SEQ ID NO: 129073 - protein, 13 aa, Homo sapiens
  CDR3 for alpha chain variable domain of TCR clone 64537 (TRAV12-1, TRAJ7)
CVVNMRGNNRLAC

SEQ ID NO: 129074 - protein, 15 aa, Homo sapiens
  CDR3 for beta chain variable domain of TCR clone 64537 (TRBV27, TRBJ2-3)
CASSLGLAATDTQYF

SEQ ID NO: 129075 - protein, 12 aa, Homo sapiens
  CDR3 for alpha chain variable domain of TCR clone 64538 (TRAV23/DV6, TRAJ54)
CAVVRGAQKLVF

SEQ ID NO: 129076 - protein, 14 aa, Homo sapiens
  CDR3 for beta chain variable domain of TCR clone 64538 (TRBV7-3, TRBJ1-1)
CASSLKGGDTEAFF

SEQ ID NO: 129077 - protein, 13 aa, Homo sapiens
  CDR3 for alpha chain variable domain of TCR clone 64539 (TRAV13-1, TRAJ20)
CAARVSNDYKLSF

SEQ ID NO: 129078 - protein, 12 aa, Homo sapiens
  CDR3 for beta chain variable domain of TCR clone 64539 (TRBV20-1, TRBJ2-1)
CSARLGTDERFS

SEQ ID NO: 129079 - protein, 12 aa, Homo sapiens
  CDR3 for alpha chain variable domain of TCR clone 64540 (TRAV12-3, TRAJ17)
CAMTLTGNKLTF

SEQ ID NO: 129080 - protein, 16 aa, Homo sapiens
  CDR3 for beta chain variable domain of TCR clone 64540 (TRBV13, TRBJ2-2)
CASSPMTGEHTGELFF

SEQ ID NO: 129081 - protein, 14 aa, Homo sapiens
  CDR3 for alpha chain variable domain of TCR clone 64541 (TRAV12-2, TRAJ40)
CAVKIPSGTYKYIF

SEQ ID NO: 129082 - protein, 12 aa, Homo sapiens
  CDR3 for beta chain variable domain of TCR clone 64541 (TRBV7-9, TRBJ2-7)
CASSIKREEQYF

SEQ ID NO: 129083 - protein, 13 aa, Homo sapiens
  CDR3 for alpha chain variable domain of TCR clone 64542 (TRAV1-1, TRAJ7)
CAVRDHRNNRLAF

SEQ ID NO: 129084 - protein, 20 aa, Homo sapiens
  CDR3 for beta chain variable domain of TCR clone 64542 (TRBV28, TRBJ2-3)
CASSLGVRSTSGRGTDTQYF

SEQ ID NO: 129085 - protein, 12 aa, Homo sapiens
  CDR3 for alpha chain variable domain of TCR clone 64543 (TRAV3, TRAJ17)
CAVRSCRQQANF

SEQ ID NO: 129086 - protein, 15 aa, Homo sapiens
  CDR3 for beta chain variable domain of TCR clone 64543 (TRBV2, TRBJ2-4)
CASSGTNLAKNIQHF

SEQ ID NO: 129087 - protein, 12 aa, Homo sapiens
  CDR3 for alpha chain variable domain of TCR clone 64544 (TRAV3, TRAJ31)
CAVRDGNALLMF

SEQ ID NO: 129088 - protein, 18 aa, Homo sapiens
  CDR3 for beta chain variable domain of TCR clone 64544 (TRBV7-2, TRBJ2-3)
CASSLKREGSGITDTQYF

SEQ ID NO: 129089 - protein, 17 aa, Homo sapiens
  CDR3 for alpha chain variable domain of TCR clone 64545 (TRAV4, TRAJ13)
CLVGVQGSSGGYQKVTF

SEQ ID NO: 129090 - protein, 13 aa, Homo sapiens
  CDR3 for beta chain variable domain of TCR clone 64545 (TRBV9, TRBJ2-1)
CASSPSGGSEQFF

SEQ ID NO: 129091 - protein, 16 aa, Homo sapiens
  CDR3 for alpha chain variable domain of TCR clone 64546 (TRAV13-1, TRAJ3)
CAATGVQQCFQDNLWI

SEQ ID NO: 129092 - protein, 16 aa, Homo sapiens
  CDR3 for beta chain variable domain of TCR clone 64546 (TRBV7-3, TRBJ2-2)
CASSLKRGTLSGELFF

SEQ ID NO: 129093 - protein, 12 aa, Homo sapiens
  CDR3 for alpha chain variable domain of TCR clone 64547 (TRAV12-3, TRAJ17)
CAMTLTGNKLTF

SEQ ID NO: 129094 - protein, 11 aa, Homo sapiens
  CDR3 for beta chain variable domain of TCR clone 64547 (TRBV28, TRBJ2-1)
CASRRANEQFF

SEQ ID NO: 129095 - protein, 13 aa, Homo sapiens
  CDR3 for alpha chain variable domain of TCR clone 64548 (TRAV38-1, TRAJ42)
CARWGGSQGNLIF

SEQ ID NO: 129096 - protein, 17 aa, Homo sapiens
  CDR3 for beta chain variable domain of TCR clone 64548 (TRBV20-1, TRBJ2-1)
CSARVPLAGVWDNEQFF

SEQ ID NO: 129097 - protein, 15 aa, Homo sapiens
  CDR3 for alpha chain variable domain of TCR clone 64549 (TRAV3, TRAJ5)
CAVRDLDTGRRALTF

SEQ ID NO: 129098 - protein, 14 aa, Homo sapiens
  CDR3 for beta chain variable domain of TCR clone 64549 (TRBV19, TRBJ1-1)
CASRRFAGVTEAFF

SEQ ID NO: 129099 - protein, 14 aa, Homo sapiens
  CDR3 for alpha chain variable domain of TCR clone 64550 (TRAV2, TRAJ9)
CAVEDRSGGFKTIF

SEQ ID NO: 129100 - protein, 14 aa, Homo sapiens
  CDR3 for beta chain variable domain of TCR clone 64550 (TRBV19, TRBJ2-5)
CASSMTGQQETQYF

SEQ ID NO: 129101 - protein, 14 aa, Homo sapiens
  CDR3 for alpha chain variable domain of TCR clone 64551 (TRAV4, TRAJ17)
CLVGDMAAGNKLTF

SEQ ID NO: 129102 - protein, 14 aa, Homo sapiens
  CDR3 for beta chain variable domain of TCR clone 64551 (TRBV7-6, TRBJ2-3)
CASSLGKVTDTQYF

SEQ ID NO: 129103 - protein, 16 aa, Homo sapiens
  CDR3 for alpha chain variable domain of TCR clone 64552 (TRAV12-2, TRAJ43)
CAGDDMRFGAGTRLTV

SEQ ID NO: 129104 - protein, 12 aa, Homo sapiens
  CDR3 for beta chain variable domain of TCR clone 64552 (TRBV18, TRBJ1-1)
CASSPGGTEAFF

SEQ ID NO: 129105 - protein, 13 aa, Homo sapiens
  CDR3 for alpha chain variable domain of TCR clone 64553 (TRAV8-1, TRAJ23)
YAVTGGQGGKLIF

SEQ ID NO: 129106 - protein, 15 aa, Homo sapiens
  CDR3 for beta chain variable domain of TCR clone 64553 (TRBV20-1, TRBJ2-2)
CSAIPGHSSTGELFF

SEQ ID NO: 129107 - protein, 14 aa, Homo sapiens
  CDR3 for alpha chain variable domain of TCR clone 64554 (TRAV12-3, TRAJ13)
CAMRNSGGYQKVTF

SEQ ID NO: 129108 - protein, 14 aa, Homo sapiens
  CDR3 for beta chain variable domain of TCR clone 64554 (TRBV4-1, TRBJ1-6)
CTSSPGSDSSPLHF

SEQ ID NO: 129109 - protein, 15 aa, Homo sapiens
  CDR3 for alpha chain variable domain of TCR clone 64555 (TRAV16, TRAJ53)
CALIDSVGSNYKLTF

SEQ ID NO: 129110 - protein, 15 aa, Homo sapiens
  CDR3 for beta chain variable domain of TCR clone 64555 (TRBV7-2, TRBJ1-2)
CASSPRAGWNYGYTF

SEQ ID NO: 129111 - protein, 14 aa, Homo sapiens
  CDR3 for alpha chain variable domain of TCR clone 64556 (TRAV12-2, TRAJ45)
CALPERGGADGLTF

SEQ ID NO: 129112 - protein, 14 aa, Homo sapiens
  CDR3 for beta chain variable domain of TCR clone 64556 (TRBV18, TRBJ1-5)
CASAPGNSNQPQHF

SEQ ID NO: 129113 - protein, 13 aa, Homo sapiens
  CDR3 for alpha chain variable domain of TCR clone 64557 (TRAV1-2, TRAJ9)
CAALNTGGFKTIF

SEQ ID NO: 129114 - protein, 15 aa, Homo sapiens
  CDR3 for beta chain variable domain of TCR clone 64557 (TRBV13, TRBJ1-2)
CASSLGRQPGYGYTF

SEQ ID NO: 129115 - protein, 12 aa, Homo sapiens
  CDR3 for alpha chain variable domain of TCR clone 64558 (TRAV35, TRAJ39)
LAPNNAGNMLTF

SEQ ID NO: 129116 - protein, 16 aa, Homo sapiens
  CDR3 for beta chain variable domain of TCR clone 64558 (TRBV2, TRBJ2-3)
CASSNSVEGVTDTQYF

SEQ ID NO: 129117 - protein, 15 aa, Homo sapiens
  CDR3 for alpha chain variable domain of TCR clone 64559 (TRAV3, TRAJ5)
CTVRDLDTGRRALTF

SEQ ID NO: 129118 - protein, 13 aa, Homo sapiens
  CDR3 for beta chain variable domain of TCR clone 64559 (TRBV12-4, TRBJ2-7)
CASSPTETYEQYF

SEQ ID NO: 129119 - protein, 14 aa, Homo sapiens
  CDR3 for alpha chain variable domain of TCR clone 64560 (TRAV12-2, TRAJ40)
CAVKIPSGTYKYTF

SEQ ID NO: 129120 - protein, 12 aa, Homo sapiens
  CDR3 for beta chain variable domain of TCR clone 64560 (TRBV11-2, TRBJ2-2)
CASSLGGGELFF

SEQ ID NO: 129121 - protein, 15 aa, Homo sapiens
  CDR3 for alpha chain variable domain of TCR clone 64561 (TRAV12-1, TRAJ44)
CVVFVNTGTASKLTF

SEQ ID NO: 129122 - protein, 17 aa, Homo sapiens
  CDR3 for beta chain variable domain of TCR clone 64561 (TRBV7-8, TRBJ2-6)
CASSAVTGGAGANVLTF

SEQ ID NO: 129123 - protein, 12 aa, Homo sapiens
  CDR3 for alpha chain variable domain of TCR clone 64562 (TRAV12-3, TRAJ17)
CAMTLTGNKLTF

SEQ ID NO: 129124 - protein, 13 aa, Homo sapiens
  CDR3 for beta chain variable domain of TCR clone 64562 (TRBV25-1, TRBJ2-7)
CASSEDGDYEQYF

SEQ ID NO: 129125 - protein, 11 aa, Homo sapiens
  CDR3 for alpha chain variable domain of TCR clone 64563 (TRAV17, TRAJ31)
CATSNNARPMF

SEQ ID NO: 129126 - protein, 16 aa, Homo sapiens
  CDR3 for beta chain variable domain of TCR clone 64563 (TRBV7-8, TRBJ2-4)
CASSAERTLAKNIQYF

SEQ ID NO: 129127 - protein, 18 aa, Homo sapiens
  CDR3 for alpha chain variable domain of TCR clone 64564 (TRAV21, TRAJ52)
CAVRPSPAGSTSYGKLTF

SEQ ID NO: 129128 - protein, 13 aa, Homo sapiens
  CDR3 for beta chain variable domain of TCR clone 64564 (TRBV7-3, TRBJ1-1)
CASSQDWGAEAFF

SEQ ID NO: 129129 - protein, 13 aa, Homo sapiens
  CDR3 for alpha chain variable domain of TCR clone 64565 (TRAV17, TRAJ33)
CATDADSNYQLIW

SEQ ID NO: 129130 - protein, 17 aa, Homo sapiens
  CDR3 for beta chain variable domain of TCR clone 64565 (TRBV20-1, TRBJ2-3)
CSAVSPGLAGGARYAVF

SEQ ID NO: 129131 - protein, 14 aa, Homo sapiens
  CDR3 for alpha chain variable domain of TCR clone 64566 (TRAV1-2, TRAJ16)
CAVNRFSDGQKLLF

SEQ ID NO: 129132 - protein, 14 aa, Homo sapiens
  CDR3 for beta chain variable domain of TCR clone 64566 (TRBV10-2, TRBJ1-5)
RASSSTGRNQPQHF

SEQ ID NO: 129133 - protein, 15 aa, Homo sapiens
  CDR3 for alpha chain variable domain of TCR clone 64567 (TRAV3, TRAJ20)
YAVRDIKLSDYKLSF

SEQ ID NO: 129134 - protein, 18 aa, Homo sapiens
  CDR3 for beta chain variable domain of TCR clone 64567 (TRBV20-1, TRBJ2-5)
CSQTGDSGRLGGKETQYF

SEQ ID NO: 129135 - protein, 17 aa, Homo sapiens
  CDR3 for alpha chain variable domain of TCR clone 64568 (TRAV12-3, TRAJ6)
CAMSARGGAGGSYIPTF

SEQ ID NO: 129136 - protein, 12 aa, Homo sapiens
  CDR3 for beta chain variable domain of TCR clone 64568 (TRBV12-4, TRBJ2-3)
CASSALPDTQYF

SEQ ID NO: 129137 - protein, 17 aa, Homo sapiens
  CDR3 for alpha chain variable domain of TCR clone 64569 (TRAV2, TRAJ22)
ILQVREAYAAEQRQLTF

SEQ ID NO: 129138 - protein, 16 aa, Homo sapiens
  CDR3 for beta chain variable domain of TCR clone 64569 (TRBV2, TRBJ2-5)
CASSETQGVGEETQYF

SEQ ID NO: 129139 - protein, 11 aa, Homo sapiens
  CDR3 for alpha chain variable domain of TCR clone 64570 (TRAV3, TRAJ21)
CAVGNFNKFYF

SEQ ID NO: 129140 - protein, 15 aa, Homo sapiens
  CDR3 for beta chain variable domain of TCR clone 64570 (TRBV7-9, TRBJ1-4)
CASSSGTPTNEKLFF

SEQ ID NO: 129141 - protein, 14 aa, Homo sapiens
  CDR3 for alpha chain variable domain of TCR clone 64571 (TRAV21, TRAJ38)
CAVANAGNNRKLIW

SEQ ID NO: 129142 - protein, 16 aa, Homo sapiens
  CDR3 for beta chain variable domain of TCR clone 64571 (TRBV12-5, TRBJ2-5)
CASGPRTSGNQETQYF

SEQ ID NO: 129143 - protein, 16 aa, Homo sapiens
  CDR3 for alpha chain variable domain of TCR clone 64572 (TRAV12-3, TRAJ53)
CAMSPGSGGSNYKLTF

SEQ ID NO: 129144 - protein, 15 aa, Homo sapiens
  CDR3 for beta chain variable domain of TCR clone 64572 (TRBV5-1, TRBJ2-2)
CASSSQGGNTGELFF

SEQ ID NO: 129145 - protein, 18 aa, Homo sapiens
  CDR3 for alpha chain variable domain of TCR clone 64573 (TRAV21, TRAJ52)
CAVRPFPAGGTSYGKLTF

SEQ ID NO: 129146 - protein, 15 aa, Homo sapiens
  CDR3 for beta chain variable domain of TCR clone 64573 (TRBV10-3, TRBJ2-3)
CAISLTSGGTDTQYF

SEQ ID NO: 129147 - protein, 20 aa, Homo sapiens
  CDR3 for alpha chain variable domain of TCR clone 64574 (TRAV1-1, TRAJ4)
CLLLLRCEGFLSGGYNKLIF

SEQ ID NO: 129148 - protein, 16 aa, Homo sapiens
  CDR3 for beta chain variable domain of TCR clone 64574 (TRBV28, TRBJ1-4)
CASSPPYRGRSEKLFI

SEQ ID NO: 129149 - protein, 15 aa, Homo sapiens
  CDR3 for alpha chain variable domain of TCR clone 64575 (TRAV8-3, TRAJ45)
CASSYSGVGADGLTF

SEQ ID NO: 129150 - protein, 13 aa, Homo sapiens
  CDR3 for beta chain variable domain of TCR clone 64575 (TRBV20-1, TRBJ2-2)
CSASAAGTGELFF

SEQ ID NO: 129151 - protein, 16 aa, Homo sapiens
  CDR3 for alpha chain variable domain of TCR clone 64576 (TRAV26-1, TRAJ37)
CIVRGDGSGNTGKLIF

SEQ ID NO: 129152 - protein, 17 aa, Homo sapiens
  CDR3 for beta chain variable domain of TCR clone 64576 (TRBV4-1, TRBJ2-7)
CASRRDPLGVRGGEQYF

SEQ ID NO: 129153 - protein, 14 aa, Homo sapiens
  CDR3 for alpha chain variable domain of TCR clone 64577 (TRAV8-4, TRAJ15)
FAVTIREAGTALIF

SEQ ID NO: 129154 - protein, 13 aa, Homo sapiens
  CDR3 for beta chain variable domain of TCR clone 64577 (TRBV10-3, TRBJ2-7)
CAISEKGGYEQYF

SEQ ID NO: 129155 - protein, 19 aa, Homo sapiens
  CDR3 for alpha chain variable domain of TCR clone 64578 (TRAV2, TRAJ20)
ILQVREADAAVYRDCKLSF

SEQ ID NO: 129156 - protein, 20 aa, Homo sapiens
  CDR3 for beta chain variable domain of TCR clone 64578 (TRBV7-8, TRBJ2-2)
CASSHLFPGPTIHITGELFF

SEQ ID NO: 129157 - protein, 12 aa, Homo sapiens
  CDR3 for alpha chain variable domain of TCR clone 64579 (TRAV22, TRAJ20)
CAVGGNDYKLSF

SEQ ID NO: 129158 - protein, 14 aa, Homo sapiens
  CDR3 for beta chain variable domain of TCR clone 64579 (TRBV10-3, TRBJ2-7)
CHQCGTSETYEQYF

SEQ ID NO: 129159 - protein, 13 aa, Homo sapiens
  CDR3 for alpha chain variable domain of TCR clone 64580 (TRAV35, TRAJ57)
CAGSQGGAEKLVF

SEQ ID NO: 129160 - protein, 14 aa, Homo sapiens
  CDR3 for beta chain variable domain of TCR clone 64580 (TRBV25-1, TRBJ1-1)
CASTHLGGNTEAFF

SEQ ID NO: 129161 - protein, 15 aa, Homo sapiens
  CDR3 for alpha chain variable domain of TCR clone 64581 (TRAV12-1, TRAJ45)
CVVLSGGGGADGLAF

SEQ ID NO: 129162 - protein, 15 aa, Homo sapiens
  CDR3 for beta chain variable domain of TCR clone 64581 (TRBV20-1, TRBJ2-7)
CSARDRVSGMDEQYF

SEQ ID NO: 129163 - protein, 10 aa, Homo sapiens
  CDR3 for alpha chain variable domain of TCR clone 64582 (TRAV23/DV6, TRAJ57)
CAASSTLSQG

SEQ ID NO: 129164 - protein, 13 aa, Homo sapiens
  CDR3 for beta chain variable domain of TCR clone 64582 (TRBV11-3, TRBJ2-3)
CASSHDTKDTQYL

SEQ ID NO: 129165 - protein, 15 aa, Homo sapiens
  CDR3 for alpha chain variable domain of TCR clone 64583 (TRAV26-1, TRAJ29)
CIVRVEGSGNTPLVF

SEQ ID NO: 129166 - protein, 16 aa, Homo sapiens
  CDR3 for beta chain variable domain of TCR clone 64583 (TRBV6-1, TRBJ2-1)
CASILRQGSSYNEQFF

SEQ ID NO: 129167 - protein, 23 aa, Homo sapiens
  CDR3 for alpha chain variable domain of TCR clone 64584 (TRAV8-6, TRAJ38)
CAVRNAGNNHIQNPDPAVYQLRD

SEQ ID NO: 129168 - protein, 15 aa, Homo sapiens
  CDR3 for beta chain variable domain of TCR clone 64584 (TRBV4-1, TRBJ2-2)
CASSEGQGITGELFL

SEQ ID NO: 129169 - protein, 13 aa, Homo sapiens
  CDR3 for alpha chain variable domain of TCR clone 64585 (TRAV13-1, TRAJ49)
CAASIGTGNQFYF

SEQ ID NO: 129170 - protein, 16 aa, Homo sapiens
  CDR3 for beta chain variable domain of TCR clone 64585 (TRBV7-3, TRBJ2-2)
CASSLKRGTLSGELFF

SEQ ID NO: 129171 - protein, 18 aa, Homo sapiens
  CDR3 for alpha chain variable domain of TCR clone 64586 (TRAV21, TRAJ52)
CAVRPSPAGGTSYGKLTF

SEQ ID NO: 129172 - protein, 13 aa, Homo sapiens
  CDR3 for beta chain variable domain of TCR clone 64586 (TRBV2, TRBJ1-5)
CAAAGPGNQPQHF

SEQ ID NO: 129173 - protein, 14 aa, Homo sapiens
  CDR3 for alpha chain variable domain of TCR clone 64587 (TRAV1-2, TRAJ8)
CAVREDAGFQKLVF

SEQ ID NO: 129174 - protein, 15 aa, Homo sapiens
  CDR3 for beta chain variable domain of TCR clone 64587 (TRBV12-4, TRBJ2-5)
CASSPPTGLQETQYF

SEQ ID NO: 129175 - protein, 11 aa, Homo sapiens
  CDR3 for alpha chain variable domain of TCR clone 64588 (TRAV21, TRAJ31)
CAVRNNARLMF

SEQ ID NO: 129176 - protein, 17 aa, Homo sapiens
  CDR3 for beta chain variable domain of TCR clone 64588 (TRBV28, TRBJ1-5)
GASSLSWLVSSNQPLHF

SEQ ID NO: 129177 - protein, 12 aa, Homo sapiens
  CDR3 for alpha chain variable domain of TCR clone 64589 (TRAV20, TRAJ33)
CAVRGSNYQLIW

SEQ ID NO: 129178 - protein, 13 aa, Homo sapiens
  CDR3 for beta chain variable domain of TCR clone 64589 (TRBV11-3, TRBJ1-1)
CASSPTGNTEAFF

SEQ ID NO: 129179 - protein, 15 aa, Homo sapiens
  CDR3 for alpha chain variable domain of TCR clone 64590 (TRAV3, TRAJ22)
CAVRDRGGSARQLTF

SEQ ID NO: 129180 - protein, 13 aa, Homo sapiens
  CDR3 for beta chain variable domain of TCR clone 64590 (TRBV11-2, TRBJ2-5)
CASSFSSQETQYF

SEQ ID NO: 129181 - protein, 17 aa, Homo sapiens
  CDR3 for alpha chain variable domain of TCR clone 64591 (TRAV3, TRAJ6)
CAVRDGPRAGGSYIPTF

SEQ ID NO: 129182 - protein, 12 aa, Homo sapiens
  CDR3 for beta chain variable domain of TCR clone 64591 (TRBV7-9, TRBJ1-2)
CASSLGHYGYTF

SEQ ID NO: 129183 - protein, 13 aa, Homo sapiens
  CDR3 for alpha chain variable domain of TCR clone 64592 (TRAV29/DV5, TRAJ47)
CAASAEYGNKLVF

SEQ ID NO: 129184 - protein, 15 aa, Homo sapiens
  CDR3 for beta chain variable domain of TCR clone 64592 (TRBV11-2, TRBJ2-2)
CASRGLAANTGELFF

SEQ ID NO: 129185 - protein, 16 aa, Homo sapiens
  CDR3 for alpha chain variable domain of TCR clone 64593 (TRAV3, TRAJ37)
CAVRGKGSGNTGKLIF

SEQ ID NO: 129186 - protein, 14 aa, Homo sapiens
  CDR3 for beta chain variable domain of TCR clone 64593 (TRBV19, TRBJ2-1)
CARGARSFQWEQFF

SEQ ID NO: 129187 - protein, 14 aa, Homo sapiens
  CDR3 for alpha chain variable domain of TCR clone 64594 (TRAV9-2, TRAJ39)
CALYIYNAGNMLTF

SEQ ID NO: 129188 - protein, 15 aa, Homo sapiens
  CDR3 for beta chain variable domain of TCR clone 64594 (TRBV5-1, TRBJ2-5)
CASSFKGGDQETQYF

SEQ ID NO: 129189 - protein, 17 aa, Homo sapiens
  CDR3 for alpha chain variable domain of TCR clone 64595 (TRAV3, TRAJ42)
CAVRDRDYGGSQGNLIF

SEQ ID NO: 129190 - protein, 16 aa, Homo sapiens
  CDR3 for beta chain variable domain of TCR clone 64595 (TRBV5-1, TRBJ1-1)
CASSSGGNSLNTEAFF

SEQ ID NO: 129191 - protein, 11 aa, Homo sapiens
  CDR3 for alpha chain variable domain of TCR clone 64596 (TRAV17, TRAJ31)
CATSNNARLMF

SEQ ID NO: 129192 - protein, 16 aa, Homo sapiens
  CDR3 for beta chain variable domain of TCR clone 64596 (TRBV7-8, TRBJ2-4)
CASSAERTRAKNIQYF

SEQ ID NO: 129193 - protein, 14 aa, Homo sapiens
  CDR3 for alpha chain variable domain of TCR clone 64597 (TRAV26-1, TRAJ34)
CIVSVAYNTDKLIF

SEQ ID NO: 129194 - protein, 15 aa, Homo sapiens
  CDR3 for beta chain variable domain of TCR clone 64597 (TRBV20-1, TRBJ2-7)
CSARVPAAYFYEQYF

SEQ ID NO: 129195 - protein, 14 aa, Homo sapiens
  CDR3 for alpha chain variable domain of TCR clone 64598 (TRAV21, TRAJ37)
CAAKGSSNTGKLIF

SEQ ID NO: 129196 - protein, 14 aa, Homo sapiens
  CDR3 for beta chain variable domain of TCR clone 64598 (TRBV7-2, TRBJ2-1)
CASSRGGARNEQFF

SEQ ID NO: 129197 - protein, 20 aa, Homo sapiens
  CDR3 for alpha chain variable domain of TCR clone 64599 (TRAV26-1, TRAJ42)
CCVLLHRQTYYGGSQGNLIF

SEQ ID NO: 129198 - protein, 16 aa, Homo sapiens
  CDR3 for beta chain variable domain of TCR clone 64599 (TRBV7-3, TRBJ2-2)
CSSSLKRGTLSGELFF

SEQ ID NO: 129199 - protein, 17 aa, Homo sapiens
  CDR3 for alpha chain variable domain of TCR clone 64600 (TRAV13-2, TRAJ28)
CAEEPAGSGAGSYQLTF

SEQ ID NO: 129200 - protein, 15 aa, Homo sapiens
  CDR3 for beta chain variable domain of TCR clone 64600 (TRBV5-5, TRBJ1-1)
CASGLVGKDNTEAFF

SEQ ID NO: 129201 - protein, 11 aa, Homo sapiens
  CDR3 for alpha chain variable domain of TCR clone 64601 (TRAV4, TRAJ31)
CLVGDNARLMF

SEQ ID NO: 129202 - protein, 16 aa, Homo sapiens
  CDR3 for beta chain variable domain of TCR clone 64601 (TRBV7-2, TRBJ2-5)
CASRSKWLSGQETQYF

SEQ ID NO: 129203 - protein, 15 aa, Homo sapiens
  CDR3 for alpha chain variable domain of TCR clone 64602 (TRAV3, TRAJ4)
CAVRDVTGGYNKLIF

SEQ ID NO: 129204 - protein, 16 aa, Homo sapiens
  CDR3 for beta chain variable domain of TCR clone 64602 (TRBV27, TRBJ2-2)
CASSSSGVSNTGELFF

SEQ ID NO: 129205 - protein, 14 aa, Homo sapiens
  CDR3 for alpha chain variable domain of TCR clone 64603 (TRAV27, TRAJ22)
CAGLPSGSARQLTF

SEQ ID NO: 129206 - protein, 17 aa, Homo sapiens
  CDR3 for beta chain variable domain of TCR clone 64603 (TRBV24-1, TRBJ2-4)
CATSDAEARGVRNIQYF

SEQ ID NO: 129207 - protein, 15 aa, Homo sapiens
  CDR3 for alpha chain variable domain of TCR clone 64604 (TRAV26-2, TRAJ45)
CILRLWGIQEEVLTD

SEQ ID NO: 129208 - protein, 17 aa, Homo sapiens
  CDR3 for beta chain variable domain of TCR clone 64604 (TRBV28, TRBJ2-3)
CASSPTPAGGRVDTQYF

SEQ ID NO: 129209 - protein, 15 aa, Homo sapiens
  CDR3 for alpha chain variable domain of TCR clone 64605 (TRAV8-3, TRAJ45)
CASSYSGGGADGLTF

SEQ ID NO: 129210 - protein, 13 aa, Homo sapiens
  CDR3 for beta chain variable domain of TCR clone 64605 (TRBV20-1, TRBJ1-1)
CSARGGGNTEAFF

SEQ ID NO: 129211 - protein, 13 aa, Homo sapiens
  CDR3 for alpha chain variable domain of TCR clone 64606 (TRAV21, TRAJ27)
CAARTGNAGKSTF

SEQ ID NO: 129212 - protein, 15 aa, Homo sapiens
  CDR3 for beta chain variable domain of TCR clone 64606 (TRBV11-3, TRBJ2-7)
CASSPGPASSYEQYF

SEQ ID NO: 129213 - protein, 14 aa, Homo sapiens
  CDR3 for alpha chain variable domain of TCR clone 64607 (TRAV1-1, TRAJ27)
CAVIYNTNAGKSTF

SEQ ID NO: 129214 - protein, 16 aa, Homo sapiens
  CDR3 for beta chain variable domain of TCR clone 64607 (TRBV7-2, TRBJ1-2)
CASSSNQDRRGHGYTF

SEQ ID NO: 129215 - protein, 14 aa, Homo sapiens
  CDR3 for alpha chain variable domain of TCR clone 64608 (TRAV8-3, TRAJ4)
CAVGAAGGYNKLIF

SEQ ID NO: 129216 - protein, 16 aa, Homo sapiens
  CDR3 for beta chain variable domain of TCR clone 64608 (TRBV2, TRBJ2-4)
CASSEAPGGEQNIQYF

SEQ ID NO: 129217 - protein, 12 aa, Homo sapiens
  CDR3 for alpha chain variable domain of TCR clone 64609 (TRAV12-2, TRAJ40)
CAMSSGTYKYIF

SEQ ID NO: 129218 - protein, 15 aa, Homo sapiens
  CDR3 for beta chain variable domain of TCR clone 64609 (TRBV7-3, TRBJ2-2)
CASSETGQGTGELFF

SEQ ID NO: 129219 - protein, 14 aa, Homo sapiens
  CDR3 for alpha chain variable domain of TCR clone 64610 (TRAV17, TRAJ4)
CATVPSGGYNKLIF

SEQ ID NO: 129220 - protein, 13 aa, Homo sapiens
  CDR3 for beta chain variable domain of TCR clone 64610 (TRBV24-1, TRBJ2-2)
CATSDWSTGELFF

SEQ ID NO: 129221 - protein, 12 aa, Homo sapiens
  CDR3 for alpha chain variable domain of TCR clone 64611 (TRAV12-2, TRAJ16)
CAVAPDGQKLLF

SEQ ID NO: 129222 - protein, 14 aa, Homo sapiens
  CDR3 for beta chain variable domain of TCR clone 64611 (TRBV25-1, TRBJ1-1)
CASTHLGGNTEAFF

SEQ ID NO: 129223 - protein, 14 aa, Homo sapiens
  CDR3 for alpha chain variable domain of TCR clone 64612 (TRAV13-1, TRAJ40)
CAASMTSGTYKHIF

SEQ ID NO: 129224 - protein, 15 aa, Homo sapiens
  CDR3 for beta chain variable domain of TCR clone 64612 (TRBV7-3, TRBJ2-1)
CASSPTGGGEVEQFF

SEQ ID NO: 129225 - protein, 15 aa, Homo sapiens
  CDR3 for alpha chain variable domain of TCR clone 64613 (TRAV3, TRAJ3)
CAVRDMSSSASKIIF

SEQ ID NO: 129226 - protein, 14 aa, Homo sapiens
  CDR3 for beta chain variable domain of TCR clone 64613 (TRBV19, TRBJ2-1)
CASPTLVLSGEQFF

SEQ ID NO: 129227 - protein, 15 aa, Homo sapiens
  CDR3 for alpha chain variable domain of TCR clone 64614 (TRAV12-3, TRAJ27)
CAMRAYNTNAGKSTF

SEQ ID NO: 129228 - protein, 13 aa, Homo sapiens
  CDR3 for beta chain variable domain of TCR clone 64614 (TRBV11-2, TRBJ2-5)
CASSRRPSETQYF

SEQ ID NO: 129229 - protein, 14 aa, Homo sapiens
  CDR3 for alpha chain variable domain of TCR clone 64615 (TRAV12-1, TRAJ3)
CVVNPGSSASKIIF

SEQ ID NO: 129230 - protein, 18 aa, Homo sapiens
  CDR3 for beta chain variable domain of TCR clone 64615 (TRBV4-2, TRBJ1-2)
CASSQGKVGHTVNYGYTF

SEQ ID NO: 129231 - protein, 15 aa, Homo sapiens
  CDR3 for alpha chain variable domain of TCR clone 64616 (TRAV12-1, TRAJ5)
CVVNLRNTGRRALTF

SEQ ID NO: 129232 - protein, 14 aa, Homo sapiens
  CDR3 for beta chain variable domain of TCR clone 64616 (TRBV19, TRBJ2-1)
CASPTFVLSGEQFF

SEQ ID NO: 129233 - protein, 13 aa, Homo sapiens
  CDR3 for alpha chain variable domain of TCR clone 64617 (TRAV17, TRAJ57)
CAIYQGGSEKLVF

SEQ ID NO: 129234 - protein, 17 aa, Homo sapiens
  CDR3 for beta chain variable domain of TCR clone 64617 (TRBV15, TRBJ1-4)
CATSRYGTGDPNEKLFF

SEQ ID NO: 129235 - protein, 20 aa, Homo sapiens
  CDR3 for alpha chain variable domain of TCR clone 64618 (TRAV12-3, TRAJ41)
SLLIRDSQPSDSATPEALNF

SEQ ID NO: 129236 - protein, 15 aa, Homo sapiens
  CDR3 for beta chain variable domain of TCR clone 64618 (TRBV5-1, TRBJ2-7)
CASSLDLTSSYEQYF

SEQ ID NO: 129237 - protein, 14 aa, Homo sapiens
  CDR3 for alpha chain variable domain of TCR clone 64619 (TRAV12-1, TRAJ17)
CVVNYKAAGNKLTF

SEQ ID NO: 129238 - protein, 17 aa, Homo sapiens
  CDR3 for beta chain variable domain of TCR clone 64619 (TRBV4-1, TRBJ2-7)
CASSRDPLGVRGGEQYF

SEQ ID NO: 129239 - protein, 11 aa, Homo sapiens
  CDR3 for alpha chain variable domain of TCR clone 64620 (TRAV12-2, )
CAVASLATTIS

SEQ ID NO: 129240 - protein, 16 aa, Homo sapiens
  CDR3 for beta chain variable domain of TCR clone 64620 (TRBV5-1, TRBJ2-2)
CASSSRAGGRTGELFF

SEQ ID NO: 129241 - protein, 14 aa, Homo sapiens
  CDR3 for alpha chain variable domain of TCR clone 64621 (TRAV12-2, TRAJ13)
CAVKKTGGYQKVTS

SEQ ID NO: 129242 - protein, 12 aa, Homo sapiens
  CDR3 for beta chain variable domain of TCR clone 64621 (TRBV12-4, TRBJ2-7)
CASSLGGYEQYF

SEQ ID NO: 129243 - protein, 12 aa, Homo sapiens
  CDR3 for alpha chain variable domain of TCR clone 64622 (TRAV3, TRAJ26)
CAVRDYGQNFVF

SEQ ID NO: 129244 - protein, 16 aa, Homo sapiens
  CDR3 for beta chain variable domain of TCR clone 64622 (TRBV11-2, TRBJ1-2)
CASSPSGRDANYGYTF

SEQ ID NO: 129245 - protein, 12 aa, Homo sapiens
  CDR3 for alpha chain variable domain of TCR clone 64623 (TRAV4, TRAJ26)
CLVGDYGQNCVF

SEQ ID NO: 129246 - protein, 16 aa, Homo sapiens
  CDR3 for beta chain variable domain of TCR clone 64623 (TRBV7-2, TRBJ1-2)
CASSSNQDRRGHGYTF

SEQ ID NO: 129247 - protein, 14 aa, Homo sapiens
  CDR3 for alpha chain variable domain of TCR clone 64624 (TRAV12-2, TRAJ11)
CAVEGGSGYSTLTF

SEQ ID NO: 129248 - protein, 16 aa, Homo sapiens
  CDR3 for beta chain variable domain of TCR clone 64624 (TRBV19, TRBJ1-1)
CASSPTRFWPGTEAFF

SEQ ID NO: 129249 - protein, 19 aa, Homo sapiens
  CDR3 for alpha chain variable domain of TCR clone 64625 (TRAV26-1, TRAJ52)
CIVRAHRNAGGTSYGKLTF

SEQ ID NO: 129250 - protein, 15 aa, Homo sapiens
  CDR3 for beta chain variable domain of TCR clone 64625 (TRBV29-1, TRBJ2-1)
CSGRDRKSSYNEHFF

SEQ ID NO: 129251 - protein, 13 aa, Homo sapiens
  CDR3 for alpha chain variable domain of TCR clone 64626 (TRAV1-2, TRAJ9)
CAALNTGGFKTIF

SEQ ID NO: 129252 - protein, 14 aa, Homo sapiens
  CDR3 for beta chain variable domain of TCR clone 64626 (TRBV11-2, TRBJ2-7)
CASSLGAGAYEQYF

SEQ ID NO: 129253 - protein, 19 aa, Homo sapiens
  CDR3 for alpha chain variable domain of TCR clone 64627 (TRAV2, TRAJ20)
ILQVREADAAVYRDCKLSF

SEQ ID NO: 129254 - protein, 13 aa, Homo sapiens
  CDR3 for beta chain variable domain of TCR clone 64627 (TRBV7-2, TRBJ1-3)
CASSLDRGNTIYF

SEQ ID NO: 129255 - protein, 11 aa, Homo sapiens
  CDR3 for alpha chain variable domain of TCR clone 64628 (TRAV4, TRAJ28)
CLVGDNRAETL

SEQ ID NO: 129256 - protein, 13 aa, Homo sapiens
  CDR3 for beta chain variable domain of TCR clone 64628 (TRBV20-1, TRBJ2-7)
CSATHTSGYEQYF

SEQ ID NO: 129257 - protein, 18 aa, Homo sapiens
  CDR3 for alpha chain variable domain of TCR clone 64629 (TRAV21, TRAJ52)
CAVRPSPAGGTSYGKLTC

SEQ ID NO: 129258 - protein, 15 aa, Homo sapiens
  CDR3 for beta chain variable domain of TCR clone 64629 (TRBV20-1, TRBJ2-7)
CSARDRVSGMDEQYF

SEQ ID NO: 129259 - protein, 11 aa, Homo sapiens
  CDR3 for alpha chain variable domain of TCR clone 64630 (TRAV12-2, TRAJ29)
CSVTLRSPLVF

SEQ ID NO: 129260 - protein, 16 aa, Homo sapiens
  CDR3 for beta chain variable domain of TCR clone 64630 (TRBV19, TRBJ1-5)
CASSIDRGGPRQPQHF

SEQ ID NO: 129261 - protein, 13 aa, Homo sapiens
  CDR3 for alpha chain variable domain of TCR clone 64631 (TRAV16, TRAJ28)
CALTGAGSYQLTF

SEQ ID NO: 129262 - protein, 16 aa, Homo sapiens
  CDR3 for beta chain variable domain of TCR clone 64631 (TRBV28, TRBJ1-5)
CASSLTGQGWDQPQHF

SEQ ID NO: 129263 - protein, 14 aa, Homo sapiens
  CDR3 for alpha chain variable domain of TCR clone 64632 (TRAV2, TRAJ8)
CAVEDYTGFQKLVF

SEQ ID NO: 129264 - protein, 15 aa, Homo sapiens
  CDR3 for beta chain variable domain of TCR clone 64632 (TRBV11-2, TRBJ2-2)
CASSSDRVNAGELFF

SEQ ID NO: 129265 - protein, 18 aa, Homo sapiens
  CDR3 for alpha chain variable domain of TCR clone 64633 (TRAV3, TRAJ17)
CAVRARRGGRSCRQKANF

SEQ ID NO: 129266 - protein, 14 aa, Homo sapiens
  CDR3 for beta chain variable domain of TCR clone 64633 (TRBV4-1, TRBJ2-2)
CASSQAVNTGELFF

SEQ ID NO: 129267 - protein, 18 aa, Homo sapiens
  CDR3 for alpha chain variable domain of TCR clone 64634 (TRAV12-3, TRAJ52)
CAMSVGGAGGTSYGKLTF

SEQ ID NO: 129268 - protein, 16 aa, Homo sapiens
  CDR3 for beta chain variable domain of TCR clone 64634 (TRBV7-9, TRBJ1-2)
CASSISLDREGYGYTF

SEQ ID NO: 129269 - protein, 12 aa, Homo sapiens
  CDR3 for alpha chain variable domain of TCR clone 64635 (TRAV3, TRAJ43)
CAVRDPNNDMRF

SEQ ID NO: 129270 - protein, 15 aa, Homo sapiens
  CDR3 for beta chain variable domain of TCR clone 64635 (TRBV6-5, TRBJ2-1)
CASSYDAGAGNEQSF

SEQ ID NO: 129271 - protein, 12 aa, Homo sapiens
  CDR3 for alpha chain variable domain of TCR clone 64636 (TRAV8-3, TRAJ26)
CAGDNYGQNFVF

SEQ ID NO: 129272 - protein, 15 aa, Homo sapiens
  CDR3 for beta chain variable domain of TCR clone 64636 (TRBV6-5, TRBJ2-1)
CASGYDAGAGNEQFF

SEQ ID NO: 129273 - protein, 11 aa, Homo sapiens
  CDR3 for alpha chain variable domain of TCR clone 64637 (TRAV1-2, TRAJ20)
CAVANDYKLSF

SEQ ID NO: 129274 - protein, 12 aa, Homo sapiens
  CDR3 for beta chain variable domain of TCR clone 64637 (TRBV14, TRBJ2-7)
CASSLYKDEQYF

SEQ ID NO: 129275 - protein, 11 aa, Homo sapiens
  CDR3 for alpha chain variable domain of TCR clone 64638 (TRAV2, TRAJ13)
CASGGYQKVTF

SEQ ID NO: 129276 - protein, 14 aa, Homo sapiens
  CDR3 for beta chain variable domain of TCR clone 64638 (TRBV2, TRBJ2-1)
CASSDRAYYNEQFF

SEQ ID NO: 129277 - protein, 13 aa, Homo sapiens
  CDR3 for alpha chain variable domain of TCR clone 64639 (TRAV17, TRAJ9)
CATDYTGGFKTIF

SEQ ID NO: 129278 - protein, 17 aa, Homo sapiens
  CDR3 for beta chain variable domain of TCR clone 64639 (TRBV11-2, TRBJ2-1)
CASSLYPPGVEYNEQFF

SEQ ID NO: 129279 - protein, 10 aa, Homo sapiens
  CDR3 for alpha chain variable domain of TCR clone 64640 (TRAV23/DV6, TRAJ31)
CARGGARLMF

SEQ ID NO: 129280 - protein, 13 aa, Homo sapiens
  CDR3 for beta chain variable domain of TCR clone 64640 (TRBV7-3, TRBJ2-1)
CASSLDSYNEQFF

SEQ ID NO: 129281 - protein, 14 aa, Homo sapiens
  CDR3 for alpha chain variable domain of TCR clone 64641 (TRAV17, TRAJ22)
CATSPSGSARQLTF

SEQ ID NO: 129282 - protein, 12 aa, Homo sapiens
  CDR3 for beta chain variable domain of TCR clone 64641 (TRBV7-8, TRBJ2-7)
RASSLGDREQYF

SEQ ID NO: 129283 - protein, 16 aa, Homo sapiens
  CDR3 for alpha chain variable domain of TCR clone 64642 (TRAV8-4, TRAJ5)
CAVSPLTDTGRRALPF

SEQ ID NO: 129284 - protein, 14 aa, Homo sapiens
  CDR3 for beta chain variable domain of TCR clone 64642 (TRBV19, TRBJ1-6)
CASSTDGWNSPLHF

SEQ ID NO: 129285 - protein, 12 aa, Homo sapiens
  CDR3 for alpha chain variable domain of TCR clone 64643 (TRAV3, TRAJ20)
CAVRDGDYKLSF

SEQ ID NO: 129286 - protein, 16 aa, Homo sapiens
  CDR3 for beta chain variable domain of TCR clone 64643 (TRBV4-1, TRBJ2-3)
CASSQSTSGAEDTQYF

SEQ ID NO: 129287 - protein, 14 aa, Homo sapiens
  CDR3 for alpha chain variable domain of TCR clone 64644 (TRAV13-1, TRAJ44)
CAAKATDTASKLTF

SEQ ID NO: 129288 - protein, 17 aa, Homo sapiens
  CDR3 for beta chain variable domain of TCR clone 64644 (TRBV7-3, TRBJ2-3)
CASSLMKRMRGADTQYF

SEQ ID NO: 129289 - protein, 14 aa, Homo sapiens
  CDR3 for alpha chain variable domain of TCR clone 64645 (TRAV38-1, TRAJ29)
CAFITPSGNTPLVF

SEQ ID NO: 129290 - protein, 16 aa, Homo sapiens
  CDR3 for beta chain variable domain of TCR clone 64645 (TRBV19, TRBJ1-1)
CASRFGGPVTGTEAFF

SEQ ID NO: 129291 - protein, 14 aa, Homo sapiens
  CDR3 for alpha chain variable domain of TCR clone 64646 (TRAV26-1, TRAJ38)
CIADNSGNNRKLIW

SEQ ID NO: 129292 - protein, 13 aa, Homo sapiens
  CDR3 for beta chain variable domain of TCR clone 64646 (TRBV4-1, TRBJ2-7)
CASSQGQAYEQYF

SEQ ID NO: 129293 - protein, 11 aa, Homo sapiens
  CDR3 for alpha chain variable domain of TCR clone 64647 (TRAV12-3, TRAJ27)
CAMANAGKSTF

SEQ ID NO: 129294 - protein, 15 aa, Homo sapiens
  CDR3 for beta chain variable domain of TCR clone 64647 (TRBV27, TRBJ2-5)
CASSLYPRGGEAQYF

SEQ ID NO: 129295 - protein, 13 aa, Homo sapiens
  CDR3 for alpha chain variable domain of TCR clone 64648 (TRAV12-3, TRAJ33)
CAMSVNSNYQLIW

SEQ ID NO: 129296 - protein, 18 aa, Homo sapiens
  CDR3 for beta chain variable domain of TCR clone 64648 (TRBV7-3, TRBJ2-3)
CASSSTGTYPGSTDTQYF

SEQ ID NO: 129297 - protein, 13 aa, Homo sapiens
  CDR3 for alpha chain variable domain of TCR clone 64649 (TRAV13-2, TRAJ48)
CAEMDFGNEKLTF

SEQ ID NO: 129298 - protein, 14 aa, Homo sapiens
  CDR3 for beta chain variable domain of TCR clone 64649 (TRBV7-2, TRBJ1-1)
CASSFLTGTTEAFF

SEQ ID NO: 129299 - protein, 14 aa, Homo sapiens
  CDR3 for alpha chain variable domain of TCR clone 64650 (TRAV1-2, TRAJ16)
CAVSRFSDGQKLLF

SEQ ID NO: 129300 - protein, 16 aa, Homo sapiens
  CDR3 for beta chain variable domain of TCR clone 64650 (TRBV9, TRBJ2-1)
CASSVGGGGNYNEQFF

SEQ ID NO: 129301 - protein, 14 aa, Homo sapiens
  CDR3 for alpha chain variable domain of TCR clone 64651 (TRAV3, TRAJ8)
CAVSLNTGFQKLVL

SEQ ID NO: 129302 - protein, 14 aa, Homo sapiens
  CDR3 for beta chain variable domain of TCR clone 64651 (TRBV6-6, TRBJ1-5)
CASVDSGFNQPQHF

SEQ ID NO: 129303 - protein, 12 aa, Homo sapiens
  CDR3 for alpha chain variable domain of TCR clone 64652 (TRAV20, TRAJ37)
CALPSNTGKLIF

SEQ ID NO: 129304 - protein, 14 aa, Homo sapiens
  CDR3 for beta chain variable domain of TCR clone 64652 (TRBV19, TRBJ2-1)
CASPTLVLSGEQFF

SEQ ID NO: 129305 - protein, 15 aa, Homo sapiens
  CDR3 for alpha chain variable domain of TCR clone 64653 (TRAV12-3, TRAJ49)
CAMAVTPNTGNQFYF

SEQ ID NO: 129306 - protein, 18 aa, Homo sapiens
  CDR3 for beta chain variable domain of TCR clone 64653 (TRBV4-1, TRBJ1-5)
CASGQDPRGQGLNQPQHF

SEQ ID NO: 129307 - protein, 13 aa, Homo sapiens
  CDR3 for alpha chain variable domain of TCR clone 64654 (TRAV12-3, TRAJ13)
CAMSSGGYQKVTF

SEQ ID NO: 129308 - protein, 13 aa, Homo sapiens
  CDR3 for beta chain variable domain of TCR clone 64654 (TRBV20-1, TRBJ1-1)
CSAPPGGHTEAFL

SEQ ID NO: 129309 - protein, 14 aa, Homo sapiens
  CDR3 for alpha chain variable domain of TCR clone 64655 (TRAV34, TRAJ44)
CGADGTGTASKLTF

SEQ ID NO: 129310 - protein, 15 aa, Homo sapiens
  CDR3 for beta chain variable domain of TCR clone 64655 (TRBV20-1, TRBJ2-7)
CSARDRVSGMDEQYF

SEQ ID NO: 129311 - protein, 17 aa, Homo sapiens
  CDR3 for alpha chain variable domain of TCR clone 64656 (TRAV13-1, TRAJ28)
CAASPPYSGAGSYQLTF

SEQ ID NO: 129312 - protein, 13 aa, Homo sapiens
  CDR3 for beta chain variable domain of TCR clone 64656 (TRBV7-2, TRBJ1-5)
CASSLAPDQPQHF

SEQ ID NO: 129313 - protein, 14 aa, Homo sapiens
  CDR3 for alpha chain variable domain of TCR clone 64657 (TRAV17, TRAJ49)
CATDARDTGNQFCF

SEQ ID NO: 129314 - protein, 14 aa, Homo sapiens
  CDR3 for beta chain variable domain of TCR clone 64657 (TRBV5-5, TRBJ1-2)
CASSFGQINYGYTF

SEQ ID NO: 129315 - protein, 13 aa, Homo sapiens
  CDR3 for alpha chain variable domain of TCR clone 64658 (TRAV2, TRAJ40)
CAVVTSGTYKYIF

SEQ ID NO: 129316 - protein, 14 aa, Homo sapiens
  CDR3 for beta chain variable domain of TCR clone 64658 (TRBV7-2, TRBJ2-3)
CASSSGISTDTQYF

SEQ ID NO: 129317 - protein, 14 aa, Homo sapiens
  CDR3 for alpha chain variable domain of TCR clone 64659 (TRAV12-1, TRAJ47)
CVVGRREYGNKLVF

SEQ ID NO: 129318 - protein, 14 aa, Homo sapiens
  CDR3 for beta chain variable domain of TCR clone 64659 (TRBV19, TRBJ2-1)
CASPTFVLSGEQFF

SEQ ID NO: 129319 - protein, 14 aa, Homo sapiens
  CDR3 for alpha chain variable domain of TCR clone 64660 (TRAV12-3, TRAJ10)
SHLPLTGGGNKLTF

SEQ ID NO: 129320 - protein, 14 aa, Homo sapiens
  CDR3 for beta chain variable domain of TCR clone 64660 (TRBV20-1, TRBJ2-5)
RSALVPGYQETQYF

SEQ ID NO: 129321 - protein, 18 aa, Homo sapiens
  CDR3 for alpha chain variable domain of TCR clone 64661 (TRAV16, TRAJ26)
CALRLWSEFCLCSRNQIV

SEQ ID NO: 129322 - protein, 14 aa, Homo sapiens
  CDR3 for beta chain variable domain of TCR clone 64661 (TRBV7-2, TRBJ2-7)
CASRSQGAAYEQYF

SEQ ID NO: 129323 - protein, 11 aa, Homo sapiens
  CDR3 for alpha chain variable domain of TCR clone 64662 (TRAV17, TRAJ31)
CATSNNARLMF

SEQ ID NO: 129324 - protein, 13 aa, Homo sapiens
  CDR3 for beta chain variable domain of TCR clone 64662 (TRBV7-9, TRBJ1-2)
CASSLKQNYGYTF

SEQ ID NO: 129325 - protein, 12 aa, Homo sapiens
  CDR3 for alpha chain variable domain of TCR clone 64663 (TRAV17, TRAJ57)
CATDGGSEKLVF

SEQ ID NO: 129326 - protein, 12 aa, Homo sapiens
  CDR3 for beta chain variable domain of TCR clone 64663 (TRBV7-2, TRBJ1-5)
CASSLWSQPQHF

SEQ ID NO: 129327 - protein, 16 aa, Homo sapiens
  CDR3 for alpha chain variable domain of TCR clone 64664 (TRAV30, TRAJ24)
CGTEIVDADSWGKFQF

SEQ ID NO: 129328 - protein, 14 aa, Homo sapiens
  CDR3 for beta chain variable domain of TCR clone 64664 (TRBV2, TRBJ2-1)
CASSDRAYYNEQFF

SEQ ID NO: 129329 - protein, 15 aa, Homo sapiens
  CDR3 for alpha chain variable domain of TCR clone 64665 (TRAV25, TRAJ52)
CAGTSGGTSYGKLTF

SEQ ID NO: 129330 - protein, 13 aa, Homo sapiens
  CDR3 for beta chain variable domain of TCR clone 64665 (TRBV7-9, TRBJ1-2)
CASSLKQNYGYTF

SEQ ID NO: 129331 - protein, 15 aa, Homo sapiens
  CDR3 for alpha chain variable domain of TCR clone 64666 (TRAV21, TRAJ40)
CAVRPQTSGTYKYIF

SEQ ID NO: 129332 - protein, 14 aa, Homo sapiens
  CDR3 for beta chain variable domain of TCR clone 64666 (TRBV7-2, TRBJ2-7)
CASSPKTSFYEQYF

SEQ ID NO: 129333 - protein, 14 aa, Homo sapiens
  CDR3 for alpha chain variable domain of TCR clone 64667 (TRAV36/DV7, TRAJ40)
CAVETTSGTCKYIF

SEQ ID NO: 129334 - protein, 13 aa, Homo sapiens
  CDR3 for beta chain variable domain of TCR clone 64667 (TRBV10-3, TRBJ2-5)
CAMTSGAGETQYF

SEQ ID NO: 129335 - protein, 14 aa, Homo sapiens
  CDR3 for alpha chain variable domain of TCR clone 64668 (TRAV12-2, TRAJ40)
CAVKIPSGTYKYIV

SEQ ID NO: 129336 - protein, 14 aa, Homo sapiens
  CDR3 for beta chain variable domain of TCR clone 64668 (TRBV20-1, TRBJ1-1)
CSAQTRIGGTEAFF

SEQ ID NO: 129337 - protein, 13 aa, Homo sapiens
  CDR3 for alpha chain variable domain of TCR clone 64669 (TRAV27, TRAJ45)
CRSSGGGADGLTF

SEQ ID NO: 129338 - protein, 17 aa, Homo sapiens
  CDR3 for beta chain variable domain of TCR clone 64669 (TRBV7-8, TRBJ2-6)
CASSAGTGGAGANVLTF

SEQ ID NO: 129339 - protein, 13 aa, Homo sapiens
  CDR3 for alpha chain variable domain of TCR clone 64670 (TRAV21, TRAJ27)
CAALNTNAGESTF

SEQ ID NO: 129340 - protein, 14 aa, Homo sapiens
  CDR3 for beta chain variable domain of TCR clone 64670 (TRBV27, TRBJ1-1)
CASSLLSGLSEAFF

SEQ ID NO: 129341 - protein, 10 aa, Homo sapiens
  CDR3 for alpha chain variable domain of TCR clone 64671 (TRAV12-1, TRAJ37)
ARGNTGKLIF

SEQ ID NO: 129342 - protein, 15 aa, Homo sapiens
  CDR3 for beta chain variable domain of TCR clone 64671 (TRBV7-2, TRBJ2-3)
CASSVEQGGTDTQYF

SEQ ID NO: 129343 - protein, 15 aa, Homo sapiens
  CDR3 for alpha chain variable domain of TCR clone 64672 (TRAV8-3, TRAJ27)
CAVGPSKTNAGNSTF

SEQ ID NO: 129344 - protein, 12 aa, Homo sapiens
  CDR3 for beta chain variable domain of TCR clone 64672 (TRBV11-2, TRBJ2-2)
CASSLGGGELFF

SEQ ID NO: 129345 - protein, 14 aa, Homo sapiens
  CDR3 for alpha chain variable domain of TCR clone 64673 (TRAV12-3, TRAJ10)
SHPPLTGGGNKLTF

SEQ ID NO: 129346 - protein, 15 aa, Homo sapiens
  CDR3 for beta chain variable domain of TCR clone 64673 (TRBV6-3, TRBJ2-7)
CASSSPGTVFYEQYF

SEQ ID NO: 129347 - protein, 11 aa, Homo sapiens
  CDR3 for alpha chain variable domain of TCR clone 64674 (TRAV21, TRAJ34)
CAVTNTDKLIF

SEQ ID NO: 129348 - protein, 15 aa, Homo sapiens
  CDR3 for beta chain variable domain of TCR clone 64674 (TRBV7-2, TRBJ2-3)
CASSLEQGGTDTQYF

SEQ ID NO: 129349 - protein, 12 aa, Homo sapiens
  CDR3 for alpha chain variable domain of TCR clone 64675 (TRAV16, TRAJ16)
SALREEGQKLLF

SEQ ID NO: 129350 - protein, 14 aa, Homo sapiens
  CDR3 for beta chain variable domain of TCR clone 64675 (TRBV15, TRBJ2-3)
CATRSGTSTDTQYF

SEQ ID NO: 129351 - protein, 14 aa, Homo sapiens
  CDR3 for alpha chain variable domain of TCR clone 64676 (TRAV1-1, TRAJ28)
CAAPSGAGSYQLTF

SEQ ID NO: 129352 - protein, 15 aa, Homo sapiens
  CDR3 for beta chain variable domain of TCR clone 64676 (TRBV7-2, TRBJ1-2)
CASSLVSGGDYGYTV

SEQ ID NO: 129353 - protein, 17 aa, Homo sapiens
  CDR3 for alpha chain variable domain of TCR clone 64677 (TRAV3, TRAJ6)
CAVRDGPRAGGSYIPPF

SEQ ID NO: 129354 - protein, 13 aa, Homo sapiens
  CDR3 for beta chain variable domain of TCR clone 64677 (TRBV20-1, TRBJ1-6)
CSAPLGVGSPLHF

SEQ ID NO: 129355 - protein, 16 aa, Homo sapiens
  CDR3 for alpha chain variable domain of TCR clone 64678 (TRAV26-2, TRAJ8)
CILRDAADTGFQKLVL

SEQ ID NO: 129356 - protein, 14 aa, Homo sapiens
  CDR3 for beta chain variable domain of TCR clone 64678 (TRBV12-5, TRBJ2-5)
CASGSRTHQETQYF

SEQ ID NO: 129357 - protein, 13 aa, Homo sapiens
  CDR3 for alpha chain variable domain of TCR clone 64679 (TRAV35, TRAJ44)
CAGLSGTASKLTL

SEQ ID NO: 129358 - protein, 17 aa, Homo sapiens
  CDR3 for beta chain variable domain of TCR clone 64679 (TRBV7-8, TRBJ1-2)
CASSLRPLQGHLYGYTF

SEQ ID NO: 129359 - protein, 15 aa, Homo sapiens
  CDR3 for alpha chain variable domain of TCR clone 64680 (TRAV14/DV4, TRAJ49)
CAMREGWIGGNQFYF

SEQ ID NO: 129360 - protein, 15 aa, Homo sapiens
  CDR3 for beta chain variable domain of TCR clone 64680 (TRBV6-1, TRBJ2-7)
CASSESMGDFYEQYF

SEQ ID NO: 129361 - protein, 15 aa, Homo sapiens
  CDR3 for alpha chain variable domain of TCR clone 64681 (TRAV1-2, TRAJ35)
CAVRDPGGFGNVLHC

SEQ ID NO: 129362 - protein, 14 aa, Homo sapiens
  CDR3 for beta chain variable domain of TCR clone 64681 (TRBV5-1, TRBJ2-1)
CASGLDDRFDEQFF

SEQ ID NO: 129363 - protein, 12 aa, Homo sapiens
  CDR3 for alpha chain variable domain of TCR clone 64682 (TRAV21, TRAJ27)
CAANTNAGKSTF

SEQ ID NO: 129364 - protein, 15 aa, Homo sapiens
  CDR3 for beta chain variable domain of TCR clone 64682 (TRBV27, TRBJ2-1)
CASSNGGGSSNEQFF

SEQ ID NO: 129365 - protein, 16 aa, Homo sapiens
  CDR3 for alpha chain variable domain of TCR clone 64683 (TRAV17, TRAJ22)
CASGPISSGSARQLTF

SEQ ID NO: 129366 - protein, 13 aa, Homo sapiens
  CDR3 for beta chain variable domain of TCR clone 64683 (TRBV11-2, TRBJ2-1)
CASSLGLAGGRFF

SEQ ID NO: 129367 - protein, 14 aa, Homo sapiens
  CDR3 for alpha chain variable domain of TCR clone 64684 (TRAV1-2, TRAJ8)
CAVREDTGFQKLVF

SEQ ID NO: 129368 - protein, 12 aa, Homo sapiens
  CDR3 for beta chain variable domain of TCR clone 64684 (TRBV11-2, TRBJ2-2)
CASGLGGGELFF

SEQ ID NO: 129369 - protein, 15 aa, Homo sapiens
  CDR3 for alpha chain variable domain of TCR clone 64685 (TRAV21, TRAJ53)
CATLDSGGSNYKLTF

SEQ ID NO: 129370 - protein, 16 aa, Homo sapiens
  CDR3 for beta chain variable domain of TCR clone 64685 (TRBV9, TRBJ2-1)
CASSVGGGGNYNEQFF

SEQ ID NO: 129371 - protein, 17 aa, Homo sapiens
  CDR3 for alpha chain variable domain of TCR clone 64686 (TRAV12-2, TRAJ22)
CAVNRIPFSGSARQLTF

SEQ ID NO: 129372 - protein, 14 aa, Homo sapiens
  CDR3 for beta chain variable domain of TCR clone 64686 (TRBV2, TRBJ2-1)
CASRTGSSYNEQFF

SEQ ID NO: 129373 - protein, 14 aa, Homo sapiens
  CDR3 for alpha chain variable domain of TCR clone 64687 (TRAV26-1, TRAJ38)
CIAGNAGNNRKLIW

SEQ ID NO: 129374 - protein, 20 aa, Homo sapiens
  CDR3 for beta chain variable domain of TCR clone 64687 (TRBV7-8, TRBJ2-2)
CASSHLFPGPTIHITGELFF

SEQ ID NO: 129375 - protein, 12 aa, Homo sapiens
  CDR3 for alpha chain variable domain of TCR clone 64688 (TRAV29/DV5, TRAJ49)
CAATDTDNQFYF

SEQ ID NO: 129376 - protein, 19 aa, Homo sapiens
  CDR3 for beta chain variable domain of TCR clone 64688 (TRBV25-1, TRBJ2-2)
CAILVYRVDRGRKTGELFF

SEQ ID NO: 129377 - protein, 16 aa, Homo sapiens
  CDR3 for alpha chain variable domain of TCR clone 64689 (TRAV2, TRAJ4)
CAVEDRFSGGYNKPIF

SEQ ID NO: 129378 - protein, 13 aa, Homo sapiens
  CDR3 for beta chain variable domain of TCR clone 64689 (TRBV7-7, TRBJ2-5)
CASSRSGQETRYF

SEQ ID NO: 129379 - protein, 17 aa, Homo sapiens
  CDR3 for alpha chain variable domain of TCR clone 64690 (TRAV13-1, TRAJ52)
CTASSGAGGTSYGELTF

SEQ ID NO: 129380 - protein, 15 aa, Homo sapiens
  CDR3 for beta chain variable domain of TCR clone 64690 (TRBV2, TRBJ2-1)
CASSELAGSYNEQFF

SEQ ID NO: 129381 - protein, 15 aa, Homo sapiens
  CDR3 for alpha chain variable domain of TCR clone 64691 (TRAV12-1, TRAJ44)
CVVDTPQGTASKLTF

SEQ ID NO: 129382 - protein, 14 aa, Homo sapiens
  CDR3 for beta chain variable domain of TCR clone 64691 (TRBV7-9, TRBJ2-1)
CASSPRDALYEQFF

SEQ ID NO: 129383 - protein, 11 aa, Homo sapiens
  CDR3 for alpha chain variable domain of TCR clone 64692 (TRAV3, TRAJ21)
CAVGNFNKFYF

SEQ ID NO: 129384 - protein, 13 aa, Homo sapiens
  CDR3 for beta chain variable domain of TCR clone 64692 (TRBV10-3, TRBJ1-2)
CAISERDSYGYTF

SEQ ID NO: 129385 - protein, 13 aa, Homo sapiens
  CDR3 for alpha chain variable domain of TCR clone 64693 (TRAV24, TRAJ29)
CACPNSGNTPLVF

SEQ ID NO: 129386 - protein, 16 aa, Homo sapiens
  CDR3 for beta chain variable domain of TCR clone 64693 (TRBV7-3, TRBJ2-2)
CASSLKRGTLSGELFF

SEQ ID NO: 129387 - protein, 12 aa, Homo sapiens
  CDR3 for alpha chain variable domain of TCR clone 64694 (TRAV27, TRAJ36)
ASTPAGANNLFF

SEQ ID NO: 129388 - protein, 13 aa, Homo sapiens
  CDR3 for beta chain variable domain of TCR clone 64694 (TRBV7-9, TRBJ2-3)
CASSPGSTDMQYF

SEQ ID NO: 129389 - protein, 14 aa, Homo sapiens
  CDR3 for alpha chain variable domain of TCR clone 64695 (TRAV12-3, TRAJ28)
CATNSGAGSYQLTF

SEQ ID NO: 129390 - protein, 12 aa, Homo sapiens
  CDR3 for beta chain variable domain of TCR clone 64695 (TRBV29-1, TRBJ2-3)
CSVTGGADTQYF

SEQ ID NO: 129391 - protein, 16 aa, Homo sapiens
  CDR3 for alpha chain variable domain of TCR clone 64696 (TRAV3, TRAJ37)
CAVRVRGSGNTGKLIF

SEQ ID NO: 129392 - protein, 13 aa, Homo sapiens
  CDR3 for beta chain variable domain of TCR clone 64696 (TRBV7-9, TRBJ1-2)
CASSLKQNYGYTL

SEQ ID NO: 129393 - protein, 12 aa, Homo sapiens
  CDR3 for alpha chain variable domain of TCR clone 64697 (TRAV25, TRAJ53)
CQSGGSNYKLTF

SEQ ID NO: 129394 - protein, 15 aa, Homo sapiens
  CDR3 for beta chain variable domain of TCR clone 64697 (TRBV5-1, TRBJ2-2)
CAGSWTSPNTGELFF

SEQ ID NO: 129395 - protein, 12 aa, Homo sapiens
  CDR3 for alpha chain variable domain of TCR clone 64698 (TRAV3, TRAJ43)
CAVRDPNNDMRF

SEQ ID NO: 129396 - protein, 15 aa, Homo sapiens
  CDR3 for beta chain variable domain of TCR clone 64698 (TRBV27, TRBJ1-5)
CASSLGTGFDQPQHS

SEQ ID NO: 129397 - protein, 13 aa, Homo sapiens
  CDR3 for alpha chain variable domain of TCR clone 64699 (TRAV13-2, TRAJ48)
CAEMDFGNEKLTF

SEQ ID NO: 129398 - protein, 13 aa, Homo sapiens
  CDR3 for beta chain variable domain of TCR clone 64699 (TRBV19, TRBJ1-5)
CASSIGGNQPQHF

SEQ ID NO: 129399 - protein, 14 aa, Homo sapiens
  CDR3 for alpha chain variable domain of TCR clone 64700 (TRAV8-4, TRAJ9)
CAVRINTGGFKTIF

SEQ ID NO: 129400 - protein, 14 aa, Homo sapiens
  CDR3 for beta chain variable domain of TCR clone 64700 (TRBV4-1, TRBJ2-2)
CASSQAVNTGELFF

SEQ ID NO: 129401 - protein, 15 aa, Homo sapiens
  CDR3 for alpha chain variable domain of TCR clone 64701 (TRAV8-3, TRAJ23)
CAVGDRYNQGGKLIF

SEQ ID NO: 129402 - protein, 17 aa, Homo sapiens
  CDR3 for beta chain variable domain of TCR clone 64701 (TRBV4-1, TRBJ1-4)
CASSQEGTRGVEEKLFF

SEQ ID NO: 129403 - protein, 14 aa, Homo sapiens
  CDR3 for alpha chain variable domain of TCR clone 64702 (TRAV2, TRAJ37)
CAVDFTSNTGKLIF

SEQ ID NO: 129404 - protein, 14 aa, Homo sapiens
  CDR3 for beta chain variable domain of TCR clone 64702 (TRBV2, TRBJ2-1)
CASSEALDGNEQFF

SEQ ID NO: 129405 - protein, 12 aa, Homo sapiens
  CDR3 for alpha chain variable domain of TCR clone 64703 (TRAV13-2, TRAJ23)
CAERHRGGKLTF

SEQ ID NO: 129406 - protein, 13 aa, Homo sapiens
  CDR3 for beta chain variable domain of TCR clone 64703 (TRBV7-9, TRBJ1-2)
CASSLKQNYGYTF

SEQ ID NO: 129407 - protein, 14 aa, Homo sapiens
  CDR3 for alpha chain variable domain of TCR clone 64704 (TRAV1-2, TRAJ8)
CAVREDTGFQKLVF

SEQ ID NO: 129408 - protein, 15 aa, Homo sapiens
  CDR3 for beta chain variable domain of TCR clone 64704 (TRBV20-1, TRBJ2-7)
CSAREGRDSLYEQHF

SEQ ID NO: 129409 - protein, 15 aa, Homo sapiens
  CDR3 for alpha chain variable domain of TCR clone 64705 (TRAV13-2, TRAJ50)
CAEEPLKTSYDKVIF

SEQ ID NO: 129410 - protein, 15 aa, Homo sapiens
  CDR3 for beta chain variable domain of TCR clone 64705 (TRBV20-1, TRBJ1-5)
CSARGSVGSNQPQHF

SEQ ID NO: 129411 - protein, 14 aa, Homo sapiens
  CDR3 for alpha chain variable domain of TCR clone 64706 (TRAV1-2, TRAJ16)
CAVRGFSDGQKLLF

SEQ ID NO: 129412 - protein, 16 aa, Homo sapiens
  CDR3 for beta chain variable domain of TCR clone 64706 (TRBV20-1, TRBJ2-1)
CSARGHLAGGRGEQFF

SEQ ID NO: 129413 - protein, 19 aa, Homo sapiens
  CDR3 for alpha chain variable domain of TCR clone 64707 (TRAV1-2, TRAJ26)
CLLPLCCERPDNYGQNFVF

SEQ ID NO: 129414 - protein, 15 aa, Homo sapiens
  CDR3 for beta chain variable domain of TCR clone 64707 (TRBV7-3, TRBJ2-1)
CASSPTGGGEVEQFF

SEQ ID NO: 129415 - protein, 15 aa, Homo sapiens
  CDR3 for alpha chain variable domain of TCR clone 64708 (TRAV21, TRAJ24)
CAARSSTDSWGKLQF

SEQ ID NO: 129416 - protein, 14 aa, Homo sapiens
  CDR3 for beta chain variable domain of TCR clone 64708 (TRBV12-4, TRBJ1-1)
CASSLGTGGTEAFF

SEQ ID NO: 129417 - protein, 17 aa, Homo sapiens
  CDR3 for alpha chain variable domain of TCR clone 64709 (TRAV3, TRAJ6)
CAVRDGPRAGGSYIPTF

SEQ ID NO: 129418 - protein, 13 aa, Homo sapiens
  CDR3 for beta chain variable domain of TCR clone 64709 (TRBV4-1, TRBJ2-1)
CASSQAGGDEQFF

SEQ ID NO: 129419 - protein, 16 aa, Homo sapiens
  CDR3 for alpha chain variable domain of TCR clone 64710 (TRAV12-2, TRAJ32)
CAVNLGQGGATNKPIF

SEQ ID NO: 129420 - protein, 13 aa, Homo sapiens
  CDR3 for beta chain variable domain of TCR clone 64710 (TRBV9, TRBJ2-2)
CASSPRPAGELFF

SEQ ID NO: 129421 - protein, 12 aa, Homo sapiens
  CDR3 for alpha chain variable domain of TCR clone 64711 (TRAV2, TRAJ33)
RAVPDSNYQLIW

SEQ ID NO: 129422 - protein, 14 aa, Homo sapiens
  CDR3 for beta chain variable domain of TCR clone 64711 (TRBV20-1, TRBJ2-2)
CSAPDTANTGELFF

SEQ ID NO: 129423 - protein, 14 aa, Homo sapiens
  CDR3 for alpha chain variable domain of TCR clone 64712 (TRAV1-2, TRAJ16)
CAVNRFSDGQKLLF

SEQ ID NO: 129424 - protein, 13 aa, Homo sapiens
  CDR3 for beta chain variable domain of TCR clone 64712 (TRBV7-9, TRBJ1-2)
CACSLKQNYGYTF

SEQ ID NO: 129425 - protein, 16 aa, Homo sapiens
  CDR3 for alpha chain variable domain of TCR clone 64713 (TRAV26-1, TRAJ37)
CIYARHGSSNTGKLIF

SEQ ID NO: 129426 - protein, 16 aa, Homo sapiens
  CDR3 for beta chain variable domain of TCR clone 64713 (TRBV19, TRBJ2-4)
CATGGLAGGTRNIQYF

SEQ ID NO: 129427 - protein, 14 aa, Homo sapiens
  CDR3 for alpha chain variable domain of TCR clone 64714 (TRAV8-3, TRAJ27)
CAGGRNTNAGKSTF

SEQ ID NO: 129428 - protein, 16 aa, Homo sapiens
  CDR3 for beta chain variable domain of TCR clone 64714 (TRBV12-5, TRBJ2-5)
CASGPRTGGNQETQYF

SEQ ID NO: 129429 - protein, 16 aa, Homo sapiens
  CDR3 for alpha chain variable domain of TCR clone 64715 (TRAV27, TRAJ52)
CAGAPAGGTSYGELTF

SEQ ID NO: 129430 - protein, 12 aa, Homo sapiens
  CDR3 for beta chain variable domain of TCR clone 64715 (TRBV27, TRBJ2-1)
CASRGFYNEQFF

SEQ ID NO: 129431 - protein, 16 aa, Homo sapiens
  CDR3 for alpha chain variable domain of TCR clone 64716 (TRAV26-1, TRAJ52)
CIVSNAGGTSYGKLTF

SEQ ID NO: 129432 - protein, 16 aa, Homo sapiens
  CDR3 for beta chain variable domain of TCR clone 64716 (TRBV5-1, TRBJ2-1)
CASILEGRGLYNEQFF

SEQ ID NO: 129433 - protein, 15 aa, Homo sapiens
  CDR3 for alpha chain variable domain of TCR clone 64717 (TRAV12-2, TRAJ57)
CAVSRGQGGSEKLVF

SEQ ID NO: 129434 - protein, 15 aa, Homo sapiens
  CDR3 for beta chain variable domain of TCR clone 64717 (TRBV5-1, TRBJ2-1)
CASSPPRAPYNEQLF

SEQ ID NO: 129435 - protein, 15 aa, Homo sapiens
  CDR3 for alpha chain variable domain of TCR clone 64718 (TRAV16, TRAJ48)
CALFISNFGNEKLTF

SEQ ID NO: 129436 - protein, 15 aa, Homo sapiens
  CDR3 for beta chain variable domain of TCR clone 64718 (TRBV3-1, TRBJ2-7)
CASSQEWTGSYEQYF

SEQ ID NO: 129437 - protein, 11 aa, Homo sapiens
  CDR3 for alpha chain variable domain of TCR clone 64719 (TRAV2, TRAJ33)
CAVESNYQIIW

SEQ ID NO: 129438 - protein, 15 aa, Homo sapiens
  CDR3 for beta chain variable domain of TCR clone 64719 (TRBV19, TRBJ1-1)
CASTSGQIQNTEAFF

SEQ ID NO: 129439 - protein, 12 aa, Homo sapiens
  CDR3 for alpha chain variable domain of TCR clone 64720 (TRAV17, TRAJ49)
CATVTTGNQFYF

SEQ ID NO: 129440 - protein, 16 aa, Homo sapiens
  CDR3 for beta chain variable domain of TCR clone 64720 (TRBV7-3, TRBJ2-2)
CASSLKRGTLSGELFF

SEQ ID NO: 129441 - protein, 18 aa, Homo sapiens
  CDR3 for alpha chain variable domain of TCR clone 64721 (TRAV21, TRAJ52)
CAVRPSPAGGTSHGKLTF

SEQ ID NO: 129442 - protein, 15 aa, Homo sapiens
  CDR3 for beta chain variable domain of TCR clone 64721 (TRBV5-1, TRBJ2-3)
CASSVTSGSTDTQYF

SEQ ID NO: 129443 - protein, 14 aa, Homo sapiens
  CDR3 for alpha chain variable domain of TCR clone 64722 (TRAV1-2, TRAJ16)
CAVNRFSDGQKLLF

SEQ ID NO: 129444 - protein, 13 aa, Homo sapiens
  CDR3 for beta chain variable domain of TCR clone 64722 (TRBV18, TRBJ1-1)
CASSPNGDTEAFF

SEQ ID NO: 129445 - protein, 14 aa, Homo sapiens
  CDR3 for alpha chain variable domain of TCR clone 64723 (TRAV1-2, TRAJ8)
CAVREDTGLQKLVF

SEQ ID NO: 129446 - protein, 15 aa, Homo sapiens
  CDR3 for beta chain variable domain of TCR clone 64723 (TRBV28, TRBJ2-1)
CASSIIAGGRSEQFF

SEQ ID NO: 129447 - protein, 12 aa, Homo sapiens
  CDR3 for alpha chain variable domain of TCR clone 64724 (TRAV38-1, TRAJ34)
CAFMKETDKLIF

SEQ ID NO: 129448 - protein, 17 aa, Homo sapiens
  CDR3 for beta chain variable domain of TCR clone 64724 (TRBV7-8, TRBJ2-6)
CASSVGTGGAGANVLTF

SEQ ID NO: 129449 - protein, 16 aa, Homo sapiens
  CDR3 for alpha chain variable domain of TCR clone 64725 (TRAV36/DV7, TRAJ33)
WRPGNKVQDSNYQLIW

SEQ ID NO: 129450 - protein, 13 aa, Homo sapiens
  CDR3 for beta chain variable domain of TCR clone 64725 (TRBV7-9, TRBJ1-2)
CASSLKQNYGYTF

SEQ ID NO: 129451 - protein, 13 aa, Homo sapiens
  CDR3 for alpha chain variable domain of TCR clone 64726 (TRAV29/DV5, TRAJ31)
CAASRNNNASLMF

SEQ ID NO: 129452 - protein, 12 aa, Homo sapiens
  CDR3 for beta chain variable domain of TCR clone 64726 (TRBV14, TRBJ2-5)
CASSQLKETQYF

SEQ ID NO: 129453 - protein, 13 aa, Homo sapiens
  CDR3 for alpha chain variable domain of TCR clone 64727 (TRAV12-2, TRAJ13)
CREEDWGYQKVTF

SEQ ID NO: 129454 - protein, 17 aa, Homo sapiens
  CDR3 for beta chain variable domain of TCR clone 64727 (TRBV13, TRBJ2-3)
CASSLSRVAGGRNTQYF

SEQ ID NO: 129455 - protein, 13 aa, Homo sapiens
  CDR3 for alpha chain variable domain of TCR clone 64728 (TRAV17, TRAJ34)
CATDLYNTDKLIF

SEQ ID NO: 129456 - protein, 12 aa, Homo sapiens
  CDR3 for beta chain variable domain of TCR clone 64728 (TRBV11-2, TRBJ2-2)
RASSLGGGELFF

SEQ ID NO: 129457 - protein, 13 aa, Homo sapiens
  CDR3 for alpha chain variable domain of TCR clone 64729 (TRAV13-1, TRAJ5)
CAARVTGRRALTF

SEQ ID NO: 129458 - protein, 15 aa, Homo sapiens
  CDR3 for beta chain variable domain of TCR clone 64729 (TRBV7-9, TRBJ2-7)
CSSSPGGGLTYEQYF

SEQ ID NO: 129459 - protein, 16 aa, Homo sapiens
  CDR3 for alpha chain variable domain of TCR clone 64730 (TRAV3, TRAJ37)
CAVRGRGSGNTGKLIF

SEQ ID NO: 129460 - protein, 14 aa, Homo sapiens
  CDR3 for beta chain variable domain of TCR clone 64730 (TRBV11-3, TRBJ2-7)
CASSPDRNTYEQYF

SEQ ID NO: 129461 - protein, 14 aa, Homo sapiens
  CDR3 for alpha chain variable domain of TCR clone 64731 (TRAV4, TRAJ31)
CLVGDRDNNARLMF

SEQ ID NO: 129462 - protein, 15 aa, Homo sapiens
  CDR3 for beta chain variable domain of TCR clone 64731 (TRBV11-3, TRBJ2-3)
CASLKDGREGDTQYF

SEQ ID NO: 129463 - protein, 19 aa, Homo sapiens
  CDR3 for alpha chain variable domain of TCR clone 64732 (TRAV13-1, TRAJ52)
CAASPYQNAGGTSYGKLTF

SEQ ID NO: 129464 - protein, 14 aa, Homo sapiens
  CDR3 for beta chain variable domain of TCR clone 64732 (TRBV19, TRBJ2-7)
CASTVQGWPYEQYF

SEQ ID NO: 129465 - protein, 13 aa, Homo sapiens
  CDR3 for alpha chain variable domain of TCR clone 64733 (TRAV13-1, TRAJ43)
CAASKNNNNDVRF

SEQ ID NO: 129466 - protein, 14 aa, Homo sapiens
  CDR3 for beta chain variable domain of TCR clone 64733 (TRBV14, TRBJ2-1)
CASSQVQGRGEQFF

SEQ ID NO: 129467 - protein, 15 aa, Homo sapiens
  CDR3 for alpha chain variable domain of TCR clone 64734 (TRAV26-1, TRAJ29)
CIVRVEGSGNTPLVF

SEQ ID NO: 129468 - protein, 12 aa, Homo sapiens
  CDR3 for beta chain variable domain of TCR clone 64734 (TRBV5-5, TRBJ2-5)
CASSYFGETQYF

SEQ ID NO: 129469 - protein, 12 aa, Homo sapiens
  CDR3 for alpha chain variable domain of TCR clone 64735 (TRAV12-3, TRAJ17)
CAMTLTGNKLTF

SEQ ID NO: 129470 - protein, 16 aa, Homo sapiens
  CDR3 for beta chain variable domain of TCR clone 64735 (TRBV20-1, TRBJ2-4)
CSATSLAELAKNIQYF

SEQ ID NO: 129471 - protein, 12 aa, Homo sapiens
  CDR3 for alpha chain variable domain of TCR clone 64736 (TRAV12-1, TRAJ40)
CVVYSGTYKYIF

SEQ ID NO: 129472 - protein, 12 aa, Homo sapiens
  CDR3 for beta chain variable domain of TCR clone 64736 (TRBV12-4, TRBJ2-7)
CASSLGGYEQYF

SEQ ID NO: 129473 - protein, 11 aa, Homo sapiens
  CDR3 for alpha chain variable domain of TCR clone 64737 (TRAV12-3, TRAJ27)
CAMANAGKSTF

SEQ ID NO: 129474 - protein, 11 aa, Homo sapiens
  CDR3 for beta chain variable domain of TCR clone 64737 (TRBV11-2, TRBJ2-2)
CASSLPGELFF

SEQ ID NO: 129475 - protein, 15 aa, Homo sapiens
  CDR3 for alpha chain variable domain of TCR clone 64738 (TRAV26-1, TRAJ39)
CIVRVASNAGNMLTF

SEQ ID NO: 129476 - protein, 16 aa, Homo sapiens
  CDR3 for beta chain variable domain of TCR clone 64738 (TRBV4-3, TRBJ2-2)
CASSHLQGSGTGELFF

SEQ ID NO: 129477 - protein, 10 aa, Homo sapiens
  CDR3 for alpha chain variable domain of TCR clone 64739 (TRAV1-2, TRAJ23)
CAGQGGKLIF

SEQ ID NO: 129478 - protein, 16 aa, Homo sapiens
  CDR3 for beta chain variable domain of TCR clone 64739 (TRBV6-1, TRBJ1-3)
CASVQGGVETPYILER

SEQ ID NO: 129479 - protein, 15 aa, Homo sapiens
  CDR3 for alpha chain variable domain of TCR clone 64740 (TRAV3, TRAJ17)
CAVSPKEAAGNKLTV

SEQ ID NO: 129480 - protein, 12 aa, Homo sapiens
  CDR3 for beta chain variable domain of TCR clone 64740 (TRBV7-9, TRBJ1-6)
CASSLMTSPLHF

SEQ ID NO: 129481 - protein, 14 aa, Homo sapiens
  CDR3 for alpha chain variable domain of TCR clone 64741 (TRAV1-2, TRAJ16)
CAVNRFSDGQKLLF

SEQ ID NO: 129482 - protein, 14 aa, Homo sapiens
  CDR3 for beta chain variable domain of TCR clone 64741 (TRBV10-3, TRBJ2-7)
CAISAPRGAYEQYF

SEQ ID NO: 129483 - protein, 16 aa, Homo sapiens
  CDR3 for alpha chain variable domain of TCR clone 64742 (TRAV30, TRAJ24)
CGTEIVDADSWGKFKF

SEQ ID NO: 129484 - protein, 13 aa, Homo sapiens
  CDR3 for beta chain variable domain of TCR clone 64742 (TRBV10-3, TRBJ1-2)
CAISERDSYGYTF

SEQ ID NO: 129485 - protein, 13 aa, Homo sapiens
  CDR3 for alpha chain variable domain of TCR clone 64743 (TRAV17, TRAJ4)
CATKSGGHNKLIF

SEQ ID NO: 129486 - protein, 14 aa, Homo sapiens
  CDR3 for beta chain variable domain of TCR clone 64743 (TRBV20-1, TRBJ1-5)
CSARDDRGNQPQHF

SEQ ID NO: 129487 - protein, 16 aa, Homo sapiens
  CDR3 for alpha chain variable domain of TCR clone 64744 (TRAV27, TRAJ13)
CAGAKSDSGGYQKVTF

SEQ ID NO: 129488 - protein, 17 aa, Homo sapiens
  CDR3 for beta chain variable domain of TCR clone 64744 (TRBV11-2, TRBJ2-1)
CASSLYPPGVEYNEQFF

SEQ ID NO: 129489 - protein, 16 aa, Homo sapiens
  CDR3 for alpha chain variable domain of TCR clone 64745 (TRAV12-3, TRAJ53)
CAMSPGSGGSNYKLTF

SEQ ID NO: 129490 - protein, 17 aa, Homo sapiens
  CDR3 for beta chain variable domain of TCR clone 64745 (TRBV28, TRBJ2-5)
CASSAPEGDALQETQYF

SEQ ID NO: 129491 - protein, 11 aa, Homo sapiens
  CDR3 for alpha chain variable domain of TCR clone 64746 (TRAV23/DV6, TRAJ9)
CAASLSPPTTG

SEQ ID NO: 129492 - protein, 18 aa, Homo sapiens
  CDR3 for beta chain variable domain of TCR clone 64746 (TRBV4-1, TRBJ2-7)
CASSQDTGAGSGLNEQYF

SEQ ID NO: 129493 - protein, 12 aa, Homo sapiens
  CDR3 for alpha chain variable domain of TCR clone 64747 (TRAV12-1, TRAJ40)
CVVYSGTYKYIF

SEQ ID NO: 129494 - protein, 18 aa, Homo sapiens
  CDR3 for beta chain variable domain of TCR clone 64747 (TRBV11-2, TRBJ2-3)
YASSLGGASRGAPNTQYF

SEQ ID NO: 129495 - protein, 13 aa, Homo sapiens
  CDR3 for alpha chain variable domain of TCR clone 64748 (TRAV2, TRAJ29)
CAAGNSGNTPLVF

SEQ ID NO: 129496 - protein, 14 aa, Homo sapiens
  CDR3 for beta chain variable domain of TCR clone 64748 (TRBV6-3, TRBJ2-5)
CASSYSGRLSGQYF

SEQ ID NO: 129497 - protein, 16 aa, Homo sapiens
  CDR3 for alpha chain variable domain of TCR clone 64749 (TRAV17, TRAJ52)
CATGIIGGTSYGKLTF

SEQ ID NO: 129498 - protein, 15 aa, Homo sapiens
  CDR3 for beta chain variable domain of TCR clone 64749 (TRBV2, TRBJ2-1)
CASSEEREGDNEQFF

SEQ ID NO: 129499 - protein, 12 aa, Homo sapiens
  CDR3 for alpha chain variable domain of TCR clone 64750 (TRAV26-2, TRAJ21)
CILKGNFNKFYF

SEQ ID NO: 129500 - protein, 14 aa, Homo sapiens
  CDR3 for beta chain variable domain of TCR clone 64750 (TRBV7-9, TRBJ1-1)
CASPPLQSYTEAFF

SEQ ID NO: 129501 - protein, 13 aa, Homo sapiens
  CDR3 for alpha chain variable domain of TCR clone 64751 (TRAV12-2, TRAJ20)
CAVYPSNDYKLSF

SEQ ID NO: 129502 - protein, 12 aa, Homo sapiens
  CDR3 for beta chain variable domain of TCR clone 64751 (TRBV7-8, TRBJ2-7)
CASSLGDREQYF

SEQ ID NO: 129503 - protein, 12 aa, Homo sapiens
  CDR3 for alpha chain variable domain of TCR clone 64752 (TRAV2, TRAJ9)
CAVGAGGFKTIF

SEQ ID NO: 129504 - protein, 16 aa, Homo sapiens
  CDR3 for beta chain variable domain of TCR clone 64752 (TRBV13, TRBJ2-2)
CASSPRTGEHTGELFY

SEQ ID NO: 129505 - protein, 17 aa, Homo sapiens
  CDR3 for alpha chain variable domain of TCR clone 64753 (TRAV3, TRAJ12)
CAVRDGGRMDSSYKLIF

SEQ ID NO: 129506 - protein, 12 aa, Homo sapiens
  CDR3 for beta chain variable domain of TCR clone 64753 (TRBV7-9, TRBJ2-7)
CASSIKREEQYF

SEQ ID NO: 129507 - protein, 16 aa, Homo sapiens
  CDR3 for alpha chain variable domain of TCR clone 64754 (TRAV21, TRAJ17)
CAVRPGEEAAGNKLTF

SEQ ID NO: 129508 - protein, 17 aa, Homo sapiens
  CDR3 for beta chain variable domain of TCR clone 64754 (TRBV7-8, TRBJ2-6)
CASSAGTGGAGANVLTF

SEQ ID NO: 129509 - protein, 12 aa, Homo sapiens
  CDR3 for alpha chain variable domain of TCR clone 64755 (TRAV1-1, TRAJ8)
RAGGTGFQKLVF

SEQ ID NO: 129510 - protein, 15 aa, Homo sapiens
  CDR3 for beta chain variable domain of TCR clone 64755 (TRBV7-9, TRBJ1-4)
CASSRTGGFNEKLFF

SEQ ID NO: 129511 - protein, 14 aa, Homo sapiens
  CDR3 for alpha chain variable domain of TCR clone 64756 (TRAV25, TRAJ35)
CARRMEGFGNVLHC

SEQ ID NO: 129512 - protein, 13 aa, Homo sapiens
  CDR3 for beta chain variable domain of TCR clone 64756 (TRBV7-2, TRBJ1-4)
CASSLAGLEKLFS

SEQ ID NO: 129513 - protein, 13 aa, Homo sapiens
  CDR3 for alpha chain variable domain of TCR clone 64757 (TRAV12-2, TRAJ20)
CAVYPSNDYKLSF

SEQ ID NO: 129514 - protein, 12 aa, Homo sapiens
  CDR3 for beta chain variable domain of TCR clone 64757 (TRBV11-2, TRBJ2-5)
CASSLVGETQYF

SEQ ID NO: 129515 - protein, 14 aa, Homo sapiens
  CDR3 for alpha chain variable domain of TCR clone 64758 (TRAV17, TRAJ31)
CATVLRNNNARLMF

SEQ ID NO: 129516 - protein, 14 aa, Homo sapiens
  CDR3 for beta chain variable domain of TCR clone 64758 (TRBV25-1, TRBJ2-2)
CASSELGLPGELFL

SEQ ID NO: 129517 - protein, 16 aa, Homo sapiens
  CDR3 for alpha chain variable domain of TCR clone 64759 (TRAV35, TRAJ28)
CWSPGILWAGSYQLTF

SEQ ID NO: 129518 - protein, 15 aa, Homo sapiens
  CDR3 for beta chain variable domain of TCR clone 64759 (TRBV2, TRBJ1-2)
CASSEIGGANYGYTF

SEQ ID NO: 129519 - protein, 15 aa, Homo sapiens
  CDR3 for alpha chain variable domain of TCR clone 64760 (TRAV17, TRAJ57)
CATGPSQGGSEKLVF

SEQ ID NO: 129520 - protein, 19 aa, Homo sapiens
  CDR3 for beta chain variable domain of TCR clone 64760 (TRBV25-1, TRBJ2-2)
CAILVYRVDRGRKTGELFF

SEQ ID NO: 129521 - protein, 14 aa, Homo sapiens
  CDR3 for alpha chain variable domain of TCR clone 64761 (TRAV30, TRAJ33)
CGTERRFSNYQLIW

SEQ ID NO: 129522 - protein, 15 aa, Homo sapiens
  CDR3 for beta chain variable domain of TCR clone 64761 (TRBV20-1, TRBJ1-2)
CSARDSRGRNYGYTF

SEQ ID NO: 129523 - protein, 17 aa, Homo sapiens
  CDR3 for alpha chain variable domain of TCR clone 64762 (TRAV3, TRAJ7)
CAVRDMSPLEGTTDSLL

SEQ ID NO: 129524 - protein, 17 aa, Homo sapiens
  CDR3 for beta chain variable domain of TCR clone 64762 (TRBV15, TRBJ1-2)
CATSGREIDVVNYGYAF

SEQ ID NO: 129525 - protein, 11 aa, Homo sapiens
  CDR3 for alpha chain variable domain of TCR clone 64763 (TRAV39, TRAJ49)
SAVDISTQFYF

SEQ ID NO: 129526 - protein, 11 aa, Homo sapiens
  CDR3 for beta chain variable domain of TCR clone 64763 (TRBV7-8, TRBJ2-7)
CASSLSLEQYF

SEQ ID NO: 129527 - protein, 16 aa, Homo sapiens
  CDR3 for alpha chain variable domain of TCR clone 64764 (TRAV26-1, TRAJ45)
CIVEKYSGGGADGLTF

SEQ ID NO: 129528 - protein, 11 aa, Homo sapiens
  CDR3 for beta chain variable domain of TCR clone 64764 (TRBV7-9, TRBJ2-5)
CASSLGETQYF

SEQ ID NO: 129529 - protein, 13 aa, Homo sapiens
  CDR3 for alpha chain variable domain of TCR clone 64765 (TRAV8-3, TRAJ43)
CAVVPYNNKDMRF

SEQ ID NO: 129530 - protein, 17 aa, Homo sapiens
  CDR3 for beta chain variable domain of TCR clone 64765 (TRBV7-7, TRBJ1-1)
CASIGDRPNLGVTEAFF

SEQ ID NO: 129531 - protein, 14 aa, Homo sapiens
  CDR3 for alpha chain variable domain of TCR clone 64766 (TRAV26-1, TRAJ34)
CIVRVAYNTDKLIF

SEQ ID NO: 129532 - protein, 16 aa, Homo sapiens
  CDR3 for beta chain variable domain of TCR clone 64766 (TRBV7-3, TRBJ2-2)
CARSLKRGTLSGELFF

SEQ ID NO: 129533 - protein, 20 aa, Homo sapiens
  CDR3 for alpha chain variable domain of TCR clone 64767 (TRAV12-1, TRAJ42)
SSVIQPPTSVKGGSQGNLIF

SEQ ID NO: 129534 - protein, 18 aa, Homo sapiens
  CDR3 for beta chain variable domain of TCR clone 64767 (TRBV11-2, TRBJ2-3)
CANSLGGASRGAPNTQYF

SEQ ID NO: 129535 - protein, 15 aa, Homo sapiens
  CDR3 for alpha chain variable domain of TCR clone 64768 (TRAV26-1, TRAJ29)
CIVRVEGSGNTPLVF

SEQ ID NO: 129536 - protein, 16 aa, Homo sapiens
  CDR3 for beta chain variable domain of TCR clone 64768 (TRBV10-3, TRBJ2-1)
CAISGVGDGGGGEQFF

SEQ ID NO: 129537 - protein, 13 aa, Homo sapiens
  CDR3 for alpha chain variable domain of TCR clone 64769 (TRAV36/DV7, TRAJ53)
CALSGGSNYKLTL

SEQ ID NO: 129538 - protein, 13 aa, Homo sapiens
  CDR3 for beta chain variable domain of TCR clone 64769 (TRBV28, TRBJ2-4)
CASSQSSKNIQYF

SEQ ID NO: 129539 - protein, 12 aa, Homo sapiens
  CDR3 for alpha chain variable domain of TCR clone 64770 (TRAV17, TRAJ12)
CATLRSSYKLIF

SEQ ID NO: 129540 - protein, 16 aa, Homo sapiens
  CDR3 for beta chain variable domain of TCR clone 64770 (TRBV28, TRBJ2-7)
CASSLFFETGGPDQYF

SEQ ID NO: 129541 - protein, 12 aa, Homo sapiens
  CDR3 for alpha chain variable domain of TCR clone 64771 (TRAV13-1, TRAJ5)
CAAKAGRRALTF

SEQ ID NO: 129542 - protein, 12 aa, Homo sapiens
  CDR3 for beta chain variable domain of TCR clone 64771 (TRBV11-2, TRBJ2-2)
CASSLGGGELFF

SEQ ID NO: 129543 - protein, 13 aa, Homo sapiens
  CDR3 for alpha chain variable domain of TCR clone 64772 (TRAV3, TRAJ4)
CAVRDGGYNKLIF

SEQ ID NO: 129544 - protein, 20 aa, Homo sapiens
  CDR3 for beta chain variable domain of TCR clone 64772 (TRBV7-8, TRBJ2-2)
CASSHLFPGPTIHITGELFF

SEQ ID NO: 129545 - protein, 15 aa, Homo sapiens
  CDR3 for alpha chain variable domain of TCR clone 64773 (TRAV26-1, TRAJ3)
CIVRSGYSSASKIIF

SEQ ID NO: 129546 - protein, 14 aa, Homo sapiens
  CDR3 for beta chain variable domain of TCR clone 64773 (TRBV13, TRBJ2-5)
CASYRRRAEETQYF

SEQ ID NO: 129547 - protein, 13 aa, Homo sapiens
  CDR3 for alpha chain variable domain of TCR clone 64774 (TRAV12-3, TRAJ9)
CAMRNTGGFKTIF

SEQ ID NO: 129548 - protein, 14 aa, Homo sapiens
  CDR3 for beta chain variable domain of TCR clone 64774 (TRBV18, TRBJ2-5)
CASSPGVSQETQYF

SEQ ID NO: 129549 - protein, 13 aa, Homo sapiens
  CDR3 for alpha chain variable domain of TCR clone 64775 (TRAV30, TRAJ34)
CGPVGYNTDKLIF

SEQ ID NO: 129550 - protein, 16 aa, Homo sapiens
  CDR3 for beta chain variable domain of TCR clone 64775 (TRBV7-9, TRBJ1-2)
CASSLGFSSGEDGYTF

SEQ ID NO: 129551 - protein, 12 aa, Homo sapiens
  CDR3 for alpha chain variable domain of TCR clone 64776 (TRAV1-1, TRAJ43)
CAPRVSSNDMRF

SEQ ID NO: 129552 - protein, 14 aa, Homo sapiens
  CDR3 for beta chain variable domain of TCR clone 64776 (TRBV5-1, TRBJ2-7)
CASSRGESLYEQYF

SEQ ID NO: 129553 - protein, 14 aa, Homo sapiens
  CDR3 for alpha chain variable domain of TCR clone 64777 (TRAV8-3, TRAJ23)
CAVIIYNQGGKLIF

SEQ ID NO: 129554 - protein, 17 aa, Homo sapiens
  CDR3 for beta chain variable domain of TCR clone 64777 (TRBV13, TRBJ2-3)
CASSLSRVAGGRNTQYF

SEQ ID NO: 129555 - protein, 11 aa, Homo sapiens
  CDR3 for alpha chain variable domain of TCR clone 64778 (TRAV13-2, TRAJ45)
VTGGGADGLTF

SEQ ID NO: 129556 - protein, 17 aa, Homo sapiens
  CDR3 for beta chain variable domain of TCR clone 64778 (TRBV19, TRBJ1-1)
CASSIAGRGLMNTEAIF

SEQ ID NO: 129557 - protein, 14 aa, Homo sapiens
  CDR3 for alpha chain variable domain of TCR clone 64779 (TRAV1-2, TRAJ16)
CAVNRFSDGQNLLF

SEQ ID NO: 129558 - protein, 14 aa, Homo sapiens
  CDR3 for beta chain variable domain of TCR clone 64779 (TRBV7-3, TRBJ2-1)
CASSLAGGTNEQFF

SEQ ID NO: 129559 - protein, 13 aa, Homo sapiens
  CDR3 for alpha chain variable domain of TCR clone 64780 (TRAV2, TRAJ40)
CAVVTSGTYKYIF

SEQ ID NO: 129560 - protein, 15 aa, Homo sapiens
  CDR3 for beta chain variable domain of TCR clone 64780 (TRBV11-3, TRBJ2-3)
CASLKDGREGDKQYF

SEQ ID NO: 129561 - protein, 14 aa, Homo sapiens
  CDR3 for alpha chain variable domain of TCR clone 64781 (TRAV12-2, TRAJ40)
CAGKIPSGTYKYIF

SEQ ID NO: 129562 - protein, 13 aa, Homo sapiens
  CDR3 for beta chain variable domain of TCR clone 64781 (TRBV7-9, TRBJ1-2)
CASSLKQNYGYTF

SEQ ID NO: 129563 - protein, 12 aa, Homo sapiens
  CDR3 for alpha chain variable domain of TCR clone 64782 (TRAV21, TRAJ11)
CAATSGYSTLTV

SEQ ID NO: 129564 - protein, 14 aa, Homo sapiens
  CDR3 for beta chain variable domain of TCR clone 64782 (TRBV20-1, TRBJ2-7)
CSAPELAGVGEQYF

SEQ ID NO: 129565 - protein, 12 aa, Homo sapiens
  CDR3 for alpha chain variable domain of TCR clone 64783 (TRAV16, TRAJ26)
CASKDGGQNFVF

SEQ ID NO: 129566 - protein, 13 aa, Homo sapiens
  CDR3 for beta chain variable domain of TCR clone 64783 (TRBV25-1, TRBJ1-1)
CASGDRGRAEAFF

SEQ ID NO: 129567 - protein, 16 aa, Homo sapiens
  CDR3 for alpha chain variable domain of TCR clone 64784 (TRAV26-2, TRAJ48)
CILRPPFNFGNEKLTF

SEQ ID NO: 129568 - protein, 15 aa, Homo sapiens
  CDR3 for beta chain variable domain of TCR clone 64784 (TRBV20-1, TRBJ2-3)
CSARVEGAYTDTQYF

SEQ ID NO: 129569 - protein, 12 aa, Homo sapiens
  CDR3 for alpha chain variable domain of TCR clone 64785 (TRAV12-1, TRAJ40)
CVFYSGTYKYIF

SEQ ID NO: 129570 - protein, 12 aa, Homo sapiens
  CDR3 for beta chain variable domain of TCR clone 64785 (TRBV6-1, TRBJ2-7)
CASSEPLYEQYF

SEQ ID NO: 129571 - protein, 15 aa, Homo sapiens
  CDR3 for alpha chain variable domain of TCR clone 64786 (TRAV1-2, TRAJ28)
CAVQYSGAGSYQLPF

SEQ ID NO: 129572 - protein, 13 aa, Homo sapiens
  CDR3 for beta chain variable domain of TCR clone 64786 (TRBV20-1, TRBJ2-7)
CSATHTSGYEQYF

SEQ ID NO: 129573 - protein, 13 aa, Homo sapiens
  CDR3 for alpha chain variable domain of TCR clone 64787 (TRAV3, TRAJ27)
CAVRPLGAGKSTF

SEQ ID NO: 129574 - protein, 14 aa, Homo sapiens
  CDR3 for beta chain variable domain of TCR clone 64787 (TRBV19, TRBJ2-7)
CASSMGQGAIEQYF

SEQ ID NO: 129575 - protein, 11 aa, Homo sapiens
  CDR3 for alpha chain variable domain of TCR clone 64788 (TRAV1-2, TRAJ31)
CASHNDARLMF

SEQ ID NO: 129576 - protein, 13 aa, Homo sapiens
  CDR3 for beta chain variable domain of TCR clone 64788 (TRBV7-9, TRBJ2-7)
CASSPFDHYEQYF

SEQ ID NO: 129577 - protein, 13 aa, Homo sapiens
  CDR3 for alpha chain variable domain of TCR clone 64789 (TRAV13-2, TRAJ48)
CAEMDFRNEKLTF

SEQ ID NO: 129578 - protein, 15 aa, Homo sapiens
  CDR3 for beta chain variable domain of TCR clone 64789 (TRBV7-9, TRBJ1-6)
CASSSPGRGNSPLHF

SEQ ID NO: 129579 - protein, 13 aa, Homo sapiens
  CDR3 for alpha chain variable domain of TCR clone 64790 (TRAV13-1, TRAJ15)
CAAINQAGTALIF

SEQ ID NO: 129580 - protein, 14 aa, Homo sapiens
  CDR3 for beta chain variable domain of TCR clone 64790 (TRBV18, TRBJ2-7)
CASSLDRAAYEQYF

SEQ ID NO: 129581 - protein, 13 aa, Homo sapiens
  CDR3 for alpha chain variable domain of TCR clone 64791 (TRAV12-3, TRAJ33)
CAMSVNSNYQLIW

SEQ ID NO: 129582 - protein, 15 aa, Homo sapiens
  CDR3 for beta chain variable domain of TCR clone 64791 (TRBV7-2, TRBJ2-1)
CASSSGLAGGNEQFF

SEQ ID NO: 129583 - protein, 15 aa, Homo sapiens
  CDR3 for alpha chain variable domain of TCR clone 64792 (TRAV3, TRAJ22)
CAVRDRGGSARQLTF

SEQ ID NO: 129584 - protein, 16 aa, Homo sapiens
  CDR3 for beta chain variable domain of TCR clone 64792 (TRBV5-4, TRBJ2-3)
CASQQPGAGGAATQYF

SEQ ID NO: 129585 - protein, 17 aa, Homo sapiens
  CDR3 for alpha chain variable domain of TCR clone 64793 (TRAV2, TRAJ32)
CAFNPPESGWCYKQAHL

SEQ ID NO: 129586 - protein, 12 aa, Homo sapiens
  CDR3 for beta chain variable domain of TCR clone 64793 (TRBV20-1, TRBJ2-7)
CSAITPTKEQYF

SEQ ID NO: 129587 - protein, 13 aa, Homo sapiens
  CDR3 for alpha chain variable domain of TCR clone 64794 (TRAV12-2, TRAJ20)
CAVYPSNDYKLSF

SEQ ID NO: 129588 - protein, 11 aa, Homo sapiens
  CDR3 for beta chain variable domain of TCR clone 64794 (TRBV12-4, TRBJ2-3)
CASTATDTQYF

SEQ ID NO: 129589 - protein, 14 aa, Homo sapiens
  CDR3 for alpha chain variable domain of TCR clone 64795 (TRAV16, TRAJ33)
CALSAMDSNYQLIW

SEQ ID NO: 129590 - protein, 16 aa, Homo sapiens
  CDR3 for beta chain variable domain of TCR clone 64795 (TRBV12-4, TRBJ2-7)
CASSPEGQGSSYEQYF

SEQ ID NO: 129591 - protein, 10 aa, Homo sapiens
  CDR3 for alpha chain variable domain of TCR clone 64796 (TRAV12-3, TRAJ49)
CAMNDYQFYF

SEQ ID NO: 129592 - protein, 13 aa, Homo sapiens
  CDR3 for beta chain variable domain of TCR clone 64796 (TRBV12-4, TRBJ1-1)
CASSPGTGFEAFF

SEQ ID NO: 129593 - protein, 10 aa, Homo sapiens
  CDR3 for alpha chain variable domain of TCR clone 64797 (TRAV13-1, TRAJ7)
LIGGNNRLAF

SEQ ID NO: 129594 - protein, 16 aa, Homo sapiens
  CDR3 for beta chain variable domain of TCR clone 64797 (TRBV4-1, TRBJ1-2)
CASSQDAGQVLYGYAF

SEQ ID NO: 129595 - protein, 14 aa, Homo sapiens
  CDR3 for alpha chain variable domain of TCR clone 64798 (TRAV34, TRAJ44)
CGADGTGTASKLTF

SEQ ID NO: 129596 - protein, 16 aa, Homo sapiens
  CDR3 for beta chain variable domain of TCR clone 64798 (TRBV19, TRBJ2-2)
CASRSPGTGATGELFF

SEQ ID NO: 129597 - protein, 17 aa, Homo sapiens
  CDR3 for alpha chain variable domain of TCR clone 64799 (TRAV27, TRAJ18)
CAGLHRGRGPTLGRLYF

SEQ ID NO: 129598 - protein, 14 aa, Homo sapiens
  CDR3 for beta chain variable domain of TCR clone 64799 (TRBV20-1, TRBJ1-5)
CSARGRGSDQPQHF

SEQ ID NO: 129599 - protein, 12 aa, Homo sapiens
  CDR3 for alpha chain variable domain of TCR clone 64800 (TRAV20, TRAJ54)
CAVQEGAQKLVF

SEQ ID NO: 129600 - protein, 17 aa, Homo sapiens
  CDR3 for beta chain variable domain of TCR clone 64800 (TRBV13, TRBJ2-3)
CASSLSRVAGERNTQYF

SEQ ID NO: 129601 - protein, 14 aa, Homo sapiens
  CDR3 for alpha chain variable domain of TCR clone 64801 (TRAV12-3, TRAJ10)
SHLPLTGGGNKLTF

SEQ ID NO: 129602 - protein, 16 aa, Homo sapiens
  CDR3 for beta chain variable domain of TCR clone 64801 (TRBV9, TRBJ1-2)
CASSVEEKVSPYGYTF

SEQ ID NO: 129603 - protein, 15 aa, Homo sapiens
  CDR3 for alpha chain variable domain of TCR clone 64802 (TRAV8-2, TRAJ40)
CVVLGTTSGTYKYIF

SEQ ID NO: 129604 - protein, 16 aa, Homo sapiens
  CDR3 for beta chain variable domain of TCR clone 64802 (TRBV7-3, TRBJ2-1)
CASSLEGYRSCNEQFF

SEQ ID NO: 129605 - protein, 11 aa, Homo sapiens
  CDR3 for alpha chain variable domain of TCR clone 64803 (TRAV27, TRAJ20)
RAGLNDYKLSF

SEQ ID NO: 129606 - protein, 14 aa, Homo sapiens
  CDR3 for beta chain variable domain of TCR clone 64803 (TRBV6-1, TRBJ1-1)
CASTPLQMNTEAFF

SEQ ID NO: 129607 - protein, 11 aa, Homo sapiens
  CDR3 for alpha chain variable domain of TCR clone 64804 (TRAV21, TRAJ11)
CAVNGYSTLTF

SEQ ID NO: 129608 - protein, 16 aa, Homo sapiens
  CDR3 for beta chain variable domain of TCR clone 64804 (TRBV19, TRBJ2-2)
CASRSPGTGATGELFF

SEQ ID NO: 129609 - protein, 13 aa, Homo sapiens
  CDR3 for alpha chain variable domain of TCR clone 64805 (TRAV13-2, TRAJ21)
CAENVGQLQQILL

SEQ ID NO: 129610 - protein, 14 aa, Homo sapiens
  CDR3 for beta chain variable domain of TCR clone 64805 (TRBV12-5, TRBJ2-5)
CASGSRTHQETQYF

SEQ ID NO: 129611 - protein, 11 aa, Homo sapiens
  CDR3 for alpha chain variable domain of TCR clone 64806 (TRAV2, TRAJ13)
CASGGYQKVTF

SEQ ID NO: 129612 - protein, 16 aa, Homo sapiens
  CDR3 for beta chain variable domain of TCR clone 64806 (TRBV6-1, TRBJ2-5)
CVSSETLDRGAETQYF

SEQ ID NO: 129613 - protein, 14 aa, Homo sapiens
  CDR3 for alpha chain variable domain of TCR clone 64807 (TRAV26-1, TRAJ39)
CIVRGSRAGNMLTF

SEQ ID NO: 129614 - protein, 15 aa, Homo sapiens
  CDR3 for beta chain variable domain of TCR clone 64807 (TRBV7-9, TRBJ1-5)
CASSQGHQPNQPEHF

SEQ ID NO: 129615 - protein, 15 aa, Homo sapiens
  CDR3 for alpha chain variable domain of TCR clone 64808 (TRAV26-1, TRAJ37)
CIVENGSGNTGKLIF

SEQ ID NO: 129616 - protein, 15 aa, Homo sapiens
  CDR3 for beta chain variable domain of TCR clone 64808 (TRBV7-2, TRBJ2-1)
CASTHGTGIYNEQFF

SEQ ID NO: 129617 - protein, 13 aa, Homo sapiens
  CDR3 for alpha chain variable domain of TCR clone 64809 (TRAV21, TRAJ57)
CAVTQGGPEKLVF

SEQ ID NO: 129618 - protein, 17 aa, Homo sapiens
  CDR3 for beta chain variable domain of TCR clone 64809 (TRBV20-1, TRBJ2-2)
CSASGSGQGGLTGELFF

SEQ ID NO: 129619 - protein, 14 aa, Homo sapiens
  CDR3 for alpha chain variable domain of TCR clone 64810 (TRAV13-1, TRAJ40)
CAASMTSGTYKYIF

SEQ ID NO: 129620 - protein, 15 aa, Homo sapiens
  CDR3 for beta chain variable domain of TCR clone 64810 (TRBV7-3, TRBJ2-1)
CASSPTGGWEVEQFF

SEQ ID NO: 129621 - protein, 12 aa, Homo sapiens
  CDR3 for alpha chain variable domain of TCR clone 64811 (TRAV12-3, TRAJ17)
CAMTLTGNKLTF

SEQ ID NO: 129622 - protein, 16 aa, Homo sapiens
  CDR3 for beta chain variable domain of TCR clone 64811 (TRBV7-3, TRBJ2-2)
CASSLKRGTSSGELFF

SEQ ID NO: 129623 - protein, 18 aa, Homo sapiens
  CDR3 for alpha chain variable domain of TCR clone 64812 (TRAV12-3, TRAJ52)
CARSVGGAGGTSYGKLTF

SEQ ID NO: 129624 - protein, 15 aa, Homo sapiens
  CDR3 for beta chain variable domain of TCR clone 64812 (TRBV27, TRBJ1-6)
CASSFDRGLGSPLHF

SEQ ID NO: 129625 - protein, 13 aa, Homo sapiens
  CDR3 for alpha chain variable domain of TCR clone 64813 (TRAV16, TRAJ28)
CALTGAGSYQLTF

SEQ ID NO: 129626 - protein, 16 aa, Homo sapiens
  CDR3 for beta chain variable domain of TCR clone 64813 (TRBV28, TRBJ1-5)
CASSLTRQGWNQPQHF

SEQ ID NO: 129627 - protein, 18 aa, Homo sapiens
  CDR3 for alpha chain variable domain of TCR clone 64814 (TRAV2, TRAJ32)
CCLLLCFHYGGAANKLIF

SEQ ID NO: 129628 - protein, 16 aa, Homo sapiens
  CDR3 for beta chain variable domain of TCR clone 64814 (TRBV7-9, TRBJ2-7)
CASSYPDREGGYEQYF

SEQ ID NO: 129629 - protein, 12 aa, Homo sapiens
  CDR3 for alpha chain variable domain of TCR clone 64815 (TRAV12-1, TRAJ40)
CVVYSGTYKYIF

SEQ ID NO: 129630 - protein, 15 aa, Homo sapiens
  CDR3 for beta chain variable domain of TCR clone 64815 (TRBV27, TRBJ1-6)
CASSFDRGLGSTLHF

SEQ ID NO: 129631 - protein, 16 aa, Homo sapiens
  CDR3 for alpha chain variable domain of TCR clone 64816 (TRAV3, TRAJ22)
CAVRDMGSGSARQLTF

SEQ ID NO: 129632 - protein, 16 aa, Homo sapiens
  CDR3 for beta chain variable domain of TCR clone 64816 (TRBV12-5, TRBJ2-5)
CASGPRTSGNQETQYF

SEQ ID NO: 129633 - protein, 14 aa, Homo sapiens
  CDR3 for alpha chain variable domain of TCR clone 64817 (TRAV1-2, TRAJ16)
CAVNRFSDGQKPLF

SEQ ID NO: 129634 - protein, 13 aa, Homo sapiens
  CDR3 for beta chain variable domain of TCR clone 64817 (TRBV20-1, TRBJ1-1)
CSARGGGNTEAFF

SEQ ID NO: 129635 - protein, 12 aa, Homo sapiens
  CDR3 for alpha chain variable domain of TCR clone 64818 (TRAV17, TRAJ20)
CATQANDYKLSF

SEQ ID NO: 129636 - protein, 12 aa, Homo sapiens
  CDR3 for beta chain variable domain of TCR clone 64818 (TRBV6-1, TRBJ1-1)
CASNSPTAGAFF

SEQ ID NO: 129637 - protein, 14 aa, Homo sapiens
  CDR3 for alpha chain variable domain of TCR clone 64819 (TRAV1-2, TRAJ29)
CAVRELTSATPLVF

SEQ ID NO: 129638 - protein, 14 aa, Homo sapiens
  CDR3 for beta chain variable domain of TCR clone 64819 (TRBV3-1, TRBJ2-5)
CASSQGPNQETQYF

SEQ ID NO: 129639 - protein, 15 aa, Homo sapiens
  CDR3 for alpha chain variable domain of TCR clone 64820 (TRAV26-1, TRAJ29)
CIVRVEGSGNTPLVF

SEQ ID NO: 129640 - protein, 15 aa, Homo sapiens
  CDR3 for beta chain variable domain of TCR clone 64820 (TRBV6-1, TRBJ2-4)
CASSEAVWTINIQYF

SEQ ID NO: 129641 - protein, 15 aa, Homo sapiens
  CDR3 for alpha chain variable domain of TCR clone 64821 (TRAV12-2, TRAJ53)
CAVNGGGGSDYKLTF

SEQ ID NO: 129642 - protein, 13 aa, Homo sapiens
  CDR3 for beta chain variable domain of TCR clone 64821 (TRBV3-1, TRBJ1-1)
CASSPGVITEAFF

SEQ ID NO: 129643 - protein, 18 aa, Homo sapiens
  CDR3 for alpha chain variable domain of TCR clone 64822 (TRAV21, TRAJ52)
CAVRPSPAGGTSYGKLTF

SEQ ID NO: 129644 - protein, 13 aa, Homo sapiens
  CDR3 for beta chain variable domain of TCR clone 64822 (TRBV7-3, TRBJ1-1)
CASSQDWGSEAFF

SEQ ID NO: 129645 - protein, 12 aa, Homo sapiens
  CDR3 for alpha chain variable domain of TCR clone 64823 (TRAV12-3, TRAJ17)
CAMTLTGNKLTF

SEQ ID NO: 129646 - protein, 15 aa, Homo sapiens
  CDR3 for beta chain variable domain of TCR clone 64823 (TRBV7-8, TRBJ2-1)
CASSLHGGPYNEQFF

SEQ ID NO: 129647 - protein, 17 aa, Homo sapiens
  CDR3 for alpha chain variable domain of TCR clone 64824 (TRAV17, TRAJ52)
YATERPSGGTSYGKLTF

SEQ ID NO: 129648 - protein, 15 aa, Homo sapiens
  CDR3 for beta chain variable domain of TCR clone 64824 (TRBV5-1, TRBJ2-1)
CASSLVANSYNEQFF

SEQ ID NO: 129649 - protein, 16 aa, Homo sapiens
  CDR3 for alpha chain variable domain of TCR clone 64825 (TRAV4, TRAJ22)
CLVGDLCSGSARQLTF

SEQ ID NO: 129650 - protein, 16 aa, Homo sapiens
  CDR3 for beta chain variable domain of TCR clone 64825 (TRBV7-9, TRBJ2-1)
CASSDVAGGSYNEQFF

SEQ ID NO: 129651 - protein, 14 aa, Homo sapiens
  CDR3 for alpha chain variable domain of TCR clone 64826 (TRAV2, TRAJ9)
CAVEDRSGGFKTIF

SEQ ID NO: 129652 - protein, 13 aa, Homo sapiens
  CDR3 for beta chain variable domain of TCR clone 64826 (TRBV27, TRBJ2-1)
CASRTLGVGEQFF

SEQ ID NO: 129653 - protein, 14 aa, Homo sapiens
  CDR3 for alpha chain variable domain of TCR clone 64827 (TRAV39, TRAJ54)
CAVVLIQGAQKPVF

SEQ ID NO: 129654 - protein, 16 aa, Homo sapiens
  CDR3 for beta chain variable domain of TCR clone 64827 (TRBV3-1, TRBJ2-7)
CASSQGATGVAYEQYF

SEQ ID NO: 129655 - protein, 16 aa, Homo sapiens
  CDR3 for alpha chain variable domain of TCR clone 64828 (TRAV12-3, TRAJ53)
CAMSPRSGGSNYKLTF

SEQ ID NO: 129656 - protein, 14 aa, Homo sapiens
  CDR3 for beta chain variable domain of TCR clone 64828 (TRBV19, TRBJ1-2)
CASSLQGQAYGYTF

SEQ ID NO: 129657 - protein, 12 aa, Homo sapiens
  CDR3 for alpha chain variable domain of TCR clone 64829 (TRAV12-1, TRAJ40)
CVVYSGTYKYIF

SEQ ID NO: 129658 - protein, 18 aa, Homo sapiens
  CDR3 for beta chain variable domain of TCR clone 64829 (TRBV11-2, TRBJ2-3)
CASSLGGASRGAPNTQYI

SEQ ID NO: 129659 - protein, 14 aa, Homo sapiens
  CDR3 for alpha chain variable domain of TCR clone 64830 (TRAV12-3, TRAJ6)
CAMSATGGSYIPTF

SEQ ID NO: 129660 - protein, 16 aa, Homo sapiens
  CDR3 for beta chain variable domain of TCR clone 64830 (TRBV4-2, TRBJ2-1)
CASSPRVGQGANEQFF

SEQ ID NO: 129661 - protein, 15 aa, Homo sapiens
  CDR3 for alpha chain variable domain of TCR clone 64831 (TRAV26-1, TRAJ52)
CIVSDLGTSYGKLTF

SEQ ID NO: 129662 - protein, 15 aa, Homo sapiens
  CDR3 for beta chain variable domain of TCR clone 64831 (TRBV6-5, TRBJ2-7)
CASSESGRWSYEQYF

SEQ ID NO: 129663 - protein, 14 aa, Homo sapiens
  CDR3 for alpha chain variable domain of TCR clone 64832 (TRAV12-3, TRAJ10)
SHLPLTGGGNKLTF

SEQ ID NO: 129664 - protein, 14 aa, Homo sapiens
  CDR3 for beta chain variable domain of TCR clone 64832 (TRBV11-2, TRBJ1-5)
CASSLDRGRQPQHF

SEQ ID NO: 129665 - protein, 12 aa, Homo sapiens
  CDR3 for alpha chain variable domain of TCR clone 64833 (TRAV12-3, TRAJ17)
CAVTLTGNKLTF

SEQ ID NO: 129666 - protein, 15 aa, Homo sapiens
  CDR3 for beta chain variable domain of TCR clone 64833 (TRBV10-2, TRBJ2-6)
CASSEQGTGANVLTF

SEQ ID NO: 129667 - protein, 14 aa, Homo sapiens
  CDR3 for alpha chain variable domain of TCR clone 64834 (TRAV12-3, TRAJ33)
CAMSVPGSNYQLIL

SEQ ID NO: 129668 - protein, 12 aa, Homo sapiens
  CDR3 for beta chain variable domain of TCR clone 64834 (TRBV7-8, TRBJ2-7)
CASSLGDREQYF

SEQ ID NO: 129669 - protein, 14 aa, Homo sapiens
  CDR3 for alpha chain variable domain of TCR clone 64835 (TRAV9-2, TRAJ39)
CALYIYNAGNMLTF

SEQ ID NO: 129670 - protein, 11 aa, Homo sapiens
  CDR3 for beta chain variable domain of TCR clone 64835 (TRBV12-4, TRBJ2-3)
CASSSVRGRYF

SEQ ID NO: 129671 - protein, 18 aa, Homo sapiens
  CDR3 for alpha chain variable domain of TCR clone 64836 (TRAV12-3, TRAJ52)
CAMSRTNAGGTNYGKLTF

SEQ ID NO: 129672 - protein, 17 aa, Homo sapiens
  CDR3 for beta chain variable domain of TCR clone 64836 (TRBV7-3, TRBJ2-3)
CASSLMKRMRGADTQYF

SEQ ID NO: 129673 - protein, 14 aa, Homo sapiens
  CDR3 for alpha chain variable domain of TCR clone 64837 (TRAV3, TRAJ22)
CAVRDYGSARQLTF

SEQ ID NO: 129674 - protein, 16 aa, Homo sapiens
  CDR3 for beta chain variable domain of TCR clone 64837 (TRBV6-3, TRBJ1-2)
CASSYSRRASNYGYTF

SEQ ID NO: 129675 - protein, 15 aa, Homo sapiens
  CDR3 for alpha chain variable domain of TCR clone 64838 (TRAV8-4, TRAJ52)
CAVSDGGTSYGKLTL

SEQ ID NO: 129676 - protein, 12 aa, Homo sapiens
  CDR3 for beta chain variable domain of TCR clone 64838 (TRBV29-1, TRBJ2-3)
CSVTSGGDTQYF

SEQ ID NO: 129677 - protein, 14 aa, Homo sapiens
  CDR3 for alpha chain variable domain of TCR clone 64839 (TRAV12-3, TRAJ10)
SHLPLTGGGNKLTF

SEQ ID NO: 129678 - protein, 19 aa, Homo sapiens
  CDR3 for beta chain variable domain of TCR clone 64839 (TRBV5-1, TRBJ2-3)
CASSLWLAGGITTTDTQYF

SEQ ID NO: 129679 - protein, 16 aa, Homo sapiens
  CDR3 for alpha chain variable domain of TCR clone 64840 (TRAV3, TRAJ21)
CAVRDIERGNFNKFYF

SEQ ID NO: 129680 - protein, 13 aa, Homo sapiens
  CDR3 for beta chain variable domain of TCR clone 64840 (TRBV27, TRBJ1-1)
CASSLSIGAEAFF

SEQ ID NO: 129681 - protein, 15 aa, Homo sapiens
  CDR3 for alpha chain variable domain of TCR clone 64841 (TRAV12-2, TRAJ43)
CAFDMRFGAGTRLTV

SEQ ID NO: 129682 - protein, 18 aa, Homo sapiens
  CDR3 for beta chain variable domain of TCR clone 64841 (TRBV20-1, TRBJ2-3)
CSASGLAGGPGTTDTLYF

SEQ ID NO: 129683 - protein, 14 aa, Homo sapiens
  CDR3 for alpha chain variable domain of TCR clone 64842 (TRAV12-3, TRAJ10)
SHLPLTGGGNKLTF

SEQ ID NO: 129684 - protein, 15 aa, Homo sapiens
  CDR3 for beta chain variable domain of TCR clone 64842 (TRBV5-1, TRBJ2-5)
CASSFKGGDQETQYF

SEQ ID NO: 129685 - protein, 13 aa, Homo sapiens
  CDR3 for alpha chain variable domain of TCR clone 64843 (TRAV17, TRAJ15)
CATVNQAGTALIF

SEQ ID NO: 129686 - protein, 13 aa, Homo sapiens
  CDR3 for beta chain variable domain of TCR clone 64843 (TRBV3-1, TRBJ1-1)
CASSPGVITEAFF

SEQ ID NO: 129687 - protein, 15 aa, Homo sapiens
  CDR3 for alpha chain variable domain of TCR clone 64844 (TRAV16, TRAJ12)
CSKWPLRDSSYKLIF

SEQ ID NO: 129688 - protein, 13 aa, Homo sapiens
  CDR3 for beta chain variable domain of TCR clone 64844 (TRBV6-1, TRBJ1-1)
CASSRQGNTEAFF

SEQ ID NO: 129689 - protein, 16 aa, Homo sapiens
  CDR3 for alpha chain variable domain of TCR clone 64845 (TRAV30, TRAJ24)
CGTEIVDADSWGKFQL

SEQ ID NO: 129690 - protein, 13 aa, Homo sapiens
  CDR3 for beta chain variable domain of TCR clone 64845 (TRBV7-3, TRBJ1-1)
CASSQDWGAEAFF

SEQ ID NO: 129691 - protein, 15 aa, Homo sapiens
  CDR3 for alpha chain variable domain of TCR clone 64846 (TRAV23/DV6, TRAJ13)
CAAWPGGGGYQKVTF

SEQ ID NO: 129692 - protein, 17 aa, Homo sapiens
  CDR3 for beta chain variable domain of TCR clone 64846 (TRBV19, TRBJ2-7)
CASGISFYDSYPYEQYF

SEQ ID NO: 129693 - protein, 15 aa, Homo sapiens
  CDR3 for alpha chain variable domain of TCR clone 64847 (TRAV12-1, TRAJ44)
CVVDEYTGTASKLTF

SEQ ID NO: 129694 - protein, 14 aa, Homo sapiens
  CDR3 for beta chain variable domain of TCR clone 64847 (TRBV5-1, TRBJ1-2)
CASSLEPVNYGDTF

SEQ ID NO: 129695 - protein, 12 aa, Homo sapiens
  CDR3 for alpha chain variable domain of TCR clone 64848 (TRAV13-1, TRAJ43)
CAAGRFNNDMRF

SEQ ID NO: 129696 - protein, 15 aa, Homo sapiens
  CDR3 for beta chain variable domain of TCR clone 64848 (TRBV29-1, TRBJ2-7)
CIVEFFDRGSYEQYF

SEQ ID NO: 129697 - protein, 11 aa, Homo sapiens
  CDR3 for alpha chain variable domain of TCR clone 64849 (TRAV20, TRAJ34)
CTRDNTAKLIF

SEQ ID NO: 129698 - protein, 15 aa, Homo sapiens
  CDR3 for beta chain variable domain of TCR clone 64849 (TRBV2, TRBJ2-1)
CASSVTSEGTDEQFF

SEQ ID NO: 129699 - protein, 11 aa, Homo sapiens
  CDR3 for alpha chain variable domain of TCR clone 64850 (TRAV27, TRAJ47)
CRSNQGNKLVL

SEQ ID NO: 129700 - protein, 16 aa, Homo sapiens
  CDR3 for beta chain variable domain of TCR clone 64850 (TRBV12-4, TRBJ1-5)
CASSRPVGGSNQPQHF

SEQ ID NO: 129701 - protein, 16 aa, Homo sapiens
  CDR3 for alpha chain variable domain of TCR clone 64851 (TRAV8-4, TRAJ7)
CVVSEGPYYGNNRLAF

SEQ ID NO: 129702 - protein, 13 aa, Homo sapiens
  CDR3 for beta chain variable domain of TCR clone 64851 (TRBV19, TRBJ2-1)
CASSMYGVNEQFF

SEQ ID NO: 129703 - protein, 11 aa, Homo sapiens
  CDR3 for alpha chain variable domain of TCR clone 64852 (TRAV35, TRAJ30)
CAGPGDDKIIL

SEQ ID NO: 129704 - protein, 14 aa, Homo sapiens
  CDR3 for beta chain variable domain of TCR clone 64852 (TRBV7-6, TRBJ1-6)
CASSQAGGGSPLHF

SEQ ID NO: 129705 - protein, 15 aa, Homo sapiens
  CDR3 for alpha chain variable domain of TCR clone 64853 (TRAV35, TRAJ58)
CAGRRQETSGSRLTF

SEQ ID NO: 129706 - protein, 12 aa, Homo sapiens
  CDR3 for beta chain variable domain of TCR clone 64853 (TRBV11-2, TRBJ2-2)
CASSLGGGELFF

SEQ ID NO: 129707 - protein, 15 aa, Homo sapiens
  CDR3 for alpha chain variable domain of TCR clone 64854 (TRAV17, TRAJ23)
CATDAEDNQGGKLIF

SEQ ID NO: 129708 - protein, 12 aa, Homo sapiens
  CDR3 for beta chain variable domain of TCR clone 64854 (TRBV2, TRBJ2-1)
CAKREGHNEQFF

SEQ ID NO: 129709 - protein, 13 aa, Homo sapiens
  CDR3 for alpha chain variable domain of TCR clone 64855 (TRAV8-3, TRAJ43)
CAVVPYNNNDMRF

SEQ ID NO: 129710 - protein, 16 aa, Homo sapiens
  CDR3 for beta chain variable domain of TCR clone 64855 (TRBV7-2, TRBJ2-5)
CASSPFPAGGEETQYF

SEQ ID NO: 129711 - protein, 14 aa, Homo sapiens
  CDR3 for alpha chain variable domain of TCR clone 64856 (TRAV3, TRAJ40)
CAVRDRRGTYKYIF

SEQ ID NO: 129712 - protein, 14 aa, Homo sapiens
  CDR3 for beta chain variable domain of TCR clone 64856 (TRBV12-4, TRBJ2-5)
CASSLWQKQETQYF

SEQ ID NO: 129713 - protein, 13 aa, Homo sapiens
  CDR3 for alpha chain variable domain of TCR clone 64857 (TRAV8-2, TRAJ47)
CVVSEREGNKLVF

SEQ ID NO: 129714 - protein, 16 aa, Homo sapiens
  CDR3 for beta chain variable domain of TCR clone 64857 (TRBV5-1, TRBJ1-1)
CASSKAGTEVGTEAFF

SEQ ID NO: 129715 - protein, 14 aa, Homo sapiens
  CDR3 for alpha chain variable domain of TCR clone 64858 (TRAV13-1, TRAJ40)
CAARSTSGTYRYIF

SEQ ID NO: 129716 - protein, 15 aa, Homo sapiens
  CDR3 for beta chain variable domain of TCR clone 64858 (TRBV18, TRBJ1-5)
CASSEAGGNNQPQHF

SEQ ID NO: 129717 - protein, 12 aa, Homo sapiens
  CDR3 for alpha chain variable domain of TCR clone 64859 (TRAV13-1, TRAJ9)
CASHTGGFKTIF

SEQ ID NO: 129718 - protein, 13 aa, Homo sapiens
  CDR3 for beta chain variable domain of TCR clone 64859 (TRBV12-4, TRBJ1-2)
CASSAGSKDGYTF

SEQ ID NO: 129719 - protein, 13 aa, Homo sapiens
  CDR3 for alpha chain variable domain of TCR clone 64860 (TRAV20, TRAJ20)
CAVQALNDYKLSF

SEQ ID NO: 129720 - protein, 15 aa, Homo sapiens
  CDR3 for beta chain variable domain of TCR clone 64860 (TRBV7-9, TRBJ1-4)
CASSLPGIEKLFLAV

SEQ ID NO: 129721 - protein, 17 aa, Homo sapiens
  CDR3 for alpha chain variable domain of TCR clone 64861 (TRAV26-2, TRAJ42)
CILRDVGYGGSQENLIF

SEQ ID NO: 129722 - protein, 16 aa, Homo sapiens
  CDR3 for beta chain variable domain of TCR clone 64861 (TRBV12-4, TRBJ2-7)
CASSLIGGTGTYEQYF

SEQ ID NO: 129723 - protein, 13 aa, Homo sapiens
  CDR3 for alpha chain variable domain of TCR clone 64862 (TRAV26-2, TRAJ43)
CILRAVNNNDMRF

SEQ ID NO: 129724 - protein, 15 aa, Homo sapiens
  CDR3 for beta chain variable domain of TCR clone 64862 (TRBV27, TRBJ2-1)
CASSNGGGSSNEQFF

SEQ ID NO: 129725 - protein, 14 aa, Homo sapiens
  CDR3 for alpha chain variable domain of TCR clone 64863 (TRAV8-1, TRAJ39)
CAVNASNAGNMLTF

SEQ ID NO: 129726 - protein, 15 aa, Homo sapiens
  CDR3 for beta chain variable domain of TCR clone 64863 (TRBV7-3, TRBJ2-2)
CASSLEVLPTGELFF

SEQ ID NO: 129727 - protein, 15 aa, Homo sapiens
  CDR3 for alpha chain variable domain of TCR clone 64864 (TRAV12-2, TRAJ43)
CAFDMRFGAGTRLTV

SEQ ID NO: 129728 - protein, 14 aa, Homo sapiens
  CDR3 for beta chain variable domain of TCR clone 64864 (TRBV27, TRBJ2-5)
CASSSLKGWETQYF

SEQ ID NO: 129729 - protein, 14 aa, Homo sapiens
  CDR3 for alpha chain variable domain of TCR clone 64865 (TRAV38-1, TRAJ45)
CAYYSGGGADGLIF

SEQ ID NO: 129730 - protein, 20 aa, Homo sapiens
  CDR3 for beta chain variable domain of TCR clone 64865 (TRBV28, TRBJ2-1)
CASTPIGRSPGLAGGNEQFF

SEQ ID NO: 129731 - protein, 12 aa, Homo sapiens
  CDR3 for alpha chain variable domain of TCR clone 64866 (TRAV13-1, TRAJ27)
CATHTNAGKSTF

SEQ ID NO: 129732 - protein, 14 aa, Homo sapiens
  CDR3 for beta chain variable domain of TCR clone 64866 (TRBV19, TRBJ2-2)
CASSGQGIAGELFF

SEQ ID NO: 129733 - protein, 20 aa, Homo sapiens
  CDR3 for alpha chain variable domain of TCR clone 64867 (TRAV25, TRAJ21)
TATQTTDVGTYPLSFNKFYF

SEQ ID NO: 129734 - protein, 14 aa, Homo sapiens
  CDR3 for beta chain variable domain of TCR clone 64867 (TRBV20-1, TRBJ2-7)
CSAPEQAGVGEQYF

SEQ ID NO: 129735 - protein, 11 aa, Homo sapiens
  CDR3 for alpha chain variable domain of TCR clone 64868 (TRAV16, TRAJ20)
CALSEGFKAAL

SEQ ID NO: 129736 - protein, 13 aa, Homo sapiens
  CDR3 for beta chain variable domain of TCR clone 64868 (TRBV7-3, TRBJ2-1)
CASSLDSYSEQFF

SEQ ID NO: 129737 - protein, 15 aa, Homo sapiens
  CDR3 for alpha chain variable domain of TCR clone 64869 (TRAV13-2, TRAJ16)
CAENDRFSDGQKLLF

SEQ ID NO: 129738 - protein, 14 aa, Homo sapiens
  CDR3 for beta chain variable domain of TCR clone 64869 (TRBV4-2, TRBJ1-5)
CACSRDRGNQPQHF

SEQ ID NO: 129739 - protein, 14 aa, Homo sapiens
  CDR3 for alpha chain variable domain of TCR clone 64870 (TRAV1-2, TRAJ8)
CAVREDKGFRKLVF

SEQ ID NO: 129740 - protein, 15 aa, Homo sapiens
  CDR3 for beta chain variable domain of TCR clone 64870 (TRBV6-3, TRBJ2-7)
CASSSPGTVFYEQYF

SEQ ID NO: 129741 - protein, 14 aa, Homo sapiens
  CDR3 for alpha chain variable domain of TCR clone 64871 (TRAV12-2, TRAJ40)
CAVKIPSGTYKHIF

SEQ ID NO: 129742 - protein, 20 aa, Homo sapiens
  CDR3 for beta chain variable domain of TCR clone 64871 (TRBV28, TRBJ2-1)
CASTPIGRSPGLAGGNEQFF

SEQ ID NO: 129743 - protein, 14 aa, Homo sapiens
  CDR3 for alpha chain variable domain of TCR clone 64872 (TRAV8-2, TRAJ37)
CVVSISGNTGKLIF

SEQ ID NO: 129744 - protein, 14 aa, Homo sapiens
  CDR3 for beta chain variable domain of TCR clone 64872 (TRBV7-2, TRBJ2-7)
CASRSQGAAYEQYF

SEQ ID NO: 129745 - protein, 14 aa, Homo sapiens
  CDR3 for alpha chain variable domain of TCR clone 64873 (TRAV8-3, TRAJ39)
CAVGANNAGNMLTF

SEQ ID NO: 129746 - protein, 14 aa, Homo sapiens
  CDR3 for beta chain variable domain of TCR clone 64873 (TRBV7-8, TRBJ2-5)
CASSATGGQETQYF

SEQ ID NO: 129747 - protein, 12 aa, Homo sapiens
  CDR3 for alpha chain variable domain of TCR clone 64874 (TRAV13-1, TRAJ21)
CAAKEGCNKFYF

SEQ ID NO: 129748 - protein, 17 aa, Homo sapiens
  CDR3 for beta chain variable domain of TCR clone 64874 (TRBV19, TRBJ2-7)
CASSISFYDSYPYEQYF

SEQ ID NO: 129749 - protein, 13 aa, Homo sapiens
  CDR3 for alpha chain variable domain of TCR clone 64875 (TRAV12-1, TRAJ6)
CVVFPGGSYIPTF

SEQ ID NO: 129750 - protein, 13 aa, Homo sapiens
  CDR3 for beta chain variable domain of TCR clone 64875 (TRBV7-3, TRBJ1-1)
CASSQDWGAEAFF

SEQ ID NO: 129751 - protein, 15 aa, Homo sapiens
  CDR3 for alpha chain variable domain of TCR clone 64876 (TRAV14/DV4, TRAJ4)
CAMRDSSGGYNRLIF

SEQ ID NO: 129752 - protein, 12 aa, Homo sapiens
  CDR3 for beta chain variable domain of TCR clone 64876 (TRBV19, TRBJ1-1)
CASSIGTEEAFF

SEQ ID NO: 129753 - protein, 14 aa, Homo sapiens
  CDR3 for alpha chain variable domain of TCR clone 64877 (TRAV12-2, TRAJ24)
CAVTPADSWGKLQF

SEQ ID NO: 129754 - protein, 16 aa, Homo sapiens
  CDR3 for beta chain variable domain of TCR clone 64877 (TRBV6-4, TRBJ2-3)
APSGGGRAWGTDTQYF

SEQ ID NO: 129755 - protein, 14 aa, Homo sapiens
  CDR3 for alpha chain variable domain of TCR clone 64878 (TRAV8-3, TRAJ36)
CAVGPITGANNLFF

SEQ ID NO: 129756 - protein, 15 aa, Homo sapiens
  CDR3 for beta chain variable domain of TCR clone 64878 (TRBV4-1, TRBJ2-1)
CASSQGPGNYNEQFF

SEQ ID NO: 129757 - protein, 14 aa, Homo sapiens
  CDR3 for alpha chain variable domain of TCR clone 64879 (TRAV16, TRAJ3)
CALSQYSSASKIVF

SEQ ID NO: 129758 - protein, 14 aa, Homo sapiens
  CDR3 for beta chain variable domain of TCR clone 64879 (TRBV6-3, TRBJ2-1)
CASLHSAYYNEQFF

SEQ ID NO: 129759 - protein, 13 aa, Homo sapiens
  CDR3 for alpha chain variable domain of TCR clone 64880 (TRAV2, TRAJ21)
CAAEDLNFNKFYF

SEQ ID NO: 129760 - protein, 15 aa, Homo sapiens
  CDR3 for beta chain variable domain of TCR clone 64880 (TRBV28, TRBJ2-5)
CASSPGQGSIETQYF

SEQ ID NO: 129761 - protein, 15 aa, Homo sapiens
  CDR3 for alpha chain variable domain of TCR clone 64881 (TRAV13-2, TRAJ6)
CAEKVLAGGSYIPTF

SEQ ID NO: 129762 - protein, 12 aa, Homo sapiens
  CDR3 for beta chain variable domain of TCR clone 64881 (TRBV19, TRBJ1-5)
CASSIAQQPQHF

SEQ ID NO: 129763 - protein, 12 aa, Homo sapiens
  CDR3 for alpha chain variable domain of TCR clone 64882 (TRAV12-1, TRAJ40)
CVVYSGTYKYIF

SEQ ID NO: 129764 - protein, 13 aa, Homo sapiens
  CDR3 for beta chain variable domain of TCR clone 64882 (TRBV10-3, TRBJ1-2)
CAISERDSYGYTF

SEQ ID NO: 129765 - protein, 15 aa, Homo sapiens
  CDR3 for alpha chain variable domain of TCR clone 64883 (TRAV3, TRAJ22)
CALRDRGGSARQLTF

SEQ ID NO: 129766 - protein, 13 aa, Homo sapiens
  CDR3 for beta chain variable domain of TCR clone 64883 (TRBV7-9, TRBJ1-2)
CASSLKQNYGYTF

SEQ ID NO: 129767 - protein, 14 aa, Homo sapiens
  CDR3 for alpha chain variable domain of TCR clone 64884 (TRAV9-2, TRAJ6)
CALSDPGGSYIPTF

SEQ ID NO: 129768 - protein, 11 aa, Homo sapiens
  CDR3 for beta chain variable domain of TCR clone 64884 (TRBV12-4, TRBJ1-2)
CASRGDRGYTF

SEQ ID NO: 129769 - protein, 15 aa, Homo sapiens
  CDR3 for alpha chain variable domain of TCR clone 64885 (TRAV13-1, TRAJ57)
QVPPLSQGGSEKLVF

SEQ ID NO: 129770 - protein, 15 aa, Homo sapiens
  CDR3 for beta chain variable domain of TCR clone 64885 (TRBV7-9, TRBJ1-6)
CASSSPGRGNSPLHF

SEQ ID NO: 129771 - protein, 11 aa, Homo sapiens
  CDR3 for alpha chain variable domain of TCR clone 64886 (TRAV12-2, TRAJ43)
CAAYNNNDMRF

SEQ ID NO: 129772 - protein, 14 aa, Homo sapiens
  CDR3 for beta chain variable domain of TCR clone 64886 (TRBV7-8, TRBJ1-2)
CASSAGTATYGYTF

SEQ ID NO: 129773 - protein, 14 aa, Homo sapiens
  CDR3 for alpha chain variable domain of TCR clone 64887 (TRAV27, TRAJ49)
CAGRPEGTGNQFYF

SEQ ID NO: 129774 - protein, 13 aa, Homo sapiens
  CDR3 for beta chain variable domain of TCR clone 64887 (TRBV11-2, TRBJ2-5)
CASSRGPSETQYF

SEQ ID NO: 129775 - protein, 16 aa, Homo sapiens
  CDR3 for alpha chain variable domain of TCR clone 64888 (TRAV26-1, TRAJ40)
CIVRGYPTSGAYKYIF

SEQ ID NO: 129776 - protein, 14 aa, Homo sapiens
  CDR3 for beta chain variable domain of TCR clone 64888 (TRBV5-1, TRBJ1-4)
CASSSGQGGEKLFF

SEQ ID NO: 129777 - protein, 11 aa, Homo sapiens
  CDR3 for alpha chain variable domain of TCR clone 64889 (TRAV26-1, TRAJ37)
CIVRVGRKLIF

SEQ ID NO: 129778 - protein, 13 aa, Homo sapiens
  CDR3 for beta chain variable domain of TCR clone 64889 (TRBV19, TRBJ1-2)
CASSVPGQDGYTF

SEQ ID NO: 129779 - protein, 13 aa, Homo sapiens
  CDR3 for alpha chain variable domain of TCR clone 64890 (TRAV21, TRAJ27)
CAARPGNAGKSTF

SEQ ID NO: 129780 - protein, 14 aa, Homo sapiens
  CDR3 for beta chain variable domain of TCR clone 64890 (TRBV11-2, TRBJ2-7)
CASSLGAGAYEQHF

SEQ ID NO: 129781 - protein, 12 aa, Homo sapiens
  CDR3 for alpha chain variable domain of TCR clone 64891 (TRAV2, TRAJ33)
CAFMDSNYQLIW

SEQ ID NO: 129782 - protein, 16 aa, Homo sapiens
  CDR3 for beta chain variable domain of TCR clone 64891 (TRBV2, TRBJ2-7)
CANSEPWTGPSYEQYF

SEQ ID NO: 129783 - protein, 14 aa, Homo sapiens
  CDR3 for alpha chain variable domain of TCR clone 64892 (TRAV3, TRAJ8)
CAALMNTGFQQLVF

SEQ ID NO: 129784 - protein, 15 aa, Homo sapiens
  CDR3 for beta chain variable domain of TCR clone 64892 (TRBV28, TRBJ2-5)
CASSLGLGNQETQYF

SEQ ID NO: 129785 - protein, 19 aa, Homo sapiens
  CDR3 for alpha chain variable domain of TCR clone 64893 (TRAV8-3, TRAJ8)
LSTSVLWDPMNTGFQKLVF

SEQ ID NO: 129786 - protein, 13 aa, Homo sapiens
  CDR3 for beta chain variable domain of TCR clone 64893 (TRBV10-2, TRBJ2-3)
CASSGSGDHTQYF

SEQ ID NO: 129787 - protein, 16 aa, Homo sapiens
  CDR3 for alpha chain variable domain of TCR clone 64894 (TRAV3, TRAJ37)
CAVRPHGSGNTGKLIF

SEQ ID NO: 129788 - protein, 14 aa, Homo sapiens
  CDR3 for beta chain variable domain of TCR clone 64894 (TRBV19, TRBJ2-7)
CASSIFAGTYEQYF

SEQ ID NO: 129789 - protein, 14 aa, Homo sapiens
  CDR3 for alpha chain variable domain of TCR clone 64895 (TRAV12-2, TRAJ17)
CAVNIKAAGNKLTF

SEQ ID NO: 129790 - protein, 16 aa, Homo sapiens
  CDR3 for beta chain variable domain of TCR clone 64895 (TRBV20-1, TRBJ2-6)
GSASSQGYDGANVLTF

SEQ ID NO: 129791 - protein, 12 aa, Homo sapiens
  CDR3 for alpha chain variable domain of TCR clone 64896 (TRAV13-2, TRAJ8)
FAPWLGFQKLVF

SEQ ID NO: 129792 - protein, 15 aa, Homo sapiens
  CDR3 for beta chain variable domain of TCR clone 64896 (TRBV12-4, TRBJ2-5)
CASSLSGAFQETQYF

SEQ ID NO: 129793 - protein, 12 aa, Homo sapiens
  CDR3 for alpha chain variable domain of TCR clone 64897 (TRAV21, TRAJ31)
CAVWGNNARLMF

SEQ ID NO: 129794 - protein, 14 aa, Homo sapiens
  CDR3 for beta chain variable domain of TCR clone 64897 (TRBV7-2, TRBJ2-3)
CASSQTGSSYTQYF

SEQ ID NO: 129795 - protein, 14 aa, Homo sapiens
  CDR3 for alpha chain variable domain of TCR clone 64898 (TRAV8-2, TRAJ36)
CVVSGGTGANNLFF

SEQ ID NO: 129796 - protein, 15 aa, Homo sapiens
  CDR3 for beta chain variable domain of TCR clone 64898 (TRBV7-3, TRBJ2-1)
CASSPTGGGEVEQFF

SEQ ID NO: 129797 - protein, 17 aa, Homo sapiens
  CDR3 for alpha chain variable domain of TCR clone 64899 (TRAV3, TRAJ6)
CAVRDGPRAGGSYIPTF

SEQ ID NO: 129798 - protein, 15 aa, Homo sapiens
  CDR3 for beta chain variable domain of TCR clone 64899 (TRBV27, TRBJ1-6)
CASSFDRGLGSPLHF

SEQ ID NO: 129799 - protein, 14 aa, Homo sapiens
  CDR3 for alpha chain variable domain of TCR clone 64900 (TRAV1-1, TRAJ27)
CAVIYNTNAGKSTF

SEQ ID NO: 129800 - protein, 13 aa, Homo sapiens
  CDR3 for beta chain variable domain of TCR clone 64900 (TRBV12-5, TRBJ1-2)
CASGVRTGNGYSF

SEQ ID NO: 129801 - protein, 14 aa, Homo sapiens
  CDR3 for alpha chain variable domain of TCR clone 64901 (TRAV35, TRAJ50)
CAGHRKTSYAKVIF

SEQ ID NO: 129802 - protein, 13 aa, Homo sapiens
  CDR3 for beta chain variable domain of TCR clone 64901 (TRBV7-7, TRBJ2-3)
CASSLSRADTQDF

SEQ ID NO: 129803 - protein, 13 aa, Homo sapiens
  CDR3 for alpha chain variable domain of TCR clone 64902 (TRAV21, TRAJ27)
CAARPGNAGKSTF

SEQ ID NO: 129804 - protein, 16 aa, Homo sapiens
  CDR3 for beta chain variable domain of TCR clone 64902 (TRBV12-4, TRBJ1-5)
CASSRPVGGSNQPQHF

SEQ ID NO: 129805 - protein, 14 aa, Homo sapiens
  CDR3 for alpha chain variable domain of TCR clone 64903 (TRAV2, TRAJ9)
CAVEDRSGGCKTIF

SEQ ID NO: 129806 - protein, 14 aa, Homo sapiens
  CDR3 for beta chain variable domain of TCR clone 64903 (TRBV18, TRBJ2-7)
CASSPRGGAYEQYF

SEQ ID NO: 129807 - protein, 14 aa, Homo sapiens
  CDR3 for alpha chain variable domain of TCR clone 64904 (TRAV38-1, TRAJ29)
CAFITPSGNTPLVF

SEQ ID NO: 129808 - protein, 14 aa, Homo sapiens
  CDR3 for beta chain variable domain of TCR clone 64904 (TRBV18, TRBJ2-7)
CASSPRGGAYEQYV

SEQ ID NO: 129809 - protein, 16 aa, Homo sapiens
  CDR3 for alpha chain variable domain of TCR clone 64905 (TRAV30, TRAJ24)
CGTEIVDADSWGKFQF

SEQ ID NO: 129810 - protein, 17 aa, Homo sapiens
  CDR3 for beta chain variable domain of TCR clone 64905 (TRBV5-1, TRBJ1-6)
CASSPSLQGSDNSPLHF

SEQ ID NO: 129811 - protein, 13 aa, Homo sapiens
  CDR3 for alpha chain variable domain of TCR clone 64906 (TRAV36/DV7, TRAJ57)
CAVVLGGSEKLVF

SEQ ID NO: 129812 - protein, 14 aa, Homo sapiens
  CDR3 for beta chain variable domain of TCR clone 64906 (TRBV4-1, TRBJ1-2)
CASSQDRQVRGYTF

SEQ ID NO: 129813 - protein, 14 aa, Homo sapiens
  CDR3 for alpha chain variable domain of TCR clone 64907 (TRAV29/DV5, TRAJ48)
CAAMALFGNEKLTF

SEQ ID NO: 129814 - protein, 17 aa, Homo sapiens
  CDR3 for beta chain variable domain of TCR clone 64907 (TRBV7-3, TRBJ2-3)
CASSLMKRMRGADTQYF

SEQ ID NO: 129815 - protein, 13 aa, Homo sapiens
  CDR3 for alpha chain variable domain of TCR clone 64908 (TRAV27, TRAJ57)
CAGVQGGSEKLVF

SEQ ID NO: 129816 - protein, 14 aa, Homo sapiens
  CDR3 for beta chain variable domain of TCR clone 64908 (TRBV20-1, TRBJ1-2)
CSGRKDGRAYGYTF

SEQ ID NO: 129817 - protein, 17 aa, Homo sapiens
  CDR3 for alpha chain variable domain of TCR clone 64909 (TRAV8-6, TRAJ58)
CAVSSWVGETSGSRLTF

SEQ ID NO: 129818 - protein, 14 aa, Homo sapiens
  CDR3 for beta chain variable domain of TCR clone 64909 (TRBV20-1, TRBJ2-1)
CSAQVGGSANEQFF

SEQ ID NO: 129819 - protein, 13 aa, Homo sapiens
  CDR3 for alpha chain variable domain of TCR clone 64910 (TRAV3, TRAJ21)
CAVREPDFNKFYF

SEQ ID NO: 129820 - protein, 16 aa, Homo sapiens
  CDR3 for beta chain variable domain of TCR clone 64910 (TRBV15, TRBJ2-3)
CATSRDLGIVTDTQYF

SEQ ID NO: 129821 - protein, 12 aa, Homo sapiens
  CDR3 for alpha chain variable domain of TCR clone 64911 (TRAV27, TRAJ33)
CAGDGSNYQLIW

SEQ ID NO: 129822 - protein, 14 aa, Homo sapiens
  CDR3 for beta chain variable domain of TCR clone 64911 (TRBV20-1, TRBJ1-1)
CSAQTRIGGTEAFF

SEQ ID NO: 129823 - protein, 15 aa, Homo sapiens
  CDR3 for alpha chain variable domain of TCR clone 64912 (TRAV4, TRAJ39)
CLVGPNNSAGNMPTF

SEQ ID NO: 129824 - protein, 16 aa, Homo sapiens
  CDR3 for beta chain variable domain of TCR clone 64912 (TRBV13, TRBJ2-2)
CASGPRTGEHTGELFF

SEQ ID NO: 129825 - protein, 14 aa, Homo sapiens
  CDR3 for alpha chain variable domain of TCR clone 64913 (TRAV12-1, TRAJ12)
CVVNGRDSSYKLIF

SEQ ID NO: 129826 - protein, 13 aa, Homo sapiens
  CDR3 for beta chain variable domain of TCR clone 64913 (TRBV28, TRBJ2-2)
CASIRESTGELFS

SEQ ID NO: 129827 - protein, 17 aa, Homo sapiens
  CDR3 for alpha chain variable domain of TCR clone 64914 (TRAV23/DV6, TRAJ57)
CAASSTLSQGGSEKLVF

SEQ ID NO: 129828 - protein, 15 aa, Homo sapiens
  CDR3 for beta chain variable domain of TCR clone 64914 (TRBV9, TRBJ2-1)
CASSLAGSSYNEQFF

SEQ ID NO: 129829 - protein, 16 aa, Homo sapiens
  CDR3 for alpha chain variable domain of TCR clone 64915 (TRAV16, TRAJ52)
CALSAAGGTSYGKLTF

SEQ ID NO: 129830 - protein, 17 aa, Homo sapiens
  CDR3 for beta chain variable domain of TCR clone 64915 (TRBV11-2, TRBJ2-1)
CASSLYPPGVEYNEQFL

SEQ ID NO: 129831 - protein, 13 aa, Homo sapiens
  CDR3 for alpha chain variable domain of TCR clone 64916 (TRAV12-1, TRAJ7)
CVVNMRGNNRLSF

SEQ ID NO: 129832 - protein, 15 aa, Homo sapiens
  CDR3 for beta chain variable domain of TCR clone 64916 (TRBV27, TRBJ2-3)
CASSLGLAATDTQYF

SEQ ID NO: 129833 - protein, 16 aa, Homo sapiens
  CDR3 for alpha chain variable domain of TCR clone 64917 (TRAV3, TRAJ10)
CAVRDMMAGGGNKLTF

SEQ ID NO: 129834 - protein, 14 aa, Homo sapiens
  CDR3 for beta chain variable domain of TCR clone 64917 (TRBV25-1, TRBJ1-1)
CASTHLGGNTEAFF

SEQ ID NO: 129835 - protein, 15 aa, Homo sapiens
  CDR3 for alpha chain variable domain of TCR clone 64918 (TRAV8-3, TRAJ32)
CAVGPYSGATNKLIF

SEQ ID NO: 129836 - protein, 14 aa, Homo sapiens
  CDR3 for beta chain variable domain of TCR clone 64918 (TRBV29-1, TRBJ2-2)
CSVLAETNTGELFF

SEQ ID NO: 129837 - protein, 14 aa, Homo sapiens
  CDR3 for alpha chain variable domain of TCR clone 64919 (TRAV9-2, TRAJ39)
CALYIYNAGNMLTF

SEQ ID NO: 129838 - protein, 13 aa, Homo sapiens
  CDR3 for beta chain variable domain of TCR clone 64919 (TRBV20-1, TRBJ2-2)
CSALSGGAGELFF

SEQ ID NO: 129839 - protein, 14 aa, Homo sapiens
  CDR3 for alpha chain variable domain of TCR clone 64920 (TRAV13-1, TRAJ44)
CAAKATGTASKLTF

SEQ ID NO: 129840 - protein, 17 aa, Homo sapiens
  CDR3 for beta chain variable domain of TCR clone 64920 (TRBV7-3, TRBJ2-3)
CASSLMKRMRGADTQYC

SEQ ID NO: 129841 - protein, 15 aa, Homo sapiens
  CDR3 for alpha chain variable domain of TCR clone 64921 (TRAV12-3, TRAJ6)
CTMSATTGGSYIPTF

SEQ ID NO: 129842 - protein, 16 aa, Homo sapiens
  CDR3 for beta chain variable domain of TCR clone 64921 (TRBV27, TRBJ2-5)
CASSFGPGGTKETQYF

SEQ ID NO: 129843 - protein, 15 aa, Homo sapiens
  CDR3 for alpha chain variable domain of TCR clone 64922 (TRAV12-1, TRAJ44)
CVVDTPQGTASKLTF

SEQ ID NO: 129844 - protein, 12 aa, Homo sapiens
  CDR3 for beta chain variable domain of TCR clone 64922 (TRBV11-2, TRBJ2-2)
CASSLGGGELFF

SEQ ID NO: 129845 - protein, 12 aa, Homo sapiens
  CDR3 for alpha chain variable domain of TCR clone 64923 (TRAV21, TRAJ45)
CAAGGGADGLTF

SEQ ID NO: 129846 - protein, 18 aa, Homo sapiens
  CDR3 for beta chain variable domain of TCR clone 64923 (TRBV4-1, TRBJ2-3)
CASSQGGASGGATDTQYF

SEQ ID NO: 129847 - protein, 17 aa, Homo sapiens
  CDR3 for alpha chain variable domain of TCR clone 64924 (TRAV3, TRAJ12)
CAVRDGGRMDSSYKLIF

SEQ ID NO: 129848 - protein, 13 aa, Homo sapiens
  CDR3 for beta chain variable domain of TCR clone 64924 (TRBV12-4, TRBJ1-2)
CASGLRQGKGYTF

SEQ ID NO: 129849 - protein, 11 aa, Homo sapiens
  CDR3 for alpha chain variable domain of TCR clone 64925 (TRAV21, TRAJ34)
CAVTNTDKLIF

SEQ ID NO: 129850 - protein, 17 aa, Homo sapiens
  CDR3 for beta chain variable domain of TCR clone 64925 (TRBV20-1, TRBJ2-1)
CSARSPSGGPPTMSSSP

SEQ ID NO: 129851 - protein, 22 aa, Homo sapiens
  CDR3 for alpha chain variable domain of TCR clone 64926 (TRAV8-3, TRAJ8)
CAVGPNEHRLSETCIWNWHPTS

SEQ ID NO: 129852 - protein, 18 aa, Homo sapiens
  CDR3 for beta chain variable domain of TCR clone 64926 (TRBV7-6, TRBJ2-1)
CASSPRTSGMSSYNEQFF

SEQ ID NO: 129853 - protein, 13 aa, Homo sapiens
  CDR3 for alpha chain variable domain of TCR clone 64927 (TRAV30, TRAJ24)
CGTVTDSWGKLQF

SEQ ID NO: 129854 - protein, 14 aa, Homo sapiens
  CDR3 for beta chain variable domain of TCR clone 64927 (TRBV19, TRBJ2-1)
CASPTFVLSGEQFF

SEQ ID NO: 129855 - protein, 14 aa, Homo sapiens
  CDR3 for alpha chain variable domain of TCR clone 64928 (TRAV27, TRAJ22)
CAGLPSGSARQLTF

SEQ ID NO: 129856 - protein, 16 aa, Homo sapiens
  CDR3 for beta chain variable domain of TCR clone 64928 (TRBV7-3, TRBJ2-2)
CASSLRRGTLSGELFF

SEQ ID NO: 129857 - protein, 14 aa, Homo sapiens
  CDR3 for alpha chain variable domain of TCR clone 64929 (TRAV1-2, TRAJ8)
CAVREDTGFQKLVF

SEQ ID NO: 129858 - protein, 13 aa, Homo sapiens
  CDR3 for beta chain variable domain of TCR clone 64929 (TRBV2, TRBJ1-4)
CASSERAGEKLFF

SEQ ID NO: 129859 - protein, 15 aa, Homo sapiens
  CDR3 for alpha chain variable domain of TCR clone 64930 (TRAV8-3, TRAJ27)
CDVGPSKTNAGKSTF

SEQ ID NO: 129860 - protein, 15 aa, Homo sapiens
  CDR3 for beta chain variable domain of TCR clone 64930 (TRBV7-2, TRBJ2-1)
CAGSSGLAGGNEQFF

SEQ ID NO: 129861 - protein, 13 aa, Homo sapiens
  CDR3 for alpha chain variable domain of TCR clone 64931 (TRAV2, TRAJ15)
CAVEAQAGTALIF

SEQ ID NO: 129862 - protein, 18 aa, Homo sapiens
  CDR3 for beta chain variable domain of TCR clone 64931 (TRBV7-6, TRBJ2-1)
CASSPRTSGMSSYNEQFF

SEQ ID NO: 129863 - protein, 15 aa, Homo sapiens
  CDR3 for alpha chain variable domain of TCR clone 64932 (TRAV3, TRAJ45)
CAVRTPWGGADGLTF

SEQ ID NO: 129864 - protein, 12 aa, Homo sapiens
  CDR3 for beta chain variable domain of TCR clone 64932 (TRBV11-2, TRBJ2-2)
CASSLGGGELFF

SEQ ID NO: 129865 - protein, 11 aa, Homo sapiens
  CDR3 for alpha chain variable domain of TCR clone 64933 (TRAV12-3, TRAJ17)
CNDAYRHKLTF

SEQ ID NO: 129866 - protein, 15 aa, Homo sapiens
  CDR3 for beta chain variable domain of TCR clone 64933 (TRBV20-1, TRBJ2-7)
CSARDRVSGMDEQYF

SEQ ID NO: 129867 - protein, 12 aa, Homo sapiens
  CDR3 for alpha chain variable domain of TCR clone 64934 (TRAV2, TRAJ20)
CAVHRNDYKLSF

SEQ ID NO: 129868 - protein, 15 aa, Homo sapiens
  CDR3 for beta chain variable domain of TCR clone 64934 (TRBV4-1, TRBJ2-2)
CASSQETGRAGELFF

SEQ ID NO: 129869 - protein, 14 aa, Homo sapiens
  CDR3 for alpha chain variable domain of TCR clone 64935 (TRAV12-2, TRAJ13)
CAVKKTGGYQKVTF

SEQ ID NO: 129870 - protein, 13 aa, Homo sapiens
  CDR3 for beta chain variable domain of TCR clone 64935 (TRBV5-5, TRBJ1-2)
CASSFWRGEDYTF

SEQ ID NO: 129871 - protein, 15 aa, Homo sapiens
  CDR3 for alpha chain variable domain of TCR clone 64936 (TRAV23/DV6, TRAJ44)
CAARTLTGTASKLTF

SEQ ID NO: 129872 - protein, 17 aa, Homo sapiens
  CDR3 for beta chain variable domain of TCR clone 64936 (TRBV24-1, TRBJ2-1)
CATSGVSTSGTYNEQFF

SEQ ID NO: 129873 - protein, 14 aa, Homo sapiens
  CDR3 for alpha chain variable domain of TCR clone 64937 (TRAV12-3, TRAJ15)
CAMIPPQAGTALIL

SEQ ID NO: 129874 - protein, 12 aa, Homo sapiens
  CDR3 for beta chain variable domain of TCR clone 64937 (TRBV11-2, TRBJ2-2)
CASSLGGGELFF

SEQ ID NO: 129875 - protein, 12 aa, Homo sapiens
  CDR3 for alpha chain variable domain of TCR clone 64938 (TRAV12-3, TRAJ17)
CAMTLTGNKLTF

SEQ ID NO: 129876 - protein, 13 aa, Homo sapiens
  CDR3 for beta chain variable domain of TCR clone 64938 (TRBV13, TRBJ2-5)
CASSPEVGETQYF

SEQ ID NO: 129877 - protein, 15 aa, Homo sapiens
  CDR3 for alpha chain variable domain of TCR clone 64939 (TRAV1-1, TRAJ23)
CAVRVYYNQGGKLIF

SEQ ID NO: 129878 - protein, 13 aa, Homo sapiens
  CDR3 for beta chain variable domain of TCR clone 64939 (TRBV7-2, TRBJ1-1)
CASSLTENTEAFF

SEQ ID NO: 129879 - protein, 13 aa, Homo sapiens
  CDR3 for alpha chain variable domain of TCR clone 64940 (TRAV38-1, TRAJ42)
CARWGGSQGNLIF

SEQ ID NO: 129880 - protein, 17 aa, Homo sapiens
  CDR3 for beta chain variable domain of TCR clone 64940 (TRBV4-1, TRBJ1-4)
CASSQEGPRGVEEKLFF

SEQ ID NO: 129881 - protein, 14 aa, Homo sapiens
  CDR3 for alpha chain variable domain of TCR clone 64941 (TRAV13-2, TRAJ43)
CAEIPTYTNNDMRF

SEQ ID NO: 129882 - protein, 15 aa, Homo sapiens
  CDR3 for beta chain variable domain of TCR clone 64941 (TRBV7-9, TRBJ2-2)
CASGPLDTFPGELFF

SEQ ID NO: 129883 - protein, 15 aa, Homo sapiens
  CDR3 for alpha chain variable domain of TCR clone 64942 (TRAV3, TRAJ4)
CAVRDGTGGYHKLIF

SEQ ID NO: 129884 - protein, 16 aa, Homo sapiens
  CDR3 for beta chain variable domain of TCR clone 64942 (TRBV27, TRBJ2-2)
CASSSSGVSNTGELFF

SEQ ID NO: 129885 - protein, 16 aa, Homo sapiens
  CDR3 for alpha chain variable domain of TCR clone 64943 (TRAV14/DV4, TRAJ54)
CAMREGRIQGAQKLVF

SEQ ID NO: 129886 - protein, 13 aa, Homo sapiens
  CDR3 for beta chain variable domain of TCR clone 64943 (TRBV12-4, TRBJ1-1)
CASSPGTGFEAFF

SEQ ID NO: 129887 - protein, 12 aa, Homo sapiens
  CDR3 for alpha chain variable domain of TCR clone 64944 (TRAV13-1, TRAJ21)
CAAKEGFNRSYF

SEQ ID NO: 129888 - protein, 14 aa, Homo sapiens
  CDR3 for beta chain variable domain of TCR clone 64944 (TRBV5-4, TRBJ1-1)
CASSLDSRRDEAFF

SEQ ID NO: 129889 - protein, 13 aa, Homo sapiens
  CDR3 for alpha chain variable domain of TCR clone 64945 (TRAV13-1, TRAJ21)
CAASIYNFNKFYF

SEQ ID NO: 129890 - protein, 15 aa, Homo sapiens
  CDR3 for beta chain variable domain of TCR clone 64945 (TRBV11-3, TRBJ2-3)
CASLKDGREGDTQYF

SEQ ID NO: 129891 - protein, 13 aa, Homo sapiens
  CDR3 for alpha chain variable domain of TCR clone 64946 (TRAV8-1, TRAJ23)
CAVTGGQGGRLIF

SEQ ID NO: 129892 - protein, 14 aa, Homo sapiens
  CDR3 for beta chain variable domain of TCR clone 64946 (TRBV20-1, TRBJ1-1)
CSAQTRIGGTEAFF

SEQ ID NO: 129893 - protein, 15 aa, Homo sapiens
  CDR3 for alpha chain variable domain of TCR clone 64947 (TRAV25, TRAJ52)
CAGRPGGTSYGKLTF

SEQ ID NO: 129894 - protein, 14 aa, Homo sapiens
  CDR3 for beta chain variable domain of TCR clone 64947 (TRBV7-2, TRBJ2-7)
CASRSQGAAYEQYF

SEQ ID NO: 129895 - protein, 13 aa, Homo sapiens
  CDR3 for alpha chain variable domain of TCR clone 64948 (TRAV16, TRAJ22)
SAMLAGSARQLTF

SEQ ID NO: 129896 - protein, 18 aa, Homo sapiens
  CDR3 for beta chain variable domain of TCR clone 64948 (TRBV7-2, TRBJ2-3)
CASSLETSRGRKAGTQYF

SEQ ID NO: 129897 - protein, 13 aa, Homo sapiens
  CDR3 for alpha chain variable domain of TCR clone 64949 (TRAV29/DV5, TRAJ44)
CAASTGTASKLTF

SEQ ID NO: 129898 - protein, 13 aa, Homo sapiens
  CDR3 for beta chain variable domain of TCR clone 64949 (TRBV7-9, TRBJ1-2)
CASSLKQNYGYTF

SEQ ID NO: 129899 - protein, 13 aa, Homo sapiens
  CDR3 for alpha chain variable domain of TCR clone 64950 (TRAV3, TRAJ21)
CAVREPDFNKFYF

SEQ ID NO: 129900 - protein, 15 aa, Homo sapiens
  CDR3 for beta chain variable domain of TCR clone 64950 (TRBV2, TRBJ2-7)
CASSEGLARSYEQYF

SEQ ID NO: 129901 - protein, 11 aa, Homo sapiens
  CDR3 for alpha chain variable domain of TCR clone 64951 (TRAV8-4, TRAJ20)
CAVTNVLTTTR

SEQ ID NO: 129902 - protein, 16 aa, Homo sapiens
  CDR3 for beta chain variable domain of TCR clone 64951 (TRBV6-1, TRBJ1-2)
CASSGAWQGRSHGYTF

SEQ ID NO: 129903 - protein, 14 aa, Homo sapiens
  CDR3 for alpha chain variable domain of TCR clone 64952 (TRAV12-2, TRAJ15)
CAPHTGPAGTALIF

SEQ ID NO: 129904 - protein, 17 aa, Homo sapiens
  CDR3 for beta chain variable domain of TCR clone 64952 (TRBV5-5, TRBJ1-2)
CASSLGSLDGQSEGYTF

SEQ ID NO: 129905 - protein, 12 aa, Homo sapiens
  CDR3 for alpha chain variable domain of TCR clone 64953 (TRAV2, TRAJ23)
CAVEDVGGKLIF

SEQ ID NO: 129906 - protein, 16 aa, Homo sapiens
  CDR3 for beta chain variable domain of TCR clone 64953 (TRBV7-9, TRBJ1-2)
CASSLGFSSGEDGYTF

SEQ ID NO: 129907 - protein, 18 aa, Homo sapiens
  CDR3 for alpha chain variable domain of TCR clone 64954 (TRAV13-1, TRAJ52)
CAAKNPNAGGTSYGKLTF

SEQ ID NO: 129908 - protein, 16 aa, Homo sapiens
  CDR3 for beta chain variable domain of TCR clone 64954 (TRBV28, TRBJ1-5)
CASSLTGQGWNQPQHF

SEQ ID NO: 129909 - protein, 14 aa, Homo sapiens
  CDR3 for alpha chain variable domain of TCR clone 64955 (TRAV4, TRAJ20)
CLVGDKVTTTSSAL

SEQ ID NO: 129910 - protein, 15 aa, Homo sapiens
  CDR3 for beta chain variable domain of TCR clone 64955 (TRBV18, TRBJ2-7)
CASSPSSTGNYEQYF

SEQ ID NO: 129911 - protein, 13 aa, Homo sapiens
  CDR3 for alpha chain variable domain of TCR clone 64956 (TRAV26-2, TRAJ43)
CILRAVNNNDMHF

SEQ ID NO: 129912 - protein, 15 aa, Homo sapiens
  CDR3 for beta chain variable domain of TCR clone 64956 (TRBV7-2, TRBJ2-1)
CASTHGTGIYNEQFF

SEQ ID NO: 129913 - protein, 12 aa, Homo sapiens
  CDR3 for alpha chain variable domain of TCR clone 64957 (TRAV12-3, TRAJ39)
CAMTQAGNMITF

SEQ ID NO: 129914 - protein, 13 aa, Homo sapiens
  CDR3 for beta chain variable domain of TCR clone 64957 (TRBV20-1, TRBJ1-1)
CSAPEGGNTEAFF

SEQ ID NO: 129915 - protein, 13 aa, Homo sapiens
  CDR3 for alpha chain variable domain of TCR clone 64958 (TRAV12-2, TRAJ9)
CAGGNTGGFKTIF

SEQ ID NO: 129916 - protein, 16 aa, Homo sapiens
  CDR3 for beta chain variable domain of TCR clone 64958 (TRBV4-1, TRBJ2-1)
RQQPGPRGGLYNEQFF

SEQ ID NO: 129917 - protein, 13 aa, Homo sapiens
  CDR3 for alpha chain variable domain of TCR clone 64959 (TRAV12-1, TRAJ22)
CVASGGSARQLTF

SEQ ID NO: 129918 - protein, 14 aa, Homo sapiens
  CDR3 for beta chain variable domain of TCR clone 64959 (TRBV13, TRBJ2-5)
CASSLERVGETQYF

SEQ ID NO: 129919 - protein, 14 aa, Homo sapiens
  CDR3 for alpha chain variable domain of TCR clone 64960 (TRAV2, TRAJ37)
CAVDFTSNTGKLIF

SEQ ID NO: 129920 - protein, 15 aa, Homo sapiens
  CDR3 for beta chain variable domain of TCR clone 64960 (TRBV5-1, TRBJ2-3)
CASSYTSGSTDTQYF

SEQ ID NO: 129921 - protein, 12 aa, Homo sapiens
  CDR3 for alpha chain variable domain of TCR clone 64961 (TRAV20, TRAJ39)
CAVGNAGNILTF

SEQ ID NO: 129922 - protein, 16 aa, Homo sapiens
  CDR3 for beta chain variable domain of TCR clone 64961 (TRBV15, TRBJ1-2)
CATSRGPRTGGGGYTF

SEQ ID NO: 129923 - protein, 18 aa, Homo sapiens
  CDR3 for alpha chain variable domain of TCR clone 64962 (TRAV9-2, TRAJ52)
CTLSRHNAGGTSYGKLTF

SEQ ID NO: 129924 - protein, 13 aa, Homo sapiens
  CDR3 for beta chain variable domain of TCR clone 64962 (TRBV7-9, TRBJ1-2)
CASSLKQNYGYTF

SEQ ID NO: 129925 - protein, 13 aa, Homo sapiens
  CDR3 for alpha chain variable domain of TCR clone 64963 (TRAV1-2, TRAJ11)
CAVGREGYSTFTF

SEQ ID NO: 129926 - protein, 14 aa, Homo sapiens
  CDR3 for beta chain variable domain of TCR clone 64963 (TRBV14, TRBJ2-7)
CASRHRDKPYEQYF

SEQ ID NO: 129927 - protein, 14 aa, Homo sapiens
  CDR3 for alpha chain variable domain of TCR clone 64964 (TRAV1-1, TRAJ30)
CAVRSLNRDDEIIF

SEQ ID NO: 129928 - protein, 14 aa, Homo sapiens
  CDR3 for beta chain variable domain of TCR clone 64964 (TRBV12-5, TRBJ2-5)
CASGSRTHQETQYF

SEQ ID NO: 129929 - protein, 13 aa, Homo sapiens
  CDR3 for alpha chain variable domain of TCR clone 64965 (TRAV12-3, TRAJ13)
CAVGTGGYQKVTF

SEQ ID NO: 129930 - protein, 14 aa, Homo sapiens
  CDR3 for beta chain variable domain of TCR clone 64965 (TRBV7-2, TRBJ2-5)
CASSTGGELKTQYF

SEQ ID NO: 129931 - protein, 16 aa, Homo sapiens
  CDR3 for alpha chain variable domain of TCR clone 64966 (TRAV16, TRAJ52)
CALSGVGGTSYGKLTF

SEQ ID NO: 129932 - protein, 13 aa, Homo sapiens
  CDR3 for beta chain variable domain of TCR clone 64966 (TRBV6-5, TRBJ2-5)
CASSPQGGETQYF

SEQ ID NO: 129933 - protein, 12 aa, Homo sapiens
  CDR3 for alpha chain variable domain of TCR clone 64967 (TRAV38-2/DV8, TRAJ47)
CVLMEYGNKLVF

SEQ ID NO: 129934 - protein, 14 aa, Homo sapiens
  CDR3 for beta chain variable domain of TCR clone 64967 (TRBV20-1, TRBJ1-5)
CSATDRGSNQPQHL

SEQ ID NO: 129935 - protein, 17 aa, Homo sapiens
  CDR3 for alpha chain variable domain of TCR clone 64968 (TRAV3, TRAJ42)
CAVRDRDYGGSKGNLIF

SEQ ID NO: 129936 - protein, 13 aa, Homo sapiens
  CDR3 for beta chain variable domain of TCR clone 64968 (TRBV10-3, TRBJ2-7)
CASKLAVNYEQYF

SEQ ID NO: 129937 - protein, 15 aa, Homo sapiens
  CDR3 for alpha chain variable domain of TCR clone 64969 (TRAV29/DV5, TRAJ29)
CAASERSSGNTPLVF

SEQ ID NO: 129938 - protein, 15 aa, Homo sapiens
  CDR3 for beta chain variable domain of TCR clone 64969 (TRBV11-3, TRBJ2-7)
CASSPGPASSYEQYF

SEQ ID NO: 129939 - protein, 14 aa, Homo sapiens
  CDR3 for alpha chain variable domain of TCR clone 64970 (TRAV35, TRAJ22)
CAGLRPGSARQLTF

SEQ ID NO: 129940 - protein, 16 aa, Homo sapiens
  CDR3 for beta chain variable domain of TCR clone 64970 (TRBV6-5, TRBJ2-7)
CASSPGGREWTYEQYF

SEQ ID NO: 129941 - protein, 14 aa, Homo sapiens
  CDR3 for alpha chain variable domain of TCR clone 64971 (TRAV12-2, TRAJ40)
CAVKIPSGTYKYIF

SEQ ID NO: 129942 - protein, 16 aa, Homo sapiens
  CDR3 for beta chain variable domain of TCR clone 64971 (TRBV24-1, TRBJ2-3)
CATSDPGTGATDTQYF

SEQ ID NO: 129943 - protein, 13 aa, Homo sapiens
  CDR3 for alpha chain variable domain of TCR clone 64972 (TRAV21, TRAJ57)
CAVTQGGSEKLVF

SEQ ID NO: 129944 - protein, 15 aa, Homo sapiens
  CDR3 for beta chain variable domain of TCR clone 64972 (TRBV5-1, TRBJ1-1)
CASSSTTGTNSEAFF

SEQ ID NO: 129945 - protein, 12 aa, Homo sapiens
  CDR3 for alpha chain variable domain of TCR clone 64973 (TRAV35, TRAJ30)
CAGQLADDKIIF

SEQ ID NO: 129946 - protein, 17 aa, Homo sapiens
  CDR3 for beta chain variable domain of TCR clone 64973 (TRBV4-2, TRBJ2-5)
CASSPGRWRSFQETQYF

SEQ ID NO: 129947 - protein, 11 aa, Homo sapiens
  CDR3 for alpha chain variable domain of TCR clone 64974 (TRAV12-1, TRAJ34)
CVVNKGRELIF

SEQ ID NO: 129948 - protein, 13 aa, Homo sapiens
  CDR3 for beta chain variable domain of TCR clone 64974 (TRBV7-9, TRBJ1-2)
CASSLKQNYGYTF

SEQ ID NO: 129949 - protein, 12 aa, Homo sapiens
  CDR3 for alpha chain variable domain of TCR clone 64975 (TRAV12-3, TRAJ21)
CAMFNNFNKFYF

SEQ ID NO: 129950 - protein, 16 aa, Homo sapiens
  CDR3 for beta chain variable domain of TCR clone 64975 (TRBV7-9, TRBJ1-2)
CASNLAPLRAAYGYTF

SEQ ID NO: 129951 - protein, 17 aa, Homo sapiens
  CDR3 for alpha chain variable domain of TCR clone 64976 (TRAV35, TRAJ52)
CAGQLAVGGTSYGKLTF

SEQ ID NO: 129952 - protein, 12 aa, Homo sapiens
  CDR3 for beta chain variable domain of TCR clone 64976 (TRBV20-1, TRBJ2-7)
CSAGRRQSEQYF

SEQ ID NO: 129953 - protein, 13 aa, Homo sapiens
  CDR3 for alpha chain variable domain of TCR clone 64977 (TRAV23/DV6, TRAJ45)
CAAGRGGADGLTF

SEQ ID NO: 129954 - protein, 14 aa, Homo sapiens
  CDR3 for beta chain variable domain of TCR clone 64977 (TRBV7-2, TRBJ2-3)
CASSLARGTDTQYF

SEQ ID NO: 129955 - protein, 18 aa, Homo sapiens
  CDR3 for alpha chain variable domain of TCR clone 64978 (TRAV26-1, TRAJ52)
CIVRVEGAGCTSYGKLTF

SEQ ID NO: 129956 - protein, 13 aa, Homo sapiens
  CDR3 for beta chain variable domain of TCR clone 64978 (TRBV7-3, TRBJ1-2)
CASSLKRGYGYTF

SEQ ID NO: 129957 - protein, 12 aa, Homo sapiens
  CDR3 for alpha chain variable domain of TCR clone 64979 (TRAV17, TRAJ12)
CATLRSSYKLIF

SEQ ID NO: 129958 - protein, 16 aa, Homo sapiens
  CDR3 for beta chain variable domain of TCR clone 64979 (TRBV28, TRBJ2-7)
CASSLFFETGGSEQYF

SEQ ID NO: 129959 - protein, 16 aa, Homo sapiens
  CDR3 for alpha chain variable domain of TCR clone 64980 (TRAV3, TRAJ27)
CAVRDPRGTNAGKSTF

SEQ ID NO: 129960 - protein, 17 aa, Homo sapiens
  CDR3 for beta chain variable domain of TCR clone 64980 (TRBV4-1, TRBJ2-7)
CASSQGRGLQTSYEQYF

SEQ ID NO: 129961 - protein, 12 aa, Homo sapiens
  CDR3 for alpha chain variable domain of TCR clone 64981 (TRAV12-3, TRAJ42)
CAPGGSQGNLIF

SEQ ID NO: 129962 - protein, 13 aa, Homo sapiens
  CDR3 for beta chain variable domain of TCR clone 64981 (TRBV20-1, TRBJ1-1)
SAVLGGGNTEAFF

SEQ ID NO: 129963 - protein, 14 aa, Homo sapiens
  CDR3 for alpha chain variable domain of TCR clone 64982 (TRAV1-1, TRAJ27)
CAVICNTSAGKSTF

SEQ ID NO: 129964 - protein, 15 aa, Homo sapiens
  CDR3 for beta chain variable domain of TCR clone 64982 (TRBV7-2, TRBJ2-1)
CASSSGLAGGNEQFF

SEQ ID NO: 129965 - protein, 16 aa, Homo sapiens
  CDR3 for alpha chain variable domain of TCR clone 64983 (TRAV12-2, TRAJ45)
CAVRRNPGGGADGLTF

SEQ ID NO: 129966 - protein, 12 aa, Homo sapiens
  CDR3 for beta chain variable domain of TCR clone 64983 (TRBV6-1, TRBJ2-5)
CASSEGRETQYF

SEQ ID NO: 129967 - protein, 12 aa, Homo sapiens
  CDR3 for alpha chain variable domain of TCR clone 64984 (TRAV2, TRAJ31)
CAMEDNNARLMF

SEQ ID NO: 129968 - protein, 16 aa, Homo sapiens
  CDR3 for beta chain variable domain of TCR clone 64984 (TRBV10-3, TRBJ2-1)
CAISGVGDGGGGEQFF

SEQ ID NO: 129969 - protein, 12 aa, Homo sapiens
  CDR3 for alpha chain variable domain of TCR clone 64985 (TRAV12-3, TRAJ17)
CAMTLTGNKLTF

SEQ ID NO: 129970 - protein, 14 aa, Homo sapiens
  CDR3 for beta chain variable domain of TCR clone 64985 (TRBV7-2, TRBJ2-7)
CASSLPPGQGPQYF

SEQ ID NO: 129971 - protein, 13 aa, Homo sapiens
  CDR3 for alpha chain variable domain of TCR clone 64986 (TRAV12-1, TRAJ33)
CGDAPDSNYQLIW

SEQ ID NO: 129972 - protein, 15 aa, Homo sapiens
  CDR3 for beta chain variable domain of TCR clone 64986 (TRBV27, TRBJ2-1)
CASGNGGGSSNEQFF

SEQ ID NO: 129973 - protein, 16 aa, Homo sapiens
  CDR3 for alpha chain variable domain of TCR clone 64987 (TRAV26-1, TRAJ37)
CIVRGDGSGNTGKLIF

SEQ ID NO: 129974 - protein, 17 aa, Homo sapiens
  CDR3 for beta chain variable domain of TCR clone 64987 (TRBV4-1, TRBJ2-7)
CASSRDPLGVRRGEQYF

SEQ ID NO: 129975 - protein, 12 aa, Homo sapiens
  CDR3 for alpha chain variable domain of TCR clone 64988 (TRAV22, TRAJ22)
CAPGGSARQLTF

SEQ ID NO: 129976 - protein, 15 aa, Homo sapiens
  CDR3 for beta chain variable domain of TCR clone 64988 (TRBV9, TRBJ2-1)
CASSLAGSSYNEQFF

SEQ ID NO: 129977 - protein, 16 aa, Homo sapiens
  CDR3 for alpha chain variable domain of TCR clone 64989 (TRAV16, TRAJ4)
CALSRMSSGGYNKLIF

SEQ ID NO: 129978 - protein, 13 aa, Homo sapiens
  CDR3 for beta chain variable domain of TCR clone 64989 (TRBV7-3, TRBJ2-7)
CASSQAGGYEQYF

SEQ ID NO: 129979 - protein, 15 aa, Homo sapiens
  CDR3 for alpha chain variable domain of TCR clone 64990 (TRAV12-3, TRAJ6)
CAMSATTGGSYIPTF

SEQ ID NO: 129980 - protein, 16 aa, Homo sapiens
  CDR3 for beta chain variable domain of TCR clone 64990 (TRBV20-1, TRBJ1-2)
CSASMGQGVANYCYTF

SEQ ID NO: 129981 - protein, 14 aa, Homo sapiens
  CDR3 for alpha chain variable domain of TCR clone 64991 (TRAV29/DV5, TRAJ44)
CAAFLVGTASKLTF

SEQ ID NO: 129982 - protein, 16 aa, Homo sapiens
  CDR3 for beta chain variable domain of TCR clone 64991 (TRBV20-1, TRBJ1-4)
CSAPGQGLLTNEKLFF

SEQ ID NO: 129983 - protein, 12 aa, Homo sapiens
  CDR3 for alpha chain variable domain of TCR clone 64992 (TRAV35, TRAJ49)
CAGWNTGNQFYF

SEQ ID NO: 129984 - protein, 16 aa, Homo sapiens
  CDR3 for beta chain variable domain of TCR clone 64992 (TRBV5-1, TRBJ2-2)
CASSLWDTTNSGELFF

SEQ ID NO: 129985 - protein, 13 aa, Homo sapiens
  CDR3 for alpha chain variable domain of TCR clone 64993 (TRAV2, TRAJ15)
CAVASQAGTALIF

SEQ ID NO: 129986 - protein, 16 aa, Homo sapiens
  CDR3 for beta chain variable domain of TCR clone 64993 (TRBV5-5, TRBJ2-2)
CASSGRREGATGELFF

SEQ ID NO: 129987 - protein, 14 aa, Homo sapiens
  CDR3 for alpha chain variable domain of TCR clone 64994 (TRAV17, TRAJ16)
CATADFSDGQKLLF

SEQ ID NO: 129988 - protein, 15 aa, Homo sapiens
  CDR3 for beta chain variable domain of TCR clone 64994 (TRBV18, TRBJ2-1)
CTSSPPSASYNEQFF

SEQ ID NO: 129989 - protein, 16 aa, Homo sapiens
  CDR3 for alpha chain variable domain of TCR clone 64995 (TRAV3, TRAJ37)
CAVRGKGSGNTGKLIL

SEQ ID NO: 129990 - protein, 15 aa, Homo sapiens
  CDR3 for beta chain variable domain of TCR clone 64995 (TRBV5-1, TRBJ2-7)
CASSLNGGPAREQYF

SEQ ID NO: 129991 - protein, 14 aa, Homo sapiens
  CDR3 for alpha chain variable domain of TCR clone 64996 (TRAV29/DV5, TRAJ45)
CAAGFRGGADGLTF

SEQ ID NO: 129992 - protein, 12 aa, Homo sapiens
  CDR3 for beta chain variable domain of TCR clone 64996 (TRBV11-2, TRBJ2-2)
CASSLGGGELFF

SEQ ID NO: 129993 - protein, 17 aa, Homo sapiens
  CDR3 for alpha chain variable domain of TCR clone 64997 (TRAV12-2, TRAJ18)
CAVNPLDRGSTLGRLYF

SEQ ID NO: 129994 - protein, 14 aa, Homo sapiens
  CDR3 for beta chain variable domain of TCR clone 64997 (TRBV19, TRBJ2-1)
CASPTFVLSGEQFF

SEQ ID NO: 129995 - protein, 17 aa, Homo sapiens
  CDR3 for alpha chain variable domain of TCR clone 64998 (TRAV26-1, TRAJ46)
IASSESEKKSSGDKLTF

SEQ ID NO: 129996 - protein, 14 aa, Homo sapiens
  CDR3 for beta chain variable domain of TCR clone 64998 (TRBV12-5, TRBJ2-5)
CASGSRTHQETQYF

SEQ ID NO: 129997 - protein, 12 aa, Homo sapiens
  CDR3 for alpha chain variable domain of TCR clone 64999 (TRAV13-1, TRAJ21)
RAAKEGFNKFYF

SEQ ID NO: 129998 - protein, 14 aa, Homo sapiens
  CDR3 for beta chain variable domain of TCR clone 64999 (TRBV7-2, TRBJ2-7)
CASSPKTSFYEQYF

SEQ ID NO: 129999 - protein, 14 aa, Homo sapiens
  CDR3 for alpha chain variable domain of TCR clone 65000 (TRAV12-1, TRAJ39)
CVVNFNNAGKMLTF

SEQ ID NO: 130000 - protein, 14 aa, Homo sapiens
  CDR3 for beta chain variable domain of TCR clone 65000 (TRBV12-4, TRBJ1-1)
CASSLGTGGTEAFF

SEQ ID NO: 130001 - protein, 14 aa, Homo sapiens
  CDR3 for alpha chain variable domain of TCR clone 65001 (TRAV12-2, TRAJ13)
CAVKKTGGYQKVTF

SEQ ID NO: 130002 - protein, 12 aa, Homo sapiens
  CDR3 for beta chain variable domain of TCR clone 65001 (TRBV5-6, TRBJ2-7)
CASSLGRYEQYF

SEQ ID NO: 130003 - protein, 12 aa, Homo sapiens
  CDR3 for alpha chain variable domain of TCR clone 65002 (TRAV13-1, TRAJ21)
CAAKEGVNKFYF

SEQ ID NO: 130004 - protein, 14 aa, Homo sapiens
  CDR3 for beta chain variable domain of TCR clone 65002 (TRBV18, TRBJ2-7)
CASSPRGGAYEQYF

SEQ ID NO: 130005 - protein, 13 aa, Homo sapiens
  CDR3 for alpha chain variable domain of TCR clone 65003 (TRAV17, TRAJ26)
SATVDNYGQNFVF

SEQ ID NO: 130006 - protein, 16 aa, Homo sapiens
  CDR3 for beta chain variable domain of TCR clone 65003 (TRBV2, TRBJ2-1)
CASSVGGSLSYNEQFF

SEQ ID NO: 130007 - protein, 14 aa, Homo sapiens
  CDR3 for alpha chain variable domain of TCR clone 65004 (TRAV3, TRAJ36)
RAVRDGTGANNLFF

SEQ ID NO: 130008 - protein, 16 aa, Homo sapiens
  CDR3 for beta chain variable domain of TCR clone 65004 (TRBV20-1, TRBJ2-6)
CSAREGPGVGANVLTF

SEQ ID NO: 130009 - protein, 18 aa, Homo sapiens
  CDR3 for alpha chain variable domain of TCR clone 65005 (TRAV4, TRAJ9)
CCVLLPRGLWTGGFKTIF

SEQ ID NO: 130010 - protein, 15 aa, Homo sapiens
  CDR3 for beta chain variable domain of TCR clone 65005 (TRBV7-2, TRBJ2-1)
CASSLASGRVNEQFF

SEQ ID NO: 130011 - protein, 16 aa, Homo sapiens
  CDR3 for alpha chain variable domain of TCR clone 65006 (TRAV30, TRAJ24)
CGTEIVDADSWGKFQF

SEQ ID NO: 130012 - protein, 15 aa, Homo sapiens
  CDR3 for beta chain variable domain of TCR clone 65006 (TRBV19, TRBJ2-1)
CASIKGRGPYNEQFF

SEQ ID NO: 130013 - protein, 11 aa, Homo sapiens
  CDR3 for alpha chain variable domain of TCR clone 65007 (TRAV12-2, TRAJ6)
CAVEGSYIPTF

SEQ ID NO: 130014 - protein, 14 aa, Homo sapiens
  CDR3 for beta chain variable domain of TCR clone 65007 (TRBV10-3, TRBJ2-2)
CAISETLNTGELFF

SEQ ID NO: 130015 - protein, 14 aa, Homo sapiens
  CDR3 for alpha chain variable domain of TCR clone 65008 (TRAV38-1, TRAJ40)
CALRPTSGTYKYIF

SEQ ID NO: 130016 - protein, 19 aa, Homo sapiens
  CDR3 for beta chain variable domain of TCR clone 65008 (TRBV25-1, TRBJ2-2)
CAILVYRVDRGRKTGELFF

SEQ ID NO: 130017 - protein, 16 aa, Homo sapiens
  CDR3 for alpha chain variable domain of TCR clone 65009 (TRAV30, TRAJ24)
CGTEIVDADSWGKFQF

SEQ ID NO: 130018 - protein, 18 aa, Homo sapiens
  CDR3 for beta chain variable domain of TCR clone 65009 (TRBV12-5, TRBJ2-5)
CASGSDTSRDPVLRARHA

SEQ ID NO: 130019 - protein, 12 aa, Homo sapiens
  CDR3 for alpha chain variable domain of TCR clone 65010 (TRAV3, TRAJ20)
CAVRDGDYKLSF

SEQ ID NO: 130020 - protein, 14 aa, Homo sapiens
  CDR3 for beta chain variable domain of TCR clone 65010 (TRBV7-2, TRBJ2-7)
CASRSQGAAYEQYF

SEQ ID NO: 130021 - protein, 14 aa, Homo sapiens
  CDR3 for alpha chain variable domain of TCR clone 65011 (TRAV12-3, TRAJ42)
CAMNYGGSQGNLIF

SEQ ID NO: 130022 - protein, 15 aa, Homo sapiens
  CDR3 for beta chain variable domain of TCR clone 65011 (TRBV2, TRBJ2-1)
CASSELAGSYNEQFF

SEQ ID NO: 130023 - protein, 18 aa, Homo sapiens
  CDR3 for alpha chain variable domain of TCR clone 65012 (TRAV26-1, TRAJ22)
CIVRVALISSGSARQLTF

SEQ ID NO: 130024 - protein, 12 aa, Homo sapiens
  CDR3 for beta chain variable domain of TCR clone 65012 (TRBV13, TRBJ2-5)
CQQPEVGETQYF

SEQ ID NO: 130025 - protein, 13 aa, Homo sapiens
  CDR3 for alpha chain variable domain of TCR clone 65013 (TRAV25, TRAJ16)
CAGRTARSCSLQG

SEQ ID NO: 130026 - protein, 18 aa, Homo sapiens
  CDR3 for beta chain variable domain of TCR clone 65013 (TRBV6-5, TRBJ1-1)
CTSVPALLDGLLNTEAFF

SEQ ID NO: 130027 - protein, 16 aa, Homo sapiens
  CDR3 for alpha chain variable domain of TCR clone 65014 (TRAV3, TRAJ37)
SAVRGKGSGNTGKLIF

SEQ ID NO: 130028 - protein, 15 aa, Homo sapiens
  CDR3 for beta chain variable domain of TCR clone 65014 (TRBV20-1, TRBJ2-1)
CSARGGTRYYNEQFF

SEQ ID NO: 130029 - protein, 13 aa, Homo sapiens
  CDR3 for alpha chain variable domain of TCR clone 65015 (TRAV35, TRAJ21)
CAGQLSNFNKFYF

SEQ ID NO: 130030 - protein, 13 aa, Homo sapiens
  CDR3 for beta chain variable domain of TCR clone 65015 (TRBV12-4, TRBJ2-7)
CASSLSGVYEQYF

SEQ ID NO: 130031 - protein, 13 aa, Homo sapiens
  CDR3 for alpha chain variable domain of TCR clone 65016 (TRAV1-1, TRAJ9)
CAAKNTGGFKTIC

SEQ ID NO: 130032 - protein, 14 aa, Homo sapiens
  CDR3 for beta chain variable domain of TCR clone 65016 (TRBV20-1, TRBJ2-1)
CSAQIGGSANEQFF

SEQ ID NO: 130033 - protein, 17 aa, Homo sapiens
  CDR3 for alpha chain variable domain of TCR clone 65017 (TRAV26-1, TRAJ28)
CIVRVPDSGAGRYQLTF

SEQ ID NO: 130034 - protein, 17 aa, Homo sapiens
  CDR3 for beta chain variable domain of TCR clone 65017 (TRBV28, TRBJ2-7)
CASSPLPAGGKSYEQYF

SEQ ID NO: 130035 - protein, 16 aa, Homo sapiens
  CDR3 for alpha chain variable domain of TCR clone 65018 (TRAV3, TRAJ10)
CAVRDMRAGGGNKLTV

SEQ ID NO: 130036 - protein, 13 aa, Homo sapiens
  CDR3 for beta chain variable domain of TCR clone 65018 (TRBV6-1, TRBJ1-1)
CASSRQGNTEAFF

SEQ ID NO: 130037 - protein, 15 aa, Homo sapiens
  CDR3 for alpha chain variable domain of TCR clone 65019 (TRAV25, TRAJ53)
FAATGGGGSNYKLTF

SEQ ID NO: 130038 - protein, 19 aa, Homo sapiens
  CDR3 for beta chain variable domain of TCR clone 65019 (TRBV7-2, TRBJ2-3)
CASSFLSRNWGGGTDTQYF

SEQ ID NO: 130039 - protein, 15 aa, Homo sapiens
  CDR3 for alpha chain variable domain of TCR clone 65020 (TRAV25, TRAJ53)
CAATGGGGSNYKLTC

SEQ ID NO: 130040 - protein, 19 aa, Homo sapiens
  CDR3 for beta chain variable domain of TCR clone 65020 (TRBV7-2, TRBJ2-3)
CASSFLSRNWGGGTDTQYF

SEQ ID NO: 130041 - protein, 12 aa, Homo sapiens
  CDR3 for alpha chain variable domain of TCR clone 65021 (TRAV10, TRAJ49)
CVVSDTGNQFYF

SEQ ID NO: 130042 - protein, 11 aa, Homo sapiens
  CDR3 for beta chain variable domain of TCR clone 65021 (TRBV5-6, TRBJ2-5)
CASSLERTQYF

SEQ ID NO: 130043 - protein, 14 aa, Homo sapiens
  CDR3 for alpha chain variable domain of TCR clone 65022 (TRAV1-2, TRAJ16)
CAVNRFSDGQKLLF

SEQ ID NO: 130044 - protein, 14 aa, Homo sapiens
  CDR3 for beta chain variable domain of TCR clone 65022 (TRBV13, TRBJ2-5)
CASSLGRGQETPYF

SEQ ID NO: 130045 - protein, 18 aa, Homo sapiens
  CDR3 for alpha chain variable domain of TCR clone 65023 (TRAV21, TRAJ52)
CAVRPSPAGGTSYGKLTF

SEQ ID NO: 130046 - protein, 14 aa, Homo sapiens
  CDR3 for beta chain variable domain of TCR clone 65023 (TRBV20-1, TRBJ2-1)
CSAQIGGSANELFF

SEQ ID NO: 130047 - protein, 14 aa, Homo sapiens
  CDR3 for alpha chain variable domain of TCR clone 65024 (TRAV3, TRAJ21)
CAVRDWDNFNKFYF

SEQ ID NO: 130048 - protein, 17 aa, Homo sapiens
  CDR3 for beta chain variable domain of TCR clone 65024 (TRBV7-8, TRBJ1-5)
CASSLLGQGGSNQPQHF

SEQ ID NO: 130049 - protein, 15 aa, Homo sapiens
  CDR3 for alpha chain variable domain of TCR clone 65025 (TRAV3, TRAJ22)
CAVIDRGGSARQLTF

SEQ ID NO: 130050 - protein, 15 aa, Homo sapiens
  CDR3 for beta chain variable domain of TCR clone 65025 (TRBV19, TRBJ2-5)
CASSIVRASQETQYF

SEQ ID NO: 130051 - protein, 13 aa, Homo sapiens
  CDR3 for alpha chain variable domain of TCR clone 65026 (TRAV12-2, TRAJ39)
CAVNNNAGNMLTF

SEQ ID NO: 130052 - protein, 13 aa, Homo sapiens
  CDR3 for beta chain variable domain of TCR clone 65026 (TRBV2, TRBJ1-5)
CATAGPGDQPQHF

SEQ ID NO: 130053 - protein, 13 aa, Homo sapiens
  CDR3 for alpha chain variable domain of TCR clone 65027 (TRAV23/DV6, TRAJ58)
CAARLIRGSRLTF

SEQ ID NO: 130054 - protein, 13 aa, Homo sapiens
  CDR3 for beta chain variable domain of TCR clone 65027 (TRBV2, TRBJ1-6)
CVDSGSYNSPLHF

SEQ ID NO: 130055 - protein, 14 aa, Homo sapiens
  CDR3 for alpha chain variable domain of TCR clone 65028 (TRAV12-2, TRAJ9)
CAVNMEGGGFKTIF

SEQ ID NO: 130056 - protein, 14 aa, Homo sapiens
  CDR3 for beta chain variable domain of TCR clone 65028 (TRBV27, TRBJ2-3)
CASRKGGRTDTQYL

SEQ ID NO: 130057 - protein, 13 aa, Homo sapiens
  CDR3 for alpha chain variable domain of TCR clone 65029 (TRAV21, TRAJ27)
CAARPGNAGKSNF

SEQ ID NO: 130058 - protein, 14 aa, Homo sapiens
  CDR3 for beta chain variable domain of TCR clone 65029 (TRBV11-2, TRBJ2-7)
CASSLGAGAYEQYF

SEQ ID NO: 130059 - protein, 17 aa, Homo sapiens
  CDR3 for alpha chain variable domain of TCR clone 65030 (TRAV12-2, TRAJ48)
CASNEKLTFGTGTRLTI

SEQ ID NO: 130060 - protein, 21 aa, Homo sapiens
  CDR3 for beta chain variable domain of TCR clone 65030 (TRBV5-1, TRBJ2-5)
RGSWCSVSAGCWGAGEKTQYF

SEQ ID NO: 130061 - protein, 14 aa, Homo sapiens
  CDR3 for alpha chain variable domain of TCR clone 65031 (TRAV38-1, TRAJ40)
CALRPTSGTYKYIF

SEQ ID NO: 130062 - protein, 14 aa, Homo sapiens
  CDR3 for beta chain variable domain of TCR clone 65031 (TRBV25-1, TRBJ1-1)
CASTHLGGNTEAFI

SEQ ID NO: 130063 - protein, 15 aa, Homo sapiens
  CDR3 for alpha chain variable domain of TCR clone 65032 (TRAV12-3, TRAJ5)
CAMSGLGTGRRALTF

SEQ ID NO: 130064 - protein, 15 aa, Homo sapiens
  CDR3 for beta chain variable domain of TCR clone 65032 (TRBV19, TRBJ1-1)
CASTLGQIQNTEAFF

SEQ ID NO: 130065 - protein, 14 aa, Homo sapiens
  CDR3 for alpha chain variable domain of TCR clone 65033 (TRAV3, TRAJ34)
CAVRAPGNTDKLIF

SEQ ID NO: 130066 - protein, 17 aa, Homo sapiens
  CDR3 for beta chain variable domain of TCR clone 65033 (TRBV20-1, TRBJ2-7)
CSATPGLARGISYEQYF

SEQ ID NO: 130067 - protein, 14 aa, Homo sapiens
  CDR3 for alpha chain variable domain of TCR clone 65034 (TRAV1-2, TRAJ8)
CAVREDTGFQKLVF

SEQ ID NO: 130068 - protein, 17 aa, Homo sapiens
  CDR3 for beta chain variable domain of TCR clone 65034 (TRBV3-1, TRBJ2-5)
CASSNWGGTSGQETQYF

SEQ ID NO: 130069 - protein, 22 aa, Homo sapiens
  CDR3 for alpha chain variable domain of TCR clone 65035 (TRAV34, )
CGADFTPGNNHIQNPDPAVYQL

SEQ ID NO: 130070 - protein, 16 aa, Homo sapiens
  CDR3 for beta chain variable domain of TCR clone 65035 (TRBV12-5, TRBJ2-5)
CASGPRTSGNQETQYF

SEQ ID NO: 130071 - protein, 17 aa, Homo sapiens
  CDR3 for alpha chain variable domain of TCR clone 65036 (TRAV26-1, TRAJ37)
CIVRVITVSSNTGKLIF

SEQ ID NO: 130072 - protein, 17 aa, Homo sapiens
  CDR3 for beta chain variable domain of TCR clone 65036 (TRBV13, TRBJ2-3)
CASSLSRVAGGRNTQYF

SEQ ID NO: 130073 - protein, 12 aa, Homo sapiens
  CDR3 for alpha chain variable domain of TCR clone 65037 (TRAV8-6, TRAJ11)
CAVSSGYSTLTF

SEQ ID NO: 130074 - protein, 20 aa, Homo sapiens
  CDR3 for beta chain variable domain of TCR clone 65037 (TRBV7-8, TRBJ2-2)
CASSHLFPGPTIHITGELFF

SEQ ID NO: 130075 - protein, 13 aa, Homo sapiens
  CDR3 for alpha chain variable domain of TCR clone 65038 (TRAV1-2, TRAJ9)
CAALNTGGFKTIF

SEQ ID NO: 130076 - protein, 20 aa, Homo sapiens
  CDR3 for beta chain variable domain of TCR clone 65038 (TRBV28, TRBJ2-1)
CASTPIGRSSGLAGGNEQFF

SEQ ID NO: 130077 - protein, 12 aa, Homo sapiens
  CDR3 for alpha chain variable domain of TCR clone 65039 (TRAV1-2, TRAJ33)
CAALDSNYQLIW

SEQ ID NO: 130078 - protein, 14 aa, Homo sapiens
  CDR3 for beta chain variable domain of TCR clone 65039 (TRBV7-2, TRBJ2-7)
CASRSQGAAYEQYF

SEQ ID NO: 130079 - protein, 13 aa, Homo sapiens
  CDR3 for alpha chain variable domain of TCR clone 65040 (TRAV27, TRAJ45)
CRSSGGGADGLTF

SEQ ID NO: 130080 - protein, 12 aa, Homo sapiens
  CDR3 for beta chain variable domain of TCR clone 65040 (TRBV12-4, TRBJ2-7)
CASSLGGYEQYF

SEQ ID NO: 130081 - protein, 15 aa, Homo sapiens
  CDR3 for alpha chain variable domain of TCR clone 65041 (TRAV3, TRAJ22)
CAVRDRGGSVRQLTF

SEQ ID NO: 130082 - protein, 14 aa, Homo sapiens
  CDR3 for beta chain variable domain of TCR clone 65041 (TRBV18, TRBJ2-5)
CASSPGVSQETQYF

SEQ ID NO: 130083 - protein, 13 aa, Homo sapiens
  CDR3 for alpha chain variable domain of TCR clone 65042 (TRAV17, TRAJ7)
CATDNYGNNRLAF

SEQ ID NO: 130084 - protein, 15 aa, Homo sapiens
  CDR3 for beta chain variable domain of TCR clone 65042 (TRBV11-3, TRBJ2-7)
CASSPGPASSYEQYF

SEQ ID NO: 130085 - protein, 15 aa, Homo sapiens
  CDR3 for alpha chain variable domain of TCR clone 65043 (TRAV8-1, TRAJ6)
CAVNTPPGGGYIPKF

SEQ ID NO: 130086 - protein, 14 aa, Homo sapiens
  CDR3 for beta chain variable domain of TCR clone 65043 (TRBV12-4, TRBJ2-1)
CASSLGQGASEQFF

SEQ ID NO: 130087 - protein, 13 aa, Homo sapiens
  CDR3 for alpha chain variable domain of TCR clone 65044 (TRAV17, TRAJ9)
CATDYTGGFKTIF

SEQ ID NO: 130088 - protein, 14 aa, Homo sapiens
  CDR3 for beta chain variable domain of TCR clone 65044 (TRBV19, TRBJ2-5)
CASSMIGQQETQYF

SEQ ID NO: 130089 - protein, 13 aa, Homo sapiens
  CDR3 for alpha chain variable domain of TCR clone 65045 (TRAV27, TRAJ41)
FAGEGNSGYALNF

SEQ ID NO: 130090 - protein, 14 aa, Homo sapiens
  CDR3 for beta chain variable domain of TCR clone 65045 (TRBV7-2, TRBJ1-1)
CASSFLTGTTEAFF

SEQ ID NO: 130091 - protein, 16 aa, Homo sapiens
  CDR3 for alpha chain variable domain of TCR clone 65046 (TRAV8-3, TRAJ42)
CAVGEGNGGSKGNLIF

SEQ ID NO: 130092 - protein, 14 aa, Homo sapiens
  CDR3 for beta chain variable domain of TCR clone 65046 (TRBV7-2, TRBJ2-1)
CASSRGGARNEQFF

SEQ ID NO: 130093 - protein, 13 aa, Homo sapiens
  CDR3 for alpha chain variable domain of TCR clone 65047 (TRAV1-2, TRAJ9)
CAALNTGGFKAIF

SEQ ID NO: 130094 - protein, 17 aa, Homo sapiens
  CDR3 for beta chain variable domain of TCR clone 65047 (TRBV3-1, TRBJ2-7)
CASSEVGHRGPSYEQYF

SEQ ID NO: 130095 - protein, 11 aa, Homo sapiens
  CDR3 for alpha chain variable domain of TCR clone 65048 (TRAV2, TRAJ13)
CASGGYQKVTF

SEQ ID NO: 130096 - protein, 16 aa, Homo sapiens
  CDR3 for beta chain variable domain of TCR clone 65048 (TRBV6-1, TRBJ2-5)
CVGSETLDRGAETQYF

SEQ ID NO: 130097 - protein, 14 aa, Homo sapiens
  CDR3 for alpha chain variable domain of TCR clone 65049 (TRAV1-2, TRAJ16)
CAVNRFADGQKLLF

SEQ ID NO: 130098 - protein, 11 aa, Homo sapiens
  CDR3 for beta chain variable domain of TCR clone 65049 (TRBV7-9, TRBJ2-3)
CASSPTDTQYF

SEQ ID NO: 130099 - protein, 12 aa, Homo sapiens
  CDR3 for alpha chain variable domain of TCR clone 65050 (TRAV2, TRAJ31)
CAVEDNNARLMF

SEQ ID NO: 130100 - protein, 16 aa, Homo sapiens
  CDR3 for beta chain variable domain of TCR clone 65050 (TRBV10-3, TRBJ2-1)
CAISGVGEGGGGEQFF

SEQ ID NO: 130101 - protein, 17 aa, Homo sapiens
  CDR3 for alpha chain variable domain of TCR clone 65051 (TRAV13-1, TRAJ52)
CAAGRNAGGTSYGKLTF

SEQ ID NO: 130102 - protein, 13 aa, Homo sapiens
  CDR3 for beta chain variable domain of TCR clone 65051 (TRBV7-2, TRBJ1-1)
CASNLKGEKVAFF

SEQ ID NO: 130103 - protein, 14 aa, Homo sapiens
  CDR3 for alpha chain variable domain of TCR clone 65052 (TRAV8-4, TRAJ9)
CAVRINTGGFKTIF

SEQ ID NO: 130104 - protein, 15 aa, Homo sapiens
  CDR3 for beta chain variable domain of TCR clone 65052 (TRBV10-2, TRBJ2-6)
CASSEQGTGADVLTF

SEQ ID NO: 130105 - protein, 16 aa, Homo sapiens
  CDR3 for alpha chain variable domain of TCR clone 65053 (TRAV12-3, TRAJ53)
CAMSPGSGGSNYKLTF

SEQ ID NO: 130106 - protein, 13 aa, Homo sapiens
  CDR3 for beta chain variable domain of TCR clone 65053 (TRBV4-3, TRBJ1-1)
CASSQAGNTEAFF

SEQ ID NO: 130107 - protein, 14 aa, Homo sapiens
  CDR3 for alpha chain variable domain of TCR clone 65054 (TRAV12-2, TRAJ11)
CAVNRESGYSTLTF

SEQ ID NO: 130108 - protein, 10 aa, Homo sapiens
  CDR3 for beta chain variable domain of TCR clone 65054 (TRBV20-1, TRBJ2-5)
CRARFETQYF

SEQ ID NO: 130109 - protein, 13 aa, Homo sapiens
  CDR3 for alpha chain variable domain of TCR clone 65055 (TRAV1-2, TRAJ9)
CAALNTGGFKTIF

SEQ ID NO: 130110 - protein, 15 aa, Homo sapiens
  CDR3 for beta chain variable domain of TCR clone 65055 (TRBV19, TRBJ1-1)
CASTPGQIQNTEAFF

SEQ ID NO: 130111 - protein, 13 aa, Homo sapiens
  CDR3 for alpha chain variable domain of TCR clone 65056 (TRAV8-1, TRAJ30)
CAVIMNRDDKIIF

SEQ ID NO: 130112 - protein, 14 aa, Homo sapiens
  CDR3 for beta chain variable domain of TCR clone 65056 (TRBV7-2, TRBJ1-6)
CASSLQGANSTLHF

SEQ ID NO: 130113 - protein, 15 aa, Homo sapiens
  CDR3 for alpha chain variable domain of TCR clone 65057 (TRAV26-1, TRAJ15)
CIVRAANQAGTALIF

SEQ ID NO: 130114 - protein, 15 aa, Homo sapiens
  CDR3 for beta chain variable domain of TCR clone 65057 (TRBV20-1, TRBJ1-1)
CCARSAAASNTEAFF

SEQ ID NO: 130115 - protein, 12 aa, Homo sapiens
  CDR3 for alpha chain variable domain of TCR clone 65058 (TRAV17, TRAJ57)
YATDGGSEKLVF

SEQ ID NO: 130116 - protein, 13 aa, Homo sapiens
  CDR3 for beta chain variable domain of TCR clone 65058 (TRBV7-9, TRBJ2-7)
CASSFAGAYEQYF

SEQ ID NO: 130117 - protein, 13 aa, Homo sapiens
  CDR3 for alpha chain variable domain of TCR clone 65059 (TRAV38-2/DV8, TRAJ34)
CAYRNYNTDKLTF

SEQ ID NO: 130118 - protein, 15 aa, Homo sapiens
  CDR3 for beta chain variable domain of TCR clone 65059 (TRBV20-1, TRBJ2-5)
CSAEGTGGLQETQYF

SEQ ID NO: 130119 - protein, 15 aa, Homo sapiens
  CDR3 for alpha chain variable domain of TCR clone 65060 (TRAV38-1, TRAJ37)
FAFIHGSGNTGKLIF

SEQ ID NO: 130120 - protein, 12 aa, Homo sapiens
  CDR3 for beta chain variable domain of TCR clone 65060 (TRBV7-9, TRBJ2-7)
CASSFGSYEQYF

SEQ ID NO: 130121 - protein, 14 aa, Homo sapiens
  CDR3 for alpha chain variable domain of TCR clone 65061 (TRAV8-1, TRAJ5)
CAVRTDTGRRALTF

SEQ ID NO: 130122 - protein, 18 aa, Homo sapiens
  CDR3 for beta chain variable domain of TCR clone 65061 (TRBV7-6, TRBJ2-1)
CASSPRTSGMSSYNEQFF

SEQ ID NO: 130123 - protein, 14 aa, Homo sapiens
  CDR3 for alpha chain variable domain of TCR clone 65062 (TRAV23/DV6, TRAJ22)
CAASRSGSTRQLTF

SEQ ID NO: 130124 - protein, 13 aa, Homo sapiens
  CDR3 for beta chain variable domain of TCR clone 65062 (TRBV15, TRBJ1-6)
CATSGGLNSPLHF

SEQ ID NO: 130125 - protein, 12 aa, Homo sapiens
  CDR3 for alpha chain variable domain of TCR clone 65063 (TRAV21, TRAJ31)
CAVWGNNARLMF

SEQ ID NO: 130126 - protein, 16 aa, Homo sapiens
  CDR3 for beta chain variable domain of TCR clone 65063 (TRBV27, TRBJ2-5)
CASSYGPGGQKETQYL

SEQ ID NO: 130127 - protein, 15 aa, Homo sapiens
  CDR3 for alpha chain variable domain of TCR clone 65064 (TRAV13-1, TRAJ6)
RAAIHPSGGSYIPTF

SEQ ID NO: 130128 - protein, 14 aa, Homo sapiens
  CDR3 for beta chain variable domain of TCR clone 65064 (TRBV7-9, TRBJ2-2)
CASGLAINTGELFF

SEQ ID NO: 130129 - protein, 14 aa, Homo sapiens
  CDR3 for alpha chain variable domain of TCR clone 65065 (TRAV1-2, TRAJ16)
CAVNRFSDGQKLLF

SEQ ID NO: 130130 - protein, 14 aa, Homo sapiens
  CDR3 for beta chain variable domain of TCR clone 65065 (TRBV7-9, TRBJ2-3)
CASSLEDGSDTQYF

SEQ ID NO: 130131 - protein, 15 aa, Homo sapiens
  CDR3 for alpha chain variable domain of TCR clone 65066 (TRAV38-1, TRAJ37)
CAFIHGSGNTGKLIF

SEQ ID NO: 130132 - protein, 15 aa, Homo sapiens
  CDR3 for beta chain variable domain of TCR clone 65066 (TRBV7-2, TRBJ2-1)
CASSSGLAGGNEQFF

SEQ ID NO: 130133 - protein, 18 aa, Homo sapiens
  CDR3 for alpha chain variable domain of TCR clone 65067 (TRAV21, TRAJ52)
CAVRPSPAGGTSYGKLTF

SEQ ID NO: 130134 - protein, 19 aa, Homo sapiens
  CDR3 for beta chain variable domain of TCR clone 65067 (TRBV5-8, TRBJ2-6)
CASSFHRGRAHSGANVLTF

SEQ ID NO: 130135 - protein, 16 aa, Homo sapiens
  CDR3 for alpha chain variable domain of TCR clone 65068 (TRAV27, TRAJ52)
CAGAGAGGTSYGRLTF

SEQ ID NO: 130136 - protein, 17 aa, Homo sapiens
  CDR3 for beta chain variable domain of TCR clone 65068 (TRBV24-1, TRBJ2-3)
CATSDLPSGEDTDTQYF

SEQ ID NO: 130137 - protein, 12 aa, Homo sapiens
  CDR3 for alpha chain variable domain of TCR clone 65069 (TRAV12-3, TRAJ17)
CAMTLTGNKLTF

SEQ ID NO: 130138 - protein, 14 aa, Homo sapiens
  CDR3 for beta chain variable domain of TCR clone 65069 (TRBV4-1, TRBJ2-3)
CASSQDWSTDTQYF

SEQ ID NO: 130139 - protein, 12 aa, Homo sapiens
  CDR3 for alpha chain variable domain of TCR clone 65070 (TRAV12-2, TRAJ34)
CAASYNTDKLIF

SEQ ID NO: 130140 - protein, 16 aa, Homo sapiens
  CDR3 for beta chain variable domain of TCR clone 65070 (TRBV27, TRBJ2-5)
CASSYGPGGQKETQYF

SEQ ID NO: 130141 - protein, 16 aa, Homo sapiens
  CDR3 for alpha chain variable domain of TCR clone 65071 (TRAV8-2, TRAJ45)
CVVSEGTGGGADGLTF

SEQ ID NO: 130142 - protein, 15 aa, Homo sapiens
  CDR3 for beta chain variable domain of TCR clone 65071 (TRBV10-3, TRBJ2-3)
CAISLTSGGTDTQYF

SEQ ID NO: 130143 - protein, 14 aa, Homo sapiens
  CDR3 for alpha chain variable domain of TCR clone 65072 (TRAV12-3, TRAJ5)
CVMSTYTGRRALTF

SEQ ID NO: 130144 - protein, 13 aa, Homo sapiens
  CDR3 for beta chain variable domain of TCR clone 65072 (TRBV28, TRBJ2-3)
CASSTGGGDTQYF

SEQ ID NO: 130145 - protein, 17 aa, Homo sapiens
  CDR3 for alpha chain variable domain of TCR clone 65073 (TRAV4, TRAJ18)
CLVVAAGRGSTLGRPYF

SEQ ID NO: 130146 - protein, 17 aa, Homo sapiens
  CDR3 for beta chain variable domain of TCR clone 65073 (TRBV28, TRBJ2-2)
CASSLATGMGDAGELFF

SEQ ID NO: 130147 - protein, 12 aa, Homo sapiens
  CDR3 for alpha chain variable domain of TCR clone 65074 (TRAV13-1, TRAJ53)
AASGGSNYKLTF

SEQ ID NO: 130148 - protein, 15 aa, Homo sapiens
  CDR3 for beta chain variable domain of TCR clone 65074 (TRBV5-1, TRBJ2-1)
CASSPPRAHYNEQFF

SEQ ID NO: 130149 - protein, 12 aa, Homo sapiens
  CDR3 for alpha chain variable domain of TCR clone 65075 (TRAV21, TRAJ8)
CSVNTGFQKLVF

SEQ ID NO: 130150 - protein, 13 aa, Homo sapiens
  CDR3 for beta chain variable domain of TCR clone 65075 (TRBV6-3, TRBJ2-1)
CASSYDNYNEQFF

SEQ ID NO: 130151 - protein, 13 aa, Homo sapiens
  CDR3 for alpha chain variable domain of TCR clone 65076 (TRAV13-1, TRAJ37)
CAARSGNAGKLIF

SEQ ID NO: 130152 - protein, 14 aa, Homo sapiens
  CDR3 for beta chain variable domain of TCR clone 65076 (TRBV12-4, TRBJ2-3)
CASSLGQGTDTQYF

SEQ ID NO: 130153 - protein, 15 aa, Homo sapiens
  CDR3 for alpha chain variable domain of TCR clone 65077 (TRAV3, TRAJ47)
FAVRDIGEYGNKLVF

SEQ ID NO: 130154 - protein, 14 aa, Homo sapiens
  CDR3 for beta chain variable domain of TCR clone 65077 (TRBV13, TRBJ2-5)
CASSLERVGETQYF

SEQ ID NO: 130155 - protein, 14 aa, Homo sapiens
  CDR3 for alpha chain variable domain of TCR clone 65078 (TRAV8-4, TRAJ13)
CAVILSGGYQKVTF

SEQ ID NO: 130156 - protein, 16 aa, Homo sapiens
  CDR3 for beta chain variable domain of TCR clone 65078 (TRBV5-7, TRBJ1-4)
CASSPSGGLKTEKLFF

SEQ ID NO: 130157 - protein, 17 aa, Homo sapiens
  CDR3 for alpha chain variable domain of TCR clone 65079 (TRAV21, TRAJ52)
CAVGVNAGGTSYEKLTF

SEQ ID NO: 130158 - protein, 13 aa, Homo sapiens
  CDR3 for beta chain variable domain of TCR clone 65079 (TRBV5-1, TRBJ1-2)
CASSFQGNYGYTF

SEQ ID NO: 130159 - protein, 12 aa, Homo sapiens
  CDR3 for alpha chain variable domain of TCR clone 65080 (TRAV12-3, TRAJ17)
CVMTLAGNKLTF

SEQ ID NO: 130160 - protein, 15 aa, Homo sapiens
  CDR3 for beta chain variable domain of TCR clone 65080 (TRBV20-1, TRBJ2-7)
CSARDRVSGMDEQYF

SEQ ID NO: 130161 - protein, 15 aa, Homo sapiens
  CDR3 for alpha chain variable domain of TCR clone 65081 (TRAV8-3, TRAJ45)
CALSHSGGGADGLTF

SEQ ID NO: 130162 - protein, 13 aa, Homo sapiens
  CDR3 for beta chain variable domain of TCR clone 65081 (TRBV10-3, TRBJ2-7)
CASKLAVNYEQYF

SEQ ID NO: 130163 - protein, 15 aa, Homo sapiens
  CDR3 for alpha chain variable domain of TCR clone 65082 (TRAV26-1, TRAJ37)
CIVKTGSSNTGKLIF

SEQ ID NO: 130164 - protein, 15 aa, Homo sapiens
  CDR3 for beta chain variable domain of TCR clone 65082 (TRBV11-2, TRBJ1-6)
CASSLDPWAVPPLHF

SEQ ID NO: 130165 - protein, 13 aa, Homo sapiens
  CDR3 for alpha chain variable domain of TCR clone 65083 (TRAV13-1, TRAJ40)
CAAISPGTYNYIF

SEQ ID NO: 130166 - protein, 13 aa, Homo sapiens
  CDR3 for beta chain variable domain of TCR clone 65083 (TRBV10-3, TRBJ2-7)
CAIRAGGPHEQYF

SEQ ID NO: 130167 - protein, 14 aa, Homo sapiens
  CDR3 for alpha chain variable domain of TCR clone 65084 (TRAV1-2, TRAJ8)
CAVREDTGFQKLVF

SEQ ID NO: 130168 - protein, 13 aa, Homo sapiens
  CDR3 for beta chain variable domain of TCR clone 65084 (TRBV12-4, TRBJ2-5)
YASRKRGKETQYF

SEQ ID NO: 130169 - protein, 14 aa, Homo sapiens
  CDR3 for alpha chain variable domain of TCR clone 65085 (TRAV13-1, TRAJ44)
CASKATGTASKLTF

SEQ ID NO: 130170 - protein, 17 aa, Homo sapiens
  CDR3 for beta chain variable domain of TCR clone 65085 (TRBV7-3, TRBJ2-3)
CASSLMKRMRGADTQYF

SEQ ID NO: 130171 - protein, 10 aa, Homo sapiens
  CDR3 for alpha chain variable domain of TCR clone 65086 (TRAV16, TRAJ22)
SAMYLQQLTF

SEQ ID NO: 130172 - protein, 15 aa, Homo sapiens
  CDR3 for beta chain variable domain of TCR clone 65086 (TRBV7-9, TRBJ1-6)
CASSSPGRGNSPLHF

SEQ ID NO: 130173 - protein, 14 aa, Homo sapiens
  CDR3 for alpha chain variable domain of TCR clone 65087 (TRAV35, TRAJ22)
CAGLRPGSARQPTF

SEQ ID NO: 130174 - protein, 14 aa, Homo sapiens
  CDR3 for beta chain variable domain of TCR clone 65087 (TRBV4-1, TRBJ2-7)
CASSPVAGGDEQYF

SEQ ID NO: 130175 - protein, 13 aa, Homo sapiens
  CDR3 for alpha chain variable domain of TCR clone 65088 (TRAV2, TRAJ20)
CAVEDRSEYKLSF

SEQ ID NO: 130176 - protein, 16 aa, Homo sapiens
  CDR3 for beta chain variable domain of TCR clone 65088 (TRBV25-1, TRBJ2-7)
CASSELTGGGIYEQYF

SEQ ID NO: 130177 - protein, 17 aa, Homo sapiens
  CDR3 for alpha chain variable domain of TCR clone 65089 (TRAV4, TRAJ18)
CLVGERSVGSTLGRRYF

SEQ ID NO: 130178 - protein, 18 aa, Homo sapiens
  CDR3 for beta chain variable domain of TCR clone 65089 (TRBV11-2, TRBJ2-3)
CASSLGGASRGAPNTQYF

SEQ ID NO: 130179 - protein, 15 aa, Homo sapiens
  CDR3 for alpha chain variable domain of TCR clone 65090 (TRAV8-3, TRAJ45)
CASSYSGGGADGLTF

SEQ ID NO: 130180 - protein, 15 aa, Homo sapiens
  CDR3 for beta chain variable domain of TCR clone 65090 (TRBV10-2, TRBJ2-6)
CASSEQGTGANVLTF

SEQ ID NO: 130181 - protein, 13 aa, Homo sapiens
  CDR3 for alpha chain variable domain of TCR clone 65091 (TRAV3, TRAJ7)
CAVSSYGNNRLAF

SEQ ID NO: 130182 - protein, 17 aa, Homo sapiens
  CDR3 for beta chain variable domain of TCR clone 65091 (TRBV13, TRBJ2-3)
CASSLSRVAGGRNTQYF

SEQ ID NO: 130183 - protein, 13 aa, Homo sapiens
  CDR3 for alpha chain variable domain of TCR clone 65092 (TRAV13-1, TRAJ6)
CAASKGGSYTPTF

SEQ ID NO: 130184 - protein, 13 aa, Homo sapiens
  CDR3 for beta chain variable domain of TCR clone 65092 (TRBV10-3, TRBJ2-7)
CASKLAVNYEQYF

SEQ ID NO: 130185 - protein, 13 aa, Homo sapiens
  CDR3 for alpha chain variable domain of TCR clone 65093 (TRAV26-1, TRAJ23)
CIDLRTRGGKLIF

SEQ ID NO: 130186 - protein, 14 aa, Homo sapiens
  CDR3 for beta chain variable domain of TCR clone 65093 (TRBV2, TRBJ2-7)
CASSRNRSSYEQYF

SEQ ID NO: 130187 - protein, 15 aa, Homo sapiens
  CDR3 for alpha chain variable domain of TCR clone 65094 (TRAV20, TRAJ40)
CAVQRGTSGTYKYIF

SEQ ID NO: 130188 - protein, 15 aa, Homo sapiens
  CDR3 for beta chain variable domain of TCR clone 65094 (TRBV25-1, TRBJ1-4)
CASSHGDSTNEKLFF

SEQ ID NO: 130189 - protein, 14 aa, Homo sapiens
  CDR3 for alpha chain variable domain of TCR clone 65095 (TRAV1-2, TRAJ16)
CAVNRFSDGQKLLF

SEQ ID NO: 130190 - protein, 15 aa, Homo sapiens
  CDR3 for beta chain variable domain of TCR clone 65095 (TRBV6-1, TRBJ2-3)
CASSERGGITDAQYF

SEQ ID NO: 130191 - protein, 16 aa, Homo sapiens
  CDR3 for alpha chain variable domain of TCR clone 65096 (TRAV17, TRAJ53)
CATDALSGGSNYKLTF

SEQ ID NO: 130192 - protein, 12 aa, Homo sapiens
  CDR3 for beta chain variable domain of TCR clone 65096 (TRBV5-1, TRBJ2-7)
CASSFRGHEQYF

SEQ ID NO: 130193 - protein, 15 aa, Homo sapiens
  CDR3 for alpha chain variable domain of TCR clone 65097 (TRAV12-1, TRAJ44)
CVADLPTGTASKLTF

SEQ ID NO: 130194 - protein, 13 aa, Homo sapiens
  CDR3 for beta chain variable domain of TCR clone 65097 (TRBV6-5, TRBJ2-5)
CASSPQGGETQNF

SEQ ID NO: 130195 - protein, 12 aa, Homo sapiens
  CDR3 for alpha chain variable domain of TCR clone 65098 (TRAV17, TRAJ12)
CATLRSSYKLIF

SEQ ID NO: 130196 - protein, 16 aa, Homo sapiens
  CDR3 for beta chain variable domain of TCR clone 65098 (TRBV28, TRBJ2-7)
CVSSLFFETGGPEQYF

SEQ ID NO: 130197 - protein, 11 aa, Homo sapiens
  CDR3 for alpha chain variable domain of TCR clone 65099 (TRAV2, TRAJ13)
CASGGYQKVTF

SEQ ID NO: 130198 - protein, 18 aa, Homo sapiens
  CDR3 for beta chain variable domain of TCR clone 65099 (TRBV20-1, TRBJ2-6)
CSAETTPTHVSGANVLTF

SEQ ID NO: 130199 - protein, 13 aa, Homo sapiens
  CDR3 for alpha chain variable domain of TCR clone 65100 (TRAV8-4, TRAJ29)
CAVSATGNTPLVF

SEQ ID NO: 130200 - protein, 15 aa, Homo sapiens
  CDR3 for beta chain variable domain of TCR clone 65100 (TRBV7-9, TRBJ1-6)
CASSSPGRGNSPLHF

SEQ ID NO: 130201 - protein, 17 aa, Homo sapiens
  CDR3 for alpha chain variable domain of TCR clone 65101 (TRAV4, TRAJ13)
CLVGVQGSSGGYQKVTF

SEQ ID NO: 130202 - protein, 18 aa, Homo sapiens
  CDR3 for beta chain variable domain of TCR clone 65101 (TRBV15, TRBJ2-3)
CVTSRDGARSWDTDTQYF

SEQ ID NO: 130203 - protein, 14 aa, Homo sapiens
  CDR3 for alpha chain variable domain of TCR clone 65102 (TRAV1-2, TRAJ16)
CAVNRFSDGQKLLF

SEQ ID NO: 130204 - protein, 14 aa, Homo sapiens
  CDR3 for beta chain variable domain of TCR clone 65102 (TRBV7-8, TRBJ2-7)
CASSPGLADYEQYF

SEQ ID NO: 130205 - protein, 13 aa, Homo sapiens
  CDR3 for alpha chain variable domain of TCR clone 65103 (TRAV16, TRAJ48)
CSPPNFGNEKLTF

SEQ ID NO: 130206 - protein, 11 aa, Homo sapiens
  CDR3 for beta chain variable domain of TCR clone 65103 (TRBV7-9, TRBJ2-3)
CASSPTDTQYF

SEQ ID NO: 130207 - protein, 13 aa, Homo sapiens
  CDR3 for alpha chain variable domain of TCR clone 65104 (TRAV17, TRAJ5)
CAPMDTGRRALTF

SEQ ID NO: 130208 - protein, 17 aa, Homo sapiens
  CDR3 for beta chain variable domain of TCR clone 65104 (TRBV13, TRBJ2-3)
CASSLSRVAGGRNTQYF

SEQ ID NO: 130209 - protein, 21 aa, Homo sapiens
  CDR3 for alpha chain variable domain of TCR clone 65105 (TRAV1-1, TRAJ6)
CLLLLRCERLERTGGSYIHTF

SEQ ID NO: 130210 - protein, 13 aa, Homo sapiens
  CDR3 for beta chain variable domain of TCR clone 65105 (TRBV10-2, TRBJ2-7)
CASGASGGYEQYF

SEQ ID NO: 130211 - protein, 15 aa, Homo sapiens
  CDR3 for alpha chain variable domain of TCR clone 65106 (TRAV26-1, TRAJ44)
CIVRIGNGTASKLTF

SEQ ID NO: 130212 - protein, 15 aa, Homo sapiens
  CDR3 for beta chain variable domain of TCR clone 65106 (TRBV7-6, TRBJ2-1)
CASSSLAGEGNEQFF

SEQ ID NO: 130213 - protein, 14 aa, Homo sapiens
  CDR3 for alpha chain variable domain of TCR clone 65107 (TRAV12-2, TRAJ17)
CAVLFKAAGSKLTF

SEQ ID NO: 130214 - protein, 14 aa, Homo sapiens
  CDR3 for beta chain variable domain of TCR clone 65107 (TRBV7-3, TRBJ1-1)
CASSLKGGNTEAFF

SEQ ID NO: 130215 - protein, 12 aa, Homo sapiens
  CDR3 for alpha chain variable domain of TCR clone 65108 (TRAV30, TRAJ43)
CGTEERGDDMRF

SEQ ID NO: 130216 - protein, 11 aa, Homo sapiens
  CDR3 for beta chain variable domain of TCR clone 65108 (TRBV29-1, TRBJ2-5)
CSEDRTGTQYF

SEQ ID NO: 130217 - protein, 14 aa, Homo sapiens
  CDR3 for alpha chain variable domain of TCR clone 65109 (TRAV29/DV5, TRAJ44)
CAAFLVGTASKLTF

SEQ ID NO: 130218 - protein, 14 aa, Homo sapiens
  CDR3 for beta chain variable domain of TCR clone 65109 (TRBV19, TRBJ2-1)
CASPTFVLSGEQFF

SEQ ID NO: 130219 - protein, 12 aa, Homo sapiens
  CDR3 for alpha chain variable domain of TCR clone 65110 (TRAV35, TRAJ49)
CAGWNTGNEFYF

SEQ ID NO: 130220 - protein, 16 aa, Homo sapiens
  CDR3 for beta chain variable domain of TCR clone 65110 (TRBV5-1, TRBJ2-2)
CASSLWDTTNTGELFF

SEQ ID NO: 130221 - protein, 15 aa, Homo sapiens
  CDR3 for alpha chain variable domain of TCR clone 65111 (TRAV27, TRAJ38)
CAARRNAGNNRKLIW

SEQ ID NO: 130222 - protein, 13 aa, Homo sapiens
  CDR3 for beta chain variable domain of TCR clone 65111 (TRBV12-5, TRBJ2-3)
CASGDRQSDTQHF

SEQ ID NO: 130223 - protein, 14 aa, Homo sapiens
  CDR3 for alpha chain variable domain of TCR clone 65112 (TRAV12-2, TRAJ17)
CAVLFKAAGNKLTF

SEQ ID NO: 130224 - protein, 15 aa, Homo sapiens
  CDR3 for beta chain variable domain of TCR clone 65112 (TRBV5-1, TRBJ2-3)
CASSYTSGSTDTQYF

SEQ ID NO: 130225 - protein, 14 aa, Homo sapiens
  CDR3 for alpha chain variable domain of TCR clone 65113 (TRAV17, TRAJ35)
CATDRPGFGNVLHF

SEQ ID NO: 130226 - protein, 14 aa, Homo sapiens
  CDR3 for beta chain variable domain of TCR clone 65113 (TRBV7-8, TRBJ2-3)
CASSLEAGTDTQYF

SEQ ID NO: 130227 - protein, 19 aa, Homo sapiens
  CDR3 for alpha chain variable domain of TCR clone 65114 (TRAV1-2, TRAJ26)
CLLPLCCERPDNYGQNFVF

SEQ ID NO: 130228 - protein, 18 aa, Homo sapiens
  CDR3 for beta chain variable domain of TCR clone 65114 (TRBV4-2, TRBJ1-4)
CASSPTLDRTGKNEKLFF

SEQ ID NO: 130229 - protein, 13 aa, Homo sapiens
  CDR3 for alpha chain variable domain of TCR clone 65115 (TRAV12-3, TRAJ33)
CAMSVNSNYQLIW

SEQ ID NO: 130230 - protein, 13 aa, Homo sapiens
  CDR3 for beta chain variable domain of TCR clone 65115 (TRBV7-2, TRBJ2-2)
CVSSLAVTGELFF

SEQ ID NO: 130231 - protein, 13 aa, Homo sapiens
  CDR3 for alpha chain variable domain of TCR clone 65116 (TRAV3, TRAJ21)
CAVREPDFNKFYF

SEQ ID NO: 130232 - protein, 20 aa, Homo sapiens
  CDR3 for beta chain variable domain of TCR clone 65116 (TRBV7-8, TRBJ2-2)
CASSHLFPGPTIHITGELFF

SEQ ID NO: 130233 - protein, 15 aa, Homo sapiens
  CDR3 for alpha chain variable domain of TCR clone 65117 (TRAV3, TRAJ4)
CAVRDGTGGYNKLIF

SEQ ID NO: 130234 - protein, 15 aa, Homo sapiens
  CDR3 for beta chain variable domain of TCR clone 65117 (TRBV2, TRBJ2-1)
CASSELAGSYNEQFF

SEQ ID NO: 130235 - protein, 14 aa, Homo sapiens
  CDR3 for alpha chain variable domain of TCR clone 65118 (TRAV2, TRAJ22)
CAVGRGGSARPLTF

SEQ ID NO: 130236 - protein, 12 aa, Homo sapiens
  CDR3 for beta chain variable domain of TCR clone 65118 (TRBV19, TRBJ2-1)
CASSMQDTEQFF

SEQ ID NO: 130237 - protein, 15 aa, Homo sapiens
  CDR3 for alpha chain variable domain of TCR clone 65119 (TRAV8-3, TRAJ45)
CASSYSGGGADGLTY

SEQ ID NO: 130238 - protein, 13 aa, Homo sapiens
  CDR3 for beta chain variable domain of TCR clone 65119 (TRBV10-3, TRBJ2-7)
CASKLAVNYEQYF

SEQ ID NO: 130239 - protein, 17 aa, Homo sapiens
  CDR3 for alpha chain variable domain of TCR clone 65120 (TRAV3, TRAJ6)
CAVRDSPRVGGSYIPTF

SEQ ID NO: 130240 - protein, 12 aa, Homo sapiens
  CDR3 for beta chain variable domain of TCR clone 65120 (TRBV11-2, TRBJ2-2)
CASSLGGGELFF

SEQ ID NO: 130241 - protein, 15 aa, Homo sapiens
  CDR3 for alpha chain variable domain of TCR clone 65121 (TRAV12-3, TRAJ10)
CASYILTGGGNKLTF

SEQ ID NO: 130242 - protein, 15 aa, Homo sapiens
  CDR3 for beta chain variable domain of TCR clone 65121 (TRBV27, TRBJ2-1)
CASSNGGGSSNEQFF

SEQ ID NO: 130243 - protein, 15 aa, Homo sapiens
  CDR3 for alpha chain variable domain of TCR clone 65122 (TRAV34, TRAJ38)
CGADFTPGNNRKLIW

SEQ ID NO: 130244 - protein, 15 aa, Homo sapiens
  CDR3 for beta chain variable domain of TCR clone 65122 (TRBV6-1, TRBJ2-7)
CASSEGVGNPYEQYF

SEQ ID NO: 130245 - protein, 18 aa, Homo sapiens
  CDR3 for alpha chain variable domain of TCR clone 65123 (TRAV9-2, TRAJ52)
CALSRHNAGGTSYGKLTF

SEQ ID NO: 130246 - protein, 17 aa, Homo sapiens
  CDR3 for beta chain variable domain of TCR clone 65123 (TRBV13, TRBJ2-3)
CASSLSRVAGGRNTQYF

SEQ ID NO: 130247 - protein, 13 aa, Homo sapiens
  CDR3 for alpha chain variable domain of TCR clone 65124 (TRAV21, TRAJ27)
CAARPGNAGKSTF

SEQ ID NO: 130248 - protein, 14 aa, Homo sapiens
  CDR3 for beta chain variable domain of TCR clone 65124 (TRBV11-2, TRBJ2-7)
CASSLGAGAYEQYV

SEQ ID NO: 130249 - protein, 16 aa, Homo sapiens
  CDR3 for alpha chain variable domain of TCR clone 65125 (TRAV21, TRAJ52)
CAVTNAGGTSYGTLTF

SEQ ID NO: 130250 - protein, 13 aa, Homo sapiens
  CDR3 for beta chain variable domain of TCR clone 65125 (TRBV20-1, TRBJ2-3)
CSARLAGTDTQYF

SEQ ID NO: 130251 - protein, 16 aa, Homo sapiens
  CDR3 for alpha chain variable domain of TCR clone 65126 (TRAV3, TRAJ18)
CAVRDGRGSTLGRLYF

SEQ ID NO: 130252 - protein, 17 aa, Homo sapiens
  CDR3 for beta chain variable domain of TCR clone 65126 (TRBV5-1, TRBJ2-3)
CASSKSGLADRTDTQYF

SEQ ID NO: 130253 - protein, 12 aa, Homo sapiens
  CDR3 for alpha chain variable domain of TCR clone 65127 (TRAV12-1, TRAJ29)
CAADSGNTPLVF

SEQ ID NO: 130254 - protein, 12 aa, Homo sapiens
  CDR3 for beta chain variable domain of TCR clone 65127 (TRBV2, TRBJ2-7)
CASKRGSYEQYF

SEQ ID NO: 130255 - protein, 17 aa, Homo sapiens
  CDR3 for alpha chain variable domain of TCR clone 65128 (TRAV3, TRAJ6)
CAVRDGPRAGGSYIPTF

SEQ ID NO: 130256 - protein, 13 aa, Homo sapiens
  CDR3 for beta chain variable domain of TCR clone 65128 (TRBV29-1, TRBJ1-1)
CSVGDSRDTEAFF

SEQ ID NO: 130257 - protein, 14 aa, Homo sapiens
  CDR3 for alpha chain variable domain of TCR clone 65129 (TRAV35, TRAJ13)
CAGRSPGGYQKVTF

SEQ ID NO: 130258 - protein, 14 aa, Homo sapiens
  CDR3 for beta chain variable domain of TCR clone 65129 (TRBV19, TRBJ2-2)
CASSMVGLSGELFF

SEQ ID NO: 130259 - protein, 10 aa, Homo sapiens
  CDR3 for alpha chain variable domain of TCR clone 65130 (TRAV21, TRAJ43)
CAVRIGDMRF

SEQ ID NO: 130260 - protein, 13 aa, Homo sapiens
  CDR3 for beta chain variable domain of TCR clone 65130 (TRBV20-1, TRBJ2-7)
CSAPGIADYEQYF

SEQ ID NO: 130261 - protein, 12 aa, Homo sapiens
  CDR3 for alpha chain variable domain of TCR clone 65131 (TRAV21, TRAJ11)
CAVRGGNSNLTF

SEQ ID NO: 130262 - protein, 15 aa, Homo sapiens
  CDR3 for beta chain variable domain of TCR clone 65131 (TRBV6-1, TRBJ2-7)
CASSEPIAATTEQYF

SEQ ID NO: 130263 - protein, 23 aa, Homo sapiens
  CDR3 for alpha chain variable domain of TCR clone 65132 (TRAV30, TRAJ43)
CTLRPPSSVTQEPTSAALSDMCF

SEQ ID NO: 130264 - protein, 13 aa, Homo sapiens
  CDR3 for beta chain variable domain of TCR clone 65132 (TRBV12-4, TRBJ2-2)
CASSITGSGELFF

SEQ ID NO: 130265 - protein, 15 aa, Homo sapiens
  CDR3 for alpha chain variable domain of TCR clone 65133 (TRAV26-1, TRAJ12)
IASSELMDSSYKLIF

SEQ ID NO: 130266 - protein, 11 aa, Homo sapiens
  CDR3 for beta chain variable domain of TCR clone 65133 (TRBV7-9, TRBJ2-3)
CASSPPDTQHF

SEQ ID NO: 130267 - protein, 15 aa, Homo sapiens
  CDR3 for alpha chain variable domain of TCR clone 65134 (TRAV23/DV6, TRAJ18)
CTARYRGSTLGRLYF

SEQ ID NO: 130268 - protein, 13 aa, Homo sapiens
  CDR3 for beta chain variable domain of TCR clone 65134 (TRBV7-2, TRBJ2-7)
CASSSPSGSEQYF

SEQ ID NO: 130269 - protein, 11 aa, Homo sapiens
  CDR3 for alpha chain variable domain of TCR clone 65135 (TRAV3, TRAJ49)
CAPITGNQFYF

SEQ ID NO: 130270 - protein, 15 aa, Homo sapiens
  CDR3 for beta chain variable domain of TCR clone 65135 (TRBV6-3, TRBJ2-7)
CASSSPGTVFYEQYF

SEQ ID NO: 130271 - protein, 11 aa, Homo sapiens
  CDR3 for alpha chain variable domain of TCR clone 65136 (TRAV21, TRAJ17)
CAAPAGNKLTF

SEQ ID NO: 130272 - protein, 16 aa, Homo sapiens
  CDR3 for beta chain variable domain of TCR clone 65136 (TRBV2, TRBJ2-5)
CASSETQGVGEETQYF

SEQ ID NO: 130273 - protein, 15 aa, Homo sapiens
  CDR3 for alpha chain variable domain of TCR clone 65137 (TRAV2, TRAJ28)
CAVLYSGAGSYQLTF

SEQ ID NO: 130274 - protein, 17 aa, Homo sapiens
  CDR3 for beta chain variable domain of TCR clone 65137 (TRBV20-1, TRBJ2-4)
CSARDWASGGRENIQYF

SEQ ID NO: 130275 - protein, 12 aa, Homo sapiens
  CDR3 for alpha chain variable domain of TCR clone 65138 (TRAV12-1, TRAJ30)
CVVNPRDDKIIF

SEQ ID NO: 130276 - protein, 12 aa, Homo sapiens
  CDR3 for beta chain variable domain of TCR clone 65138 (TRBV11-2, TRBJ2-2)
CASSLGGGELFF

SEQ ID NO: 130277 - protein, 12 aa, Homo sapiens
  CDR3 for alpha chain variable domain of TCR clone 65139 (TRAV17, TRAJ12)
CAGGDSSYKLIF

SEQ ID NO: 130278 - protein, 15 aa, Homo sapiens
  CDR3 for beta chain variable domain of TCR clone 65139 (TRBV10-2, TRBJ2-6)
CASSGQGTGANVLTF

SEQ ID NO: 130279 - protein, 16 aa, Homo sapiens
  CDR3 for alpha chain variable domain of TCR clone 65140 (TRAV38-1, TRAJ37)
CAFKGDGSSNTGKLIF

SEQ ID NO: 130280 - protein, 13 aa, Homo sapiens
  CDR3 for beta chain variable domain of TCR clone 65140 (TRBV12-4, TRBJ2-5)
CASSLCRRETQYF

SEQ ID NO: 130281 - protein, 15 aa, Homo sapiens
  CDR3 for alpha chain variable domain of TCR clone 65141 (TRAV2, TRAJ37)
CAVEDGSSNTGKLTF

SEQ ID NO: 130282 - protein, 13 aa, Homo sapiens
  CDR3 for beta chain variable domain of TCR clone 65141 (TRBV20-1, TRBJ1-6)
CSTFREGNSPLHF

SEQ ID NO: 130283 - protein, 14 aa, Homo sapiens
  CDR3 for alpha chain variable domain of TCR clone 65142 (TRAV17, TRAJ33)
CATDARRSNYQLIL

SEQ ID NO: 130284 - protein, 14 aa, Homo sapiens
  CDR3 for beta chain variable domain of TCR clone 65142 (TRBV25-1, TRBJ1-4)
CASSGGGQPEKLFF

SEQ ID NO: 130285 - protein, 11 aa, Homo sapiens
  CDR3 for alpha chain variable domain of TCR clone 65143 (TRAV17, TRAJ43)
CATDNNNDMRF

SEQ ID NO: 130286 - protein, 15 aa, Homo sapiens
  CDR3 for beta chain variable domain of TCR clone 65143 (TRBV20-1, TRBJ1-2)
CSAIRTGAFNCGYTF

SEQ ID NO: 130287 - protein, 12 aa, Homo sapiens
  CDR3 for alpha chain variable domain of TCR clone 65144 (TRAV12-3, TRAJ17)
CAMTITGNKLTF

SEQ ID NO: 130288 - protein, 15 aa, Homo sapiens
  CDR3 for beta chain variable domain of TCR clone 65144 (TRBV19, TRBJ2-1)
CASSILGEGRNEQFF

SEQ ID NO: 130289 - protein, 12 aa, Homo sapiens
  CDR3 for alpha chain variable domain of TCR clone 65145 (TRAV12-1, TRAJ40)
CVFYSGTYKYIF

SEQ ID NO: 130290 - protein, 14 aa, Homo sapiens
  CDR3 for beta chain variable domain of TCR clone 65145 (TRBV19, TRBJ2-1)
CASPTFVLSGEQFF

SEQ ID NO: 130291 - protein, 11 aa, Homo sapiens
  CDR3 for alpha chain variable domain of TCR clone 65146 (TRAV4, TRAJ31)
CLVGDNARLMF

SEQ ID NO: 130292 - protein, 17 aa, Homo sapiens
  CDR3 for beta chain variable domain of TCR clone 65146 (TRBV13, TRBJ2-3)
CASSLSRVAGGRNTQYF

SEQ ID NO: 130293 - protein, 17 aa, Homo sapiens
  CDR3 for alpha chain variable domain of TCR clone 65147 (TRAV3, TRAJ6)
CAVRDGPRAGGSYIPTF

SEQ ID NO: 130294 - protein, 20 aa, Homo sapiens
  CDR3 for beta chain variable domain of TCR clone 65147 (TRBV28, TRBJ2-1)
CTSTPIGRSPGLAGGNEQFF

SEQ ID NO: 130295 - protein, 13 aa, Homo sapiens
  CDR3 for alpha chain variable domain of TCR clone 65148 (TRAV35, TRAJ43)
CAGYPYNNDDMRF

SEQ ID NO: 130296 - protein, 15 aa, Homo sapiens
  CDR3 for beta chain variable domain of TCR clone 65148 (TRBV25-1, TRBJ1-4)
CASSKRIATNEKLFF

SEQ ID NO: 130297 - protein, 14 aa, Homo sapiens
  CDR3 for alpha chain variable domain of TCR clone 65149 (TRAV20, TRAJ10)
CAVWVEGGGNKLTF

SEQ ID NO: 130298 - protein, 18 aa, Homo sapiens
  CDR3 for beta chain variable domain of TCR clone 65149 (TRBV24-1, TRBJ2-1)
CATSDLMFLGRGVHEQFF

SEQ ID NO: 130299 - protein, 15 aa, Homo sapiens
  CDR3 for alpha chain variable domain of TCR clone 65150 (TRAV8-4, TRAJ11)
CAVSRALSGYSTLTF

SEQ ID NO: 130300 - protein, 16 aa, Homo sapiens
  CDR3 for beta chain variable domain of TCR clone 65150 (TRBV11-3, TRBJ2-3)
CASSSGSGGGTDTQYF

SEQ ID NO: 130301 - protein, 12 aa, Homo sapiens
  CDR3 for alpha chain variable domain of TCR clone 65151 (TRAV12-3, TRAJ17)
CAMTLTGNKLTF

SEQ ID NO: 130302 - protein, 16 aa, Homo sapiens
  CDR3 for beta chain variable domain of TCR clone 65151 (TRBV28, TRBJ2-7)
CASSLFFETGGPEQYF

SEQ ID NO: 130303 - protein, 17 aa, Homo sapiens
  CDR3 for alpha chain variable domain of TCR clone 65152 (TRAV8-6, TRAJ58)
CAVSSWVGETSGSRLTF

SEQ ID NO: 130304 - protein, 14 aa, Homo sapiens
  CDR3 for beta chain variable domain of TCR clone 65152 (TRBV7-2, TRBJ2-7)
CASSPKTSFYEQYF

SEQ ID NO: 130305 - protein, 14 aa, Homo sapiens
  CDR3 for alpha chain variable domain of TCR clone 65153 (TRAV21, TRAJ23)
CAIMIYNQGGRLIF

SEQ ID NO: 130306 - protein, 18 aa, Homo sapiens
  CDR3 for beta chain variable domain of TCR clone 65153 (TRBV20-1, TRBJ2-6)
CSAETTPTHGSGANVLTF

SEQ ID NO: 130307 - protein, 12 aa, Homo sapiens
  CDR3 for alpha chain variable domain of TCR clone 65154 (TRAV12-3, TRAJ17)
CAMTLTGNKLTF

SEQ ID NO: 130308 - protein, 13 aa, Homo sapiens
  CDR3 for beta chain variable domain of TCR clone 65154 (TRBV10-3, TRBJ2-7)
CASKRAVNYEQYF

SEQ ID NO: 130309 - protein, 16 aa, Homo sapiens
  CDR3 for alpha chain variable domain of TCR clone 65155 (TRAV3, TRAJ10)
CAVRDMRAGGGNKLNF

SEQ ID NO: 130310 - protein, 13 aa, Homo sapiens
  CDR3 for beta chain variable domain of TCR clone 65155 (TRBV6-1, TRBJ1-1)
CASSRQGNTEAFF

SEQ ID NO: 130311 - protein, 13 aa, Homo sapiens
  CDR3 for alpha chain variable domain of TCR clone 65156 (TRAV27, TRAJ8)
CAGGPTGFQKLVF

SEQ ID NO: 130312 - protein, 15 aa, Homo sapiens
  CDR3 for beta chain variable domain of TCR clone 65156 (TRBV6-1, TRBJ2-7)
CASSESVGDFYEQYF

SEQ ID NO: 130313 - protein, 11 aa, Homo sapiens
  CDR3 for alpha chain variable domain of TCR clone 65157 (TRAV21, TRAJ11)
CAVNGYSTLTF

SEQ ID NO: 130314 - protein, 16 aa, Homo sapiens
  CDR3 for beta chain variable domain of TCR clone 65157 (TRBV12-4, TRBJ1-5)
CASSRPVGGSNQPQHF

SEQ ID NO: 130315 - protein, 14 aa, Homo sapiens
  CDR3 for alpha chain variable domain of TCR clone 65158 (TRAV12-2, TRAJ13)
CAVKKTGGYQEVTF

SEQ ID NO: 130316 - protein, 12 aa, Homo sapiens
  CDR3 for beta chain variable domain of TCR clone 65158 (TRBV11-2, TRBJ2-2)
CASSLGGGELFF

SEQ ID NO: 130317 - protein, 15 aa, Homo sapiens
  CDR3 for alpha chain variable domain of TCR clone 65159 (TRAV8-4, TRAJ36)
CAVRKSWTGANNLFF

SEQ ID NO: 130318 - protein, 17 aa, Homo sapiens
  CDR3 for beta chain variable domain of TCR clone 65159 (TRBV3-1, TRBJ2-2)
CASSQDSQGPNTGGLFF

SEQ ID NO: 130319 - protein, 15 aa, Homo sapiens
  CDR3 for alpha chain variable domain of TCR clone 65160 (TRAV21, TRAJ40)
CAVRPQTSGTYKYIL

SEQ ID NO: 130320 - protein, 13 aa, Homo sapiens
  CDR3 for beta chain variable domain of TCR clone 65160 (TRBV7-2, TRBJ2-2)
CASSSVRAGELFF

SEQ ID NO: 130321 - protein, 15 aa, Homo sapiens
  CDR3 for alpha chain variable domain of TCR clone 65161 (TRAV21, TRAJ24)
CAARSSTDSWGKLQF

SEQ ID NO: 130322 - protein, 13 aa, Homo sapiens
  CDR3 for beta chain variable domain of TCR clone 65161 (TRBV7-9, TRBJ2-7)
CASSFAGAYEQYF

SEQ ID NO: 130323 - protein, 15 aa, Homo sapiens
  CDR3 for alpha chain variable domain of TCR clone 65162 (TRAV13-1, TRAJ32)
CAASIYGGATNKLIF

SEQ ID NO: 130324 - protein, 17 aa, Homo sapiens
  CDR3 for beta chain variable domain of TCR clone 65162 (TRBV7-3, TRBJ2-5)
CASSLGSGRSGSETKYF

SEQ ID NO: 130325 - protein, 12 aa, Homo sapiens
  CDR3 for alpha chain variable domain of TCR clone 65163 (TRAV2, TRAJ40)
CCGYLRNLQYIF

SEQ ID NO: 130326 - protein, 14 aa, Homo sapiens
  CDR3 for beta chain variable domain of TCR clone 65163 (TRBV19, TRBJ2-1)
CASPTFVLSGEQFF

SEQ ID NO: 130327 - protein, 13 aa, Homo sapiens
  CDR3 for alpha chain variable domain of TCR clone 65164 (TRAV2, TRAJ10)
CAVETRGGNKLTF

SEQ ID NO: 130328 - protein, 14 aa, Homo sapiens
  CDR3 for beta chain variable domain of TCR clone 65164 (TRBV20-1, TRBJ2-3)
CSAGGRRGTDTQYF

SEQ ID NO: 130329 - protein, 13 aa, Homo sapiens
  CDR3 for alpha chain variable domain of TCR clone 65165 (TRAV8-1, TRAJ32)
CAADGGATNKLIF

SEQ ID NO: 130330 - protein, 14 aa, Homo sapiens
  CDR3 for beta chain variable domain of TCR clone 65165 (TRBV2, TRBJ2-7)
CASSLTSGGYEQYF

SEQ ID NO: 130331 - protein, 11 aa, Homo sapiens
  CDR3 for alpha chain variable domain of TCR clone 65166 (TRAV2, TRAJ33)
CAVESNYQLIW

SEQ ID NO: 130332 - protein, 16 aa, Homo sapiens
  CDR3 for beta chain variable domain of TCR clone 65166 (TRBV19, TRBJ2-2)
CASRSPGTGATGELFF

SEQ ID NO: 130333 - protein, 12 aa, Homo sapiens
  CDR3 for alpha chain variable domain of TCR clone 65167 (TRAV12-2, TRAJ20)
CAVRPSDYKLSF

SEQ ID NO: 130334 - protein, 14 aa, Homo sapiens
  CDR3 for beta chain variable domain of TCR clone 65167 (TRBV6-1, TRBJ2-7)
CASNRARLDYEQYF

SEQ ID NO: 130335 - protein, 11 aa, Homo sapiens
  CDR3 for alpha chain variable domain of TCR clone 65168 (TRAV13-2, TRAJ23)
CAESPRGKLIF

SEQ ID NO: 130336 - protein, 15 aa, Homo sapiens
  CDR3 for beta chain variable domain of TCR clone 65168 (TRBV28, TRBJ2-1)
CASSGLAEVDNEQLF

SEQ ID NO: 130337 - protein, 15 aa, Homo sapiens
  CDR3 for alpha chain variable domain of TCR clone 65169 (TRAV27, TRAJ50)
CAGVGMGTSYDKVIF

SEQ ID NO: 130338 - protein, 14 aa, Homo sapiens
  CDR3 for beta chain variable domain of TCR clone 65169 (TRBV7-2, TRBJ1-1)
CASSFYDLNTEAFF

SEQ ID NO: 130339 - protein, 10 aa, Homo sapiens
  CDR3 for alpha chain variable domain of TCR clone 65170 (TRAV20, TRAJ22)
CAAPARQLTF

SEQ ID NO: 130340 - protein, 14 aa, Homo sapiens
  CDR3 for beta chain variable domain of TCR clone 65170 (TRBV19, TRBJ2-1)
CASSMGSGATKQFF

SEQ ID NO: 130341 - protein, 14 aa, Homo sapiens
  CDR3 for alpha chain variable domain of TCR clone 65171 (TRAV38-2/DV8, TRAJ30)
CAYMDVLGGDKIIF

SEQ ID NO: 130342 - protein, 15 aa, Homo sapiens
  CDR3 for beta chain variable domain of TCR clone 65171 (TRBV7-9, TRBJ2-2)
CASRPADRDTGELFF

SEQ ID NO: 130343 - protein, 14 aa, Homo sapiens
  CDR3 for alpha chain variable domain of TCR clone 65172 (TRAV2, TRAJ9)
CAVEDRSGGFKTIF

SEQ ID NO: 130344 - protein, 14 aa, Homo sapiens
  CDR3 for beta chain variable domain of TCR clone 65172 (TRBV7-3, TRBJ1-1)
CASSLKGGNTEAFF

SEQ ID NO: 130345 - protein, 12 aa, Homo sapiens
  CDR3 for alpha chain variable domain of TCR clone 65173 (TRAV21, TRAJ33)
CAKMDSNYQLIW

SEQ ID NO: 130346 - protein, 14 aa, Homo sapiens
  CDR3 for beta chain variable domain of TCR clone 65173 (TRBV7-3, TRBJ1-1)
CASSLKGRNTEAFF

SEQ ID NO: 130347 - protein, 17 aa, Homo sapiens
  CDR3 for alpha chain variable domain of TCR clone 65174 (TRAV26-1, TRAJ53)
CIVRVDDSGGSNYKLTF

SEQ ID NO: 130348 - protein, 14 aa, Homo sapiens
  CDR3 for beta chain variable domain of TCR clone 65174 (TRBV20-1, TRBJ2-7)
QCRVPAVYFYEQYF

SEQ ID NO: 130349 - protein, 13 aa, Homo sapiens
  CDR3 for alpha chain variable domain of TCR clone 65175 (TRAV26-2, TRAJ43)
CILRAVNNNDMRF

SEQ ID NO: 130350 - protein, 15 aa, Homo sapiens
  CDR3 for beta chain variable domain of TCR clone 65175 (TRBV7-2, TRBJ2-1)
CASTHGTGIYNEQVF

SEQ ID NO: 130351 - protein, 12 aa, Homo sapiens
  CDR3 for alpha chain variable domain of TCR clone 65176 (TRAV1-1, TRAJ39)
CAVPVVGNMLTL

SEQ ID NO: 130352 - protein, 17 aa, Homo sapiens
  CDR3 for beta chain variable domain of TCR clone 65176 (TRBV28, TRBJ2-5)
CASSTPEGDALQETQYF

SEQ ID NO: 130353 - protein, 16 aa, Homo sapiens
  CDR3 for alpha chain variable domain of TCR clone 65177 (TRAV21, TRAJ52)
CAVTNAGGTSYGKLTF

SEQ ID NO: 130354 - protein, 15 aa, Homo sapiens
  CDR3 for beta chain variable domain of TCR clone 65177 (TRBV9, TRBJ1-6)
CASSVAGTGDSPLHF

SEQ ID NO: 130355 - protein, 13 aa, Homo sapiens
  CDR3 for alpha chain variable domain of TCR clone 65178 (TRAV3, TRAJ27)
CAVRPLGAGKSTF

SEQ ID NO: 130356 - protein, 13 aa, Homo sapiens
  CDR3 for beta chain variable domain of TCR clone 65178 (TRBV7-3, TRBJ1-1)
CAGSQDWGAEAFF

SEQ ID NO: 130357 - protein, 12 aa, Homo sapiens
  CDR3 for alpha chain variable domain of TCR clone 65179 (TRAV12-3, TRAJ17)
CAMTPTGNKLTF

SEQ ID NO: 130358 - protein, 14 aa, Homo sapiens
  CDR3 for beta chain variable domain of TCR clone 65179 (TRBV12-4, TRBJ1-1)
CASTWTGHDTEAFF

SEQ ID NO: 130359 - protein, 13 aa, Homo sapiens
  CDR3 for alpha chain variable domain of TCR clone 65180 (TRAV13-2, TRAJ13)
CAERPGGYQEVTF

SEQ ID NO: 130360 - protein, 18 aa, Homo sapiens
  CDR3 for beta chain variable domain of TCR clone 65180 (TRBV7-6, TRBJ2-1)
CASSPRTSGMSSYNEQFF

SEQ ID NO: 130361 - protein, 13 aa, Homo sapiens
  CDR3 for alpha chain variable domain of TCR clone 65181 (TRAV13-2, TRAJ13)
CAERPGGYQKVTF

SEQ ID NO: 130362 - protein, 14 aa, Homo sapiens
  CDR3 for beta chain variable domain of TCR clone 65181 (TRBV23-1, TRBJ2-5)
CASSLLRSQETQYF

SEQ ID NO: 130363 - protein, 16 aa, Homo sapiens
  CDR3 for alpha chain variable domain of TCR clone 65182 (TRAV16, TRAJ52)
CALSGVGGTSYGKLTF

SEQ ID NO: 130364 - protein, 14 aa, Homo sapiens
  CDR3 for beta chain variable domain of TCR clone 65182 (TRBV19, TRBJ1-2)
CASGLQGQAYGYTF

SEQ ID NO: 130365 - protein, 12 aa, Homo sapiens
  CDR3 for alpha chain variable domain of TCR clone 65183 (TRAV1-1, TRAJ39)
CAVPVVGNMLTF

SEQ ID NO: 130366 - protein, 16 aa, Homo sapiens
  CDR3 for beta chain variable domain of TCR clone 65183 (TRBV28, TRBJ2-7)
CASSPWVATGGLSQYF

SEQ ID NO: 130367 - protein, 12 aa, Homo sapiens
  CDR3 for alpha chain variable domain of TCR clone 65184 (TRAV14/DV4, TRAJ9)
CAMDPGGFKTIF

SEQ ID NO: 130368 - protein, 16 aa, Homo sapiens
  CDR3 for beta chain variable domain of TCR clone 65184 (TRBV28, TRBJ2-5)
CASSFSPAGGWETQYF

SEQ ID NO: 130369 - protein, 16 aa, Homo sapiens
  CDR3 for alpha chain variable domain of TCR clone 65185 (TRAV3, TRAJ6)
CAVRDGMGRRKLHTSI

SEQ ID NO: 130370 - protein, 15 aa, Homo sapiens
  CDR3 for beta chain variable domain of TCR clone 65185 (TRBV9, TRBJ2-1)
CASSLAGSSYNEQFF

SEQ ID NO: 130371 - protein, 15 aa, Homo sapiens
  CDR3 for alpha chain variable domain of TCR clone 65186 (TRAV30, TRAJ57)
CGTAIPQGGSEKLVF

SEQ ID NO: 130372 - protein, 15 aa, Homo sapiens
  CDR3 for beta chain variable domain of TCR clone 65186 (TRBV6-3, TRBJ2-7)
CASSSPGTVFYEQYF

SEQ ID NO: 130373 - protein, 14 aa, Homo sapiens
  CDR3 for alpha chain variable domain of TCR clone 65187 (TRAV12-3, TRAJ10)
SHLPLTGGGNKLTF

SEQ ID NO: 130374 - protein, 15 aa, Homo sapiens
  CDR3 for beta chain variable domain of TCR clone 65187 (TRBV7-6, TRBJ2-1)
CASSSLAGEGNEQFF

SEQ ID NO: 130375 - protein, 12 aa, Homo sapiens
  CDR3 for alpha chain variable domain of TCR clone 65188 (TRAV20, TRAJ39)
CAVGNAGSMLTF

SEQ ID NO: 130376 - protein, 16 aa, Homo sapiens
  CDR3 for beta chain variable domain of TCR clone 65188 (TRBV15, TRBJ1-2)
CATSRGPRTGGGGYTF

SEQ ID NO: 130377 - protein, 14 aa, Homo sapiens
  CDR3 for alpha chain variable domain of TCR clone 65189 (TRAV29/DV5, TRAJ45)
CAASFRGGADGLTF

SEQ ID NO: 130378 - protein, 15 aa, Homo sapiens
  CDR3 for beta chain variable domain of TCR clone 65189 (TRBV11-3, TRBJ2-3)
CASLKDGREGDTQYF

SEQ ID NO: 130379 - protein, 13 aa, Homo sapiens
  CDR3 for alpha chain variable domain of TCR clone 65190 (TRAV21, TRAJ57)
CAVTQGGSEKLVF

SEQ ID NO: 130380 - protein, 17 aa, Homo sapiens
  CDR3 for beta chain variable domain of TCR clone 65190 (TRBV15, TRBJ1-4)
CATSRYGTGDPNEKLFF

SEQ ID NO: 130381 - protein, 15 aa, Homo sapiens
  CDR3 for alpha chain variable domain of TCR clone 65191 (TRAV12-3, TRAJ27)
CAMRAYNTNAGKSTF

SEQ ID NO: 130382 - protein, 13 aa, Homo sapiens
  CDR3 for beta chain variable domain of TCR clone 65191 (TRBV11-2, TRBJ2-5)
GASSRGPSETQYF

SEQ ID NO: 130383 - protein, 12 aa, Homo sapiens
  CDR3 for alpha chain variable domain of TCR clone 65192 (TRAV26-2, TRAJ21)
CILKGNFNKFYF

SEQ ID NO: 130384 - protein, 16 aa, Homo sapiens
  CDR3 for beta chain variable domain of TCR clone 65192 (TRBV12-5, TRBJ2-5)
CASGPRTSGNQETQYF

SEQ ID NO: 130385 - protein, 18 aa, Homo sapiens
  CDR3 for alpha chain variable domain of TCR clone 65193 (TRAV26-1, TRAJ52)
CIVRVAGAGGTSYGKLTF

SEQ ID NO: 130386 - protein, 13 aa, Homo sapiens
  CDR3 for beta chain variable domain of TCR clone 65193 (TRBV7-8, TRBJ1-2)
CASSAQSYYGYSF

SEQ ID NO: 130387 - protein, 13 aa, Homo sapiens
  CDR3 for alpha chain variable domain of TCR clone 65194 (TRAV13-1, TRAJ10)
CAATLGGGNKLTF

SEQ ID NO: 130388 - protein, 15 aa, Homo sapiens
  CDR3 for beta chain variable domain of TCR clone 65194 (TRBV7-9, TRBJ2-1)
CASSLGLAGGTEQFF

SEQ ID NO: 130389 - protein, 18 aa, Homo sapiens
  CDR3 for alpha chain variable domain of TCR clone 65195 (TRAV1-2, TRAJ16)
CLLPLSVNRFSDGQKLLF

SEQ ID NO: 130390 - protein, 15 aa, Homo sapiens
  CDR3 for beta chain variable domain of TCR clone 65195 (TRBV9, TRBJ1-6)
CASSVAGTGDSPLHF

SEQ ID NO: 130391 - protein, 11 aa, Homo sapiens
  CDR3 for alpha chain variable domain of TCR clone 65196 (TRAV1-1, TRAJ23)
CAVRQGGKLIF

SEQ ID NO: 130392 - protein, 20 aa, Homo sapiens
  CDR3 for beta chain variable domain of TCR clone 65196 (TRBV7-8, TRBJ2-2)
CASSHLFPGPTIHITGALFF

SEQ ID NO: 130393 - protein, 11 aa, Homo sapiens
  CDR3 for alpha chain variable domain of TCR clone 65197 (TRAV23/DV6, TRAJ48)
FAPRWGEKLTF

SEQ ID NO: 130394 - protein, 13 aa, Homo sapiens
  CDR3 for beta chain variable domain of TCR clone 65197 (TRBV12-4, TRBJ2-5)
CASSPGTEETQYF

SEQ ID NO: 130395 - protein, 14 aa, Homo sapiens
  CDR3 for alpha chain variable domain of TCR clone 65198 (TRAV26-1, TRAJ34)
CIVRVAYNTDKLVF

SEQ ID NO: 130396 - protein, 15 aa, Homo sapiens
  CDR3 for beta chain variable domain of TCR clone 65198 (TRBV20-1, TRBJ2-7)
CSARVPAAYFYEQYF

SEQ ID NO: 130397 - protein, 11 aa, Homo sapiens
  CDR3 for alpha chain variable domain of TCR clone 65199 (TRAV2, TRAJ13)
CASGGYQKFTF

SEQ ID NO: 130398 - protein, 16 aa, Homo sapiens
  CDR3 for beta chain variable domain of TCR clone 65199 (TRBV6-1, TRBJ2-5)
CASSETLDRGAETQYF

SEQ ID NO: 130399 - protein, 13 aa, Homo sapiens
  CDR3 for alpha chain variable domain of TCR clone 65200 (TRAV26-2, TRAJ21)
CILQPYNFNKFYF

SEQ ID NO: 130400 - protein, 13 aa, Homo sapiens
  CDR3 for beta chain variable domain of TCR clone 65200 (TRBV27, TRBJ2-1)
CASSLGPMDEQFF

SEQ ID NO: 130401 - protein, 15 aa, Homo sapiens
  CDR3 for alpha chain variable domain of TCR clone 65201 (TRAV38-1, TRAJ37)
CAFIHGSGNTGKIIF

SEQ ID NO: 130402 - protein, 12 aa, Homo sapiens
  CDR3 for beta chain variable domain of TCR clone 65201 (TRBV7-9, TRBJ2-7)
CASSFGSYEQYF

SEQ ID NO: 130403 - protein, 13 aa, Homo sapiens
  CDR3 for alpha chain variable domain of TCR clone 65202 (TRAV9-2, TRAJ53)
CALSGGSNYKLTF

SEQ ID NO: 130404 - protein, 13 aa, Homo sapiens
  CDR3 for beta chain variable domain of TCR clone 65202 (TRBV7-3, TRBJ1-1)
CASSQDWGAEAFF

SEQ ID NO: 130405 - protein, 14 aa, Homo sapiens
  CDR3 for alpha chain variable domain of TCR clone 65203 (TRAV1-2, TRAJ16)
CAVNRVSDGQKLLF

SEQ ID NO: 130406 - protein, 14 aa, Homo sapiens
  CDR3 for beta chain variable domain of TCR clone 65203 (TRBV18, TRBJ2-7)
CASSPRGGAYEQYF

SEQ ID NO: 130407 - protein, 13 aa, Homo sapiens
  CDR3 for alpha chain variable domain of TCR clone 65204 (TRAV8-3, TRAJ21)
CAVGAYNFNKFYF

SEQ ID NO: 130408 - protein, 16 aa, Homo sapiens
  CDR3 for beta chain variable domain of TCR clone 65204 (TRBV19, TRBJ2-1)
CASSMGGGSSYSEQFF

SEQ ID NO: 130409 - protein, 13 aa, Homo sapiens
  CDR3 for alpha chain variable domain of TCR clone 65205 (TRAV27, TRAJ42)
CAGARRSQGNLIF

SEQ ID NO: 130410 - protein, 15 aa, Homo sapiens
  CDR3 for beta chain variable domain of TCR clone 65205 (TRBV10-3, TRBJ2-2)
CAIRTDREDTGELFF

SEQ ID NO: 130411 - protein, 14 aa, Homo sapiens
  CDR3 for alpha chain variable domain of TCR clone 65206 (TRAV12-3, TRAJ9)
CAMSPNTGGFKTIF

SEQ ID NO: 130412 - protein, 15 aa, Homo sapiens
  CDR3 for beta chain variable domain of TCR clone 65206 (TRBV7-3, TRBJ2-2)
CASSETGQGTGELFF

SEQ ID NO: 130413 - protein, 16 aa, Homo sapiens
  CDR3 for alpha chain variable domain of TCR clone 65207 (TRAV12-3, TRAJ53)
CAMSPGSGGSNYKLTF

SEQ ID NO: 130414 - protein, 13 aa, Homo sapiens
  CDR3 for beta chain variable domain of TCR clone 65207 (TRBV10-3, TRBJ2-7)
CASKLAVNYGQYF

SEQ ID NO: 130415 - protein, 15 aa, Homo sapiens
  CDR3 for alpha chain variable domain of TCR clone 65208 (TRAV2, TRAJ24)
CAVEVLIDSWGKFQF

SEQ ID NO: 130416 - protein, 14 aa, Homo sapiens
  CDR3 for beta chain variable domain of TCR clone 65208 (TRBV19, TRBJ2-1)
CASSMGSGRRSSSS

SEQ ID NO: 130417 - protein, 11 aa, Homo sapiens
  CDR3 for alpha chain variable domain of TCR clone 65209 (TRAV30, TRAJ24)
WMLTAGGKFQF

SEQ ID NO: 130418 - protein, 13 aa, Homo sapiens
  CDR3 for beta chain variable domain of TCR clone 65209 (TRBV20-1, TRBJ1-1)
CSARGGGNTEAFF

SEQ ID NO: 130419 - protein, 14 aa, Homo sapiens
  CDR3 for alpha chain variable domain of TCR clone 65210 (TRAV38-1, TRAJ45)
CAYYSGGGDDGLTF

SEQ ID NO: 130420 - protein, 20 aa, Homo sapiens
  CDR3 for beta chain variable domain of TCR clone 65210 (TRBV28, TRBJ2-1)
CASTPIGRSPGLAGGNEQFF

SEQ ID NO: 130421 - protein, 11 aa, Homo sapiens
  CDR3 for alpha chain variable domain of TCR clone 65211 (TRAV21, TRAJ9)
CAVPGGFKTIF

SEQ ID NO: 130422 - protein, 12 aa, Homo sapiens
  CDR3 for beta chain variable domain of TCR clone 65211 (TRBV20-1, TRBJ2-3)
CSARVCTDTQYF

SEQ ID NO: 130423 - protein, 15 aa, Homo sapiens
  CDR3 for alpha chain variable domain of TCR clone 65212 (TRAV35, TRAJ58)
CAGRRQETSGSRLTS

SEQ ID NO: 130424 - protein, 16 aa, Homo sapiens
  CDR3 for beta chain variable domain of TCR clone 65212 (TRBV2, TRBJ2-1)
CASSVGGSLSYNEQFF

SEQ ID NO: 130425 - protein, 12 aa, Homo sapiens
  CDR3 for alpha chain variable domain of TCR clone 65213 (TRAV13-1, TRAJ53)
AASGGSNYNLTF

SEQ ID NO: 130426 - protein, 15 aa, Homo sapiens
  CDR3 for beta chain variable domain of TCR clone 65213 (TRBV5-1, TRBJ2-1)
CASSPPRAPYNEQFF

SEQ ID NO: 130427 - protein, 13 aa, Homo sapiens
  CDR3 for alpha chain variable domain of TCR clone 65214 (TRAV17, TRAJ26)
CATVDNYGQNCVF

SEQ ID NO: 130428 - protein, 16 aa, Homo sapiens
  CDR3 for beta chain variable domain of TCR clone 65214 (TRBV2, TRBJ2-1)
CASSVGGSLSYNEQFF

SEQ ID NO: 130429 - protein, 12 aa, Homo sapiens
  CDR3 for alpha chain variable domain of TCR clone 65215 (TRAV9-2, TRAJ5)
CALSPGRRALTF

SEQ ID NO: 130430 - protein, 16 aa, Homo sapiens
  CDR3 for beta chain variable domain of TCR clone 65215 (TRBV9, TRBJ2-2)
CASSAMGKGNTGELFF

SEQ ID NO: 130431 - protein, 14 aa, Homo sapiens
  CDR3 for alpha chain variable domain of TCR clone 65216 (TRAV1-2, TRAJ16)
CAVNRFSDGQKLLF

SEQ ID NO: 130432 - protein, 13 aa, Homo sapiens
  CDR3 for beta chain variable domain of TCR clone 65216 (TRBV4-1, TRBJ2-1)
CASSQAGGDEQLF

SEQ ID NO: 130433 - protein, 14 aa, Homo sapiens
  CDR3 for alpha chain variable domain of TCR clone 65217 (TRAV12-3, TRAJ10)
SHLPLTGGGNKLTF

SEQ ID NO: 130434 - protein, 14 aa, Homo sapiens
  CDR3 for beta chain variable domain of TCR clone 65217 (TRBV19, TRBJ2-7)
CASSIRLGDHEQYF

SEQ ID NO: 130435 - protein, 16 aa, Homo sapiens
  CDR3 for alpha chain variable domain of TCR clone 65218 (TRAV3, TRAJ10)
CAVRDMRAGGGNKLTS

SEQ ID NO: 130436 - protein, 19 aa, Homo sapiens
  CDR3 for beta chain variable domain of TCR clone 65218 (TRBV6-3, TRBJ1-2)
CASSYSRGRTGPPNYGYTF

SEQ ID NO: 130437 - protein, 16 aa, Homo sapiens
  CDR3 for alpha chain variable domain of TCR clone 65219 (TRAV14/DV4, TRAJ54)
CAMREGRIQGAQKLAF

SEQ ID NO: 130438 - protein, 18 aa, Homo sapiens
  CDR3 for beta chain variable domain of TCR clone 65219 (TRBV18, TRBJ1-3)
CASSPRGGAGPSGNTIYF

SEQ ID NO: 130439 - protein, 20 aa, Homo sapiens
  CDR3 for alpha chain variable domain of TCR clone 65220 (TRAV12-2, TRAJ52)
SPVIQPPARAGGTSYGKLTF

SEQ ID NO: 130440 - protein, 16 aa, Homo sapiens
  CDR3 for beta chain variable domain of TCR clone 65220 (TRBV15, TRBJ1-2)
CATSRGPRTGGGGHTF

SEQ ID NO: 130441 - protein, 12 aa, Homo sapiens
  CDR3 for alpha chain variable domain of TCR clone 65221 (TRAV20, TRAJ56)
CAVTGANSKLTF

SEQ ID NO: 130442 - protein, 12 aa, Homo sapiens
  CDR3 for beta chain variable domain of TCR clone 65221 (TRBV3-1, TRBJ2-1)
CASSQGSSGQFF

SEQ ID NO: 130443 - protein, 12 aa, Homo sapiens
  CDR3 for alpha chain variable domain of TCR clone 65222 (TRAV8-3, TRAJ20)
CAVGANDYKLSF

SEQ ID NO: 130444 - protein, 13 aa, Homo sapiens
  CDR3 for beta chain variable domain of TCR clone 65222 (TRBV29-1, TRBJ2-5)
CSVEATAQGTQYF

SEQ ID NO: 130445 - protein, 15 aa, Homo sapiens
  CDR3 for alpha chain variable domain of TCR clone 65223 (TRAV29/DV5, TRAJ24)
CAASGATDSWGKFQF

SEQ ID NO: 130446 - protein, 14 aa, Homo sapiens
  CDR3 for beta chain variable domain of TCR clone 65223 (TRBV11-2, TRBJ1-1)
CASSFLTGTTEAFF

SEQ ID NO: 130447 - protein, 14 aa, Homo sapiens
  CDR3 for alpha chain variable domain of TCR clone 65224 (TRAV8-4, TRAJ54)
CAVSEVLGAQKLVF

SEQ ID NO: 130448 - protein, 15 aa, Homo sapiens
  CDR3 for beta chain variable domain of TCR clone 65224 (TRBV6-1, TRBJ2-6)
CASSSRPSGANDLTF

SEQ ID NO: 130449 - protein, 12 aa, Homo sapiens
  CDR3 for alpha chain variable domain of TCR clone 65225 (TRAV30, TRAJ7)
CAGSYGNNRLAF

SEQ ID NO: 130450 - protein, 14 aa, Homo sapiens
  CDR3 for beta chain variable domain of TCR clone 65225 (TRBV12-5, TRBJ2-5)
CASGSRTHQETQYF

SEQ ID NO: 130451 - protein, 11 aa, Homo sapiens
  CDR3 for alpha chain variable domain of TCR clone 65226 (TRAV12-1, TRAJ34)
CVVSKGRELIF

SEQ ID NO: 130452 - protein, 12 aa, Homo sapiens
  CDR3 for beta chain variable domain of TCR clone 65226 (TRBV11-2, TRBJ2-2)
CASSLGGGELFF

SEQ ID NO: 130453 - protein, 16 aa, Homo sapiens
  CDR3 for alpha chain variable domain of TCR clone 65227 (TRAV3, TRAJ37)
CAVRPHGSGNTGKLIF

SEQ ID NO: 130454 - protein, 14 aa, Homo sapiens
  CDR3 for beta chain variable domain of TCR clone 65227 (TRBV25-1, TRBJ1-1)
CASTHLGWNTEAFF

SEQ ID NO: 130455 - protein, 14 aa, Homo sapiens
  CDR3 for alpha chain variable domain of TCR clone 65228 (TRAV9-2, TRAJ39)
CALYIYNAGNMLTF

SEQ ID NO: 130456 - protein, 18 aa, Homo sapiens
  CDR3 for beta chain variable domain of TCR clone 65228 (TRBV20-1, TRBJ2-3)
CSASGLAGGPGTTDTQYF

SEQ ID NO: 130457 - protein, 14 aa, Homo sapiens
  CDR3 for alpha chain variable domain of TCR clone 65229 (TRAV1-2, TRAJ16)
CALNRFSDGQKLLF

SEQ ID NO: 130458 - protein, 15 aa, Homo sapiens
  CDR3 for beta chain variable domain of TCR clone 65229 (TRBV9, TRBJ1-6)
CASSVAGTGDSPLHF

SEQ ID NO: 130459 - protein, 13 aa, Homo sapiens
  CDR3 for alpha chain variable domain of TCR clone 65230 (TRAV27, TRAJ6)
CAEGTRGSYIPTF

SEQ ID NO: 130460 - protein, 13 aa, Homo sapiens
  CDR3 for beta chain variable domain of TCR clone 65230 (TRBV4-1, TRBJ2-2)
CASSQENTGELFF

SEQ ID NO: 130461 - protein, 10 aa, Homo sapiens
  CDR3 for alpha chain variable domain of TCR clone 65231 (TRAV23/DV6, TRAJ57)
CAASSTLSQV

SEQ ID NO: 130462 - protein, 14 aa, Homo sapiens
  CDR3 for beta chain variable domain of TCR clone 65231 (TRBV19, TRBJ2-1)
CASSKDRGQDEQFF

SEQ ID NO: 130463 - protein, 16 aa, Homo sapiens
  CDR3 for alpha chain variable domain of TCR clone 65232 (TRAV3, TRAJ10)
CAVRDMRAGGGNKLTF

SEQ ID NO: 130464 - protein, 19 aa, Homo sapiens
  CDR3 for beta chain variable domain of TCR clone 65232 (TRBV6-3, TRBJ1-2)
CASSYSKGRTGPPNYGYTV

SEQ ID NO: 130465 - protein, 13 aa, Homo sapiens
  CDR3 for alpha chain variable domain of TCR clone 65233 (TRAV3, TRAJ21)
CAVREPDFNKFYF

SEQ ID NO: 130466 - protein, 19 aa, Homo sapiens
  CDR3 for beta chain variable domain of TCR clone 65233 (TRBV4-2, TRBJ2-2)
CASSQESGRNSRRHGELFF

SEQ ID NO: 130467 - protein, 11 aa, Homo sapiens
  CDR3 for alpha chain variable domain of TCR clone 65234 (TRAV3, TRAJ32)
CAVSEGIMVVL

SEQ ID NO: 130468 - protein, 13 aa, Homo sapiens
  CDR3 for beta chain variable domain of TCR clone 65234 (TRBV2, TRBJ1-1)
CASSEGGNTEAFF

SEQ ID NO: 130469 - protein, 12 aa, Homo sapiens
  CDR3 for alpha chain variable domain of TCR clone 65235 (TRAV13-2, TRAJ23)
CAERHRRGKLIF

SEQ ID NO: 130470 - protein, 16 aa, Homo sapiens
  CDR3 for beta chain variable domain of TCR clone 65235 (TRBV20-1, TRBJ1-4)
CSAPGQGLLTNEKLFF

SEQ ID NO: 130471 - protein, 12 aa, Homo sapiens
  CDR3 for alpha chain variable domain of TCR clone 65236 (TRAV16, TRAJ10)
CSRTGGGNKLTF

SEQ ID NO: 130472 - protein, 12 aa, Homo sapiens
  CDR3 for beta chain variable domain of TCR clone 65236 (TRBV11-1, TRBJ1-1)
CASSHRQGEAFF

SEQ ID NO: 130473 - protein, 17 aa, Homo sapiens
  CDR3 for alpha chain variable domain of TCR clone 65237 (TRAV8-6, TRAJ58)
CAVSSWVGETSGSTLTF

SEQ ID NO: 130474 - protein, 14 aa, Homo sapiens
  CDR3 for beta chain variable domain of TCR clone 65237 (TRBV4-2, TRBJ2-1)
CASGLDRAYNEQFF

SEQ ID NO: 130475 - protein, 16 aa, Homo sapiens
  CDR3 for alpha chain variable domain of TCR clone 65238 (TRAV23/DV6, TRAJ9)
CAASIGGNTGGFKTIF

SEQ ID NO: 130476 - protein, 13 aa, Homo sapiens
  CDR3 for beta chain variable domain of TCR clone 65238 (TRBV15, TRBJ2-5)
CATSQIGEETQYF

SEQ ID NO: 130477 - protein, 12 aa, Homo sapiens
  CDR3 for alpha chain variable domain of TCR clone 65239 (TRAV27, TRAJ36)
ASTPAGATNLFF

SEQ ID NO: 130478 - protein, 13 aa, Homo sapiens
  CDR3 for beta chain variable domain of TCR clone 65239 (TRBV7-9, TRBJ2-3)
CASSPGSTDTQYF

SEQ ID NO: 130479 - protein, 15 aa, Homo sapiens
  CDR3 for alpha chain variable domain of TCR clone 65240 (TRAV3, TRAJ22)
CAVRDRGGSARQLTF

SEQ ID NO: 130480 - protein, 16 aa, Homo sapiens
  CDR3 for beta chain variable domain of TCR clone 65240 (TRBV20-1, TRBJ1-2)
CSASMGQGVANYGYTF

SEQ ID NO: 130481 - protein, 15 aa, Homo sapiens
  CDR3 for alpha chain variable domain of TCR clone 65241 (TRAV26-1, TRAJ29)
CIVRVEGSGNTPLVF

SEQ ID NO: 130482 - protein, 15 aa, Homo sapiens
  CDR3 for beta chain variable domain of TCR clone 65241 (TRBV6-1, TRBJ2-3)
CASSERGGITDTQYF

SEQ ID NO: 130483 - protein, 11 aa, Homo sapiens
  CDR3 for alpha chain variable domain of TCR clone 65242 (TRAV3, TRAJ17)
PRGAAGTKLTF

SEQ ID NO: 130484 - protein, 16 aa, Homo sapiens
  CDR3 for beta chain variable domain of TCR clone 65242 (TRBV7-6, TRBJ2-1)
CASSAPGPSSYNEQFF

SEQ ID NO: 130485 - protein, 14 aa, Homo sapiens
  CDR3 for alpha chain variable domain of TCR clone 65243 (TRAV9-2, TRAJ39)
CALYIYNAGNMLTF

SEQ ID NO: 130486 - protein, 15 aa, Homo sapiens
  CDR3 for beta chain variable domain of TCR clone 65243 (TRBV5-1, TRBJ1-5)
CASSAAAGGDQPQHF

SEQ ID NO: 130487 - protein, 11 aa, Homo sapiens
  CDR3 for alpha chain variable domain of TCR clone 65244 (TRAV3, TRAJ21)
CAVGNFNKFYF

SEQ ID NO: 130488 - protein, 15 aa, Homo sapiens
  CDR3 for beta chain variable domain of TCR clone 65244 (TRBV4-1, TRBJ2-5)
CASSQWDLYQETQYF

SEQ ID NO: 130489 - protein, 15 aa, Homo sapiens
  CDR3 for alpha chain variable domain of TCR clone 65245 (TRAV3, TRAJ5)
CAVRDLDTGRGALTF

SEQ ID NO: 130490 - protein, 15 aa, Homo sapiens
  CDR3 for beta chain variable domain of TCR clone 65245 (TRBV20-1, TRBJ2-1)
CSARSPGGPGNEQFF

SEQ ID NO: 130491 - protein, 14 aa, Homo sapiens
  CDR3 for alpha chain variable domain of TCR clone 65246 (TRAV8-1, TRAJ13)
CAVKRSGGYQKVTF

SEQ ID NO: 130492 - protein, 15 aa, Homo sapiens
  CDR3 for beta chain variable domain of TCR clone 65246 (TRBV20-1, TRBJ2-7)
CSARDRVSGMDEQYF

SEQ ID NO: 130493 - protein, 14 aa, Homo sapiens
  CDR3 for alpha chain variable domain of TCR clone 65247 (TRAV12-2, TRAJ13)
CAVKKTGGNQKVTF

SEQ ID NO: 130494 - protein, 12 aa, Homo sapiens
  CDR3 for beta chain variable domain of TCR clone 65247 (TRBV12-4, TRBJ1-2)
CASSFIWLHLRF

SEQ ID NO: 130495 - protein, 12 aa, Homo sapiens
  CDR3 for alpha chain variable domain of TCR clone 65248 (TRAV13-2, TRAJ39)
CAESRPGNMLTF

SEQ ID NO: 130496 - protein, 12 aa, Homo sapiens
  CDR3 for beta chain variable domain of TCR clone 65248 (TRBV11-2, TRBJ2-2)
CASSLGGGELFF

SEQ ID NO: 130497 - protein, 12 aa, Homo sapiens
  CDR3 for alpha chain variable domain of TCR clone 65249 (TRAV21, TRAJ33)
CAKMDSNYQLIW

SEQ ID NO: 130498 - protein, 14 aa, Homo sapiens
  CDR3 for beta chain variable domain of TCR clone 65249 (TRBV2, TRBJ2-7)
CPSSLTSGGYEQYF

SEQ ID NO: 130499 - protein, 13 aa, Homo sapiens
  CDR3 for alpha chain variable domain of TCR clone 65250 (TRAV2, TRAJ40)
CAVVTSGTYKYIF

SEQ ID NO: 130500 - protein, 14 aa, Homo sapiens
  CDR3 for beta chain variable domain of TCR clone 65250 (TRBV11-3, TRBJ2-3)
CQPEGRAGGDTQYF

SEQ ID NO: 130501 - protein, 18 aa, Homo sapiens
  CDR3 for alpha chain variable domain of TCR clone 65251 (TRAV21, TRAJ52)
CAVRPSPAGGTSYGKLTF

SEQ ID NO: 130502 - protein, 12 aa, Homo sapiens
  CDR3 for beta chain variable domain of TCR clone 65251 (TRBV11-2, TRBJ2-1)
CASGPGNNEQFF

SEQ ID NO: 130503 - protein, 16 aa, Homo sapiens
  CDR3 for alpha chain variable domain of TCR clone 65252 (TRAV30, TRAJ24)
CGTEMVDADSWGKFQF

SEQ ID NO: 130504 - protein, 14 aa, Homo sapiens
  CDR3 for beta chain variable domain of TCR clone 65252 (TRBV12-5, TRBJ2-5)
CASGSRTHQGTQYF

SEQ ID NO: 130505 - protein, 12 aa, Homo sapiens
  CDR3 for alpha chain variable domain of TCR clone 65253 (TRAV13-1, TRAJ21)
CAAKEGFNKFYF

SEQ ID NO: 130506 - protein, 14 aa, Homo sapiens
  CDR3 for beta chain variable domain of TCR clone 65253 (TRBV5-4, TRBJ1-1)
CASSLDSRRHEAFF

SEQ ID NO: 130507 - protein, 14 aa, Homo sapiens
  CDR3 for alpha chain variable domain of TCR clone 65254 (TRAV1-2, TRAJ16)
CAVNRFSDGQKLLF

SEQ ID NO: 130508 - protein, 16 aa, Homo sapiens
  CDR3 for beta chain variable domain of TCR clone 65254 (TRBV11-2, TRBJ1-2)
CASSLDTGGADCGYTF

SEQ ID NO: 130509 - protein, 18 aa, Homo sapiens
  CDR3 for alpha chain variable domain of TCR clone 65255 (TRAV13-1, TRAJ52)
CAAKNPNAGGTSYGKLTF

SEQ ID NO: 130510 - protein, 13 aa, Homo sapiens
  CDR3 for beta chain variable domain of TCR clone 65255 (TRBV14, TRBJ2-7)
CASSQVAVGEQYF

SEQ ID NO: 130511 - protein, 14 aa, Homo sapiens
  CDR3 for alpha chain variable domain of TCR clone 65256 (TRAV20, TRAJ10)
CAVRVEGGGNKLAF

SEQ ID NO: 130512 - protein, 18 aa, Homo sapiens
  CDR3 for beta chain variable domain of TCR clone 65256 (TRBV24-1, TRBJ2-1)
CATSDLMFLGRGVHEQFF

SEQ ID NO: 130513 - protein, 17 aa, Homo sapiens
  CDR3 for alpha chain variable domain of TCR clone 65257 (TRAV36/DV7, TRAJ52)
CAVAQRAGGTSYGKLTF

SEQ ID NO: 130514 - protein, 15 aa, Homo sapiens
  CDR3 for beta chain variable domain of TCR clone 65257 (TRBV7-9, TRBJ1-6)
CASSSPGRGNSPLHF

SEQ ID NO: 130515 - protein, 17 aa, Homo sapiens
  CDR3 for alpha chain variable domain of TCR clone 65258 (TRAV13-1, TRAJ42)
CAASELWRKPRKSHLWK

SEQ ID NO: 130516 - protein, 12 aa, Homo sapiens
  CDR3 for beta chain variable domain of TCR clone 65258 (TRBV7-9, TRBJ2-7)
CASSLEGYEQYF

SEQ ID NO: 130517 - protein, 14 aa, Homo sapiens
  CDR3 for alpha chain variable domain of TCR clone 65259 (TRAV12-2, TRAJ13)
CAVKKTGGYQKVTF

SEQ ID NO: 130518 - protein, 14 aa, Homo sapiens
  CDR3 for beta chain variable domain of TCR clone 65259 (TRBV7-9, TRBJ1-6)
CASSVMTDYSPLHF

SEQ ID NO: 130519 - protein, 13 aa, Homo sapiens
  CDR3 for alpha chain variable domain of TCR clone 65260 (TRAV2, TRAJ40)
CAVVTSGTYKYVF

SEQ ID NO: 130520 - protein, 14 aa, Homo sapiens
  CDR3 for beta chain variable domain of TCR clone 65260 (TRBV7-9, TRBJ2-1)
CASSSMVGFGEQFF

SEQ ID NO: 130521 - protein, 14 aa, Homo sapiens
  CDR3 for alpha chain variable domain of TCR clone 65261 (TRAV8-3, TRAJ4)
CAVGAAGGYNKLIF

SEQ ID NO: 130522 - protein, 17 aa, Homo sapiens
  CDR3 for beta chain variable domain of TCR clone 65261 (TRBV11-1, TRBJ2-7)
CASSLTGSFGLDYEQYF

SEQ ID NO: 130523 - protein, 14 aa, Homo sapiens
  CDR3 for alpha chain variable domain of TCR clone 65262 (TRAV9-2, TRAJ6)
CALIDPGGSYIPTF

SEQ ID NO: 130524 - protein, 16 aa, Homo sapiens
  CDR3 for beta chain variable domain of TCR clone 65262 (TRBV19, TRBJ2-2)
CASRSPGTGATGELFF

SEQ ID NO: 130525 - protein, 15 aa, Homo sapiens
  CDR3 for alpha chain variable domain of TCR clone 65263 (TRAV35, TRAJ20)
CAGQLVGSNDHKLSF

SEQ ID NO: 130526 - protein, 13 aa, Homo sapiens
  CDR3 for beta chain variable domain of TCR clone 65263 (TRBV19, TRBJ2-7)
CASSKTGTHEQYF

SEQ ID NO: 130527 - protein, 10 aa, Homo sapiens
  CDR3 for alpha chain variable domain of TCR clone 65264 (TRAV30, TRAJ48)
CGIGNEKLSF

SEQ ID NO: 130528 - protein, 14 aa, Homo sapiens
  CDR3 for beta chain variable domain of TCR clone 65264 (TRBV7-6, TRBJ2-3)
CASSVAGGTDTQYF

SEQ ID NO: 130529 - protein, 16 aa, Homo sapiens
  CDR3 for alpha chain variable domain of TCR clone 65265 (TRAV30, TRAJ24)
CGTEIVDADSWGKFQF

SEQ ID NO: 130530 - protein, 12 aa, Homo sapiens
  CDR3 for beta chain variable domain of TCR clone 65265 (TRBV11-2, TRBJ2-1)
CASSPGNNEQFF

SEQ ID NO: 130531 - protein, 15 aa, Homo sapiens
  CDR3 for alpha chain variable domain of TCR clone 65266 (TRAV8-4, TRAJ3)
CAVTGENFVQQCFQD

SEQ ID NO: 130532 - protein, 16 aa, Homo sapiens
  CDR3 for beta chain variable domain of TCR clone 65266 (TRBV4-2, TRBJ1-1)
CASSQAGFGMNTEAFF

SEQ ID NO: 130533 - protein, 13 aa, Homo sapiens
  CDR3 for alpha chain variable domain of TCR clone 65267 (TRAV27, TRAJ45)
CRSSGGGADGLTF

SEQ ID NO: 130534 - protein, 17 aa, Homo sapiens
  CDR3 for beta chain variable domain of TCR clone 65267 (TRBV11-2, TRBJ2-1)
CASSLYSPGVEYNEQFF

SEQ ID NO: 130535 - protein, 12 aa, Homo sapiens
  CDR3 for alpha chain variable domain of TCR clone 65268 (TRAV12-3, TRAJ17)
CAMTLTGNKLTF

SEQ ID NO: 130536 - protein, 15 aa, Homo sapiens
  CDR3 for beta chain variable domain of TCR clone 65268 (TRBV12-4, TRBJ2-5)
CASSPPTGLQGTQYF

SEQ ID NO: 130537 - protein, 14 aa, Homo sapiens
  CDR3 for alpha chain variable domain of TCR clone 65269 (TRAV8-3, TRAJ4)
CAVGASGGYNKLMF

SEQ ID NO: 130538 - protein, 16 aa, Homo sapiens
  CDR3 for beta chain variable domain of TCR clone 65269 (TRBV4-3, TRBJ2-2)
CASSHLQGSGTGELFF

SEQ ID NO: 130539 - protein, 11 aa, Homo sapiens
  CDR3 for alpha chain variable domain of TCR clone 65270 (TRAV3, TRAJ21)
CAVGSFNKFYF

SEQ ID NO: 130540 - protein, 16 aa, Homo sapiens
  CDR3 for beta chain variable domain of TCR clone 65270 (TRBV19, TRBJ2-1)
CASSKAGPGSCNEQFF

SEQ ID NO: 130541 - protein, 12 aa, Homo sapiens
  CDR3 for alpha chain variable domain of TCR clone 65271 (TRAV13-2, TRAJ23)
CAECHRGGKLIF

SEQ ID NO: 130542 - protein, 16 aa, Homo sapiens
  CDR3 for beta chain variable domain of TCR clone 65271 (TRBV11-2, TRBJ1-1)
CASSLRQGGEHSKAFF

SEQ ID NO: 130543 - protein, 15 aa, Homo sapiens
  CDR3 for alpha chain variable domain of TCR clone 65272 (TRAV26-1, TRAJ23)
CIVRVAGYQGGKLIF

SEQ ID NO: 130544 - protein, 18 aa, Homo sapiens
  CDR3 for beta chain variable domain of TCR clone 65272 (TRBV28, TRBJ2-1)
CASSSTSGRANPYNEQFF

SEQ ID NO: 130545 - protein, 17 aa, Homo sapiens
  CDR3 for alpha chain variable domain of TCR clone 65273 (TRAV36/DV7, TRAJ52)
CAVAQRAGGTSHGKLTF

SEQ ID NO: 130546 - protein, 15 aa, Homo sapiens
  CDR3 for beta chain variable domain of TCR clone 65273 (TRBV6-5, TRBJ1-2)
CASSYSQAFNYGYTF

SEQ ID NO: 130547 - protein, 16 aa, Homo sapiens
  CDR3 for alpha chain variable domain of TCR clone 65274 (TRAV12-1, TRAJ13)
CVVNLEVSGGYQKVTF

SEQ ID NO: 130548 - protein, 16 aa, Homo sapiens
  CDR3 for beta chain variable domain of TCR clone 65274 (TRBV24-1, TRBJ2-6)
CAASDRRASGANVLTF

SEQ ID NO: 130549 - protein, 12 aa, Homo sapiens
  CDR3 for alpha chain variable domain of TCR clone 65275 (TRAV17, TRAJ4)
CATDGGYNKLIF

SEQ ID NO: 130550 - protein, 12 aa, Homo sapiens
  CDR3 for beta chain variable domain of TCR clone 65275 (TRBV11-2, TRBJ2-2)
CASSLPTGELFF

SEQ ID NO: 130551 - protein, 11 aa, Homo sapiens
  CDR3 for alpha chain variable domain of TCR clone 65276 (TRAV23/DV6, TRAJ58)
CAARLLRGETS

SEQ ID NO: 130552 - protein, 17 aa, Homo sapiens
  CDR3 for beta chain variable domain of TCR clone 65276 (TRBV7-8, TRBJ2-6)
CASSAGTGGAGANVLTF

SEQ ID NO: 130553 - protein, 17 aa, Homo sapiens
  CDR3 for alpha chain variable domain of TCR clone 65277 (TRAV3, TRAJ42)
CAVRDRVYGGSQGNLIF

SEQ ID NO: 130554 - protein, 14 aa, Homo sapiens
  CDR3 for beta chain variable domain of TCR clone 65277 (TRBV7-2, TRBJ2-5)
CASSPRGSSETQYF

SEQ ID NO: 130555 - protein, 11 aa, Homo sapiens
  CDR3 for alpha chain variable domain of TCR clone 65278 (TRAV23/DV6, TRAJ58)
CAARLLRGETS

SEQ ID NO: 130556 - protein, 16 aa, Homo sapiens
  CDR3 for beta chain variable domain of TCR clone 65278 (TRBV12-5, TRBJ2-5)
CASGPRTSGNQETQYF

SEQ ID NO: 130557 - protein, 15 aa, Homo sapiens
  CDR3 for alpha chain variable domain of TCR clone 65279 (TRAV8-3, TRAJ11)
CAVGLLNSGYSTLTF

SEQ ID NO: 130558 - protein, 13 aa, Homo sapiens
  CDR3 for beta chain variable domain of TCR clone 65279 (TRBV15, TRBJ1-6)
CATSGGLNSPLHF

SEQ ID NO: 130559 - protein, 12 aa, Homo sapiens
  CDR3 for alpha chain variable domain of TCR clone 65280 (TRAV26-1, TRAJ43)
CIVRGNNNDMRF

SEQ ID NO: 130560 - protein, 16 aa, Homo sapiens
  CDR3 for beta chain variable domain of TCR clone 65280 (TRBV12-5, TRBJ2-5)
CASGPRTSGNQETQYF

SEQ ID NO: 130561 - protein, 14 aa, Homo sapiens
  CDR3 for alpha chain variable domain of TCR clone 65281 (TRAV1-2, TRAJ16)
CAVNRFSDGQKLLF

SEQ ID NO: 130562 - protein, 12 aa, Homo sapiens
  CDR3 for beta chain variable domain of TCR clone 65281 (TRBV7-9, TRBJ2-7)
CASSLARDEQYF

SEQ ID NO: 130563 - protein, 15 aa, Homo sapiens
  CDR3 for alpha chain variable domain of TCR clone 65282 (TRAV3, TRAJ32)
CAVSSYGGAPNKLIF

SEQ ID NO: 130564 - protein, 13 aa, Homo sapiens
  CDR3 for beta chain variable domain of TCR clone 65282 (TRBV20-1, TRBJ2-7)
CSARPSTNYEQYF

SEQ ID NO: 130565 - protein, 12 aa, Homo sapiens
  CDR3 for alpha chain variable domain of TCR clone 65283 (TRAV12-3, TRAJ17)
CAMTLTGNKLTF

SEQ ID NO: 130566 - protein, 15 aa, Homo sapiens
  CDR3 for beta chain variable domain of TCR clone 65283 (TRBV4-2, TRBJ1-2)
CASSQRTGGRDGYTF

SEQ ID NO: 130567 - protein, 10 aa, Homo sapiens
  CDR3 for alpha chain variable domain of TCR clone 65284 (TRAV30, TRAJ48)
CGIGNEKLTF

SEQ ID NO: 130568 - protein, 15 aa, Homo sapiens
  CDR3 for beta chain variable domain of TCR clone 65284 (TRBV27, TRBJ2-1)
CASSNGGGSSNEQFF

SEQ ID NO: 130569 - protein, 16 aa, Homo sapiens
  CDR3 for alpha chain variable domain of TCR clone 65285 (TRAV30, TRAJ24)
CGTEIVDADSWGKFQF

SEQ ID NO: 130570 - protein, 16 aa, Homo sapiens
  CDR3 for beta chain variable domain of TCR clone 65285 (TRBV19, TRBJ1-5)
CASSTWTGGGNQPQHF

SEQ ID NO: 130571 - protein, 12 aa, Homo sapiens
  CDR3 for alpha chain variable domain of TCR clone 65286 (TRAV12-2, TRAJ16)
CAVNLDGQKLLF

SEQ ID NO: 130572 - protein, 17 aa, Homo sapiens
  CDR3 for beta chain variable domain of TCR clone 65286 (TRBV20-1, TRBJ2-2)
CSASGSGQGGLTGELFF

SEQ ID NO: 130573 - protein, 13 aa, Homo sapiens
  CDR3 for alpha chain variable domain of TCR clone 65287 (TRAV27, TRAJ49)
CSPRPYTGNQFYF

SEQ ID NO: 130574 - protein, 18 aa, Homo sapiens
  CDR3 for beta chain variable domain of TCR clone 65287 (TRBV7-3, TRBJ2-5)
CASSLGGAAQGRWETQYF

SEQ ID NO: 130575 - protein, 16 aa, Homo sapiens
  CDR3 for alpha chain variable domain of TCR clone 65288 (TRAV26-2, TRAJ45)
CTTASPIGGGADGLTF

SEQ ID NO: 130576 - protein, 20 aa, Homo sapiens
  CDR3 for beta chain variable domain of TCR clone 65288 (TRBV28, TRBJ2-1)
CASTPSGRSPGLAGGNEQFF

SEQ ID NO: 130577 - protein, 13 aa, Homo sapiens
  CDR3 for alpha chain variable domain of TCR clone 65289 (TRAV2, TRAJ40)
CAVVTSGTYKYIF

SEQ ID NO: 130578 - protein, 16 aa, Homo sapiens
  CDR3 for beta chain variable domain of TCR clone 65289 (TRBV12-4, TRBJ2-5)
CASSFFVRGRQETQYF

SEQ ID NO: 130579 - protein, 13 aa, Homo sapiens
  CDR3 for alpha chain variable domain of TCR clone 65290 (TRAV39, TRAJ33)
CSANPDSNYQLIW

SEQ ID NO: 130580 - protein, 13 aa, Homo sapiens
  CDR3 for beta chain variable domain of TCR clone 65290 (TRBV18, TRBJ1-1)
CASSGGRNTEAFF

SEQ ID NO: 130581 - protein, 14 aa, Homo sapiens
  CDR3 for alpha chain variable domain of TCR clone 65291 (TRAV1-2, TRAJ16)
CAVNRFSDGQKLLF

SEQ ID NO: 130582 - protein, 14 aa, Homo sapiens
  CDR3 for beta chain variable domain of TCR clone 65291 (TRBV12-4, TRBJ1-1)
CASSPGTGGTEAFF

SEQ ID NO: 130583 - protein, 13 aa, Homo sapiens
  CDR3 for alpha chain variable domain of TCR clone 65292 (TRAV3, TRAJ41)
CAVSSNSGYALNF

SEQ ID NO: 130584 - protein, 12 aa, Homo sapiens
  CDR3 for beta chain variable domain of TCR clone 65292 (TRBV2, TRBJ2-1)
CASRPGPREQFS

SEQ ID NO: 130585 - protein, 18 aa, Homo sapiens
  CDR3 for alpha chain variable domain of TCR clone 65293 (TRAV21, TRAJ52)
CAVRPSPAGGTSYGKLTF

SEQ ID NO: 130586 - protein, 15 aa, Homo sapiens
  CDR3 for beta chain variable domain of TCR clone 65293 (TRBV19, TRBJ1-1)
CASTSGHIQNTEAFF

SEQ ID NO: 130587 - protein, 14 aa, Homo sapiens
  CDR3 for alpha chain variable domain of TCR clone 65294 (TRAV1-2, TRAJ8)
CAVREDPGFQKLVF

SEQ ID NO: 130588 - protein, 17 aa, Homo sapiens
  CDR3 for beta chain variable domain of TCR clone 65294 (TRBV6-1, TRBJ1-2)
CASSGTHSQRGNYGYTF

SEQ ID NO: 130589 - protein, 13 aa, Homo sapiens
  CDR3 for alpha chain variable domain of TCR clone 65295 (TRAV8-3, TRAJ28)
CAVGAVGSYQLTF

SEQ ID NO: 130590 - protein, 15 aa, Homo sapiens
  CDR3 for beta chain variable domain of TCR clone 65295 (TRBV7-9, TRBJ1-5)
CTSSQGHQPNQPQHF

SEQ ID NO: 130591 - protein, 14 aa, Homo sapiens
  CDR3 for alpha chain variable domain of TCR clone 65296 (TRAV1-2, TRAJ16)
CAVNRFSDGQKLLF

SEQ ID NO: 130592 - protein, 14 aa, Homo sapiens
  CDR3 for beta chain variable domain of TCR clone 65296 (TRBV25-1, TRBJ1-4)
CASSGGGQPEKLFF

SEQ ID NO: 130593 - protein, 11 aa, Homo sapiens
  CDR3 for alpha chain variable domain of TCR clone 65297 (TRAV12-3, TRAJ49)
CAANTGNQFYF

SEQ ID NO: 130594 - protein, 15 aa, Homo sapiens
  CDR3 for beta chain variable domain of TCR clone 65297 (TRBV7-2, TRBJ2-1)
CASSSGLAGGNEQFF

SEQ ID NO: 130595 - protein, 15 aa, Homo sapiens
  CDR3 for alpha chain variable domain of TCR clone 65298 (TRAV27, TRAJ38)
CAARRNAGNNRKLIW

SEQ ID NO: 130596 - protein, 18 aa, Homo sapiens
  CDR3 for beta chain variable domain of TCR clone 65298 (TRBV7-3, TRBJ2-1)
CASSLTLASGRAMVSSSS

SEQ ID NO: 130597 - protein, 14 aa, Homo sapiens
  CDR3 for alpha chain variable domain of TCR clone 65299 (TRAV26-1, TRAJ26)
CIVRATFLGQNFVF

SEQ ID NO: 130598 - protein, 16 aa, Homo sapiens
  CDR3 for beta chain variable domain of TCR clone 65299 (TRBV12-4, TRBJ2-7)
CASRSTGTGTSYEQYF

SEQ ID NO: 130599 - protein, 10 aa, Homo sapiens
  CDR3 for alpha chain variable domain of TCR clone 65300 (TRAV2, TRAJ34)
CAVVNDKLIF

SEQ ID NO: 130600 - protein, 13 aa, Homo sapiens
  CDR3 for beta chain variable domain of TCR clone 65300 (TRBV7-3, TRBJ1-1)
CASSQDWGAEAFF

SEQ ID NO: 130601 - protein, 10 aa, Homo sapiens
  CDR3 for alpha chain variable domain of TCR clone 65301 (TRAV25, TRAJ53)
CAGSNYKLTF

SEQ ID NO: 130602 - protein, 14 aa, Homo sapiens
  CDR3 for beta chain variable domain of TCR clone 65301 (TRBV7-7, TRBJ2-7)
CASGLGRGVGEQYF

SEQ ID NO: 130603 - protein, 19 aa, Homo sapiens
  CDR3 for alpha chain variable domain of TCR clone 65302 (TRAV26-1, TRAJ52)
CIVRVANNAGGTSYGKLTF

SEQ ID NO: 130604 - protein, 16 aa, Homo sapiens
  CDR3 for beta chain variable domain of TCR clone 65302 (TRBV12-5, TRBJ2-5)
CASGPRTSGNQETQYF

SEQ ID NO: 130605 - protein, 13 aa, Homo sapiens
  CDR3 for alpha chain variable domain of TCR clone 65303 (TRAV12-3, TRAJ5)
CAMIYTGRRALTF

SEQ ID NO: 130606 - protein, 12 aa, Homo sapiens
  CDR3 for beta chain variable domain of TCR clone 65303 (TRBV18, TRBJ1-4)
CASSPSRGKLFF

SEQ ID NO: 130607 - protein, 16 aa, Homo sapiens
  CDR3 for alpha chain variable domain of TCR clone 65304 (TRAV12-3, TRAJ53)
CAMSPGSGGSNYKLTF

SEQ ID NO: 130608 - protein, 15 aa, Homo sapiens
  CDR3 for beta chain variable domain of TCR clone 65304 (TRBV20-1, TRBJ2-7)
CSARVPAAYFYEQYF

SEQ ID NO: 130609 - protein, 14 aa, Homo sapiens
  CDR3 for alpha chain variable domain of TCR clone 65305 (TRAV10, TRAJ36)
CVVKHEGGANNLFF

SEQ ID NO: 130610 - protein, 16 aa, Homo sapiens
  CDR3 for beta chain variable domain of TCR clone 65305 (TRBV7-3, TRBJ2-2)
CASSLKRGTLSGELFF

SEQ ID NO: 130611 - protein, 16 aa, Homo sapiens
  CDR3 for alpha chain variable domain of TCR clone 65306 (TRAV3, TRAJ37)
CAVRVRGAGNTGKLIF

SEQ ID NO: 130612 - protein, 11 aa, Homo sapiens
  CDR3 for beta chain variable domain of TCR clone 65306 (TRBV11-2, TRBJ2-2)
CASSLPGELFF

SEQ ID NO: 130613 - protein, 13 aa, Homo sapiens
  CDR3 for alpha chain variable domain of TCR clone 65307 (TRAV8-3, TRAJ36)
CAVGATGAKNLFF

SEQ ID NO: 130614 - protein, 15 aa, Homo sapiens
  CDR3 for beta chain variable domain of TCR clone 65307 (TRBV7-2, TRBJ1-2)
CASSPRAGWNYGYTF

SEQ ID NO: 130615 - protein, 12 aa, Homo sapiens
  CDR3 for alpha chain variable domain of TCR clone 65308 (TRAV17, TRAJ20)
CATDGDDYKLSF

SEQ ID NO: 130616 - protein, 13 aa, Homo sapiens
  CDR3 for beta chain variable domain of TCR clone 65308 (TRBV10-2, TRBJ2-7)
CASGASGGYEQYF

SEQ ID NO: 130617 - protein, 17 aa, Homo sapiens
  CDR3 for alpha chain variable domain of TCR clone 65309 (TRAV3, TRAJ6)
CAVRDGPRAGGSYIPKF

SEQ ID NO: 130618 - protein, 15 aa, Homo sapiens
  CDR3 for beta chain variable domain of TCR clone 65309 (TRBV7-8, TRBJ1-5)
CASSLERRGLEPQHF

SEQ ID NO: 130619 - protein, 15 aa, Homo sapiens
  CDR3 for alpha chain variable domain of TCR clone 65310 (TRAV3, TRAJ13)
CAVRVYSGGYQRVTF

SEQ ID NO: 130620 - protein, 15 aa, Homo sapiens
  CDR3 for beta chain variable domain of TCR clone 65310 (TRBV5-7, TRBJ1-2)
CASSLGVAANYGYTL

SEQ ID NO: 130621 - protein, 14 aa, Homo sapiens
  CDR3 for alpha chain variable domain of TCR clone 65311 (TRAV8-4, TRAJ13)
CAVILSGGYQKVTF

SEQ ID NO: 130622 - protein, 14 aa, Homo sapiens
  CDR3 for beta chain variable domain of TCR clone 65311 (TRBV7-2, TRBJ1-2)
CASSQTGSTYGYTF

SEQ ID NO: 130623 - protein, 13 aa, Homo sapiens
  CDR3 for alpha chain variable domain of TCR clone 65312 (TRAV35, TRAJ42)
CAWFPGSQGNLIF

SEQ ID NO: 130624 - protein, 13 aa, Homo sapiens
  CDR3 for beta chain variable domain of TCR clone 65312 (TRBV29-1, TRBJ2-1)
CSVEGGRVNEQFF

SEQ ID NO: 130625 - protein, 15 aa, Homo sapiens
  CDR3 for alpha chain variable domain of TCR clone 65313 (TRAV26-1, TRAJ40)
CIDRYATSGTYKYIF

SEQ ID NO: 130626 - protein, 11 aa, Homo sapiens
  CDR3 for beta chain variable domain of TCR clone 65313 (TRBV7-9, TRBJ2-1)
CASSSKNEQFF

SEQ ID NO: 130627 - protein, 18 aa, Homo sapiens
  CDR3 for alpha chain variable domain of TCR clone 65314 (TRAV13-1, TRAJ52)
CAAKNPNACGTSYGKLTF

SEQ ID NO: 130628 - protein, 15 aa, Homo sapiens
  CDR3 for beta chain variable domain of TCR clone 65314 (TRBV6-1, TRBJ2-3)
CASSERGGITDTQYF

SEQ ID NO: 130629 - protein, 14 aa, Homo sapiens
  CDR3 for alpha chain variable domain of TCR clone 65315 (TRAV1-2, TRAJ8)
CAVREDTGFQKLVF

SEQ ID NO: 130630 - protein, 17 aa, Homo sapiens
  CDR3 for beta chain variable domain of TCR clone 65315 (TRBV28, TRBJ2-7)
CASSPPHRASGVYEQYF

SEQ ID NO: 130631 - protein, 12 aa, Homo sapiens
  CDR3 for alpha chain variable domain of TCR clone 65316 (TRAV8-3, TRAJ20)
CAVGANDYKLSF

SEQ ID NO: 130632 - protein, 13 aa, Homo sapiens
  CDR3 for beta chain variable domain of TCR clone 65316 (TRBV12-4, TRBJ2-7)
CASSPTETYEQYF

SEQ ID NO: 130633 - protein, 11 aa, Homo sapiens
  CDR3 for alpha chain variable domain of TCR clone 65317 (TRAV2, TRAJ33)
CDVDSNYQLIW

SEQ ID NO: 130634 - protein, 14 aa, Homo sapiens
  CDR3 for beta chain variable domain of TCR clone 65317 (TRBV11-2, TRBJ2-3)
CASSRLARTDTQYF

SEQ ID NO: 130635 - protein, 15 aa, Homo sapiens
  CDR3 for alpha chain variable domain of TCR clone 65318 (TRAV12-3, TRAJ48)
CAMNAKNFGNEKLTF

SEQ ID NO: 130636 - protein, 14 aa, Homo sapiens
  CDR3 for beta chain variable domain of TCR clone 65318 (TRBV2, TRBJ1-6)
CASSESRNNSPLLF

SEQ ID NO: 130637 - protein, 16 aa, Homo sapiens
  CDR3 for alpha chain variable domain of TCR clone 65319 (TRAV12-2, TRAJ6)
CAAPLAGPGGSYIPTF

SEQ ID NO: 130638 - protein, 13 aa, Homo sapiens
  CDR3 for beta chain variable domain of TCR clone 65319 (TRBV6-9, TRBJ2-5)
CASKGDGRRTQYF

SEQ ID NO: 130639 - protein, 15 aa, Homo sapiens
  CDR3 for alpha chain variable domain of TCR clone 65320 (TRAV3, TRAJ22)
CAVRDRSGSARQLTF

SEQ ID NO: 130640 - protein, 13 aa, Homo sapiens
  CDR3 for beta chain variable domain of TCR clone 65320 (TRBV20-1, TRBJ1-1)
CSARVGGNTEALF

SEQ ID NO: 130641 - protein, 14 aa, Homo sapiens
  CDR3 for alpha chain variable domain of TCR clone 65321 (TRAV35, TRAJ33)
CAGSSQDSTYQLIW

SEQ ID NO: 130642 - protein, 15 aa, Homo sapiens
  CDR3 for beta chain variable domain of TCR clone 65321 (TRBV20-1, TRBJ2-7)
CSAESGTSGAYEQYF

SEQ ID NO: 130643 - protein, 13 aa, Homo sapiens
  CDR3 for alpha chain variable domain of TCR clone 65322 (TRAV27, TRAJ57)
CRSAQGGSEKLVF

SEQ ID NO: 130644 - protein, 11 aa, Homo sapiens
  CDR3 for beta chain variable domain of TCR clone 65322 (TRBV11-2, TRBJ1-1)
CASGINTEAFF

SEQ ID NO: 130645 - protein, 17 aa, Homo sapiens
  CDR3 for alpha chain variable domain of TCR clone 65323 (TRAV3, TRAJ42)
CAVRDRDYVGSQGNLIF

SEQ ID NO: 130646 - protein, 14 aa, Homo sapiens
  CDR3 for beta chain variable domain of TCR clone 65323 (TRBV7-2, TRBJ2-5)
CASSPRGSSETQYF

SEQ ID NO: 130647 - protein, 14 aa, Homo sapiens
  CDR3 for alpha chain variable domain of TCR clone 65324 (TRAV13-1, TRAJ35)
CAASKGGFGNVLHC

SEQ ID NO: 130648 - protein, 14 aa, Homo sapiens
  CDR3 for beta chain variable domain of TCR clone 65324 (TRBV11-2, TRBJ2-5)
CASSRTGGIETQYF

SEQ ID NO: 130649 - protein, 15 aa, Homo sapiens
  CDR3 for alpha chain variable domain of TCR clone 65325 (TRAV12-1, TRAJ44)
CVADLPTGTASKLTF

SEQ ID NO: 130650 - protein, 13 aa, Homo sapiens
  CDR3 for beta chain variable domain of TCR clone 65325 (TRBV6-5, TRBJ2-5)
CASSPQVGETQYF

SEQ ID NO: 130651 - protein, 19 aa, Homo sapiens
  CDR3 for alpha chain variable domain of TCR clone 65326 (TRAV2, TRAJ20)
VLQVREADAAVYRDCKLSF

SEQ ID NO: 130652 - protein, 13 aa, Homo sapiens
  CDR3 for beta chain variable domain of TCR clone 65326 (TRBV15, TRBJ1-6)
CATSGGLNSPLHF

SEQ ID NO: 130653 - protein, 13 aa, Homo sapiens
  CDR3 for alpha chain variable domain of TCR clone 65327 (TRAV35, TRAJ42)
FAGFPGSQGNLIF

SEQ ID NO: 130654 - protein, 14 aa, Homo sapiens
  CDR3 for beta chain variable domain of TCR clone 65327 (TRBV19, TRBJ2-1)
CASPTFVLSGEQFF

SEQ ID NO: 130655 - protein, 10 aa, Homo sapiens
  CDR3 for alpha chain variable domain of TCR clone 65328 (TRAV8-1, TRAJ21)
CAVNGVKFYF

SEQ ID NO: 130656 - protein, 16 aa, Homo sapiens
  CDR3 for beta chain variable domain of TCR clone 65328 (TRBV7-2, TRBJ1-5)
CASSPWGPEGNQPQHF

SEQ ID NO: 130657 - protein, 11 aa, Homo sapiens
  CDR3 for alpha chain variable domain of TCR clone 65329 (TRAV1-2, TRAJ20)
CAVSNDCKLSF

SEQ ID NO: 130658 - protein, 16 aa, Homo sapiens
  CDR3 for beta chain variable domain of TCR clone 65329 (TRBV29-1, TRBJ2-6)
CSVEDITYSGANVLTF

SEQ ID NO: 130659 - protein, 13 aa, Homo sapiens
  CDR3 for alpha chain variable domain of TCR clone 65330 (TRAV27, TRAJ45)
CRSSGGGADGLTF

SEQ ID NO: 130660 - protein, 15 aa, Homo sapiens
  CDR3 for beta chain variable domain of TCR clone 65330 (TRBV5-1, TRBJ2-1)
CASSPPRAPYNEQFF

SEQ ID NO: 130661 - protein, 17 aa, Homo sapiens
  CDR3 for alpha chain variable domain of TCR clone 65331 (TRAV26-1, TRAJ28)
CIVRALYSGAWSYQLTF

SEQ ID NO: 130662 - protein, 12 aa, Homo sapiens
  CDR3 for beta chain variable domain of TCR clone 65331 (TRBV12-4, TRBJ2-1)
CASRQTENEQFF

SEQ ID NO: 130663 - protein, 14 aa, Homo sapiens
  CDR3 for alpha chain variable domain of TCR clone 65332 (TRAV29/DV5, TRAJ47)
CAASSIEYGNKLVF

SEQ ID NO: 130664 - protein, 15 aa, Homo sapiens
  CDR3 for beta chain variable domain of TCR clone 65332 (TRBV19, TRBJ1-2)
CASSVGQVLNYGYTF

SEQ ID NO: 130665 - protein, 12 aa, Homo sapiens
  CDR3 for alpha chain variable domain of TCR clone 65333 (TRAV12-3, TRAJ20)
CAMVRGDYKLSF

SEQ ID NO: 130666 - protein, 14 aa, Homo sapiens
  CDR3 for beta chain variable domain of TCR clone 65333 (TRBV5-5, TRBJ1-5)
CVSSGQGVDQPQHF

SEQ ID NO: 130667 - protein, 16 aa, Homo sapiens
  CDR3 for alpha chain variable domain of TCR clone 65334 (TRAV12-3, TRAJ53)
CAMSPGRGGSNYKLTF

SEQ ID NO: 130668 - protein, 12 aa, Homo sapiens
  CDR3 for beta chain variable domain of TCR clone 65334 (TRBV7-8, TRBJ2-7)
CASSLGDREQYF

SEQ ID NO: 130669 - protein, 14 aa, Homo sapiens
  CDR3 for alpha chain variable domain of TCR clone 65335 (TRAV1-2, TRAJ8)
CAVRKDTGFQKLVF

SEQ ID NO: 130670 - protein, 15 aa, Homo sapiens
  CDR3 for beta chain variable domain of TCR clone 65335 (TRBV20-1, TRBJ2-7)
CSARDRVSGMDEQYF

SEQ ID NO: 130671 - protein, 14 aa, Homo sapiens
  CDR3 for alpha chain variable domain of TCR clone 65336 (TRAV26-1, TRAJ39)
CIVRGSRAGNKLTF

SEQ ID NO: 130672 - protein, 15 aa, Homo sapiens
  CDR3 for beta chain variable domain of TCR clone 65336 (TRBV7-9, TRBJ1-5)
CASSQGHQPNQPQHF

SEQ ID NO: 130673 - protein, 14 aa, Homo sapiens
  CDR3 for alpha chain variable domain of TCR clone 65337 (TRAV16, TRAJ37)
CALDISGNTGKLTF

SEQ ID NO: 130674 - protein, 14 aa, Homo sapiens
  CDR3 for beta chain variable domain of TCR clone 65337 (TRBV7-6, TRBJ2-7)
CASSFRQGADEQYF

SEQ ID NO: 130675 - protein, 14 aa, Homo sapiens
  CDR3 for alpha chain variable domain of TCR clone 65338 (TRAV13-1, TRAJ6)
CAASITGGSYIPTF

SEQ ID NO: 130676 - protein, 17 aa, Homo sapiens
  CDR3 for beta chain variable domain of TCR clone 65338 (TRBV28, TRBJ2-5)
CASSTPEGDALQETQYF

SEQ ID NO: 130677 - protein, 11 aa, Homo sapiens
  CDR3 for alpha chain variable domain of TCR clone 65339 (TRAV1-2, TRAJ31)
CAVNNNARLMF

SEQ ID NO: 130678 - protein, 12 aa, Homo sapiens
  CDR3 for beta chain variable domain of TCR clone 65339 (TRBV11-2, TRBJ2-2)
CASSLGGGELFF

SEQ ID NO: 130679 - protein, 17 aa, Homo sapiens
  CDR3 for alpha chain variable domain of TCR clone 65340 (TRAV12-3, TRAJ6)
CAMSARGGAGGSYIPTF

SEQ ID NO: 130680 - protein, 12 aa, Homo sapiens
  CDR3 for beta chain variable domain of TCR clone 65340 (TRBV12-4, TRBJ2-3)
CASSTLPDTQHF

SEQ ID NO: 130681 - protein, 16 aa, Homo sapiens
  CDR3 for alpha chain variable domain of TCR clone 65341 (TRAV30, TRAJ24)
CGTEIVDADSWGKFQF

SEQ ID NO: 130682 - protein, 14 aa, Homo sapiens
  CDR3 for beta chain variable domain of TCR clone 65341 (TRBV7-2, TRBJ2-5)
CASSFTQGQETQYF

SEQ ID NO: 130683 - protein, 13 aa, Homo sapiens
  CDR3 for alpha chain variable domain of TCR clone 65342 (TRAV8-6, TRAJ50)
CAVIKTSYDKVIF

SEQ ID NO: 130684 - protein, 15 aa, Homo sapiens
  CDR3 for beta chain variable domain of TCR clone 65342 (TRBV18, TRBJ2-1)
CASSPPSASYNEQFF

SEQ ID NO: 130685 - protein, 12 aa, Homo sapiens
  CDR3 for alpha chain variable domain of TCR clone 65343 (TRAV13-2, TRAJ37)
CAEKGNTGKLIF

SEQ ID NO: 130686 - protein, 12 aa, Homo sapiens
  CDR3 for beta chain variable domain of TCR clone 65343 (TRBV7-6, TRBJ2-3)
CASSWAEDTQYF

SEQ ID NO: 130687 - protein, 13 aa, Homo sapiens
  CDR3 for alpha chain variable domain of TCR clone 65344 (TRAV21, TRAJ37)
CAVSSGNTGKLIF

SEQ ID NO: 130688 - protein, 17 aa, Homo sapiens
  CDR3 for beta chain variable domain of TCR clone 65344 (TRBV5-1, TRBJ2-5)
CASSLLGLAANQGTQYF

SEQ ID NO: 130689 - protein, 15 aa, Homo sapiens
  CDR3 for alpha chain variable domain of TCR clone 65345 (TRAV12-3, TRAJ48)
CAMGASNFGNEKLTF

SEQ ID NO: 130690 - protein, 13 aa, Homo sapiens
  CDR3 for beta chain variable domain of TCR clone 65345 (TRBV28, TRBJ2-7)
CASKAGGVYEQYF

SEQ ID NO: 130691 - protein, 14 aa, Homo sapiens
  CDR3 for alpha chain variable domain of TCR clone 65346 (TRAV12-2, TRAJ45)
CAVYSGGGADGLTF

SEQ ID NO: 130692 - protein, 15 aa, Homo sapiens
  CDR3 for beta chain variable domain of TCR clone 65346 (TRBV4-1, TRBJ2-5)
CASSQWDLYQETQYF

SEQ ID NO: 130693 - protein, 11 aa, Homo sapiens
  CDR3 for alpha chain variable domain of TCR clone 65347 (TRAV1-2, TRAJ20)
CAVVNDYKLSF

SEQ ID NO: 130694 - protein, 18 aa, Homo sapiens
  CDR3 for beta chain variable domain of TCR clone 65347 (TRBV20-1, TRBJ2-6)
CSAETTPTHGSGANVLTF

SEQ ID NO: 130695 - protein, 14 aa, Homo sapiens
  CDR3 for alpha chain variable domain of TCR clone 65348 (TRAV1-2, TRAJ8)
CAVREDTGFQKLVF

SEQ ID NO: 130696 - protein, 16 aa, Homo sapiens
  CDR3 for beta chain variable domain of TCR clone 65348 (TRBV20-1, TRBJ2-4)
CNARAILAGQGDIQYF

SEQ ID NO: 130697 - protein, 16 aa, Homo sapiens
  CDR3 for alpha chain variable domain of TCR clone 65349 (TRAV30, TRAJ57)
CGTGWAPQGGSEKLVF

SEQ ID NO: 130698 - protein, 14 aa, Homo sapiens
  CDR3 for beta chain variable domain of TCR clone 65349 (TRBV18, TRBJ1-1)
CASSPGLQGVEAFF

SEQ ID NO: 130699 - protein, 11 aa, Homo sapiens
  CDR3 for alpha chain variable domain of TCR clone 65350 (TRAV2, TRAJ13)
CASGGYQKVTF

SEQ ID NO: 130700 - protein, 14 aa, Homo sapiens
  CDR3 for beta chain variable domain of TCR clone 65350 (TRBV18, TRBJ1-2)
CASSPDRVVYGDTF

SEQ ID NO: 130701 - protein, 11 aa, Homo sapiens
  CDR3 for alpha chain variable domain of TCR clone 65351 (TRAV13-2, TRAJ39)
CAENAGNMLTF

SEQ ID NO: 130702 - protein, 17 aa, Homo sapiens
  CDR3 for beta chain variable domain of TCR clone 65351 (TRBV11-2, TRBJ2-1)
CASSLYPPGVEYNEQFF

SEQ ID NO: 130703 - protein, 18 aa, Homo sapiens
  CDR3 for alpha chain variable domain of TCR clone 65352 (TRAV13-1, TRAJ52)
CSAKNPNAGGTSYGKLTF

SEQ ID NO: 130704 - protein, 14 aa, Homo sapiens
  CDR3 for beta chain variable domain of TCR clone 65352 (TRBV7-3, TRBJ2-1)
CASSLAGGTNEQFF

SEQ ID NO: 130705 - protein, 15 aa, Homo sapiens
  CDR3 for alpha chain variable domain of TCR clone 65353 (TRAV12-1, TRAJ9)
CVVSFGDTGGFKTIF

SEQ ID NO: 130706 - protein, 15 aa, Homo sapiens
  CDR3 for beta chain variable domain of TCR clone 65353 (TRBV2, TRBJ1-4)
CASSERAGEKLFLAV

SEQ ID NO: 130707 - protein, 13 aa, Homo sapiens
  CDR3 for alpha chain variable domain of TCR clone 65354 (TRAV8-3, TRAJ43)
CAVGPDNNNDMRF

SEQ ID NO: 130708 - protein, 12 aa, Homo sapiens
  CDR3 for beta chain variable domain of TCR clone 65354 (TRBV7-2, TRBJ1-6)
CAGSLSSSPLHF

SEQ ID NO: 130709 - protein, 16 aa, Homo sapiens
  CDR3 for alpha chain variable domain of TCR clone 65355 (TRAV12-2, TRAJ45)
CAVKRNPGGGADGLTF

SEQ ID NO: 130710 - protein, 12 aa, Homo sapiens
  CDR3 for beta chain variable domain of TCR clone 65355 (TRBV6-1, TRBJ2-5)
RASSEGRETQYF

SEQ ID NO: 130711 - protein, 15 aa, Homo sapiens
  CDR3 for alpha chain variable domain of TCR clone 65356 (TRAV12-2, TRAJ23)
CAVKPIYNQGGKLIF

SEQ ID NO: 130712 - protein, 13 aa, Homo sapiens
  CDR3 for beta chain variable domain of TCR clone 65356 (TRBV7-3, TRBJ1-1)
CASSQDWGAEAFF

SEQ ID NO: 130713 - protein, 13 aa, Homo sapiens
  CDR3 for alpha chain variable domain of TCR clone 65357 (TRAV21, TRAJ57)
CAVTQGGSEKLVF

SEQ ID NO: 130714 - protein, 16 aa, Homo sapiens
  CDR3 for beta chain variable domain of TCR clone 65357 (TRBV29-1, TRBJ2-7)
CSVEAAEDGTAYEQYF

SEQ ID NO: 130715 - protein, 13 aa, Homo sapiens
  CDR3 for alpha chain variable domain of TCR clone 65358 (TRAV13-1, TRAJ17)
CAADGAAGNKLTF

SEQ ID NO: 130716 - protein, 14 aa, Homo sapiens
  CDR3 for beta chain variable domain of TCR clone 65358 (TRBV11-2, TRBJ1-3)
CASSLTQGRNTIYC

SEQ ID NO: 130717 - protein, 16 aa, Homo sapiens
  CDR3 for alpha chain variable domain of TCR clone 65359 (TRAV38-2/DV8, TRAJ45)
CAYTTTSGGGADGLTL

SEQ ID NO: 130718 - protein, 14 aa, Homo sapiens
  CDR3 for beta chain variable domain of TCR clone 65359 (TRBV7-9, TRBJ2-2)
CASSLGHRTGELFF

SEQ ID NO: 130719 - protein, 14 aa, Homo sapiens
  CDR3 for alpha chain variable domain of TCR clone 65360 (TRAV35, TRAJ33)
CAGSSQDSNYQLIW

SEQ ID NO: 130720 - protein, 14 aa, Homo sapiens
  CDR3 for beta chain variable domain of TCR clone 65360 (TRBV20-1, TRBJ2-1)
CSAQMGGSANEQFF

SEQ ID NO: 130721 - protein, 16 aa, Homo sapiens
  CDR3 for alpha chain variable domain of TCR clone 65361 (TRAV3, TRAJ4)
CAVRPSPSGGYNKLIF

SEQ ID NO: 130722 - protein, 12 aa, Homo sapiens
  CDR3 for beta chain variable domain of TCR clone 65361 (TRBV7-9, TRBJ2-7)
CASSQGVYEHYF

SEQ ID NO: 130723 - protein, 12 aa, Homo sapiens
  CDR3 for alpha chain variable domain of TCR clone 65362 (TRAV13-2, TRAJ41)
CAKNIGRYALDF

SEQ ID NO: 130724 - protein, 12 aa, Homo sapiens
  CDR3 for beta chain variable domain of TCR clone 65362 (TRBV7-9, TRBJ1-1)
CASSLSGGVAFF

SEQ ID NO: 130725 - protein, 11 aa, Homo sapiens
  CDR3 for alpha chain variable domain of TCR clone 65363 (TRAV29/DV5, TRAJ31)
CAAMNNARLMF

SEQ ID NO: 130726 - protein, 13 aa, Homo sapiens
  CDR3 for beta chain variable domain of TCR clone 65363 (TRBV9, TRBJ2-1)
CASSVGQGGEQFF

SEQ ID NO: 130727 - protein, 16 aa, Homo sapiens
  CDR3 for alpha chain variable domain of TCR clone 65364 (TRAV16, TRAJ52)
CALSAAGGTSNGKLTF

SEQ ID NO: 130728 - protein, 13 aa, Homo sapiens
  CDR3 for beta chain variable domain of TCR clone 65364 (TRBV3-1, TRBJ1-5)
CASSQFGDQPQHF

SEQ ID NO: 130729 - protein, 13 aa, Homo sapiens
  CDR3 for alpha chain variable domain of TCR clone 65365 (TRAV35, TRAJ58)
CAGLETSGYRLTF

SEQ ID NO: 130730 - protein, 15 aa, Homo sapiens
  CDR3 for beta chain variable domain of TCR clone 65365 (TRBV20-1, TRBJ2-1)
CSARFSAGGLNEQFF

SEQ ID NO: 130731 - protein, 13 aa, Homo sapiens
  CDR3 for alpha chain variable domain of TCR clone 65366 (TRAV29/DV5, TRAJ31)
CAASRNNNARLMF

SEQ ID NO: 130732 - protein, 12 aa, Homo sapiens
  CDR3 for beta chain variable domain of TCR clone 65366 (TRBV14, TRBJ2-5)
CASSQLKETQYL

SEQ ID NO: 130733 - protein, 16 aa, Homo sapiens
  CDR3 for alpha chain variable domain of TCR clone 65367 (TRAV12-3, TRAJ53)
CAMSPGSGGSNYKLTF

SEQ ID NO: 130734 - protein, 16 aa, Homo sapiens
  CDR3 for beta chain variable domain of TCR clone 65367 (TRBV29-1, TRBJ2-7)
CSVEDAEDGTAYEQYF

SEQ ID NO: 130735 - protein, 16 aa, Homo sapiens
  CDR3 for alpha chain variable domain of TCR clone 65368 (TRAV12-2, TRAJ40)
RAVIRGGTSGTYKYIF

SEQ ID NO: 130736 - protein, 14 aa, Homo sapiens
  CDR3 for beta chain variable domain of TCR clone 65368 (TRBV20-1, TRBJ2-5)
CSARDGRAGETQYF

SEQ ID NO: 130737 - protein, 12 aa, Homo sapiens
  CDR3 for alpha chain variable domain of TCR clone 65369 (TRAV12-3, TRAJ17)
CAMTLTGNKLTF

SEQ ID NO: 130738 - protein, 14 aa, Homo sapiens
  CDR3 for beta chain variable domain of TCR clone 65369 (TRBV12-4, TRBJ2-7)
CASSLTGRAYEQYF

SEQ ID NO: 130739 - protein, 15 aa, Homo sapiens
  CDR3 for alpha chain variable domain of TCR clone 65370 (TRAV21, TRAJ32)
CAVNSYGGATNKLIF

SEQ ID NO: 130740 - protein, 18 aa, Homo sapiens
  CDR3 for beta chain variable domain of TCR clone 65370 (TRBV7-9, TRBJ2-1)
CASSTGLAEGSSHNEQFF

SEQ ID NO: 130741 - protein, 11 aa, Homo sapiens
  CDR3 for alpha chain variable domain of TCR clone 65371 (TRAV12-3, TRAJ27)
CAMANAGKSTF

SEQ ID NO: 130742 - protein, 16 aa, Homo sapiens
  CDR3 for beta chain variable domain of TCR clone 65371 (TRBV7-9, TRBJ2-1)
CASSLVLTGQGNEQFF

SEQ ID NO: 130743 - protein, 14 aa, Homo sapiens
  CDR3 for alpha chain variable domain of TCR clone 65372 (TRAV17, TRAJ56)
CATVPAGANSKLTF

SEQ ID NO: 130744 - protein, 15 aa, Homo sapiens
  CDR3 for beta chain variable domain of TCR clone 65372 (TRBV10-2, TRBJ2-6)
CASSEQGTGANVLTF

SEQ ID NO: 130745 - protein, 14 aa, Homo sapiens
  CDR3 for alpha chain variable domain of TCR clone 65373 (TRAV29/DV5, TRAJ36)
CAARRKTGANNFFF

SEQ ID NO: 130746 - protein, 14 aa, Homo sapiens
  CDR3 for beta chain variable domain of TCR clone 65373 (TRBV12-5, TRBJ2-5)
CASGSRTHQETQYF

SEQ ID NO: 130747 - protein, 15 aa, Homo sapiens
  CDR3 for alpha chain variable domain of TCR clone 65374 (TRAV26-1, TRAJ29)
CIVRVEGSGNTPLVF

SEQ ID NO: 130748 - protein, 16 aa, Homo sapiens
  CDR3 for beta chain variable domain of TCR clone 65374 (TRBV20-1, TRBJ1-4)
CSAPGQGLLTNEKLFF

SEQ ID NO: 130749 - protein, 14 aa, Homo sapiens
  CDR3 for alpha chain variable domain of TCR clone 65375 (TRAV13-1, TRAJ8)
CAASEDTGFQKLVF

SEQ ID NO: 130750 - protein, 13 aa, Homo sapiens
  CDR3 for beta chain variable domain of TCR clone 65375 (TRBV19, TRBJ1-5)
CASSTRRDQTQHF

SEQ ID NO: 130751 - protein, 13 aa, Homo sapiens
  CDR3 for alpha chain variable domain of TCR clone 65376 (TRAV21, TRAJ42)
CAVRAGSQGNLIF

SEQ ID NO: 130752 - protein, 13 aa, Homo sapiens
  CDR3 for beta chain variable domain of TCR clone 65376 (TRBV4-2, TRBJ1-2)
CASSLSASGGYTF

SEQ ID NO: 130753 - protein, 15 aa, Homo sapiens
  CDR3 for alpha chain variable domain of TCR clone 65377 (TRAV13-1, TRAJ17)
CAASIERAAGNKLTF

SEQ ID NO: 130754 - protein, 14 aa, Homo sapiens
  CDR3 for beta chain variable domain of TCR clone 65377 (TRBV7-2, TRBJ1-2)
CASSQTGSTYGYTF

SEQ ID NO: 130755 - protein, 12 aa, Homo sapiens
  CDR3 for alpha chain variable domain of TCR clone 65378 (TRAV27, TRAJ35)
CAGADFGNVLHC

SEQ ID NO: 130756 - protein, 15 aa, Homo sapiens
  CDR3 for beta chain variable domain of TCR clone 65378 (TRBV6-3, TRBJ2-7)
CASSSPGTVFYEQYF

SEQ ID NO: 130757 - protein, 13 aa, Homo sapiens
  CDR3 for alpha chain variable domain of TCR clone 65379 (TRAV20, TRAJ21)
CAVEGYNFNKFYL

SEQ ID NO: 130758 - protein, 14 aa, Homo sapiens
  CDR3 for beta chain variable domain of TCR clone 65379 (TRBV3-1, TRBJ2-5)
CASSQGPDQETQYF

SEQ ID NO: 130759 - protein, 13 aa, Homo sapiens
  CDR3 for alpha chain variable domain of TCR clone 65380 (TRAV21, TRAJ20)
CAVGLRVDYKLSF

SEQ ID NO: 130760 - protein, 12 aa, Homo sapiens
  CDR3 for beta chain variable domain of TCR clone 65380 (TRBV7-9, TRBJ1-1)
CASSLVRGEAFF

SEQ ID NO: 130761 - protein, 13 aa, Homo sapiens
  CDR3 for alpha chain variable domain of TCR clone 65381 (TRAV41, TRAJ49)
CAVYSNTGNQFYF

SEQ ID NO: 130762 - protein, 16 aa, Homo sapiens
  CDR3 for beta chain variable domain of TCR clone 65381 (TRBV5-1, TRBJ2-3)
CASSSVGRRSTDTQYF

SEQ ID NO: 130763 - protein, 13 aa, Homo sapiens
  CDR3 for alpha chain variable domain of TCR clone 65382 (TRAV21, TRAJ57)
CAVTQGGSGKLVF

SEQ ID NO: 130764 - protein, 14 aa, Homo sapiens
  CDR3 for beta chain variable domain of TCR clone 65382 (TRBV7-2, TRBJ2-7)
CASRSQGAAYEQYF

SEQ ID NO: 130765 - protein, 15 aa, Homo sapiens
  CDR3 for alpha chain variable domain of TCR clone 65383 (TRAV8-4, TRAJ3)
CAVTGENLVQQCFQD

SEQ ID NO: 130766 - protein, 16 aa, Homo sapiens
  CDR3 for beta chain variable domain of TCR clone 65383 (TRBV4-2, TRBJ1-1)
CASNQAGFGMNTEAFF

SEQ ID NO: 130767 - protein, 13 aa, Homo sapiens
  CDR3 for alpha chain variable domain of TCR clone 65384 (TRAV12-2, TRAJ40)
CAVKRTGTYKYIF

SEQ ID NO: 130768 - protein, 15 aa, Homo sapiens
  CDR3 for beta chain variable domain of TCR clone 65384 (TRBV20-1, TRBJ2-7)
CSARDRVSGMDEQYF

SEQ ID NO: 130769 - protein, 10 aa, Homo sapiens
  CDR3 for alpha chain variable domain of TCR clone 65385 (TRAV35, TRAJ49)
CAGQLSQFYF

SEQ ID NO: 130770 - protein, 16 aa, Homo sapiens
  CDR3 for beta chain variable domain of TCR clone 65385 (TRBV7-8, TRBJ2-4)
CASSAERTLAKNIQYF

SEQ ID NO: 130771 - protein, 18 aa, Homo sapiens
  CDR3 for alpha chain variable domain of TCR clone 65386 (TRAV17, TRAJ28)
CATDPPRGSGAGSYQLPF

SEQ ID NO: 130772 - protein, 14 aa, Homo sapiens
  CDR3 for beta chain variable domain of TCR clone 65386 (TRBV13, TRBJ2-5)
CASSLDYPQETQYF

SEQ ID NO: 130773 - protein, 14 aa, Homo sapiens
  CDR3 for alpha chain variable domain of TCR clone 65387 (TRAV26-1, TRAJ39)
CIVRGSRAGNMLTF

SEQ ID NO: 130774 - protein, 13 aa, Homo sapiens
  CDR3 for beta chain variable domain of TCR clone 65387 (TRBV12-4, TRBJ2-7)
CASSPTETYEQYF

SEQ ID NO: 130775 - protein, 14 aa, Homo sapiens
  CDR3 for alpha chain variable domain of TCR clone 65388 (TRAV9-2, TRAJ39)
CALYIYNAGNMLTF

SEQ ID NO: 130776 - protein, 14 aa, Homo sapiens
  CDR3 for beta chain variable domain of TCR clone 65388 (TRBV19, TRBJ2-2)
CASSIAGAFGELFF

SEQ ID NO: 130777 - protein, 18 aa, Homo sapiens
  CDR3 for alpha chain variable domain of TCR clone 65389 (TRAV17, TRAJ45)
CATSLDLYSGGGADGLTF

SEQ ID NO: 130778 - protein, 16 aa, Homo sapiens
  CDR3 for beta chain variable domain of TCR clone 65389 (TRBV20-1, TRBJ2-3)
CSAVRDRGPIADTQCF

SEQ ID NO: 130779 - protein, 14 aa, Homo sapiens
  CDR3 for alpha chain variable domain of TCR clone 65390 (TRAV17, TRAJ39)
CATYPVRAGNMLTF

SEQ ID NO: 130780 - protein, 15 aa, Homo sapiens
  CDR3 for beta chain variable domain of TCR clone 65390 (TRBV13, TRBJ1-5)
CASSFGQGGVQPQHF

SEQ ID NO: 130781 - protein, 14 aa, Homo sapiens
  CDR3 for alpha chain variable domain of TCR clone 65391 (TRAV14/DV4, TRAJ34)
CAMREGRPHRQAHL

SEQ ID NO: 130782 - protein, 14 aa, Homo sapiens
  CDR3 for beta chain variable domain of TCR clone 65391 (TRBV19, TRBJ2-1)
CASPTFVLGGEQFF

SEQ ID NO: 130783 - protein, 13 aa, Homo sapiens
  CDR3 for alpha chain variable domain of TCR clone 65392 (TRAV27, TRAJ45)
CRSSGGGADGLTF

SEQ ID NO: 130784 - protein, 13 aa, Homo sapiens
  CDR3 for beta chain variable domain of TCR clone 65392 (TRBV10-3, TRBJ2-7)
CASKLAVNYEQYF

SEQ ID NO: 130785 - protein, 15 aa, Homo sapiens
  CDR3 for alpha chain variable domain of TCR clone 65393 (TRAV3, TRAJ3)
CAVRDRDSSASKIIF

SEQ ID NO: 130786 - protein, 18 aa, Homo sapiens
  CDR3 for beta chain variable domain of TCR clone 65393 (TRBV25-1, TRBJ1-2)
CASSGLQNEQGLIFGYTF

SEQ ID NO: 130787 - protein, 14 aa, Homo sapiens
  CDR3 for alpha chain variable domain of TCR clone 65394 (TRAV12-2, TRAJ13)
CAVKKTEGYQKVTF

SEQ ID NO: 130788 - protein, 15 aa, Homo sapiens
  CDR3 for beta chain variable domain of TCR clone 65394 (TRBV12-4, TRBJ2-5)
CASSPPTGLQETQYF

SEQ ID NO: 130789 - protein, 13 aa, Homo sapiens
  CDR3 for alpha chain variable domain of TCR clone 65395 (TRAV27, TRAJ57)
CRSAQGGSEKLVF

SEQ ID NO: 130790 - protein, 11 aa, Homo sapiens
  CDR3 for beta chain variable domain of TCR clone 65395 (TRBV11-2, TRBJ1-1)
CASSTNTEAFF

SEQ ID NO: 130791 - protein, 16 aa, Homo sapiens
  CDR3 for alpha chain variable domain of TCR clone 65396 (TRAV17, TRAJ35)
CATAEGGIGFGNVLHC

SEQ ID NO: 130792 - protein, 19 aa, Homo sapiens
  CDR3 for beta chain variable domain of TCR clone 65396 (TRBV19, TRBJ2-5)
CASSIGQVTDFFRGETQYF

SEQ ID NO: 130793 - protein, 13 aa, Homo sapiens
  CDR3 for alpha chain variable domain of TCR clone 65397 (TRAV30, TRAJ39)
CGTEKNAGNMLTF

SEQ ID NO: 130794 - protein, 12 aa, Homo sapiens
  CDR3 for beta chain variable domain of TCR clone 65397 (TRBV12-4, TRBJ2-5)
CASSAAQETQYF

SEQ ID NO: 130795 - protein, 14 aa, Homo sapiens
  CDR3 for alpha chain variable domain of TCR clone 65398 (TRAV1-2, TRAJ8)
CAVREDTGFQKLVF

SEQ ID NO: 130796 - protein, 12 aa, Homo sapiens
  CDR3 for beta chain variable domain of TCR clone 65398 (TRBV5-4, TRBJ1-1)
CASSLDRREAFF

SEQ ID NO: 130797 - protein, 14 aa, Homo sapiens
  CDR3 for alpha chain variable domain of TCR clone 65399 (TRAV17, TRAJ57)
CATDPQGGSEKLVF

SEQ ID NO: 130798 - protein, 14 aa, Homo sapiens
  CDR3 for beta chain variable domain of TCR clone 65399 (TRBV12-4, TRBJ1-1)
CASSLGTGGTEAFF

SEQ ID NO: 130799 - protein, 13 aa, Homo sapiens
  CDR3 for alpha chain variable domain of TCR clone 65400 (TRAV3, TRAJ20)
CAVRDTPRYKLSF

SEQ ID NO: 130800 - protein, 14 aa, Homo sapiens
  CDR3 for beta chain variable domain of TCR clone 65400 (TRBV7-2, TRBJ2-7)
CASSPKTSFYEQYF

SEQ ID NO: 130801 - protein, 11 aa, Homo sapiens
  CDR3 for alpha chain variable domain of TCR clone 65401 (TRAV16, TRAJ33)
CALHSNYKLIW

SEQ ID NO: 130802 - protein, 15 aa, Homo sapiens
  CDR3 for beta chain variable domain of TCR clone 65401 (TRBV4-1, TRBJ2-7)
CASSQQGQGFDEQYF

SEQ ID NO: 130803 - protein, 17 aa, Homo sapiens
  CDR3 for alpha chain variable domain of TCR clone 65402 (TRAV21, TRAJ24)
CAGIRLRSTDSWGKLQV

SEQ ID NO: 130804 - protein, 15 aa, Homo sapiens
  CDR3 for beta chain variable domain of TCR clone 65402 (TRBV7-2, TRBJ2-3)
CASSPRGLSTDTQYF

SEQ ID NO: 130805 - protein, 15 aa, Homo sapiens
  CDR3 for alpha chain variable domain of TCR clone 65403 (TRAV12-2, TRAJ53)
CAVNGGGGSNYKLTF

SEQ ID NO: 130806 - protein, 17 aa, Homo sapiens
  CDR3 for beta chain variable domain of TCR clone 65403 (TRBV7-3, TRBJ2-3)
CAGSLMKRMRGADTQYF

SEQ ID NO: 130807 - protein, 14 aa, Homo sapiens
  CDR3 for alpha chain variable domain of TCR clone 65404 (TRAV20, TRAJ56)
CAVQFGGANSKLTF

SEQ ID NO: 130808 - protein, 13 aa, Homo sapiens
  CDR3 for beta chain variable domain of TCR clone 65404 (TRBV7-9, TRBJ1-2)
CASSLKQNYGYTF

SEQ ID NO: 130809 - protein, 21 aa, Homo sapiens
  CDR3 for alpha chain variable domain of TCR clone 65405 (TRAV8-4, TRAJ47)
HLTKPSAHMSDAAERGNKLVF

SEQ ID NO: 130810 - protein, 14 aa, Homo sapiens
  CDR3 for beta chain variable domain of TCR clone 65405 (TRBV7-9, TRBJ2-1)
CASSPRYSLYEQFF

SEQ ID NO: 130811 - protein, 15 aa, Homo sapiens
  CDR3 for alpha chain variable domain of TCR clone 65406 (TRAV3, TRAJ5)
CAVRDRKTGRRALTF

SEQ ID NO: 130812 - protein, 15 aa, Homo sapiens
  CDR3 for beta chain variable domain of TCR clone 65406 (TRBV7-8, TRBJ2-1)
CVSSLADSLYNEQFF

SEQ ID NO: 130813 - protein, 14 aa, Homo sapiens
  CDR3 for alpha chain variable domain of TCR clone 65407 (TRAV21, TRAJ28)
CAVGSGAGSYQLTF

SEQ ID NO: 130814 - protein, 14 aa, Homo sapiens
  CDR3 for beta chain variable domain of TCR clone 65407 (TRBV18, TRBJ1-4)
CASSPEPNGEKLFF

SEQ ID NO: 130815 - protein, 14 aa, Homo sapiens
  CDR3 for alpha chain variable domain of TCR clone 65408 (TRAV16, TRAJ39)
CALSKNNAGNMLTF

SEQ ID NO: 130816 - protein, 19 aa, Homo sapiens
  CDR3 for beta chain variable domain of TCR clone 65408 (TRBV6-6, TRBJ2-1)
AAPPQTSVYFCASSYEQFF

SEQ ID NO: 130817 - protein, 13 aa, Homo sapiens
  CDR3 for alpha chain variable domain of TCR clone 65409 (TRAV26-1, TRAJ8)
CIVRSTGFQKLVF

SEQ ID NO: 130818 - protein, 13 aa, Homo sapiens
  CDR3 for beta chain variable domain of TCR clone 65409 (TRBV19, TRBJ1-2)
CASSVPGQDGYTF

SEQ ID NO: 130819 - protein, 17 aa, Homo sapiens
  CDR3 for alpha chain variable domain of TCR clone 65410 (TRAV3, TRAJ6)
CAVRDGPRAGGSYIPPF

SEQ ID NO: 130820 - protein, 18 aa, Homo sapiens
  CDR3 for beta chain variable domain of TCR clone 65410 (TRBV7-3, TRBJ2-3)
CASSSTGTYPGSTDTQYF

SEQ ID NO: 130821 - protein, 17 aa, Homo sapiens
  CDR3 for alpha chain variable domain of TCR clone 65411 (TRAV3, TRAJ42)
CAVRDRDYGGSQGNLIF

SEQ ID NO: 130822 - protein, 14 aa, Homo sapiens
  CDR3 for beta chain variable domain of TCR clone 65411 (TRBV7-9, TRBJ2-1)
CASSDNSGYNEQFF

SEQ ID NO: 130823 - protein, 14 aa, Homo sapiens
  CDR3 for alpha chain variable domain of TCR clone 65412 (TRAV12-2, TRAJ17)
CAVLFKAAGNKLTF

SEQ ID NO: 130824 - protein, 12 aa, Homo sapiens
  CDR3 for beta chain variable domain of TCR clone 65412 (TRBV5-4, TRBJ2-7)
CASSLEAYEQYF

SEQ ID NO: 130825 - protein, 14 aa, Homo sapiens
  CDR3 for alpha chain variable domain of TCR clone 65413 (TRAV12-3, TRAJ10)
SHLPLTGGGNKLTF

SEQ ID NO: 130826 - protein, 17 aa, Homo sapiens
  CDR3 for beta chain variable domain of TCR clone 65413 (TRBV20-1, TRBJ2-1)
CSAPPRLAGTRYNEQFF

SEQ ID NO: 130827 - protein, 12 aa, Homo sapiens
  CDR3 for alpha chain variable domain of TCR clone 65414 (TRAV25, TRAJ7)
RAGSYGNNRLAF

SEQ ID NO: 130828 - protein, 12 aa, Homo sapiens
  CDR3 for beta chain variable domain of TCR clone 65414 (TRBV5-1, TRBJ1-2)
CASSQDTYGYTF

SEQ ID NO: 130829 - protein, 17 aa, Homo sapiens
  CDR3 for alpha chain variable domain of TCR clone 65415 (TRAV3, TRAJ38)
CAVRGCLNAGNNSKLIW

SEQ ID NO: 130830 - protein, 16 aa, Homo sapiens
  CDR3 for beta chain variable domain of TCR clone 65415 (TRBV20-1, TRBJ1-4)
CSAPGQGLLTNEKLFF

SEQ ID NO: 130831 - protein, 14 aa, Homo sapiens
  CDR3 for alpha chain variable domain of TCR clone 65416 (TRAV14/DV4, TRAJ54)
CAMREAPGAQQLVF

SEQ ID NO: 130832 - protein, 15 aa, Homo sapiens
  CDR3 for beta chain variable domain of TCR clone 65416 (TRBV5-1, TRBJ2-7)
CASSLNGGPAREQYF

SEQ ID NO: 130833 - protein, 15 aa, Homo sapiens
  CDR3 for alpha chain variable domain of TCR clone 65417 (TRAV3, TRAJ22)
CAVRDRGGFARQLTF

SEQ ID NO: 130834 - protein, 16 aa, Homo sapiens
  CDR3 for beta chain variable domain of TCR clone 65417 (TRBV5-4, TRBJ2-3)
CASQQPGAGRADTQYF

SEQ ID NO: 130835 - protein, 14 aa, Homo sapiens
  CDR3 for alpha chain variable domain of TCR clone 65418 (TRAV8-3, TRAJ9)
CAVVYNTVGFKTIF

SEQ ID NO: 130836 - protein, 16 aa, Homo sapiens
  CDR3 for beta chain variable domain of TCR clone 65418 (TRBV7-3, TRBJ2-2)
CASSLKRGTLSGELFF

SEQ ID NO: 130837 - protein, 12 aa, Homo sapiens
  CDR3 for alpha chain variable domain of TCR clone 65419 (TRAV3, TRAJ20)
CAVRDGDYKLSF

SEQ ID NO: 130838 - protein, 12 aa, Homo sapiens
  CDR3 for beta chain variable domain of TCR clone 65419 (TRBV14, TRBJ2-7)
CASSSLKGEQYF

SEQ ID NO: 130839 - protein, 15 aa, Homo sapiens
  CDR3 for alpha chain variable domain of TCR clone 65420 (TRAV2, TRAJ15)
CAVEDREQAGTALIF

SEQ ID NO: 130840 - protein, 14 aa, Homo sapiens
  CDR3 for beta chain variable domain of TCR clone 65420 (TRBV19, TRBJ2-1)
CASPTFVLSGEQFF

SEQ ID NO: 130841 - protein, 15 aa, Homo sapiens
  CDR3 for alpha chain variable domain of TCR clone 65421 (TRAV29/DV5, TRAJ29)
CAASERSSGNTPLVF

SEQ ID NO: 130842 - protein, 17 aa, Homo sapiens
  CDR3 for beta chain variable domain of TCR clone 65421 (TRBV4-1, TRBJ1-4)
CASIQEGPRGVEEKLFF

SEQ ID NO: 130843 - protein, 13 aa, Homo sapiens
  CDR3 for alpha chain variable domain of TCR clone 65422 (TRAV12-2, TRAJ6)
CAANVSRKLHTYI

SEQ ID NO: 130844 - protein, 12 aa, Homo sapiens
  CDR3 for beta chain variable domain of TCR clone 65422 (TRBV29-1, TRBJ2-3)
CSVTGGADTQYF

SEQ ID NO: 130845 - protein, 15 aa, Homo sapiens
  CDR3 for alpha chain variable domain of TCR clone 65423 (TRAV2, TRAJ15)
CAVEDRGQAGTSLIF

SEQ ID NO: 130846 - protein, 13 aa, Homo sapiens
  CDR3 for beta chain variable domain of TCR clone 65423 (TRBV10-2, TRBJ2-7)
CASGASGGYEQYF

SEQ ID NO: 130847 - protein, 15 aa, Homo sapiens
  CDR3 for alpha chain variable domain of TCR clone 65424 (TRAV12-2, TRAJ53)
CAVNGGGGSNYKLTF

SEQ ID NO: 130848 - protein, 16 aa, Homo sapiens
  CDR3 for beta chain variable domain of TCR clone 65424 (TRBV7-9, TRBJ1-2)
CASSLGFSSGEDGYTF

SEQ ID NO: 130849 - protein, 13 aa, Homo sapiens
  CDR3 for alpha chain variable domain of TCR clone 65425 (TRAV38-1, TRAJ42)
CARWGGSQGNLIF

SEQ ID NO: 130850 - protein, 17 aa, Homo sapiens
  CDR3 for beta chain variable domain of TCR clone 65425 (TRBV20-1, TRBJ2-1)
CSARDPLAGVCDNEQFF

SEQ ID NO: 130851 - protein, 16 aa, Homo sapiens
  CDR3 for alpha chain variable domain of TCR clone 65426 (TRAV16, TRAJ4)
CALSRMFSGGYNKLIF

SEQ ID NO: 130852 - protein, 16 aa, Homo sapiens
  CDR3 for beta chain variable domain of TCR clone 65426 (TRBV24-1, TRBJ2-3)
CAPSDPGTGATDTQYF

SEQ ID NO: 130853 - protein, 15 aa, Homo sapiens
  CDR3 for alpha chain variable domain of TCR clone 65427 (TRAV14/DV4, TRAJ46)
CAMREKKSSGDKLTF

SEQ ID NO: 130854 - protein, 14 aa, Homo sapiens
  CDR3 for beta chain variable domain of TCR clone 65427 (TRBV18, TRBJ2-7)
CASSPRGGAYEQYF

SEQ ID NO: 130855 - protein, 13 aa, Homo sapiens
  CDR3 for alpha chain variable domain of TCR clone 65428 (TRAV30, TRAJ6)
CGTEAGGSYIPTF

SEQ ID NO: 130856 - protein, 15 aa, Homo sapiens
  CDR3 for beta chain variable domain of TCR clone 65428 (TRBV7-6, TRBJ2-1)
CASSPGQGPYNEQFF

SEQ ID NO: 130857 - protein, 15 aa, Homo sapiens
  CDR3 for alpha chain variable domain of TCR clone 65429 (TRAV26-1, TRAJ29)
CIVRVEGSGNTPLVF

SEQ ID NO: 130858 - protein, 17 aa, Homo sapiens
  CDR3 for beta chain variable domain of TCR clone 65429 (TRBV7-9, TRBJ2-6)
CASSFGAGYSGANVLTF

SEQ ID NO: 130859 - protein, 16 aa, Homo sapiens
  CDR3 for alpha chain variable domain of TCR clone 65430 (TRAV3, TRAJ42)
CAVRDTEGGSQGNLIF

SEQ ID NO: 130860 - protein, 15 aa, Homo sapiens
  CDR3 for beta chain variable domain of TCR clone 65430 (TRBV9, TRBJ2-2)
CASSDFAGASGELFF

SEQ ID NO: 130861 - protein, 14 aa, Homo sapiens
  CDR3 for alpha chain variable domain of TCR clone 65431 (TRAV8-3, TRAJ9)
CAVVYNTGGFKTIF

SEQ ID NO: 130862 - protein, 12 aa, Homo sapiens
  CDR3 for beta chain variable domain of TCR clone 65431 (TRBV11-2, TRBJ2-2)
CASSLGGGELFF

SEQ ID NO: 130863 - protein, 13 aa, Homo sapiens
  CDR3 for alpha chain variable domain of TCR clone 65432 (TRAV20, TRAJ37)
CAGCSSNTGKLIF

SEQ ID NO: 130864 - protein, 16 aa, Homo sapiens
  CDR3 for beta chain variable domain of TCR clone 65432 (TRBV19, TRBJ2-2)
CASRSPGTGATGELFF

SEQ ID NO: 130865 - protein, 12 aa, Homo sapiens
  CDR3 for alpha chain variable domain of TCR clone 65433 (TRAV30, TRAJ43)
CGTEERGNDMLF

SEQ ID NO: 130866 - protein, 13 aa, Homo sapiens
  CDR3 for beta chain variable domain of TCR clone 65433 (TRBV27, TRBJ2-7)
CASSFSQGYEQYF

SEQ ID NO: 130867 - protein, 10 aa, Homo sapiens
  CDR3 for alpha chain variable domain of TCR clone 65434 (TRAV12-3, TRAJ26)
YLYYGQNFVF

SEQ ID NO: 130868 - protein, 15 aa, Homo sapiens
  CDR3 for beta chain variable domain of TCR clone 65434 (TRBV5-1, TRBJ2-6)
CASSLDPSGANVLTF

SEQ ID NO: 130869 - protein, 11 aa, Homo sapiens
  CDR3 for alpha chain variable domain of TCR clone 65435 (TRAV26-1, TRAJ21)
CIAKGKFYFGS

SEQ ID NO: 130870 - protein, 15 aa, Homo sapiens
  CDR3 for beta chain variable domain of TCR clone 65435 (TRBV7-2, TRBJ2-1)
CASSSGLAGGNEQFF

SEQ ID NO: 130871 - protein, 12 aa, Homo sapiens
  CDR3 for alpha chain variable domain of TCR clone 65436 (TRAV29/DV5, TRAJ49)
CAATDTGNQFYF

SEQ ID NO: 130872 - protein, 18 aa, Homo sapiens
  CDR3 for beta chain variable domain of TCR clone 65436 (TRBV5-1, TRBJ2-7)
CASSLAGLGGMSSYEQYF

SEQ ID NO: 130873 - protein, 15 aa, Homo sapiens
  CDR3 for alpha chain variable domain of TCR clone 65437 (TRAV12-1, TRAJ41)
CVVNGASNSGYALNF

SEQ ID NO: 130874 - protein, 15 aa, Homo sapiens
  CDR3 for beta chain variable domain of TCR clone 65437 (TRBV7-2, TRBJ1-5)
CASSSTRVDNQPQHF

SEQ ID NO: 130875 - protein, 12 aa, Homo sapiens
  CDR3 for alpha chain variable domain of TCR clone 65438 (TRAV12-3, TRAJ17)
CAMTLTGNKLTF

SEQ ID NO: 130876 - protein, 19 aa, Homo sapiens
  CDR3 for beta chain variable domain of TCR clone 65438 (TRBV7-9, TRBJ2-6)
CASSLESATVLPGANVLTF

SEQ ID NO: 130877 - protein, 14 aa, Homo sapiens
  CDR3 for alpha chain variable domain of TCR clone 65439 (TRAV6, TRAJ8)
CALDNDTGFQKLVF

SEQ ID NO: 130878 - protein, 14 aa, Homo sapiens
  CDR3 for beta chain variable domain of TCR clone 65439 (TRBV7-2, TRBJ2-7)
CASSPKTSFYEQYF

SEQ ID NO: 130879 - protein, 13 aa, Homo sapiens
  CDR3 for alpha chain variable domain of TCR clone 65440 (TRAV2, TRAJ40)
CAVVTSGTYKYIF

SEQ ID NO: 130880 - protein, 17 aa, Homo sapiens
  CDR3 for beta chain variable domain of TCR clone 65440 (TRBV25-1, TRBJ2-7)
CASSDARVVFSSYEQYF

SEQ ID NO: 130881 - protein, 17 aa, Homo sapiens
  CDR3 for alpha chain variable domain of TCR clone 65441 (TRAV3, TRAJ12)
CAVRDGGRMDSSYKLIF

SEQ ID NO: 130882 - protein, 14 aa, Homo sapiens
  CDR3 for beta chain variable domain of TCR clone 65441 (TRBV7-6, TRBJ2-3)
CASSLGTVTDTQYF

SEQ ID NO: 130883 - protein, 13 aa, Homo sapiens
  CDR3 for alpha chain variable domain of TCR clone 65442 (TRAV27, TRAJ49)
CAPRPYTVNQFYF

SEQ ID NO: 130884 - protein, 16 aa, Homo sapiens
  CDR3 for beta chain variable domain of TCR clone 65442 (TRBV4-1, TRBJ1-2)
CASSQDAGQVLYGYTF

SEQ ID NO: 130885 - protein, 12 aa, Homo sapiens
  CDR3 for alpha chain variable domain of TCR clone 65443 (TRAV3, TRAJ43)
CAVRDPNNDMRF

SEQ ID NO: 130886 - protein, 17 aa, Homo sapiens
  CDR3 for beta chain variable domain of TCR clone 65443 (TRBV7-8, TRBJ2-6)
CASSAGTGGAGANGLTF

SEQ ID NO: 130887 - protein, 14 aa, Homo sapiens
  CDR3 for alpha chain variable domain of TCR clone 65444 (TRAV1-2, TRAJ8)
CAVREDTGFQKLVF

SEQ ID NO: 130888 - protein, 15 aa, Homo sapiens
  CDR3 for beta chain variable domain of TCR clone 65444 (TRBV19, TRBJ2-1)
CASGTGTSSYNEQFF

SEQ ID NO: 130889 - protein, 16 aa, Homo sapiens
  CDR3 for alpha chain variable domain of TCR clone 65445 (TRAV30, TRAJ24)
CGTEIVDADSWGKFQF

SEQ ID NO: 130890 - protein, 12 aa, Homo sapiens
  CDR3 for beta chain variable domain of TCR clone 65445 (TRBV7-2, TRBJ1-6)
CASSLSSSPLHF

SEQ ID NO: 130891 - protein, 14 aa, Homo sapiens
  CDR3 for alpha chain variable domain of TCR clone 65446 (TRAV12-3, TRAJ10)
SHLPLTGGGNKLTF

SEQ ID NO: 130892 - protein, 15 aa, Homo sapiens
  CDR3 for beta chain variable domain of TCR clone 65446 (TRBV20-1, TRBJ2-2)
CSAIPGHSNTGELFF

SEQ ID NO: 130893 - protein, 12 aa, Homo sapiens
  CDR3 for alpha chain variable domain of TCR clone 65447 (TRAV12-2, TRAJ52)
IGGGTRYGKLTF

SEQ ID NO: 130894 - protein, 13 aa, Homo sapiens
  CDR3 for beta chain variable domain of TCR clone 65447 (TRBV12-4, TRBJ1-1)
CASSPGTGFEAFF

SEQ ID NO: 130895 - protein, 14 aa, Homo sapiens
  CDR3 for alpha chain variable domain of TCR clone 65448 (TRAV1-2, TRAJ15)
CAVRDRQAGTALIF

SEQ ID NO: 130896 - protein, 14 aa, Homo sapiens
  CDR3 for beta chain variable domain of TCR clone 65448 (TRBV2, TRBJ2-7)
CASSLTSGGYEQYF

SEQ ID NO: 130897 - protein, 11 aa, Homo sapiens
  CDR3 for alpha chain variable domain of TCR clone 65449 (TRAV17, TRAJ43)
CATPRSNDMLF

SEQ ID NO: 130898 - protein, 15 aa, Homo sapiens
  CDR3 for beta chain variable domain of TCR clone 65449 (TRBV11-2, TRBJ2-1)
CASSLGTSGLNEQFF

SEQ ID NO: 130899 - protein, 17 aa, Homo sapiens
  CDR3 for alpha chain variable domain of TCR clone 65450 (TRAV3, TRAJ6)
CAVRDGPRAGGSYIPTF

SEQ ID NO: 130900 - protein, 20 aa, Homo sapiens
  CDR3 for beta chain variable domain of TCR clone 65450 (TRBV28, TRBJ2-1)
CASTPIGRSPGLAGENEQFF

SEQ ID NO: 130901 - protein, 16 aa, Homo sapiens
  CDR3 for alpha chain variable domain of TCR clone 65451 (TRAV3, TRAJ23)
CAVKIEIYNQGGRLIF

SEQ ID NO: 130902 - protein, 17 aa, Homo sapiens
  CDR3 for beta chain variable domain of TCR clone 65451 (TRBV10-3, TRBJ2-6)
CAISESTAPSGANVLTF

SEQ ID NO: 130903 - protein, 14 aa, Homo sapiens
  CDR3 for alpha chain variable domain of TCR clone 65452 (TRAV25, TRAJ39)
CGRSNNNAGNMLTF

SEQ ID NO: 130904 - protein, 12 aa, Homo sapiens
  CDR3 for beta chain variable domain of TCR clone 65452 (TRBV7-8, TRBJ2-7)
CASSLGDREQYF

SEQ ID NO: 130905 - protein, 16 aa, Homo sapiens
  CDR3 for alpha chain variable domain of TCR clone 65453 (TRAV16, TRAJ57)
CAPYLITQGGSEKLVF

SEQ ID NO: 130906 - protein, 13 aa, Homo sapiens
  CDR3 for beta chain variable domain of TCR clone 65453 (TRBV7-9, TRBJ1-2)
CASSLKQNYGYTF

SEQ ID NO: 130907 - protein, 12 aa, Homo sapiens
  CDR3 for alpha chain variable domain of TCR clone 65454 (TRAV21, TRAJ29)
CAVTSGNTPLVF

SEQ ID NO: 130908 - protein, 16 aa, Homo sapiens
  CDR3 for beta chain variable domain of TCR clone 65454 (TRBV12-4, TRBJ2-5)
CASSWRPSGDLETQYF

SEQ ID NO: 130909 - protein, 13 aa, Homo sapiens
  CDR3 for alpha chain variable domain of TCR clone 65455 (TRAV13-1, TRAJ28)
CAANEAGSYQLTF

SEQ ID NO: 130910 - protein, 15 aa, Homo sapiens
  CDR3 for beta chain variable domain of TCR clone 65455 (TRBV7-9, TRBJ1-6)
CASSPPGRGNSPLHF

SEQ ID NO: 130911 - protein, 12 aa, Homo sapiens
  CDR3 for alpha chain variable domain of TCR clone 65456 (TRAV23/DV6, TRAJ30)
CAASKGDDKIIF

SEQ ID NO: 130912 - protein, 18 aa, Homo sapiens
  CDR3 for beta chain variable domain of TCR clone 65456 (TRBV10-3, TRBJ2-3)
CAISELRVGPMRGDTQYF

SEQ ID NO: 130913 - protein, 23 aa, Homo sapiens
  CDR3 for alpha chain variable domain of TCR clone 65457 (TRAV27, TRAJ38)
CAARRNAGNNHIQNPDPAVYQLR

SEQ ID NO: 130914 - protein, 13 aa, Homo sapiens
  CDR3 for beta chain variable domain of TCR clone 65457 (TRBV12-5, TRBJ2-3)
CASGDRQSDTQYF

SEQ ID NO: 130915 - protein, 12 aa, Homo sapiens
  CDR3 for alpha chain variable domain of TCR clone 65458 (TRAV12-3, TRAJ17)
FAMTLTGNKLTF

SEQ ID NO: 130916 - protein, 15 aa, Homo sapiens
  CDR3 for beta chain variable domain of TCR clone 65458 (TRBV11-2, TRBJ2-2)
CASSSDRVNAGELFF

SEQ ID NO: 130917 - protein, 12 aa, Homo sapiens
  CDR3 for alpha chain variable domain of TCR clone 65459 (TRAV1-2, TRAJ24)
CAVGGSWGKFQF

SEQ ID NO: 130918 - protein, 13 aa, Homo sapiens
  CDR3 for beta chain variable domain of TCR clone 65459 (TRBV27, TRBJ2-7)
CASSFVSSYEQYF

SEQ ID NO: 130919 - protein, 13 aa, Homo sapiens
  CDR3 for alpha chain variable domain of TCR clone 65460 (TRAV23/DV6, TRAJ15)
CAALSAGRNCSDL

SEQ ID NO: 130920 - protein, 14 aa, Homo sapiens
  CDR3 for beta chain variable domain of TCR clone 65460 (TRBV7-9, TRBJ1-2)
CASSRQGANYGYTF
